United States Patent Application Publication US 2012/0070457 A1 - sequence listing, part 2

SEQ ID NO: 6612 - protein, 105 aa, Neisseria meningitidis; identical to SEQ ID NO: 3758

SEQ ID NO: 6613 - protein, 402 aa, Neisseria meningitidis; identical to SEQ ID NO: 2438

SEQ ID NO: 6614 - protein, 381 aa, Neisseria meningitidis
MTETQSLELAKELISRPSVTPDDRDCQKLLAERLHKIGFAAEELHFGDTKNIWLRRGTKAPVVCFAGHTDVVPTGPVEKWDSPPFEPAERDGRLYGRGAADMKTSIACFVTACERFVAKHPNHQGSIALLITSDEEGDALDGTTKVVDVLKARDELIDYCIVGEPTAVDKLGDMIKNGRRGSLSGNLTVKGKQGHIAYPHLAINPVHTFAPALLELTQEVWDEGNEYFPPTSFQISNINGGTGATNVIPGELNVKFNFRFSTESTEAGLKQRVHAILDKHGVQYDLQWSCSGQPFLTQAGKLTDVARAAIAETCGIEAELSTTGGTSDGRFIKAIAQELIELGPSNATIHQINENVRLNDIPKLSAVYEGILARLLAGNAV

SEQ ID NO: 6615 - protein, 160 aa, Neisseria meningitidis; identical to SEQ ID NO: 1762

SEQ ID NO: 6616 - protein, 397 aa, Neisseria meningitidis
MYRHIEYYPGDPILSLVETFKNDPRPEKVNLSIGIYFDDEGKMPVLESVSRAETARAAAPAPSPYLPMEGLDTYRSAVQHLLFGKDNPALAQGRIVTVQTLGGSGALKVGADFLHRWFPEARAYVSDPTWDNHRGIFEGAGFEVGTYPYYDPATVGVKFDEMTAFFNTLPENSVLILHPCCHNPTGVDMSERQWDEVLHIIKTRKLIPFMDIAYQGFGGDLDSDAYAVRKAVEMELPLFVSNSFSKNLSLYGERVGGLSVVCPNKEEADLVFGQLKFTVRRIYSSPPAHGAYIAADVMNSPELYALWQNEVYMMRDRIRAMRQKLYDVLTAQIPNRDFTYFIKQRGMFGYTGLSVEQVRRLRDEFAVYLLDSGRMCVAGLNTSNTDYVARAFAEVLK

SEQ ID NO: 6617 - protein, 172 aa, Neisseria meningitidis
VKDSLMDAFDFFMQGNFKKIATEQGLDRKYFIFQYIVCNLSAISSFCLMKIIHTYTILYILIAVIGIINGFLLRSKVLSIVKNKQKFLSDMFPLEMPFFFVEYKIPILARFLNRGMKWLYLPSFFCLVAICFSIYILNEEGGWMPYFACYWFGLCYPVSTYYVFLSRDYKHI

SEQ ID NO: 6618 - protein, 298 aa, Neisseria meningitidis; identical to SEQ ID NO: 5738

SEQ ID NO: 6619 - protein, 429 aa, Neisseria meningitidis; identical to SEQ ID NO: 2821

SEQ ID NO: 6620 - protein, 256 aa, Neisseria meningitidis
MKITTWNVNSLNVRLPQVQNLLADNPPDILVLQELKLDQDKFPAAALQMMGWHCVWSGQKTYNGVAIVSRSVPQDVHFGLPALPDDPQRRVIAATVSGVRVINVYCVNGEALDSPKFKYKEQWFAALTEFVRDEMTRHGKLVLLGDFNIAPADADCYDPEKWHEKIHCSSVERQWFQNLLDLGLTDSLRQVHPEGAFYTWFDYRGAMFQRKLGLRIDHILVSPAMAAALKDVRVDLETRALERPSDHAPVTAEFDW

SEQ ID NO: 6621 - protein, 658 aa, Neisseria meningitidis
MSKLKTIALTASGLSVCPGFLYAQNTSSHQIGLAIMRLNSSILDLPPTKQYFQSGSLWGELRQGFRMGEVNPELVRRHESKFIASHSYFNRVINRSRPYMYHIANEVKKRNMPAEAALLPFIESAFVTKAKSHVGASGLWQFMPATGRHYGLEKTPVYDGRHDVYAATDAALNYLQYLYGLFGDWPLAFAAYNWGEGNVGRAINRARAQGLEPTYENLRMPNETRNYVPKLLAVRNIIATPQSFGMNISDIDNKPYFQAVEPDRPLDNEAIARLAGITQSELLALNPAFNVPAFIPKSKRKLLLPVASVQTFQSNYLNAAPDSLFSWEVYTPAAKTSLSDISTATGMSIADIKRLNNLNGNLVNAGRSILVAKNGKTLQTASESVVSIDIDNTPDTYRSNMPAGTVNVGIARIRPAAAQTADITVAPLPQKTVRTEPDPLVRIAEPALATAAAQPQTEKQTAMPSETQTATLAQIIPQNDMQAADELMQLVARNNLRRQAEETISAVIGTPDTVAEHKISASPQHTAAADGKRRVRLETRVAKAADGEAEISPLHASIHRVVEGDTLFNIAKRYNVSVADLIVANNIKGNTIQKGQVLRLAQAAPAQTRIEKVSYTARKGDTFKSIAARFNIHIDDIRRLNPNLNTINPGQRVKLIGS

SEQ ID NO: 6622 - protein, 252 aa, Neisseria meningitidis
MKQKKTAAAVIAAMLAGFAAAKAPEIDPALVDTLVAQIMQQADRHAEQSQKPDGQAIRNDAVRRLQTLEVLKNRALKEGLDKDKDVQNRFKIAEASFYAEEYVRFLERSETVSEDELHKFYEQQIRMIKLQQVSFATEEEARQAQQLLLKGLSFEGLMKRYPNDEQAFDGFIMAQQLPEPLASQFAAMNRGDVTRDPVKLGERYYLFKLSEVGKNPDAQPFELVRNQLEQGLRQEKARLKIDALLEENGVKP

SEQ ID NO: 6623 - protein, 194 aa, Neisseria meningitidis
MISRLTGKLVEKNPPQIVIDVNGVGYEADVSMQTFYNLPPVGESVQLFTQLIIREDAHLLFGFATAEERKTFRQLIKVGGIGAKTALGILSAMTADELARAVAEEDVKRLSSAPGIGKKTAERMVLELRGKLVAHTVTDGLFAAAPAADETEDIVSTLLALGYSEREAKAAVKGVPEGTDVGEGVRLALKNLLK

SEQ ID NO: 6624 - protein, 157 aa, Neisseria meningitidis
MEQKGFTLIEMMIVVAILGIISVIAIPSYQSYIEKGYQSQLYTEMVGINNISKQFILKNPLDDNQTIENKLEIFVSGYKMNPKIAKKYSVSVKFVDKEKSRAYRLVGVPKAGTGYTLSVWMNSVGDGYKCRDAASAQAHLETLSSDVGCEAFSNRKK

SEQ ID NO: 6625 - protein, 178 aa, Neisseria meningitidis; identical to SEQ ID NO: 5654

SEQ ID NO: 6626 - protein, 604 aa, Neisseria meningitidis
MPAETTVSGARPAAKLPIYILPCFLWIGIIPFTFALRLQPSPDFYHDAAAAAGLIVLLFLTAGKKLFDVKIPPISFLLFAMAAFWYLQARLMNLIYPGMNDIVSWIFILLAVSAWACRSLVAHFGQERIVTLFAWSLLIGSLLQSCIVVIQFAGWEDTPMLQNIIVYSGQGVIGHIGQRNNLGHYLMWGILAAAYLNGQRKIPAALGAICLIMQTAVLGLVNSRTILTYIAAIALILPFWYFRSDKSNRRTMLGIAAAVFLTALFQFSMNTILETFTGIRYETAVERVANGGFTDLPRQIEWNKALAAFQSAPIFGHGWNSFAQQTFLINAEQHNIHDNLLSNLFTHSHNIVLQLLAEMGISGTLLVAATLLTGIAGLLKRPLTPASLFLICTLAVSMCHSMLEYPLWYVYFLIPFGLMLFLSPAEASDGIAFKKAANLSILTASAAIFAGLLHLDWTYTRLVNAFSPATDDSAKTLNRKINELRYISANSPMLSFYADFSLVNFALPEYPETQTWAEEATLKSLKYRPHSATYRIALYLMRQGKVAEAKQWMRATQSYYPYLMPRYADEIRKLPVWAPLLPELLKDCKAFAAAPGHPEAKPCK

SEQ ID NO: 6627 - protein, 160 aa, Neisseria meningitidis; identical to SEQ ID NO: 1377

SEQ ID NO: 6628 - protein, 181 aa, Neisseria meningitidis
MSKIICLTAGHSNTDPGAVNGSDREADLAQDMRNIVASILRNDYGLTVRTDGEGKGNMPLRDAVKLIRGSDVAIEFHTNAAANKTATGIEALSTPKNKRWCQVLGKAVAKKTGWKLRGEDGFKPDNAGQHSRLAYAQAGGIVFEPFFISNDTDLALFKTTKWGICRAIADAIAMELGAAKV

SEQ ID NO: 6629 - protein, 284 aa, Neisseria meningitidis
VGQSGELFCFGQMPVWKVENLPEVLLSGYSSEEGEWVCLNVLQGDVEVRAPDGSAEVWSADGGDCVFAPQQVFSVKPKTDDAEIRLSLYCAAADYFHKKYGMSATHSAVAAARDTVPAGRALDMGCGQGRNALFLGLKGFEVTAVDHNPAALANVAELAEAEGLNVRTLEYDLNAAALQGEFDYIVATVVLMFLMPQRVPDVIADMQAHTAAGGYNLIVSAMDTADFPCPMPFPFKFKEGELKDYYRDWELVEYKEELGSMHAKDENGNPIRFKFVTMLAKKPE

SEQ ID NO: 6630 - protein, 175 aa, Neisseria meningitidis
MKQKIWYTYDDIHRVIKALAEKIRNAGVKYDAMIAIGGGGFIPARMLRCFLEIPIYAVTTAYYDSDNEGQVTEEVKKVQWLDPVPEALRGKNVLVVDEVDDSRVTMEFCLTELLKEDFGTVGVAVLHEKIKAKAGKIPEGIPYFSGITVEDWWINYPWDALDIDEHNRLAEAGRS

SEQ ID NO: 6631 - protein, 85 aa, Neisseria meningitidis; identical to SEQ ID NO: 4382

SEQ ID NO: 6632 - protein, 121 aa, Neisseria meningitidis
VITVKLTHGLTYNGKVVSELRLKPLTVGGELAAFALIDDLPELPENATKAELLQRDVLETLTYWSQQIEAQGIPSDILTAQWLMENLSTEDYHTVMAAQEDLRLKPSAATASPDAPSAAEQ

SEQ ID NO: 6633 - protein, 320 aa, Neisseria meningitidis
MPSISVRRLFDDNQYKLQLAWAAGNSGADNRIGVEADKPVLALVGHLNFIHPNQIQVVGLAESEYLNRLESGETGYQFGDLFDISMSLVIVANGLPVSPGLRDYCHKNDIPLLTSKLESPYLMDVLRIYLQRTLAASSVKHGVFLDVFEIGVLITGHSGLGKSELALELISRGHSLIADDAVELFRIGPETLEGRCSPMLRDFLEVRGLGILNIRHIFGETSIRPKKILQLIINLVEADDEYMKQLDRLSIRTETESILNVNVRSVTLPVAVGRNLAVLVEAAVRNYILQLRGKDSTREFLERHQTQLKENEQHNEDRPD

SEQ ID NO: 6634 - protein, 172 aa, Neisseria meningitidis; identical to SEQ ID NO: 2773

SEQ ID NO: 6635 - protein, 188 aa, Neisseria meningitidis
MLLQNILPFAHCLLRKALPEGGNALDGTAGNGHDTLFLAQTAGIRGKVWAFDIQPQALNNTRCRLQEAGYSNVRLILDGHENLKQYIPKPLDAAIFNFGWLPGGDKSLTTRTETSIAALSATLSLLKENGMLIAVLYPGHENGKQEAEAIEQWAKNLPQEQFAVLRYGFTNRKNSPPYLLVFEKLRQK

SEQ ID NO: 6636 - protein, 149 aa, Neisseria meningitidis; identical to SEQ ID NO: 2323

SEQ ID NO: 6637 - protein, 376 aa, Neisseria meningitidis
MTKHLPLAVLTALLLAACGGSDKPPAEKPAPAENQNVLKIYNWSEYVDPETVADFEKKNGIKVTYDVYDSDETLESKVLTGKSGYDIVAPSNAFVGRQIKAGAYQKIDKSLIPNYKHLNPEMMRLMDGVDPGHEYAVPFYWGTNTFAINTERVKKALGTDKLPDNQWDLVFDPEYTSKLKQCGISYLDSAAEIYPMVLNYLGKNPNSSNTEDIREATALLKKNRPNIKRFTSSGFIDDLARGDTCVTIGFGGDLNIAKRRAEEAGGKEKIRVMMPKEGVGIWVDSFVIPKDAKNVANAHKYINDFLDPEVSAKNGNFVTYAPSSKPARELMEDEFKNDNTIFPTEEDLKNSFIMVPIQPAALKFMVRQWQDVKAGK

SEQ ID NO: 6638 - protein, 444 aa, Neisseria meningitidis; identical to SEQ ID NO: 1459

SEQ ID NO: 6639 - protein, 120 aa, Neisseria meningitidis; identical to SEQ ID NO: 1496

SEQ ID NO: 6640 - protein, 611 aa, Neisseria meningitidis
VNTTPIHSKLAEITGRIIERSRPTREKYLAKIRSAKQMGRLERNQLGCSNLAHGYAAMPKSIKIEMLQETVPNLGIITAYNDMVSAHQPFKDFPDQIKDEAQKNGATAQVAGGTPAMCDGITQGYAGMELSLFSRDVIAMSTAIGLSHQMFDGSLFMGVCDKIVPGLMIGALSFGHIPGIFVPAGPMSSGIGNKEKARTRQLFAEGKVGRNELLKSEMGSYHSPGTCTFYGTANSNQMMMEMMGVHLPAAAFVHPYTDLREALTRYAAGHLARGIKNGTIKPLGEMLTEKSFINALIGLMATGGSTNHTMHLVAMARAAGVILNWDDFDEISSIIPLLIRVYPNGKADVNHFTAAGGLPFVIRELLNAGLLHDDVDTVVGHGMRHYTKEPFLIDGKLEWREAPETSGNDDILRKADNPFSPDGGLRLMKGNIGRGVIKVSAVREGCRIIEAPAIVFNDQREVLAAFERGELERDFVCVVRYQGPRANGMPELHKLTPPLGILQDRGFKVALLTDGRMSGASGKVPASIHMTPEALMGGNIAKIRTGDLIRFDSVSGELNVLINETEWNAREVESIDLGANQQGCGRELFANFRSMTSSAETGAMSFGGEFA

SEQ ID NO: 6641 - protein, 246 aa, Neisseria meningitidis; identical to SEQ ID NO: 2993

SEQ ID NO: 6642 - protein, 123 aa, Neisseria meningitidis
MRFYIDNKECDYIFFRKAVNISDDFIQSGFITPEGLITKNSNPKLFNQYSKMASKNKCQYEMVTFLSDEMKNIIELLSNDDAYIEFAYSEDFYVLPEIEIDKRTLKSLNFYIDFGVKYIINKI

SEQ ID NO: 6643 - protein, 555 aa, Neisseria meningitidis
MLLTLSLRDFVIVENLNLDFQSGFTVLTGETGAGKSITLDAIGLLLGDKADYSQVRSGAKEAQLSALFDISHLPVLKEELREQGLLDDGGEELSIRRIIDAKGKSRSFINNQASTLAQLKAVGSQLIDIHGQNAHHSLNQEAAQRELLDAFAGSRAQAETVRQLYQNWVNAKKALQEAQEHADAVIIERERLEWQFNELNQLDIKQGEWEALSQSHDSLAHSAELLQAAEEVGSKIDGDNGIQRHIYQCQKLLANLQNIEPRFAESLNMLASIEAELGEISANMRDVAGRSDINPNELAAQEQRMGELMGIARKYRIEPEELPAKLAEIEERLQSLQAAADLDALEHNVAHNFAEYQEAAHILSAMRHQAAERLSGETTEHMQHLAMKGARFDIVLLPSSPTAHGLEQVQFQVAANKGNPPRPLNKVASGGELARISLALQVVASQYTQVPTLIFDEVDTGIGGGVAEMVGKALRALGRKHQVLAVTHLPQVASCGENHWRVRKHSEGEQTVSEISILDEIQRIEEVARMLGGEVITDTTRRHAAELLQLASKNS

SEQ ID NO: 6644 - protein, 748 aa, Neisseria meningitidis
LRNFDHTGAQTASRSLNCRLNIKAGITLMQQKIRFQIEGMTCQACASRIEKVLNKKDFVESAGVNFASEEAQVVFDDSKTSVADIAKIIEKTGYGAKEKTEDTLPQPEAEHHIGWRLWLLFTINVPFLIGMAGMMIGRHDWMIPPLWQFALASVVQLWLAIPFYKSAWASIKGGLANMDVLVTIGTVSIYLYSVYMLFFSPHAAYGMAHVYFEVGVMVIGFVSLGKFLEHRTKKSSLNSLGLLLKLTPTQVNVQRNGEWKQLPIDQVQIGDLIRANHGERIAADGIIESGSGWADESHLTGESNPEEKKAGGKVLAGALMTEGSVVYRATQLGSQTQLGDMMNALSEAQGSKAPIARVADKAAAVFVPAVVGIALLTFIVTWLIKGDWTVALMHAVAVLVIACPCALGLATPAAIMVGMGKAVKHGIWFKDAAAMEEAAHVDAVVLDKTGTLTEGSPQVAAVYCVPDSGFDEDALYRIAAAVEQNAAHPLARAIVSAAQARGLDIPAAQNAQTVVGAGITAEVEGVGLVKAGKAEFAELALPKFLDGVWDIASIVAVSVDNKPIGAFALADALKADTAEAIGRLKKHNIDVYIMSGDNQGTVEYVAKQLGIAHAFGNMSPRDKAAEVQKLKAAGKTVAMVGDGINDAPALAAANVSFAMKGGADVAEHTASATLMQHSVNQLADALLVSQATLKNIKQNLFFAFFYNILGIPLAALGFLNPVIAGAAMAASSVSVLSNALRLKRVKID

SEQ ID NO: 6645 - protein, 530 aa, Neisseria meningitidis
MFRILIISFLFLLSAKSFSADLEIKNGKLMYALSEKYNDNGFKAYKVLGEGGGIHTEYNYKFDKSLNLNVLESSTGARSLEKVPVKVTASVSRAAVLSGVGKLARLGAKLSTRAVPYVGTALLAHDVYETFKEDIQAQGYQYDPETDKFVKGYEYSNCLWYEDKRRINRTYGCYGVDSSIMRLMSDDSRFPEVKELMESQMYRLARPFWNWHKEELNKLSSLDWNNFVLNRCTFNWNGGDCLVNKGDDFRNGADFSLIRNSKYKEEMDAKKLEEILSLKVDANPDKYIKATGYPGYSEKVEVAPGTKVNMGPVTDRNGNPVQVVATFGRDSQGNTTVDVQVIPRPDLTPGSAEAPNAQPLPEVSPAENPANNPNPNENPGTSPNPEPDPDLNPDANPDTDGQPGTRPDSPAVPDRPNGRHRKERKEGEDGGLLCDYFPEILACQEMGKPSDGMFHDISIPQVIDDKTWSSHNFLPSNGVCPQPKTFHVFGRQYQASYEPLCVFAEKIRFAVLLAFIIMSAFVVFGSLKGK

SEQ ID NO: 6646 - protein, 365 aa, Neisseria meningitidis
MKSVRSFIRDDIQAMSAYQIADVPPGFAKLDSMESPVHPFAGHETLLQEWQARLAAAPIHLYPNPSGSGLQEALRSAFDIPDCADIALGNGSDELIQFITMLTAKPGAAMLAAEPSFVMYRHNAALYGMDYVGVPLNGDFTLNLPAVLEAVRKHRPALTFIAYPNNPTGVCFTRAEIEAVIEASDGIVVVDEAYGAFNGDSFLPQAGRIPNLIVLRTLSKIGFAGLRIGYAAGCPEVIGELQKILPPYNMNQLSLTTAKLALRHYGIISANIDSLKNERERMFAELGKICRLNTFSSQANFITIRVPDADLLFDTLKQNRILVKKLHGAHPLLEHCLRITVGSPAQNDAVLNIIRQLYCQPTDFL

SEQ ID NO: 6647 - protein, 336 aa, Neisseria meningitidis
MSIILYTANDGTAQFALQEFGGQLWLTQADMAELYQTTKQNISKHIKTILAEQELEEKATVNFQLTVQNENGRKVNRKIAHYSLPMIIAVGYRVRSARGIQFRQWATERLDEYLTKGFAIDDERLKGTGGGDYWKELLNRIRDIRSSEKALYRQVLDLYATSQDYNPKSSESQTFFAAVQNKLHYAASRQTAAELIYSRADSSKDFMGLTTFQGAIPTLNEAKIAKNYLTEDELFRLNRLVSAFFDLAEIKAQEQSPMYMRDWIAELDKFSGLYGQGTLQGAGSISRKQAEQKAEREYRAYEARILSPVEQAYLESVKALEKTAVQQIKQKKDRTK

SEQ ID NO: 6648 - protein, 273 aa, Neisseria meningitidis; identical to SEQ ID NO: 4369

SEQ ID NO: 6649 - protein, 321 aa, Neisseria meningitidis
MSYTQLTQGERYHIQYLSRHCTVTEIAKQLNRHKSTISREIRRHRTQGQQYSAEKAQRQSQTIKQRKRQPYKLDSQLIQHIDTLIRRKLSPEQVCAYLCKHHQITLHHSTIYRYLRQDKSNGSTLWQHLRICSKPYRKRYGSTWTRGKVPNRVGIENRPAIVDQKSRIGDWEADTIVGKGQKSALLTLVERVTRYTIICKLDSLKAEDTARAAVRALKAHKDRVHTITMDNGKEFYQHTKITKALKAETYFCRPYHSWEKGLNENTNGLIRQYFPKQTDFRNISDREIRRVQDELNHRPRKTLGYETPSVLFLNLFQPLIH

SEQ ID NO: 6650 - protein, 445 aa, Neisseria meningitidis
MLPSGRSSKKAESKTVIPAERHNIRAEMLSFAAENVIRRLKGTGFQAYVVGGAVRDLLLGIEPKDFDVATDATPEQVHKLFRRSRIIGRRFQIVHVMNGAETIEVTTFRGGAKVHQNARGRIMKDNTYGSIEEDAMRRDFTCNALYYDPEKEEILDFHNGIADVAAHRLVMIGDAAERYQEDPVRILRAIRLSGKLGFELSEETAAPIAESICRLKHEPVARLFDEIMKLLFSGHARECLKRLNGFDIPDDIHLLLNALRVSDGIAGKMTVLALKNTDERLRADKSVSVGFVLAALMWPELERHWKSNLQQGLKPAPALSDAINTMRETVERGWGVPQRFSATMREIWMFQPQFENRKGARPHKLFAQARFRAAYDFLLLRAETGNADRALAEWWTAFQTASTEQRSEMTKNEAAARHEKNEGQAKKRRRRRRKPKPKVVGTDWE

SEQ ID NO: 6651 - protein, 71 aa, Neisseria meningitidis; identical to SEQ ID NO: 3926

SEQ ID NO: 6652 - protein, 200 aa, Neisseria meningitidis; identical to SEQ ID NO: 4060

SEQ ID NO: 6653 - protein, 231 aa, Neisseria meningitidis; identical to SEQ ID NO: 1993

SEQ ID NO: 6654 - protein, 141 aa, Neisseria meningitidis
MFSWFKLFHLFFVISWFAGLFYLPRIFVNMAMIDVPRGNPEYVRLSGMAVRLYRFMSPLGFGAVVFGAAIPFAAGWWGSGWVHVKLCLGLMLLAYQLYCGVLLRRFQDYSNAFSHRWYRVFNEIPVLLMVAALYLVVFKPF

SEQ ID NO: 6655 - protein, 265 aa, Neisseria meningitidis
MDTAQKQRWAITLSYDGSRFYGWQKQADGVPTVQAALETALAQIAGEAVSTTVAGRTDTGVHATAQVVHFDTTAARPQQAWVRGVNAHLPEGIAVLHARQVAPEFHARFDAYGRHYRYLLESAPVRSPLLKNRAGWTHLKLDIEPMRRAAAYLIGEQDFSSFRAAECQAKSPVKTIYRADLTQSSGLVRLDLHGNAFLHHMVRNIMGALVYVGSGRLSVEGFAALIQERSRLKAPPTFMPDGLYLTGVDYPEAYGIIRPQIPEWL

SEQ ID NO: 6656 - protein, 117 aa, Neisseria meningitidis; identical to SEQ ID NO: 3438

SEQ ID NO: 6657 - protein, 518 aa, Neisseria meningitidis
LHPRCAAERMQNIFITFSGKTMLSGLPIPKDIARPPETILVNITPQETRVAVLEENNICELHIERNSEHSLVGNIYLGVVRRVLPGMQSAFIDIGLERAAFLHIVDVLEQRRNPEETQRIEHMLFEGQSVLVQVIKDPINTKGARLSTQISLAGRFLVHLPQEDHIGVSQRIEDDAERSSLRERLDKLLPENACRGYIIRTNAENATDEQLQSDIDYLTKVWEHIQEQAKIRPPETLLYQDLPLSLRVLRDMVGCDTQKILVDSTVNHGRMTRFAEQYVHGALGRIELFKGERPLFETHNVEQEISRALQPRVNLNFGSYLIIESTEAMTTIDVNTGGFVGARNFDETIFRTNLEACHTIARELRLRNLGGIIIIDFIDMAQESHREAVLQELAKALAFDRTRVTLHGFTSLGLVELTRKRSRENLNQVLCEPCPSCQGRGRLKTPQTVCYEIQREIVREARRYDAESFRILAAPNVIDLFLDEESQSLAMLIDFIGKPISLAVETAYTQEQYDIVLM

SEQ ID NO: 6658 - protein, 309 aa, Neisseria meningitidis
MLRCRPKSVLDSDGIFLKFNFLRSKPKYEISFLPSFKRILCLSAVISVLGACAVVADVYGHDSATMNAAAAKDYMKTVELNKSAGNVDTTSRTARRVQAVFRRMLPYADAANNTSHKFDWKMTVFKNDELNAWAMPGGKMAFYTGIVDKLKLTDDEIAAIMGHEMTHALHEHGKNKVGQQILTNTAAQIGTQIILDKKPDTNPELVGLGMDILGTYGLTLPYSRSLEEEADEGGMMLMAQAGYHPAAAVRVWEKMNQENDQNGFIYAITSTHPTNNARIENLKRLLPTVMPVYEQSVRNKGRVNKKRRR

SEQ ID NO: 6659 - protein, 206 aa, Neisseria meningitidis
MAQFFAIHPDNPQERLIKQAVEIVNKGGVVVYPTDSCYALGCKLGDKAAMERILSIRKIDLKHHLTLMCADLSELGTYAKVDNVQFRQLKAATPGPYTFILQATKDVPARTLHPKRKTIGLRIPDNAIAQALLGELGEPLLSCTLMLPEDGEPLTDPYEIRERLEHAVDLVIDGGWCGTEPTTVVDMTDGTELVRQGCGDTAVFGL

SEQ ID NO: 6660 - protein, 265 aa, Neisseria meningitidis
MAAVFSVCACFMCSCLVVKNTVIGSGRTKIAVPLVARDAAELSAVLEQIKNMPFDIAEFRADFLECAGSIGEILHHTQTVRDALPDKPLLFTFRRHGEGGSFPCSDDYYFELLDALIESRLPDIIDIELFSGETAVRCAVANAQKNGIAALLCNHEFHRTPPQEEIVCRLKQMEDCGADICKIAVMPQSAEDVLTLLSATLKAKELAAKPIVTMSMGQTGAVSRLAGQVFGSSITFGSGTQNSAPGQIGVSALRATLDCLENGAD

SEQ ID NO: 6661 - protein, 397 aa, Neisseria meningitidis
MNPKHLIAFSALFAATQAEALPVASVSLDTVTVSPSAPYTDTNGLLTDYGNASASPWMKKLQSVAQGSGETFRILQIGDSHTAGDFFTDSLRKRLQKTWGDGGIGWVYPANVKGQRMAAVRHNGNWQSLTSRNNTGDFPLGGILAHTGSGGSMTLTASDGIASKQRVSLFAKPLLAEQTLTVNGNTVSANGGGWQVLDTGAALPLTIHTEMPWDIGFINIENPAGGITVSAMGINGAQLTQWSKWRADRMNDLAQTGADLVILSYGTNEAFNNNIDIADTEQKWLDTVRQIRDSLPAAGILIIGAPESLKNTLGVCGTRPVRLTEVQQMQRRVARQGQTMFWSWQNAMGGICSMKNWLNQGWAAKDGVHFSAKGYRRAAEMLADSLEELVRSAAIRQ

SEQ ID NO: 6662 - protein, 269 aa, Neisseria meningitidis
MIQDTRPLIRVVAGILLDSDGNYLLSSRPEGKPYAGYWEFAGGKVEAGETDFQALQREFEEELGIRILAATPWLTKIHSYEHARVCLKFLWVNPDQWTGKPQSREGQEWSWQKAGDFTVAPMLPANGALLRSLSVPRRLYGSLKTGLHGENSMGAYRVLPLGSAEGSGANVLMEAAQWQDRPEHADSVWMVVQTREQWRRAQEKGADAVVWRVCDDVQAQEAAEALRQGVSVPLVLAANGQTVARYGKLWLGLGAHVVVRDETIGKNHE

SEQ ID NO: 6663 - protein, 247 aa, Neisseria meningitidis
MLIIRNLIYWLILCSTLIFLFPFMLLASPFRDGAHKMARVWVGILNWSLKHIVGLKYRIIGAENIPDRPAVICAKHQSGWETLALQDIFPPQVYVAKRELFKIPFFGWGLKLVKTIGIDRNNRREANEQLIKQGLVRKNEGYWITIFPEGTRLAPGKRGKYKLGGARMAKMFEMDIVPVALNSGEFWPKNSFLKYPGEITVVICPTIPHASGSEAELMEKCEHLIETQQPLISGAGPFAAKMPSETA

SEQ ID NO: 6664 - protein, 38 aa, Neisseria meningitidis
MLYVGNIKNFFEFLKSDMIRLLRGESKTTDFQWPQFDE

SEQ ID NO: 6665 - protein, 148 aa, Neisseria meningitidis; identical to SEQ ID NO: 4019

SEQ ID NO: 6666 - protein, 207 aa, Neisseria meningitidis
MDQFELCQKEHVNPFALSKQYLLVVTFVKSSSKNFQAALLWARSAKLFENLEIGKETIYCCAFDKTAEQAGMAGVFLNYIENWNGKQIYINGRIHSGSIYDLLGVLDCYQKSQSCPNPKSHCCFVSDDIFLWHGSRPTFEISLDLTGKKKETSSAKKFVMPCINFRHHRIEKETYLGNWNEQIAALAVKQNIDWCPSFDIENFRQYE

SEQ ID NO: 6667 - protein, 367 aa, Neisseria meningitidis; identical to SEQ ID NO: 6599

SEQ ID NO: 6668 - protein, 794 aa, Neisseria meningitidis
MADNYVIWFENLRMTDVERVGGKNASLGEMISQLTEKGVRVPGGFATTAEAYRAFLAHNGLSERISAALAKLDVEDVAELARVGKEIRQWILDTPFPEQLDAEIEAAWNKMVADAGGADISVAVRSSATAEDLPDASFAGQQETFLNINGLDNVKEAMHHVFASLYNDRAISYRVHKGFEHDIVALSAGVQRMVRSDSGASGVMFTLDTESGYDQVVFVTSSYGLGENVVQGAVNPDEFYVFKPTLKAGKPAILRKTMGSKHIKMIFTDKAEAGKSVTNVDVPEEDRNRFSITDEEITELAHYALTIEKHYGRPMDIEWGRDGLDGKLYILQARPETVKSQEEGNRNLRRFAINGDKTVLCEGRAIGQKVGQGKVRLIKDASEMDSVEAGDVLVTDMTDPDWEPVMKRASAIVTNRGGRTCHAAIIARELGIPAVVGCGNATELLKNGQEVTVSCAEGDTGFIYAGLLDVQITDVALDNMPKAPVKVMMNVGNPELAFSFANLPSEGIGLARMEFIINRQIGIHPKALLEFDKQDDELKAEITRRIAGYASPVDFYVDKIAEGVATLAASVYPRKTIVRMSDFKSNEYANLVGGNVYEPHEENPMLGFRGAARYVADNFKDCFALECKALKRVRDEMGLTNVEIMIPFVRTLGEAEAVVKALKENGLERGKNGLRLIMMCELPSNAVLAEQFLQYFDGFSIGSNDMTQLTLGLDRDSGLVSESFDERNPAVKVMLHLAISACRKQNKYVGICGQGPSDHPDFAKWLVEEGIESVSLNPDTVIETWLYLANELNK

SEQ ID NO: 6669 - protein, 498 aa, Neisseria meningitidis
MFSNYLLSLAIWIPIAAGVLVLATGSDSRAPFARVLAFMGALAGFLVTLPLFTGFDRLSGGYQFTEFHEWIPLLKINYALGVDGISVLFIILNAFITLLVVLAGWEVIQKRPAQYMAAFLIMSGLINGAFAAQDAILFYVFFEGMLIPLYLIIGVWGGPRRVYASVKLFLYTLMGSLLMLVAMVYLYYQTGSFSIVDFQNIEQIPLGVQQLLFVAFFLSFAVKVPMFPVHTWLPDAHVEAPTGGSMVLAAITLKLGAYGFLRFILPIMPDAARYFAPVIIVLSLIAVIYIGMVALVQTDMKKLVAYSSISHMGFVTLGMFLFVDGQLDDWALKGAIIQMISHGFVSAAMFMCIGVMYDRLHTRNIADYGGVVNVMPKFAAFMMLFGMANAGLPATSGFVGEFMVIMGAVKVNFWVGALAAMTLIYGASYTLWMYKRVIFGAIHNPHVAEMQDINCREFAILAILAVAVLGMGLYPNAFIEVVHQAANDLIAHVAQSKI

SEQ ID NO: 6670 - protein, 352 aa, Neisseria meningitidis
MITPQQAIERLISNNELFYDEMTDLMRQIMRGQVLPEQIAAILTGLRIKVETVSEITAAAAVMREFATKVPLENAEGLVDIVGTGGDGAKTFNISTTSMFVAAAAGAKVAKHGGRSVSSSSGAADVVEQMGANLNLTPEQVAQSIRQTGIGFMFAPNHHSAMRHVAPVRRSLGFRSIFNILGPLTNPAGAPNQLLGVFHTDLCGILSRVLQQLGSKHVLVVCGEGGLDEITLTGKTRVAELKDGKISEYDIRPEDFGIETRRNLDEIKVANTQESLLKMNEVLEGREGAARDIVLLNTAAALYAGNVAASLSDGISAAREAIDSGRAKSKKEEFVGFQPQQRCHFLGKMELG

SEQ ID NO: 6671 - protein, 227 aa, Neisseria meningitidis
MQHDVYDYTAHTVSKNTVLQKTYRLLGFSFIPASAGAALAANAGFNFYAAFGSRWIGFAVVLAFFYGMIHFIEKNRYSNTGVTLLMVFTFGMGVLIGPVLQYALHIADGAKIVGIAAAMTAAVFLTMSALARRTRLDMNALGRFLTVGAVILMVAVVANLFLGIPALALTISAGFVLFSSLMIMWQVRTVIDGGEDSHISAALTLFISLYNIFSSLLNILLSLNGED

SEQ ID NO: 6672 - protein, 206 aa, Neisseria meningitidis
MKNNDCFRLKDSQSGMALIEVLVAMLVLTIGILALLSVQLRTVASVREAETQTIVSQITQNLMEGMLMNPTIDSDSNKKNYNLYMGNHTLPHTLSAVDGDFAIDAMKTKGQLAEAQLKRFSYELKNALPDAAAIHYAVCKDSSGNAPTLSGNAFSSNCDNKANGDTLIKVLWVNDSAGDSDISRTNLEVSGDNIVYTYQARVGGRE

SEQ ID NO: 6673 - protein, 191 aa, Neisseria meningitidis; identical to SEQ ID NO: 1730

SEQ ID NO: 6674 - protein, 109 aa, Neisseria meningitidis; identical to SEQ ID NO: 899

SEQ ID NO: 6675 - protein, 984 aa, Neisseria meningitidis
LTHKDRDLQFTHISNFNVAKKNVTLSFNNTDEVVAQKDGTVVFGAATYLPPYGKVSGFDTAKLTERGKAVDWIRTTHPGLIGYSYEDITCNSNNCPEIAYRTQFTFGNHGLAKNKTNNKLDIYEDKSRDNSPIYKLKDHPWLGVSFNLGGESSFKPKRNGSLVSSFSEVVTNNQHQNLVYTTDDYKSQGNKNHQNKHHAVAFYLNAKLHLLDKKQIKNIAQGSALNLGTLKTRIEPTAAWKNRAGSFFNNGNWTFEDKGVVSVKLKLPEVKAGRCINKPNPNKNTKAPSPALTAPALWFGPVQNGKAEMYSASVSTYPDSSSSQIFLQNLSRKDDTSKPGRYSLKPLSDTQIKSKEPNFTGRQTVIRLDKGVHQIKLQGNEVANFNGNDGKNDTFGIVSEGSFMPDASEWKKVLLPWTVRASNDDGQFNTFNKEENNGKPKYSQKYRSRDNGKHERNLGDIVNSPIVAVGEYLATSANDGMVHIFKQSGGDKRSYNLKLSYIPGTMPRKDIQNTESTLAKELRAFAEKSYVGDRYGVDGGFVLRKVERNGKDHVFMFGAMGFGGRGAYALDLSKIDSGNGNLADVSLFDVKHDKNGNNGVKLGYTVGTPQIGKTHDGKYAAFLASGYATKDITSGDNKTALYVYDLESSGTLIKKIEVPGGKGGLSSPTLVDKDLDGTVDIAYAGDRGGSMYRFDLSNQDPNQWSVRAIFEGTKPITSAPAISQLKDKRVVIFGTGSDLSEDDVLSTSEQYIYGIFDDDTVANNVNVKLSGLGGGLLEQELKQEDKTLFLTDYKRSDGSGSKGWVVKLKGGQRVTVKPTVVLRTAFVTIHKYTGTDKCGAETAILGINTADGGKLTKKSARPIVPAENQAVAQYSGHKKGINGKSIPIGCMQKGNEIVCPNGYVYDKPVNVRYLDEKKTDGFSTTADGDAGGSGIDPAGKRSGKNNRCFSQKGVRTLLMNDLDSLDITGPMCGMKRISWREIFY

SEQ ID NO: 6676 - protein, 122 aa, Neisseria meningitidis
MRIFKNQWIVKFAKKHKINDSELLEAVERADNGLIDADLGGGVIKQRIARQGQGRSGGYRSLILFKQADKAFFVYAFAKNDRENISDKELDVYRKAAAYYLKYTRAELAALKEDGIITEIES

SEQ ID NO: 6677 - protein, 222 aa, Neisseria meningitidis; identical to SEQ ID NO: 4018

SEQ ID NO: 6678 - protein, 347 aa, Neisseria meningitidis
MSKKIKVGIVGATGYTGVELLRLLAAHPDVEVAAVTSRSEAGTAVADYFPSLRGVYGLAFQTPDEAGLEQCDIVFFATPNGIAMKDAPRLIEQGVRVIDLSADFRIRDIPTWEHWYGMTHAAPDLVSQAVYGLSELNREAVAQARLVANPGCYPTCVSLPLVPLLRQCRLKPGMPLIADCKSGVSGAGRKGNVGSLLCEAGDNFKAYGIAGHRHLPEIRQTIAGLQDGIAEGFVFTPHLAPMIRGMHATVYLHLSDGSDPETVLRDYYRDSPFVDILPTGSAPETRSVRGANLCRISIQQAAQSDVWVVLSVIDNLVKGAAGQAVQNMNIMFGLEETHGLDAIPLLP

SEQ ID NO: 6679 - protein, 356 aa, Neisseria meningitidis
MYRRKGRGIKPWMGAGAAFAALVWLVFALGDTLTPFAVAAVLAYVLDPLVEWLQKKGLNRASASMSVMVFSLILLLALLLIIVPMLVGQFNNLASRLPQLIGFMQNTLLPWLKNTIGGYVEIDQASIIAWLQAHTGELSNALKAWFPVLMRQGGNIVSSIGNLLLLPLLLYYFLLDWQRWSCGIAKLVPRRFAGAYTRITGNLNEVLGEFLRGQLLVMLIMGLVYGLGLVLVGLDSGFAIGMLAGILVFVPYLGAFTGLLLATVAALLQFGSWNGILSVWAVFAVGQFLESFFITPKIVGDRIGLSPFWVIFSLMAFGQLMGFVGMLAGLPLAAVTLVLLREGVQKYFAGSFYRGR

SEQ ID NO: 6680 - protein, 259 aa, Neisseria meningitidis
MKLVRPQKISDQVLSVLEERIAEGVYAEGGKIPPERVLAEEFGVSRPSVRSALNVLVARQVLEARQGDGYYVSVKPQQDFLQSWQELLGKHSNWEQDVFDFSCHIEGCMAALAAERRTDADLKRIGFWLEKFEEACESGNLEHQSEADVSFHQTIADAAHNLLFSHLSGGLLKMLYRQTRSSLIYLNQEEDPRPKLMAQHRVLYEAISNRRPGEASEAAKAHLNYVASSILKDREYQSRNRHADTLAQNDLKRVQDWAV

SEQ ID NO: 6681 - protein, 74 aa, Neisseria meningitidis
MEKPLNFKPISYPQTRESAAGWFKRNGVCKAHWAKYFNLERTTVEHLLRGKLKGNFGKSHEAAVLLGMKEKSDD

SEQ ID NO: 6682 - protein, 133 aa, Neisseria meningitidis
MKLKSLDFPTGYFYFDNAAINSDKVEVIAVGYRNTDKTIKIFIEDVIHFRVVDESYFIDTFMDLISEDADRALLHENGGQSFFELLDECYAEWILKESYFPLNREFFKYYIFMFEQTFIEIIGSSATYSIIEG

SEQ ID NO: 6683 - protein, 358 aa, Neisseria meningitidis
MICRKPIGHTPYFDMNKTICRTAALLISGFSYANTIIPDVSPVAQGQHVFINIPQQRLFLYTDGKLTKVYPVAVGRAMTQTNLGEHKIGAKAYNPVWYIPKSIQKERGDGVKTIAAGPDNPLGPVFVRLGDPKLGLGIHGTNAPASVPGVRSHGCVRMKSPDALEFAKTIASGSPASVIYQMAGLNEDADRNLWLAAFRDPYGKNNLDIASLKKSIAQWAKTQGKTIAPEKVDAVLKDRTGSAVCLTCGKNGKMKMPLKSLAWIQGSSSYSQAEVIEQTEETNSAEISETRTPEVPDVHTPEAQPHLNTQSDGTPTAYTEPAADSSPQVETPDQAASEPVDVLFSIDVIRQGNLRLGN

SEQ ID NO: 6684 - protein, 158 aa, Neisseria meningitidis
MPIEIERRFLIGNDNWRQYADEPLLLRQGYLSVEKERTVRVRIAGKQAWLTLKGYISEISRSEFEYEIPLADAEKMMETMCPFKMEKWRYPVRWGGSLFEIDVFLGDNAPLVVAEIELPDENADFDRPDWLGREITADGMFTNAYLSRHPFSSWKNAV

SEQ ID NO: 6685 - protein, 544 aa, Neisseria meningitidis
MTKFIFVTGGVVSSLGKGIAAASIAAILESRGLNVTMLKLDPYINVDPGTMSPFQHGEVFVTDDGAETDLDLGHYERFIDSTMTRRNSFSTGQVYENVIAKERRGDYLGGTVQVIPHITDEIKRRIHEGAAGYDVAIVEIGGTVGDIESLPFLEAIRQMRSQLGRNNTLFAHLSYVPYIAAAGEIKTKPTQHTVKEMLSIGLQPDILICRMDRTMPADERRKIALFCNVEERAIVGSYDVDSIYECPEMLHDQGIDNIITEQLQLNVQQADLTAWKKIVHAIQNPKHTVKIAMVGKYVDLTESYKSLIEALKHAGIHTETDVQITFVDSENIEKNKGDVSMLKDMDAILVPGGFGSRGVEGKIAAVRYARENNVPYLGICLGMQIALIEYARDVAGLKGANSTEFDLKCAAPVVALIDEWQTADGSVETRDESTDLGGTMRLGAQEVELKAGSLAAKIYGSGHIRERHRHRYEVNNNYVPTLEQAGLVIGGVSAGRERLVETIELPNHPWFFACQFHPEFTSNPRKGHPLFTAFVKAALNNKKA

SEQ ID NO: 6686 - protein, 291 aa, Neisseria meningitidis
MEEGLIDRLLETLWLDRRLSQNTLNGYRRDLEKIARRLSQSGRMLKDADEADLAAAVYVDGEQRSSQARALSACKRLYIWMEREGIRTDNPTRLLKPPKIDKNIPTLITEQQISRLLAAPDTDTPHGLRDKALLELMYATGLRVSEAVGLNFGNVDLDRGCITALGKGDKQRMVPMGQESAYWVERYYTEARPLLLKGRNCDALFVSQKKTGISRQLAWMIVKEYASQAGIGHISPHSLRHAFATHLVRHGLDLRVVQDMLGHADLNTTQIYTHVANVWLQGVVKEHHSRN

SEQ ID NO: 6687 - protein, 109 aa, Neisseria meningitidis
MSLPPCPQCASEYTYEDGGQYICPECAHEWNETESAADLAAQVRDANGAVLQNGDTVILIKDLKVKGSSMVIKQGTKVKGIRLQEGDHNIGCKIDGSAMNLKSEFVKKA

SEQ ID NO: 6688 - protein, 155 aa, Neisseria meningitidis
VRLISESGEQLGVVSVREALAMAEGQDVDLVEISPTAKPPVCKLMDYGKYKYQQAKKRDEAKKNQKQVQIKEIKFRPGTDEGDYQIKMRNINRFLADGDKVKVTLRFRGREMAHQQLGAQLLERVKEDLAEVAQIESFPKMEGRQMVMMIAPKKK

SEQ ID NO: 6689 - protein, 214 aa, Neisseria meningitidis; identical to SEQ ID NO: 909

SEQ ID NO: 6690 - protein, 140 aa, Neisseria meningitidis
MNLEQLGRRDALLSGLLKQAGQWRRLDAAVKKLLPANLHPHFQTACIEDGRLVLLAANNMAASRLKMIAPSVLPQLAGLDASIRSVSVRLVPKPEKPPKTNTLHLSKAALESFGSAAAKLEKRHPELAEALANLVRRHGA

SEQ ID NO: 6691 - protein, 315 aa, Neisseria meningitidis; identical to SEQ ID NO: 1791

SEQ ID NO: 6692 - protein, 356 aa, Neisseria meningitidis
MTKHIAILRGDGIGPEIVAETVRVLDKLIAQGLDASYEYAPLGGEAYDEYGHPYPQFTQNLCRKADAVLLGAVGSPQYDNLDRPLRPERGLLAIRKDLNLFANLRPAILYPELANASTLKPEIVAGLDILIVRELTGDIYFGEPRGIRVLENGEREGYNTMKYSESEIRRIAHVAFQSAQKRSKKVCSVGKANVLETTELWREIFEEIGKEYPDVELSHMYVDNAAMQLVRAPKQFDVIATGNIFGDILSDEASMLTGSIGMLPSASLDENGKGLYEPSHGSAPDIAGQNKANPLATILSLAMLLRYSLNDEARAQQVENAVQKVLQQGLRTGDIYEEGTKLVSCSEMGDAVLAAL

SEQ ID NO: 6693 - protein, 443 aa, Neisseria meningitidis
MLFNHTASELLDLCRRTLDLAKATGATAAEADFSESLGQSVSVRLGEIEQIEFQQDKSLDITVYVGKRKGRASTADFSEKALQDTVKAAIDIARHTAEDGCAGLADACLMAKHIGDPDLYHEWDLDTEAAVGLAKQCEQAALNEDERIENSEGAAVQTGHYQYVYGNTHGFAAHRQGTHHSISCSVVAADENGMQRDYWYDSACRHPDMDSPETIGQTAARRTLRRLGSRSIPTGSYPVLFDTTVSGGLIGHLVGALSGGALYRQSSFLIDSIGKKVLPDFLNLREEPHIPRSFRSSYFDAEGVATAPRFVIQNGIVEGYFLSSYSARKLGMQTTGNAGGAHNLYLNHTHETQSDLLKEMGTGLLVTELMGQGANTITGDYSRGAAGFWVENGVIAYPVHEITVAGRLQDMYRDIVGVADDALRRSSNKIGSILIAGMTVAGS

SEQ ID NO: 6694 - protein, 193 aa, Neisseria meningitidis; identical to SEQ ID NO: 1600

SEQ ID NO: 6695 - protein, 161 aa, Neisseria meningitidis
MIQIGIIMGSNSDWPVMRQAAQFLEEFGVEYEARVVSAHRTPDLMFQYAETARARGIKAIIAGAGGAAHLPGMVAAKTTVPVLGVPVPSKYLRGEDSLLSIVQMPKGVPVATFAIGEAGAANAALFAVSMLANETPELAQKLADFRAKQEQAVLNMELEQI

SEQ ID NO: 6696 - protein, 468 aa, Neisseria meningitidis; identical to SEQ ID NO: 29

SEQ ID NO: 6697 - protein, 330 aa, Neisseria meningitidis; identical to SEQ ID NO: 244

SEQ ID NO: 6698 - protein, 94 aa, Neisseria meningitidis
MFGGRLKNAPSITAKHFLKENIMKFINTCRKYGAKLAVVTAAPLALAAHANATLPDTAKNALEAAKADGMEAGWIVVGIFAALFVFSIVKRVMK

SEQ ID NO: 6699 - protein, 229 aa, Neisseria meningitidis
MLFEGLPCLAVWCKNRLSAVLPVGGLNVSENLLEIETHPFDPVLPPKAAVMMMGTFPPKEDKRAMQFHYPNFQNDMWRVYGLVFFNDAAHFQRLSEKAFDAEKIKAFLHERGIASCPTVLKAVRQHGNASDKFLKVVETVDLAAVLAKIPECRHICTTGGKATEILLDIQGGGIKMPKTGETVPFPFAGRDLTLTRLPSTSRAYPLSLAKKAAAYRAFFEMAGLCEKQL

SEQ ID NO: 6700 - protein, 95 aa, Neisseria meningitidis
MWSGRCSDGIITAFKCKCFEKEQVVNTVLGVLMLVFLNRQLDCRLQVVGHQTGMPVQIAYGFFFQILETFIVAFVFREFDDAPYILTALLLKPLN

SEQ ID NO: 6701 - protein, 945 aa, Neisseria meningitidis
MLDKYNPAEIESKHYQNWEEQGYFQPDMDLTKPSFSIQLPPPNVTGTLHMGHAFNQTIMDGLTRYYRMKGCNTAWIPGTDHAGIATQIVVERQLAAQNVSRHDLGREKFLEKVWEWKEVSGGTITQQMRRVGCSADWTREYFTMDDVRAETVTEVFVRLYEQGLIYRGKRLVNWDPVLGTAVSDLEVESVEEQGSMWHIRYPLADNPAEAVIVATTRPETLLGDVAVAVNPEDERYTHLIGKELILPLTGRTIPVIADEYVEKDFGTGCVKITPAHDFNDYEVGKRHDTRLINVFNLEAKVLANAEVFNFKGEAQLGFALPEKYAGLDRFAARKQMVADLQEQGFLVEIKPHTLMTPKGDRTGSVIEPMLTSQWFVAMSATPNGGEPDSEFKGLSLADKAKKAVDSGAVRFIPENWVNTYNQWMNNIQDWCISRQLWWGHQIPAWYDNEGNVYVARNQEEAEKQAGKTGLTREEDVLDTWFSSALVPFSTLGWPSETDELKAFLPSNVLVTGYEIIFFWVARMIMMTTHFTGKVPFKDVYIHGIVRDHEGKKMSKSEGNVIDPVDLIDGIGLEKLLVKRTTGLRKPETAPKVEEATKKLFPEGIPSMGADALRFTMASYASLGRSVNFDFKRAEGYRNFCNKIWNATNFVLMNTENQDCGYGATAAEPRGYSFPDMWIVGRLNQTIEQVTQAYETYRFDLAAETLYSFVWNDYCDWYLELAKVQLQTGCASRQRATRHTLLRVLEAALRLLHPIIPFITEELWQTVAPMCDAKTADSIMLARFPEADSGEIVQTAFEQMTVLQDLIGAVRNLRGEMGIQPNVKAPLFVESTDDLADYLKYLPMMTRLTEAQQVAALPESEDAPVAVCNGARLMLKVEIDKAAETARLSKEAEKLQKALDKLNAKLSKPGYTEKAPAHLVEKDKADLAELEDKMAKVQNQLAKLKD

SEQ ID NO: 6702 - protein, 449 aa, Neisseria meningitidis; identical to SEQ ID NO: 5514

SEQ ID NO: 6703 - protein, 439 aa, Neisseria meningitidis
MPSESKPVSRIVTDSRDIRAGDVFFALAGERFDAHDFVEDVLAAGAAAVVVSREDCAAMDGALKVDDTLAALQTLAKAWRENVNPFVFGITGSGGKTTVKEMLAAVLRRRFGDDAVLATAGNFNNHIGLPLTLLKLNEKHRYAVIEMGMNHFGELAVLTQIAKPNAALVNNAMRAHVGCGFDGVGDIAKAKSEIYQGLCSDGIALIPQEDANMAVFKTATLNLNTRTFGIDSGDVHAENIVLKPLSCEFDLVCGDERAAVVLPVPGRHNVHNAAAAAALALAAGLSLNDVAEGLKGFSNIKGRLNVKSGIKGATLIDDTYNANPDSMKAAIDVLARMPAPRIFVMGDMGELGELGEDEAAAMHAEVGAYARDQGIEAAYFVGDNSVEAAEKFGADGLWFAAKDPLIQVLRHDLPERATVLVKGSRFMQMEEVVEALEDK

SEQ ID NO: 6704 - protein, 280 aa, Neisseria meningitidis
MIQHAGLGYRRDLAEDFLSLSENSPICFIEAAPENWLKMGGWARKQFDRVAERLPLALHGLSMSLGGQAPLDTDLIDGIKEMMRRYDCTFFSDHLSYCHDGGHLYDLLPLPFTEEMVHHTARRIREVQDRLGCRIAVENTSYYLHSPLAEMNEVEFLNAVAREADCGIHLDVNNIYVNAVNHGLLSPEAFLENVDAERVCYIHIAGHDVETPELLIDTHGAAVLPTVWDLLELAYAKLPTIPPTLLERDFNFPPFSELEAEVAKIADYQTRAGKECRRAA

SEQ ID NO: 6705 - protein, 123 aa, Neisseria meningitidis; identical to SEQ ID NO: 2701

SEQ ID NO: 6706 - protein, 82 aa, Neisseria meningitidis; identical to SEQ ID NO: 2740

SEQ ID NO: 6707 - protein, 377 aa, Neisseria meningitidis
MFKKFKPVLLSFFALVFAFWLGTGIAYEINPRWFLSDTATEVPENPNAFVAKLARLFRNADRAVVIVKESIRTEENLAGTVDDGPLQSEKDYLALAIRLSRLKEKAKWFHVTEQEHGKEVWLDYHIGEGGLVAVSLSQRSPEAFVNAEYLYRNDRPFSVNVYGGTVHGENYETTGEYRVVWQPDGSVFDASGRGKIGEDVYEHCLGCYQMAQVYLAKYRDVANDEQKVWDFREESNRIASDSRDSVFYQNMRELMPRGMKANSLVVGYDADGLPQKVYWSFDNGKKRQSFEYYLKNGNLFIAQSSTVALKADGVTADMQTYHAQQTWYLDGGRIIREEKQGDRLPDFPLNLEDLEKEVSRYAEAAARRSGGRRDLSH

SEQ ID NO: 6708 - protein, 143 aa, Neisseria meningitidis
MMGFEKVEHLLPDTVLDIVDVIGLAATEQLVKAIGGARFKFGKGKVDTERLAILVEAIGEVKTHELLQVYGGEELYVPRCGKALIQLRNHRFYQEFVKLRDIDKKSGLMAMTKLCPKYGISSRTGYTIINEMSRPAAQQAALF

SEQ ID NO: 6709 - protein, 228 aa, Neisseria meningitidis
MTVLQERYREVSDRIGKLVLQAGRKPHSVSLIAVGKTFPSDGIREVYAAGQRDFGENYIQEWYGKTEELADLTDIVWHVIGDVQSNKTKFVAERAHWVHTVCRLKTAVRLSEQRPSSMPPLQVCIEVNIAGEAVKHGVAPEEAVALAVEVAKLPNIVVRGLMCVAKANSSETELKVQFQTMRKLLADLNTAGVKADVLSMGMSDDMPAAIECGATHVRIGSAIFGKRG

SEQ ID NO: 6710 - protein, 415 aa, Neisseria meningitidis
MLKQTTLLAACTAVAALLGGCATQQPAPVIAGNSGMQDAPSSAVYNNPYGATPYSPAPAGDAPYVPPVQSAPVYTPPAYVPPSAPAVSGTYVPSYAPVDINAATHTIVRGDTVYNISKRYHISQDDFRAWNGMTDNTLSIGQIVKVKPAGYAAPKAAAVKSRPAVPAAAQPPVQSAPVDINAATHTIVRGDTVYNISKRYHISQDDFRAWNGMTDNMLSIGQIVKVKPAGYAAPKTAAVESRPAVPAAVQTPVKPAAQPPVQSAPQPAAPAAENKAVPAPAPQSPAASPSGTRSVGGIVWQRPTQGKVVADFGGNNKGVDIAGNAGQPVLAAADGKVVYAGSGLRGYGNLVIIQHNSSFLTAYGHNQKLLVGEGQQVKRGQQVALMGNTDASRTQLHFEVRQNGKPVNPNSYIAF

SEQ ID NO: 6711 - protein, 249 aa, Neisseria meningitidis
MVLCRDFLTWCNETLQTALFKDYAPNGLQVEGREYIGKIVTSVTASRAAIDFAVEQKADLLLVHHGMFWKNELPTVTGWKKERIAALLRHDINMAGYHLPLDAHPTLGNNAQLADRLGFATEKRFGEQNLLNSGSLKQAKTLGALAAHIETVLQRKPVVIGNPEREIRRVAWCSGGAQGFFQTAIDEGVDLYLTGEISEAQYHLANETGTAFISAGHHATERYGVRALAESAAEVFGLEVCHFDENNPA

SEQ ID NO: 6712 - protein, 553 aa, Neisseria meningitidis
MTESITRDSMQYDVVIVGAGPSGLSAAIKLKQLAEQNGREISVCVVEKGSEVGAHSLAGAVIDPIALNELISDWKEKGAPLTRTVTQDKVLFLTEKKAFNLPITPNFDNHGNYIVSLGEVVRWLAEQAENMGVEIYPGFAAAEVLYHEDGSVKGIATGNMGIGKDGEPTDSFQPGMELWAQQTLFAEGCRGSLSKQIIERFQLDQNSQPQTYGLGIKEVWEVPSEQHQPGLVVHSAGWPLDSKTYGGAFVYHFDDNKVAVGFVVGLDYQNPYLSPFEEFQRFKTHPEIRKTFEGGRRIAYGARSLIEGGLQSLPKLSFKGGILVGDAAGFLNMPRIKGIHTAMKSAMLAAEAVFPLLENLEEVEGFDSGKEAADYQQRFEQSWLYQELYAARNVRPSFKWGVYLGSIYTGIDQMIFRGKAPWTLKHHGKDNEQLKKAAACKPIDYPKPDGVLTFDRLSSVFLANLAHEENQPDHLVLNNPQTMIDVNYKEYASPETRYCPAGVYEIVEENGNPRLQINAANCVHCKTCDIKDPTQNITWICPEGASGPNYGGM

SEQ ID NO: 6713 - protein, 362 aa, Neisseria meningitidis
MSQTIDELLLPHRNAIDTIDAEILRLLNERAQHAHAIGELKGTGAVYRPEREVAVLRRIQDLNKGPLPDESVARLFREVMSECLAVERPLTIAYLGPQGTFTQQAAIKHFGHAAHTMACPTIDDCFKQVETRQADYLVAPVENSTEGSVGRTLDLLAVTALQACGEIVLRIHHNLLRKNNGSTEGIAKVFSHAQALAQCNDWLGRHLPNAERIAVSSNAEAARLVAESDDGTVAAIAGRTAAEIYGLDMVAECIEDEPNNTTRFLVMGHHETGASGSDKTSLAVSAPNRAGAVASLLQPLTESGISMTKFESRPSKSVLWEYLFFIDIEGHRRDAQIQTALERLGERASFVKVIGSYPTAVL

SEQ ID NO: 6714 - protein, 397 aa, Neisseria meningitidis; identical to SEQ ID NO: 103

SEQ ID NO: 6715 - protein, 469 aa, Neisseria meningitidis
MMKNRVTNIHFVGIGGVGMSGIAEVLHNLGFKVSGSDQARNAATEHLGSLGIQVYPGHTAEHVNGADVVVTSTAVKKENPEVVAALEQQIPVIPRALMLAELMRFRDGIAIAGTHGKTTTTSLTASILGAAGLDPTFVIGGKLNAAGTNARLGKGEYIVAEADESDASFLHLTPIMSVVTNIDEDHMDTYGHSVEKLHQAFIDFIHRMPFYGKAFLCIDSEHVRAILPKVSKPYATYGLDDTADIYATDIENVGAQMKFTVHVQMKGHEQGSFEVVLNMPGRHNVLNALAAIGVALEVGASVEAIQKGLLGFEGVGRRFQKYGDIKLPNGGTALLVDDYGHHPVEMAATLAAARGAYLEKRLVLAFQPHRYTRTRDLFEDFTKVLNTVDALVLTEVYAAGEEPIAAADSRALARAIRVLGKLEPIYCENVADLPEMLLNVLQDGDIVLNMGAGSINRVPAALLALSKQI

SEQ ID NO: 6716 - protein, 56 aa, Neisseria meningitidis; identical to SEQ ID NO: 2179

SEQ ID NO: 6717 - protein, 228 aa, Neisseria meningitidis
MYAFTAAQQQKALFRLVLFHILIIAASNYLVQFPFQIFGIHTTWGAFSFPFIFLATDLTVRIFGSHLARRIIFWVMFPALLLSYVFSVLFHNGSWTGLGALSEFNTFVGRIALASFAAYAIGQILDIFVFNKLRRLKAWWIAPTASTVIGNALDTLVFFAVAFYASSDGFMAANWQGIAFVDYLFKLTVCTLFFLPAYGVILNLLTKKLTTLQTKQAQDRPAPSLQNP

SEQ ID NO: 6718 - protein, 559 aa, Neisseria meningitidis
MEIINDAELIRSMQRQQHIDAELLTDANVRFEQPLEKNNYVLSEDETPCTRVNYISLDDKTVRKFSFLPSVLMKETAFKTGMCLGSNNLSRLQKAAQQILIVRGYLTSQAIIQPQNMDSGILKLRVSAGEIGDIRYEEKRDGKSAEGSISAFNNKFPLYRNKILNLRDVEQGLENLRRLPSVKTDIQIIPSEEEGKSDLQIKWQQNKPIRFSIGIDDAGGKTTGKYQGNVALSFDNPLGLSDLFYVSYGRGLAHKTDLTDATGTETESGSRSYSVHYSVPVKKWLFSFNHNGHRYHEATEGYSVNYDYNGKQYQSSLAAERMLWRNRLHKTSVGMKLWTRQTYKYIDDAEIEVQRRRSAGWEAELRHRAYLNRWQLDGKLSYKRGTGMRQSMPAPEENGGDILPGTSRMKIITASLDAAAPFILGKQQFFYATAIQAQWNKTPLVAQDKLSIGSRYTVRGFDGEQSLFGERGFYWQNTLTWYFHPNHQFYLGADYGRVSGESAQYVSGKQLMGAVVGFRGGHKVGGMFAYDLFAGKPLHKPKGFQTTNTVYGFNLNYSF

SEQ ID NO: 6719 - protein, 701 aa, Neisseria meningitidis
MARKTPISLYRNIGISAHIDAGKTTTTERILFYTGLTHKLGEVHDGAATTDYMEQEQERGITITSAAVTSYWSGMAKQFPEHRFNIIDTPGHVDFTVEVERSMRVLDGAVMVYCAVGGVQPQSETVWRQANKYQVPRLAFVNKMDRQGANFFRVVEQMKTRLRANPVPIVIPVGAEDNFSGVVDLLKMKSIIWNEVDKGTTFTYGDIPAELVETAEEWRQNMIEAAAEASEELMDKYLGGDELTEEEIVGALRQRTLAGEIQPMLCGSAFKNKGVQRMLDAVVELLPAPTDIPPVQGVNPNTEEADSRQASDEEKFSALAFKMLNDKYVGQLTFIRVYSGVVKSGDTVLNSVKGTRERIGRLVQMTAADRTEIEEVRAGDIAAAIGLKDVTTGETLCAESAPIILERMEFPEPVIHIAVEPKTKADQEKMGIALNRLAKEDPSFRVRTDEESGQTIISGMGELHLEIIVDRMKREFGVEANIGAPQVAYRETIRKAVKAEYKHAKQSGGKGQYGHVVIEMEPMEPGGEGYEFIDEIKGGVIPREFIPSVDKGIRDTLPNGIVAGYPVVDVRIRLVFGSYHDVDSSQLAFELAASQAFKEGMRQASPALLEPIMAVEVETPEEYMGDVMGDLNRRRGVVLGMDDDGIGGKKVRAEVPLAEMFGYSTDLRSATQGRATYSMEFKKYSEAPAHIAAAVTEARKG

SEQ ID NO: 6720 - protein, 481 aa, Neisseria meningitidis
MAHFFNINYPTYKGKNMTVRIEHDLLGDREIPAEVYWGIHTLRAIENFKISTQKISDVPQFVRSMVMVKKATAQANGKLGAVKPEIAAAIEKACDEVLLNNRCLDQFPSDVYQGGAGTSVNMNTNEVIANLALEALGYEKGRYDIVNPMDHVNASQSTNDAYPTGFRLAVYYSIGELLDKLVVLKNAFAAKAEEFKDVLKMGRTQLQDAVPMTTGQEFQSFQVLLEEEILNLDRTRQLLLEVNLGATAIGTGVNTPKGYAELVVKKLSEVSGLPCKLTENLIEATSDCGAYVMVHGALKRTAVKLSKICNDLRLLSSGPRAGLKEINLPELQAGSSIMPAKVNPVIPEVVNQVCFKVIGNDTTITFAAEAGQLQLNVMEPVIAQCMFETISLLGNAAINLSDKCVKGITVNREICERYVFNSIGLVTYLNPYIGHHNGDLVGKICAQTGKGVREVVLERGLLSEEELNRILSPENLMNPHL

SEQ ID NO: 6721 - protein, 170 aa, Neisseria meningitidis; identical to SEQ ID NO: 1267

SEQ ID NO: 6722 - protein, 293 aa, Neisseria meningitidis
LRKPFTVPILRRPNIQTVLKQNNNKPTHPIINIPTVGNSDGPTPTDDIQESKVSMTQQIKYKRVLLKLSGESLMGSDPFGINHDTIVQTVGEIAEVVKMGVQVGIVVGGGNIFRGVSAQAGSMDRATADYMGMMATVMNALALKDAFETLGIKARVQSALSMQQIAETYARPKAIQYLEEGKVVIFAAGTGNPFFTTDTAAALRGAEMNCDVMLKATNVDGVYTADPKKDPSATRYETITFDEALLKNLKVMDATAFALCRERKLNIVVFGIAKEGSLKRVITGEDEGTLVHC

SEQ ID NO: 6723 - protein, 753 aa, Neisseria meningitidis
MLQIEIDGKQVSVEQGATVIEAAHKLGTYIPHFCYHKKLSIAANCRMCLVNVEKAPKPLPACATPVTDGMIVRTHSAKAREAQEGVMEFLLINHPLDCPTCDQGGECQLQDLAVGYGKTTSRYTEEKRSVVGKDMGSLVSAEEMSRCIHCTRCVRFTEEIAGLQEIAMVNRGEHSEIMPFIGKTVETELSGNVIDLCPVGALTSKPFRFNARTWELNRRKSVSAHDALGSNLIVQTKDHTVRRVLPLENEAINECWLSDRDRFAYEGLYHESRLKNPKIKQGGEWMDVDWKTALEYVRSAIECIAKDGKQNQVGVWANPMNTVEELYLAKKLADGLGVKNFATRLRQQDKRLSDGLKGAQWLGQSIESLADNDAVLVVGANLRKEQPLLTARLRRAAKDRMALSVLASSKEELFMPLLSQEAAHPDEWAGRLKNLSVNAEHAVTASLKNAEKAAVILGAEVQNHPDYAAVYAAAQELADATGAVLGILPQAANSVGADVLNVNSGKSVVEMVNAPKQAVLLLNVEPEIDTADGAKAVAALKQAKSVMAFTPFVSETLLDVCDVLLPIAPFTETSGSFINMEGRLQSFHGVVQGFGDSRPLWKVLRVLGNLFDLKGFEYHDTAAILKDALDVESLPSKLDNRNAWTGEGVQTTSDRLVRVGGVGIYHTDSIVRRSAPLQETSHAAVPAARVNPNTLARLGLQDGQTAVAKQNGASVSVAVKADAGLPENVVHLPLHTENAALGALMDTIELAGA

SEQ ID NO: 6724 - protein, 285 aa, Neisseria meningitidis
MNYALDALWWKLTSQPVRDLASLLTAPPLWQSGCELGVRELLGERGFRYLLALDADSAPLTDYLARRAPFGHRLGIYAEELLAFWFANAPHAELLAHNLTVSGSDGNTQGAADFVVRLNGKPYHIELTCKYYGGGTGRLEDMRGLDPKDTLLGKAAKLTAQLGLPHTSDGIRTLRQHGLPLDVKPVSIVRGIGFFPQSFHAFEPPLNPYGWRGIYIQDWAEYGFERQEVRYHLLDRMAYLAPARAAETETLNETEIRRIDQGLIAVLECRPDGFWHEIERIMKAV

SEQ ID NO: 6725 - protein, 841 aa, Neisseria meningitidis; identical to SEQ ID NO: 1223

SEQ ID NO: 6726 - protein, 286 aa, Neisseria meningitidis
MSDLSVLSPFAVPLAAVFGLLVGSFLNVVIYRVPVMMERGWTVFAKEYLNLPLTEEESRTFNLMKPDSCCPKCRVPIRAWQNIPIVSYLLLRGKCASCQTKISIRYPLIELLTGVLFGLVAWQYGWSWITLGGLVLTAFLISLTFIDADTQYLPDSMTLPLIWLGLIFNLDGGFVPLQSAVLGAVAGYGSLWLLCAVYKLLTGKTGMGNGDFKLIAALGAWLGISALPVLIFVSSLIGLVAAIVMRVAKGQHFAFGPALTVSGWIIFTANDSVWRAVNWWLTHPVL

SEQ ID NO: 6727 - protein, 46 aa, Neisseria meningitidis
MPSEKIYYGVLIFLCIASMLLSPFFYAGALKPKKAALRKDGQWKLI

SEQ ID NO: 6728 - protein, 336 aa, Neisseria meningitidis
MNDNTHTLPPRHLSVAPMLDWTDRHYRYLARQITRNTWLYSEMVNAGAIVYGDKDRFLMFNEGEQPVALQLGGSDPSDLAKAAKAAEAYGYNEVNLNCGCPSPRVQKGSFGACLMNEVGLVADCLNAMQDAVKIPVTVKHRIGVDRQTEYQTVADFVGTLRDKTACKTFIVHARNAWLDGLSPKENRDVPPLKYDYVYRLKQEFPGLEIIINGGITTNEAIAGHLQHVDGVMVGREAYHNPMVMREWDRLFYGDTRSPIEYADLVQRLYTYSQAQIQAGRGTILRHIVRHSLGLMHGLKGARTWRRMLSDATLLKDNDGSLILEAWKEVERANMRE

SEQ ID NO: 6729 - protein, 143 aa, Neisseria meningitidis; identical to SEQ ID NO: 6293

SEQ ID NO: 6730 - protein, 48 aa, Neisseria meningitidis
LVVSKEIELNQHPVFIKLTTALAVLVGKFAIDDGGDGNFHDDSPVFSD

SEQ ID NO: 6731 - protein, 128 aa, Neisseria meningitidis
MKNVQKGFTLLELMIAVAILGILTLITYPSYKTYIRRVRLSEVKSTLLMNAQNLERYYRQKGTFDNYDQTKLKQNKYFKITLSKSPDHFTLKATPNPATNDGETCVVTLNDGGTLSAAGNGQSCPDFD

SEQ ID NO: 6732 - protein, 261 aa, Neisseria meningitidis
MLSEPFLQSTIMANQRPIYGFHAVNARLWQNPKSIVELYIQEGKSDARTREVLEKAANENIRVYFADADRLNAISKGARHQGVVGFIDASKNHVHLEDVLENLSEPPLLLILDGITDPHNLGACLRTADAMGVHAVIAPKDKSAGLNATVSKVACGAAETVPYITVTNLARTLRELKEYGIWIIGTDMSGESDLYHCNLPDSAAWVMGNEGDGMRRLTREHCDMLVSIPMFGTVESMNVSVSAGMVLSETRRQRVLKNEKV

SEQ ID NO: 6733 - protein, 222 aa, Neisseria meningitidis
MKNLAIFDLDNTLINTDSDHAWPQYLIKKGLVDAAETEAQNEKFYRDYQNGCLDIDAFLKFHLAPLARYSKEELAEFHREFMAEYIIPHISPMQRMLVQSHQMAGDETLVISSTNEFIITPVCHLFGITNIIGTQLETGSDGRYTGNYIGTPSLKEGKITRLNQWLAERGETLQSYGKTYFYSDSKNDLPLLRLVSEPVAVNPDAELEKEAKEKGWPVLNFK

SEQ ID NO: 6734 - protein, 166 aa, Neisseria meningitidis; identical to SEQ ID NO: 1240

SEQ ID NO: 6735 - protein, 672 aa, Neisseria meningitidis
MNKSLSSSVEEYRELTLRGMILGALITVIFTASNVYLGLKVGLTFASSIPAAVISMAVLKFFKGSNILENNMVQTQASAAGTLSTIIFVLPGLLMAGYWSGFPFWQTTLLCIAGGILGVIFTIPLRYAMVVKSDLPYPEGVAAAEILKVGGHEEGDNRQGGSGIKELAAGGALAGLMSFCAGGLRVIADSASYWFKSGTAIFQLPMGFSLALLGAGYLVGLTGGIAILLGISIAWGIAVPYFSSHIPQPSDMEMAAFAMKLWKEKVRFIGAGTIGIAAVWTLLMLLKPMVEGMKMSFKSFGGGAPAAERAEQDLSPKAMIFWVLAMMFVLGVSFYHFIGDSHITGGMAWLLVVVCTLLASVIGFLVAAACGYMAGLVGSSSSPISGVGIVSVVVISLVLLLVGESGGLLADEANRKFLLALTLFCGSAVICVASISNDNLQDLKTGYLLKATPWRQQVALIIGCIVGALVISPVLELLYEAYGFTGAMPREGMDAAQALAAPQATLMTTIASGIFAHNLEWVYIFTGIVIGAVLIVVDLVLKKSSGGKLALPVLAVGMGIYLPPSVNMPIVAGAVLAAVLKHIIGKKAENREGRLKNAERIGTLFSAGLIVGESLIGVIMAFIIAFSVTNGGSDAPLALNLQNWDAAASWLGLAFFVTGMFFFAQRVLKAGK

SEQ ID NO: 6736 - protein, 209 aa, Neisseria meningitidis
MAAHLEEQQELDNFKYFWKTTGKWLFALLILAALGYLGYTVYQNRKVSQNQEAAAVLANIVEKAQSKAPQSEINAELTKLQQSYPHSISAAQATLMAAATEFDAQRYDVAEGHLKWVLSNQKDSLIQALAAQRLGVVLLQQKKYDAALAALDTPVEADFAPLLMETKGDVYAAQGKSQEALKNYGQALEKMPQDSVGRELVQMKLDSLK

SEQ ID NO: 6737 - protein, 445 aa, Neisseria meningitidis
MTFQNKKILVAGLGGTGISMIAYLRKNGAEVAAYDAELKPERVSQIGKMFDGLVFYTGRLKDALDNGFDILALSPGISERQPDIEAFKQNGGRVLGDIELLADIVNRRDDKVIAITGSNGKTTVTSLVGYLCIKCGLDTVIAGNIGTPVLEAEWQREGKKADVWVLELSSFQLENTESLRPTAATVLNISEDHLDRYDDLLDYAHTKAKIFRGDGVQVLNADDAFCRAMKRAGREVKWFSLEHEADFWLERETGRLKQGNEDLIVTQDIPLQGLHNAANVMAAVALCEAIGLSREALLEHVKTFQGLPHRVEKIGEKNGVVFIDDSKGTNVGATAAAIAGLQNPLFVILGGMGKGQDFTPLRDALVGKAKGVFLIGVDAPQIRRDLDGCGLNMTDCATLGEAVQTAYAQAEAGDIVLLSPACASFDMFKGYAHRSEVFIEAFKAL

SEQ ID NO: 6738 - protein, 164 aa, Neisseria meningitidis
MIFKQNQNYWAVFDANKETLIVQTCSGLGLTAIDHLYPPHILPLDTDNETLGTTVLQALANSRTFVYDSPEDQDFFDTEKIRQRYEDWVAKLCGNLGYKTRRALFKNMMSVDIWLHNGCLKISPSRHVKLEAWNAIDADDVILSLDNSPEEIGAGLKLALSHCR

SEQ ID NO: 6739 - protein, 245 aa, Neisseria meningitidis; identical to SEQ ID NO: 4045

SEQ ID NO: 6740 - protein, 81 aa, Neisseria meningitidis
VAGATIRIIDRQTDEVIAKKTIYVFEKGLDGTGGARMPWKFAILCNKERLTSSEPLSDFVLSVLKPYILRPLYIASLRRDD

SEQ ID NO: 6741 - protein, 241 aa, Neisseria meningitidis
MPRFHLPENLSVGQTVALPDNIVRHLNVLRVRPNENITLFDGKGKAHAARLTVLEKRRAEAEILHEDTTDNESPLNITLIQSISSGDRMDFTLQKSVELGVTAIQPVISERCIVRLDGERAAKRLARWQEIVISACEQSGRNTVPPVLPIIGYREALDKMPSESTKLIMSINRARKLGDIRQPSGAIVFMVGPEGGWTEQEEQQAFEAGFQAVTLGKRILRTETAPLAALAAMQTLWGDFA

SEQ ID NO: 6742 - protein, 248 aa, Neisseria meningitidis; identical to SEQ ID NO: 639

SEQ ID NO: 6743 - protein, 476 aa, Neisseria meningitidis
MTWETVIGLEIHVQLNTKSKIFSGASTAFGAEPNAHASVVECALPGVLPVMNREVVEKAIKLGLALDAKINQKNVFDRKNYFYPDLPKGYQISQLDLPIVEHGKLEIVVGDDVKTINVTRAHMEEDAGKSVHEGLNGATGIDLNRAGTPLLEVVSEPEMRSAAEAVAYAKALHSLVTWLDICDGNMAEGSFRVDANVSVRPKGQEEFGTRREIKNLNSFRFLEQAINYEAEAQIEILEDGGKVQQATMLFDPEKGETRVMRLKEDAHDYRYFPDPDLLPVIISDAQMQKAKAEMPELPKEMAARFVADYGVSEYDARLLTASRAQAAYFEEAAKESGQGKLTANWMNGELAAALNKEGMELADSPITAPRLAALVGKIADGTLSSKLAKKAFEAMWAEPEATIAEIIEKHGLQQMTDTGEIEAMVDEVLANNAKAVEQFKSGNEKALNAIVGQVMKASKGKANPAQVQELIKAKLA

SEQ ID NO: 6744 - protein, 1371 aa, Neisseria meningitidis
  misc_feature 1367, 1368, 1369: 'Xaa' is any amino acid
MNKGLHRIIFSKKHSTMVAVAETANSQGKGKQAGSSVSVSLKTSGDLCGKLKTTLKTLVCSLVSLSMVLPAHAQITTDKSAPKNQQVVILKTNTGAPLVNIQTPNGRGLSHNRYTQFDVDNKGAVLNNDRNNNPFVVKGSAQLILNEVRGTASKLNGIVTVGGQKADVIIANPNGITVNGGGFKNVGRGILTTGAPQIGKDGALTGFDVRQGTLTVGAAGWNDKGGADYTGVLARAVALQGKLQGKNLAVSTGPQKVDYASGEISAGTAAGTKPTIALDTAALGGMYADSITLIANEKGVGVKNAGTLEAAKQLIVTSSGRIENSGRIATTADGTEASPTYLSIETTEKGAAGTFISNGGRIESKGLLVIETGEDISLRNGAVVQNNGSRPATTVLNAGHNLVIESKTNVNNAKGPATLSADGRTVIKEASIQTGTTVYSSSKGNAELGNNTRITGADVTVLSNGTISSSAVIDAKDTAHIEAGKPLSLEASTVTSDIRLNGGSIKGGKQLALLADDNITAKTTNLNTPGNLYVHTGKDLNLNVDKDLSAASIHLKSDNAAHITGTSKTLTASKDMGVEAGSLNVTNTNLRTNSGNLHIQAAKGNIQLRNTKLNAAKALETTALQGNIVSDGLHAVSADGHVSLLANGNADFTGHNTLTAKADVNAGSVGKGRLKADNTNITSSSGDITLVAGNGIQLGDGKQRNSINGKHISIKNNGGNADLKNLNVHAKSGALNIHSDRALSIENTKLESTHNTHLNAQHERVTLNQVDAYAHRHLSITGSQIWQNDKLPSANKLVANGVLALNARYSQIADNTTLRAGAINLTAGTALVKRGNINWSTVSTKTLEDNAELKPLAGRLNIEAGSGTLTIEPANRISAHTDLSIKTGGKLLLSAKGGNAGAPSAQVSSLEAKGNIRLVTGETDLRGSKITAGKNLVVATTKGKLNIEAVNNSFSNYFPTQKAAELNQKSKELEQQIAQLKKSSPKSKLIPTLQEERDRLAFYIQAINKEVKGKKPKGKEYLQAKLSAQNIDLISAQGIEISGSDITASKKLNLHAAGVLPKAADSEAAAILIDGITDQYEIGKPTYKSHYDKAALNKPSRLTGRTGVSIHAAAALDDARIIIGASEIKAPSGSIDIKAHSDIVLEAGQNDAYTFLKTKGKSGKIIRKTKFTSTRDHLIMPAPVELTANGITLQAGGNIEANTTRFNAPAGKVTLVAGEELQLLAEEGIHKHELDVQKSRRFIGIKVGKSNYSKNELNETKLPVRVVAQTAATRSGWDTVLEGTEFKTTLAGADIQAGVGEKARADAKIILKGIVNRIQSEEKLETNSTVWQKQAGRGSTIETLKLPSFESPTPPKLTAPGGYIVDXXXHT

SEQ ID NO: 6745 - protein, 127 aa, Neisseria meningitidis
MTDTDTQADRFEQMMWQAVDKLFEQHDGKLESMDGREQELVLIWRTEADIGNGSILQFVCNWGFPAAEKTCSVLKKIGAVHSAMLIHRAADALDKEIRRLQSEGKNLKEMWDITSRQQNRLTAEQSG

SEQ ID NO: 6746 - protein, 96 aa, Neisseria meningitidis; identical to SEQ ID NO: 4410

SEQ ID NO: 6747 - protein, 385 aa, Neisseria meningitidis
MKFATKAIHSSYDCDEHNRALMPPIYQNSMFALHEIGENVPYRYSRLSNPTRQILEDTVADLEHGAAGFAFSSGMAGIDAVWRTFLRPGDTIVAVADIYGGAYDLLVDVYQKWGVNVVFADLGNPDNLDELLKAHKVKLVWLETPSNPLLRLVDIKVLAAKAKAAGALVGIDNTFATPYLQQPLDMGCDFVFHSATKYLCGHSDVLMGIVVAKTKELAQPLHDMMVHTGAVAGPLDCWLVLRGIKTLALRMNAHCQNALEIARRLEAHPAIEKVFHPGLPSHEHYELAKTQMPKGIGGVVTVYLKNDTREAANSVIKNMKLVKMASSLGGVESLVNHCYSQSHSGVPHDVKMEMGIKVGLLRFSIGIEDADDIWNDISAALDTTL

SEQ ID NO: 6748 - protein, 192 aa, Neisseria meningitidis; identical to SEQ ID NO: 5124

SEQ ID NO: 6749 - protein, 222 aa, Neisseria meningitidis; identical to SEQ ID NO: 3618

SEQ ID NO: 6750 - protein, 121 aa, Neisseria meningitidis
MIAKHIDRFPLLKLDRVIDWQPIEQYLNRQRTRYLRDHRGRPAYPLLSMFKAVLLGQWHSLSDPELEHSLITRIDFNLFCRFDELSIPDYSHQPYSGLSEKDAYAVMTGYRPVKRVRPYAV

SEQ ID NO: 6751 - protein, 125 aa, Neisseria meningitidis; identical to SEQ ID NO: 348

SEQ ID NO: 6752 - protein, 406 aa, Neisseria meningitidis
LVNSFQGEAASKIKTTFSDDYVAKQFAHALAGCVSGLVQGKCKDGAIGAAVGEIVADSMLGGRNPATLSDAEKHKVISYSKIIAGSVAALNGGDVNTAANAAEVAVVNNALNFDSTPTNAKKHQPQKPDKTALEKIIQGIMPAHAAGAMTNPQDKDAAIWISNIRNGITGPIVITSYGVYAAGWTAPLIGTAGKLAISTCMANPSGCTVMVTQAAEAGAGIATGAVTVGNAWEAPVGALSKAKAAKQAAPKETINNLANLAKAEQQILFRIAQRDTQLDAWKTGFNNRVRKGAGLLDASNIPITINGKTIKPVQAISLKGAPVYSGVSEQEIFALYRQMTGQNPNFRVLPDGRLANGIISTGEWAGTKIALRNFSKTENSTQARWTLDLQNPPSFIKGTKLELKFQ

SEQ ID NO: 6753 - protein, 98 aa, Neisseria meningitidis; identical to SEQ ID NO: 3727

SEQ ID NO: 6754 - protein, 245 aa, Neisseria meningitidis; identical to SEQ ID NO: 4995

SEQ ID NO: 6755 - protein, 61 aa, Neisseria meningitidis
MYHYQSDATQFLNRLIEEKPELEQQRLENRGLLWDVELNPEEQENFEAAKVAKKPYTYYQD

SEQ ID NO: 6756 - protein, 112 aa, Neisseria meningitidis
MTYRELVERQLAVRHADLELGLSRAREQEPFVIHVSDLLDKAGIEYAVRMDKDFQTTFHLEYPITNYDTFKRAVWQTLGAYYCVCNDGDGLEIASNRPDGYAVRIVFGDVPV

SEQ ID NO: 6757 - protein, 277 aa, Neisseria meningitidis
MPHALVLQFPSAAALPSDFPLRLPEPDCADEKRMRFIVEEGFSLSEKDAALLGSRQIDHAVLPDMDFDELGLIVSDMDSTLITIECVDEIAAGVGLKNKVAEITERSMRGELDFEQSLRSRVALLAGLDERVLADVYENVLKLSPGAEFLLDECKRHDVKFLLVSGGFTFFTERLQQRLGFEYQHANVLEIENGRLTGRLKGRIIDAQAKADLLREYRSRLGLQPHQVLAVGDGANDIPMLKEAGIGVAYRAKPKARAAADACINFGGLERVRGLFG

SEQ ID NO: 6758 - protein, 288 aa, Neisseria meningitidis
MVAYRRNMPQGRQEKGEEMDKIRVAAVQMVSGVSPETNVAAMKRLVARAAEQGADWVLLPEYWVLMGANDTDKLALAEPLGGGRFQTALSETAKECGVVLFGGTVPLQSCEAGKVMNTLLVYGRDGVRTGLYHKMHLFGFSGLGERYAEADTIRAGGDVPHLSAEGVPVAAGICYDVRFPEFFRRQLPFDVLMLPAAFTHTTGKAHWELLLRARAVENQCYVVAAAQGGLHENGRRTFGHSMIVDPWGDVLDVLPEGEGVVTADIDANRLNSVRNRLPALKYRVLDAV

SEQ ID NO: 6759 - protein, 350 aa, Neisseria meningitidis
MPSEAFRRHRAYRENKLQPLVSVLICAYNVEKYFAQSLAAVVNQTWRNLDILIVDDGSTDGTLAIAQRFQEQDGRIRILAQPRNSGLIPSLNIGLDELAKSGGGGGEYIARTDADDIAAPDWIEKIVGEMEKDRSIIAMGAWLEVLSEEKDGNRLARHHEHGKIWKKPTRHEDIADFFPFGNPIHNNTMIMRRSVIDGGLRYNTERDWAEDYQFWYDVSKLGRLAYYPEALVKYRLHANQVSSKYSIRQHEIAQGIQKTARNDFLQSMGFKTRFDSLEYRQIKAVAYELLEKHLPEEDFERARRFLYQCFKRTDTLPAGAWLDFAADGRMRRLFTLRQYFGILHRLLKNR

SEQ ID NO: 6760 - protein, 615 aa, Neisseria meningitidis
MHDTRTMMIKPTALLLPALFFFPHAYAPAADLSENKAAGFALFKNKSPDTESVKLKPKFPVLIDTQDSEIKDMVEEHLPLITQQQEEVLDKEQTGFLAEEAPDNVKTMLRSKGYFSSKVSLTEKDGAYTVHITPGPRTKIANVGVAILGDILSDGNLAEYYRNALENWQQPVGSDFDQDSWENSKTSVLGAVTRKAYPLAKLGNTQAAVNPDTATADLNVVVDSGRPIAFGDFEITGTQRYPEQIVSGLARFQPGMPYDLDLLLDFQQALEQNGHYSGASVQADFDRLQGDRVPVKVSVTEVKRHKLETGIRLDSEYGLGGKIAYDYYNLFNKGYIGSVVWDMDKYETTLAAGISQPRNYRGNYWTSNVSYNRSTTQNLEKRAFSGGVWYVRDRAGIDARLGAEFLAEGRKIPGSAVDLGNSHATMLTASWKRQLLNNVLHPENGHYLDGKIGTTLGTFLSSTALIRTSARAGYFFTPENKKLGTFIIRGQAGYTVARDNADVPSGLMFRSGGASSVRGYELDSIGLAGPNGSVLPERALLVGSLEYQLPFTRTLSGAVFHDMGDAAANFKRMKLKHGSGLGVRWFSPLAPFSFDIAYGHSDKKIRWHISLGTRF

SEQ ID NO: 6761 - protein, 269 aa, Neisseria meningitidis
MPDFSMSNLAVAFSITLAAGLFTVLGSGLVMFSKTPNPRVLSFGLAFAGGAMVYVSLTEIFSKSSEAFAEIYDKDHAFAAATMAFLAGMGGIALIDRLVPNPHETLDAQDPSFQESKRRHIARVGMMAAFAITAHNFPEGLATFFATLENPAVGMPLALAIAIHNIPEGISIAAPVYFATRSRKKTVWACLLSGLAEPLGAALGYLVLQPFLSPAVFGSVFGVIAGVMVFLALDELLPAAKRYSDGHETVYGLTTGMAVIAVSLVLFHF

SEQ ID NO: 6762 - protein, 109 aa, Neisseria meningitidis
MTDKSKTEKLISSDDKQSVIDGILDMVFNSKAYEVPWISEKLMELSKNKDLDIAGLSLTCFGHLARLHSNIGDYDKVIPLLHSKQDDPELQGRAEDALEDISLFLSENH

SEQ ID NO: 6763 - protein, 103 aa, Neisseria meningitidis; identical to SEQ ID NO: 392

SEQ ID NO: 6764 - protein, 596 aa, Neisseria meningitidis
MRYKPLLLALMLVFSTPAVAAHDAAHNRSAEVKKQTKNKKEQPEAAEGKKEKGKNGAVKDKKTGGKEAAKEGKESKKTAKNRKEAEKEATSRQSARKGREGDKKSKAEHKKAHGKPVSGSKEKNAKTQPENKQGKKEAKGQGNPRKGGKAEKDTVSANKKVRSDKNGKAVKQDKKYREEKNAKTDSDELKAAVAAATNDVENKKALLKQSEGMLLHVSNSLKQLQEERIRQERIRQARGNLASVNRKQREAWDKFQKLNTELNRLKTEVAATKAQISRFVSGNYKNSQPNAVALFLKNAEPGQKNRFLRYTRYVNASNREVVKDLEKQQKALAVQEQKINNELARLKKIQANVQSLLKKQGVTDAAEQTESRRQNAKIAKDARKLLEQKGNEQQLNKLLSNLEKKKAEHRIQDAEAKRKLAEARLAAAEKARKEAAQQKAEARRAEMSNLTAEDRNIQAPSVMGIGSADGFSRMQGRLKKPVDGVPTGLFGQNRSGGDIWKGVFYSTAPATVESIAPGTVSYADELDGYGKVVVVDHGENYISIYAGLSEISVGKGYMVAAGSKIGSSGSLPDGEEGLYLQIRYQGQVLNPSSWIR

SEQ ID NO: 6765 - protein, 230 aa, Neisseria meningitidis
VQADLAYAAERITHDYPKATGTDKDKISTVSDYFRNIRAHSIHPRVSVGYDFGGWRIAADYASYRKWSNNKYSVNTKVLKENQGNRIKLKTENQGNGTFHASSSLGLSAIYDFKLNDKFDKFKPYIGARVAYGHVKHQVHSVETKTTIYTTAPTGDATVGGTIPERPSSKPAYHESNSISSLGLGVIAGVGFDITPKLTLDTGYRYHNWGRLENTRFKTHEVSLGMRYHF

SEQ ID NO: 6766 - protein, 350 aa, Neisseria meningitidis; identical to SEQ ID NO: 928

SEQ ID NO: 6767 - protein, 181 aa, Neisseria meningitidis
MLKTSFAVLGGCLLLAACGKSENTAEQPQNAVQSAPKPVFKVKYIDNTAIAGLDLGQSSEGKTNDGKKQISYPIKGLPEQNVIRLIGKHPGDLEAVSGKCMETDDKDSPAGWAENGVCHTLFAKLVGNIAEDGGKLTDYLVSHAALQPYQAGKSGYAAVQNGRYVLEIDSEGAFYFRRRHY

SEQ ID NO: 6768 - protein, 462 aa, Neisseria meningitidis
MNAVVVAVIVMLVLSLSRVHVVLSLTVGAFVGGAVAGMPLQNIADAAGQVSQAGIIPVFNKGLEGGAKIALSYAMLGAFAMAITHSGLPQQLAGAVVRKLNRGGMPDSVRSGEGAVKWLLLSIILVMGMMSQNIIPIHIAFIPMIVPPLLLVFNRLKIDRRLIACVITFGLVTTYMFLPYGFGAIFLNEILLGNIHSAAPQLDVKNINVMAAMAIPALGMLAGLLLAFVHYRKPRLYQSNNADTAGNADAANRPQPSAYRSLAAAVAIAVCFAIQLMYEDSLVLGAMLGFAVFMMLGVINRDKANDVFGEGIKMMAMVGFIMIAAQGFAAVMNATGHIQPLVESSMAIFGNSKGMAALAMLVVGLLVTMGIGSSFSTLPIIAAIYVPLCVGLGFSPLATVAIVGTAGALGDAGSPASDSTLGPTMGLNADGQHDHIRDSVIPTFIHYNIPLLIAGWIAAMVL

SEQ ID NO: 6769 - protein, 446 aa, Neisseria meningitidis
MNKQPLSLAVVGHTNTGKTSLLRTLLRDSGFGEVKNAPSTTRHVEEAAISDGADTLVFLYDTPGLEDAGGVLEWLENHTDNRSDGIERLQQFLGSHGAHHDFNQEAKVLRQVLQSDMAMYVIDAREPVLDKYRDELTILSWCAKPVMPVFNFTGGQLPESWTTMLARRNLHVFAGFDTVAFDFEGELRLWENLATMLPERSTLDRLTAMRRREWQRLDGEARREIADFLIDAAAFRQEVDENEDTATVLQTMQAEIRQLERQMQQRLFALYRFYHSEIDGGDWMPQAFRQDPFDSELLKQYGIRTGTGAATGALIGLGLDIATLGGSLGLGTAIGGFLGGILPNTRTISDKLAGRQTLHTDPETLTLLAARALDLLHVLQTRGHAAQSDIELHSRKVPWDAARLPPELNKARSHWKWSSLNTHRPETSRAERREYAEKLGIRLAGK

SEQ ID NO: 6770 - protein, 79 aa, Neisseria meningitidis; identical to SEQ ID NO: 831

SEQ ID NO: 6771 - protein, 37 aa, Neisseria meningitidis
LQNSPKFPPRHLGDFGEFCKGLGQYFERSARKFVWKP

SEQ ID NO: 6772 - protein, 42 aa, Neisseria meningitidis
VRDMCHAELSAWFEDILSSLGIKTPKEEGVIVSKRLRKPEGK

SEQ ID NO: 6773 - protein, 469 aa, Neisseria meningitidis
MPHIDFDTIPGSIRVPGQYIEFNTRNAVQGLPQNPQKVLMVAPMLTAGIQPALEPVQLFSDAEAADLFGQGSLAHLMVRQAFANNPYLDLTVIGIADHSAGVQATATVTLSGTATAPGVVEITIGGKQVSTAVNTGETAATVADRLKTAITAADVTVTASGSGAAVTLTAKHKGEIGNESGLTVSTGNTGLTYQANAFTGGAKNADIATALSKVAGKHYHIICSPFSDDANAKALSNHITNVSNAIEQRGCIGVLGMSAALSTATTATGEINDGRMTCAWYKGAVEPNGIIAAGYAAVLAFEEDPAKPLNTLEIKGLAVTPDAQWPLFAECNNALYNGLTPLTVVNNRVQIMRAVSTYTKSANNTDDPALLDITTIRTLDYVRRSVKERIALRFPRDKLSDRLLPKVKSEILDVLIKLDQAEIIENAEANKGKLVVARAQNDPNRVNAIIPADVVNGLHVFAGRIDLIL

SEQ ID NO: 6774 - protein, 177 aa, Neisseria meningitidis
MSRVAKNPVTVPAGVEVKFGAEALVIKGKNGELSFPLHSDVAIEFNDGKLTFVANNSSKQANAMSGTARALVSNMVKGVSEGFEKRLQLIGVGYRAQAQGKILNLSLGFSHPIVYEMPEGVSVQTPSQTEIVLTGSDKQVVGQVAAEIRAFRAPEPYKGKGVRYVGEVVVMKEAKKK

SEQ ID NO: 6775 - protein, 153 aa, Neisseria meningitidis; identical to SEQ ID NO: 750

SEQ ID NO: 6776 - protein, 398 aa, Neisseria meningitidis
MPSEPFGRHNATNTLISITQDDTMTHIKPVIAALALIGLAACSGSKTEQPKLDYQSRSHRLIKLEVPPDLNNPDQGNLYRLPAGSGAVRASDLEKRRTPAVQQPADAEVLKSVKGVRLERDGSQRWLVVDGKSPAEIWPLLKAFWQENGFDIKSEEPAIGQMETEWAENRAKIPQDSLRRLFDKVGLGGIYSTGERDKFIVRIEQGKNGVSDIFFAHKAMKEVYGGKDKDTTVWQPSPSDPNLEAAFLTRFMQYLGVDGQQAENASAKKPTLPAANEMARIEGKSLIVFGDYGRNWRRTVLALDRIGLTVVGQNTERHAFLVQKAPNESNAVTEQKPGLFKRLLGKGKAEKPAEQPELIVYAEPVANGSRIVLLNKDGSAYAGKDASALLGKLHSELR

SEQ ID NO: 6777 - protein, 163 aa, Neisseria meningitidis
MSTETKNYITPAGWQALKDELYQLVNKERPEIVQIVNWAAGNGDRSENGDYLYGKRRMREIDRRIRFLTKRLEAAVVVDPELREATDQVFFGATVGLLRDDGREQTVKIVGIDEIDTAQNKISWISPLARCLIKAREGDEVVLNTPEGREEIEILSVEYIKID

SEQ ID NO: 6778 - protein, 823 aa, Neisseria meningitidis
MKKTCFHCGLDVPENLHLTVRYEGEDRETCCAGCQAVAQSIIDAGLGSYYKQRTADAQKTELPPQEILDQIRLYDLPEVQSDFVETHGGTREAVLMLGGITCAACVWLIEQQLLRTDGIVRIDLNYSTHRCRVVWDDGKIRLSDILLKIRQIGYTAAPYDAQKIEAANQKERKQYIVRLAVAGLGMMQTMMFALPTYLYGSDIEPDFLQILHWGGFLMVLPVVFYCAVPFYQGALRDLKNRRVGMDTPITVAIIMTFIAGVYSLATNAGQGMYFESIAMLLFFLLGGRFMEHIARRKAGDAAERLVKLIPAFCHHMPDYPDTQETCEAAVVKLKAGDIVLVKPGETIPVDGTVLEGSSAVNESMLTGESLPVAKMPSEKVTAGTLNTQSPLIIRTDRTGGGTRLSHIVRLLDRALAQKPRTAELAEQYASSFIFGELLLAVPVFIGWTLYADAHTALWITVALLVITCPCALSLATPTALAASTGTLAREGILIGGKQAIETLAQTTDIIFDKTGTLTQGKPAVRRISLLRGTDEAFVLAVAQALEQQSEHPLARAILNCRVSSGSVPDIAIKQRLNRIGEGVGAQLTVNGETQVWALGRASYVAEISGKEPQTEGGGSAVYLGSQSGFQAVFYLTDPLKDSAAEAVRQLAGKNLTLHILSGDRETAVAETARALGVAHYRAQAMPEDKLEYVKALQKEGKKVLMIGDGINDAPVLAQADVSAAAAGGTDIARDGADIVLLNEDLRTVAHLLDQARRTRHIIRQNLIWAGAYNIIAVPLAVLGYVQPWIAALGMSFSSLVVLGNAMRLHKQVDMPSEKMPSEQ

SEQ ID NO: 6779 - protein, 419 aa, Neisseria meningitidis
MHVSELQTLHISKLLELAEEHGIENANRFRKQDLVFAIVRQMMKKGEGFTCSGTLEILPDGFGFLRSADTSYLAGPDDIYVSPTQIRRFNLHTGDTIEGSVRVPKDNERYFALVRLDTINGDHPEVCRHKILFENLTPLFPTEQLKLERDLKSEENLTGRAIDLISPIGKGQRALLVAPPKSGKTVMLQNIAHAVTANYPEVELIVLLIDERPEEVTEMSRSVRGEVVSSTFDEPAQRHVQVAEMVLEKAKRMVEHKKDVVILLDSITRLARAYNTVVPTSGKILTGGVDANALHRPKRFFGAARNVEEGGSLTIIATALVETGSRMDDVIYEEFKGTGNMELHLDRRMAEKRLFPAININKSGTRREELLVPNDQLQRMWLLRKFLHPMDEIEAAEFLIGKIKASKNNDDFFELMRGK

SEQ ID NO: 6780 - protein, 136 aa, Neisseria meningitidis; identical to SEQ ID NO: 1774

SEQ ID NO: 6781 - protein, 119 aa, Neisseria meningitidis; identical to SEQ ID NO: 2176

SEQ ID NO: 6782 - protein, 38 aa, Neisseria meningitidis; identical to SEQ ID NO: 6664

SEQ ID NO: 6783 - protein, 258 aa, Neisseria meningitidis
MSDNALTSSRRFGGIARLYGDSALAHFSQAHVCVVGVGGVGSWAVEALARTGIGRLTLIDLDNVAESNVNRQLHALTGDFGKAKVTALRERITQINPQCEVFEIEDFVTEDNLPEYFGKGFDFVIDAIDQVRVKAAMAAYFVERKQPFVLSGGAGGQKNPALIQTADLSRVTHDPLLANLRYTLRKRYGFSRDTKANMRVPCVYSTENIVPPQSREACSADAAPQGLSCAGYGASMLVTASFGLYCAQAAVEHIADKK

SEQ ID NO: 6784 - protein, 389 aa, Neisseria meningitidis
MTAHKILPVLLSIILGVSHATAASPAPNRPTVHAAPTFQTPETLTAAHIVIDLQSKQILSAKNINTPVEPAALTQLMTAYLVFKNMKSGNIQSEENLKIPESAWASEGSRMFVRPGDTVSTDKLLKGMIALSANDAALTLAGRLGNGSIENFVQQMNKEARRLGMKNTVFKNPTGLSREGQVSTAKDLALLSEALMRDFPEYYPLFSIKSFKFKNIEQNNRNILLYRDNNVNGLKAGHTESGGYNLAVSYSGNGRHILVITLGSESAETRASDNSKLLNWALQAFDTPKIYPKGKTVAQIQISGGSKKTVRAGFLKEAYITLPHKEAKMAEQILETIQPIPAPVKKGQILGKIKIRQNGYTIAEKEIVALENVKKRSRWQRLWACLTGQ

SEQ ID NO: 6785 - protein, 156 aa, Neisseria meningitidis; identical to SEQ ID NO: 955

SEQ ID NO: 6786 - protein, 515 aa, Neisseria meningitidis
MQLNPAEISDLIKAKIENLSVNAEVRTCGTVISVTDGIVRIHGLSDAMQGEMLEFPGNTFGLAMNLERDSVGAVVLGEYEHIKEGDTVTCTGRILEVPVGRELVGRVVDALGRPIDGKGPINTTLTAPIEKIAPGVIARKSVDQPMQTGLKAIDSMVPVGRGQRELIIGDRQTGKTAVALDAIVNQKGTGVICIYVAIGQKASSIANVVRKLEEHGAMEHTIVVAATASEAAALQYIAPYSGCTMGEFFRDRGEDALIVYDDLSKQAVAYRQISLLLRRPPGREAYPGDVFYLHSRLLERAARVNEHEVEKLTNGEVKGKTGSLTALPIIETQAGDVSAFVPTNVISITDGQIFLETDLFNAGIRPAINAGISVSRVGGAAQTKVIKKLGGGIRLALAQYRELAAFSQFASDLDEATRKQLEHGEVVTELMKQKQFSTLNTAEMALTLWAINNGSYSDVPVAKALAFESEFLSFVRTQHPEVLEAVNASGAMSDESEKTLEAAMKSFKSSYAYQA

SEQ ID NO: 6787 - protein, 259 aa, Neisseria meningitidis
MFFVLSPAKNLNEKDPAPVSEFTQPDLLAESDILMQQLRELAPQQIAELMHVSDKIALLNAQRNAEWNTPFTPENAKQAVFMFNGDVYEGMDANTLDIGQIRYLQNHVRLLSGLYGLLRPLDLIQPYRLEMGTAFANLRGKNLYEFWGDIITNLLNDTLAQAGSNTLVNLASQEYFKSVNTKKLRARLITPIFKDEKNGKYKIISFYAKRARGLMVRYAAEHHITDPEMLKNFNYEGYAFNDAASNESEWVFMRSEQIK

SEQ ID NO: 6788 - protein, 425 aa, Neisseria meningitidis
MRSSDILIVDDEIGIRDLLSEILQDEGYSVALAENAEEARKLRHQARPAMVLLDIWMPDCDGITLLKEWAKNGQLNMPVVMMSGHASIDTAVEATKIGAIDFLEKPISLQKLLSAVENALKYGAAQTETGPVFDKLGNSAAIQEMNREVGAAVKCASPVLLTGEAGSPFETVARYFHKNGTPWVSPARVEYLIDMPMELLQKAEGGVLYVGDIAQYSRNIQAGIAFIVGKAEHRRVRVVASGSRAAGSDGIACEEKLAELLSESVVRIPPLRMQHEDIPFLIQGIACNVAESQKIAPASFSEEALAALTRYDWPGNFDQLQSVVATLLLEADGQEIGAGAVSSLLGQNVPAEGAEDMVGGFNFNLPLRELREEVERRYFEYHIAQEGQNMSQVAQKVGLERTHLYRKLKQLGIGVSRRAGEKTEE

SEQ ID NO: 6789 - protein, 172 aa, Neisseria meningitidis
MPKLHMFYLGGNAGRSNIEVHDIQFAVCDNYREAVPALKAAWFGDADKIHIDGWQIVEWADGYDIAVSETPKTKMPSEHAPRLYFANVGGYRAGQLAEAHAFGLFAAATPAEAKQKALQTLLTDSYVQQHKDNLKDVDNLLALDRIGNFHIRLTPNPHGKPAEIGFQGYLPI

SEQ ID NO: 6790 - protein, 640 aa, Neisseria meningitidis
MIEIKNLTLQRGLKVLLDKANATVNPGQRVGLIGKNGTGKSSLFALIKGEITQDGGDVSIPKNWRLASVSQETPDLDISALDYVLQGDAELQAFQTALRQAEAQNDGMKQAEYHAKLEEIDAYTAPARAAKLLNGLGFSQEEHSRPVKSFSGGWRMRLNLAQALICRADLLLLDEPTNHLDLETVLWLENHLASLPCTQIIISHDRDFLNAETTQTIELSQQKLTQYGGNYDFYQNERAQRLAQQQAAYVKQQAQIKHLQSFIDRFKAKATKAVQAQSRMKALAKLERIAPAHLDSEFSFEFYHPDHLPNPLLKLEHADLGYEGKTVLHDITLSLESGARYGLLGVNGSGKSTFIKALAGTIDLLSGSIVRSEKLNIGYFAQHQLDTIRSDQNPVWHIQQLSPEVREQEIRNFLGGFNFVGDMALQKTEPFSGGEKARLALAMIIWQKPNLLLLDEPTNHLDLDMRHALTLALQSFQGALIVVSHDRSLLEATTDSFLLIDKGRLKNFDGDLNDYRQWRLAQENAAVAPAASAQSQSRKDTKRIEAQIRQEKARRGKPIQQKIDRAEKEMAQLSEIQTACEAFLAQEEAYFEENKEKLQDTLSELAKVKTQLAQIEEVWLACQEELEQIETEIEKQFAER

SEQ ID NO: 6791 - protein, 1071 aa, Neisseria meningitidis
MPKRTDLKSILIIGAGPIVIGQACEFDYSGAQACKALREEGYKVILVNSNPATIMTDPEMADVTYIEPIMWQTVEKIIAKERPDAILPTMGGQTALNCALDLARNGVLAKYNVELIGATEDAIDKAEDRGRFKEAMEKIGLSCPKSFVCHTMNEALAAQEQVGFPTLIRPSFTMGGSGGGIAYNKDEFLAICERGFDASPTHELLIEQSVLGWKEYEMEVVRDKNDNCIIICSIENFDPMGVHTGDSITVAPAQTLTDKEYQIMRNASLAVLREIGVDTGGSNVQFAVNPANGEMIVIEMNPRVSRSSALASKATGFPIAKVAAKLAVGFTLDELRNDITGGKTPASFEPSIDYVVTKIPRFAFEKFPAADDRLTTQMKSVGEVMAMGRTIQESFQKALRGLETGLCGFNPRSEDKAEIRRELANPGPERMLFVADAFRAGFTLEEIHEICAIDPWFLAQIEDLMKEEKAVSDGILSDLDFAALRRLKRKGFSDKRLAQLLNVSEKEVREHRYALKLHPVYKRVDTCAAEFATETAYLYSTYEEECESRPSDRKKVMILGGGPNRIGQGIEFDYCCVHAALALRESGFETIMVNCNPETVSTDFDTSDRLYFEPLTLEDVLEIVRTENPWGVIVHYGGQTPLKLANALVENGVNIIGTSADSIDAAEDRERFQKVLNDLGLRQPPNRIAHNEEEALVKAEEIGYPLVVRPSYVLGGRAMQVVHSAEELQKYMREAVQVSEDSPVLLDFFLNNAIEVDVDCVSDGKDVVIGGIMQHVEQAGIHSGDSGCSLPPYSLSEEIQDEIRRQTKAMAYALGVVGLMNVQFAVQDGVVFVLEVNPRASRTVPFVSKATGVPLAKVGARCMAGISLKEQGVEKEVVPDFYAVKEAVFPFIKFPGVDTILGPEMRSTGEVMGVGASFGEAYYKAQLGAGERLNPTGKIFLSVREEDKERVIKTAKNFQVLGYGICATRGTAQYLTEHGLIVQTINKVPEGRPHIGDALKNGEIALVVNTVSSDPQSVSDSHIIRQSALQQRVPQYTTTAGGEAMSEGAKSRDHLGVYSVQELHGRLKNRN

SEQ ID NO: 6792 - protein, 226 aa, Neisseria meningitidis
MERYKNAVGEDKAAELYLLNLSLSRELFHVVSIFEIVLRNKIDICLQQAFKDRNWLYNSIQPQTNPALKYQGCFLRNGTKESAELIKVALSKIQNNSGGKFDHNQLVAGLGFGFWRYLFAGGKDAQFDATGKVLMKVFPKKPKSTPSVQYNQKWIFRELSNINKFRNRLAHHEPICFKGAIKDTNYARNIHQSIFELLNYMDVDTASVFSHFSDQVIAVCDEIDKL

SEQ ID NO: 6793 - protein, 96 aa, Neisseria meningitidis; identical to SEQ ID NO: 3537

SEQ ID NO: 6794 - protein, 328 aa, Neisseria meningitidis; identical to SEQ ID NO: 372

SEQ ID NO: 6795 - protein, 205 aa, Neisseria meningitidis
MTFPPLKSPLKFYAVVPTADWVGRMVKAGADTVQLRCKALHGDELKREIARCAAACQGSRTQLFINDHWREAIEAGAYGVHLGQEDMDTADLAAIAAAGLRLGLSTHSVAELDRALSVHPSYIASGAIFPTTTKQMPTAPQGLDKLREYVKQAGGTPVVAIGGIDLNNARAVLATGVSSLAAVRAVTEAANPEAVVKAFQALWDG

SEQ ID NO: 6796 - protein, 133 aa, Neisseria meningitidis
MNTTRLPTALVLGCFCAAASAPDNSIMTKGQKVYESNCVACHGKKGEGRGTMFPPLYRSDFIMKKPQVLLHSMVKGINGTIKVNGKTYNGFMPATAISDADIAAVATYIMNAFDNGGGSVTEKDVKQAKSKKN

SEQ ID NO: 6797 - protein, 163 aa, Neisseria meningitidis; identical to SEQ ID NO: 3672

SEQ ID NO: 6798 - protein, 261 aa, Neisseria meningitidis
VKHISSTNNEHIRHLHRLLSQGKFRRQYAQTVLEGVHLLQVFLQSGGMPVGVYIPEAKMPSEEVRKLTAVLPEDGFFSVSDGILKKISSLTCADDVLALIDIPDAGALPAGGDCVVLDGVQDPGNVGTVLRSAAAAGIGAVILGKGCADAWSPKVLRAGMGAHFLSEIYPQADLEIWLVRYKGRVFATALREEKQAVLYGEDLCEPTAWVFGNEGAGVGKAVLDRADKCVRIPMHDATESLNVAMAATICLFEQMRQRAAY

SEQ ID NO: 6799 - protein, 576 aa, Neisseria meningitidis
MCNAPADNFKETAMSASQLLSRLTQTVGEKYIITDPAKTEQYRQGYRFGEGKALAVVRPGSILEMWKILQACVEADVIVITQAANTGLTGGSTPDGNDYDRDIVIVNTMRMNIIQTINNNEQVVCLPGSTLNQLELLLKPLGREPHSVIGSSCIGASVLGGVCNNSGGALVQRGPAYTEMALFAQINEEGRLELVNHLGIDLGNTPEEILTNLQGHHYQNKDITQDAGKGHDHAYCEHVRQVDEPTAARFNADPARHYEASGCAGKLMVFAVRLDTFPQEKQTAVFYIGTNDINELTDIRRAALGEFESLPVSGEYIHRHAFDIADVYGKDTFYVIKKFGTHQLPKLFDLKARVDRFGKKVSFLPKHFSDKAMQFVSKFLPDHLPKSMRDYRDKYEHHLILKMGGKGVDEARAFLKEYFAHHGGAFFECNAEETQAAMLHRFAVASAAIRYRAVHDDEVEDLVALDIALRRDDRDWFEKLPPEIDNKIIHKLYYGHFMCHVFHQDYIIKKGNDCMALEHEMLHLLDQRGAQYPAEHNVGHLYEAKPALKQFYRKLDPTNSFNPGVGKTSKKKNWAE

SEQ ID NO: 6800 - protein, 121 aa, Neisseria meningitidis; identical to SEQ ID NO: 1070

SEQ ID NO: 6801 - protein, 83 aa, Neisseria meningitidis; identical to SEQ ID NO: 5347

SEQ ID NO: 6802 - protein, 146 aa, Neisseria meningitidis
MMQTFRKISRYVATLWLGMQIMAGYIAAPVLFKMLPKMQAGEIAGVLFDILSWSGLAVWGAVLAAAFAALTRRQTALLLFLLSALAANRFLITPVIEALKYGHENWLLSFVGGSFGMWHGISSIVFMATALLSAVLSWRLSGKDAV

SEQ ID NO: 6803 - protein, 481 aa, Neisseria meningitidis
MSTQTNFDLVLFGATGDLAMRKLLPCLYQAHVAGLLHPEGRILGVSRSELDTEGFLAKVETSSKIHVKENFSDEAWASFVERFAYLKVDVTQPDDFAALGDLVKARKETDNVVIYLSTAPKFFAQACENLAAIGLNADNVRVVLEKPLGTDLASSQQINTDVARYFKEGQIYRIDHYLGKESLQNLLALRFANVMFEPLWNNKYIESVQLTIAEQLGVEERGEFYDITGALRDMVQNHLMQMLCMTAMEAPASLDADAVRDEKVKVIKSLKPLTVESVNENVVRGQYTAAKGMNGYLEEINVPQDSFTETYVAIKAEIENERWKGVPFYLRTGKRMAGKVAEIVLNFKDLNSHIFEGSRTAPNRLVIELQPYESVRLYTQMKTPGAGNKVETVPLATDLGKALESRRAEAYERLLLDVINGKLALFNRRDELEAAWEYVMPILENWTNNTTPPHGYGAHSWGPEAARELLARDGHKWHEEQ

SEQ ID NO: 6804 - protein, 166 aa, Neisseria meningitidis
LPQCRLKPFRRHYPAKCSNNMPKATFYTHVAQVPIFTCRLIARAIRDGGRILVWSDSFGQLQELDKMLWQYEAESFIPHEIWETEEAMPSEPSVLLACGGNLPRIPEGMTVLNLSDGFWNTAPVLPARVLEIVGNSLEELADARERFTAYRRSGFAIEHHGMEGKA

SEQ ID NO: 6805 - protein, 305 aa, Neisseria meningitidis
MKKTKVHLISGFLGTGKTTALKSLMAQKDPNEKWVIIVNEFGEIGIDGAVLSDNGIPVAEIAGGCLCCTAGPQMGVTVQKMLRDAKPDRLMIEASGLAHAASVIDELKTKPLDSLLEIGAVFTVVDPRQFINPDYAQQALYKDQIGICDVLVASKTDLCTPEQLAEFHDKAAKLFPPKAKVVEVQNAQLDIQWLDIPVIEKSRYRLKALPDNTMGFQSQGFTFPAGRDFDGEKLTNFFNDLPNMTEGLVRAKGVFQVLGTWVWLNWVDGQWGANQVSWRRDSRFELIAKSFDADLIEQKLKDALE

SEQ ID NO: 6806 - protein, 237 aa, Neisseria meningitidis
MKIKLPLFIIWLSVSASCASVSPVPAGSQTEMSTRENASDGIPYPVPTLQDRLDYLEGKIVRLSNEVETLNGKVKALEHAKTHSSGRAYVQKLDDRKLKEHYLNTEGGSASAHTVETAQNLYNQALKHYKSGKFSAAASLLKGADGGDGGSIAQRSMYLLLQSRARMGNCESVIEIGGRYANRFKDSPTAPEAMFKIGECQYRLQQKDIARATWRSLIQTYPGSPAAKRAAAAVRKR

SEQ ID NO: 6807 - protein, 266 aa, Neisseria meningitidis
MNAFNLIIIGDEILHGSSQDKHFAFFKSLLESKGLKLNQVQYLPDEPDLLVRQLRRSFSDGMPTFVTGGIGATPDDHTRQAAAAALDLPVVRHSEAAKFIEGITQKRGEPLDSPEHAQRLKMADFPEGAELVPNPFNNIAGFSIREHYFFPGFPVMAHPMAEWVLETYYADRFNQTERGSRSVYVFEQPESRITPLMEHIEQTYPGVRSYSLPSVGWTHSDGTQVKPHIEFGIKAEGEAVNLLDAAWAEVLHSLDGLGAELKNRVN

SEQ ID NO: 6808 - protein, 348 aa, Neisseria meningitidis
MKMQAVVVNKNVAGDVEVVEREVRPLEYGEALVEVEYCGVCHTDLHVAAGDYGDKPGRVLGHEGIGLVKEVADGVKNLKVGDRVSIAWLFQSCGSCEYCNTGRETLCRSVLNAGYTADGGMATHCIVSADYAVKVPEGLDPAQASSITCAGVTTYKAIKVSGVRPGQWIAIYGAGGLGNLGVQYAKKVFGAHVVAIDINDDKLAFAKETGADLVVNAAKEDAAKVIQEKTGGAHAAVVTAVSAAAFNSAVNCVRAGGRVVAIGLPPESMDLSIPRLVLDGIEVVGSLVGTRKDLEEAFQFGAEGLVVPKVQLRALDEAPAIFQEMREGKITGRMVIDMKKECGCGHHH

SEQ ID NO: 6809 - protein, 90 aa, Neisseria meningitidis; identical to SEQ ID NO: 1115

SEQ ID NO: 6810 - protein, 110 aa, Neisseria meningitidis; identical to SEQ ID NO: 4156

SEQ ID NO: 6811 - protein, 404 aa, Neisseria meningitidis
MTVKTPVYLDYAATTPVDKRVAEKMIPYLTETFGNPASNSHSFGWEAEEAVEKARADIAALINADSKEIVFTSGATESNNLAIKGAAHFYKSKGNHLITVKTEHKAVLDTMRELERQGYEVTYLDVQENGLVDLDVLKAAIREDTILVSVMWVNNEIGVVQDIPAIGEICRERKIIFHVDAAQACGKVPVDVEAAKVDLLSMSGHKVYGPKGIGALYVRRKPRVRLEAQMHGGGHERGFRSGTLPTHQIVGMGEAFRIAKEELAQDTAHYLKLRDIFLKGIEGIEEVYINGDLEHRVPNNLNVSFNFVEGESLIMAVKELAVSSGSACTSASLEPSYVLRALGRNDELAHSSLRITFGRMTTEEEVQFAAELIKSKIGKLRELSPLWEMFKDGIDLNSIEWAAH

SEQ ID NO: 6812 - protein, 876 aa, Neisseria meningitidis
MQEQYRPAAIEPAAQKKWDDARIFNVSEDASKPKYYCLSMFPYPSGKLHMGHVRNYTIGDVLSRFKLLNGFNVMQPMGWDAFGMPAENAAMKNNVAPAAWTYDNIEYMKTQLKSLGFAIDWARETATCKPEYYRWEQWLFTKLFEKGIVYRKNGTVNWDPVDQTVLANEQVIDGRGWRSGALIEKREIPMYYFKITDYAEELLNDLDKLEHWPEQVKTMQRNWIGKSRGMTVRFAVSDDSKQGLEGDYAKFLQVYTTRPDTLMGATYVAVAAEHPLAAAAAADKPELQAFIAECKAGSVAEADMATMEKKGVPTGRYVVNPLNGDKLEVWIANYVLWGYGDGAVMAVPAHDERDFEFATKYNLPKKQVIAVGDNAFDENQWQEWYGDKENGVLVNSGDLDGLDFQTAFDAVAAKLQSQGAGEPKTQYRLRDWGISRQRYWGCPIPIVHCEQCGDVPVPADQLPVVLPENVVPDGMGSPLAKMPEFYETACPCCGGAAKRETDTMDTFMESSWYFFRYMSPKFSDGMVDPAAAKYWGAVDQYIGGIEHAILHLLYARFFTKLMRDEGLVNVDEPFERLLTQGMVVCETYYRENDKGGKDWINPADVELTFDDKGRPISAVLKADGLPVVISGTEKMSKSKNNGVDPQELINAYGADTARLFMMFAAPPEQSLEWSDSGVEGAHRFLRRLWRTVYEYLKQGEAVKAFAGSQDGLSKELKDLRHKLHATTAKVSDDYGRRQQFNTAIAAVMELLNQYDKTDTGGEQGRAVAQEVLETAVRLLWPIVPHICETLWSELNGAKLWEAGWPTVDEAALVKSEIEVMVQVNGKLRGKITVAADASKADLEAAALATEGAVKFMEGKPAKKIIVVPGRLVNIVV

SEQ ID NO: 6813 - protein, 144 aa, Neisseria meningitidis; identical to SEQ ID NO: 6

SEQ ID NO: 6814 - protein, 416 aa, Neisseria meningitidis
MFVPLAMLAGMFSYYETFHETEALQDDLLRQAALYVAPDSKPETLPEGDGDTRILVQMPQQEDPVVSLPAHLADGLHTLQADDDDDYYRVYIRTTEQGRIAVMQENEYREDLAADAARQSVLPLLAALPLMILLTVWITHKAMRPVRKLSQSLEQRRINDLSALSVDNIPSEIRGFVTAINLLLKRADEDIRHRQRFVADAAHELRTPMTALPLQAERLNNMPLPPDAARQPAVLQQSIRRNKHLLEQLLALARSQSDEIPLTKTTFGLQSRFRQVLQELMPLALEKCQDIGVAVGGDVEVSADETEIYTLIKTFADNAVRYTPPEGRIDLGFTDEGKYLAVWVEDNGKGIPESERARVLDPFYRILGTEQQGTGLGLSIADTLAKKYGGYLELSDSRRFGRGLLIRALLDKETLK

SEQ ID NO: 6815 - protein, 186 aa, Neisseria meningitidis
MKNLIAFNKPYGVICQFSPHEKHKSLKDFINLPGFYPAGRLDTDSEGLLLLTDDGRLQAQITDPKFKHPKTYWAQLEGVPDESRLESLRKGIDLGGFVTRPASIRILKHGEADSLWERIPPIRVRKTVPDFWIEITISEGKNRQVRRMTAKAGYPCLRLIRVASGRLKLFDLDLKPGEWAYAPFKP

SEQ ID NO: 6816 - protein, 371 aa, Neisseria meningitidis; identical to SEQ ID NO: 849

SEQ ID NO: 6817 - protein, 201 aa, Neisseria meningitidis
MTIYFKNGFYDDTLGGIPEGAVAVRAEEYAALLAGQAQGGQIAADSDGRPVLTPPRPSDYHEWDGKKWKISKAAAAARFAKQKTALAFRLAEKADELKNSLLAGYPQVEIDSFYRQEKEALARQADNNAPTPMLAQIAAARGVELDVLIEKVIEKSARLAVAAGAIIGKRQQLEDKLNTIETAPGLDALEKEIEEWTLNIG

SEQ ID NO: 6818 - protein, 508 aa, Neisseria meningitidis
MNPMYITFAIYLVAVLLIGLAAYFSTRNFDDYILGGRSLGPFVTAMSAGASDMSGWLLMGLPGAIYLSGLNEAWIAIGLLVGAYFNWLLVAGRLRVHTEYANNALTLPDYFFHRFGAGGHLMKVVSALIILFFFTIYCASGIVAGATLFQSLFEGMTYNQAMWLGAGATIAYTFLGGFLAVSWTDTLQASLMIFALILTPVMVYLGLGGAEQMSAAIQSVAAGTGKEYGSLFAGTTVIGIISTAAWGLGYFGQPHILARFMAAESAKSLVSARRIGMTWMALCLAGAVAVGYFGIAYFGANPDKVSSMSGNHERIFIALSTLLFNPWIAGIILSAILAAVMSTLSCQLLVCSSAITEDFYKGFLRKNAQQSELVWVGRLMVLAIAVISILIASDPNSKVLGLVSYAWAGFGAAFGPIVILSVLWKRITAYGALSGMVAGALTVVVWAEWVKKPAQAAGESGLLTMYEIVPGFIVCLIVAVLVSLFNKEPSRETQERFEKADADYRATR

SEQ ID NO: 6819 - protein, 144 aa, Neisseria meningitidis; identical to SEQ ID NO: 3606

SEQ ID NO: 6820 - protein, 192 aa, Neisseria meningitidis
MNILLLDGGKAFGHSHGGLNRTLHKKAKEVLTALGHNVQETVIDAGYDVEAEIEKFVWMDAVIWQMPGWWMHEPWTVKKYIDEVLTAGHGKLYQSDGRHSVNPTEGYGTGGLLQGKKHMISLTWNAPIEAFTREGDFFEGKGVDVLYMHFHKANEFLGMTRLPTFLCNDVVKNPQVEKYLADYQAHLEKVFG

SEQ ID NO: 6821 - protein, 81 aa, Neisseria meningitidis
MINHECINQPYGRILKFSRVQAKEMLTADELKENFAKNGQTLAQWARENGFKPRDVYLVIGGQRKGNYGKGHEIAKKLGLK

SEQ ID NO: 6822 - protein, 115 aa, Neisseria meningitidis
MDKELNPSIGDYTGRTVDTLQNAVYIRLMTPLGSWWADKTLGSLLHLLQREKDLQRVSLLAEQYADEALQPIVKSGRADKITVRAEQPHDGRLILHIRMDTAAGGFDYRHEVPVI

SEQ ID NO: 6823 - protein, 200 aa, Neisseria meningitidis
LVYNFPFTDRFRHMTDLETKRLETQAMLENADLLFDQGQCRAALQKVADEITRDLGGKYPLLLPVMGGAVVFTGQLLPLLRFPLDFDYVHVSRYGDKLEGGAFNWKRMPDAEQIRGRHVVVLDDILDEGHTMSAIQAKLLEMGAASCRAAVFANKLIDKPKPIRADYVGLDVPNRYVFGYGMDAAGCWRNLGEIYALGGK

SEQ ID NO: 6824 - protein, 281 aa, Neisseria meningitidis; identical to SEQ ID NO: 3006

SEQ ID NO: 6825 - protein, 349 aa, Neisseria meningitidis; identical to SEQ ID NO: 328

SEQ ID NO: 6826 - protein, 268 aa, Neisseria meningitidis
MNMKKWIAAALACSALALSACGGQGKDTAAPAANPDKVYRVASNAEFAPFESLDSKGNVEGFDVDLMNAMAKAGNFKIEFKHQPWDSLFPALNNGDADVVMSGVTITDDRKQSMDFSDPYFEITQVVLVPKGKKVSSSEDLKNMNKVGVVTGYTGDFSVSKLLGNDNPKIARFENVPLIIKELENGGLDSVVSDSAVIANYVKNNPAKGMDFVTLPDFTTEHYGIAVRKGDEATVKMLNDALEKVRESGEYDKIYAKYFAKEDGQAAK

SEQ ID NO: 6827 - protein, 113 aa, Neisseria meningitidis
MKNNVKNWTTKEVKQSLDKFNNILIKNTFLLQYLKKEFSASSAYCLSMLPEEEDIYEILVNGNIIIDLEFNKHTNETVVINVTDVDEYLKTLTNESGRVFFTLAKEIGKQKNI

SEQ ID NO: 6828 - protein, 245 aa, Neisseria meningitidis
MIILDKVSKHYQTRDKTRFAAVEPTSLEIRDGEIFGLMGYSGAGKSTLLRLINLLERPDSGKVNVCGQELTALDAAALRQARQNIGMVFQQFNLLSNRTVADNVAFPLEIAGWPSEKIKARVKECLEIVGLTERAGHYPAQLSGGQKQRVGIARALAPKPQVILADEPTSALDPATTRSVLECLEDINKRFNVTIVIVTHEMSVIRRLCDRAALLDKGKVVEIVEVRGNQIHAQSDIGRELIRED

SEQ ID NO: 6829 - protein, 558 aa, Neisseria meningitidis
MSFKTDAEIAQSSTMRPIGEIAAKLGLNADNIEPYGHYKAKINPAEAFKLPQKQGRLILVTAINPTPAGEGKTTVTIGLADALRHIGKDAVIALREPSLGPVFGVKGGAAGGGYAQVLPMEDINLHFTGDFHAIGAANNLLAAMLDNHIYQGNELNIDPKRVLWRRVVDMNDRQLRNIIDGMGKPVDGVMRPDGFDITVASEVMAVFCLAKDISDLKERLGNILVAYAKDGSPVYAKDLKANGAMAALLKDAIKPNLVQTIEGTPAFVHGGPFANIAHGCNSVTATRLAKHLADYAVTEAGFGADLGAEKFCDIKCRLAGLKPDAAVVVATVRALKYNGGVERANLGEENLDALEKGLPNLLKHISNLKNVFGLPVVVALNRFVSDADAELAMIEKACAEHGVEVSLTEVWGKGGAGGADLARKVVNAIESQTNNFGFAYDVELGIKDKIRAIAQKVYGAEDVDFSAEASAEIASLEKLGLDKMPICMAKTQYSLSDNAKLLGCPEDFRIAVRGITVSAGAGFIVALCGNMMKMPGLPKVPAAEKIDVDAEGVIHGLF

SEQ ID NO: 6830 - protein, 179 aa, Neisseria meningitidis
MSQVFKDFDLSSVWKTNSWADENYKEAPFTPEILAAVESELGYKLPQSFIELMAVQNGGIFVKNCFPTTQRNSWAENHVQICEVSGIGFEKEGSLCGAMGQKLWLEEWEYPPIGVYFANDPSGGHAMFALDYRACGKDGEPKVVFVEQESDFEIVELAPDFETFIRSLRHEDEFIDEEI

SEQ ID NO: 6831 - protein, 82 aa, Neisseria meningitidis; identical to SEQ ID NO: 3017

SEQ ID NO: 6832 - protein, 63 aa, Neisseria meningitidis; identical to SEQ ID NO: 1437

SEQ ID NO: 6833 - protein, 102 aa, Neisseria meningitidis
MDVFPELNIHCFYDDKNQLEAIEIFEPNKFFLEDISFNWLGKINDEIISYLYKSGINDFEIDDLGIRLLNIPVSTIINSIGKVECCYLDFSNRDTKFYVKQV

SEQ ID NO: 6834 - protein, 301 aa, Neisseria meningitidis
VRGISDSEATDDTGFRNNMNTLKFTKMHGLGNDFMVIDAVSQDFTPEDAPIAEWADRFRGVGFDQLLVVGRSETEGVDFRYRIFNADGSEVGQCGNGARCFARFVADKGLTDKKEICVETANGVIFPKLSDNGMVTVNMGKPKFMPSEIPFVPESGEGDDACIYGVHLESGIQPVSCVNMGNPHAVIVVDDVECAPVRETGSLIEPHRQFPERVNVGFMQVVGRTAIRLRVFERGVGETQACGTGACAAVVAGIRLGLLDEGKTVEVVLPGGTLYIEWACGGDVMMTGPAEAVFEGELAYS

SEQ ID NO: 6835 - protein, 797 aa, Neisseria meningitidis
MKLKQIASALMVLGISPLALADFTIQDIRVEGLQRTEPSTVFNYLPVKVGDTYNDTHGSAIIKSLYATGFFDDVRVETADGQLLLTVIERPTIGSLNITGAKMLQNDAIKKNLESFGLAQSQYFNQATLNQAVAGLKEEYLGRGKLNIQITPKVTKLARNRVDIDITIDEGKSAKITDIEFEGNQVYSDRKLMRQMSLTEGGIWTWLTRSNQFNEQKFAQDMEKVTDFYQNNGYFDFRILDTDIQTNEDKTKQTIKITVHEGERFRWGKVSIEGDTNEVPKAELEKLLTMKPGKWYERQQMTAVLGEIQNRMGSAGYAYSEISVQPLPNAETKTVDFVLHIEPGRKIYVNEIHITGNNKTRDEVVRRELRQMESAPYDTSKLQRSKERVELLGYFDNVQFDAVPLAGTPDKVDLNMSLTERSTGSLDLSAGWVQDTGLVMSAGVSQDNLFGTGKSAALRASRSKTTLNGSLSFTDPYFTADGVSLGYDVYGKAFDPRKASTSIKQYKTTTAGAGIRMSVPVTEYDRVNFGLVAEHLTVNTYNKAPKHYADFIKKYGKTDGTDGSFKGWLYKGTVGWGRNKTDSALWPTRGYLTGVNAEIALPGSKLQYYSATHNQTWFFPLSKTFTLMLGGEVGIAGGYGKTKEIPFFENFYGGGLGSVRGYESGTLGPKVYDEYGEKISYGGNKKANVSAELLFPMPGAKDARTVRLSLFADAGSVWDGKTYDDNSSSATGGRVQNIYGAGNTHKSTFTNELRYSAGGAVTWLSPLGPMKFSYAYPLKKKPEDEIQRFQFQLGTTF

SEQ ID NO: 6836 - protein, 331 aa, Neisseria meningitidis
MKKSLIALTLAALPVAAMADVTLYGTIKAGVETSRSVEHNGGQVVSVETGTGIVDLGSKIGFKGQEDLGNGLKAIWQVEQKASIAGTDSGWGNRQSFIGLKGGFGKLRVGRLNSVLKDTGDINPWDSKSDYLGVNKIAEPEARLISVRYDSPEFAGLSGSVQYALNDNAGKYNSESYHAGFNYKNGGFFVQYGGAYKRHVRVDENVNIEKYQIHRLVSGYDNDALHASVAVQQQDAKLVEDNYSHNSQTEVAATLAYRFGNVTPRVSYAHGFKGSFDDADLSNDYDQVVVGAEYDFSKRTSALVSAGWLQEGKGENKFVSTAGGVGLRHKF

SEQ ID NO: 6837 - protein, 219 aa, Neisseria meningitidis
  misc_feature 2, 3: 'Xaa' is any amino acid
VXXVGVILVGCCPGGTASNVMTYLARGNVALSVAVTSVSTLISPLLTPAIFLMLAGEMLEIQAAGMLMSIVKMVLLPIVLGLIVHKVLGSKTEKLTDALPLVSVAAIVLIIGAVVGASKGKIMESGLLIFAVVVLHNGIGYLLGFFAAKWTGLPYDAQKTLAIEVGMQNSGLAAALAAAHFAAAPVVAVPGALFSVWHNISGSLLATYWAAKAGKHKKP

SEQ ID NO: 6838 - protein, 101 aa, Neisseria meningitidis; identical to SEQ ID NO: 2399

SEQ ID NO: 6839 - protein, 122 aa, Neisseria meningitidis; identical to SEQ ID NO: 2347

SEQ ID NO: 6840 - protein, 369 aa, Neisseria meningitidis
LLFFQIGKMTVLREVHMSKNAQKTLLAVCSFEVQPKDGRIQLLPYGEFRAVDGRPTDVPAWYLTEENGHDVALLANSSRNQLVVDYEHQTLYKEKNGQPAPAAGWMRWLEFTPKGMFAEVEWTDKAAAAIAAKEYRYISAVFSYDTKGYVSKIFHAALTNFPALDGMDEVLAAASAQILKPETEQNPMKELLQQLFDLPDAGEEELKAALSALVEAKPKDVALSADVFAQLAEKDSRIAALTAQTAKPDLTKYAPISVVQELQSKVAALTAKQEADKGNELITAALTSGKLLPAQKEWAKGVLKQPGGLAFLTGFIENAQPVAALAGSQTGGKAPDERVAALTAEEAAAAKMLGMSGEEFVKIKESEGK

SEQ ID NO: 6841 - protein, 436 aa, Neisseria meningitidis
MDTSKQTLLDGIFKLKANGTTVRTELMAGLTTFLTMCYIVIVNPLILGETGMDMGAVFVATCIASAIGCFVMGFVGNYPIALAPGMGLNAYFTFAVVKGMGVPWQVALGAVFISGLIFILFSFFKVREMLVNALPMGLKMSIAAGIGLFLALISLKGAGIIVANPATLVGLGDIHQPSALLALFGFAMVVVLGHFRVQGAIIITILTITVIASLMGLNEFHGIIGEVPSIAPTFMQMDFEGLFTVSMVSVIFVFFLVDLFDSTGTLVGISHRAGLLVDGKLPRLKRALLADSTAIVAGAALGTSSTTPYVESAAGVSAGGRTGLTAVTVGVLMLACLMFSPLAKSVPAFATAPALLYVGTQMLRSARDIDWDDMTEAAPAFLTIVFMPFTYSIADGIAFGFISYAVVKLLCRRTKDVPPMVWIVAVLWALKFWYLG

SEQ ID NO: 6842 - protein, 291 aa, Neisseria meningitidis
MAVGKEILTKIRSVQNTQKITKAMQMVSTSKMRKTQERMRLARPYAEKVRMVMSHLAQTNTDHGIPLLESHREIRRVGFILITSDKGLCGGLNANVLKKFLAQVQEYRNQGIEEEIVCFGSKGLMACQSIGLNVVASAVNLGDTPKMEMLLGPLTELFQRYEKHEIDRIHLVYSGFVNTMRQEPRMEVLLPIGENVIGDSAPKSPFSWEYRYEPTALAVLEYLVRRYLESVVYQALSDNMASEQAARMVAMKAATDNAGNAIKELRLVYNKSRQAAITTELSEIVAGAAAV

SEQ ID NO: 6843 - protein, 106 aa, Neisseria meningitidis
MANIRHSRYAALEGLFVGSDDEAGFGENGETVRHAFPLAAEAYAVGKTVGTLPMAAYGIKLLFVRRRTGRIENPDASFTLEGGDVLVVAGKKEEIISFENWSLQGI

SEQ ID NO: 6844 - protein, 630 aa, Neisseria meningitidis
MPILTIREVCNINHWGIGYYDVDDSGEIIVRPNPSQHNQTVSLQKLTEAVQQKHQARLPVLFCFPQILEHRLRDINRAFQTAREECGYKGGYCLVYPIKVNQHRRVIESLMSSGQPHGLEAGSKAELMAVLAHAGNRQTLIVCNGYKDREYIRFALMGEKLGHQVYLVIEKLSEIQMVLEEAEKLGIKPRLGVRARLASQGSGKWQSSGGEKSKFGLSASQVLQLVDILKQKNRLDCLQLLHFHLGSQLGNIRDVATGVHESARFYVELHKLGVNIRCFDVGGGLGVDYEGNRTQSDCSVNYSLNEYAATVVWGISQACLEHGLPHPTIITESGRGITAHHAVLVANVIGVERYKPRRLDAPSPEAPRVLHSMWETWTDISASREKRSLRSWIHEGQFDLADVHNQYNVGLLSLAQRAWAEQLYLNICHEVGELFNEKHRSHRTIIDELQERFADKLYVNFSLFQSLPDAWGIDQLFPVCPITGLNEPIARRAVLLDITCDSDGTIDHYIDGDGIAGTMPMPDYPEEEPPLLGFFMVGAYQEILGNMHNLFGDTATADVVVGEDGQFTVIDYDEGNTVADMLEYVYQDPKELMKRYREQIEHSDLPASQAMSFLKELEAGLNGYTYLEDE

SEQ ID NO: 6845 - protein, 120 aa, Neisseria meningitidis
MSQLDFNLELFIKNSNFDDYKIFDIVKEAIETQDEIGSILRTHLFFERILEAWIYAKCNKEDFFNDTQIGFRTKLKIARNLGLFSEVYDIGERLNKIRNTIAHHVLREVNQENLTLYMKV

SEQ ID NO: 6846 - protein, 354 aa, Neisseria meningitidis
MLVLGIESSCDETGVALYDTERGLRAHCLHTQMAMHAEYGGVVPELASRDHIRRLVPLTEGCLAQAGASYGDIDAVAFTQGPGLGGALLAGSSYANALALALDKPVIPVHHLEGHLLSPLLAEEKPDFPFVALLVSGGHTQIMAVRGIGDYALLGESVDDAAGEAFDKTAKLLGLLYPGGAKLSELAESGRFEAFVFPRPMIHSDDLQMSFSGLKTAVLTAVEKVRAENGADDIPEQTRNDICRAFQDAVVDVLAAKVKKALLQTGFRTVVVAGGVGANRKLRETFGNMTVQIPTPKGKPKHPSEKVSVFFPPTAYCTDNGAMIAFAGAMHLGKGREVGAFNVRPRWPLSEIVR

SEQ ID NO: 6847 - protein, 101 aa, Neisseria meningitidis; identical to SEQ ID NO: 1118

SEQ ID NO: 6848 - protein, 111 aa, Neisseria meningitidis
LGGAMDIVQLGPAELKAWMDEGRMFCLLDVRTDEETAVCSLPNALHIPMNLIPLRQNELPDDVPLVVYCHHGIRSLHTAMYLADAGFENLYNLQGGIDAWAAEIDGNMMRY

SEQ ID NO: 6849 - protein, 284 aa, Neisseria meningitidis
MKIVLISGLSGSGKSVALRQMEDSGYFCVDNLPLEMLPALVSYHIERADETELAVSVDVRSGIDIGQAREQIASLRGLGHRVEVLFVEAEESVLVRRFSETRRGHPLSNQDMTLLESLKKEREWLFPLKEIAYCIDTSKMNAQQLRHAVRQWLKVERTGLLVILESFGFKYGVPNNADFMFDMRSLPNPYYDPELRPYTGMDKPVWDYLDGQPLVQEMVDDIERFVTHWLPRLEDESRSYVTVAIGCTGGQHRSVYIVEKLARRLKGRYELLIRHRQAQNLSDR

SEQ ID NO: 6850 - protein, 312 aa, Neisseria meningitidis
MSIHTLKRLPSSLLLGLCLSLPSAHLFADNDILGQFLEQNMLTSSDPIEIFAESTIHPTNTQAITGGLILSSQSALVVNNKTGQILYQKNADRIMPIASISKLMSAMVVLDANLDMNETVTITPDEIDRIKGTGSRLAIGTALTRKKLLHLSLMSSENRATHALGRTYPGGMGAFVAAMNRKAQSLGMYGSRFYEPTGLNFQNVSTAKDLSLMVNAAAQYPQIRTNSTSNYASVQTKNGQQNYKNSNALVREGMWNIELQKTGYIREAGRSMVVKANIQNQPVTIVLLNSPTSATRVNDARKIESWMLQQRS

SEQ ID NO: 6851 - protein, 173 aa, Neisseria meningitidis
MECHADVWHFILEKNMKKFYFVLLALGLAACGQEQSQKADAEQYFFANKYQFADEKQAFYFERAARFRVLQQGLGGDFERFLKGEIPNQENLAKYRENITQAVAYYADTNGDDDPYRVCKQAAQDAEILMKSMVTSGGGGTTDLDKESYQNYRKSMQECRKTITEAEANLPKK

SEQ ID NO: 6852 - protein, 316 aa, Neisseria meningitidis
MKLQQLKYALEVYQHNLNVSEAAEALFTSQPGISKQIKLLEEEIGIQIFIRSGKRVVSVSQPGKVVLDIAERILRDVQNIKNIGSEFTGQDSGSLTVATTHTQARYALPLIVADFVKRYPKVNLTIKQGSPAAIARMVTSGEADLAIVTERIDDHPELGKLPCYDWTHAVIVPNDHPLLECRNPLRIEDLARFPLITYEFAFNAGSSIARAFSKARLEQPDVALAAADTDVLKTYVRLGLGVGLMAKMAYNPDTDGDLQLVDAAHLFEPSPTWIALRSDTYLRGYAYDFIQAFAPHLTREKVDRILYTPISEDFSI

SEQ ID NO: 6853 - protein, 274 aa, Neisseria meningitidis
MIKKTIGGIIPIFTAVFIPASAGAADLMLAQEYKGQDIAGWAMSEKLDGVRAYWDGKHLMSRQGYAFAPPKGFTAQFPPYPLDGELYSGRGQFEQISATVRSVSSDWRGIRLHVFDVPKAQGNLYQRLAVATQWLKTHPNAPITIIPQIKVRDRQHAMDFLKQIEAQGGEGVMLRQPESRYSGGRSSQLLKLKSQYDDECTVTRHYEGKGRNAGRLGAVGCKNRHGEFRIGSGFKDKDRDNPPKIGTLITYRYRGFTRKGTPKFATFVRVRTDR

SEQ ID NO: 6854 - protein, 209 aa, Neisseria meningitidis; identical to SEQ ID NO: 1847

SEQ ID NO: 6855 - protein, 54 aa, Neisseria meningitidis
  misc_feature 2, 3, 4: 'Xaa' is any amino acid
VXXXAFVVALLSLWVNAGAFGMQEDDTPQSDYERRLGLGAKLKNKNPDTDEKRQ

SEQ ID NO: 6856 - protein, 68 aa, Neisseria meningitidis; identical to SEQ ID NO: 4044

SEQ ID NO: 6857 - protein, 759 aa, Neisseria meningitidis
MNTPTDLKVTKRDGRLEAIDLDKIHRVVTWAADGLENVSVSQVELKSHIQFYNGIRTDDIHETIIKAAADLISEDTPDYQYLAARLAIFHLRKIAYGEYEPPHLYDHVKKLTDAGKYDRHILEDYSREEFDELNAYIDHERDMSFSYAAVKQLEGKYLVQNRVTRQIYETPQFLYVLVAMCLFSKYPKEARLGYVKRFYDAVSTFKVSLPTPIMSGVRTPTRQFSSCVLIECDDSLDSINATTSAIVKYVSQRAGIGINAGRIRGLDSEIRGGEARHTGCIPFFKMFQAAVKSCSQGGVRGGAATLFYPLWHIEAESLLVLKNNRGVEDNRIRQLDYGVQINRLLYTRLIKGGNITLFSPNEVPGLYEAFFADQDEFERLYTKYEQDPDIRKRIIPAADLFSTLMQERAGTGRIYIQNVDHCNTHSPFDPRVAPVHQSNLCMEIALPTKPLDNINDPNGEIALCTLSAFNLGALNSLDELEGLADLTVRALDALLDYQGYPVEAARTSTMGRRSLGIGVINYAYYLAKNGVRYSDGSALGLTHRTFEAIQYYLLKASANLAKEYGACTLFNQTVYSQGKLPIDTYKKDLDAVCGEPLHYDWESLRAEIVKYGLRNSTLTALMPSETSSQIANATNGIEPPRGLVTVKASKDGILKQVVPEFETLKNAYETLWQLPGNEGYLKLVGVMQKFVDQSISANTAYDPGKFEGGKVSMKQMLKDLLTAYKYGVKTLYYHNTRDGADDTQTDIQDDGCAGGACKI

SEQ ID NO: 6858 - protein, 289 aa, Neisseria meningitidis
MSANEYAQIGWIGLGQMGLPMVTRLLDGGIEVGVYNRSPDKTAPISAKGAKVYGNTAELVRDYPVIFLMVSDYAAVCDILNGVRDGLAGKIIVNMSTISPTENLAVKALVEAAGGQFAEAPVSGSVGPATNGTLLILFGGSEAVLNPLQKIFSLVGKKTFHFGDVGKGSGAKLVLNSLLGIFGEAYSEAMLMARQFGIDTDTIVEAIGGSAMDSPMFQTKKSLWANREFPPAFALKHASKDLNLAVKELEQAGNTLPAVETVAASYRKAVEAGYGEQDVSGVYLKLAEH

SEQ ID NO: 6859 - protein, 270 aa, Neisseria meningitidis
VPSETVSDGTDKPPPLNPAVLACIIRHSIRNSQQVSNMSLKTVAVIGAMEQEIELLREMMENVKAVSFGRFSAYEGELAGKRMVLALSGIGKVNAAVATAWIIREFAADCVINTGSAGGLGKGLKVGDVVIGTETAHHDVDVTAFGYAWGQVPQLPARFASDGILIEAAKRAARTFEGAAVEQGLIVSGDRFVHSSEGVAEIRKHFPEVKAVEMEAAAIAQTCHQLETPFVIIRAVSDSADEKADISFDEFLKTAAANSAKMVAEIVKSL

SEQ ID NO: 6860 - protein, 196 aa, Neisseria meningitidis
MNWLNRGIQEKILRVLSDNYPNCLKATKVYNSLFPSSSLPITSNIPVDKQGLGLALTLGCEIQSQHLATLQSDEFQYFLKNIYYLEESGLIEITSIDSLHKNFDCKINHKGIDFLTDDGGLSAILGVVTVKLHSDTIQALIAAKIDQAEISDSEKSWLKKELGKIKDTALSTLTENAINAIPAATLITLLKKFVGL

SEQ ID NO: 6861 - protein, 154 aa, Neisseria meningitidis; identical to SEQ ID NO: 741

SEQ ID NO: 6862 - protein, 635 aa, Neisseria meningitidis
MPLSFLYTPHRQAEFMALLQISEPGMSAAPHRHRLAAGIDLGTTNSLVATVRSGSAACLPDAEGRVTLPSVVRYLENGGIEVGKTALSAQKTDPLNTVSSAKRLIGRTLADLHQNTHYLPYRFGDNQRVIELHTRQGVKTPVEVSAEILKTLKSRAEETLGGDLVGVVITVPAYFDDAQRQATKDAARLAGLNVLRLLNEPTAAAIAYGLDNASEGTFVVYDLGGGTFDVSVLQLTKGLFEVKATGGNSALGGDDFDHRLFCRLLEQNGLSQLNEQDSQLLLSLVRAAKEQLTTQTEARIQATLSDGMAIDTSISRAEFHNLTQHLVMKTLEPVTQALKDAGVGKNEVKGVIMVGGSTRMLHVQQAVATFFGQTPLNNLNPDEVVALGAAIQANVLAGNKTDGEWLLLDVTPLSLGLETYGGLAEKIIPRNSTIPTARAQDFTTFKDGQTAMTIHVVQGERELVADCRSLAKFTLRGIPPMAAGAARIRVTFQIDADGLLSVSAQEQSTGVQAQIEVKPSYGLDDDTITQMLKDSMSNAAEDMAARARAEAVVEAESLTDAVNAALELDSDLLDAEELQQIRQGIADLQGRLKDGKAEDIRAAAAKLGSITDNFAAKRMNRNIQRALTGQSVDNI

SEQ ID NO: 6863 - protein, 51 aa, Neisseria meningitidis
  misc_feature 46, 47: 'Xaa' is any amino acid
MSVGQVREIFERFGKYNLVQTEYRRFKADKTENRNHKANSIFEYLXXHTLN

SEQ ID NO: 6864 - protein, 693 aa, Neisseria meningitidis
MKSLKTFLIWGIVVLVGLASFTTLALSRGEQVSAVWMVTAAISVYCIAYRFYSLYIANRVMRLDPDRLTPAERHNDGLDYVPTHKGVLFGHHFAAIAGAGPLVGPVLAAQMGYLPGTLWIIFGVVFAGAVQDMMVLFVSMRRDGKSLGDIVKQELGTVPGVIASIGILMIMVIIMAVLALIVVKALVHSPWGTFTIAATMPIALFMGIYTRYIRPGKIGEISIVGFILLMLAVIYGEDVAKSSIGHWFDLDGIQLTWAIMIYGFVASVLPVWLLLTPRDYLSTFLKIGTIAALALGIVIVNPALQMPAVTHFIDGSGPVFSGALFPFLFITIACGAVSGFHALISSGTTPKMLENETHVRMIGYGGMLMESFVAIMALAAAASLDPGVYFAMNSPAALIGTDANTAAEVITTKLQFPVDAATLLHTAKEVGENTILSRAGGAPTLAVGMAHIMSRLIPGEAMMAFWYHFALLFEALFILTAVDAGTRVARFMIQDLGSIFYKPFGNTDSIPANLIATFFAVALWGYFLYTGVTDPLGGINSLWPLFGIANQMLAGVALIMCAVVLIKMKRDRYVWVVLVPAVGVLFVTCYAGLQKLFHSDPRISFLAHAGKYSDALAKNEILAPAKDIGEMAQIIFNDKINAGLTILFLSVVVIVAAYGLRTALKARKVGWPTAKEIPAVYRDGKQPEAQSEA

SEQ ID NO: 6865 - protein, 254 aa, Neisseria meningitidis
MPTEDIEEIFMSANVSRLVVQNLQKSFKKRQVVKSFSLEIESGEVIGLLGPNGAGKTTSFYMIVGLIAADAGSVTLDGQELRHLPIHERARLGVGYLPQEASIFRKMTVEQNIRAILEIRTKDKNQIDREIEKLLADLNIGHLRRSPAPSLSGGERRRVEIARVLAMKPHFILLDEPFAGVDPIAVIDIQKIIGFLKSRGIGVLITDHNVRETLSICDRAYIISDGTVLASGKPDDLVGNEQVRSVYLGKNFKY

SEQ ID NO: 6866 - protein, 79 aa, Neisseria meningitidis
LANGKNGTLYIGVTMNLPERVWQHKNHVNIDGFTARYDVHDLVWYQFFENMPEAVAKEKTMKKWRREWKIKLIEEQNTE

SEQ ID NO: 6867 - protein, 434 aa, Neisseria meningitidis
MAMAKNVVVIGAQWGDEGKGKIVDWLAEEAGGVVRFQGGHNAGHTLVVGGKKTILRLIPSGILHESLDCFIGSGVVVSPEALLGEIDELNAAGVKNVEGRLKIAPTCPLILPYHIALDQAREASRGKGKIGTTGRGIGPAYEDKVARRAIRAADLLHPEKLREKLDAVLAYYNVQLQHLHNAEPVKAEDVMAVIEKVAPRIAPMITDVSRVLNEKNKNGEKLLFEGAQGALLDIDYGTYPFVTSSNCLAGAASAGAGVGPQMLDYVLGIVKAYTTRVGSGPFPTELFDEVGVGLAERGHEFGSVTGRARRCGWFDAAALKRSIQINGISGMCITKLDVMDGVETINICVGYELPDGGKTDILPCGSDAVETCKPIYETMPGWRESTFGVKDYGALPENAKAYLKRIEEVCGAPVAIVSTGPDREETIVLHHPFA

SEQ ID NO: 6868 - protein, 100 aa, Neisseria meningitidis
LSAVFIAPYLTAFHEQEKTFEYAELTVTALNRSGRAIKLDADGQHYRLSCYGFDSLCTGGNIGRTIRAEQVRAVLSETVGKGFLNGVLLEYRNSGSVYKQ

SEQ ID NO: 6869 - protein, 88 aa, Neisseria meningitidis
MDFEFGFRTLWPIATAAFWFWVNGISGRLKEADKRIDDLKEELHAVKLSYHTKADAKADSTNIAAALERIENKLEKVNEKLDRKADKS

SEQ ID NO: 6870 - protein, 706 aa, Neisseria meningitidis
MFDKHVKTFQYGNQTVTLETGEIARQAAAAVKVSMGDTVVLVAVTTNKEVKEGQDFFPLTVDYLERTYAAGKIPGGFFKREGKQSEKEILTSRLIDRPIRPLFPEGFYHDIQIVAMVVSVDPEIDSDIPAMLGASAALVLSGVPFAGPIGAARVGYVNGVYVLNPTKAELAKSQLDLVVAGTSKAVLMVESEAKILPEDVMLGAVVYGHDQMQVAINAINEFADEVNPELWDWKAPETNEELVAKVRGIAGETIKEAFKIRQKQARSAKLDEAWSAVKEALITEETDTLAANEIKGIFKHLEADVVRSQILDGQPRIDGRDTRTVRPLNIQTSVLPRTHGSALFTRGETQALAVATLGTSRDEQIIDALSGEYTDRFMLHYNFPPYSTGEVGRMGAPKRREIGHGRLAKRALLAVLPKPEDFSYTMRVVSEITESNGSSSMASVCGGCLSLLSAGVPLKAHVAGIAMGLILEGNKFAVLTDILGDEDHLGDMDFKVAGTTEGVTALQMDIKIQGITKEIMQIALAQAKEARLHILDQMKAAVAGPQELSAHAPRLFTMKINQDKIREVIGKGGETIRSITAETGTEINIAEDGTITIAATTQEAGDAAKKRIEQITAEVEVGKVYEGTVVKILDNNVGAIVSVMPGKDGLVHISQIAHERVRNVGDYLQVGQVVNVKALEVDDRGRVRLSIKALLDAPAREENAAE

SEQ ID NO: 6871 - protein, 95 aa, Neisseria meningitidis
MDDLIAAFLGYLSGKYREGKISRLGISLTAGSIFFAVFFIHELIIFIVDGNKENLWNFITEMMKDLFLFSCSVCLLFYFLLFIAETIGKTINKIK

SEQ ID NO: 6872 - protein, 204 aa, Neisseria meningitidis
MSFDNYLVPTVIEQSGRGERAFDIYSRLLKERIVFLVGPVTDESANLVVAQLLFLESENPDKDIFFYINSPGGSVTAGMSIYDTMNFIKPDVSTLCLGQAASMGAFLLSAGEKGKRFALPNSRIMIHQPLISGGLGGQASDIEIHARELLKIKEKLNRLMAKHCDRDLADLERDTDRDNFMSAEEAKEYGLIDQILENRASLRL

SEQ ID NO: 6873 - protein, 190 aa, Neisseria meningitidis; identical to SEQ ID NO: 917

SEQ ID NO: 6874 - protein, 84 aa, Neisseria meningitidis; identical to SEQ ID NO: 3171

SEQ ID NO: 6875 - protein, 317 aa, Neisseria meningitidis
MNHKKIVVLDADTLPGRVFHFDFPHELAVYGTTGADETAERVRDAHIVITNKVMISADIIAANPQLELIAVSATGVNNVDIGAAKAAGVAVCNVRAYGNESVAEHAFMLMIALMRNLPAYQRDVAAGLWEKSPFFCHYGAPIRDLNGKTLAVFGRGNIGRTLAGYAQAFGMGVVFAEHKHASAVREGYVSFEDAVRAADVLSLHCPLNAQTENMIGENELRQMKPGAVLINCGRGGLVDENALLAALKYGQIGGAGVDVLTNEPPKNGNPLLNARLPNLIVTPHTAWASREALDRLFDILLANIHAFVKGEAQNRVV

SEQ ID NO: 6876 - protein, 238 aa, Neisseria meningitidis
LVKCCLKIISDGIFIWGESEVASVFLEGEAVEVGNIFCIGRNYAAHIEELKNEIPSEPVVFMKPSGSILNSGGTILLPEFSRDVQFECELVLLVGKDADGMGEGADILECVAGYGVGLDLTARDIQCRLKAQGLPWLKAKGFRHSACVSDFAAADRIGNPEKVLFSLKQNGVLKQRGDTGLMIYPIREILHKLAADYGLGKGDLVFTGTPSGVGAIGAGDNLALELDGLVRASFTVGC

SEQ ID NO: 6877 - protein, 152 aa, Neisseria meningitidis
MKTQISLAAAAITLLLSACGGSGIPSQPKGEISENRTAAFKSMMPDFSRMGKMVKGEEPYDVEKFKQAAAAFAESSKKPFTLFESDPQGNGRALPAVWSDGAKFEAEKTKFAAAVEKLNAAAQTGKLDEIKAAYGETGASCKSCHDSFRAPE

SEQ ID NO: 6878 - protein, 114 aa, Neisseria meningitidis; identical to SEQ ID NO: 565

SEQ ID NO: 6879 - protein, 103 aa, Neisseria meningitidis
LEHNFKGIQIVCLGHRGDGSLHYNTFLPEILSNEVYRYKDNINSTVYRNVLACNGTIAAKHGIGIIKKQWLDKVRTPAEITLMKSIKQHLDPYNIMNPGELLP

SEQ ID NO: 6880 - protein, 320 aa, Neisseria meningitidis
MQYAKISGTGSYLPANRVSNDDLAQKVDTSDEWITARTGIKFRHIAAENEKTSDLAAEAAHRALDAAGLDSGEIDLIIVATATPDMQFPSTATIVQQKLGITNGCPAFDVQAVCAGFMYALTTANAYIKSGMAKNALVIGAETFSRIVDWNDRTTCVLFGDGAGAVVLSASDTPGIIHSKLKADGNYLKLLNVPGQIACGKVSGSPYISMDGPGVFKFAVKMLSKIADDVIEEAGYTAAQIDWIVPHQANRRIIESTAKHLGLSMDKVVLTVQDHGNTSAASIPLALDTGIRSGQIKRGQNLLLEGIGGGFAWGAVLLQY

SEQ ID NO: 6881 - protein, 225 aa, Neisseria meningitidis; identical to SEQ ID NO: 1206

SEQ ID NO: 6882 - protein, 337 aa, Neisseria meningitidis
MAWSMFATTQADRAVRSATAPKEMWFHKKIIDEKTGKVSFDTRQIWSLNDLSKEELASIQDTNGKVITVSNPGIFNNREDSLSNAAKQNRNSTNGSGVIAVMNPPTGKYKSDSNNKIKDFLWLGSSLVSELMYVGYDQLNNKVFQGYLPKTNSEKLNQDIYREVQKMGNGWSVDTSNHSRGGITASVSLKDWVNNQKQNGIAPIRKARFYGTATNVQNDYADVLQKNGYTYTGADGKTYNSGSYSIVHDKDFVGNKWIPFLLGTNDTTQGTCKGLCYSHSSYFAEVPKAGTKEFDDYVKIWGEVEYDAQGKPINKSKPILVEPNKTKDNEKYEKEAF

SEQ ID NO: 6883 - protein, 128 aa, Neisseria meningitidis
MNEQELQDLQKMVGVAVNALGDIKAKDISVLETQDKTSLFARMIIASGDSTRQVKALANNVAVDLKEAGFEILSTEGDSGEWTLVDAGDLVVHVMLPAVRDFYDIDTLWGGEKPSFHAGMQKPWHAAD

SEQ ID NO: 6884 - protein, 290 aa, Neisseria meningitidis
MPILNHIALIGVGLIGGSFVLDLKRQGLVRTVTGIDTDRDNLERALERGVIDQASVAIDADSIGGADLVLIATPVATVPAILTALRPVLPEHTWISDVGSTKSSVIEAFRRCLPDRLHHCIAAHPIAGSDRSGAQAAQFGLFRHRKLIITPHGGEHSDGIALVENLWHAVGAEIYTMDAQRHDAVFAAVSHMPHLTAFAYVHQILDHPDGQEYLKFAATGFRDFTRIASGHPAVWADICLANKDSLLQLVQGLGKQLDVLANILTTDDREALYRYFEEAKTTRDRWLDGN

SEQ ID NO: 6885 - protein, 122 aa, Neisseria meningitidis; identical to SEQ ID NO: 83

SEQ ID NO: 6886 - protein, 214 aa, Neisseria meningitidis
VNKRLFCSRNGLRYYLLGGFCLSVFPLLLVFASSVWAVYRTGGQVLPPYVRADAALVLGAAAWDKRPSPVFRERINHAIALYQSRRVGKIVFTGGRTKKGYMTEAEVGRRYALKQGVPARNILFENTSRNTYENLNNIRPVLRANGIASVVIVSDPYHLARAAEMAEDLGVRVYMSATPTTRFDAGNKKKIFMLQEGYALSLYRLEKWGRDFFN

SEQ ID NO: 6887 - protein, 161 aa, Neisseria meningitidis
MFVNEKDPYAALFAGLVFLTLPFALAVHDAFALAFGRAGLLVSVSDGGFGWRGGWDGTVWFVYGVFAFLNLVVSAGLMKLAYKKMMRRHSRYALFLSGVAACAAAVVAWIFELLLGSAALGGLRGEAVLEYAFAVWLVSMLTLPKRLTRAPVQPVVFHRKK

SEQ ID NO: 6888 - protein, 64 aa, Neisseria meningitidis
LESHDLAEGYTYFFNENTDDCYVLKEDFINNERYEKTELYSQKDKVILFPKFGEYDLVLNPDII

SEQ ID NO: 6889 - protein, 279 aa, Neisseria meningitidis; identical to SEQ ID NO: 343

SEQ ID NO: 6890 - protein, 590 aa, Neisseria meningitidis
MILPARFSDGISLSLRLKLLTGLWVGLAALSVVLTLLLSLRLENAASVIEEAGNLRMQAYRLAYMAGEGSPRAQIDNQVAEFEKSLKRIAQSDAIHPLIPSDTPLAYDLIQSMLIIDWQAHILPPLQSYRRPTQVDLYRFAGNIELFLQALENANEKNTWWLRRFQWAIMLMTLVSSVLMLFWHQIWVIRPLQALREGAERIGRRCFDIPVPEGGTPEFKQVGRCFNQMGGRLKILYDDLEGQVAEQTRSLEKQNQNLTLLYQTTRDLHQSYIPQQAAEHFLNRILPAVGADSGRVCLDGGSDVYVSIHHADCGTAASDLGKYHEEIFPIEYQNETLGRLLLSFPNGISLDEDDRILLQTLGRQLGVSLAGAKQEEEKRLLAVLQERNLIAQGLHDSIAQALTFLNLQVQMLETAFAENKREEAAENISFIKTGVQECYEDVRELLLNFRTKISNKEFPEAVADLFARFTQQTGITVETAWENGSFLPPQEAQLQMIFILQESLSNIRKHARATHVKFTLSEHGGRFTMTIQDNGQGFDTEKIGEPTGSHVGLHIMQERAKRIHAVLEIRSQAQQGTTVSLTVASEESLK

SEQ ID NO: 6891 - protein, 420 aa, Neisseria meningitidis
MSNTQKQLALAKAAKKSVNTADTEEKNRALFAMANSLEAAAADILAANRQDLEAAAGNIPESMTDRLLLDGKRIGAMADGIRAVAALPDPVGEILETSTLPNGLEIVKKRVAMGVIGIIYESRPNVTSDAAALALKSGSAVVLRSGKDAFQSARAIVAALKTGLAQTRIDPDALQLIEDTGREGSYEMMRAKDYLDLLIPRGGAGLIRAVVENAVVPVIETGTGIVHIYIDKDADWDKALRIVYNAKTSRPSVCNSMEVLLVHEDIAADFLPKLERLLVRDRIEAGLPPVRFRLDPQAARHIGGEAAGADDFDTEFLDYILAVKTVASVEEAVWHIETHSTHHSDGIVTENRHAADYFTTHIDSAAVYVNASTRFTDGGEFGLGCEMGISTQKLHARGPMGLKELTSYKYIVQGTGQVRE

SEQ ID NO: 6892 - protein, 379 aa, Neisseria meningitidis
MSQNASVGIVMPQKIPFEMPLVLENGKTLPRFDLMIETYGELNAEKNNAVLICHALSGNHHVAGRHSAEDKYTGWWDNMVGPGKPIDTERFFVVGLNNLGGCDGSSGPLSINPETGREYGADFPVVTVKDWVKSQAALADYLGIEQWAAIVGGSLGGMQALQWTISYPERVRHALVIASAPKLSTQNIAFNDVARQAILTDPDFNEGHYRSHNTVPARGLRIARMMGHITYLAEDGLGKKFGRDLRSNGYQYGFGVEFEVESYLRYQGDKFVGRFDANTYLLMTKALDYFDPAADFGDSLTRALQNVKAKFFVASFSTDWRFAPERSHELVKALIAAQKSVQYIEVKSAHGHDAFLMEDEAYMRAVAAYMNNVYKECQQ

SEQ ID NO: 6893 - protein, 370 aa, Neisseria meningitidis
MSTFFQQTAQAMIARHIDRFPLLKLDQVIDWQPIEQYLNRQKTRYLRDHRGRPAYPLLSMFKAVLLGQWHSLSDPELEHSLITRIDFNLFCRFDELSIPDYSTLCRYRNRLAQDDTLSELLELINRQLTEKGLKVEKASAAVVDATIIQTVGSKQRQAIEVDEEGQINGQTTPSKDSDARWIKKNGLYKLGYKQHTRTDAEGYIEKLHITPANAHECKHLPPLLEGLPKGTTVYADKGYDSAENRQHLEEHQLQDGIMRKACRNRPLTETQTKRNRYLSKTRYSGLNLNQDKATKPQTVQIVRQGEATPYWFKFNPLYVVEQSFGTLHRKFRYARAAYFGLIKVSAQSHLKAMCLNLLKAANRLSAPAAA

SEQ ID NO: 6894 - protein, 242 aa, Neisseria meningitidis
MTETVLITGSNRGIGKAVAFGLAEDGFDIAVHCRSRRDEAEAVAEEIRALGRNARVLQFDVSDREACREILTADIEANGAYYGVVLNAGLTRDNTFPAFSDDDWDVVLRTNLDGFYNVLHPLVMPMIRRRKAGRIVCMASVSGLTGNRGQVNYSASKAGIIGAAKALAVELAKRKITVNCVAPGLIDTDIIDENVPVEEILKAVPAALMGLPEEVAHAVRFLMDEKAAYITRQVIAVNGGLC

SEQ ID NO: 6895 - protein, 205 aa, Neisseria meningitidis
MSAYRKGNIFIISAASGTGKTTLVSRLLANHNGLRVSVSHTTRPPREGEANGVHYHFVSKEEFESLIAQEAFLEYADVFGNYYGTGAEGVNALAAAGYDVILEIDVQGAAQVRDALPEAVGIFILPPSFDVLAARLNGRGTDSREVIQRRLSKARHEIEQSVLFDFVVVNDDLARAEEDLRHIVNACRLKRSRQLGFIADLLENS

SEQ ID NO: 6896 - protein, 159 aa, Neisseria meningitidis; identical to SEQ ID NO: 929

SEQ ID NO: 6897 - protein, 242 aa, Neisseria meningitidis
MPDYIRISRAADSLRDIKITPHFLPHTDGSCLIECGNTKVICTASIDENVPPFLRGKNQGWVTAEYGMLPASTASRMLREASAGKQSGRTQEIQRLIGRSLRAVVDMEKLGERQILIDCDVIQADGGTRTASITGAFVALQIAVGKLVSDGILSENPIREAVAAVSVGVVNGVPLLDLDYPEDSGCDSDVNIVMTASGKIIEIQGTAEDAPFSLDELGKLVALAQKGIGELLQHQQNALSAA

SEQ ID NO: 6898 - protein, 678 aa, Neisseria meningitidis
MTDNALLHLGEEPRFDQIKTEDIKPALQTAIAEAREQIAAIKAQTHTGWANTVEPLTGITERVGRIWGVVSHLNSVADTPELRAVYNELMPEITVFFTEIGQDIELYNRFKTIKNSPEFDTLSPAQKTKLNHDLRDFVLSGAELPPEQQAELAKLQTEGAQLSAKFSQNVLDATDAFGIYFDDAAPLAGIPEDALAMFAAAAQSESKTGYKIGLQIPHYLAVIQYADNRELREQIYRAYVTRASELSDDGKFDNTANIDRTLANALQTAKLLGFKNYAELSLATKMADTPEQVLNFLHDLARRAKPYAEKDLAEVKAFARESLNLADLQPWDLGYASEKLREAKYAFSETEVKKYFPVGKVLNGLFAQIKKLYGIGFTEKTVPVWHKDVRYFELQQNGETIGGVYMDLYAREGKRGGAWMNDYKGRRRFADGTLQLPTAYLVCNFAPPVGDKEARLSHDEILILFHETGHGLHHLLTQVDELGVSGINGVEWDAVELPSQFMENFVWEYDVLAQMSAHEETGVPLPKELFDKMLAAKNFQRGMFLVRQMEFALFDMMIYSEDDEGRLKNWQQVLDSVRKKVAVIQPPEYNRFALSFGHIFAGGYSAGYYSYAWAEVLSADAYAAFEESDDVAATGKRFWQEILAVGGSRGAAESFKAFRGREPSIDALLRHSGFDNAV

SEQ ID NO: 6899 - protein, 196 aa, Neisseria meningitidis
MKKSSLISALGIGILSIGMAFAAPADAVSQIRQNATQVLSILKNGDANTARQKAEAYAIPYFDFQRMTALAVGNPWRTASDAQKQALAKEFQTLLIRTYSGTMLKLKNANVNVKDNPIVNKGGKEIIVRAEVGVPGQKPVNMDFTTYQSGGKYRTYNVAIEGASLVTVYRNQFGEIIKAKGVDGLIAELKAKNGGK

SEQ ID NO: 6900 - protein, 67 aa, Neisseria meningitidis
MDNLNPQEISVLPENLPLYCSGPGNEQWNGHPRVFLPLCEGESGSVACPYCGTRYRLDGKMPHHHYA

SEQ ID NO: 6901 - protein, 65 aa, Neisseria meningitidis
MNTVPKSRIPVKPLPEKTTDEAKVEKWRQLGAEHGLSGEWAVAVRLGENGFTEEQMENIANLFGR

SEQ ID NO: 6902 - protein, 84 aa, Neisseria meningitidis
MKHMTEQEIYRLLRDTLTELFEIEPERITPDTNLYEDLEIDSIDAIDLIDRIKRETGRKLQAEDFRNVRTVNDVVQAVLKIQAG

SEQ ID NO: 6903 - protein, 363 aa, Neisseria meningitidis
MSLKCGIVGLPNVGKSTLFNALTQSGIEAANYPFCTIEPNVGIVEVPDPRMAELAKIVNPQKMQPAIVEFVDIAGLVAGASKGEGLGNQFLANIRETDAIVNVVRCFDDDNIVHVAGRVDPIADIETIGTELALADLASVEKAIVREEKRARSGDKDAQKLVDLCKKLLPHLDEGKPVRSFGLDAEERAMLKPLFLLTAKPAMYVGNVAEDGFENNPHLDRLKELAAKENAPVVAVCAAMESEIAELEDDEKAEFLAEMGLEEPGLNRLIRAGYDLLGLQTYFTAGVKEVRAWTIHKGDTAPQAAGVIHTDFERGFIRAQVISYDDFVSLGGEAKAKEAGKMRVEGKEYVVQDGDVMHFLFNV

SEQ ID NO: 6904 - protein, 753 aa, Neisseria meningitidis
VSISAPYANENSRILLSTTDISSENGKIKLQSYGDQFYYAGQGELYTFDKRSYKTGKWYKLKHVTEIKEHKNAKADPVSLSASQGIEIKSGGNIGAHATLFDAPRGSVKIEAGRGLVLYAVEDLNYDKLDTRTKRKFIGITYDKVHDTTTHTMKTALPSRVVAESANLQSGWDAKLQGTQFETTLGGAAIRAGVGDQARADAKIILEGIKSSVRTETVSSSKSALWQKQAGRGSNIETLQLPSFTGSVAPVLSAPGGYIVDIPKGNLKTEIEKLAKQPEYAYLKQLQVAKNVNWNQVQLAYDKWDYKQEGLTRAGAAIIALAVTVVTAGAGVGAALGLNGAAAAAADAAFASLASQASVSLINNKGDVGKTLKELGRSRTVKNLVVAAATAGVSNKLGASSLATWSETPWVNNLNVNLANAGSAALINTAVNGGSLKDNLEANILAALVNTAHGEAASKIKGLDQHYVAHKIAHAVAGCAAAAANKGKCQDGAIGAAVGEIVGEALVKNTDFSDMTPEQLDLEVKKITAYAKLAAGTVAGVTGGDVNTAAQTAQNAVENNAVKAVVTAAKVVYKVARKGLKNGKINVRDLKQTLKDEGYNLADNLTTLFDETLDWNDAKAVIDIVVGTELNRANKGEAAQKVKEVLEKNRPYIPNKGAVPNMSTYMKNNPFGKQLAQISEKTTLPTQQGQSVFLVKRNQGLLKTGDRFYLDGQHKNHLEVFDKNGNFKFVLNMDGSLNQMKTGAAKGRKLNLK

SEQ ID NO: 6905 - protein, 210 aa, Neisseria meningitidis; identical to SEQ ID NO: 5679

SEQ ID NO: 6906 - protein, 144 aa, Neisseria meningitidis; identical to SEQ ID NO: 1499

SEQ ID NO: 6907 - protein, 42 aa, Neisseria meningitidis
LFPLFIPEIELYKYQFYSEIIIDVGIIIKISAETINFEPLGK

SEQ ID NO: 6908 - protein, 214 aa, Neisseria meningitidis; identical to SEQ ID NO: 1408

SEQ ID NO: 6909 - protein, 473 aa, Neisseria meningitidis
MRHLPLFSLMLFPASVYAADLDGANLNLLWGLPFALILLSIALGPLFFSHTWHHHYGKITAFWTLLFLIPFSLVFGASAGIHTVAHALVEEYIPFILLLLALYTISGGILVWGDLNGTPKLNTALLAVGTALASIMGTTGAAMLMIRPLLKANQNRTRRVHIVIFFIFLVANIGGGLTPLGDPPLFLGFLKGVDFMWTVKHMFAPVLISTAVLLTAFYFIDNRFFKQESIAQDTPAQQEKPEKIAIFGKWNFLLLSGVVGAVLMSGLWKPEHPGFEILGSRYALQNLVRDVILIALTAVSMAITPKQVRAGNEFNFEPIAEVGKLFLGIFITIFPVLSILKAGEAGALGGVVSLVHDTAGHPINVMYFWMSGILSAFLDNAPTYLVFFNMAGGDAQALMTGTLFHSLLAVSMGSVFMGALTYIGNAPNFMVKAIAEQRGVPMPTFFGYMMWSVAFLTPVFIVHTLIFFVFKLL

SEQ ID NO: 6910 - protein, 107 aa, Neisseria meningitidis; identical to SEQ ID NO: 178

SEQ ID NO: 6911 - protein, 122 aa, Neisseria meningitidis
MKPLKRHPALIGLSRDHHHSLSLCVRLLRTPEERHRDELEPHFSELETHFREEETKFAPIWQNVAPELKQRFEKDHARLRQMMASPEYGNAAWNTAFATTLRDHARFEERELFPAAEPFLPA

SEQ ID NO: 6912 - protein, 929 aa, Neisseria meningitidis
MTDYSKTVNLLESPFPMRGNLAKREPAWLKSWYEQKRYQKLREIAKGRPKFILHDGPPYANGDIHIGHAVNKILKDIIIRSKTQAGFDAPYVPGWDCHGLPIEVMVEKLHGKDMPKARFRELCREYAAEQIARQKKDFIRLGVLGDWDHPYLTMDFKTEADTVRMLGEIYKSGYLYRGAKPVQFCLDCGSSLAEAEVEYKDKISPAIDVAYLFKDTAALAAAFGLAGFEGKAFAVIWTTTPWTLPASQAVSAGADVVYQLIDTPKGKLVLAKDLAEDALKRYGFSDGIAILAETTGDKLENLHMNHPFLERDIPMLNGEHVTTDAGTGLVHTAPAHGLEDYAVCNKYGIELYNPVNAEGRYIGETPRVAGMRVWEANPVILQWLEETGNLLASSKIEHSYAHCWRHKTPLIYRATGQWFVGMDKAGADGKTLRDKAIKAVDDTEFFPSWGRARLEAMIEGRPDWVVSRQRYWGTPMTFFVHKETGELHPNSAELLEKVALKIEEKGIEAWFSLDKSELLSAEDCENYDKLSDTMDVWFDSGSTHYSVVKQREELEWPADLYLEGSDQHRGWFQSSMLTGCASSMGRAPYKQLLTHGFVVDGEGKKMSKSIGNVVAPQEVYNEFGADILRLWAASTDYSGELAISKEILKRVTESYRRIRNTLSFLFANLSDFNPIEDAVQQADMVEIDRYAVVLARQLQECLAGDYYPRYAFHFAVKDIVSFCSEDLGAFYLDILKDRLYTTKADSHARRSAQTALYHITRSLVLLIAPILCFTGEEAWDIIGGGEEDSVLFHTWHEFPTINEKTEAELVKKWTAIREAREAVTAAIEPLRADKTVGSSLQAEAEITAPEEMAGYLNALGEELRFALLVSKAEVKVGSELAVAAKASDGEKCERCWHYTRDVGAVAGYETVCKRCAENVGGEGETRHYA

SEQ ID NO: 6913 - protein, 109 aa, Neisseria meningitidis; identical to SEQ ID NO: 4604

SEQ ID NO: 6914 - protein, 71 aa, Neisseria meningitidis
MKEYKVVIYQESPLSSLFFGAAKVNPVNFSAFLNKQTPEGWRVVTMEKDLRRMLLFFKREAYVVILERDRV

SEQ ID NO: 6915 - protein, 467 aa, Neisseria meningitidis; identical to SEQ ID NO: 3712

SEQ ID NO: 6916 - protein, 284 aa, Neisseria meningitidis
MSAQLINGKEVSQKRLQAVAEAVAQRQQNNLHTPCLAVVLVGGDPASAVYVRNKKTACQKCGIKSLSYELPESTSQEELLALVDRLNADSEVDGILVQLPLPKHLDSQAVLERISPDKDVDGFHPYNVGRLAVKMPLMRPCTPKGVMTLLEAYGIDPKGKKAVVVGASNIVGRPQALELLLARATVTVCHSATENLTDEVAGADILVVGVGIPNFVKGEWIKPGAVVIDVGINRLDDGSLCGDVEFETAKERAAMITPVPGGVGPMTIATLMENTLHAASLHDA

SEQ ID NO: 6917 - protein, 285 aa, Neisseria meningitidis
MARHVWQAGRFEIGLDKPKIMGIVNLTPDSFSDGGVYSQNAQTALAHAEQLLKEGADILDIGGESTRSGADYVSPEEEWARVEPVLAEVAGWGVPISLDTRRTVIMEKALALGGIDIINDVAALNDEGAVELLARQADTGICLMHMQGLPKTMQINPKYQDVVGEVARYLKARSAECIAAGIAPQRIILDPGFGSGFGKPLQHNIALMRHLPELMAETGFPLLIGVSRKSTIGELTGEANAAERVHGSVAAALASVARGAQIVRVHDVKATADALKVWEALGINL

SEQ ID NO: 6918 - protein, 325 aa, Neisseria meningitidis
LWVYPTGGRSWKLSFVQDGRQQTISLGRYPDFSLADAREWREEVRRKRAHGENVVNKKVRADFAFEKVARDWFVRWSKGRSEKYAGQVMRNFERWVFPAIGNLDIRQIRTADVVGCLRVMEARGIVDTLRKTKNSLKMVFAFAVGSGMMEINPVAQIGSGVFERAKTGNMAALSPSELPRLIDFLEQRNEFAVYAGRVRIHPVTRLCIYWLLLTMTRIQEAALMEWSELDGEVWRIPAERKKERRGHDVPLSRAMQWVLDQARALNVNGRFVFESVNFQGHINKESPRVAMQRAGLDTTAHGLRSLARTYLREVLKVDSIMRKRK

SEQ ID NO: 6919 - protein, 582 aa, Neisseria meningitidis
MIHYKITPSPLDHEWHILLTFTQDDDLPIEISLPNWVPGSYLIRDFSRHITSIHASCNGTSMPLEQIAKNRWHAAAVRGEWQIRYTVYAFDLSVRGSFLTTERGFFDGSCLFLKVEGTETLPHRLELTGIPSEWRIATTLPETGRFVFQAASYAELIDRPVEMGLIEFLDFEAAGIPHTIALSGIYPDFDRNRLVSDIKKICETELAVFSSPAPFQKYLFLLHVGDHIYGGLEHTDSTALLADRHSLPPYGMTDADDTYTTLLGLFSHEYFHAWNVKSIKPAAFVPYDLDKENYTEQLWAFEGITSYYDDLFLARSRTISPESYLNLLAQGITRVQQTRGRLRQTLAESSFTAWNKFYKPDENSPNAIVSYYQKGALAALCLDLIIRNRSNGRHSLDTLMDKLYREWRDTHSGIPEKHWQIRCQEITGLDLEDFFQKALYSTEDLPLAECLATAGVGLTFLPLPRQHGGGYAEHICPVPSAGDFGARFKQNTDHIVLTHVFNGGSAESAALCPQDKIIALDGYACTDFTAQWARYHVNAKINIHFFRAGILRQTVLTVQAAAADTAILHITDRNLLDNWLFG

SEQ ID NO: 6920 - protein, 766 aa, Neisseria meningitidis
MHRPTAKQILHEVFGYPEFRGRQEAVINTLAGGGSLTVLMPTGGGKSLCYQIPALMREGVAVVVSPLIALMNDQVANLHAAGIEAAAVNSGTSADEAREIADRLAQGRLKLLYVAPERLVTDRFLRFLDQQTVSLFAIDEAHCVSQWGHDFRPEYQQLGMLAERYPNVPRIALTATADAATRADIKHYLHLDDAPEFVSSFDRPNIYYQVIEKNNGKKQLLDFIRKEMTGQSGIVYCLSRKKVEDVAQFLRENGLNAIPYHAGLSMDVREENQRRFTHEDNIIVVATVAFGMGIDKPDVRFVAHLDMPQSVEHFYQESGRAGRDGLPAASWLCYGLNDWVLLRERIAEGNSDEVQKQIEMQKLDAMLAVCETAACRRVLLLKHFGEASEPCGHCDNCLHPPVRFDGTVLVQKLLSCVYRAGQRFAAGYITNILRGKSDDWIRGNRHEQLSTFGIGTELSDKEWRSVIRQCISLGYLTVNITRYQALQLTEAAKKVLKGETEVMLRPLKRDKPAARTLKDNWLRTEREERLWQALRVWRMKQAEAEGIPAYMIFGDKTLRDLVEKMPQDLNGLHDIYGLGEAKIDRFGHGILEVCRNAAGFSRDAVIRPQTEREQQLRQKLEAWRYEQARAENCALHAVLSDESLADMLADTPETETDLEGVYGLGSVRAAKYGRDILAVCRPFSDGIDETAKRKRRLMRALIQWCGETAKHEQSEPYRILSKAALRAIAAKQPEGLAELAAVYGVGEEKAARYGAAVLAVLERNAV

SEQ ID NO: 6921 - protein, 103 aa, Neisseria meningitidis
MKYKNEALAAIHEMMEGAYNIGAIDKKTMRDFDKSCLTEIKPLSGGDIKAIREKEALSQAAFAIYLNVGKNHVSAWERGVKKPSGAALKLLTIVKNKGIEAIA

SEQ ID NO: 6922 - protein, 82 aa, Neisseria meningitidis; identical to SEQ ID NO: 2338

SEQ ID NO: 6923 - protein, 278 aa, Neisseria meningitidis
MIDLHCHSTVSDGMLSPAEVVRLAHQNGCTLLALTDHDHTGGIAEARAEADKLGLRLINGVEISVTWRGRTIHVVGLDFDEQDENLQNLLAQVRKGRLKRLEAIAAKLEKKGIGGAYDGALALAANKEMVSRTHVAEFLIQAGHVKNKQQAFTKYLGDGKSCAVRHEWATLEDCVSAVNGAGGMAVIAHPMRYDLSATAKRNLFEEFKNLGGAGIEVHSGNCCKNDRLNYALLAERFGMLASAGSDFHRLNDFSGGILGACPELPENCKPVWEHFSRY

SEQ ID NO: 6924 - protein, 812 aa, Neisseria meningitidis
MTEKSHKKTAKGRAGSPSPTSARNKKADNGARGNKVSERLKAVKELQKTETKKARPEHVVNLIGDALWLMGLAATLYLAISLISFDMGDPSWSHSSPVVEDVANWGGLFGAYVADVGYYLFGWSFWWWIAAACVVLYKNFRLHAKQTENEAYNHKIAAAALFVLTVFSPVLEYFVLGGKYADSLPVGAGGMVGIRVGAVFAWLLGKSGSLLIILVVLLLSLSLLVQISWLEFLNGAGRAVQNRLSALSGKVMALGKRRPNTKTDGVDTQNTRRMVKEAKNITAKPVALPEGSSSNRKSVAVSVAPPPKIQVSLFEDDEPRQAGEYHKPTLNLLRIPDSEPVSINPAELERTAELIESKLAEFGIGVQVVSATSGPVITRYEIEPAQGVKGSQIVALSKDLARSMSLQSVRIVETIAGKNTMGIELPNDKRQDVMLSEILSSPVFAEAKSKLTVALGKDIAGTPVVGDLAKMPHLLVAGMTGSGKSVGVNGMIMSMLFKATPDEVRFIMIDPKMLELSIYDGIPHLLCPVVTDMREAGQALNWCVAEMEKRYRLLSHAGVRNLEGFNQKVEAAKAAGKPLLNPFSLNPDEPEPLEKLPLIVVVIDELADLMMTERKAVEQQIARLAQKARAAGIHMIVATQRPSVDVVTGLIKANIPTRMAFTVQSKIDSRTILDQMGADELLKYGDSLFLQPGSAEPTRLQGAFVSDDEVHQVVNYVKSQAPADYIEGLLSGEAALETANIVNPNADSDELFDQAVAYVLESKKTSISSLQRQLRIGYNRAANLMEALENAGVVSSTDLNGSRKILAHKDHL

SEQ ID NO: 6925 - protein, 580 aa, Neisseria meningitidis
MKFFPAPCLLVILAVIPLKTLAADENDAELIRSMQRQQHIDAELLTDANVRFEQPLEKNNYVLSEDETPCTRVNYISLDDKTVRKFSFLPSVLMKETAFKTGMCLGSNNLSRLQKAAQQILIVRGYLTSQAIIQPQNMDSGILKLRVSAGEIGDIRYEEKRDGKSAEGSISAFNNKFPLYRNKILNLRDVEQGLENLRRLPSVKTDIQIIPSEEEGKSDLQIKWQQNKPIRFSIGIDDAGGKTTGKYQGNVALSFDNPLGLSDLFYVSYGRGLAHKTDLTDATGTETESGSRSYSVHYSVPVKKWLFSFNHNGHRYHEATEGYSVNYDYNGKQYQSSLAAERMLWRNRLHKTSVGMKLWTRQTYKYIDDAEIEVQRRRSAGWEAELRHRAYLNRWQLDGKLSYKRGTGMRQSMPAPEENGGDILPGTSRMKIITASLDAAAPFILGKQQFFYATAIQAQWNKTPLVAQDKLSIGSRYTVRGFDGEQSLFGERGFYWQNTLTWYFHPNHQFYLGADYGRVSGESAQYVSGKQLMGAVVGFRGGHKVGGMFAYDLFAGKPLHKPKGFQTTNTVYGFNLNYSF

SEQ ID NO: 6926 - protein, 417 aa, Neisseria meningitidis
MQTYLVGGAVRDYLLGLPVKDRDWVVVGADAQTMLAQGFQPVGKDFPVFLHPETHEEYALARTERKTAKGYVGFSFHADKDVTLEQDLMRRDLTINAMAQDADGKIIDPFGGQRDLAAGILRHVSPAFAEDPVRILRTARFAARYKFEIAEETIKLMRQMVENGEADALVAERVWQEFAKGLMEKNPRKMIEVLRECGALKVLLPEVNALFGVPQRADYHPEIDSGIHTLMTLQRAADMGLSLPERYAALLHDLGKAKTPSDILPRHHGHDLAGVEPVREVNQRLRAPKHCAELAELVCRWHIIFHQVGQLKSQTILNVLKKTDAFRRPERFQTALNVCIADTQGRLNREHTPYPQRAHWLALLEAANQADSGKIAAECRAQGKAHLIAEQIDRARLAQIAPLQKAFRAAQDKTEKH

SEQ ID NO: 6927 - protein, 103 aa, Neisseria meningitidis; identical to SEQ ID NO: 2233

SEQ ID NO: 6928 - protein, 92 aa, Neisseria meningitidis
MSRNLLVRWLVVCLIPLATLAVFVANPPEDKPQHLINGIILACEATFLFKFVLFDTIKHHLKQEFDLKRQTMLLFIPIILLIVYLFHYFGAF

SEQ ID NO: 6929 - protein, 213 aa, Neisseria meningitidis; identical to SEQ ID NO: 2602

SEQ ID NO: 6930 - protein, 144 aa, Neisseria meningitidis
MCGLWLLRALTAKLPQQRYAALFITLFFAAVLVFGRHDSMYWYPVLVNLMMLAVFGGSLFAGQTVIEKLARLQQPDLPEKAVRYTRRVTQVWCVFFIINGTLAALLARLGRYDWWAVYTGVIAYVLMGMLFAGEWLYRKLVLKV

SEQ ID NO: 6931 - protein, 231 aa, Neisseria meningitidis
MSELILKCEGVGKRYRDGGLDVRVLHGLDLEIHAGESTGIIGSSGSGKSTLLHILGGLDMPSEGRVLLMGEDLRTLNQRRLGDLRNRHLGFVYQFHHLLPEFSALENVMMPLLIGKKSREEAAEAAMAMLEKVGLKHRSTHRAGELSGGERQRAAIARALVTQPKCLLADEPTGNLDRANARNVLDMMLELKTELGTGLVVVTHDDELAGRFERVMVMKDGSLHPKQGANA

SEQ ID NO: 6932 - protein, 103 aa, Neisseria meningitidis; identical to SEQ ID NO: 2233

SEQ ID NO: 6933 - protein, 525 aa, Neisseria meningitidis
MMKKSFLTLVLYSSLLTASEIAYRFVFGIETLPAAKIAETFALTFVIAALYLFARYKVTRLLIAVFFAFSIIANNVHYAVYQSWMTGINYWLMLKEVTEVGSAGASMLDKLWLPVLWGVLEVMLFCSLAKFRRKTHFSADILFAFLMLMIFVRSFDTKQEHGISPKPTYSRIKANYFSFGYFVGRVLPYQLFDLSRIPAFKQPAPSKIGQGSVQNIVLIMGESESAAHLKLFGYGRETSPFLTRLSQADFKPIVKQSYSAGFMTAVSLPSFFNAIPHANGLEQISGGDTNMFRLAKEQGYETYFYSAQAENEMAILNLIGKKWIDHLIQPTQLGYGNGDNMPDEKLLPLFDKINLQQGKHFIVLHQRGSHAPYGALLQPQDKVFGEADIVDKYDNTIHKTDQMIQTVFEQLQKQPDGNWLFAYTSDHGQYVRQDIYNQGTVQPDSYLVPLVLYSPDKAVQQAANQAFAPCEIAFHQQLSTFLIHTLGYDMPVSGCREGSVTGNLITGDAGSLNIRDGKAEYVYPQ

SEQ ID NO: 6934 - protein, 915 aa, Neisseria meningitidis
LKPICFYLMGVTLYHYSYAEDAGRAGSEAQIQVLEDVHVKAKRVPKDKKVFTDARAVSTRQDIFKSSENLDNIVRSIPGAFTQQDKSSGIVSLNIRGDSGFGRVNTMVDGITQTFYSTSTDAGRAGGSSQFGASVDSNFIAGLDVVKGSFSGSAGINSLAGSANLRTLGVDDVVQGNNTYGLLLKGLTGTNSTKGNAMAAIGARKWLESGASVGVLYGHSRRSVAQNYRVGGGGQHIGNFGAEYLERRKQRYFVQEGALKFNSDSGKWERDLQRQQWKYKPYKNYNNQELQKYIEEHDKSWRENLAPQYDITPIDPSSLKQQSAGNLFKLEYDGVFNKYTAQFRDLNTKIGSRKIINRNYQFNYGLSLNPYTNLNLTAAYNSGRQKYPKGSKFTGWGLLKDFETYNNAKILDLNNTATFRLPRETELQTTLGFNYFHNEYGKNRFPEELGLFFDGPDQDNGLYSYLGRFKGDKGLLPQKSTIVQPAGSQYFNTFYFDAALKKDIYRLNYSTNTVGYRFGGEYTGYYGSDDEFKRAFGENSPTYKKHCNRSCGIYEPVLKKYGKKRANNHSVSISADFGDYFMPFASYSRTHRMPNIQEMYFSQIGDSGVHTALKPERANTWQFGFNTYKKGLLKQDDTLGLKLVGYRSRIDNYIHNVYGKWWDLNGDIPSWVSSTGLAYTIQHRNFKDKVHKHGFELELNYDYGRFFTNLSYAYQKSTQPTNFSDASESPNNASKEDQLKQGYGLSRVSALPRDYGRLEVGTRWLGNKLTLGGAMRYFGKSIRATAEERYIDGTNGGNTSNFRQLGKRSIKQTETLARQPLIFDFYAAYEPKKNLIFRAEVKNLFDRRYIDPLDAGNDAATQRYYSSFDPKDKDEDVTCNADKTLCNGKYGGTSKSVLTNFARGRTFLMTMSYKF

SEQ ID NO: 6935 - protein, 155 aa, Neisseria meningitidis; identical to SEQ ID NO: 3828

SEQ ID NO: 6936 - protein, 230 aa, Neisseria meningitidis
MTAFVHTLSDGMELTVEIKRRAKKNLIIRPAGTHTVRISVPPCFSVSALNRWLYENEAVLRQTLAKTPPPQTAENRLPESILFHGRQLALTAHQDTQILLMPSEIRVPEGAPEKQLALLRDFLERQAHSYLIPRLERHARTTQLFPASSSLTSAKTFWGVCRKTTGIRFNWRLVGAPEYVADYVCIHELCHLAHPDHSPAFWELTRRFAPYTPKAKQWLKIHGRELFALG

SEQ ID NO: 6937 - protein, 146 aa, Neisseria meningitidis
VNIRRAVCADCEELAALDAVCNPSAWTQRQFESALVSPSEQVFLAEKDGGIAAFIVWQNLPDESELHLIATAPECRRQGIASALLEYWFTHLPEDTQRLLLEVRAGNTAAQALYTAHGFSITGRRKNYYRTADGKTEDAVLMEKIC

SEQ ID NO: 6938 - protein, 365 aa, Neisseria meningitidis
LPHAVFLHYNPLDYPAKRTKGIRHNNLPPFRRHKPFRNEQTMDTLTRFLPEHLQQNQLPEALGGVLLSVVSACTEINAKVRLGALAGVLGMAGTGNIQGEDQKKLDVIANNIMIDTLKANSAVAGLASEEEDTFVNAGENGRYLVLFDPLDGSSNIDVNISVGTIFSILEKPEGALATESFLQTGRQQLAAGYVLYGPQTQLVFTFGHGVYMFTLNAENEFVLTKENPKVPESTKEFAINMSNRRHWLPPVQQYIDELLAGETGTRGKNYNMRWVASMVAEIHRILMRGGVFMYPQDKRDPAKPGKLRLMYEANPMSLILEQAGASASNAYQAMLDIQPENLHQRVAVFMGSSEEVAYLDRLHAK

SEQ ID NO: 6939 - protein, 79 aa, Neisseria meningitidis; identical to SEQ ID NO: 1083

SEQ ID NO: 6940 - protein, 198 aa, Neisseria meningitidis
LRQGLWNVFLPASDAEILFFLPNNLFSQGKLDYNGGMKKYLIPLSIAAVLSGCQSIYVPTLTEIPVNPINTVKTEAPAKGFRLASSHWTDVAKISDEATRLGYQVGIGKMTKVQAAQYLNNFRKRLVGRNAVDDSMYEIYLRSAIDSQRGAINTEQSKLYIQNALRGWQQRWKNMDVKPNNPAFTNFLMEVMKMQPLK

SEQ ID NO: 6941 - protein, 120 aa, Neisseria meningitidis
MDIRYFGTTPRYSEAVGANGLIFLSGMVPENGETAAEQTADVLAQIDRWLAECGSDKAHVLDAVIYLRDMGDYAEMNGVWDAWVAAGRTPARACVEARLARPEWRVEIKITAVKRDAATA

SEQ ID NO: 6942 - protein, 481 aa, Neisseria meningitidis
MTQYTLKQASVLLQSKQISAVELASAYLAAIAEKNPALNGYITIDQDKTLAEARAADERIAQGNASALTGVPVAYKDIFCQTGWRSACASKMLDNFISPYTATVVQNLLDEGMVTLGRTNMDEFAMGSTNENSFYGAAKNPWNLEHVPGGSSGGSAAVVAARLAPAALGSDTGGSIRQPASHCGITGIKPTYGTVSRFGMVAYASSFDQTGPMAQTAEDCAILLNAMAGFDPKDSTSLEREKEDYTRDLNQPLKGLKIGLPKEYFGEGNSADVLTALQNTIDLLKAQGAELIEVSLPQTKLSIPAYYVLASAEASTNLSRYDGVRYGHRAAQFADLEEMYGKTRAEGFGSEVKRRIMIGTYVLSHGYYDAYYLKAQKLRRLVADDFQTAFARCDLILAPTAPTAAPKIGADASPVETYLSDIYTIAVNLAGLPALTLPAGFSGGGLPVGVQLVGNYFAEAKILGAAHQIQLNSDWHGKRPE

SEQ ID NO: 6943 - protein, 226 aa, Neisseria meningitidis
MIFQTVWFSDMVLSVSWIVLILILAASAPSAFRSLARYRSALPLCTVIFSAAWCLNASAGGGQLAQMNYHLLAVNLVALMMGTSAALWLAALLMLPYCLLFAGSVGAYPPNALVLILPALTVNRLSRMLVNRLPPNIFIFIFVNGFLASAAGILLTGLVLTGILDAANAFPSEILWTTALPVFILLAWAEAFLSGISTAIFVALKPHWINTFDDNRYLKSDRGIWR

SEQ ID NO: 6944 - protein, 366 aa, Neisseria meningitidis
METQLYIGIMSGTSMDGADAVLIRMDGGKWLGAEGHAFTPYPGRLRRQLLDLQDTGADELHRSRILSQELSRLYAQTAAELLCSQNLAPSDITALGCHGQTVRHAPEHGYSIQLADLPLLAERTRIFTVGDFRSRDLAAGGQGAPLVPAFHEALFRDNRETRAVLNIGGIANISVLPPDAPAFGFDTGPGNMLMDAWTQAHWQLPYDKNGAKAAQGNILPQLLDRLLAHPYFAQPHPKSTGRELFALNWLETYLDGGENRYDVLRTLSRFTAQTVCDAVSHAAADARQMYICGGGIRNPVLMADLAECFGTRVSLHSTADLNLDPQWVEAAAFAWLAACWINRIPGSPHKATGASKPCILGAGYYY

SEQ ID NO: 6945 - protein, 201 aa, Neisseria meningitidis; identical to SEQ ID NO: 2273

SEQ ID NO: 6946 - protein, 255 aa, Neisseria meningitidis
LKETMPSIICRFHFDIAAWRVSGSKMRDMAQWAKWAECPDFADGLPDVRPELPFLPAMQRRRLSKAARLVCDAAWDIASAHPGSPVVYASHDGEMARSFDLWLELLKSHTVSPTSFGLSVHNATAGQWSILRQDMSEQTALAVCADGVETALAEAASLLEEGCGSVLVLAADDPLPEGYAVSATRAPFAYALAMVLTKGTRYSLTLSASDDMPSEAGMLPEAYWSGLEWVRFLLNGSRECRRVYRNREWLWQRNG

SEQ ID NO: 6947 - protein, 95 aa, Neisseria meningitidis
MKITHCKLKKKVQKELLRFFVLEVTARSAADILGIHPNSAALFYRKIRTVINHHLALAADEVFEGPVEPDESDFGGRRKGRRGRGRQEKWLSSAF

SEQ ID NO: 6948 - protein, 231 aa, Neisseria meningitidis
MKAMILAAGRGERMRPLTDTTPKPLLDVAGKPLIGWHLCRLKQAGFTEIVINHAWLGRQIEDALGDGSAYGVNIAYSPEPAGGLETAGGIAQALPLLGGQPFLVVNGDVLTDIDFTAAFQTASSLPEHISAHLWLVENPPHNPDGDFSLLPDSSVRPEVNGGNGLTFSGVGIYRPEMFDGIEAGSVAKLAPVLRGEMRQNRVSGQKHTGLWLDVGTVCRLKEAQALAGAWK

SEQ ID NO: 6949 - protein, 482 aa, Neisseria meningitidis
MNGDIGVIGLAVMGQNLILNMNDCGFKVVAYNRTTAKVDEFLNGAAKGTNIIGAYSLQDLVDKLEKPRKIMMMVRAGSVVDEFIEQLLPLLEEGDILIDGGNANYPDTTRRTHYLAEKGILFVGAGVSGGEEGARRGPSIMPGGDKRAWDAVKPIFQAIAAKTSQGEPCCDWVGKDGAGHFVKMVHNGIEYGDMQLICEAYQFMKDGLGLSYDEMYRVFAEWNKTELDSYLIEITAAILGYKDEGGEPLVEKILDTAGQKGTGKWTGINALDLGIPLTLISEAVFARCVSSFKEQRVQTGKLFARTVTPVEGGKQEWVEALRQALLASKIISYAQGFMLIREAGESYGWDLDYGNTALLWREGCIIRSAFLSNIRDAYENNPDLVFLGADPYFKNILENCLPAWRKVVAKAVECGIPMPCMASAITFLDGYTTERLPANLLQAQRDYFGAHTYERTDKPRGEFFHTNWTGKGGDTASTTYDI

SEQ ID NO: 6950 - protein, 328 aa, Neisseria meningitidis
VSGAESYRHITVLLNEAVDALAVREDGVYVDGTFGRGGHSRLILSRLGDAGRLIVFDKDPQAIAVAEELARSDKRVGVVHGGFASFQTALDGLGIGKVDGALFDLGISSPQIDDGSRGFSFRFDAPLDMRMDTTRGMSAAEWIAVASEQDLHEVIKNYGEERFSRRIARAIVAQRAESPIDTTRKLAQIVAQNVRTRERGQDPATRTFQAVRIFINRELEEVGAVLPQVMCRLKEGGRLAVIAFHSLEDRIVKQFVKKYSQHAPLPRWAAVREADLPELPLKIVGRALKPGEAEIAANPRARSAVLRVAERTAGPIPEQSQRKTSEWQ

SEQ ID NO: 6951 - protein, 298 aa, Neisseria meningitidis
LNPTNDLKTWQQRAQAQTELLLERFLPSEGEIPHTLHEAMRYAALDGGKRLRPMLVLAASELGEAVHEAVEQAMAAIEMIHVYSLVHDDMPAMDNDSLRRGKPTCHIKYGEATALLTGDALQTQAFDVLSRPTELPAARQLAMLSVLAKAGGSRGMAGGQAIDLANVGKQMVQADLEQMHSLKTGALIRAAVLLGATACPDLSDAELSVLDAYAAKLGLAFQVIDDVLDCEADTATLGKTAGKDADNDKPTYVKLMGLEAARSYAHKLVAEAVALLEPFGDKALRLRQLAEFAVARKY

SEQ ID NO: 6952 - protein, 89 aa, Neisseria meningitidis
MAMNKLNFLLLLAVCVSAFSVVMQQNQYRLNFTALDKAKKQEIALEQDYAQMRLQQARLANHEAIRAAAEKQNLHPPVSGNTFMVEHQR

SEQ ID NO: 6953 - protein, 1371 aa, Neisseria meningitidis; identical to SEQ ID NO: 6744
  misc_feature 1367, 1368, 1369: 'Xaa' is any amino acid

SEQ ID NO: 6954 - protein, 257 aa, Neisseria meningitidis
MPDNGRHKAGKMETTLFKPALWQIPHIGSGGETALAEKTETLKQRLHRIVGSHRDARFASSLAAEDMVITDLIAGENLNIGIFTLDTGLLHTETLNLLDRLGRAYPHLRIKRFRPVREDADRYVESKGRFAFYDSVEARRECCRIRKTEPLNRAIAGADAWLTGQRREQSATRTELPFAEYDAGRGIGKYNPIFDWSEHDVWAYILANNVPYNDLYRQGFPSIGCDPCTRPVKAGEDIRAGRWWWEGRNSKECGLHK

SEQ ID NO: 6955 - protein, 160 aa, Neisseria meningitidis; identical to SEQ ID NO: 515

SEQ ID NO: 6956 - protein, 399 aa, Neisseria meningitidis
MPPAEVPSDGIVKNFIKNRIPIMSTPALLVLADGSVFHGTSIGYEGSTSGEVVFNTSMTGYQEILTDPSYCKQIVTLTYPHIGNTGTNAEDEESRSVYAAGLIIRDLPLLHSNFRASESLHDYLVRNKTVAIADIDTRRLTTLLREKGAQGGAILTGADATIEKAQELIAAFGSMVGKDLAKEVSCTETYEWTEGEWALGKGFVTPDEQPYHVVAYDFGVKTNILRMLASRGCRLTVVPAQTSAEDVLALNPDGVFLSNGPGDPEPCTYAIKAVQKLIESGKPIFGICLGHQLISLAIGAKTLKMRFSHHGANHPVQDLDSGKVVITSQNHGFAVDADTLPANARITHKSLFDNTLQGIELTDKPVFCFQGHPEASPGPQDVGYLFDKFIGNMKAAKRA

SEQ ID NO: 6957 - protein, 129 aa, Neisseria meningitidis; identical to SEQ ID NO: 322

SEQ ID NO: 6958 - protein, 193 aa, Neisseria meningitidis
MEEKNDYTDAASDNRNGQEIEVGIAGAGDRILAALLNQLFTFLVLLVPFAGLIAFAIKNEGRIGSGEEIFGLLLGMTSFWVGLAGILAYTVIQIYYMSRDGQSLGKKIMRIRVLKTDGRNPGFVGTVLVREIAWSVLVAIIAAVIGLAVGDNGENAINLLAFLANFVLLFMVKRDRRTLYDILADTVVVKLPK

SEQ ID NO: 6959 - protein, 312 aa, Neisseria meningitidis
MLELNGLCKRFGNKTVADNICLTVGRGKILAVLGRSGCGKSTLLNIIAGIVRPDGGEIWLNGENITRMPPEKRRISLMFQDYALFPHMSALENAAFGLKMQKMPKAEAERLAMAALAEVGLENEAHRKPEKLSGGEKQRLALARALVVRPSLLLLDESFSSLDTHLRGTLRRMTAERIRNGGIPAVLVTHSPEEACTTADEIAVMHKGRILQYGTPETLVKTPSCVQVARLMGLPNTDDNRHIPQHAVRFDQDGMECRVLSRTCLPESFSLSVLHPEHGILWLNLDMRHAGAVSGKDTVRIHIEEREIVRFR

SEQ ID NO: 6960 - protein, 235 aa, Neisseria meningitidis
MNAAIEHVQAVAFDLDGTLCDSVPDLAAAAEAMLEQLGMKPLPAKVVESYVGDGIGKLVHRVLTNDRDREADSELWEKGFVSYMKYYRDHLSVFTRPYPETEAGLALLKSLGIPLAVVTNKNEILASELLKQLGLADYFSLILGGDSLPEKKPSPLPLRHAAEVLGIDVANMVMVGDSRNDIIAAKAAGCLSVGVTFGYGDMTLLSQDDATRPDWIIGSLPEIYENLQPQKNKEE

SEQ ID NO: 6961 - protein, 278 aa, Neisseria meningitidis
MQIIHTIRELRAWRKNAGKVAFVPTMGNLHEGHLALVREAKKRADSVVVSIFVNRLQFGQGEDFDKYPRTLQQDADKLAAEGIAVVFAPDEKELYPNVEQRYNVEPPNLQNELCGKFRPGHFRGVATVVSKLFHIVSPDIACFGKKDYQQLAVIKGFVEDLNFDVEIVPVDTGRAEDGLALSSRNQYLSAAERDEAPRLYRELKAVAESLVQGSLDYAGLEKRAVQSLTEYGWVVDYVEIRRADTLEVARAGDKKLVVLAAACLGTTRLIDNLEIKLP

SEQ ID NO: 6962 - protein, 424 aa, Neisseria meningitidis
MKTLQDWLSHLETAHSGGLIDMGLERTSEVKKRMKLEPQCPVVVVAGTNGKGSVCAYLTQIYKQAGYKIGTLTSPHLLRYNERIAINAEPVSDDTIIASFERIEAARGEISLTYFEFNALAAVDIFMREQVDVMILEVGLGGRLDAVNAFDGDCAVVTSVDLDHQAFLGDTVEQVGFEKAGVFRSGKPAICGQNPAPKSLLSHAEAIGAKLLMVQRDFEFHAMENIQWNYRFRPQHSDDPARNRNALPFPALRGTYQLSNAACALTVLECLNDKLPVDIGAIKRGLLLVENPGRFQVLPGRPLTVLDVGHNPHAARALRRSLINLAFAQKRTAVFSMLSDKDIDGVLETVKDQFDEWYIAPLDVPRGMTLESLQNKLHEHSIENIQTFAAVREAYRAAASKAGENDRIVVFGSFHTVADVMSVL

SEQ ID NO: 6963 - protein, 153 aa, Neisseria meningitidis
MKPQKSLRARAMDILSRQELSRIGLKRKLAPHAESEEELENVLNEFAERNWQSDLRYAEAYIRSKSRKHGSLRLKQALAQQGIDEETSRNLLPDRSSEKLAAIAVLRKKFKHPAADLKEKQKQARFLAYRGFDADTVQTALKHAWDDGWEEDC

SEQ ID NO: 6964 - protein, 146 aa, Neisseria meningitidis
MPTQSKHASINIGLIQAREALMTQFRPILNQANITDQQWRIIRLLAENGTLDFQDLANQACILRPSLTGILTRLEKAGLVVRLKPSNDQRRVFLKLTAEGEKLYEEIGEEVDERYDAIEEVLGREKMLLLKDLLAELAKIEDALNS

SEQ ID NO: 6965 - protein, 924 aa, Neisseria meningitidis
VNGLARMRHLGYIYNIYGRRERKIMQLHILNNPKDAALAADAEFLKQSLFNLLHEEASPLVVETVKLLSTSDDSAALIEKVLPQLDEQQTHDLTLACGLFAQILNIAEDVHHERRRQIHEEAGRGGAEGSLTETVRRLKAGKADGKSVQRQLDNTSVTAVLTAHPTEVQRQTVLSFNRRIRALLPQRERCTNADALARLRREIDTILLGLWQTSETRRHKLSVNDEINNGVSIFPMSFFEALPKLYRKMEHDFQTAYPGVRVPDILKIGGWIGGDRDGNPFVSAETLRFAFRRHADAVFRFYRGELDKLYRELPLSIRRVKVNGDVTALSDKSPDEEIARAEEPYRRAIAYIMARAMGKARALGLGMGCKFGFLEPYASAQEFLDDLKKLQRSLIDNGSRLLAEGRLADLIRSVSVFGFHMMPLDLRQHAGKHADVVAELFQHAGLEDYNRLNEEQKQTALLRELSHQRPLYSPFITYSDHTRHELAIFNEARKIKDEFGEDAVTQSIISNCEQPSDLLALALLLKETGLLAVENGKPHSRINIVPLFETIEALENACPVMETMFRLDWYDALLESRGNIQEIMLGYSDSNKDGGYVTSSWCLYQAELGLVELFKKYDVRMRLFHGRGGSVGRGGGPSYQAILAQPAGSVAGQIRITEQGEVITAKYADPGNAQRNLETLVAATLEASILPDKKDPDAKLMQALSDVSFKYYRELITHPDFIDYFLQTSPIQEIATLNLGSRPASRKTLARIQDLRAIPWVFSWMQNRLMLPAWYGFGSAVETLCEDKPETLAALREHAQSNPFFQAMLSNMEQVMAKTDITLAENYAGLSESPDKAKIIFGMIKEEYRRSRKALLDLLQTEELLRDNRSLARSLALRIPYLNALNGLQVAMLKRLRKEPDNPHALLMVHLTINGVAQGLRNTG

SEQ ID NO: 6966 - protein, 207 aa, Neisseria meningitidis
MRKPTDTLPVNLQRRRLLCAAGALLLSPLAHAGAQREETLADDVASVMRSSVGSVNPPRLVFDNPKEGERWLSAMSARLARFVPEEEERRRLLVNIQYESSRAGLDTQIVLGLIEVESAFRQYAISGVGARGLMQVMPFWKNYIGKPAHNLFDIRTNLRYGCTILRHYRNLEKGNIVRALARFNGSLGSNKYPNAVLGAWRNRWQWR

SEQ ID NO: 6967 - protein, 276 aa, Neisseria meningitidis; identical to SEQ ID NO: 3411

SEQ ID NO: 6968 - protein, 514 aa, Neisseria meningitidis
MMTEMQQRAQLHRQIWKIADEVRGAVDGWDFKQYVLGTLFYRFISENFTDYMQAGDSSIDYAAMPDSIITPEIKDDAVKVKGYFIYPGQLFCNIAAEAHQNEELNTKLKEIFTAIESSASGYPSEQDIKGLFDDFDTTSSRLGSTVADKNKRLAAVLKGVAELDFGNFENHHIDLFGDAYEYLISNYAANAGKSGGEFFTPQSVSKLIARLAVHGQEKVNKIYDPACGSGSLLLQAKKQFDEHIIEEGFFGQEINHTTYNLARMNMFLHNVNYNQFHIELGDTLTNPKLKDSKPFDAIVSNPPYSINWIGSDDPTLINDDRFAPAGVLAPKSKADFAFILHALNYLSGRGRAAIVSFPGIFYRGGAEQKIRQYLVEGNYVETVIALAPNLFYGTGIAVNILVLSKHKDNTDIQFIDASGFFKKETNNNVLIEEHIAEIVKLFADKADVPHIAQNAAQQTVKDNGYNLAVSSYVEAEDTREIIDIKQLNAEIGETVAKIERLRREIDEVIAEIEA

SEQ ID NO: 6969 - protein, 219 aa, Neisseria meningitidis
MTTPKLIIFDWDGTLADTTQPIIDTMRRSFAECGFPPPEAERVRSLIGYSLPEIIRTLLEMPSETAVADITRTYSAHYLNPNNRNMSLFPDALPCLDKLKAQGYWLAVATGKGRAGLDNAISQTATGGYWLATACAGEYPSKPSPEMVFGICGELGLDPKEALVVGDTAHDLHMAANAGAAAVGVATGAHSREQLLSAPHLAVLDGLSELPGFLAQHYA

SEQ ID NO: 6970 - protein, 305 aa, Neisseria meningitidis
MSVYTSVSDDEMRGFLSGYDLGEFVSLQGIAQGITNSNYFLTTTSGRYVLTVFEVLKQEELPFFLELNRHLSMKGVAVAAPVARKDGRLDSVLAGKPACLVACLKGSDTALPTAEQCFHTGAMLAKMHLAAADFPLEMENPRYNAWWTEACARLLPVLSQDDAALLCSEIDALKDNLGNHLPSGIIHADLFKDNVLLDGGQVSGFIDFYYACRGNFMYDLAIAVNDWARTADNKLDEALKKAFIGGYEGVRPLSAEEKAYFPTAQRAGCIRFWVSRLLDFHFPQAGEMTFIKDPNAFRNLLLSLG

SEQ ID NO: 6971 - protein, 430 aa, Neisseria meningitidis
MQFSAFGEKFTQHSGILQLMDDLGDALKSDKPVNMLGGGNPARIPEIDQAFADIFSKLAAEHAVENIGNYSNPQGDAVLIDALTAFLNREYSWNLTADNIALTNGSQNAFFYLFNLFGGKFNLSDGTSAEKAILLPLAPEYIGYADVHVEGQHFVSVKPKIENVEHEGEAGFFKYRVDFDALENLPELKAGKIGAICCSRPTNPTGNVLTDGEMARLDALAREHGIPLIIDNAYGMPFPNIIYSDVTLNWHENIILCFSLSKVGLPGVRTGIIVAAPEVVKAVSSLNAIVNLAPTRFGAAIATPLLESGEMKRLADQVIRPFYRNQAQTAVSLLKRELGAYPMKIHKPEGAIFLWLWFENLPVSSQTLYEMLKAEGTLIIPGEHFFVGIDTQDYPHAGECIRMSIAQDAQTLEKGIAAIGKTVRKLYDNV

SEQ ID NO: 6972 - protein, 1201 aa, Neisseria meningitidis
MFHFAFPAQTALRQAITDAYRRNEIEAVQDMLQRAQMSDEERNAASELARRLVTQVRAGRTKAGGVDALMHEFSLSSEEGIALMCLAEALLRIPDNATRDRLIADKISDGNWKSHLNNSPSLFVNAAAWGLLITGKLTATNDKQMSSALSRLISKGGAPLIRQGVNYAMRLLGKQFVTGQTIEEALQNGKEREKMGYRFSFDMLGEAAYTQADADRYYRDYVEAIHAIGKDAAGQGVYEGNGISVKLSAIHPRYSRTQHGRVMGELLPRLKELFLLGKKYDIGINIDAEEANRLELSLDLMEALVSDPDLAGYKGIGFVVQAYQKRCPFVIDYLIDLARRNNQKLMIRLVKGAYWDSEIKWAQVDGLNGYPTYTRKVHTDISYLACARKLLSAQDAVFPQFATHNAYTLGAIYQMGKGKDFEHQCLHGMGETLYDQVVGPQNLGRRVRVYAPVGTHETLLAYLVRRLLENGANSSFVNQIVDENISIDTLIRSPFDTIAEQGIHLHNALPLPRDLYGKCRLNSQGVDLSNENVLQQLQEQMNKAAAQDFHAASIVNGKARDVGEAQPIKNPADHDDIVGTVSFADAALAQEAVGAAVAAFPEWSATPAAERAACLRRFADLLEQHTPALMMLAVREAGKTLNNAIAEVREAVDFCRYYANEAEHTLPQDAKAVGAIVAISPWNFPLAIFTGEVVSALAAGNTVIAKPAEQTSLIAGYAVSLMHEAGIPTSALQLVLGAGDVGAALTNDARIGGVIFTGSTEVARLINKALAKRGDNPVLIAETGGQNAMIVDSTALAEQVCADVLNSAFDSAGQRCSALRILCVQEDVADRMLDMIKGAMDELVVGKPIQLTTDVGPVIDAEAQQNLLNHINKMKGVAKSYHEVKTAADVDSKKSTFVRPILFELNNLNELQREVFGPVLHVVRYRADELDNVIDQINSKGYALTHGVHSRIEGTVRHIRSRIEAGNVYVNRNIVGAVVGVQPFGGHGLSGTGPKAGGSFYLQKLTRAGEWVAPTLSQIGQADEAALKRLEALVHKLPFNAEEKKAAAAALGHARIRTLRRAETVLTGPTGERNSISWHAPKRVWIHGGSTVQAFAALTELAASGIQAVVEPDSPLASYTADLEGLLLVNGKPETAGISHVAALSPLDSARKQELAAHDGALIRILPSENGLDILQVFEEISCSVNTTAAGGNASLMAVAD

SEQ ID NO: 6973 - protein, 185 aa, Neisseria meningitidis; identical to SEQ ID NO: 313

SEQ ID NO: 6974 - protein, 186 aa, Neisseria meningitidis; identical to SEQ ID NO: 1480

SEQ ID NO: 6975 - protein, 431 aa, Neisseria meningitidis
MLDIQLLRSNTAAVAERLARRGYDFDTARFDTLEERRKSVQVKTEELQASRNSISKQIGALKGQGKHEEAQAAMNQVAQIKTDLEQAAADLDAVQKELDAWLLSIPNLPHESVPAGKDETENVEVRKVGTPREFDFEIKDHVDLGEPLGLDFEGGAKLSGARFTVMRGQIARLHRALAQFMLDTHTLQHGYTEHYTPYIVDDTTLQGTGQLPKFAEDLFHVTRGGDETKTTQYLIPTAEVTLTNTVADSIIPSEQLPLKLTAHSPCFRSEAGSYGKDTRGLIRQHQFDKVEMVQIVHPEKSYETLEEMVGHAENILKALELPYRVITLCTGDMGFGAAKTYDLEVWVPAQNTYREISSCSNCEDFQARRLKARFKDENGKNRLVHTLNGSGLAVGRTLVAVLENHQNADGSINIPAALQPYMGGVAKLEVK

SEQ ID NO: 6976 - protein, 218 aa, Neisseria meningitidis
MDFEKARFNMVEQQIRPWDVLDFDVLDALAEIPRELFVDEDLQGLAYADMALPLANGHKMLEPKVVARLAQGLKLTKNDTVLEIGTGSGYATALLAKLAGRVVSDDIDVEQQNRAKAVLDGLGLDNIDYVQNNGLTELSAGAPFDAVYVGGAVNLVPEVLKEQLKDGGRMVVIVGRKPVQRALLITRRGDVFEEKVLFDTLVAHLDDKDADPFGGFDF

SEQ ID NO: 6977 - protein, 102 aa, Neisseria meningitidis; identical to SEQ ID NO: 1826

SEQ ID NO: 6978 - protein, 235 aa, Neisseria meningitidis
MEGLINALKYLAEHEPIDNFEEIRTRNSPIELPSGLSNFEQNIFLKENLSPKLQNDDSLKTHYWIIREWGGIKSFKQSAENSQLIRQFLSELNSGKLSSGLLKISSLSKLASFIDCERFAIYDSRAIFSLNWLLFKFTNADLFFQPQGRNRELEIRNMNVLFHFSDIKPNYRKPDVSFHQYCGLLQDLAKQVYGKQAKPYHIEMLLFKIATTWICADMDQLIKFDCLRNQDFQTA

SEQ ID NO: 6979 - protein, 331 aa, Neisseria meningitidis; identical to SEQ ID NO: 1014

SEQ ID NO: 6980 - protein, 51 aa, Neisseria meningitidis; identical to SEQ ID NO: 3530

SEQ ID NO: 6981 - protein, 321 aa, Neisseria meningitidis
MSYTQLTQGERYHIQYLSRHCTVTEIAKQLNRHKSTISREIRRHRTQGQQYSAEKAQRQSQTIKQRKRQPYKLDSQLIQHIDTLIRRKLSPEQVCAYLCKHHQITLHHSTIYRYLRQDKSNGSTLWQHLRICSKPYRKRYGSTWTRGKVPNRVGIENRPAIVDQKSRIGDWEADTIVGKGQKSALLTLVERVTRYTIICKLDSLKAEDTARAAVRTLKAHKDRVHTITMDNGKEFYQHTKITKALKAETYFCRPYHSWEKGLNENTNGLIRQYFPKQTDFRNISDREIRRVQDELNHRPRKTLGYETPSVLFLNLFQPLIH

SEQ ID NO: 6982 - protein, 581 aa, Neisseria meningitidis; identical to SEQ ID NO: 2972

SEQ ID NO: 6983 - protein, 130 aa, Neisseria meningitidis; identical to SEQ ID NO: 4345

SEQ ID NO: 6984 - protein, 820 aa, Neisseria meningitidis
MTQKEKHFEEYAALATLPLRDVVVYPHMVLPLFVGRPKSIAALENAITREEPVFLLAQTDAAVEEPIAADLYQTGTVAQVLQVLKLPDGTVKVLVEGLYRGRVLTIEDTGGLFVSHIETVVEEDTGGNTDLEAVRRTLLAQFEQYAKLNKKIPAEIIGSINGIAENSRLTDTVAAHLQLKLAQRQQILEIPEIGKRMEFLLAQLESELDIMQAEKRIRGRVKRQMEKSQREYYLNEQIKAIHKELGEEDENGELDALEADIKKAGMTKEAEEKCLSELKKLKMMPPMSAESTVVRNYIDTLLELPWKKKSRVSKDIAKAGLVLDADHYGLEKVKERILEYLAVQKRMDKLKGPILCLVGPPGVGKTSLGESIAKATGRKYVRMALGGVRDESEIRGHRRTYIGSMPGKILQNMAKAGVKNPLFLLDEIDKLGNDFRGDPASALLEVLDPEQNNKFADHYAEVDYDLSDVMFIATSNSLNIPTPLLDRMEIIRLSGYTEDEKINIAMQYLVPKQMKRNGVKEGELAIEESAVRDIIRYYTREAGVRSLDREIAKICRKVVMQITLDEDKKRLSETKKTSKAKPKAVKVNEKNLHDYLGVRRFDYGVAESENRIGQVTGLAWTEVGGELLTVEAAALPGKGVIQCTGQLGDVMKESVSAAWSVVRSRAESVGLAPDFYEKKDIHIHVPEGATPKDGPSAGIAMTLAAVSAFTKIPVRADVAMTGEITLRGEVLPIGGLKEKLLAALRGGIKHVLIPKDNVKDLEEIPENVKTGLTIHPVKWIDEVLALGLESQPEPWAEPSGAEAAAESASKPKPRSRATKH

SEQ ID NO: 6985 - protein, 383 aa, Neisseria meningitidis; identical to SEQ ID NO: 3357

SEQ ID NO: 6986 - protein, 421 aa, Neisseria meningitidis
MSEALAKETLNPFEIARKQVKTACDRLKTDPAVYEILKSPTRVLEVNFPVKLDDDTVKTFTGYRSQHNNAVGPYKGGVRFHPSVNLDEVKALSIWMTIKCCVAGIPYGGGKGGITLDPRDYSEAELERIARAYAEAIAPLIGEKIDIPAPDVNTNGKIMSWMVDAYENVVKHSAPGVFTGKPVEFGGSLARTEATGYGVNLAAVQALEKLGKDVKGATYAIQGFGNVGYHTGYYAHQSGAKVVAVSTVDVAIYNENGLDMEALFKEFQEKGFITNEAGYGKEITNAELLALDVDVLAPCALENQLTSENAGKVRAKIVVEGANGPTTPEADVILRQNGVLVVPDILANCGGVVVSYFEWVQNLQGYYWEFDEVQEKETVVLRRAFRDIWNLAQEYDVDLRTASYMMSIRRVEKAMKLRGWY

SEQ ID NO: 6987 - protein, 1457 aa, Neisseria meningitidis
MKTTDKRTTETHRKAPKTGRIRFSPAYLAICLSFGILPQAWAGHTYFGINYQYYRDFAENKGKFAVGAKDIEVYNKKGELVGKSMTKAPMIDFSVVSRNGVAALVGDQYIVSVAHNGGYNNVDFGAEGRNPDQHRFTYKIVKRNNYKAGTKGHPYGGDYHMPRLHKFVTDAEPVEMTSYMDGRKYIDQNNYPDRVRIGAGRQYWRSDEDEPNNRESSYHIASAYSWLVGGNTFAQNGSGGGTVNLGSEKIKHSPYGFLPTGGSFGDSGSPMFIYDAQKQKWLINGVLQTGNPYIGKSNGFQLVRKDWFYDEIFAGDTHSVFYEPRQNGKYSFNDDNNGTGKINAKHEHNSLPNRLKTRTVQLFNVSLSETAREPVYHAAGGVNSYRPRLNNGENISFIDEGKGELILTSNINQGAGGLYFQGDFTVSPENNETWQGAGVHISEDSTVTWKVNGVANDRLSKIGKGTLHVQAKGENQGSISVGDGTVILDQQADDKGKKQAFSEIGLVSGRGTVQLNADNQFNPDKLYFGFRGGRLDLNGHSLSFHRIQNTDEGAMIVNHNQDKESTVTITGNKDIATTGNNNSLDSKKEIAYNGWFGEKDTTKTNGRLNLVYQPAAEDRTLLLSGGTNLNGNITQTNGKLFFSGRPTPHAYNHLNDHWSQKEGIPRGEIVWDNDWINRTFKAENFQIKGGQAVVSRNVAKVKGDWHLSNHAQAVFGVAPHQSHTICTRSDWTGLTNCVEKTITDDKVIASLTKTDISGNVDLADHAHLNLTGLATLNGNLSANGDTRYTVSHNATQNGNLSLVGNAQATFNQATLNGNTSASGNASFNLSDHAVQNGSLTLSGNAKANVSHSALNGNVSLADKAVFHFESSRFTGQISGGKDTALHLKDSEWTLPSGTELGNLNLDNATITLNSAYRHDAAGAQTGSATDAPRRRSRRSRRSLLSVTPPTSVESRFNTLTVNGKLNGQGTFRFMSELFGYRSDKLKLAESSEGTYTLAVNNTGNEPASLEQLTVVEGKDNKPLSENLNFTLQNEHVDAGAWRYQLIRKDGEFRLHNPVKEQELSDKLGKAEAKKQAEKDNAQSLDALIAAGRDAVEKTESVAEPARQAGGENVGIMQAEEEKKRVQADKDTALAKQREAETRPATTAFPRARRARRDLPQLQPQPQPQPQRDLISRYANSGLSEFSATLNSVFAVQDELDRVFAEDRRNAVWTSGIRDTKHYRSQDFRAYRQQTDLRQIGMQKNLGSGRVGILFSHNRTENTFDDGIGNSARLAHGAVFGQYGIDRFYIGISAGAGFSSGSLSDGIGGKIRRRVLHYGIQARYRAGFGGFGIEPHIGATRYFVQKADYRYENVNIATPGLAFNRYRAGIKADYSFKPAQHISITPYLSLSYTDAASGKVRTRVNTAVLAQDFGKTRSAEWGVNAEIKGFTLSLHAAAAKGPQLEAQHSAGIKLGYRW

SEQ ID NO: 6988 - protein, 90 aa, Neisseria meningitidis
MYYQVGNKCLEKHQAENLYFSLVVPRIKENGQIVRPEYNGSLWKMSDGLPLRLLLAECSPKDNLQSGLETGWIVFGILASVYFVSLLKKF

SEQ ID NO: 6989 - protein, 1392 aa, Neisseria meningitidis
MNYSFTEKKRIRKSFAKRENVLEVPFLLATQIDSYAKFLQLENAFDKRTDDGLQAAFNSIFPIVSHNGYARLEFVHYTLGEPLFDIPECQLRGITYAAPLRARIRLVILDKEASKPTVKEVRENEVYMGEIPLMTPSGSFVINGTERVIVSQLHRSPGVFFEHDKGKTHSSGKLLFSARIIPYRGSWLDFEFDPKDLLYFRIDRRRKMPVTILLKALGYNNEQILDIFYDKETFYLSSNGVQTDLVADRLKGETAKVDILDKEGNVLVAKGKRITAKNIRDITNAGLTRLDVEPESLLGKALAADLIDSETGEVLASANDEITEELLAKFDINGVKEITTLYINELDQGAYISNTLRTDETAGRQAARVAIYRMMRPGEPPTEEAVEQLFNRLFFSEDSYDLSRVGRMKFNTRTYEQKLSEAQQNSWYGRLLNETFAGAADKGGYVLSVEDIVASIATLVELRNGHGEVDDIDHLGNRRVRSVGELTENQFRSGLARVERAVKERLNQAESENLMPHDLINAKPVSAAIKEFFGSSQLSQFMDQTNPLSEVTHKRRVSALGPGGLTRERAGFEVRDVHPTHYGRVCPIETPEGPNIGLINSLSVYARTNDYGFLETPYRRVIDGKVTEEIDYLSAIEEGRYVIAQANADLDSDGNLIGDLVTCREKGETIMATPDRVQYMDVATGQVVSVAASLIPFLEHDDANRALMGANMQRQAVPCLRPEKPMVGTGIERSVAVDSATAIVARRGGVVEYVDANRVVIRVHDDEATAGEVGVDIYNLVKFTRSNQSTNINQRPAVKAGDVLQRGDLVADGASTDFGELALGQNMTIAFMPWNGYNYEDSILISEKVAADDRYTSIHIEELNVVARDTKLGAEDITRDIPNLSERMQNRLDESGIVYIGAEVEAGDVLVGKVTPKGETQLTPEEKLLRAIFGEKASDVKDTSLRMPTGMSGTVIDVQVFTREGIQRDKRAQSIIDSELKRYRLDLNDQLRIFDNDAFDRIERMIVGQKANGGPMKLAKGSEITTEYLAGLPSRHDWFDIRLTDEDLAKQLELIKVSLQQKREEADELYEIKKKKLTQGDELQPGVQKMVKVFIAIKRRLQAGDKMAGRHGNKGVVSRILPVEDMPYMADGRPVDIVLNPLGVPSRMNIGQILEVHLGWAAKGIGERIDRMLKEQRKAGELREFLNRLYNGSGKKEDLDALTDEEIIELASNLRKGASFASPVFDGAKESEIREMLNLAYPSDDPEVEKLGFNDSKTQITLYDGRSGEAFDRKVTVGVMHYLKLHHLVDEKMHARSTGPYSLVTQQPLGGKAQFGGQRFGEMEVWALEAYGAAYTLQEMLTVKSDDVNGRTKMYENIVKGEHKIDAGMPESFNVLVKEIRSLGLDIDLERY

SEQ ID NO: 6990 - protein, 258 aa, Neisseria meningitidis; identical to SEQ ID NO: 5438

SEQ ID NO: 6991 - protein, 500 aa, Neisseria meningitidis
MSREMLQLAEALASEKNVDAEVVFQALEFALSTAAKKKADREHMDVRVQINRDTGEYQTFRRWLIVADEDYTYPDVEKTIEEIQEEIPGTTIQIGEYYEEQLPNEGFGRQAAQTAKQIILQRIRDAEREQNLNEFLAVKEDIVSGTVKRVERHGIIVEVVAGKLDALIPRDQMIPRENFRSGDRIRALFLRVEEIGNTGRKQVILSRTSGDFLVKLYANEVPEIADGMLEIRAVARDPGQRAKVAVKANDQRIDPQGTCIGVRGSRVNAVSNELSGERIDVVLWSPEPAQFVMSALSPAEVSRIVIDEDKHAVDVIVAEDQLALAIGRGGQNVRLASDLTGWQLNIMTSAEADERNAAEDAAIRRLFMDHLNVDEETADVLVQEGFATLEEVAYVPAAELLAIEGFDEEIVDMLRNRARDAILTMAIAAEEKLGEVSDDMRNLEGIDADMLRSLAEAGITTRDDLAELAVDELIEITGVNEETAKAVILTAREHWFTEDK

SEQ ID NO: 6992 - protein, 212 aa, Neisseria meningitidis
MKKINVAPENPQYRIVEIFESLQGEGWNTGMPAVFVRLGKCNLACGWCDTDYLTFGMMGLSDILGRLKTYAARNIIITGGEPTIQPHLDMLLDTLKAEGYFLCLETNGLNPAPPQIDYVATSPKACYAAKYENSCIETADEVRIVADGDVLAFCENMERKIRAHHYYLSPCEQDGAMNIYDTIRQIGILNSRPDASVHWQLSVQTHKWAGIE

SEQ ID NO: 6993 - protein, 367 aa, Neisseria meningitidis; identical to SEQ ID NO: 6599

SEQ ID NO: 6994 - protein, 119 aa, Neisseria meningitidis
MIRYLLIACGCISLLLGIIGIFLPLLPTTPFVLLSAACWAKASPRFYRWLHRHRYFGPMVHNWEQNGAVPRKAKIFAISMMTASCLIMFWQFPQRWWVGAVSSVFCSLVAIWMWRRPES

SEQ ID NO: 6995 - protein, 419 aa, Neisseria meningitidis
MKQTVLKNNLQNLLESAENILLLQGPVGDFFLRLADWLTANGKTVHKFNFNAGDDYFYPPTQAHTVVFNDNYDAFPEFLQEYITQHHIQAVVCFGDTRPYHVIAKRIANENQASFWAFEEGYFRPYYITLEKDGVNAFSPLPRRADFFLEQFPKLAQQEYKAPTPVHGGFTPMAKNAIRYYIELFRNPRKYPDYIHHRAPNAGHYLKPWSLSILKRLNYYIEDIQIAKRVEAGKYGKFFIVPLQVFNDSQVRIHCDFPSVRSFLLHVLSSFAEHAPADTNIIIKHHPMDRGFIDYWRDIKRFIKEHPELKGRVIYVHDVPLPVFLRHGLGMVTINSTSGLSGLIHNMPVKVLGRAYYDIPGITDQNTLAEFWNHPTPPDKELFHAYRMYHLNVTQINGNFYSQVFFPNKKTSNSSTPVI

SEQ ID NO: 6996 - protein, 390 aa, Neisseria meningitidis
MKRQALAAMIASLFALAACGGEPAAQAPAETPAAAAEAASSAAQTAAETPSGELPVIDAVTTHAPEVPPAIDRDYPAKVRVKMETVEKTMTMEDGVEYRYWTFDGDVPGRMIRVREGDTVEVEFSNNPSSTVPHNVDFHAATGQGGGAAATFTAPGRTSTFSFKALQPGLYIYHCAVAPVGMHIANGMYGLILVEPKEGLPKVDKEFYIVQGDFYTKGKKGAQGLQPFDMDKAVAEQPEYVVFNGHVGAIAGDNALKAKAGETVRMYVGNGGPNLVSSFHVIGEIFDKVYVEGGKLINENVQSTIVPAGGSAIVEFKVDIPGSYTLVDHSIFRAFNKGALGQLKVEGAENPEIMTQKLSDTAYAGNGAAPAASAPAASAPAASASEKSVY

SEQ ID NO: 6997 - protein, 69 aa, Neisseria meningitidis
MIDFLSLKSIFLNKFALKYSGLNLNQDKATKPQTVQIVRQGEATPYWFKFNPLYRKFIQWIDREENKVV

SEQ ID NO: 6998 - protein, 725 aa, Neisseria meningitidis
MTRFKYSLLFAALLPVYAQADVSVSDDPKPQESTELPTITVTADRTASSNDGYTVSGTHTPLGLPMTLREIPQSVSVITSQQMRDQNIKTLDRALLQATGTSRQIYGSDRAGYNYLFARGSRIANYQINGIPVADALADTGNANTAAYERVEVVRGVAGLLDGTGEPSATVNLVRKRLTRKPLFEVRAEAGNRKHFGLDADVSGSLNTEGTLRGRLVSTFGRGDSWRRRERSRDAELYGILEYDIAPQTRVHAGMDYQQAKETADAPLSYAVYDSQGYATAFGPKDNPATNWANSRHRALNLFAGIEHRFNQDWKLKAEYDYTRSRFRQPYGVAGVLSIDHNTAATDLIPGYWHADPRTHSASVSLIGKYRLFGREHDLIAGINGYKYASNKYGERSIIPNAIPNAYEFSRTGAYPQPASFAQTIPQYGTRRQIGGYLATRFRAADNLSLILGGRYTRYRTGSYDSRTQGMTYVSANRFTPYTGIVFDLTGNLSLYGSYSSLFVPQSQKDEHGSYLKPVTGNNLEAGIKGEWLEGRLNASAAVYRARKNNLATAAGRDPSGNTYYRAANQAKTHGWEIEVGGRITPEWQIQAGYSQSKTRDQDGSRLNPDSVPERSFKLFTAYHFAPEAPSGWTIGAGVRWQSETHTDPATLRIPNPAAKARAADNSRQKAYAVADIMARYRFNPRAELSLNVDNLFNKHYRTQPDRHSYGALRTVNAAFTYRFK

SEQ ID NO: 6999 - protein, 704 aa, Neisseria meningitidis
MSVFRINMTAATVLAALSSSVFAAQTEGLETVHIKGQRSYNAIATEKNGDYSSFAATVGTKIPASLREIPQSVSIITNQQVKDRNVDTFDQLARKTPGLRVLSNDDGRSSVYARGYEYSEYNIDGLPAQMQSINGTLPNLFAFDRVEVMRGPSGLFDSSGEMGGIVNLVRKRPTKAFQGHAAAGFGTHKQYKAEADVSGSLNSDGSVRGRVMAQTVGASPRPAEKNNRRETFYAAADWDINPDTVLGAGYLYQQRRLAPYNGLPADANNKLPSLPQHVFVGADWNKFKMHSHDVFADLKHYFGNGGYGKVGMRYSDRKADSNYTFAGSKLNNTGQADVAGLGTDIKQKAFAVDASYSRPFALGNTANEFVIGADYNRLRSTNEQGRSTLSKSVALDGFRALPYNGILQNARAGNKGFNHSVTEENLDETGLYAKTVFRPLEGLSLIAGGRVGHHKIESGDGKTLHKASKTKFTSYAGAVYDIDGSNSLYASASQLYTPQTSIGTDGKLLKPREGNQFEIGYKGSYMDDRLNTRVSFYRMKDKNAAAPLDSNNKKTRYAALGKRVMEGVETEISGAMTPKWQIHAGYSYLHSQIKTASNSRDEGIFLLMPKHSANLWTTYQVTSGLTIGGGVNAMSGITSSAGIHAGGYATFDAMAAYRFTPKLKLQINADNIFNRHYYARVGSESTFNIPGSERSLTANLRYSF

SEQ ID NO: 7000 - protein, 250 aa, Neisseria meningitidis
MTDILIDNTATETVRTLIRAFPLVPVSQPPEQGSYLLAEHDTVSLRLVGEKSSVIVDFASGAAQYRRTKGGGELIAKAVNHTAHPTVWDATAGLGRDSFVLASLGLAVTAFEQHPAVACLLSDGIRRALLNPETQNTAAHINLHFGNAAEQMPALVQTQGKPDIVYLDPMYPERRKSAAVKKEMTYFHRLVGEAQDEAALLHTARQTAKKRVVVKRPRLGEHLAGQDPAYQYTGKSTRFDVYLPYGTDKG

SEQ ID NO: 7001 - protein, 887 aa, Neisseria meningitidis
MSTQLHDVDPIETQEWLDALSSVLEYEGGERAQYLLENLVKYCRDKGVRMPHGTTTPYLNTVSVENEKGIPGDQNIEHRIRAFVRWNAAAIVLRAGKKDLELGGHIASFQSAATMYEVGFNHFWKAKGEGEEGDLVFFQGHVAPGIYARAFVEGRLTEDQLNNFRQEVDGHGLPSYPHPHLLPDFWQFPTVSMGLGPIMAIYQARFLKYLESRGLAKTKGRKVWCFCGDGEMDEPESQGAIALAAREGLDNLIFVINCNLQRLDGPVRGNGKIIQELEGNFAGAGWNVVKVIWGRRWDRLLAKDKDGILRQRMEECLDGDYQTYKSKDGAYVREHFFNTPELKALVADMTDEQLWALNRGGHDPQKVYNAYDRAANHADGKPTVILAKTIKGYGMGASGEGQNVAHQAKKMDKASLKQFRDRFDIPVTDEQIESGDLPYLTFAPDTEEYKYLHARRDALGGYLPQRKPTQEVLEVPELSAFDAQLKSSGEREFSTTMAFVRILSTLLKDKKIGKRVVPIVPDESRTFGMEGMFRQYGIWNPKGQQYTPQDKDQLMFYKESVDGQILQEGINEPGAMADWIAAATSYANSNFAMIPFYIYYSMFGFQRIGDLAWAAGDMHARGFLLGGTAGRTTLNGEGLQHEDGHSHIQADLIPNCVSYDPTFQYEVAVIVQDGLRRMYANNEDVFYYITLMNENYTHPDMPEGAEQDILKGMYLLKAGGKGDKKVQLMGSGTILQEVIAGAELLKADFGVEADIWSCPSFNLLHRDAVEVERFNRLHPLEAEKVPFVTSQLQGHDGPVIAATDYIRSYADRIRAYIPNDYHVLGTDGFGRSDSRANLRRFFEVDRYNVAVAALAALAEQGKVSKETVQQAIEKYGIKADSAPSWKR

SEQ ID NO: 7002 - protein, 150 aa, Neisseria meningitidis
MNIEVEMKVLDERMADVVPVYATEGSAGLDLRACLDEEVVLQPGETFLVPTGLAIYLANPAYAAVLLPRSGLGHKHGIVLGNLVGLIDSDYQGELKVSLWNRSSEPFTVKPFERIAQMVVVPIVQAGFKRVEEFVGSSRGEGGFGSTGSH

SEQ ID NO: 7003 - protein, 399 aa, Neisseria meningitidis
MQAARPSLQCFLFLNERSKTMKKTLVAAAILSLALTACGGGSDTAAQTPSAKPEAEQSGKLNIYNWSDYVDPETVAAFEKETGIKTRSDYYDSNETLEAKVLTGKSGYDLTAPSIANVGRQIKAGAYQKIDKAQIPHYGNIDKDLLKMMEAVDPGNEYAVPYFWGINTLAINTQQVKKALGTDKLPENEWDLVFKPEYTAKLKSCGISYFDSAIEQIPLALHYLGKDPNSENPEDIKAAVDMMKAVRGDVKRFSSSGYIDDMAAGNLCAAIGYGGDLNIAKTRAEEAANGVEIKVLTPKTGVGVWVDSFMIPRDAQNVANAHRYIDYTLRPEVAAKNGSFVTYAPASRPARELMDEKYTSDASIFPNKELMEKSFIVSPKSAESVKLGVKLWQGLKAGK

SEQ ID NO: 7004 - protein, 38 aa, Neisseria meningitidis
LELKYCNREAKASVVTFTIYFIILISSKNKIQDYTYRQ

SEQ ID NO: 7005 - protein, 196 aa, Neisseria meningitidis
MGLKLPLILGTSSVFRREQMERLGIAFQAASPDFDETPMLGESAPQTALRLAEGKAQSLIGRFPESLIVGADQVAWCDGRQWGKPMNLANAQKMLMHLSGREIEFYSAVVLLNTVTGRMQRHIDKTVVVMRKLDELHILRYLEREPDAVYCSCALKSEDLGALLIERIESSDPNALIGLPVFRLVDFLKNEGVDVL

SEQ ID NO: 7006 - protein, 143 aa, Neisseria meningitidis
MDIQTILEKTLPGLGYELVDFELTAQGTLRVFIDKESGITVEDCATVSNHLSRVFMVEDIDYKNLEISSPGLDRPLKKAADFVRFAGQNAKIKTRLPIDGQKNFIGKIEGCENDTVTVSFDGKTVQIELGNIDKARLRPEFKF

SEQ ID NO: 7007 - protein, 983 aa, Neisseria meningitidis
MPSEQGFQTAFAFSVIIRGCPGAGFKPASSFPIFFCPLSVLSGFFMSNRPTLLLVDGSSYLYRAYHAMGQNLTAPDGAPTGALYGVLNMLRRLRSEYPHDYCAVVFDAKGKNFRHQMFEEYKATRPPMPDDLRPQAEALPDLVRLTGWPVLVIGQVEADDVIGTLAKQGAEHGLRVIVSTGDKDMAQLVDERVTLVNTMSSETLDIEGVKAKFGVRPDQIRDYLALMGDKVDNVPGVEKCGPKTAVKWLEAYGSLAGVMEHASEIKGKVGENLQAALPQLPLSYDLVTIKTDVDLHAELSDGIESLRRTTPKWAQLVVDFKRWGFRTWLKEAESNMNTGSTDDLFGSDSIGEQAALNAEMPFEKQAEKATAPEKLDYQAVTTEAQFAALLDKLSRADTIGIDTETTSLDAMNASLVGISIAFQAGEAVYIPVGHSLTAAPEQLDLQDVLGRLKPHLGNPALKKIGQNLKYDQHVFANYGIALNGIAGDAMLASYIIESHLGHGLDELSERWLGLETITYESLCGKGAKQIGFADVAIGQATEYAAQDADFALRLEAHLRAQMDEKQLEMYEKMELPVAQVLFEMERNGVQIDRAELARQSAELGAELMKLEQEAYAAAGQPFNLNSPKQLQEILFDKMGIPTKGLKKTAKGGISTNEAVLEQLAPDYPLPKIILQNRSLAKLKSTYTDKLPEMISPKDGRVHTTYAQAVAITGRLASNNPNLQNIPIRTEEGRKVRRAFTAPQGSVIVSADYSQIELRIMAHLSGDKTLIAAFQNGEDVHRRTAAEVFGTAPENVSSEQRRYAKTINFGLIYGMGQYGLAKSLGIDNLSAKNFIDRYFARYPGVAEYMQRTKEQAAAQGYVETLFGRRLYLPDIRNKNANARAGAERAAINAPMQGTASDLIKRAMIDVSRWLSECEASPWDELLQSKLIMQVHDELVLEVVETELDFVKEKLPQIMAKVDGGLLDVPLVAEVGVGENWEEAH

SEQ ID NO: 7008 - protein, 106 aa, Neisseria meningitidis
MNFQDYLATFPSIDHLGGLDVQDADGKTVHHIPAVQGKLGSLKLYNALAERFDGKLGKEAAEQGLIWFAEHVADARAHPGKHPNIDLLENVVQSGETWLLKPLSAQ

SEQ ID NO: 7009 - protein, 767 aa, Neisseria meningitidis
MLAPELEQILQQLYREARKAHYEFISLEHLLLVLIEEDASVHNVLKLCGADLKVVSEQLAASVAENTPLIPEHLLDTVETRPTLGFQRVMQRAMVHTQSAGKAAVEPLDVLVALMSETDSHTVYFLKLQSVTRFEVLRCIAHGSPDEDEDEDEDDGNYSSDGMDDDNGNRTKPGKNPLSAYTVNLNAEVKAGRIDPLIGRKHEMERLVQILCRRRKNNPLLVGEAGVGKTALAEGLAHQIVNGGIPDALKDAEVYALDMGSLLAGTKYRGDFEARVKSVLKQLEKIPHAILFIDEIHTIIGAGSTSGGTMDASNLLKPALAKGSLRCIGATTYDEYRTIFDKDHALSRRFQKIDVVEPTVSETVQILRGLKPMFEAFHQVRYTQGALEAAAELSARYINERFLPDKAIDVMDEAGAAQRILPKSKQKKVIGKAQIETVIAKVARIPEKTVSHDDKQVLQFLGRDLKNMVYGQENAIDALVAAVKMSRSGLALPDKPIGSFLFSGPTGVGKTEVAKQLAYSMGVPLQRFDMSEYMERHAVSRLIGAPPGYVGFEQGGLLTEAINKQPHCVLLLDEIEKAHPDIFNVLLQVMDAGKLTDNNGKSADFRNVILIMTTNAGAESLSRPSLGFTAKRERGDEMQAINKLFTPEFRNRLDAIIPFAPLSEPVITKVVDKFLLQLEHRLLDKKVEAEFTSALHKYLAEKGFDPQMGARPMHRLIQEKIRKPLADELLFGKLSDGGFVRIDWDAAKEEAVLKFKKSKVKIKTASA

SEQ ID NO: 7010 - protein, 182 aa, Neisseria meningitidis
LSFGIFARRGEKYSCFFMSVRFAKNIGLILYIVFYGFEMRRALIAKIKIAQKELGLDDGTYRAVLERVTGKRSCADMDVSELESVVADMRSHGFKPKAKGNPHGKPHLRRTSSAAMLDKVEALLTVGGKHWNYAHAMARRMFGKDKVEYLDDTQLHKLVAALQIAENRKTEKAGGDDGVRKS

SEQ ID NO: 7011 - protein, 49 aa, Neisseria meningitidis; identical to SEQ ID NO: 5144

SEQ ID NO: 7012 - protein, 256 aa, Neisseria meningitidis
VSETQNEQPVQPLVEHLIELRRRLMWTVVGILVCFFGLMPFAQQLYTFIANPLMANLPKDTSMIATDVIAPFFVPVKVTLMAAFLISLPHTLYQIWAFVAPALYQNEKRLITPLVLSSVSLFFIGMAFAYFLVFPVIFKFLAGVTPVGVNMATDIDKYLSFILGMFVAFGTTFEVPIVVILLTKIGVVTTEQLKRARPYVIVGAFVIAAIITPPDVISQTLLAIPLILLYEAGIWFGRFFTPRSEQDGDIQPPATT

SEQ ID NO: 7013 - protein, 332 aa, Neisseria meningitidis; identical to SEQ ID NO: 3650

SEQ ID NO: 7014 - protein, 174 aa, Neisseria meningitidis; identical to SEQ ID NO: 3281

SEQ ID NO: 7015 - protein, 503 aa, Neisseria meningitidis
MSEQNHPQTEPQLDENQIIALRREKLHNIRQQRNAYPNDFKRDSFAADLHAQYGEIGKEELDPQGIPVKVAGRMMLKRQMGKASFATIQDVSGQIQLYLNNKGVSQEVLDDFNHWDLGDIVGAEGTLFKTNHGELTVRVSGIRLLSKSLRPLPDKHKGLSDQETKYRQRYVDLIANEESRNTFIKRSQIIQSVRNFMVGEHYLEVETPMMHPIPGGATAKPFVTHHNALDIPLYLRIAPELYLKRLVVGGLERVFEINRSFRNEGMSVRHNPEFTMIEFYEAFSDYERMMQMAEDIIRNASRTVNGTANITYNGKEVDLESPFERLTILEAIKKYNPHYTDEQLNDAEWLKKEIVKHGESLPPSPGIGSLQLALFEGCAEGKLWNPTFIVDYPVEVSPLARASDTKQGLTERFELFVVGRELANGYSELNDPEDQAERFKAQVVQKDAGDDEAMHYDADYIRAMEFGLPPTGGCGIGIDRLVMLLTDSQTIRDVILFPQMRPE

SEQ ID NO: 7016 - protein, 92 aa, Neisseria meningitidis; identical to SEQ ID NO: 32

SEQ ID NO: 7017 - protein, 405 aa, Neisseria meningitidis
MEIILGIVMFTVIVLVLALMILFAKSKLVSEGDITIKVNGEKELTMPAGGKLLGALANEGIFIPSACGGGGSCGQCRVVVKSGGGDILPTELSHISKREAREGCRLSCQVNVKTDMDIEVPEEVFGVKKWECTVISNDNKATFIKELKLAIPEGEEVPFRAGGYIQIEAPPHTVAYKDFDIPKEYHEDWDKYNLWQYVSKVDEPILRAYSMASYPEEKGIIMLNVRIATPPPRVPDAPPGQMSSYIWSLKPGDKVTISGPFGEFFAKDTDAEMVFIGGGAGMAPMRSHIFDQLKRLNSKRKITFWYGARSKREMFYVEDFDQLAAEFPNFTWHVALSDPLPEDNWDGYTGFIHNVVYENHLKNHEAPEDCEFYMCGPPIMNQSVIKMLKDLGVEDENILLDDFGG

SEQ ID NO: 7018 - protein, 186 aa, Neisseria meningitidis; identical to SEQ ID NO: 1228

SEQ ID NO: 7019 - protein, 188 aa, Neisseria meningitidis
MAKKISILVGSLRRASFARKVALNAAEMFPEGWQAEIVEIGHLPLYNFDYDDPAVEDVPLPESYTAFRETIKASDGILFVTSENNRTIPACLKNAVDIGSKPNADVAWKNKPAGIISHSVGKMGGYSSQKNLRLALSYFDMPVTGQPEVFLGNSPTLFDENGKLIDSARDFVQSYINQFVGLIERNAK

SEQ ID NO: 7020 - protein, 315 aa, Neisseria meningitidis
MMIEKSISIVDGKEYSVFAVSHEFRYTFDEPILVADLISSLKAYETLTSSYLPAILNQLFDVKIQKIKVAVSEIERGSFLEKLIFNLFFKDEDAYNEFCLKIRKFLGTENQDGSINMSKIIMFAMTTLLGVGAGYLLFKNPPQEKQAITNNIVTVINADSSVALDGEHLVSVVKEVTGSSKQKTAENVAKVYAPASKNNGSITLGTDDVRIEPVAQQTVATLPKDVDLRDTPLTEDYTDIDVQIRATDRDKNSGWYAVIDQIVPSRVRLELPEDIDLNRLANNATIRANVTVEFDLKQNGSRKPKKIILTSLSTD

SEQ ID NO: 7021 - protein, 70 aa, Neisseria meningitidis
VCFSPLHQKFLENRRESAVLVSAGTVEMGNIDGIDGSGGLKPTLVYWNHRIIATNRPAATRAHPRHTTVA

SEQ ID NO: 7022 - protein, 208 aa, Neisseria meningitidis
VNPFSEDGKMSELDNILAHNRQFVESGEYEKYFTDKYPERGLAVLSCMDARIIGLLPDALGLKNGDAKLIKNAGALVTHPWGSVMRSLLVAVFELKVREIMVIAHHDCGMQGLNAEEFLGRVRESRIPEDRIETLRYAGIDLDGWLTGFDNVEDSVRHTVDLIRNHPLMPRHIAVHGLVIHPVTGKLTLVVDGSVSDGMDLSEGMETS

SEQ ID NO: 7023 - protein, 594 aa, Neisseria meningitidis
MELMTVLLPLAALVSGVLFTWLLMKGRFQGEFAGLNAHLAEKAARCDFVEQAHGKTVSELAVLDGKYRHLQDENYALGNRFSAAEKQIAHLQEKEAESARLKQSYIELQEKAQGLAVENERLATQLGQERKAFADQYALERQIRQRIETDLEESRQTVRDVQNDLSDVGNRFAAAEKQIAHLQEKEAEAERLRQSHTELQEKAQGLAVENERLATQIEQERLASEEKLSLLGEARKSLSDQFQNLANTILEEKSRRFTEQNREQLHQVLNPLNERIHGFGELVKQTYDKESRERLTLENELKRLQGLNAQLHSEAKALTNALTGTQNKVQGNWGEMILETVLENSGLQKGREYVVQAASVRKEEDGGTRRLQPDVLVNLPDNKQIVIDSKVSLTAYVRYTQAADADTAARELAAHVASIRAHMKGLSLKDYTDLEGVNTLDFVFMFIPVEPAYLLALQNDAGLFQECFDKRIMLVGPSTLLATLRTVANIWRNEQQNQNALAIADEGGKLYDKFVGFVQTLESVGKGIDQAQSSFQTAFKQLAEGRGNLVGRAEKLRLLGVKAGKQLQRDLVERSNETTALSESLEYAAEDEAV

SEQ ID NO: 7024 - protein, 206 aa, Neisseria meningitidis; identical to SEQ ID NO: 1193

SEQ ID NO: 7025 - protein, 321 aa, Neisseria meningitidis
MSYTQLTQGERYHIQYLSRHCTVTEIAKQLNRHKSTISREIRRHRTQGQQYSAEKAQRQSRTIKQRKRQPYKLDSQLIQHIDPFIRRKLSPEQVCAYLCKHHQITLHHSTIYRYLRQDKSNGSTLWQHLRICSKPYRKRYGSTWTRGKVPNRVGIENRPAIVDQKSRIGDWEADTIVGKGQKSALLTLVERVTRYTIICKLDSLKAEDTARAAVRALKAHKDRVHTITMDNGKEFYQHTKITKALKAETYFCRPYHSWEKGLNENTNGLIRQYFPKQTDFRNISDREIRRVQDELNHRPRKTLGYETPSVLFLNLFQPLIH

SEQ ID NO: 7026 - protein, 299 aa, Neisseria meningitidis; identical to SEQ ID NO: 167

SEQ ID NO: 7027 - protein, 195 aa, Neisseria meningitidis
MPLPDLTDAELIESRKLLLHFARLQLPDHPDLAEDLVQETLLSAYSAGDSFQGRALVNSWLFAILKNKIIDALRQIGRQRKVFTTLDDELLDEAFESHFSQNGHWTQEGQPQHWNTPEKSLNNNEFQKILQSCLYNLPENTARVFTLKEILGFSSDEIQQMCGISTSNYHTIMHRARESLRQCLQIKWFNQENPK

SEQ ID NO: 7028 - protein, 322 aa, Neisseria meningitidis
MNEKTIILANPRGFCAGVDRAISIVERALEEFGAPIYVRHEVVHNKFVVDNLREKGAVFIEDLAEVPPGATLVYSAHGVSKAVRQEAAERGFRVFDATCPLVTKVHKEVARLDAQDCEIIMIGHKGHVEVEGTMGQLAPGKMLLVETVGDVAKLEVRNPDKLAYVSQTTLSVDETKDIIAALNARFPNIRNPHKEDICYATTNRQTAVKELAEQCDIVIVVGSPNSSNSNRLREVAASRGIDAYMVDNAGYLQRAWFEGKNKVGVTAGASAPEVLVREVLATIRGWGHETVREGEGAEESIVFVLPKELRREGETKPDLCKR

SEQ ID NO: 7029 - protein, 313 aa, Neisseria meningitidis
MKTLLLLIPLVLTACGTLTGIPAHGGGKRFAVEQELVAASSRAAVKEMDLSALKGRKAALYVSVMGDQGSGNISGGRYSIDALIRGGYHNNPESATQYSYPAYDTTATTKSDALSSVTTSTSLLNAPAAALTKNSGRKGERSAGLSVNGTGDYRNETLLANPRDVSFLTNLIQTVFYLRGIEVVPPEYADTDVFVTVDVFGTVRSRTELHLYNAETLKAQTKLEYFAVDRDSRKLLITPKTAAYESQYQEQYALWTGPYKVSKTVKASDRLMVDFSDITPYGDTTAQNRPDFKQNNGKKPDVGNEVIRRRKGG

SEQ ID NO: 7030 - protein, 98 aa, Neisseria meningitidis
MDAKHRLKKYVYHLLVAIDQLFNALTGGAADETLSSRTYRRARLAQKPKTRWKILYTLINGVFFDRHHCRQAYISELKGRQHDARFNQSRAAGEKGTR

SEQ ID NO: 7031 - protein, 458 aa, Neisseria meningitidis; identical to SEQ ID NO: 569

SEQ ID NO: 7032 - protein, 356 aa, Neisseria meningitidis
MAACPNESVKMDISDFDFTLPEKLIAQHPPEVRGSSRLLVALPDMPLQDRVFGDLPDYVEAGDVLVFNNTKVMKARLFGQKDSGGRIEALIERVLDNHTALAHIRSSKSPKPGMGLVFEGGIRAVTVGREGELFCLRFEGGETVYELLEQNGHLPLPPYIERAADADDDSRYQTVYAKYQGAVAAPTAGLHFTEELLHRLKDKGAVTAEVTLHVGAGTFQPVRVDKIEEHKMHSEWFEVPSETAAAVEAAKARGNKVWAVGTTSMRALESAARATGRLKAGQGDTDIFITPGYRFNVVDRLVTNFHLPKSTLLMLVSAFSGMGHIRAAYRHAVEREYRFFSYGDAMVLGRNEGVVR

SEQ ID NO: 7033 - protein, 403 aa, Neisseria meningitidis; identical to SEQ ID NO: 200

SEQ ID NO: 7034 - protein, 267 aa, Neisseria meningitidis; identical to SEQ ID NO: 2269

SEQ ID NO: 7035 - protein, 366 aa, Neisseria meningitidis
MAGNTFGQLFTVTTFGESHGAGLGCIIDGCPPGLELSEADIQFDLDRRKPGTSRHVTQRREADQVEILSGVFEGKTTGTPIALLIRNTDQRSKDYGNIATSFRPGHADYTYWHKYGTRDYRGGGRSSARETAARVAAGAVAKKWLKEKFGTEITAYVTQVGEKEIRFEGCEHISQNPFFAANHSQIAELENYMDSVRKSLDSVGAKLHIEAANVPVGLGEPVFDRLDAEIAYAMMGINAVKGVEIGAGFDSVTQRGSEHGDELTPQGFLSNHSGGILGGISTGQDIRVNIAIKPTSSIATPRRSIDINGNPIELATHGRHDPCVGLRSAPIAEAMLALVLIDHALRHRAQNADVQVNTPDITLSNK

SEQ ID NO: 7036 - protein, 413 aa, Neisseria meningitidis
MPNKTPSLFGGAMIIAGTVIGAGMLANPTATSGVWFTGSLAVLLYTWFSMLSSGLMILEVNTHYPHGASFDTMVKDLLGRGWNIINGIAVAFVLYLLTYAYIFVGGDLTAKGLGSAAGGDVSLTVGQLVFFGILAFCVWASARLVDRFTGVLIGGMVLTFIWAAGGLIADAKPSVLFDTQAPAGTNYWIYAATALPVCLASFGFHGNVSSLLKYFKGDAPKVAKSIWTGTLIALVIYVLWQTAIQGNLPRNEFAPVIAAEGQVSVLIETLSKFAQTGNMDKILSLFSYMAIATSFLGVTLGLFDYIADIFKWNDSISGRTKTAALTFLPPLISCLLFPTGFVTAIGYVGLAATVWTGIIPAMLLYRSRKKFGAGKTYKVYGGLWLMVWVFLFGIVNIAAQVLSQMELVPVFKG

SEQ ID NO: 7037 - protein, 245 aa, Neisseria meningitidis
MLLIPAIDLKEGRCVRLKQGLMEEATVFSDSPAETALHWFKQGARRLHLVDLNGAFAGVPQNLPAIKDILAAVAKDIPVQLGGGIRDLKTIGQYLDLGLNDVIIGTAAVKNPDFVREACKAFPGRIIVGLDAKDGMAAIDGWATVTGHHVIDLAKRFEDDGVNSIIYTDIGRDGMMSGVNIDATVKLAQTVRIPVIASGGLTGLDDIRALCAAEKHGVAGAITGRAIYEGSIDFAQAQQLADSLD

SEQ ID NO: 7038 - protein, 381 aa, Neisseria meningitidis
MQNNSYGYAVSVRVGGKEHRHWERYDIDSDFLIPADSFDFVIGRLGPEAAIPDLSGESCEVVIDGQIVMTGIIGSQRHGKSKGSRELSLSGRDLAGFLVDCSAPQLNVKGMTVLDAAKKLAAPWPQIKAVVLKAENNPALGKIDIEPGETVWQALTHIANSVGLHPWLEPDGTLVVGGADYSSPPVATLCWSRTDSRCNIERMDIEWDTDNRFSEVTFLAQSHGRSGDSAKHDLKWVYKDPTMTLHRPKTVVVSDADNLAALQKQAKKQLADWRLEGFTLTITVGGHKTRDGVLWQPGLRVHVIDDEHGIDAVFFLMGRRFMLSRMDGTQTELRLKEDGIWTPDAYPKKAEAARKRKGKRKGVSHKGKKGGKKQAETAVFE

SEQ ID NO: 7039 - protein, 181 aa, Neisseria meningitidis
LILAVALGSLSAWLGRISEVEIEEVRLNPDEPQYTMDGLDGRRFDEQGYLKEHLSAKGAKQFPESSDIHFDSPHLVFFQEGRLLYEVGSDEAVYHTENKQVLFKNNVVLTKTADGKRQAGKVEAEKLHVDTESQYAQTDTPVSFQYGASHGQAGGMTYDHKTGMLNFSSKVKATIYDTKDM

SEQ ID NO: 7040 - protein, 402 aa, Neisseria meningitidis
MTGIIHSLLDTDLYKFTMLQVVLHQFPQTHSLYEFRCRNASTVYPLADIREDLEAELDALCQLRFTHDELGYLRSLRFIKSDFVDYLELFQLQRRFVEIGTDDKDRLNIRIEGPMIQAMFFEIFILAIVNELYFRRLETPAVIEEGERRLQAKAARLKEIAAAQNPDEPPFLISDFGTRRRYKLAWQEHVIRTLLEAAPGIVRGTSNVFLAKKLGITPIGTMAHEFLQAFQALDVRLRNFQKAALESWVHEYRGDLGVALTDVVGMDAFLRDFDLYFAKLFDGLRHDSGDPYVWGDKAYAHYQKLKIDSRTKMLTFSDGLDIERSWALHQYFKDRFKTGFGIGTNLTNDMGHTPLNIVLKLVECNGQSVAKLSDSPGKTMTNNSTFLAYLRQVFDVPEPETP

SEQ ID NO: 7041 - protein, 233 aa, Neisseria meningitidis
MFRIIKWLIALPVGIFIFFNAYVYGNIITYRAVAPHRTAFMSMRMKQFEQEGRDVALDYRWMPYKRISTNLKKALIASEDARFAGHGGFDWGGIQNAIRRNRNSGKVKAGGSTISQQLAKNLFLNESRSYIRKGEEAAITAMMEAVTDKDRIFELYLNSIEWHYGVFGAEAASRYFYQIPAAKLTKQQAAKLTARVPAPLYYADHPKSKRLRNKTNIVLKRMGSAELPESDTD

SEQ ID NO: 7042 - protein, 141 aa, Neisseria meningitidis
MTQETALGAALKSAVQTMSKKKQTEMIADHIYGKYDVFKRFKPLALGIDQDLIAALPQYDAALIARVLANHCRRPRYLKALARGGKRFDLNNRFKGEVTPEEQAIAQNHPFVQQALQQQSAQAAAETLSVEAEAAESSAAE

SEQ ID NO: 7043 - protein, 120 aa, Neisseria meningitidis
MKLPRNRFSLLSALWFAGGIYSLLFKAADTAPPPFPHFDKAAHLALFFAQIWLLTKAFKTGKLPIPYRSLMVFALCFALFSECAQAWFTATRTGSLGDVLADMAGTVLALFAARAADRPD

SEQ ID NO: 7044 - protein, 208 aa, Neisseria meningitidis
MTQEHFPSFFNQAPTITVRDPLAAFLGAAENGILTYRYADAVRLCGHSCPTVAGAYLMVIKGLKALYGEELPERGGIEAAMQGARDEGTVGVTASVVQLLTGAAPETGFGGIGMQGRFARRHLLSFGVGEINGTLTLRRKDNGKTVAVGLNAALQPFAPEMRDIMPKAVGGSASAEELERFGQLWQARVKAFLTESADDPQFVIVREV

SEQ ID NO: 7045 - protein, 156 aa, Neisseria meningitidis
MRIIQANVFRRHLNAMPSEHAAYADLTASSAKRLLCAKAILFSSAVRTGAAVGNIFFDGFADGGDFGDGAQYGFATFNAVDAASDSAGGIAGAAVLEIVEDEDFEGDLGSWADSVKMVRSSDGITVVPMPSETAAVQAFVPDGKIGYNIGHQCPTY

SEQ ID NO: 7046 - protein, 117 aa, Neisseria meningitidis
VNKQTAYLLTSFSLIALIILSLSWELWIAPLRPGGSWLALKALPLCLPLSGILKKKIYTYQYSSMLVLIYFAEAVMRLFDAYPAEQICAALSAVFSIIFFISCLSFVKQYKETNNAR

SEQ ID NO: 7047 - protein, 70 aa, Neisseria meningitidis; identical to SEQ ID NO: 232

SEQ ID NO: 7048 - protein, 373 aa, Neisseria meningitidis; identical to SEQ ID NO: 306

SEQ ID NO: 7049 - protein, 271 aa, Neisseria meningitidis; identical to SEQ ID NO: 1333

SEQ ID NO: 7050 - protein, 197 aa, Neisseria meningitidis
MTTLQERVAAHFAESIRAKQEAGKVLVEPTVQAAELMLQCLMNDGKILACGNGGSAADAQHFAAEMTGRFEKERMELAAVALTTDTSALTAIGNDYGFDHVFSKQVRALGRAGDVLVGISTSGNSANVIEAVKAAHERDMHVIALTGRDGGKIAAILKDTDVLLNVPHPRTARIQENHILLIHAMCDCIDSVLLEGM

SEQ ID NO: 7051 - protein, 388 aa, Neisseria meningitidis; identical to SEQ ID NO: 1435

SEQ ID NO: 7052 - protein, 68 aa, Neisseria meningitidis
MPSEKCFRRHFLVADMLTDDVGAHDHADVERACLTVVLSALQRLLVEVAVEAGNAASARVAADAALCL

SEQ ID NO: 7053 - protein, 218 aa, Neisseria meningitidis
MKNKTKVWDLPTRLFHWLLAASLPFMWYSAKAGGDMLQWHTRVGLFVLFLLVFRLCWGIWGSDTARFSRFVQGWAGIRGYLKNGIPEHIQPGHNPLGALMVVALLAAVSFQVGTGLFAADENTFSTNGYLNHLVSEHTGSLMRKIHLNFFKLLAVFSAIHIAAVAAYRVFKKKNLILPMITGFKYIEGKTSIRFAGKAALAAALSVASLAAAAILLLS

SEQ ID NO: 7054 - protein, 43 aa, Neisseria meningitidis
MRDFDKPAEEAAEYAAEGAVKFIEGKPAKKIIAVPGRLENIVV

SEQ ID NO: 7055 - protein, 291 aa, Neisseria meningitidis
MPTVRFTESVSKHDLDALFEWAKASYGAESCWKTLYLNGLPLGNLSPEWVERVKKDWEAGCSESSDGIFLNADGWPDMGRRLQHLARSWHCAGLLDGWRNECFDLTDGGGNPLFTLERAAFRPFGLLSRAVHLNGLTESDGRWHFWIGRRSPHKAVDPDKLDNTAAGGVSGGEMPSEAVCRESSEEAGLDKTLFPFIRPVSRLHSLRPVSRGVHNEILYVFDAVLPETFLPENQDGEVAGFEKMDIGGLLDAMLSGNMMHDAQLVTLDAFCRYGLIDAAHPLSEWLDGIRL

SEQ ID NO: 7056 - protein, 255 aa, Neisseria meningitidis
MSSNKASFFTRLRRLCRLAVWLFKTGKNLRGIDGGCPESRNRAVIELGRGVLAALDIGLEVGRPAPEHPNGVLVAANHVSWLDIFAMSAVYPSSFIAKQEIKSWPVLGKMGQNAGTVFINRNSRRDIEPINRAVCETLQRGQNVSFFPEARTSSGLGLLPFKAALFQSAIDAGAKVLAVALRYYDETGKRTARPSYADVGLPTCLWRIVSMKKLTIRVDFVCVADAAESEDRYALKDKIEESIRAVVADDADIAV

SEQ ID NO: 7057 - protein, 90 aa, Neisseria meningitidis; identical to SEQ ID NO: 5418

SEQ ID NO: 7058 - protein, 251 aa, Neisseria meningitidis; identical to SEQ ID NO: 4289

SEQ ID NO: 7059 - protein, 852 aa, Neisseria meningitidis
MPANLSSALETFKQQRDAAEAHYLKANRVSVFFREYTAAVETLLAALWAEYFQNSALCLMAVGGFGRGELYPCSDVDLAVVSPAPLSDGIQEQIARFVQTLWDCKLMPSVKSGSVDELCESVRNDITGDTAFLEARFLFGNRQTVDKLAEKMNAQRNVAAFVEAKLVEMEHRHAKSQGSGAVLEPNIKSCPGGLRDIHTLLWIAKAQGLATDLPDLLKQRILTRAEAGMLSHGYRRLAHIRIHLHLNAKRAEDRLLFDLQPQVAESMGYEGLNLRRQSEELMRVFYRAIKTVKQLGGILTPMLQSRVSSTPLRVTLRIDDDYIQVNNQIAARHTDIFFRRPEHIFKIVEIMQQRNDITALEPQTLRAWWGATRKINRSFYQNPENRRRFAGFFRNGNGLTQTLRFLNLYGVLGRYLPAWEKIIGLLQHDLFHIYPVDDHILTVVRNVRRLALDMHSHELPYASALMQSFEKQDILYLAAFFHDIAKGRGGDHAIQGIADARQFAADHFLTGEESDLLAWLVENHLLMSAVAQKEDIQDPSVLDAFCKRVQTHERLSALYLLTISDIRGTNPKLWNAWRASLLESLFHAAGRYLTGNGGNPHTLFGRRRQEAADLLTRAAVPEKQQKKLWNALGSAYFARHQSREILWHAANLVHDFETPIVRSRILPKSDSFQVMVFMPNGPRLFARLCRIFSRHGFDILAARAFITEHDYILDTFIVQIPSQHAPEDYPDIQSALEAELNSFIHGHTVAETQSRSRRISRRSRYMPIAPSITITPEEDYPDWYSVEITAVNRPFLLADMAEVFFAHNVSLRYAKISTLDERAEDSFTVFSPDLKNPKIQSSLKQTLLEQLS

SEQ ID NO: 7060 - protein, 288 aa, Neisseria meningitidis; identical to SEQ ID NO: 464

SEQ ID NO: 7061 - protein, 94 aa, Neisseria meningitidis; identical to SEQ ID NO: 6698

SEQ ID NO: 7062 - protein, 296 aa, Neisseria meningitidis
MSVLINKDTKVLVQGFTGKNGTFHSEQALAYGTKVVGGVTPGKGGQTHLNLPVFNTMKEAVKETGADASVIYVPAPFVLDSIVEAVDSGVGLVVVITEGVPTLDMLKAKRYLETNGNGTRLVGPNCPGVITPGECKIGIMPGHIHTPGRIGIISRSGTLTYEAVAQTTKLGLGQSTCIGIGGDPIPGMNQIDALKLFQEDPDTDAIIMIGEIGGTAEEEAAEYIQSNVSKPVVGYIAGVTAPKGKRMGHAGAIISGGKGTAEEKFAAFEKAGIAYTRSPAELGTTMLEVLKAKGLA

SEQ ID NO: 7063 - protein, 751 aa, Neisseria meningitidis
MGQYKKLWYLLFAVLAVCFTILGYMGSEVYKKAPPYPEQVVSASGKVLMTKDDILAGQSAWQTTGGMEVGSILGHGAYQAPDWTADWLHRELVAWLDLTAQQTYGKKFDEVSPEEQAVLKTRLADEYRNQSRVKEDGSVVISDTRVKAIESILPYYHGVYSDDPKFQTTREHFAMKNNTLPSQEAREKLFNFFFWTSWSASTNRPDENFTYTNNWPHEPLINNVPTTENYMWSFTSVVLLLMGIGLLMWGYSFLTKHEEVEVPSEDPISKIQLTPSQKALGKYVFLTVALFVVQVLLGGLTAHYTVEGQGFYGIDEALGFEMSDWFPYALTRTWHIQSAIFWIATGFLTAGLFLAPIVNGGKDPKFQRAGVNFLYIALFIVVGGSYAGNFFALTHILPPEFNFWFGHQGYEYLDLGRFWQLLLMVGLLLWLFLMLRCTVSAFKEKGVDKNLLAIFVASMVGVGVFYAPGLFYGEKSPIAVMEYWRWWVVHLWVEGFFEVFATAAFAFVFYNMGFVRRSTATASTLAAAAIFMLGGVPGTLHHLYFSGSTSASMAIGACFSALEVVPLVLLGREAYEHWSYQHLSDWAKRLRWPLMCFVAVAFWNMIGAGVFGFLINPPISLFYIQGLNTSAVHAHAALFGVYGFLALGFVLLVARYLKPNAQFDDKLMTWGFWLLNGGLVGMIAISLLPVGAIQAYASITHGLWYARSEEFLQMEILDTLRWVRTAADLVFIGGAICVAIQATKIVFGRDK

SEQ ID NO: 7064 - protein, 445 aa, Neisseria meningitidis
MTDTAGLRRHNLRQWIEKYYGGLQTRFAEAVALNTGELSALLKNKSFGEKKARKIEQAAKMPAFWLDTEHTARPSEHTGKHTMSHISPIPEILADIKAGKMVIITDAEDRENEGDLLMAAQFVTPEAINFMIKHARGLVCLPMDGEMVEKLGLPMMTQKNGAQYGTNFTVSIEAAHGITTGISAADRALTIQTAVSPTAKPEDIVQPGHIFPLRAQKGGVLVRAGHTEAGVDLAQMNGLIPASVICEIINDDGTMARMPELMKFAEEHKLKIGTIADLIEYRSRTESLLEDMGNAPVQTPWGEFQQHVYVDKLSGETHLALVKGTPAADTETLVRVHEPFSVMDFIQANPRHSWSLPKALEHIQQAESGVVILLHRTEDGASLLDRTLPKGANQAYKWDSKSYGIGAQILAGLNVKKLRVLGQPSSFTGLTGFGLEVVGFEEAEK

SEQ ID NO: 7065 - protein, 129 aa, Neisseria meningitidis
LKAGSRLLSESGRTQTVRKTVVKPKPLKAYNLTVADWHTYFVKGNQAETEGVWVHNSCPPKRTGSSKNEKHGDGGRSQISAESKIAELTNKIIPGMSKNERLKIKQKIRNIAKNANRKTKGEEHGRRGR

SEQ ID NO: 7066 - protein, 47 aa, Neisseria meningitidis
MNCLDKALVKLNIYFENDEEKYKNKTVMDIYYQCIKNPNYVVTHNNL

SEQ ID NO: 7067 - protein, 661 aa, Neisseria meningitidis
MKISASDIAKLGIPSLPTDRQGIEYHAKKNNWQHCFEQKGRGRPKKLYEIASLPAEIRAAIMKRQSDELAEKMPKMLPKVRPGTAMSAQALAEAAKLLNEKQRSVADARCAVVAAVLGIKYEYDCSAKAAVAQFLGLLAEGKLDAVTLGNLEKANDRSRTAKVGERTLDGWISAYLKAENATERLVALAPKTTKAVKPIESYGWLPMFMQFHNIPSAPKLAHSYRWFVQWAEAENMPVNDVPNLSMVRRVWEKLPLIMQERGRKTGAAYKSLLPYVKRDWGALKPNDVWIGDGHSFKAKVAHPVHGRPFKPEVTVIIDGCTRFVVGFSVSLAESCVAVSDAMRIGVKHFGLPIIYYSDNGGGQTGKTIDHEITGITSRPGIRHETGIAGNPQGRGIIERWWKDNLIEMARQYETFAGAGMDSSTKNLMYRKMESAFNALEKGKDLTEEQQKYLKKLPSWSRFIADVVKCIDEYNNRPHGELPRHPDGGHYTPKAYREMRLEQDGIAPDMLSAQELATMFMPQEVRKVQRGWLDLFNNSYFSTELAEYHKDEVRVSYDLSDASAVNVFDMDGKFITKAQANGNTREAFPTARIDQLAEKRRKGKIKRAENAIKLANAEVNPALEQAAVWDELGHLGGNDIEAEYAVLPKTGTDDFVLFEADR

SEQ ID NO: 7068 - protein, 369 aa, Neisseria meningitidis
MSNWKPNIPYNDLPPLPPKQDIESKTILKRCIAARASLARLKQAAELIPNQAMLINTLPVMEARASSEIENIVTTTDKLFQSLQMDTERQDPATKEALQYRTALFAGYESLTSRPLCTQTAIMVCNAIKHPYEMAIRKTGGTALKGGNSGNVVYTPPEGEETIRGKLANWERFIHESGDLDPLIIMAAAHYQFEAIHPFTDGNGRTGRILNSLLLIEKGLLDLPILYLSRYIIENRADYYRLLLGVTERQDWESWIIYILDGVADTADWTVSKIDAIRRLFEQTRQHIRTHAQGIYTHELVNLLFEQPYTRIANLEAAGIAKRQTASKYLKELSDIGVLQEIVIGRDKLFIHPRLMELLRGEGNSFTSF

SEQ ID NO: 7069 - protein, 111 aa, Neisseria meningitidis
MFGKAGLGGLMKQAQQMQENMKKAQAKLAETEIEGEAGNGLVKITMTCAHEVRKIDISPDLIQEAADDKEMLEDLILAALKSARGKAEETANKTMGAFTQGLPPGVGDFFR

SEQ ID NO: 7070 - protein, 121 aa, Neisseria meningitidis; identical to SEQ ID NO: 4117

SEQ ID NO: 7071 - protein, 206 aa, Neisseria meningitidis; identical to SEQ ID NO: 1725

SEQ ID NO: 7072 - protein, 106 aa, Neisseria meningitidis; identical to SEQ ID NO: 2449

SEQ ID NO: 7073 - protein, 179 aa, Neisseria meningitidis
MKQRKLSLRPSDKRAPRGGAKGEYDMYKHLVVAVDGSETSINALKHAAELAGVNGARLTLVHVANPAEYMALAPEFLQHESYEAAAVAQGNEVLDAAERTAQELGVENTVKHLLVANKGAREMAQDLVDYADENGADLLVLGTHGRTGLMHLLMGSFAETVMRQSHLPLLIIRSKAEEA

SEQ ID NO: 7074 - protein, 195 aa, Neisseria meningitidis
MRAVGHCWKRFPNKAIEYKYKTASCRIGCSDGINREFMKTNFKQKIIEQARSEGLQVTALREQVLDIVLQQSGVIKAYNVLSQMQQQSEGVLAPPTAYRALDFWAEQGVLHKVAAVNGYILCSHAQHECDDHCHDHEEAEAHHSAFILVCTECGTADEQTLSHEWAALRAGVAESGFALKEEHVVLTGICKKCQQ

SEQ ID NO: 7075 - protein, 206 aa, Neisseria meningitidis
LLGVVPGIGESIQAYKVAKAAKNLQGMKKALDKAATVATAQGYVSKTKIKIGQTELRVTAATDKQLLKTISEGRDTTGKMTEQLFDSLAKQNGFRVLSGGKYGANNGFDHVWQAADGSVVLIVESKQIRNGTVQLNPNGAGGYTQMSEDWIKQVITNLPDNHPTKNILREAVRSGKIKTAVTGVDRQTGKAVILPVKVPSKTNIRR

SEQ ID NO: 7076 - protein, 81 aa, Neisseria meningitidis
  misc_feature 76, 77: 'Xaa' is any amino acid
MAKEKFERSKPHVNVGTIGHVDHGKTTLTAALTTILAKKFGGAAKAYDQIDNAPEEKARGITINTSHVEYETETRXXHTLN

SEQ ID NO: 7077 - protein, 287 aa, Neisseria meningitidis
MSEIGLVKIYFGKVRDLYEIDDKRMLMVASDRLSAFDVILDDPIPSKGEILTQISNFWFKKLAHIMPNHFTGQTVYDVLPENEAKALEKRAVVAKKLTPVKVEAIVRGYLAGSGWKDYQKTGSVCGIQLPEGMQEAQQLPEVIFTPSTKAAVGDHDENISFEECGRIIGKELAEEVRAKAVRLYTEAAEYAKSRGIIICDTKFEFGLDENGTLTLMDEVLTPDSSRFWPADQYKVGTNPPSFDKQFVRDWLEQSGWNKKAPAPKVPADVIQKTVEKYREALTLLTQD

SEQ ID NO: 7078 - protein, 543 aa, Neisseria meningitidis
LKKIKGTQMSIVEIKVPDIGGHENVDIIAVEVKAGDTIAVDDTLITLETDKATMDVPADAAGVVKEVKVKVGDKISEGGVILTVETGAAAAEAAPAAAEAQPAPAAAPAAAGGATVQVAVPDIGGHTDVDVIAVEIKVGDTVAEDDTLITLETDKATMDVPCTAAGVVKAVFLKVGDKVSEGSAIIEVETVGSAAAAPAQAAQAAAPAAAPPPTAAAAPAAAPAPSAPAAAKIDEAAFAKAHAGPSARKLARELGVDLGQVKGTGLKGRIMGDDIKAFVKSVMQGGAAKPAAASASLGGGLDLLPWPKVDFSKFGNVEVKELSRIKKISGQNLSRNWVVIPHVTVHEEADMTELEEFRKQLNKEWEREGVKLSPLAFIIKASVSALKAFPEFNASLDGDNLVLKNYFNIGFAADTPNGLVVPVIKDVDQKGLKQISQELTELSKKAREGKLKPQEMQGACFTISSLGGIGGTGFTPIVNAPEVAILGVCKSQIKPVWNGKEFAPRLMCPLSLSFDHRVIDGAAGMRFTVFLAKLLKDFRRITL

SEQ ID NO: 7079 - protein, 494 aa, Neisseria meningitidis
MSKPVFKKIALYTLGAISGVAVSLAVQGFAAEKDRRDNEVLPVQSIRTMAEVYGQIKANYYQDKPDADLFEGAMKGMVAGLDPHSEYMDKKGYAEIKESTSGEFGGLGMEIGQEDGFVKVVSPIEDTPAERAGVKSGDFIVKIDNVSTRGMTVSEAVKKMRGKPGTKITLTLSRKNADKPIVVNLTRAIIKVKSVRHHLIEPDYGYIRVSQFQERTVESVNTAAKELVKENKGKPLKGLVLDLRDDPGGLLTGAVGVSAAFLPSEAVVVSTKGRDGKDRMVLKAIPEDYVYGMGGDSLAGIPAELKTIPMTVLVNSGSASASEIVAGALQDHKRAVIVGTQSFGKGSVQTLIPLSNGSAVKLTTALYYTPNDRSIQAQGIVPDVEVKDKERIFESREADLVGHIGNPLGGEDVNGETLAVPLEKDADKPAVKEKGKKKKDEDLSSRRIPNPAKDDQLRKALDLVKSPEQWQKSLGLAAKKPVSNKDKKDKKDKK

SEQ ID NO: 7080 - protein, 260 aa, Neisseria meningitidis
VGEIVGEALVKNTDFSGMTASEIEKAKANITAYAKLVAGATVGVTGGNVDVAANASETAVKNNALDIIWDIGNLVWDGGKWIYAKSIGDKQMAREAAIDFGVDAAAAAVPFVPAGATKISRGGAYVLKAGDEAVDTAKAIQEIQKQTGIKLTYDKVNKVWTTPAGLDYGLDAKHGNRIKHVLAHTIPNPNKPVHSVFNVSRKEVLPLVDEAWRMKGNPLPNDSSVYLVDMKKPIGTKGETKVRIVVQKGTNKIISAYPQK

SEQ ID NO: 7081 - protein, 141 aa, Neisseria meningitidis
MKTARRRSRELAVQAVYQSLINRTAAPEIAKNIREMSDFAKADEELFNKLFFGTQTNAAEYIRQIRPLLDRDEKDLNPIERAVLLTACHELSAMPETPYPVIINEAIEVTKTFGGTDGHKFVNGILDKLAAQIRPDEPKRR

SEQ ID NO: 7082 - protein, 128 aa, Neisseria meningitidis; identical to SEQ ID NO: 723

SEQ ID NO: 7083 - protein, 78 aa, Neisseria meningitidis
MRKACRNRPLTEAQTKRNRYLSKTRYVVEQSFGTLHRKFRYARAAYFGLIKVSAQSHLKAMCLNLLKAANRLSAPAAA

SEQ ID NO: 7084 - protein, 685 aa, Neisseria meningitidis
MPEQNRILCRELSLLAFNRRVLAQAEDQNVPLLERLRFLCIVSSNLDEFFEVRMAWLKREHKRCPQRRLDNGKMPSETIADVTEAARSLIRHQYDLFNNVLQPELAQEGIHFYRRRNWTDTQKKWIEDYFDRELLPILTPIGLDPSHPFPRPLNKSLNFAVELDGTDAFGRPSGMAIVQAPRILPRVVPLPSELCGGGHGFVFLSSILHAHVGKLFPGMNVKGCHQFRLTRDSDLTVDEEDLQNLRAAIQNELHDREYGDGVRLEVADTCPAYIRDFLLAQFKLTAAELYQVKGPVNLVRLNAVPDLVNRPDLKFPTHTPGRLKALGKTASIFDLVRQSPILLHHPYQSFDPVVEMMREAAADPAVLAVKMTIYRTGTRSELVRALMKAALAGKQVTVVVELMARFDEANNVNWAKQLEEAGAHVVYGVFGYKVHAKMALVIRREDGVLKRYAHLGTGNYHQGTSRIYTDFGLITADEQITADVNILFMEITGLGKPGRLNKLYQSPFTLHKMVIDRIARETEHAKAGKPARITAKMNSLIEPTVIEALYRASAAGVQIDLIVRGMCTLRPGVKGLSENIRVRSIVGRQLEHARVYYFHNNGTDDTFISSADWMGRNFFRRIETATPITAPELKKRVIHEGLTMALDDNTHAWLMQPDGGYIRAAPAEGESEADLQNDLWTLLGG

SEQ ID NO: 7085 - protein, 735 aa, Neisseria meningitidis
MFPDQSAPNLLQGLNPEQLSAVTWPPQSALVLAGAGSGKTRVLTTRIAWLLQSGQASVHSIMAVTFTNKAAKEMQTRLGAMIPINVRAMWLGTFHGLCHRFLRLHHRDAGLPSSFQILDGGDQLSLIKRLLKSLNIAEEIIAPRSLQGFINAQKESGLRASVLSAPDPHTRRMIECYAEYDKICQREGVVDFAELMLRSYEMLQNNEILRQHYQNRFNHILVDEFQDTNKLQYAWLKLIAGNHAAVFAVGDDDQSIYRFRGANVGNMTALMEEFHIDAPVKLEQNYRSVGNILAAANAVIENNDERLGKNLRTDAEAGDKIRYYSAFTDLEEARFILDETKALEREGWDLDEIAVLYRSNAQSRVIEQSLFRSGIPYKIYGGLRFYERQEIKHALAYLRLAVNPDDDNALLRVINFPPRGIGARTVENLQTASNEQGITLWQAACNAGAKAAKVVAFVRLIEALRNQVGQLSLSEIIVGILKDSGLTEHYRTQKGDNQDRLDNLDELVNAAIEFKPEDSNFEILPENISDDPAFPILAFLSNAALESGENQAGAGEKAVQLMTVHAAKGLEFNAVFLTGMEEGRFPSEMSLAERGGLEEERRLMYVAITRARKRLYITMAQQRMLHGQTQFGIVSRFVEEIPPEVLHYLSVKKPAYDSYGNTRQTAASKDKIIDDYKQPQTYAGFRIGQNVRHAKFGTGVIIDAADKGESARLTINFGKQGVKELDTKFAKLEEM

SEQ ID NO: 7086 - protein, 553 aa, Neisseria meningitidis
MTDNSPPPNGHAQARVRKNNTFLSAVWLVPLIALIAGGWLWVKEIRNRGPVVTLLMDSAEGIEVNNTVIKVLSIDVGRVTRIKLRDDQKGVEVTAQLNADVSGLIRSDTQFWVVKPRIDQSGVTGLGTLLSGSYIAFTPGKSDEAKDVFQVQDIPPVTAIGQSGLRLNLIGKNDRILNVNSPVLYENFMVGQVESAHFDPSDQSVHYTIFIQSPNDKLIHSASRFWLESGINIETTGSGIKLNSAPLPALLSGAISFDSPKTKNSKNVKSEDSFTLYDSRSEVANLPDDRSLYYTAFFKQSVRGLTVGSPVEYKGLNVGVVSDVPYFDRNDSLHLFENGWIPVRIRIEPSRLEINADEQSKEHWKQQFQTALNKGLTATISSNNLLTGSKMIELNDQPSASPKLRPHTVYAGDTVIATQGGGLDDLQVKLADLLDKFDKLPLDKTVAELNGSLAELKSTLKSANAALSSIDKLVGKPQTQNIPNELNQTLKELRTTLQGVSPQSPIYGDVQNTLQSLDKTLKDVQPVINTLKEKPNALIFNSSSKDPIPKGSR

SEQ ID NO: 7087 - protein, 354 aa, Neisseria meningitidis
MALVSMRQLLDHAAENSYGLPAFNVNNLEQMRAIMEAADQVDAPVIVQASAGARKYAGAPFLRHLILAAVEEFPHIPVVMHQDHGASPDVCQRSIQLGFSSVMMDGSLMEDGKTPSSYEYNVNATRTVVNFSHACGVSVEGEIGVLGNLETGEAGEEDGVGAVGKLSHDQMLTSVEDAVCFVKDTGVDALAIAVGTSHGAYKFTRPPTGDVLRIDRIKEIHQALPNTHIVMHGSSSVPQEWLKVINEYGGNIGETYGVPVEEIVEGIKHGVRKVNIDTDLRLASTGAVRRYLAENPSDFDPRKYLSKTIEAMKQICLDRYLAFGCEGQAGKIKPVSLEKMASRYAKGELNQIVK

SEQ ID NO: 7088 - protein, 290 aa, Neisseria meningitidis; identical to SEQ ID NO: 4909

SEQ ID NO: 7089 - protein, 192 aa, Neisseria meningitidis; identical to SEQ ID NO: 746

SEQ ID NO: 7090 - protein, 325 aa, Neisseria meningitidis; identical to SEQ ID NO: 5588

SEQ ID NO: 7091 - protein, 522 aa, Neisseria meningitidis; identical to SEQ ID NO: 968

SEQ ID NO: 7092 - protein, 421 aa, Neisseria meningitidis
MSKKQPAQPTRRTLFKTAIAAGAVGAIGGYLGGKKQGETAERTAESQHSPQAYPCYGEHQAGIVTPQQAFSIMCAFDVTAQSAKQLENLFRPLTARIEFLTQGGEYQDGDDKLPPAGSGILGKAFNPDGLTVTVGVGSSLFDGRFGLKDKKPIHLQEMRDFSNDKLQKSWCDGDLSLQICAFTPETCQAALRDIIKHTVQTAVIRWSIDGWQPKSEPGAMAARNLLGFRDGTGNPKVSDPKTADEVLWTGVAANSLDEPEWAKNGSYQAVRLIRHFVEFWDRTPLQEQTDIFGRRKYSGAPMDGKKEADQPDFAKDPEGDITPKDSHIRLANPRDPEFLKKHRLFRRAYSYSRGLASSGQLDVGLVFVCYQANLADGFIFVQNLLNGEPLEEYISPFGGGYFFVLPGVEKGGFLGQGLLGV

SEQ ID NO: 7093 - protein, 421 aa, Neisseria meningitidis
MNTLQRRKTHQVRIDHITVGSEAPVVIQSMTNTDTADAKATALQIKELSDAGSEMVRITVNSSEAASKVAEIRRRLDDMGYATPLIGDFHFNGERLLAEFPECGKALSKYRINPGNVGKGVKGDEKFAFMIRTAAENDKAVRIGVNWGSLDQSLAKRMMDANLASSAPKPPEEVTKEALIVSALESAEKAVLLGLPEDKIILSCKVSAVQDLIQVYRELGSRCAYPLHLGLTEAGMGSKGIVASTAALSVLLQEGIGDTIRISLTPEPGSPRTQEVVVGQEILQTMGLRSFTPMVTACPGCGRTTSTVFQELAQDVQNYLRQKMSIWRTLYPGVESLNVAVMGCVVNGPGESKLADIGISLPGTGETPVAPVYVDGERKVTLKGDNIATEFLAIVEEYVKTNYGENGLKRHQGKVIPIHSL

SEQ ID NO: 7094 - protein, 423 aa, Neisseria meningitidis
VGDGVHTLLLDRPIVRDGRKFDAPLLWMVVLMTAFSLLMIYSASVYLASKEGGDQFFYLTRQAGFVVAGLIASGLLWFLCRMRTWRRLVPWIFALSGLLLVVVLIAGREINGATRWIPLGPLNFQPTELFKLAVILYLASLFTRREEVLRSMESLGWQSIWRGTANLIMSATNPQARRETLEMYGRFRAIILPIMLVAFGLVLIMVQPDFGSFVVITVIAVGMLFLAGLPWKYFFVLVGSVLGGMVLMITAAPYRVQRVVAFLDPWKDPQGAGYQLTHSLMAIGRGEWFGMGLGASLSKRGFLPEAHTDFIFAIIAEEFGFFGMCVLIFCYGWLVVRAFSIGKQSRDLGLTFNAYIASGIGIWIGIQSFFNIGVNIGALPTKGLTLPLMSYGGSSVFFMLISMMLLLRIDYENRRKMRGYRVE

SEQ ID NO: 7095 - protein, 273 aa, Neisseria meningitidis
MAVLITGASAGFGEAMCRAFVGAGYRVIGAARRADRLQALADELGALFYPLEMDVSRRESVENALNGIPDEFSDIDCLINNAGLALGLDTADKADFGDWETMIQTNVLGLTFLTRKILPQMVERGGGYVMNLGSIAGNYAYAGSNVYGATKAFVRQFSLNLRAELADKNIRVTNIEPGLCGNTEFSNVRFKGDDEKAAGVYEGVEFIRPEDIAETALWLYRRPAHMNVNTIEIMPVAQTFAGMKVIKKAVPEVREDFEKQSMSLFSRIRSWFK

SEQ ID NO: 7096 - protein, 63 aa, Neisseria meningitidis
  misc_feature 58, 59: 'Xaa' is any amino acid
MKKSLIALCVAHCAKLKNDFGVPPLPEIKITPSPVRVGSLKQHPSLRLGKSGVAAAKXXHTLN

SEQ ID NO: 7097 - protein, 260 aa, Neisseria meningitidis
MTDILNKILATKAQEVAAQKAAVNAEHIRTLAAEAAPVRSFIDSIRGKHRLNLPAVIAEIKKASPSKGLIRPDFRPAEIARAYENAGAACLSVLTDEPYFQGSPEYLKQAREAVSLPVLRKDFIIDEYQVYQARAWGADAVLLIAAALEQEQLERFEAVAHELGMTVLLELHDETELEKCRNLTTPLWGVNNRNLRTFEVSLDQTLSLLPALEGKTVVTESGITGKADVEFMQSRGVHTFLIGETFMRADDIEAEVGKLF

SEQ ID NO: 7098 - protein, 45 aa, Neisseria meningitidis
LPRLAVLSVLSAASSPCPDLNLIHYIIKQQISKPEHLLRSLKIIS

SEQ ID NO: 7099 - protein, 270 aa, Neisseria meningitidis
MENIGRQRPIGVFDSGIGGLTNVRALMERLPMENIIYFGDTARVPYGTKSKATIENFSMQIVDFLLEHDVKAMVIACNTIAAVAGQKIRQKTGNMPVLDVISAGAKAALATTRNNKIGIIATNTTVNSNAYARAIHRNNPDTLVRTQAAPLLVPLVEEGWLEHEVTRLTVCEYLKPLLADGIDTLVLGCTHFPLLKPLIGREAGNVALVDSAITTAEETARVLAQEGLLNTDNNNPDYRFYVSDIPLKFRTIGERFLGRTMEQIEMVSLG

SEQ ID NO: 7100 - protein, 336 aa, Neisseria meningitidis
MNHTVTLPDQTTFAANDGETVLTAAARQNLNLPHSCKSGVCGQCKAELVSGDIQMGGHSEQALSEAEKAQGKILMCCTTAQSDININIPGYKADALPVRTLPARIESIIFKHDVALLKLALPKAPPFAFYAGQYIDLLLPGNVSRSYSIANLPDQEGILELHIRRHENGVCSEMIFGSEPKVKEKGIVRVKGPLGSFTLQEDSGKPVILLATGTGYAPIRSILLDLIRQGSNRAVHFYWGARHQDDLYALEEAQGLACRLKNACFTPVLSRPGEGWQGRNGHVQDIAAQDHPDLSEYEVFACGSPAMTEQTKNLFVQQHKLPENLFFSDAFTPSAS

SEQ ID NO: 7101 - protein, 222 aa, Neisseria meningitidis
MLPSKYEDNALQIKEKSTERTAPFFVLEVTARSAADILGIHPNSAVLFYRKIRTVINHHLALAADEVFEGPVEPDESDFGGRRKGRRGRGAAGKVVVFGILKRNGRGYTVVVDNAKSETLLPVIKKKIMPDSIVYTDSLSSCDKLDVSGFIHYRINHSKEFADRQNHINGIENFWNQAKRVLRKYNGIDRKSFPLFLKECEFRFNFGTPSQQLKILRDWCGI

SEQ ID NO: 7102 - protein, 41 aa, Neisseria meningitidis; identical to SEQ ID NO: 3182

SEQ ID NO: 7103 - protein, 390 aa, Neisseria meningitidis
MKRDLSKMTCIEDLRRVAKRKMPRMFYDYIDSGSWTETTYRENTSDFKDIRFRQKVLVNMEGRSLETKMIGQDVKMPVAIAPTGFTGMAHADGEILAARAAEKFGIPFTLSTMSICSIEDVAENTSAPFWFQLYVMRDREFMENLIKRAKDAKCSALVLTADLQVLGQRHKDIKNGLSAPPKPTIANLINLATKPEWCMKMLNTERRTFRNIVGHAKNVGDLSSLSSWTSEQFDPRLSWDDVARIKDLWGGKLIIKGIMEPEDAEKAAKSGADALIVSNHGGRQLDDTVSAIKALPDIVSAVGSDIEVWMDSGIRSGQDILKAWALGAKGTMIGRAFLYGLGAYGEEGVTRALEILYKEMDISMAFTGHRDIQDVDASILRGKDWGRETV

SEQ ID NO: 7104 - protein, 352 aa, Neisseria meningitidis
MSGYTGGLVVSGGISLIDRLDIMENVNRIVAEGIAAVEAAQDFNALEQIKARYLGKTGELTGLLKTLGQMSPEERKTIGAHINECKNRFQTAFNAKREALNEVKLQARLAAEALDITLPGRAQEGGSLHPVTLTLQRVVELFHGMGFEVADGPEIEDDFHNFQALNIPANHPARAMQDTFYVENGDVLRTHTSPIQIRYMLDKKEPPIRIIAPGRVYRVDSDATHSPMFHQAEGLWVEEGVTFADLKAVFTDFIRRFFERDDLQVRFRPSFFPFTEPSAEIDIMGENGKWLEVGGCGMVHPNVLKNVNIDPEKYTGFAFGIGLDRFAMLRYNVNDLRLFFDNDLNFLKQFAK

SEQ ID NO: 7105 - protein, 50 aa, Neisseria meningitidis
MSGIYLPRLFPPHIAERGLLYFQQGKVLDVRKTSAGHYRAEVCGSENYWV

SEQ ID NO: 7106 - protein, 616 aa, Neisseria meningitidis
MIMLPNRFKMLTVLTATLIAGQVSAAGGGAGDMKQPKEVGKVFRKQQRYSEEEIKNERARLAAVGERVNQIFTLLGGETALQKGQAGTALATYMLMLERTKSPEVAERALEMAVSLNAFEQAEMIYQKWRQIEPIPGKAQKRAGWLRNVLRERGNQHLDGLEEVLAQADEGQNRRVFLLLAQAAVQQDGLAQKASKAVRRAALKYEHLPEAAVADVVFSVQGREKEKAIGALQRLAKLDTEILPPTLMTLRLTARKYPEILDGFFEQTDTQNLSAVWQEMEIMNLVSLHRLDDAYARLNVLLERNPNADLYIQAAILAANRKEGASVIDGYAEKAYGRGTEEQRSRAALTAAMMYADRRDYAKVRQWLKKVSAPEYLFDKGVLAAAAAVELDGGRAALRQIGRVRKLPEQQGRYFTADNLSKIQMLALSKLPDKREALRGLDKIIEKPPAGSNTELQAEALVQRSVVYDRLGKRKKMISDLERAFRLAPDNAQIMNNLGYSLLTDSKRLDEGFALLQTAYQINPDDTAVNDSIGWAYYLKGDAESALPYLRYSFENDPEPEVAAHLGEVLWALGERDQAVDVWTQAAHLTGDKKIWRETLKRHGIALPQPSRKPRK

SEQ ID NO: 7107 - protein, 384 aa, Neisseria meningitidis
MVDKKSPLIAVSVGEASGDLLGAHLIRAIRERCPQARFTGIGGELMKAEGFESLYDQERLAVRGFVEVVRRLPEILRIRRGLVRDLLSLKPDVFVGIDAPDFNLGVAEKLKRTGIPTVHYVSPSVWAWRRERVGKIVHQVNRVLCLFPMEPQLYLDAGGRAEFVGHPMAQLMPLEDDRETARKTLGVDAGIPVFALLPGSRVSEIDYMAPVFFQTALLLLKRYPTARFLLPAATEATKRRLAEVLQRPEFAGLPLTVTDRQSETVCRAADAVLVTSGTATLEVALCKRPMVISYKISPLTYAYVKRKIKVPHVGLPNILLGKEAVPELLQSEAKPEKLAAALADWYEHPDKVAALQQDFRALHLLLKKDTADLAARAVLEEAGC

SEQ ID NO: 7108 - protein, 100 aa, Neisseria meningitidis; identical to SEQ ID NO: 3521

SEQ ID NO: 7109 - protein, 305 aa, Neisseria meningitidis
MSIIHYLSLHVESARTALKQLLRQPFGTLLTLMMLAVAMTLPLFMHLGIQSGQSVLGKLNESPQITIYMETSAAQSDSDTVRSLLARDKRLDNIRFIGKEDGLEELQSNLDQNLISMLDGNPLPDVFIVTPDPATTPAQMQAIYRDITKLPMVESASMDTEWVQTLYQINEFIRKILWFLSLTLGMAFVLVAHNTIRLQILSRKEEIEITKLLGAPASFIRRPFLYQAMWQSILSAAVSLGLCGWLLSAVRPLVDAIFKPYGLNIGWRFFYAGELGLVFGFVIALGVFGAWLATTQHLLGFKAKK

SEQ ID NO: 7110 - protein, 174 aa, Neisseria meningitidis
MKKALATLIALALPAAALAEGASGFYVQADAAHAKASSSLGSAKGFSPRISAGYRINDLRFAVDYTRYKNYKAPSTDFKLYSIGASAIYDFDTQSPVKPYLGARLSLNRASVDLGGSDSFSQTSIGLGVLTGVSYAVTPNVDLDAGYRYNYIGKVNTVKNVRSGELSAGVRVKF

SEQ ID NO: 7111 - protein, 97 aa, Neisseria meningitidis; identical to SEQ ID NO: 910

SEQ ID NO: 7112 - protein, 201 aa, Neisseria meningitidis
MKKIGLFGGTFDPIHNGHLHIARAFADEIGLDAVVFLPTGGPYHKDAASASAADRLAMVELATAEDARFAVSDCDIVREGATYTFDTVQIFRQQFPSAQLWWLMGSDSLMKLHTWKKWQMLVRETNIAVAMRQGDSLHQTPRELHAWLGKSLQDGSVRILSAPMHNVSSTEIRRNLAGQGVSDGIPPAAARYIREHGLYEK

SEQ ID NO: 7113 - protein, 376 aa, Neisseria meningitidis
MFTDENMTAKEELFAWLRHMNQNKGSDLFVTTHFPPAMKLDGKITRITDEPLTAEKCMEIAFSIMSAKQAEEFSSTNECNFAISLPDTSRFRVNAMIQRGATALVFRTITSKIPKFESLNLPPVLKDVALKKRGLVIFVGGTGSGKSTSLASLIDYRNENSFGHIITIEDPIEFVHEHKNCIITQREVGVDTENWMAALKNTLRQAPDVILIGEIRDRETMDYAIAFAETGHLCMATLHANSTNQALDRIINFFPEERREQLLTDLSLNLQAFISQRLVPRDGGKGRVAAVEVLLNSPLISELIHNGNIHEIKEVMKKSTTLGMQTFDQHLYQLYEKGDISLQEALKNADSAHDLRLAVQLRSRRAQSSSPDLELL

SEQ ID NO: 7114 - protein, 563 aa, Neisseria meningitidis
MIKCPSIPINGHFTKISWLILNKYFLRQKIFPPILPTKPKPEADRYAPIRTLNTPITMQLIDYSHSFFSVVPPFLALALAVITRRVLLSLGIGILVGVAFLVGGNPVDGLTHLKDMVVGLAWSDGDWSLGKPKILVFLILLGIFTSLLTYSGSNQAFADWAKRHIKNRRGAKMLTACLVFVTFIDDYFHSLAVGAIARPVTDKFKVSRTKLAYILDSTAAPMCVLMPVSSWGASIIATLAGLLVTYKITEYTPMGTFVAMSLMNYYALFALIMVFVVAWFSFDIGSMARFEQAALNEAHDETAVSDATKGRVYALIIPVLALIASTVSAMIYTGAQASETFSILGAFENTDVNTSLVFGGTCGVLAVVLCTLGTIKTADYPKAVWQGAKSMFGAIAILILAWLISTVVGEMHTGDYLSTLVAGNIHPGFLPVILFLLASVMAFATGTSWGTFGIMLPIAAAMAVKVEPALIIPCMSAVMAGAVCGDHCSPISDTTILSSTGARCNHIDHVTSQLPYALTVAAAAASGYLALGLTKSALLGFGTTGIVLAVLIFLLKDKKRANA

SEQ ID NO: 7115 - protein, 196 aa, Neisseria meningitidis; identical to SEQ ID NO: 5310

SEQ ID NO: 7116 - protein, 436 aa, Neisseria meningitidis; identical to SEQ ID NO: 1523

SEQ ID NO: 7117 - protein, 404 aa, Neisseria meningitidis
MDKFPKSAKLDHVCYDIRGPVHKKALQLEEEGNKILKLNIGNPAPFGFEAPDEILVDVIRNLPTSQGYCDSKGLYSARKAIVHYYQTKGLRDITVDDVYIGNGVSELITMSMQALLNDGDEILIPAPDYPLWTAAATLAGGTVRHYLCDEENGWFPNLADMEAKITPKTKAIVVINPNNPTGAVYSREILLEIAELARKHGLIIFADEIYDKILYDGAVHHHIAALAPDLLTVTFNGLSKAYRVAGFRQGWMVLNGPKHHAKGYIEGLDMLSSMRLCANTPMQHAIQTALGGYQSINEFILPGGRLLEQRNRAWELVNQIPGVSCVKPMGAMYMFPKIDTEMYRIRDDMKFVYDLLVREKVLLVQGTGFNWIKPDHFRIVTLPYVHQIEEAMGRLARFLQTYRQ

SEQ ID NO: 7118 - protein, 305 aa, Neisseria meningitidis
  misc_feature 2, 3: 'Xaa' is any amino acid
VXXVWQLEQDVSVAGGGATQWGNRESFVGLAGEFGTLRAGRVANQFDDASQAIDPWDSNNDVASQLGIFKRHDDMPVSVRYDSPDFSGFSGSVQFVPIQNSKSAYTPAHYTRQNNADVFVPAVVGKPGSDVYYAGLNYKNGGFAGSYAFKYARHANVGRDAFELFLLGSTSDEAKGTDPLKNHQVHRLTGGYEEGGLNLALAAQLDLSENGDKAKTKNSTTEIAATASYRFGNAVPRISYAHGFDLIERGKKGENTSYDQIIAGVDYDFSKRTSAIVSGAWLKRNTGIGNYTQINAASVGLRHKF

SEQ ID NO: 7119 - protein, 259 aa, Neisseria meningitidis
MKTITETLNLAPKGKNFLTADWPAPANVKTLITTRNGGVSQGAYQSLNLGTHVDDNPEAVRRNREIVQQQVGLPVAYLNQIHSTVVVNAAEALGGTPDADASVDDTGKVACAVMTADCLPVLFCDRAGTTVAAAHAGWRGLAGGVLQNTIAAMKVPPVEMMAYLGPAISADAFEVGQDVFDAFCTPMPEAAAAFEGIGGGKFLADLYALARLILKREGVGGVYGGTHCTVLERDTFFSYRRDGATGRMASLIWLDGNAV

SEQ ID NO: 7120 - protein, 1014 aa, Neisseria meningitidis
MFWIVLIVILLLALAGLFFVRAQSEREWMREVSAWQEKKGEKQAELPEIKDGMPDFPELALMLFHAVKTAVYWLFVGVVRFCRNYLAHESEPDRPVPPASANRADVPTASDGYSDSGNGTEEAETEEAEAAEEEAADTEDIATAVIDNRRIPFDRSIAEGLMPSESEISPVRPVFKEITLEEATRALNSAALRETKKRYIDAFEKNETAVPKVRVSDTPMEGLQIIGLDDPVLQRTYSHMFDADKEAFSESADYGFEPYFEKQHPSAFSAVKAENARNAPFHRHAGQGKGQAEAKSPDVSQGQSVSDGTAVRDARRRVSVNLKEPNKATVSAEARISRLIPESQTVVGKRDVEMPSETENVFTETVSSVGYGGPVYDETADIHIEEPAAPDAWVVEPPEVPKVPMTAIDIQPPPPVSEIYNRTYEPPSGFEQVQRSRIAETDHLADDVLNGGWQEETAAIADDGSEGAAERSSGQYLSETEAFGHDSQAVCPFENVPSERPSCRVSDTEADEGAFPSEETGAVSEHLPTTDLLLPPLFNPEATQTEEELLENSITIEEKLAEFKVKVKVVDSYSGPVITRYEIEPDVGVRGNSVLNLEKDLARSLGVASIRVVETIPGKTCMGLELPNPKRQMIRLSEIFNSPEFAESKSKLTLALGQDITGQPVVTDLGKAPHLLVAGTTGSGKSVGVNAMILSMLFKAAPEDVRMIMIDPKMLELSIYEGIPHLLAPVVTDMKLAANALNWCVNEMEKRYRLMSFMGVRNLAGFNQKIAEAAARGEKIGNPFSLTPDDPEPLEKLPFIVVVVDEFADLMMTAGKKIEELIARLAQKARAAGIHLILATQRPSVDVITGLIKANIPTRIAFQVSSKIDSRTILDQMGAENLLGQGDMLFLLPGTAYPQRVHGAFASDEEVHRVVEYLKQFGEPDYVDDILSGGGSEELPGIGRSGDDETDPMYDEAVSVVLKTRKASISGVQRALRIGYNRAARLIDQMEAEGIVSAPEHNGNRTILVPLDNA

SEQ ID NO: 7121 - protein, 59 aa, Neisseria meningitidis
MFCIVVYRFRTFVRLKAGRHRNESTQRKCRLNMRSGGVLLGGIGAERLKKGFRRSLGVW

SEQ ID NO: 7122 - protein, 241 aa, Neisseria meningitidis
MRIPLLAPDNYAFPDPAYALARCDGLVGVSRDLDAGRLLEAYRNGVFPWFLRDGWFFWYAVGPRAVIVPERLHVPRSLEKTLRNCSYRVTVNGCFAEVVAHCAAAVRPNQDGTWIAPEFQTAYLKLHEMGYAHSFECHYPDENGKTRLAGGFYGVQIGRVFYGESMFALQPDASKIAFACAVPFLASLGVELIDCQQDTGHMRRFGSELLPFADFAERLRMLNAVPLKEEIGRREVACKGL

SEQ ID NO: 7123 - protein, 346 aa, Neisseria meningitidis
MQPIRYRTDLTPYNTFGLRAQARAFIALEHADELRDIVRLLEFDRDTVLWLGGGSNILLMQDYAGLVVHMENKGIREIARSDGMVLIEAQAGEIWHDFVLHTVALGLSGLENLSLIPGTVGASPVQNIGAYGVEAKDVIHSVRCFDLDTETFVELANADCRFAYRESLFKQEGKGRYVIVSVVFALKTHFVPTLGYGDLAAAVAELSAGRVPTAKDVSDAVCAIRNSKLPNPNVLGNVGSFFKNPVVSAEKAATLLQRHPDMPRYPQPDGSVKLAAGWLIDQCRLKGFQIGGAAVHDRQALVLVNKNNASANDVRQLAQHIKFTVFARFQVELHAEPNWLPASFSL

SEQ ID NO: 7124 - protein, 415 aa, Neisseria meningitidis
MSQRRVVITGLGQVSPVGNTVAEAWDTLLTGKSGIGAITRFDTSDINSRVAGEVRGFDIGQYISAKEARRMDVFIHYGIAAALQAIADSGLDDVENLDKDRIGVNIGSGIGGLPGIEVTGKAVIEGGARKINPFFIPGSLINLISGHVTILKGYRGPSYGMVSACTTGAHAIGDSLRMIKYGDADIMVAGGAEGAISTLGVGGFAAMKALSTRNDDPATASRPWDKGRDGFVIGEGAGILVLEELEHAKKRGAKIYAEIVGFGMSSDAYHITAPNEEGPALAVTRALKDAGINPEDVDYVNAHGTSTPLGDANETKALKRAFGEHAYKTVVSSTKSMTGHLLGAAGGVEAVYSILAIHDGKIPPTINIFEQDVEAGCDLDYCANEARDAEIDVAISNSFGFGGTNGTLVFKRFKG

SEQ ID NO: 7125 - protein, 149 aa, Neisseria meningitidis
  misc_feature 143, 144: 'Xaa' is any amino acid
MKELDKIDFRILKILQQNARIPMTELAEKVGLSTTPVTERVRRLEREHYISGYHAHLNPHLLGKPLLVFVELKLQSKSGNIFEDFKKEVLKIPQIMECHLVSGEYDYLIKVRLPDMSAYRDMLGNILLQLPAASESRSYVVMXXTHLIN

SEQ ID NO: 7126 - protein, 262 aa, Neisseria meningitidis
MNHQDARWQVHRHLAEHTDQRLTLVRNAPKHILLAGADADISRSLLAKRYPQAVFEEYDSRADFLAAAAAARKGGFWQRFTGKGVVQHCQSPIAPLPEACADMLWSNLGLLAAEQILPVLHNWARALKTDGLLFFTCFGRDTLAELKCRLKENGIESRSALFPDMHDLGDMLAENGFYDPVTDTAKLVLDYKKAETFWADMDTLGVWRAMAWNDENAARSCVGTIFEREGGLGITLETVYGHAVKKLMLPQGENVVQFFPKR

SEQ ID NO: 7127 - protein, 223 aa, Neisseria meningitidis
MTTQDELKRIAAEKAVEFVPENEYIGIGTGSTINFFIEALGKSGKKIKGAVSTSKKSGELLAQYDIPVVSLNEVSGLAVYIDGADEVNHALQMIKGGGGAHLNEKIVASASEKFICIADESKYVSRLGKFPLPVEVVESARSLVSRKLLAMGGQPELRIGYTTFYGNQIVDVHGLNIDQPLTMEDEINKITGVLENGIFARDAADVLILGTEEGAKVIYPCQG

SEQ ID NO: 7128 - protein, 291 aa, Neisseria meningitidis
MLQGSLVALITPMNQDGSIHYEQLRDLIDWHIENGTDGIVAVGTTGESATLSVEEHTAVIEAVVKHVAKRVPVIAGTGANNTVEAIALSQAAEKAGADYTLSVVPYYNKPSQEGIYQHFKTIAEATSIPMIIYNVPGRTVVSMTNDTILRLAEIPNIVGVKEASGNIGSNIELINRAPEGFVVLSGDDHTALPFMLCGGHGVITVAANAAPKLFADMCRAALQGDIALARELNDRLIPIYDTMFCEPSPAAPKWAVSALGRCEPHVRLPLVPLTENGQAKVRAALKASGQL

SEQ ID NO: 7129 - protein, 265 aa, Neisseria meningitidis; identical to SEQ ID NO: 2138

SEQ ID NO: 7130 - protein, 148 aa, Neisseria meningitidis
VRAFQTALRPSRILNILTVSLHAASLAVCLTWFYGRMMWFGLAALVASYAYSLRITNLKHRHAITAITIDRDGQAEIVSGKDKTAKAAALSGSSMVTPYALFLQWDTGGKTVRQCIMPDMTDKESYRKLKVWVLWRQPKKTAETDTSD

SEQ ID NO: 7131 - protein, 506 aa, Neisseria meningitidis
MSKWRGLNQKGNTMKEMMMFKRSVIAMACIFALSACGGGGGGSPDVKSADTLSKPAAPVVSEKETEAKEDAPQAGSQGQGAPSAQGSQDMAAVSEENTGNGGAVTADNPKNEDEVAQNDMPQNAAGTDSSTPNHTPDPNMLAGNMENQATDAGESSQPANQPDMANAADGMQGDDPSAGGQNAGNTAAQGANQAGNNQAAGSSDPIPASNPAPANGGSNFGRVDLANGVLIDGPSQNITLTHCKGDSCSGNNFLDEEVQLKSEFEKLSDADKISNYKKDGKNDKFVGLVADSVQMKGINQYIIFYKPKPTSSARVRRSARSRRSLPAEMPLIPVNQADTLIVDGEVVSLTGHSGNIFAPEGNYRYLTYGAEKLSGGSYALRVQGEPAKGEMLAGTAVYNGEVLHFHTENGRSYPTRGRFAAKVDFGSKSVDGIIDSGDDLHMGTQKFKAVIDGNGFKGNWTENGGGDVSGRFYGPAGEEVAGKYSYRPTDAEKGGFGVFAGKKEQD

SEQ ID NO: 7132 - protein, 190 aa, Neisseria meningitidis
MDNHAEAHWQNGWLQSIRHTPSPNFSPRETGETVSLIVLHNISLPPFEYGTDAVEKLFANRLDPDGHPFFSLIHTLRVSSHFLIKRDGETVQFVSCDNMAYHAGVSSFGGREKCNAFSIGIELEGCDFEPFAEAQYRSLEALLDAICRHYPVTAVTGHQDIAPGRKTDPGHFFDWRRIREKGFLVDRNAV

SEQ ID NO: 7133 - protein, 291 aa, Neisseria meningitidis
MAYLLISIVFSVSVSILLKMARKKKIDIAQAVAVNYVVAVILTLLVLKPDVGNIGAFLPTWWLFAALGVLLPSVFVIMGKSVESAGIVKSDAAQRLSLFLPIVAALTLFGEKLSEGRLIGLCLAFAALFCLLWKHSGGKKSGSAWRQAALLLGVWAGYGIIDILFKQLAKSGTAFAGNLLVAFVLAGVLMFACLFAKSVRWRVESVVGGIFLGGLNFMNIVTYITAHQMMKDNPTLVFAGMNIGVIVLGTLSGALFFKEKINTINTAGIVLALCSIACLFYWGEVKVLFGI

SEQ ID NO: 7134 - protein, 68 aa, Neisseria meningitidis
MKAVRDIALWLAVTVWINFFPDSYRYDTVPQGRYGYWHADHPWYPYARFLLPLFLACILFYRHFRKRK

SEQ ID NO: 7135 - protein, 70 aa, Neisseria meningitidis
MPDRIKPSRNGGGADDIARQQGTAQTGAKPETSPTARYGDFLRPLQGGIGFKRRGLEGKTGGAQNCLNAV

SEQ ID NO: 7136 - protein, 241 aa, Neisseria meningitidis; identical to SEQ ID NO: 400

SEQ ID NO: 7137 - protein, 86 aa, Neisseria meningitidis
MKMCPACQQGYLYHSKPKYLHDEIILCDECDAVWLKGMNIFYGEYEKDFYSYVPFMESQGITSECIWEGDLFDHPYYEDENSNDMD

SEQ ID NO: 7138 - protein, 212 aa, Neisseria meningitidis
MSKLTPREILTAGAVVPVMAIDDLSTAIDLSHALVEGGIPTLEITLRTPVGLDAIRLIAKEVPNAIVGAGTVTNPEQLKAVEDAGAVFAISPGLHESLAKAGHNSGIPLIPGVATPGEIQLALEHGIDTLKLFPAEVVGGKAMLKALYGPYADVRFCPTGGISLATAPEYLALPNVLCVGGSWLTPKEAVKNKDWDTITRLAKEAAALKPKA

SEQ ID NO: 7139 - protein, 228 aa, Neisseria meningitidis; identical to SEQ ID NO: 2050

SEQ ID NO: 7140 - protein, 60 aa, Neisseria meningitidis; identical to SEQ ID NO: 3237

SEQ ID NO: 7141 - protein, 316 aa, Neisseria meningitidis; identical to SEQ ID NO: 5301

SEQ ID NO: 7142 - protein, 292 aa, Neisseria meningitidis; identical to SEQ ID NO: 1803

SEQ ID NO: 7143 - protein, 310 aa, Neisseria meningitidis
MKQNRTFTFPDFRTVYSYAPLYRLQHLKYTLRKFFGKKEIYAFEQFVNASPIRQGLFLHCPQNAYPLLREFVDRRFNCKRRLDAMTADFLMAEKLFGTDILHQMEDYRFHLVLAHLSDGISLWLNRNDNCVEEGAWSLSLRDEAGNRLYMATFAFVGTHLLTASVQGPAGEEAKDTVRRITKQLHGLRPQQLMVTALQYFAAVLGLDGAMGIAQKHQVKLRWKLKKRVKMNYDAFWQEYGASLERDGYWHLPQTPARKDLADIESKKRSMYRKRYEMLDNMVAEMKDSLKTEARGISDGIQTEKPPRRTA

SEQ ID NO: 7144 - protein, 239 aa, Neisseria meningitidis
LTLTRKTLFLLTAAFGTHSLQTASADAVVKAEKLHASANRSYKVAGKRYTPKNQVAEFTQTGNASWYGGRFHGRKTSGGERYDMNAFTAAHKTLPIPSYVRVTNTKNGKSVIVRVNDRGPFHGNRIIDVSKAAAQKLGFVNQGTAHVKIEQIVPGQSAPVAENKDIFIDLKSFGTEHEAQAYLNQAAQNFAVSSSGTNLSVEKRRYEYVVKMGPFTSQERAAEAEAQARGMVRAVLTAG

SEQ ID NO: 7145 - protein, 477 aa, Neisseria meningitidis; identical to SEQ ID NO: 3214

SEQ ID NO: 7146 - protein, 116 aa, Neisseria meningitidis; identical to SEQ ID NO: 4624

SEQ ID NO: 7147 - protein, 417 aa, Neisseria meningitidis
VDKLKISANGPLNGEITVSGAKNAALPLMCAGLLTSGTLRLKNVPMLADVKTTQKLLQGMGARVLTDNISEFEINGGTVNNTCAPYELVRTMRASILVLGPTLARFGEAQVSLPGGCAIGSRPVDQHLKGLEAMGAEIVIEHGYVKAKGKLKGTRVAMDVVTVGGTENLLMAATLAEGTTVLENCAIEPEVVDLAECLVKMGAKISGIGTSTMIVEGVDELQGCEHSVVPDRIEAGTFLCAVAITGGRVVLRNAAPKTMEVVLDKLVEAGAVIEAGDDWIAIDMRQRPKAVDIRTVVHPGFPTDMQAQFMALNAVAEGSCRVVETIFENRFMHVPELNRMGANITTEGNTAFVQGVEQLSGAVVKATDLRASASLVIAGLAARGETVVEQIYHLDRGYENIEKKLGSVGAKIERVSG

SEQ ID NO: 7148 - protein, 198 aa, Neisseria meningitidis
MAFITRLFKSSKWLIVPLMLPAFQNVAAEGIDVSRAEARITDGGQLSISSRFQTELPDQLQQALRRGVPLNFTLSWQLSAPIIASYRFKLGQLIGDDDNIDYKLSFHPLTNRYRVTVGAFSTDYDTLDAALRATGAVANWKVLNKGALSGAEAGETKAEIRLTLSTSKLPKPFQINALTSQNWHLDSGWKPLNIIGNK

SEQ ID NO: 7149 - protein, 111 aa, Neisseria meningitidis
MQMHWLFLTVAILSEVCGSSMLKLSGGFSKLWPSIGVVVSFSVCFWALSMTLKTMPLATAYAIWAGVGLVLTALVSVVFFGEKADFIGIVSIGLILLGVVLLNTMSHMSGH

SEQ ID NO: 7150 - protein, 135 aa, Neisseria meningitidis
MKRQAFFKLMACAAFLSAVSLRLPVLGACYAILSLYAFALYGIDKRCAIRGQRRIPEHRLLLPALLGGWVGAYFGSMTFKHKTAKKRFVVLFRLTVSGNVLATLILIYSGLNLNQYGVASPCRTICTVCGFVALS

SEQ ID NO: 7151 - protein, 239 aa, Neisseria meningitidis
MKDDVLKQQAHAAIQKKLGYAFRDISLLRQALTHRSHHAKHNERFEFVGDSILNYTVARMLFDAFPKLTEGELSRLRASLVNEGVLAEMAAEMNVGDGLYLGAGELKSGGFRRPSILADAMEAMFAAVSFDADFNTAEKVVRHLFADRVRRADFQNQAKDGKTALQEALQARRFALPKYRIEEQIGYANDSMFVISCDLGELGFVCRAKGTSRKAAEQEAAKEALKWLEEKLPLKRKKK

SEQ ID NO: 7152 - protein, 219 aa, Neisseria meningitidis; identical to SEQ ID NO: 2874

SEQ ID NO: 7153 - protein, 428 aa, Neisseria meningitidis
MTAQHQTPLRFITAGSVDDGKSTLIGRLLYDSKALLSDQIKTLESGKSKGLKEAIDFSILTDGLEAEREQGITIDVAYRYFSTAKRKFIIADTPGHEQYTRNMVTGASTASAAVVLVDASQLDFGAQPLQLLPQTKRHSAILRQLNCPHIVVAVNKMDLLDYSEDKFNAIVEAYRRLAEQLGLKDAHFVPMSALLGDNIVYPGGNMPWYKGEPLLSILETLPGADEVSRTADDFYFPVQLVVRQDADKADDFRGYQGRIERGSVAVGQTVRIEPNGLTAEVSEIITPKGEVAQAFAGEAATLRLDRDIDVSRGDLFVDKNSPLAPQKHLEATLCWFDERPLNTARKYLLKHGTQTVPAKVGEIESVLDVRTLEQEAGAESLKMNDIAKVRINLQKPVTATPYAENTAAGSFILIDEATYGTVAAGMIL

SEQ ID NO: 7154 - protein, 540 aa, Neisseria meningitidis
MKTKEFLKSLAELAASLRQVIEAEVDGFDASPKAIAARRAKVFDPVGGYEYFVNTYFPHYIRSPEKSELHAFLFSRLPEIIRSPKGENEAVGAPRGEGKSTKVTQLFTLWCIVTGQKHYAVIVMDSIDQAYPMLEAIKAELEFNPRLKTDFPEVCGQGRVWQAGTIVTANDVKVQVAGSGKKLRGLRHGPYRPDLTVLDDIENDEQVRNPEQRDKLNAWLTKTVLPLGGVGQKYDVIYIGTILHYDSVLNRTLNNPFWHGIKFKAMKRWPDRMDLWDRWEELFRNDGETVAEAFYQANKDEMERGAVTSWAARGVLALMKIRARDGHATFDSEYQNDPVSGEDAPFAKSMKFWNDLPSDLVYFGALDPSLGKAGASRDPSAIIIGGYQRVTGKLYVVEAQIKKRLPDLIIEDVIRLHRQYRCKLWFVETVQFQEFLKDELVKRSAARGIPVPARAVKPVSDKLLRIETLQPHMANGLILLNESQQTLIQQFRHFPKADHDDGPDAVHMLWSGAVANCVPIEWQSPTDNDFDDEIKSKWSR

SEQ ID NO: 7155 - protein, 119 aa, Neisseria meningitidis
MLSNIIPLSIGAALGATARWLLNLAVPASIPPATGNLFANWIGAFLIGIFAETVNHPQWKLLLITGFLGSLTTLSGFSLETVTLLQLNRPASALANIFLHTAGSLLLTWLGLKIGAAVK

SEQ ID NO: 7156 - protein, 140 aa, Neisseria meningitidis; identical to SEQ ID NO: 1135

SEQ ID NO: 7157 - protein, 94 aa, Neisseria meningitidis; identical to SEQ ID NO: 973

SEQ ID NO: 7158 - protein, 299 aa, Neisseria meningitidis
MWFKQISFYPLNKEKLPEADVLADKLAEAEFTHCQGLDWFSEGFTAPVSFSPELVFPADFTLRVALKKEEKVLPAGVIRDILEEKVAEIQNNEARNVGRKEKQELKEQITDDLLPRAFTRSSRTEAVFNTRHGYLLVNNAASAKAENILTKLREALGGLEASLPNTKQSPSSLMTGWLLQGHCEGGFELDSDCELKGTGDIVPVVKVSKQDLTADEVVQHVKNGKTVTQLGLVWREQIAFILTQDFTLKRIQYLDVLQEEAESNGDDAAGLAFASQILMAESVSTMLEELVSYLGGWQD

SEQ ID NO: 7159 - protein, 1144 aa, Neisseria meningitidis
MTEPTYIPLRLHTEFSITDGMVRIKKLIAKAQEYGLPALGISDLMNEFGLVKFYKACRSAGIKPIGAADVRIGNPDAPDKPFRAMLIIRNDAGYLRLSELLTAAYVGKDRNVHHAELNPEWLENGDNSGLICLSGAHYGEVGVNLLNGNEDAARTAALKYAAWFPDAFYMELQRLPERPEWEACVSGSVKLAEELGLPVVATHPTQFMSRDDFNAHEARVCIAGGWVLTDKKRPRDFTPGQFFIPPETMAERFADLPEALENTVEIAKRCNLHITLGKNFLPLFPTPDGLSLDDYLIKLSNEGLQERMVQLYPDEAERAAKMPEYQERLDFELNIIIQMKFPGYFLIVQDFINWAKTHGCPVGPGRGSGAGSLVAYSLKITDLDPLKYALLFERFLNPERVSMPDFDVDFCQSNRGRVIEYVREKYGAEAVSQIVTFGTMSSKAVIRDVGRVLELPFMLCDKLSKLIPLEANKPLSLEKAMETEPQIQELIEAEEADELITLAKKLEDLTRGLGMHAGGVLIAPGKISDYSPVYQADESASPVSMYDKGDVEDVGLVKFDFLGLRNLTIIEMAQNNIKNTTGDIIDVGKIPLDDQVAYQIFRDANTTAVFQFESTGMKKMLKTAHTTKFEELIAFVSLYRPGPMDNIPDFVARMKGQEFQYIHPLLEGILAPTYGIMVYQEQVMQAAQIIGGYSLGGADLLRRAMGKKKPEEMVKHREIFAEGAAKQGISREKSDEIFNYMEKFAGYGFNKSHAAAYALISYQTAWLKAHYPAEFMAATMSSELDNTDQLKHFYDDCRANGIEFLPPDINESDYRFTPYPDMKIRYALGAIKGTGEAAVESITAARQSGGKFTGLLDFCERVGKEHMNRRTLEALIRGGAFDSIEPNRAMLLANIDLAMDNADQKAANANQGGLFDMMEDAIEPVRLIDAPMWSESEKLAEEKTVIGFYLSGHPFGPYAQEVRQIAPTKLDRLKPQDSVRLAGFVTAVRTMMGKRGKIAFVSLEDLSGQVEIMVGGQTLENCADCLKADQVLIIESKVSRDDYGGGDGLRILANQVMTLQTARERYARSLSLALAPHHDIGGLVRLLAAHQLPDTPRIPLQLSYANEKASGRLQVPPKWTVTPSSALFGELETLLGSRSVRVNW

SEQ ID NO: 7160 - protein, 352 aa, Neisseria meningitidis; identical to SEQ ID NO: 327

SEQ ID NO: 7161 - protein, 642 aa, Neisseria meningitidis
MAKVIGIDLGTTNSCLAISENGQTKVIENAEGARTTPSVIAYLDGGEILVGAPAKRQAVTNAKNTIYAAKRLIGHKFEDKEVQRDIESMPFEIIKANNGDAWVKAQGKELSPPQISAEVLRKMKEAAEAYLGEKVTEAVITVPAYFNDSQRQATKDAGRIAGLDVKRIINEPTAAALAFGMDKGDNKDRKVAVYDLGGGTFDISIIEIANLDGDKQFEVLATNGDTFLGGEDFDQRLIDHIIAEFKKEQGIDLKQDVMALQRLKEAAEKAKIELSSGQQTEINLPYITMDATGPKHLAMKITRAKFESLVEDLITRSIEPCKIALKDAGLSTGDIDDVILVGGQSRMPKVQEAVKAFFGKEPRKDVNPDEAVAVGAAIQGEVLSGGRSDVLLLDVTPLSLGIETMGGVMTKLIQKNTTIPTKASQVFSTAEDNQSAVTIHVLQGERERASANKSLGQFNLGDIAPAPRGMPQIEVTFDIDANGILHVSAKDKGTGKAANITIQGSSGLSEEEIERMVKDAEANAEEDKKLTELVASRNQAEALIHSVKKSLADYGDKLDAAEKEKIEAALKEAEEAVKGDDKAAIDAKTEALGAASQKLGEMVYAQAQAEAQAGESEQANASAKKDDDVVDADFEEVKDDKK

SEQ ID NO: 7162 - protein, 289 aa, Neisseria meningitidis
MKRIFLPALPAILPLSTYADLPLTIEDIMTDKGKWKLETSLTYLNSENNRAELAAPVYIQTGATSFIPIPTEIQENGSNTDMLVGTLGLRYGLTGNTDIYGSGSYLWHEERKLDGNGKTRNKRMSDVSLGISHTFLKDDKNPALISFLESTVYEKSRNKASSGKSWLIGATTYKAIDPIVLSLTAAYRINGSKTLSDGIRYKSGNYLLLNPNISFAANDRISLTGGIQWLGTQPDRIDGKKETARNTSTYAHFGTGFGFTKTTALNASARFNVSGQSSSELKFGVQHTF

SEQ ID NO: 7163 - protein, 128 aa, Neisseria meningitidis
MAYSDKVIDHYENPRNVGTFDKGDDSVGTGMVGAPACGDVMRLQIKVNDEGIIEDAKFKTYGCGSAIASSSLITEWVKGKSLDDALAIKNSEIAEELELPPVKIHCSILAEDAVKAAVADYRKRQENR

SEQ ID NO: 7164 - protein, 308 aa, Neisseria meningitidis
LPQYFPFSDGMFRLQFRLFPPLRTAMHILLTALLKCLSLLPLSCLHTLGNRLGHLAFYLLKEDRARIVANMRQAGLNPDPKTVKAVFAETAKGGLELAPAFFRKPEDIETMFKAVHGWEHVQQALDKHEGLLFITPHIGSYDLGGRYISQQLPFPLTAMYKPPKIKAIDKIMQAGRVRGKGKTAPTSIQGVKQIIKALRSGEATIVLPDHVPSPQEGGEGVWVDFFGKPAYTMTLAAKLAHVKGVKTLFFCCERLPGGQGFDLHIRPVQGELNGDKAHDAAVFNRNAEYWIRRFPTQYLFMYNRYKMP

SEQ ID NO: 7165 - protein, 173 aa, Neisseria meningitidis
MSCFSIKRMSAFRARITAFFAAFVFLTAALPAYAERLPDFLAKIQPSEIFPGADRYGKPEGKPMVARVYKGDEQLGLVYITTDAVNTRGYSSKPIDTLMVLANDGTIAGAKLVDHHEPIMLIGIPHLPAPGRAIRSNWLPAYIKPNFTLTNRLRLKGLPTVPQPSKATGAGVP

SEQ ID NO: 7166 - protein, 133 aa, Neisseria meningitidis; identical to SEQ ID NO: 8

SEQ ID NO: 7167 - protein, 272 aa, Neisseria meningitidis
MRIFSTGGKMDTQAVITHIARWLDEYAARANAKGFVVGVSGGIDSAVVSALAARTGRPTLLLDMPIRQHPGQLERARLHIRNLQRQYANVSAQTVDLTDTFQTFEQTVGAHQTAFDSQPLSLANARSRLRMLTLYYYGQIHGLLVTGTGNKIEDFGVGFFTKYGDGGVDISPIADLTKTQVYRLAEALGVDEAIQKAPPTDGLWDTERTDEEQMGASYPELEWAMGVYGTRKPEDFEGRQREVLEIYTRLHRAMQHKINPIPVCRIPPELLG

SEQ ID NO: 7168 - protein, 369 aa, Neisseria meningitidis
MFSDTDISMMENALRLAALGRFSTSPNPRVGCVIAHGSQIVGQGFHVKAGEPHAEVHALRQAGEMAQGATAFVTLEPCSHYGRTPPCAEALVRAGVSRVVAAMRDPNPLVAGKGLALLEAAGIKTECGLLEHQARELNRGFLSRIERRRPFVRLKCAVSLDGKTALSDGSSFWITGEDARADVQVLRAESCAVLTGIGTVLADNPRLNVRAFPTLRQPARIVLDSRLRLPPNSHLVTDGQSPTYIATLERNEDRLHPYREHAHVRILMPSETADSKIDLHHLMRLLADEGFGEIMVEAGSELTSAFLAENLADEIVLYRSPKILGSGKDLFSLLENRAALSAPPLWTPVSSEILGHNIKTVFRKNGNAF

SEQ ID NO: 7169 - protein, 498 aa, Neisseria meningitidis; identical to SEQ ID NO: 6290

SEQ ID NO: 7170 - protein, 370 aa, Neisseria meningitidis
MSTFFQQTAQAMIAKHINRFPLLKLDQVIDWQPIEQYLNRQKTRYLRDHRGRPAYPLLSMFKAVLLGQWHSLSDPELEHSLITRIDFNLFCRFDELSIPDYSTLCRYRNWLAQDDTLSELLKLINRQLTEKGLKVEKASAAVIDATIIQTADGKQRQAIEVDEEGQINGQTTPSKDSDARWIKKNGLYKLGYKQHTRTDAEGYIEKLHITPANAHECKHLPPLLEGLPKGTTVYADKGYDSAENRQHLEEHQLLDGIMRKACRNRPLTETQTKRNRYLSKTRYSGLNLNQDKATKPQTVQIVRQGEATPYWFKFNPLYVVEQSFGTLHRKFRYARAAYFGLIKVSAQSHLKAMCLNLLKAANRLSAPAAA

SEQ ID NO: 7171 - protein, 137 aa, Neisseria meningitidis
MIPSYTYAALAFSAFTSATLLPGTSEAAFALFVHRFPEHAYGALLCAGLANGLGSMVSYWMGRLLPSRKMPSEKTLNLMRRFGIWLLAFTWLPVVGDALPLAAGWLRLNPWTSGLMLVIGKTARYAFILWGMQYYAA

SEQ ID NO: 7172 - protein, 65 aa, Neisseria meningitidis
MKWTDTQRIAEELYDLHGETIDPRTVRFTQLRDLIMALPEFDDDPARCGERILEAVQQAWIDEAE

SEQ ID NO: 7173 - protein, 274 aa, Neisseria meningitidis; identical to SEQ ID NO: 450

SEQ ID NO: 7174 - protein, 502 aa, Neisseria meningitidis
MQTDCDVLIAGNGLAALTLALSLPESFRIVILCKNRLDDTASRHAQGGIAAAWSGEDDIEKHVADTLEAGAGLCDEAAVRAILSQGKPAIEWLLAQGVAFDRNHNGLHLTREGGHTCRRIAHVADYTGEAVMQSLIAQIRRRPNIRVCERQMALDIQTESGAACGLTVLDCRTQETYRIRARHTVLAGGGLGQIYAATTTPPECTGDAIAMAIRAGCAVGNLEFIQFHPTGLARPSENGRTFLISEAVRGEGGILTNQAGERFMPHYDRRAELAPRDIVARAIAAEIAKQTQDFVSLDISHQPAAFVRRHFPSIHRHCLSQCGLDITRQAIPVRPVQHYTCGGIQTDPCGRTSLPQLYALGETACTGLHGANRLASNSLLECVVTARLCAQAIADGQAFQAEPFQRPSESLSAEAGIFSDDLQNTFSRPVLQTFNQRHLGILRNDTGLRRAIAQLQLWKQNQAEPHTASEYENRNLLECSLAVAQAAYRRRQNIGAHFNSDC

SEQ ID NO: 7175 - protein, 244 aa, Neisseria meningitidis
MTTRQIILDTETTGLYADGGDRLVEFAGLEMVNRQMTDKNLHLYVHPERDMPEEAARVHGLTIQVLEGKNAPPFAEVGRQIADFLRGAELIIHNAKFDVGFLNMEFRRMGLPTVEELGCTVTDTLAMAREMFPGQKASLDALCNRFSVDRSKRVLHGALIDCELLGEVYLAMTRRQFDLMGAAAEEKMETKPVVHTETKRSGKLKVIRADENELAAHGQYLDGLGEACIWRKEAVPSENGGTDA

SEQ ID NO: 7176 - protein, 336 aa, Neisseria meningitidis
MSDTPATRDFGLIDGRAVTGYVLSNRRGTRVCVLDLGGIVQEFSVLADGVRENLVVSFDDAASYADNPFQINKQIGRVAGRIRGAAFDINGRTYRVEANEGRNALHGGSHGLAVTRFNAVAADGRSVVLRSRLQQSADGYPNDLDLDISYRLDEDDRLTVSYRATALGDTVFDPTLHIYWRLDAGLHDAVLHIPQGGHMPADAEKLPVSTVSDDLEVFDFSRPKPLDAAVAALRRETGRAGFDDAYRVPSDIGRPAAVLQAGRRRRISIYSDRNGLVIFTAAPQDFARHDAGVYDALATEAQTLPDSLNWPEFGNIRLNKGDTREATIAYGIESLS

SEQ ID NO: 7177 - protein, 587 aa, Neisseria meningitidis
MGFPVRKFDAVIVGGGGAGLRAALQLSKSGLNCAVLSKVFPTRSHTVAAQGGISASLGNVQEDRWDWHMYDTVKGSDWLGDQDAIEFMCRAAPEAVIELEHMGMPFDRVESGKIYQRPFGGHTAEHGKRAVERACAVADRTGHAMLHTLYQQNVRANTQFFVEWTAQDLIRDENGDVVGVTAMEMETGEVYIFHAKAVMFATGGGGRIYASSTNAYMNTGDGLGICARAGIPLEDMEFWQFHPTGVAGAGVLITEGVRGEGGILLNADGERFMERYAPTVKDLASRDVVSRAMAMEIYEGRGCGKNKDHVLLKIDHIGAEKIMEKLPGIREISIQFAGIDPIKDPIPVVPTTHYMMGGIPTNYQGEVVVPQGDEYEVPVKGLYAAGECACASVHGANRLGTNSLLDLVVFGKAAGDSMIKFIKEQSDWKPLPADAGELTRQRIERLDNQTDGENVDALRRELQRSVQLHAGVFRTDEILSKGVREVMAIAERVKRTEIKDKSKVWNTARIEALELDNLIEVAKATLVSAEARKESRGAHASDDHPERDDENWMKHTLYHSDINTLSYKPVHTKPLSVEYIKPAKRVY

SEQ ID NO: 7178 - protein, 52 aa, Neisseria meningitidis
MKTFEKTWSAQYRDMEISVRNFWNLERTRAEVYINGRRVYHNEAEMASASLR

SEQ ID NO: 7179 - protein, 66 aa, Neisseria meningitidis; identical to SEQ ID NO: 3561

SEQ ID NO: 7180 - protein, 265 aa, Neisseria meningitidis
MRAVPPPHISITGLGYLGLPLAQKFYQHGSRVAAVKRSLTSDDINLPIHLDTIDLNQDSAFQSANLARDTSFWRHHANKPVWFCLLPPSSLTHYADTVKQWAELARACNVQHLIFTSSTSVYGDTARECDEIALPDPQTESARQILAAEQHLLDSGVPNIDILRLGGLYCAERHPVGRLVQKQNIPGGNRPINIVHRNIAVESLFQTAFNPGGRRLKNIIEPRHPTRREFYTEEAAKLGLPAPDFAPDDSVGKIIRTVCDNGLSL

SEQ ID NO: 7181 - protein, 206 aa, Neisseria meningitidis; identical to SEQ ID NO: 4838

SEQ ID NO: 7182 - protein, 225 aa, Neisseria meningitidis
MTGFNDAAGVASSSKIKGKYVKEVTVANGVVTATMLSSGVNKEIQGKKLSLWAKRQNGSVKWFCGQPVTRAGTDDTVAADNTGNKKTNTKHLPSTCRDAASAVCTKTPEYYPNHGEWPKNNTSAGVASSSTIKGKYVKEVTVANGVITATMLSSGVNKEIQGKKLSLWAKRQDGSVKWFCGQPVTRNAANAKAGTDEVTAATPDTDKINTKHLPSTAPTRKSTPN

SEQ ID NO: 7183 - protein, 469 aa, Neisseria meningitidis
MDTQIKTEADNQSNRRYLTVWRWHFYAGLLVMPFLTLLAVTGLGMLLFANITGKEGERIHVVPQATVQPLSVQAEAARSAVNPETSSVVQYIAPRADDMVAVFRVNNEGKATMVAVDPYTAKVVSTMPRNQGWYYTMDEIHSDMMLGAAGDYLLETAASLTIIMVVSGLYLWWVKRRGIKAMLLPSKGRARSWWRNLHGTFGTWVSLILLLFCLSGIAWAGIWGGKFVQAWSQFPAGKWGVEPNPVSVVPTHGEVLNDGKVKEVPWVLELTPMPVSGTTVGKDGINPDEPMTLETVDRFAREIGFKGRYQLNLPKGEDGVWTLSQDSMSYDMISPFADRTVHIDQYSGKILADIRFDDYNPFGKFMAASIALHMGTLGWWSVLANVLFCLAVIFIGISGCVMWWKRRPTGAVGIVPPAQKVKLPVWWMMALPLLAIALLFPTSLLAIAVIWLLDTLLLSRIPVLRRWFK

SEQ ID NO: 7184 - protein, 171 aa, Neisseria meningitidis
MKIKQIVKPGLAVLAAGVLSACATKSNVKADGTTDNPVFPKPYSVTLDNKRGTFPTYDELDQMRPGLTKDDIYKILGRPHYDESMYGVREWDYLFHFHTPGVGIDPENTSGVEDVTTCQYKVIFDKDKFARSFYWNPVFPKDAACPPPAPKAEPQVIIREIVPAKPKRIRQ

SEQ ID NO: 7185 - protein, 572 aa, Neisseria meningitidis
MNLHQTVEHEAAAAFAAAGIADSPIVLQPTKNAEHGDFQINGVMGAAKKAKQNPRELAQKVAEALADNAVIESAEVAGPGFINLRLRPEFLAQNIQTALNDARFGVAKTDKPQTVVIDYSSPNLAKEMHVGHLRSSIIGDSISRVLAFMGNTVIRQNHVGDWGTQFGMLVAYLVEQQKDNAAFELADLEQFYRAAKVRFDEDPAFADTAREYVVKLQGGDETVLALWKQFVDISLSHAQAVYDTLGLKLRPEDVAGESKYNDDLQPVVDDLVQKGLAVEDDGAKVVFLDEFKNKEGEPAAFIVQKQGGGFLYASTDLACLRYRIGRLKADRLLYVVDHRQALHFEQLFTTSRKAGYLPENVGAAFIGFGTMMGKDGKPFKTRSGDTVKLVDLLTEAVERATALVKEKNPELGADEAAKIGKTVGIGAVKYADLSKNRTSDYVFDWDAMLSFEGNTAPYLQYAYTRVQSVFRKAGEWDANAPTVLTEPLEKQLAAELLKFEDVLQSVADTAYPHYLAAYLYQIATLFSRFYEACPILKAEGASRNSRLQLAKLTGDTLKQGLDLLGIDVLDVM

SEQ ID NO: 7186 - protein, 74 aa, Neisseria meningitidis
LVFWLQRLKYPLLLWIADMLLYRLLGGAEIECGRCPVPPMTDWQHFLPAMGTVSAWVAVIWAYLMIESEKNGRY

SEQ ID NO: 7187 - protein, 212 aa, Neisseria meningitidis; identical to SEQ ID NO: 1350

SEQ ID NO: 7188 - protein, 69 aa, Neisseria meningitidis
MNINELGARIDRPTIRELIAYATCRNRPISNSTLLRMEKDGRIPCRLKTPLTSPVWDTREVLEALGLQQ

SEQ ID NO: 7189 - protein, 671 aa, Neisseria meningitidis; identical to SEQ ID NO: 5624

SEQ ID NO: 7190 - protein, 306 aa, Neisseria meningitidis
MPNPLYRQHIISISDLSREQLECLLQTALKLKAHPRGDLLEGKLIGSCFFEPSTRTRLSFETAVQRLGGKVIGFSDGANTSAKKGETLADTARIISGYTDAIIQRHPKDGAARVAAEFSRVPVINAGDGTNQHPSQTLLDLVTIYETQGRLDKLKIAMAGDLKYGRTVHSLCQALKRWNCEFAFVSPPSLAMPDYITEELDEAGCRYRILGSLEEAAEWADILYMTRVQRERFDEQEFAKIQGKFNLEASMLARAKPNLRVLHPLPRVDEIHPDVDATPHAYYFEQATNGVYARMAILSLVLNEEV

SEQ ID NO: 7191 - protein, 157 aa, Neisseria meningitidis; identical to SEQ ID NO: 140

SEQ ID NO: 7192 - protein, 210 aa, Neisseria meningitidis
MPSEPPSDGIARHPKSTIKMAKKPNKPFRLTPKLLIRAVLLICIAAIGALAIGIVSTFNPNGDKTLQAEPQHTDSPRETEFWLPNGVVGQDAAQPEHHHAASSEPAQPDGTDESGSGLPSPAAPKKNRVKPQPADTAQTDRQPDDAGTQAENTLKETPVLPTNVPRPEPRKETPEKQAQPKETPKENHTKPDTPKNTPPKPHKEILDNLF

SEQ ID NO: 7193 - protein, 128 aa, Neisseria meningitidis
VVVFGILKRNGRVYTVVVDNAKSETLLPVIKKKIMPDSIVYTDSLSSCDKLDVSGFIHYRINHSKEFADRQNHINGIENFWNQAKRVLRKYNGIDRKSFPLFLKECEFRFNFGTPSQQLKILRDWCGI

SEQ ID NO: 7194 - protein, 124 aa, Neisseria meningitidis
MMPATRSSEMYIPDKGDIFHLNFDPSSGKEIKGGRFALALSPKAFNRATGLVFACPISQGNAAAARSSGMISTLLGAGTETQGNVHCHQLKSLDWQIRKASFKETVPDYVLDDVLARIGAVLFD

SEQ ID NO: 7195 - protein, 399 aa, Neisseria meningitidis; identical to SEQ ID NO: 2328

SEQ ID NO: 7196 - protein, 97 aa, Neisseria meningitidis; identical to SEQ ID NO: 177

SEQ ID NO: 7197 - protein, 131 aa, Neisseria meningitidis
MPSDVGIRLQTAFKWKLKMKKIFYFLMVVFSTSVWAGDAEDNLLSIQSGYRALLQKQNNLDGKIIGMQSDLEDARRRLQTAQADIARLEAEIPAAMAQKARQAEDLRQIGVRLDHAWNAVYGAGGTKASGN

SEQ ID NO: 7198 - protein, 107 aa, Neisseria meningitidis
MSILEENVIDSASIENGILILTISDHLKWDNEHLFLLQEKINSYIQYIESGQIFEDFGESSYETIEIQLIYKYKPNENYRKFLYRLEGALLKLKLRFSHGTISYFYS

SEQ ID NO: 7199 - protein, 259 aa, Neisseria meningitidis
MHIIDSHCHLNFEGLKERLPEVLSNMEANGVGQALAISVSRESFSEVFAIAEAHEHIYCTIGVHPDSKEAEEFSIAEMVEAAAHPKVVGIGETGLDYYWCKGDLSWQHKRFADHIEAANQTGLPVIVHTRDAAADTLSILKECRVNSGVIHCFSEDIGFARAAMDLGLYISFSGIVTFKNAPLVQEAAKYVPDDRILVETDAPFLAPVPKRGRQNEPAFVRHTAEHIAKLRNQTLEQVAAYTTENFYRLFKKVPDMRTV

SEQ ID NO: 7200 - protein, 457 aa, Neisseria meningitidis
MSNPFSSLGLGTELVSALTAQGYENPTPIQAAAIPKALAGHDLLAAAQTGTGKTAAFMLPSLERLKRYATASTSPAMHPVRMLVLTPTRELADQIDQNVQGYIKNLPLRHTVLFGGMNMDKQTADLRAGCEIVVATVGRLLDHVKQKNIHLNKVEIVVLDEADRMLDMGFIDDIRKIMQMLPRQRQTLLFSATFSAPIRKLAQDFMNAPETVEVAAQNTTNANVEQHIIAVDTIQKRNLLERLIVDLHMNQVIVFCKTKQSVDRVTRELVRRNLSAQAIHGDRSQQSRLETLNAFKDGNLRVLVATDIAARGLDIAELPFVINYEMPAQPEDYVHRIGRTGRAGADGVAISLMDESEQKMFESIKELTGNKLLIERIEGFEPQWWEQGGAKPEKPEMREPRQRNRYESAKAQREKNTRPENAANDAGAACGKIAGRSRRSRREHRTCALLQPRYGVK

SEQ ID NO: 7201 - protein, 225 aa, Neisseria meningitidis
MNLFAVCFRRHFESLGTADCNHENLELFQENIRNENFCPDTGRRSGEPYGRRGQRACSFGGKALIDHVIDRVRPQVSHIAISTNRNLEEYARRSPHIFPDARQWQHFGPLSALCTAANDLQLAAADWLLVVPCDMPYLPDDLVARFETVSKRTPLCNAYYVETPITMHYNIMYIRPQILQSAIPYLFSGMKTLRSWLQQQRARPVRFEFDGHFADLNTQIDLQEG

SEQ ID NO: 7202 - protein, 490 aa, Neisseria meningitidis
MNQTSRDLTRISHNTKIVATLGPGSNNVELLEDMIRVGGLNVVRFNFSHGTPEFHQENALIVREAAKRAGQEIAIIADLQGPKIRVGKIAGGGIELNKGETLVLDAALEGEGTREAVGLDYRDLPDDVAAGDVLWLDDGLLTLTVESVEGSRIITRVENSHVLKSNKGINKRGGGLSAGALTEKDFRDLKTAIAIGCDYLAISFVKSAEDLHIARAKVEEEMKGSTAVRPGLVSKIERVEAIENLDEIILAGDGIMVARGDLAVEVGHAAVPALQKRMIRRARELRRFSITATQMMESMITNPVPTRAEVSDVANAVLDGTDAVMCSAETAVGAYPFETVSQMAIICAAAEKEQDSLNGVAEQVEYPEAVSTNLAVAGGAVSVARAVHAKAIVALTESGSTAFEISRHNITLPIFALTPSVSAQRRMAMYRGVRPLILATSTDHDTALNEVETMLVEHNILHSGDQYIITSGSQMRESGSTNTLEVLRVK

SEQ ID NO: 7203 - protein, 105 aa, Neisseria meningitidis; identical to SEQ ID NO: 5128

SEQ ID NO: 7204 - protein, 916 aa, Neisseria meningitidis
MLTNIAKKIFGSRNDRLLKQYRKSVARINALEEQMQALSDADLQAKTAEFKQRLADGQTLDGILPEAFAVCREASRRTLGMRHFDVQLIGGMVLHDGKIAEMRTGEGKTLVATLAVYLNALAGKGVHVVTVNDYLASRDAGIMEPLYNFLGLTVGVIISDMQPFDRQNAYAADITYGTNNEFGFDYLRDNMVTDQYDKVQRELNFAVVDEVDSILIDEARTPLIISGQADDNIQLYQIMNTVPPHLVRQETEEGEGDYWVDEKAHQVILSEAGHEHAEQILTQMGLLAENDSLYSAANIALMHHLMAALRAHSLFHKDQHYVIQDGEIVIVDEFTGRLMSGRRWSEGLHQAVEAKEGVEIKRENQTLASITFQNYFRLYTKLSGMTGTADTEAFEFQSIYNLETVIIPTNRPVQRKDFNDQIFRSAEEKFEAVVKDIEECHKRGQPVLVGTTSIENSELVSKLLTQAGLPHNVLNAKEHEREALIVAQAGKVGAITVATNMAGRGTDIVLGGNLKHQTDAIRADETLSDEEKQAQIAALEDGWQAEHDKVMEAGGLHIIGTERHESRRIDNQLRGRSGRQGDPGSSRFYLSFEDPLLRLFALDRAAAILNRLAPERGVAIEHNLLTRQIEGAQRKVEGRNFDMRKQVLEYDDVANEQRKVIYSQRNEILTSKDISDLMQEIRSDVVSDLVDTYMPPDSMEEQWDIPTLENRLAAEFRLHEDIQSWLKADNAIDGQDIKERLIERIENEYAAKTELVGKQAMADFERNVMLQVIDNQWREHLAAMDYLRQGIHLRSYAQKNPKQEYKREAFTMFQDLWNGIKFHIASLLTSVQIEQNPVAVVEEQPIGNIQSIHSESPDMEELLGQSQTDLVTEAFNPDGTDFSPEALEARGQIVHRNDPCPCGSGLKYKQCHGKLA

SEQ ID NO: 7205 - protein, 321 aa, Neisseria meningitidis
MSYTQLTQGERYHIQYLSRHCTVTEIAKQLNRHKSTISREIRRHRTQGQQYSAEKAQRQSRTIKQRKRQPYKLDSQLIQHIDPLIRRKLSPEQVCAYLCKHHQITLHHSTIYRYLRQDKSNGSTLWQHLRICSKPYRKRYGSTWTRGKVPNRVGIENRPAIVDQKSRIGDWEADTIVGKGQKSALLTLVERVTRYTIICKLDSLKAEDTARAAVRALKAHKDRVHTITMDNGKEFYQHTKITKALKAETYFCRPYHSWEKGLNENTNGLIRQYFPKQTDFRNISDREIRRVQDELNHRPRKTLGYETPSVLFLNLFQPLIH

SEQ ID NO: 7206 - protein, 414 aa, Neisseria meningitidis
MSNENRTCSFCGKSKSHVKHLIEGENAFICDECVSNCIEILHEDGNDGTPSESAGGEPEESGKLPTPAEIVANLNDHVIGQEQAKKALAVSVYNHYKRLRHPKAGANVELSKSNILLIGPTGSGKTLLAQSLARKLDVPFVMADATTLTEAGYVGEDVEQIITKLLGKCDFDVEKAQRGIVYIDEIDKISRKSDNPSITRDVSGEGVQQALLKLIEGTVASVPPQGGRKHPNQEFINVDTTNILFICGGAFAGLEKVIRQRTEKGGIGFGASVHSKDENADITKLFGIVEPEDLIKFGLIPELIGRLPVIATLEELDEDALINILTEPKNALVKQYQALFGMENVELEFEEGALRSIARQAMERKTGARGLRSIVERCLLDTMYRLPDLKGLKKVVVGKAVIEEGREPELVFES

SEQ ID NO: 7207 - protein, 248 aa, Neisseria meningitidis
MNVLISNDDGYLSEGIAVLARVTAEFANVRVVAPERDRSGVSNSLTLERPLQLKQAQNGFYYVNGTPTDCIHIGQSVFSDFQADFVFSGINRGANMGDDTLYSGTVAAATEAYLMGIPAVAFSLNDASGRYWATAEQALWTLLAHFFKNPPQSPILWNINIPAVAPEDVRGIKIARLGRRHHGQNVIPARNPRGEQIYWIGPVGEVSDREEGTDFGECGAGFITVTPLQIDLTAYPDMAETAAFWHAD

SEQ ID NO: 7208 - protein, 123 aa, Neisseria meningitidis
MRKPQRGYARQDRVKEQIMRELAELVRTGLKDPRAGFITVNEVEVTRDYSHATVFYTILNQDAREITEEVLEHARGHLRSELAKRIKLFKTPELHFKYDESLERGLNLSALIDQVAAEKPVED

SEQ ID NO: 7209 - protein, 313 aa, Neisseria meningitidis; identical to SEQ ID NO: 7029

SEQ ID NO: 7210 - protein, 321 aa, Neisseria meningitidis; identical to SEQ ID NO: 6649

SEQ ID NO: 7211 - protein, 166 aa, Neisseria meningitidis; identical to SEQ ID NO: 987

SEQ ID NO: 7212 - protein, 979 aa, Neisseria meningitidis
MSGFNYEKNQPHQMRAVSAVLGVFDGATPKYRTADENPELLFAAKQYANNILKVQSQNGIDGRFPDRSDDQNILDISMETGTGKTYTYTQTMFELHRWLGVFKFIVVVPTLSIKAGTQQFLQSKALAEHFEQDFGGDYEGVRLKTYVVESAKKNKGKKSNAPITIEQFVKAENKKEIHVLLINAGMVNSSSMNDTGDKALKDLFDNPVDALAAVRPFMIVDEPHKFPTRDSAKTWGNIKRLKPQYILRYGATFNDEYYNLLYRLTAVDAFNDGLVKGVRVFQEEMQGGMDAAVKLVSSDGKEAKFELNEKDKKQTFKLAKGEDLAQIHPAISDLKIDKMNKTVVVLSNGLELKTGAVINPYSYSQTVQDAMMQRAVAEHFKLERALLAERAPQPKIKPLTLFFIDDIAGYRSGNELSGSLKDKFESWIRAEAARRLKTESDPFYRDYLQKTLDDVSACHGGYFSKDNTDSDDRIEQEINEILHDKEKLLSLDNPRRFIFSKWTLREGWDNPNVFQICKLRSSGSTTSKLQEVGRGLRLPVNELMARVRDVPYKLNYFVDSSEKDFVKQLVGEINDNSFQEEISKKFTEELKQKILQKYPDIKPLVLVNQLFLDGIIDDNENFAEDGYDKLKAAYPEAFPKGLDKGKVSNAKDEGKDTIIMREGKYEELKALWELIHHKAVLQYKIKDEAEFADLFTAYLHENAAKFPQAGIRTAVNEAYINNGLMLSRRIDSFEDEDFIRFNTMTYREFLEKLAQTAKIRMQTLHQAFYCIRNELNIGDFLNMQTIAQIKNGFNRFLLHHSFHKFELDYRLVGSKIHPTKFTNKDGKPRAVKKADLGRFEDTEHRPAAGYLFGEIFYDSDIEHENVANNQIEGVIVFTKIPRNSIKIPVAGGGTYSPDFAYIVKTKSGEILNFVIEAKGTDGAEDLRKSEERKIKHAEKLFAEISKEIKVVFKTQFDGERIAELIGQNMPAGGHSENGR

SEQ ID NO: 7213 - protein, 184 aa, Neisseria meningitidis
MNNMFAAKLSKLVYTASDHPDSLSEMEEFDRLILLIRKLYQILDGQHILSRVTVCLHHQNRRDLIALDKAAAGCDSAMLRAQRWLIYTQIAERLAGSGGGFTVTVESVSAACPELEGRYLELVRRAAVSFGFTQGWENPAGGQEKTQAVPDAASGHSVRKPIKINIEARVERYPAYCPTVALKV

SEQ ID NO: 7214 - protein, 123 aa, Neisseria meningitidis; identical to SEQ ID NO: 4020

SEQ ID NO: 7215 - protein, 151 aa, Neisseria meningitidis
MFGGAHELSIDSKGRLAVPAKFRDILSRLYTPAVVVTLESKHKLLMYPVAEWEKVAAQLLNLKVADNPVLRRFQNLLLHNAEILEWDSAGRVLVSAGLRKRVDFDREVVLVGRANRLELWGREQWEAEMVQALDDDPDELAFQLSQTDLQL

SEQ ID NO: 7216 - protein, 176 aa, Neisseria meningitidis
MNAIRTFQNRTPEIHETCMIDEACVVIGEVSLAEDVSVWPCAVLRGDVNSITVGARSNIQDGSVLHVSHKTAAKPEGSPLVIGEDVTVGHKVMLHGCRIGNRVLVGMGTTVLDDAVIEDEVMIGAGSLVPPRKRLAGGYLYVGSPVRQVRVLTDEEKAFLKYSAAHYVKLSKQYGM

SEQ ID NO: 7217 - protein, 160 aa, Neisseria meningitidis
MKYLNLAAITLAATFAAHTASADELAGWKDNTPQSLQSLKAPVRIVNLWATWCGPCRKEMPAMSKWYKAQKKGSVDMVGIALDTSDNIGNFLKQTPVSYPIWRYTGANSRNFMKTYGNTVGVLPFTVVEAPKCGYRQTITGEVNEKSLTDAVKLAHSKCR

SEQ ID NO: 7218 - protein, 391 aa, Neisseria meningitidis
MQNIFDPLVIRGKSLTPIVQGGMGVGVSASGLSSAVARENGIGTIASVDLRHLHEDLLAESQINPSEEKYTSLNCTALDREIQKAKSASEGKGLIAVNVMKAVKDHAAYVRQACESGADAVVMGAGLPLDLPEMTEGYHKDVALLPILSESRGINIVLKRWMKKGILPDAIVVEHPAHAAGHLGASTVEGVNDAKFDFKRVIEETFEVFKSLGLESEKIPLILAGGMANFEKVKTALKNWGASAVQIGTAFAVTEEGDAHLNFKKTLAGAETEKVVEFMSVAGLPARGVRTKFLDSYIKRESKLQTNAKADPRRCTQGLNCLTSCGLRDGLSKAGQFCIDIQLAAAFRGEVDKGLFFRGKDPLPFGNAIRTVRETIQYLLTGSEPVATLGR

SEQ ID NO: 7219 - protein, 447 aa, Neisseria meningitidis
MFHSVNVFTGETLYRRPAQDYAEFERRLADLKMRGGAFAQLGVTERAARLQKFADRLEAEKERFAEMVCEEVGRCLHECRAEIGKSIELIRYYARLAPELLAHKTIATQASLSQVRFEPLGVVFAVMPWNYPVWQVLRFAVPAMCAGNACAVKPAPSVARVSQALFDLASDGIPLAGVWLDEAGTLKAVEDTDAMAFTGSTHTGRILAAHAGANLKKTVLELGGSNAFIVMPDADLERAAAEACYSRFRDAGQSCNAAKRIIVTEAAADRFITLFLAECAKLKMGDPKHPDTTLAPLHREDLRDRVHGQVEDAVSNGAVCLTGGKIPQGRGWFYPATVLDRVNPACRVWREEVFGPAALILRAENEEHAIALANDSPFGLGACIYTADTERAWRFAEKIQAGSVFINRHTSSDLRLPFGGVKDSGYGRELSEFGLYEFVNVKTYWQK

SEQ ID NO: 7220 - protein, 318 aa, Neisseria meningitidis; identical to SEQ ID NO: 6240

SEQ ID NO: 7221 - protein, 154 aa, Neisseria meningitidis
MIEMSKDYRNDLYDVYVSYPPQVDRGLIRECLKENLGEEKAEGLIESLDSKPQVLVEEKCTWAKREELHDYFSYLGLDIITRRYMELETVVPPEEGEGEGEGADGEMPEYLELHGGREDDISAPSQPEPPSRNIKLLVFGLLIAFLGYLLGKIF

SEQ ID NO: 7222 - protein, 219 aa, Neisseria meningitidis
LCASCLNVNKIVIIATFYRNPERPSEMRNEEKRALRRELRGRRSQMGRDVRAAATVKINHLLKRYIKKGRKIGVYWPMGKELRLDGFVRAAQKRGAELYLPYIEPRSRRMWFTPYPADGVKQERKRGRAKLHVPQFAGRKKRVHDLNLLLVPVVGMDRLGYRLGQAGGYYDATLSAMKYRLQAKTVGVGFACQLVDRLPVEAHDRSLDGFVSEAGILCF

SEQ ID NO: 7223 - protein, 376 aa, Neisseria meningitidis
MKIVFITTVASSIYGFRAPVIKKLIGKNHQVYAFVSEFSDNELDIIREMGVTPVTYRSNRSGLNPFSDIKSTFLIFKELKKISPDLVFPYFAKPVIFGTFAAKLAGVPRIVGMLEGLGFAFTPQPEGIPLKTKIIKGILIALYRIALPMLESLIVLNPDDKDELTDKYGIKIKNIHILGGIGLDLRQYPYSEADIPDEKEPVKFLFIGRFLKEKGIDDFIRAAEQVKDKYPDTVFTALGAIDKSRGGGGDLERLAARDIIRFPGFVNNVSEVIKEHHIFVLPSYYREGVPRSTQEAMAVGRAVITTDVPGCRETVADKVNGFLIEPWNPRILAEKMIYFIENREAVRLMGNASYAIAKDKFDAEKVDLKLLDILKA

SEQ ID NO: 7224 - protein, 371 aa, Neisseria meningitidis
MKVGFVGWRGMVGSVLMQRMKEENDFAHIPEAFFFTTSNVGGAAPDFGQAAKTLLDANNVAELAKMDIIVTCQGGDYTKSVFQALRDSGWNGYWIDAASSLRMKDDAIIVLDPVNRDVLDNGLKNGVKNYIGGNCTVSLMLMALGGLFQNDLVEWATSMTYQAASGAGAKNMRELISGMGAVHAQVADALADPAGSILDIDRKVSDFLRSEDYPKANFGVPLAGSLIPWIDVDLGNGQSKEEWKGGVETNKILGRSDNPTVIDGLCVRVGAMRCHSQAITLKLKKDLPVSEIETILAGANDWVKVIPNEKEASIHELTPAKVTGTLSVPVGRIRKLGMGGEYISAFTVGDQLLWGAAEPLRRVLRIVLGSL

SEQ ID NO: 7225 - protein, 188 aa, Neisseria meningitidis
MGFYALLLIALGMSMDAFAVALAKGAAVRMPPRKIAATALVFGTVEALTPLAGWVGGFYAKPFISEWDHWVAFVLLGGLGLKMMREGLSGEAEDVRESKRESLWMTVLTAFGTSIDSMIVGVGLAFMEVNIAFAAAIIGMATTVMVAVGLTAGRALGVLFGRCAEFAGGLVLIAIGTWTLLSHLGLIQ

SEQ ID NO: 7226 - protein, 1371 aa, Neisseria meningitidis; identical to SEQ ID NO: 6744
  misc_feature 1367, 1368, 1369: 'Xaa' is any amino acid

SEQ ID NO: 7227 - protein, 612 aa, Neisseria meningitidis
MCGIVGAIRAHHNVVDFLTDGLKRLEYRGYDSSGIAVNTDGKIKRVRRVGRVQLMEDAAREKGISGGIGIGHTRWATHGGVTEPNAHPHISGGMIAVVHNGIIENFESERKRLEGLGYRFESQTDTEVIAHSINHEYAQNGGRLFEAVQEAVKRFHGAYAIAVIAQDKPDELVVARMGCPLLVALGDDETFIASDVSAVIAFTRRVAYLEDGDIALLASDGIKRLTDKNGLPAERKVKVSELSLASLELGLYSHFMQKEIHEQPRAIADTAEVFLDGGFIPENFGKDAKSVFESIRSVKILACGTSYYAALTAKYWLESIAKIPSDVEIASEYRYRSVIADSDQLVITISQSGETLDTMEALKYAKSLGHRHSLSICNVMESALPRESSLVLYTRAGAEIGVASTKAFTTQLVALFGLAVTLAKVRGLVSEEDEARYTEELRQLPGSVQHALNLEPQIAAWAQQFAKKTSALFLGRGIHYPIALEGALKLKEITYIHAEAYPAGELKHGPLALVDENMPVVVIAPNDSLLDKVKANMQEVGARGGELFVFADLDSNFNATEGVHVIRAPRHVGKLSPVVHTIPVQLLAYHTALARGTDVDKPRNLAKSVTVE

SEQ ID NO: 7228 - protein, 362 aa, Neisseria meningitidis
MNDYTQQLQGKKDYLKTLFAGLDVPEWEVYESPDKHYRMRAEFRIWHEGGEMFYAMFEKGQKASGASMIRCDRFEAASEAVNRLMPELIAAAAQSPELKKRWYAVEFLSTLSGEMLVTMIYHKRLDAEWMQAAQALQQQLDISVIGRSRGQKIVLKQDYVTETLKVGNRDFRYRQIEGSFTQPNAAVCQKMLEWACRTAEGLGSDLLELYCGNGNFTLPLSRYFRQVLATEISKTSVSAAQWNIEANRIGNIKIARLSAEEFTEAYTGKREFKRLKDGGIALTDYAFSTIFVDPPRAGIDEETLKLVSQFDNIIYISCNPETLRANLDTLAETHAVERAALFDQFPFTHHIESGVLLKKKIL

SEQ ID NO: 7229 - protein, 223 aa, Neisseria meningitidis
LKNIDMEKSGIVYLMKTVIKGVYKIGISDVSNFEGRMRHLENNGYANVAGLERILAVKTDNYKEKENLLHEIFSKSRIGDTELFAVDENLVKRLFLSLRGEIVFPKNETAESEFEKSVHERRQEGNAGSGRKQLLDLVRRGHREYPYALPRLLAGAASYKPKKSKIRLFKEAYFGKSGTRLTDEIADGIHIYTCFSRADLEKAYSEYLELFKSESDAEGRKPQ

SEQ ID NO: 7230 - protein, 200 aa, Neisseria meningitidis
MNMKKLISAICVSIVLSACNQQSKTAQAEEPVQSIQAADCTAPMDITVEQYLINLEQAFKTQNVSTKIHNKNIVKTDCGYDLTLVMDFGAIALKLDEQQKIRAISVGYILKTDGEKGQNLVNNAINGLHSIQAVLSLTTTDKLGESEAGKQLFTALTEVVKESNQTGATAQKDVPADGILYSVVFEKETNTIAIIGRKQP

SEQ ID NO: 7231 - protein, 53 aa, Neisseria meningitidis
MAYFGGFVRALFDLGVFERGGVKGRGKWFSRVWRRSEVLCLMCGGIFSVKLIL

SEQ ID NO: 7232 - protein, 374 aa, Neisseria meningitidis
MQNTSFDNESDYSDDSDFASASETENRIGLTVPLELAGGRLDAVLAKLLPDYSRSRLTSWIKEGAVIVNDKPSQPKDKMIGGEQICVTVRPSEENLAFVPEPMALDIVYEDDTVIVVNKPAGLVVHPAAGNWTGTLLNGLLAHCPELSQVPRAGIVHRLDKETSGLMVVAKTLPAQNSLVRQLQERTVKRIYRAVANGIVPFDGKIETQIGRDPHNRLKMAVVKFGGKPAVTHVKVLERYLTHSYIECSLETGRTHQIRVHMREANHPLAADPVYGNPRHPCGDTVKEAVKSLGARQALHAYRLSFTHPESGETVSFEAPIPDDIYHLLSVLRLEAGLDSSLSNEEEWQDKFGADDDDDWNEDDYDVEVVYVRE

SEQ ID NO: 7233 - protein, 130 aa, Neisseria meningitidis; identical to SEQ ID NO: 1661

SEQ ID NO: 7234 - protein, 200 aa, Neisseria meningitidis
MTDKISPDALIEAALLTQTEPLTEKSMRELCVPPLSQDKLIDVLAQLKTRWQDRALQLVHTQEGWRFQIVQTAFERLGSLQEQRAPRYSRAVMETLAIIAYQQPVTRGDIEGIRGVAVSQNVIQTLQDRGWIEVIGHRDTLGKPALWATTATFLSDLRLDGLEELPPLTELGELVLPDLIEMPPTDEEEPTTVPSDTLPN

SEQ ID NO: 7235 - protein, 436 aa, Neisseria meningitidis
MTDLFAREPDAPLAERLRPHTLDDVVGQEHLIGEGKPLRVAVEGGKPHSMLLWGPPGVGKTTLARILAQSFNAQFLPVSAVFSGVKDIREAIDKAEIALQQGRATILFVDEVHRFNKAQQDAFLPHVESGLLTFIGATTENPSFEVNPALLSRAQVYVLQPLSSDDLKKLIAKVLALPEYQEFTIETDAQKLLVNTADGDARRLLNLLEQLLRAADTRRLKNLTAEFLADSLGAQIRRFDKGGESFYNQISALHKSVRGSHPNAALYWFCRMLDGGTDPRYLARRIVRIAWEDIGLADPRAFQIANDAAATFERLGSPEGELALAQAVLYLAAAAKSNAGYKAYNQMRHFVKENASDEVPVHLRNAPTKLMKELGYGREYRYAHDEPNAYSAGESYMPDGLDEPDFYQPVPRGLEIKIGEKLEWLKSLDEEVLKAK

SEQ ID NO: 7236 - protein, 384 aa, Neisseria meningitidis
MDTHTDETKLQNTQAKRKRRLTALTLLFALAAAAAGSAFFLWWQHEEETEDAYVAGRVVQVTPQKGGTVRKVLHDDTDAVKKGDVLAVLDDDNDVLAYERAKNELVQAVRQNRRQNAATSQAGAQVALRRADLARAQDDLRRRSALAESGAVSAEELAHARAAVSQAQAAVKAALAEESSARAALGGQVSLREQPAVQTAIGRLKDAWLNLQRTQIRAPADGQVAKRSVQVGQQVAAGAPLMAVVPLSDVWVDANFKETQLRHMKIGQPAELVSDLYGKQIVYRGRVAGFSAGTGSAFSLIPAQNATGNWIKVVQRVPVRIVLNREDVDRHPLRIGLSMTVKVDTSAAGAPVSKTPGAALPEMESTDWSEVDRTVDEILGQSAP

SEQ ID NO: 7237 - protein, 403 aa, Neisseria meningitidis
MAFLKLTEQNVQGKTVLIRADMNVPFKDGKISDDTRIRASLASIKYCVDNGASVIVMTHLGRPTEGEFHPEDDVAPVAAHLGSLLGKDVKVLNDWRENKPALNAGDVVMLQNVRINKGEKKNDLELGKAYASLCDVFVNDAFGTAHRAQASTEAVAQAAPVACAGVLMAGELDALGKALKQPARPMVAIVAGSKVSTKLTILESLADKVDQLIVGGGIANTFLLAEGKAIGKSLAEHDLVEESKKIMAKMAAKGGSVPLPTDVVVAKAFAADAEAVVKDIAADAEAVVKDIADVAEDEMILDIGPKSAAALADLLKAAGTVVWNGPVGVFEFDQFAGGTKALAEAIAQSKAFSIAGGGDTLAAIAKFGVTEQIGYISTGGGAFLEFLEGKELPAVAALEKRGA

SEQ ID NO: 7238 - protein, 55 aa, Neisseria meningitidis
MGEYLEFEESGTKITVEIGSAWHFNETIRNINTHLRGTKLPGSNWRVQDKGHFHL

SEQ ID NO: 7239 - protein, 182 aa, Neisseria meningitidis; identical to SEQ ID NO: 977

SEQ ID NO: 7240 - protein, 416 aa, Neisseria meningitidis
MIKLTRRQIIRRTAGTLFALSPIASAVAKTVRAPQFTAARIWPSHTYTRLTLESTAALKYQHFTLDNPGRLVVDIQNANINTVLHGLSQKVMADDPFIRSIRAGQNTPTTVRLVIDLKQPTHAQVFALPPVGGFKNRLVVDLYPHGMDADDPMMALLNGSLNKTLRGSPEADLAQNTTPQPGRGRNGRRPVIMLDPGHGGEDPGAISPGGLQEKHVVLSIARETKNQLEALGYNVFMTRNEDVFIPLGVRVAKGRARRADVFVSIHADAFTSPSARGTGVYMLNTKGATSSAAKFLEQTQNNADAVGGVPTSGNRNVDTALLDMTQTATLRDSRKLGKLVLEELGRLNHLHKGRVDEANFAVLRAPDMPSILVETAFLSNPAEEKLLGSESFRRQCAQSIASGVQRYINTSVLKRG

SEQ ID NO: 7241 - protein, 539 aa, Neisseria meningitidis
MDNLVWDGVPDIRTLDQTIRKHAHPLNLIVCLPDNQIPDFQTAQDASDAECRLKHRLDQATQCLQFDSINLIEHILPDVRFWLVPPSRTRRLHEHFHHISWQTEAIPQTESKSDKPWFALPQTSERQKPEHILVIGAGISGAATAHALASYGISVTVLEARKAAQAASGNRQGLLYAKISPHDTEQTELLLAGYGYTKRLLGHILPESETWGGNGIIHLNYSRTEQQRNHELGLQKHHNHLYRSITQAEAEKIAGIPLSVPYDHPSCGLYWQHGVWLNPPALVRALLNHPLIGLHEDTPLTDISHDGEKWIASTPNGIFSATHIIYCTGAHSPRLPETNLAALPLRQIRGQTGLTPSTPFSEQLRCAVSGESYISPSWHGLHCYGASFIPNSSHTGWNEAEEASNRQALAHLNPALSESLFAANPNPQKHQGHAAIRCDSPDHLPLVGALGDIAAMRQTYTKLALDKNYRIDTPCPYLPNAYVNTAHGTRGLATAPICAAAIAAQILGLPHPFSQRLRHALHPNRTIIRAIVRRKDLTP

SEQ ID NO: 7242 - protein, 988 aa, Neisseria meningitidis
  misc_feature 2, 3, 4: 'Xaa' is any amino acid
VXXXRTATGWVSADDGLLVRDLNGNGIIDNGAELFGDNTKLADGSFAKHGYAALAELDSNGDNIINAADAAFQSLRVWQDLNQDGISQANELRTLEELGIQSLDLAYKDVNKNLGNGNTLAQQGSYTKTDGTTAKMGDLLLAADNLHSRFKDKVELTAEQAKAANLAGIGRLRDLREAAALSGDLANMLKAYSAAETKEAQLALLDNLIHKWAETDSNWGKKSPMRLSTDWTQTANEGIALTPSQVAQLKKNALVSLSDKAKAAIDAARDRIAVLDAYTGQDSNTLYYMSEEDALNIVKVTNDTYDHLAKNIYQNLLFQTRLQPYLNQISFKMENDTFTLDFSGLVQAFNHVKETNPQKAFVDLAEMLAYGELRSWYEGRRLMADYVEEAKKAGKFEDYQKVLGQETVALLAKTSGTQADDILQNVGFGHNKNVSLYGNDGNDTLIGGAGNDYLEGGSGSDTYVFGEGFGQDTVYNYDYATGRKDIIRFTDGITADMLTFTREGNHLLIKAKDGSGQVTVQSYFQNDGSGAYRIDEIHFDNGKVLDVATVKELVQQSTDGSDRLYAYQSGNTLNGGLGDDYLYGADGDDLLNGDAGNDSIYSGNGNDTLDGGEGNDALYGYNGNDALNGGEGNDHLNGEDGNDTLIGGAGNDYLEGGSGSDTYVFGKGFGQDAVYNYDYATGRKDIIRFTDGITADMLTFTREGNHLLIKAKDGSGQVTVQSYFQNDGSGAYRIDEIHFDNGKVLDVATVKELVQQSTDGSDRLYAYQSGNTLNGGLGDDYLYGADGDDLLNGDAGNDSIYSGNGNDTLDGGEGNDALYGYNGNDALNGGEGNDHLNGEDGNDTLIGGAGNDYLEGGSGSDTYVFGEGFGQDTVYNYHVDKNSDTMHFKGFKAADVHFIRSGSDLVLSASEQDNVRISGFFYGENHRVDTFVFDDAAISNPDFAKYINAGNNLVQSMSVFGSNTAATGGNVDANIQSVQQPLLVTPSA

SEQ ID NO: 7243 - protein, 160 aa, Neisseria meningitidis; identical to SEQ ID NO: 236

SEQ ID NO: 7244 - protein, 426 aa, Neisseria meningitidis; identical to SEQ ID NO: 85

SEQ ID NO: 7245 - protein, 228 aa, Neisseria meningitidis
MRWILSFSSKKTDKKQHTDLEGIGEYALFLLIIVCILNRKFVMPTAFAYNARIPNSDTDAVQTYRKPSYRKRDIMQGNQAVVDYMNELLSGELAARDQYFIHSRLYSEWGYTKLFERLNHEMEEETTHAEDFIRRILMLGGTPKMARAELNIGTDVVSCLKADLQTEYEVRDALKKGIKLCEEAQDYVTRDLMVAQLKDTEEDHAHWLEQQLRLIELIGEGNYYQSQL

SEQ ID NO: 7246 - protein, 59 aa, Neisseria meningitidis; identical to SEQ ID NO: 642

SEQ ID NO: 7247 - protein, 248 aa, Neisseria meningitidis
MSTQDLNGKIALVTGASRGIGAAIADTLAAAGAKVIGTATSESGAAAISERLAQWGGEGRVLNSAEPETIESLIADIEKAFGKLDILVNNAGITRDNLLMRMKEEEWDDIMQVNLKSVFRASKAVLRGMMKQRSGRIINITSVVGVMGNAGQTNYAAAKAGLIGFSKSMAREVGSRGITVNCVAPGFIDTDMTRALPEETRQTFTAQTALGRFGDAQDIADAVLFLASDQAKYITGQTLHVNGGMLMP

SEQ ID NO: 7248 - protein, 544 aa, Neisseria meningitidis
MAAKDVQFGNEVRQKMVNGVNILANAVRVTLGPKGRNVVVDRAFGGPHITKDGVTVAKEIELKDKFENMGAQMVKEVASKTNDVAGDGTTTATVLAQSIVAEGMKYVTAGMNPTDLKRGIDKAVAALVDELKNIAKPCDTSKEIAQVGSISANSDEQVGAIIAEAMEKVGKEGVITVEDGKSLENELDVVEGMQFDRGYLSPYFINDAEKQIAALDNPFVLLFDKKISNIRDLLPVLEQVAKASRPLLIIAEDVEGEALATLVVNNIRGILKTVAVKAPGFGDRRKAMLQDIAILTGGVVISEEVGLSLEKATLEDLGQAKRIEIGKENTTIIDGFGDAAQIEARVAEIRQQIETATSDYDKEKLQERVAKLAGGVAVIKVGAATEVEMKEKKDRVEDALHATRAAVEEGVVAGGGVALLRARAALENLHTGNADQDAGVQIVLRAVESPLRQIVANAGGEPSVVVNKVLEGKGNYGYNAGSGEYGDMIEMGVLDPAKVTRSALQHAASIAGLMLTTDCMIAEIPEDKPAMPDMGGMGGMGGMM

SEQ ID NO: 7249 - protein, 284 aa, Neisseria meningitidis; identical to SEQ ID NO: 1842

SEQ ID NO: 7250 - protein, 232 aa, Neisseria meningitidis; identical to SEQ ID NO: 2345

SEQ ID NO: 7251 - protein, 321 aa, Neisseria meningitidis; identical to SEQ ID NO: 6173

SEQ ID NO: 7252 - protein, 169 aa, Neisseria meningitidis
MKKKLLSGIKFAVQTALVFLLVSLFLDWIRKPEEPAGAAGRPLTLLSGQRLTLGQFSRDKAVLVYFWGSWCGVCRYQSPIIDDLAADGVPVVGVAVRSGSASEVAAYMAKRGLGFPTVNDEDGGLARSWRIVATPAVVLVKNGKMVHYTTGISSYWGLRARIFQADVFG

SEQ ID NO: 7253 - protein, 111 aa, Neisseria meningitidis
MFKDWKEHTALVKKSFGELGKAHPKMLQAYGALEQAAAAEALDAKTRELIAIAVAITTRCESCISVHAAAATKAGATDSEIAGALATAIALNAGAAYTYALRALEAVETQK

SEQ ID NO: 7254 - protein, 170 aa, Neisseria meningitidis; identical to SEQ ID NO: 1571

SEQ ID NO: 7255 - protein, 198 aa, Neisseria meningitidis
MKQTVKWLAAALIALGLNRAVWADDVSDFRENLQAAAQGNAAAQYNLGAMYYKGRGVRRDDAEAVRWYRQAAEQGLAQAQYNLGWMYANGRGVRQDDTEAVRWYRQAAAQGVVQAQYNLGVIYAEGRGVRQDDVEAVRWFRQAAAQGVAQAQNNLGVMYAERRGVRQDRALAQEWFGKACQNGDQDGCDNDQRLKAGY

SEQ ID NO: 7256 - protein, 204 aa, Neisseria meningitidis
MNFTRLLNQVLSTVQKKGNTFSDSPLNSFGGGALVAGVASMLLNGKNRKTITKIGSTAALGYLAYRGYQMWQQNKGRATVTQSDFQPAGETEETYSRTVLRTMIAAAASDGMIDEAERRTIEQESGTDPETAAWLAAEYRLPASIEDIAAAVGNDEALAAEAYLAARLVCADLSRKETVFLARLSQALKLDDNLVESLERQLGF

SEQ ID NO: 7257 - protein, 363 aa, Neisseria meningitidis
MQTFNRERLEFALDKRGCTQTKLAELLGITARQVRNYVKDEQIPDLNELANLLEFPVHFFTNDERLPELKSQAVSFRARSRTSKRLEKQALNHSITAFLLNDWLETEFTLSQAVLPDFSDISPEEAAQELRLEWGLGNEPIPNMITLLEVKGVRVFSLSLDTKDIDAFCTWYENHPFVFLNTQKSAERSRFDAAHELGHLIRDKYSMEHSKNSEITEDEPRDIIEKEANAFASAFLMPEAALRLYRHVPITIENLLKIKRRFGVSLVALAYRMHKLGMITDRMYIHNLCPLFAKKKYRTIEPEPMEREISSALRKMLTILKNDGIGIEQIAENLNVSPKDVADLTFGLVERDLNRYRKLRLVK

SEQ ID NO: 7258 - protein, 545 aa, Neisseria meningitidis
MDFKRLTAFFAIALVIMIGWEKMFPTPKPVPAPQQAAQQQAVTASAEAALAPATPITVTTDTVKAVIDEKSGDLRQMTLLKYKANGNENKPFSLFDDSKEYTYVAQSELLDAQGNNILKGVNFTAAQKQYSLNGDKVEVRLSAPETNGLKIDKVYTFTKDSYLVNVRFDITNTSGKPANLSADYRIVRDHSQPEGQGYFTRSYLGPVVYTPEDKFQKVSFSDLDDDAKSGKNEAEYARKTQTGWLGMIEHHFMSTWILQPKGGQSVCAAGDCRIDIKRRNDNLYSTSVSVPLAAIQNGTKSEASINLYAGPQTTSVIANIADNLQLAKDYGKVHWFASPLFWLLNQLHNIIGNWGWAIVVLTIIVKAVLYPLTNASYRSMAKMRAAAPKLQAIKEKYGDDRMAQQQAMMQLYKDEKINPLGGCLPMLLQIPVFIGLYWALFASVELRQAPWLGWITDLSRSDPYYILPIIMAVTMFAQTFLNPPPTDPMQAKMMKIMPLVFSVMFFFFPAGLVLYWVVNNLLTITQQWHINRSIEKQRAQGEVVS

SEQ ID NO: 7259 - protein, 371 aa, Neisseria meningitidis
MIYQRNLIKELSFTAVGIFVVLLAVLVSTQAINLLGRAADGRVAIDAVLALVGFWVIGMTPLLLVLTAFISTLTVLTRYWRDSEMSVWLSCGLALKQWIRPVMQFAVPFAVLVAVMQLWVIPWAELRSREYAEILKQKQELSLVEAGEFNSLGKRNGRVYFVETFDTESGIMKNLFLREQDKNGGDNIIFAKEGNFSLNDNKRTLELRHGYRYSGTPGRADYNQVSFQKLNLIISTTPKLIDPVSHRRTIPTAQLIGSSNPQHQAELMWRISLTVSVLLLCLLAVPLSYFNPRSGHTYNILIAIGLFLIYQNGLTLLFEAVEDGKIHFWLGLLPMHIIMFAVALILLRVRSMPSQPFWQAVGKSLTLKGGK

SEQ ID NO: 7260 - protein, 168 aa, Neisseria meningitidis
MPLLDSFKVDHTRMHAPAVRVAKTMTTPKGDTITVFDLRFCVPNKEILPGKGIHTLEHLFAGFMRDHLNGNGVEIIDISPMGCRTGFYMSLIGTPSEQQVADAWLASMQDVLNVKDQSKIPELNEYQCGTYQMHSLAEAQQIAQNVLARKVAVNKNEELTLDEGLLNA

SEQ ID NO: 7261 - protein, 186 aa, Neisseria meningitidis; identical to SEQ ID NO: 482

SEQ ID NO: 7262 - protein, 145 aa, Neisseria meningitidis
MVEAKIFILYGAANKGKSTTLNTLFNQICRKFSKFLVFFERHGNGLDFVAVFDHEGQRIGFYSSGDNEYEVRGNLYKLYSHNCDFIFGTSRTRGGSCDAVGCYAELLHGDVNIINWCEKFEPTDEDNERAVKELFKSFKNIINEL

SEQ ID NO: 7263 - protein, 308 aa, Neisseria meningitidis
MSFAFFFPGQGSQSLGMMNGFAEHAIVKNTFAEASAILGQDLWAMINGSDAEIIGQTVNTQPIMLAAGVAVYRAYLEAGGKTPAAVAGHSLGEYTALVAAGALNFADAVKLVRLRAELMQSAVPQGVGAMAAILGLEDEQVKAICAEAAQSEVVEAVNFNSPGQIVIAGNAAAVGRAMAAAKEAGAKRALPLPVSVPSHCSLMKPAADKLAEALKTVEIKQPQIRVIHNADVAAYDDADKIKDALVRQLYSPVRWTETVNALVSDGIAESAECGPGKVLAGLAKRINKAAACSALTDAGQVAAFIEAH

SEQ ID NO: 7264 - protein, 444 aa, Neisseria meningitidis
MAKKYFGTDGVRGEVGQFPITPDFVLKLGYAAGQVLVQHDTDQKPTVLIGKDTRISGYMLEAALVAGFTAAGVNVVQTGPLPTPGVAYLTRALRLSAGVMISASHNAYSDNGIKFFAEGGVKLSDEVELEIEAKIDGEMKTQPSARLGRARRISGADDRYIEFCKSTFPSHSDLRGLKLVVDTANGAGYGVAPKVFHELGAQVVSIGNEPNGYNINEKCGATYTKTLQAAVLQHEADYGIALDGDGDRLMMVDKNGQVYDGDSLIYVIAKARAREGINIGGVVGTVMTNMAMEIALKEQGVDFCRAKVGDRYVLEQLNQRGWLIGGEASGHILCMDKHNTGDGIISALQVLAALQTLNQDLATVCADWQPYPQTMINVRIQKGQQWQEASKDVLAEVEKELEGKGRVVLRASGTEPVVRVMVEARQADWAREGAERIAAAIGGI

SEQ ID NO: 7265 - protein, 427 aa, Neisseria meningitidis
MTASKSGFIGQIFSRNMLVCIFTGFTSGLPLYFLINLIPAWLRSEQVDLKSIGLMALIGLPFTWKFLWSPLMDAVRLPVLGRRRGWMLLTQAGLLAALAAYAFLNPRNHLPLIAGLSVLVAFFSASQDIVLDAFRREILSDEELGLGNSVHVNAYRVAALIPGSLSLVLADRMPWSEVFVITSLFMLPGLLMTLFLAREPVLPPSVPKTLKQTVVEPFKEFFTRKGIASAVCVLLFIFLYKLGDSMATALATPFYLDMGFSKTDIGLIAKNAGLWPAVAAGILGGVWMLKIGVNKALWIFGAVQAVTVLGFVWLAGFGHFDTVGTGERLMLAAVIGAEAVGVGLGTAAFVSYMARETNPAFTATQLALFTSLSAVPRTVINSFAGYLIEWLGYVPFFQLCFALALPGMLLLLKVAPWNGEKTQDAGR

SEQ ID NO: 7266 - protein, 56 aa, Neisseria meningitidis; identical to SEQ ID NO: 2971

SEQ ID NO: 7267 - protein, 100 aa, Neisseria meningitidis; identical to SEQ ID NO: 448

SEQ ID NO: 7268 - protein, 119 aa, Neisseria meningitidis
MYFVDRTAVVLKPTARFLEWLKSTDENMPDLTIEQLRANCSVFLVPQFDEPEAVVSYFDERYRQIFEAELAGWDIDKDKWPQDMGLKAFWEFFDIEIHDMVLNMEEAELNITPVFDNMM

SEQ ID NO: 7269 - protein, 161 aa, Neisseria meningitidis
MNDYTAMPSEDGGIGSLSLPPHSMEAEQSVLGGLMLENPAWDRIADVVSGEDFYRHEHRLIFRSIAKLINESRPADVITVQEDLQRNEELEAAGGFEYLITLAQNTPSAANIRRHAEIVRERSIMRQLAEVGTEIARSAIPKISAAERAVAWSTKNSSSFF

SEQ ID NO: 7270 - protein, 796 aa, Neisseria meningitidis
MTEQKHEEYGADSIQVLEGLEAVRKRPGMYIGDTQDGSGLHHMVFEVLDNAIDEALAGHCDKITVTIHADHSVSVADNGRGMPTGIHPKEGRSAAEVIMTVLHAGGKFDNNSYKISGGLHGVGVSVVNALSDWVTLTIYRDGKEHFVRFVRGETEEPLKVVGDSDKKGTTVRFLASTETFGNVEYSFDILAKRIRELSFLNNGVDIELTDERDGKHESFALSGGVAGFVQYMNRKKTPLHEKIFYAFGEKDGMSVECAMQWNDSYQESVQCFTNNIPQRDGGTHLTALRQVMTRTINSYIEANEVAKKAKVETAGDDMREGLTCVLSVKLPDPKFSSQTKDKLVSGEIGPVVNEVISQALTDFLEENPNEAKIITGKIVDAARAREAARKAREITRRKGVMDGLGLPGKLADCQEKDPALSELYLVEGDSAGGSAMQGRDRKFQAILPLKGKILNVEKARFEKMLASQEVAALITALGAGIGKEEFNAEKLRYHRIIIMTDADVDGAHIRTLLLTFFYRQMPELVERGYIYIAQPPLYKAKYGKQERYLKDELEKDQWLLGLALEKAKIISDGRTIEGAELADTAKQFLLAKTVIEQESRFVDELVLRAMLHASPIDLTSSENADKAVAELSGLLDEKEVALERIEGHEGHRFIKITRKLHGNVMVSYIEPKFLNSKAYQTLTQTAAALKGMVGEGAKLYKGENGYDADSFETALDILMSVAQKGMSIQRYKGLGEMNPEQLWETTMDPAVRRLLKVRIEDAIAADEVFVTLMGDEVEPRRAFIENNALIAQNIDA

SEQ ID NO: 7271 - protein, 296 aa, Neisseria meningitidis
MFPVFHLSGESRRQMLQTALRFPHVFKARAEDSHKGTFGTLAVVGGSAGMSGAPVLAASAAMYLGCGKVWAGFNQDTLPFAVIAGFPEIMLDTADSLAKRQDINAWVVGCGLGTGRAAVGTLAGILTEHTDKPVVLDADALNILSTDAETRNLARGCKNLILTPHPAEAARLLGTTVAQVQADRTAAVRKIGAIFGATVVLKGHKTLVASPDTEIYVNESGNAGLATAGSGDVLGGIIGSLLAQGVPVFEAACAGAWLHGAAADVIKESAGIAAGLLAGEIAPAARWLRNRITKSM

SEQ ID NO: 7272 - protein, 92 aa, Neisseria meningitidis
MHTELKNGILHIGGDITVKTLTAAAFTRFRQQCRLKDTCAVDLSGVGRADSACVSLLLEVLRGCKGSVRLTGIPESVRALSELYEIKDWLKS

SEQ ID NO: 7273 - protein, 144 aa, Neisseria meningitidis; identical to SEQ ID NO: 4464

SEQ ID NO: 7274 - protein, 222 aa, Neisseria meningitidis
MLPSKYEDNALQIKEKSTERTAPFFVLEVTARSAADILGIHPNSAALFYRKIRTVINHHLALAADEVFEGPVEPDESDFGGRRKGRRGRGAAGKVVVFGILKRNGRVYTVVVDNAKSETLLPVIKKKIMPDSIVYTDSLSSYDKLDVSGFIHYRINHSKECADRQNHINGIENFWNQAKRVLRKYNGIDRKSFPLFLKECEFRFNFGTPSQQLKILRDWCGI

SEQ ID NO: 7275 - protein, 109 aa, Neisseria meningitidis
MFDGEVEADESYFGGQRKGKRGRGAAGKVAVFGLLKRNGKVYTVTVPNTQTATLFPIIREQVKPDSIFYTDCYRSYDVLDVREFSHFSFAETSFSYQSQHTFCRTTKPY

SEQ ID NO: 7276 - protein, 152 aa, Neisseria meningitidis; identical to SEQ ID NO: 1697

SEQ ID NO: 7277 - protein, 686 aa, Neisseria meningitidis
MTQTLLIELLTEELPPKALNNLGNHFAASVAEGLEKAQLVDGAAEFTAYASPRRLAVQVKNVKAVQADQKIVKKGPAVANAMKDGAPTKALEGFARGAGAKIEDLTIVHDGKQDVYAYEYVQIGKPLGGLLEDIINQAVKKLPIPKVMRWGSSTFTFVRPVHGLVVLHGGDIVNVSVLGLQSGNKTLGHRFLSDGEITIENADSYAAQMREQGKVVASFAERKAAIQTVLEGQARRLNATAAADEALLDEVTALVEWPVVLEAGFEEHFLAVPQECLILTMQQNQKYFPLLDQNGKLMNRFLLVSNLQTEDPSHIIQGNERVLRARLSDAEFFYKQDQKATLESRLPKLTNVVYHNKIGSQAERIERLQSIAAHIAKALGADAAAAERAARLAKADLVTEMVGEFPELQGTMGKYYARLDGETEEITEAVEQHYQPRFAGDNLPEGKIAAAVALADKLETLVGIWGIGLIPTGDKDPYALRRAALGILRMLMQYGLDVNELIQTAFNSFPQGLLNEKTPSETADFMQARLAVLLQNDYPQDIVAAVLAKQPRRLDDLTAKLQAVAAFKQLPEAAALAAANKRVQNLLKKADAELGAVNESLLQQDEEKALFAAAQGLQPKIAAAVAEGNFQTALSELASVKPQVDAFFDGVMVMAEDAAVKQNRLNLLNRLAEQMNAVADIALLGE

SEQ ID NO: 7278 - protein, 249 aa, Neisseria meningitidis
MLIQAVTIFPEMFDSITRYGVTGRANRQGIWQFEAVNPRKFADNRLGYIDDRPFGGGPGMIMMAPPLHAAIEHAKTQSSQAAKVIYLSPQGKPLTHQKAVELAELPHLILLCGRYEGIDERLLQSSVDEEISIGDFVVSGGELPAMMLMDAVLRLVPGVLGDMQSAEQDSFSSGILDCPHYTKPLEFQGMAVPEVLRSGNHGLIAEWRLEQSLRRTLERRPDLLEKRVLIPKESRLLETIRQEQREIQS

SEQ ID NO: 7279 - protein, 222 aa, Neisseria meningitidis
MTTHLSNVAPDLQNYLNAIGEPEHPVLTRLREKTGHHRMGKMAIAREQAAVLVWLAKLIRAEKYLEIGVFTGYSSTALALALPEHGRITACDINVTFTDTARQVWNEAGVAHKISLHLQPALLTLDDLIAQGEAGSYDLALIDADKPPTPQYFERCLKLVRQGGIIAIDNILLNGRVMREAASDAPPSVGILKDFNQNLPNDPRIVPITLPVGDGLTLLLKK

SEQ ID NO: 7280 - protein, 114 aa, Neisseria meningitidis
MLPNKVLGKYDWNVDGKTGIGAAWVVAAFILPMLVWAIFMLSRMQGWLAPTKANPIWALVWLLICLPCLLIASKCLGWKGWRRVVNIFACLTVCAILSVPASLLIAFTLRDLLK

SEQ ID NO: 7281 - protein, 397 aa, Neisseria meningitidis
MTEDERFAWLQLAFTPYIGAESFLLLMRRFGSAQNALSAPAEQVAALIRHKQALEAWRNAEKRALARQAAEAALEWEMRDGCRLMLLQDEDFPEMLTQGLTAPPVLFLRGNVQLLHKPSAAIVGSRHATPQAMRIAKDFGKSLGGKGIPVVSGMASGIDTAAHQGALQAEGGTIAVWGTGIDRIYPPVNKNLAYEIAEKGLIVSEFPIGTRPYAGNFPRRNRLIAALSQVTLVVEAALESGSLITARLAAEMGREVMAVPGSIDNPHSKGCHKLIKDGAKLVECLDDILNECPGLLQNTGASSYSINKGIPEKRITAVQTASDQLSLPEGKMPSEKTENRPVGGSILDRMGFDPVHPDVLAGQLAMPAADLYAALLELELDGSVAAMPGGRYQRIRT

SEQ ID NO: 7282 - protein, 98 aa, Neisseria meningitidis
LTVEYFMLLATDGEDVHEARMAARPEHLKRLETLKSEGRLLTAGPNPLPEDSNRVSGSLIVAQFESLDAAQAWAEDDPYVHAGVYSEVLIKPFKAVFK

SEQ ID NO: 7283 - protein, 389 aa, Neisseria meningitidis; identical to SEQ ID NO: 5513

SEQ ID NO: 7284 - protein, 83 aa, Neisseria meningitidis
LPANNGIIRALSPPFTGINIRLFAALGLLSLSGAVAQASVYHCNSNGKSVYTSAPAGLCADADLPKISSHQGGGYRLKIKKLS

SEQ ID NO: 7285 - protein, 157 aa, Neisseria meningitidis
MKGDRLVIRELNKNLGLLLVTINQYFLHARILKNWGFEELGEHFFKQSIVEMKAADDLIERILFLEGLPNLQELGKLLIGESTEEIIACDLTKEQEKHEALLAAIATAEAQQDYVSRDLLEKQKDTNEEHIDWLETQQELIGKIGLPNYLQTAAQED

SEQ ID NO: 7286 - protein, 321 aa, Neisseria meningitidis
MSYTQLTQGERYHIQYLSRHCTVTEIAKQLNRHKSTISREIRRHRTQGQQYSAEKAQRQSRTIKQRKRQPYKLDSQLIQHIDPLIRRKLSPEQVCAYLCKHHQITLHHSTIYRYLRQDKSNGSTLWQHLRICSKPYRKRYGSTWTRGKVPNRVGIENRPAIVDQKSRIGDWEADTIVGKGQKSALLTLVERVTRYTIICKLDSLKAEDTARAAVRALKAHKDRVHTITMDNGKEFYQHTKITKALKAETYFCRPYHSWEKGLNENTNGLIRQYFPKQTDFRNISDREIRRVQDELNHRPRKTLGYETPSVLFLNLFQPLVP

SEQ ID NO: 7287 - protein, 93 aa, Neisseria meningitidis
LTKGRLKNSFDKDAVAKEIDLQREVTQAFGKTPPKPQRPLPTNSAIPEVTDGIRQPEPCRRPNCKTNPTQKTVRPTQKTARKIWTAVQTGCPV

SEQ ID NO: 7288 - protein, 203 aa, Neisseria meningitidis
MRRTALLLLALAAGTSLAAGFSQKDTPINTRYRETPEEAAAREFKEHTAKLPPLPDTHSDGWFDIYVDENYGKQPKILLDSLQIMPAPDGSIRYILNIRSDKGYDNLTAKGIFCARFSIRFGNGKPSSYKVFGYGDTVNRRWIQPRNAEWKPIGGTLSRNDALRTVLYQAFCEGGVPADTKGLVQRLKERAGRYAPSIKPHNK

SEQ ID NO: 7289 - protein, 2703 aa, Neisseria meningitidis
MNRTLYKVVFNKHRNCMIAVAENAKREGKNTADTQAVGILPNDIAGFAGFIHSISVISFSLSLLLGSALILTSSSATAQGIVADKSAPAQQQPTILQTGNGIPQVNIQTPTSAGVSVNQYAQFDVGNRGAILNNSRSNTQTQLGGWIQGNPWLARGEARVVVNQINSSHSSQLNGYIEVGGRRAEVVIANPAGIAVNGGGFINASRATLTTAQPQYQAGDLSGFKIRQGNVVIAGHGLDARDTDYTRILSYHSKIDAPVWGQDVRVVAGQNDVAATGDAHSPILNNAAANTSNNTANNGTHIPLFAIDTGKLGGMYANKITLISTVEQAGIRNQGQWFASAGNVAVNAEGKLVNTGMIAATGENHAVSLHARNVHNSGTVASQDDANIHSQTLDNSGTVLSSGRLTVRNLGRLKNQNNGTIQAARLDMSTGGLDNTGNITQTGSQALDLVSAGKFDNSGKIGVSDVPQTGLNPNPSVIPQIPSTATGSGSSTVSVSKPGSNNPVSPTAPAKNYAVGRIQTTGAFDNAGSINAGGQIDIAAQNGLGNSGSLNAAKLRVSGDSFNNTVKGKLQAHDLAVNTQTAKNSGHLLTQTGKIDNRELHNAGEIAANNLTLIHSGRLSNDKKGNIRAAHLQLDTAGLHNAGNILADSGTVTTKNNLRNTGKVSVARLNTEGQTLDNTRGRIEAETVNIQSQQLTNQSGHITATEQLTINSRNVDNQNGKLLSANQAQLAVSDGLYNQHGEIATNRQLSIHDKNQNTLALNNADGTIQSAGNVSLQAKSLANNGTLTAGNKLDIALTDDFVVERDLTAGKQLNLSIKGRLKNTHTLQAGHTLKLNAGNIDNQVTGKIIGGEQTDITSEQHVDNRGLINSDGLTHIGAGQTLTNTGTGKIYGNHIALDAQILLNREETTEGSTKAGAIAARKRLDIGAKEIHNQEGALLSSEGIFAVGNRLDEQHHAAGMADTFVNGSAGLEVQGDALMSVRNMQNINNHFKTETYLAKAEKQVRDYTVLGQNTYYQAGKDGLFDNSQGQKDQTTATFHLKNGSRIEANQWHVRDYHIETYKERIIENRPAHITVGGDLTASGQNWLNKDSRIVVGGRIITDDLNQKEITNQSTTGKGRTDAVGTQWDSVTKKGWYSGRKRQRRTERNHTPYHDTQLFTHDFDTPVSVIQQNAASPSFQPAASAIKLIDGVSTAAVNGQRIHTGNVVSLNNATVTLPNSSLYTTHPDNKGWLVETDPQFADYRRWLGSDYMLQQLQLDTNHLHKRLGDGYYEQKLVNEQIHQLTGYRRLDGYRSDEEQFKALMDNGLTAAKTFGLTPGIALSAEQVARLTSDIVWMENQTVTLSDGSTQTVLVPKVYALARKGDLNTSGGLISAEQVLLKLQNGNLTNSGTIAGRQAVLIQARNINSNGNIQADQIGLKAEKSINIDGGQVQAGRLLTAQAQNINLNGTTQTSGNERNGNTAIDRMAGINVVGSHTEQVDNRTSDGILSLHASNDINLNAATVSNQVKDGTTQITAGNNLNLGTIRTEHREAYGTLDDENHRHVRQSTEVGSSIRTQNGALLRAGNDLKIRQGELEAEEGKTVLAAGRDVTISEGRQITELDTSVSGKSKGILSSTKTHDRYRFSHDEAVGSNIGGGKMIVAAGQDINVRGSNLISDKGIVLKAGHDIDISTAHNRYTGNEYHESKKSGVMGTGGLGFTIGNRKTTDDTDRTNIVHTGSIIGSLNGDTVTVAGNRYRQTGSTVSSPEGRNTVTAKSIDVEFANNRYATDYAHTQEQKGLTVALNVPVVQAAQNFIQAAQNVGKSKNKRVNAMAAANAAWQSYQATQQMQQFAPSSSAGQGQNNNQSPSISVSITYGEQKSRNEQKRHYTEAAASQIIGKGQTTLAATGSGEQSNINITGSDVIGHAGTALIADNHIRLQSAKQDGSEQSKNKSSGWNAGVAVKIGNGIRFGITAGGNIGKGKEQGGSTTHRHTHVGSTTGKTTIRSGGDTTLKGVQLIGKGIQADTRNLHIESVQDTETYQSKQQNGNVQVTVGYGFSASGSYRQSKVKADHASVTGQSGIYAGEDGYQIKVRDNTDLKGGIITSSQSAEDKGKNLFQTATLTASDIQNHSRYEGRSFGIGGSFDLNGGWDGTVTDKQGRPTDRISPAAGYGSDGDSKNSTTRSGVNTHNIHITDEAGQLARTGRTAKETEARIYTGIDTETADQHSGHLKNSFDKDAVAKEINLQREVTKEFGRNAAQAVAAVADKLGNTQSYERYQEARTLLEAELQNTDSEAEKAAFRASLGQVNAYLAENQSRYDTWKEGGIGRSILHGAAGGLTTGSLGGILAGGGTSLAAPYLDKAAENLGPAGKAAVNALGGAAIGYATGGSGGAVVGANVDWNNRQLHPKEMALADKYAEALKREVEKREGRKISSQEAAMRIRRQILRWVDKGSQDGYTDQSVISLIGMKGEDKALGYTWDYRDYGARNPQTYNDPKLFEEYRRQDKPEYRNLTWLHSGTKDTKIRQGERKNEEFALNVAEGLTSLVNPNPRIKVPILAGIRNLKNIKPTVTGSDPLLAGAGNIRIPANGNVAKGDRIPDTALASKGIKHKNRKDQLEKNKKSGEDFEMEIYQKKVKQGFKPQRQITVKTKSGVKTRLDIISKEGGLDVCTECKASITAPLTKNQKKAFPEIERTGATVVGKGKPGYPKGTKIEPTKVIIERKR

SEQ ID NO: 7290 - protein, 158 aa, Neisseria meningitidis; identical to SEQ ID NO: 871

SEQ ID NO: 7291 - protein, 360 aa, Neisseria meningitidis
MFLWLAHFSNWLTGLNIFQYTTFRAVMAALTALAFSLMFGPWTIRRLTALKCGQAVRTDGPQTHLVKNGTPTMGGSLILTAITVSTLLWGNWANPYIWILLGVLLATGALGFYDDWRKVVYKDPNGVSAKFKMVWQSSVAIIASLALFYLAANSANNILIVPFFKQIALPLGVVGFLVLSYLTIVGTSNAVNLTDGLDGLATFPVVLVAAGLAIFAYASGHSQFAQYLQLPYVAGANEVVIFCTAMCGACLGFLWFNAYPAQVFMGDVGALALGAALGTVAVIVRQEFVLVIMGGLFVVEAVSVMLQVGWYKKTKKRIFLMAPIHHHYEQKGWKETQVVVRFWIITIVLVLIGLSTLKIR

SEQ ID NO: 7292 - protein, 237 aa, Neisseria meningitidis
LRRQFAASDACRTGLKEGEIMGLGMEIGKLIVAFLVLINPFSALSLYLDLTNGHSTKERRKVARTAAVAVFAVIAVFALIGGTLLKVLGISVGSFQVGGGILVLLIAISMMNGNDNPAKQNLGAQPETGQARPARNAGAIAVVPIAIPITIGPGGISTVIIYASAAKTYGDIALIIAAGLVVSAICYAILIVAGKVSRLLGATGLTILNRIMGMMLAAVSVEIIVSGLKTIFPQLAG

SEQ ID NO: 7293 - protein, 405 aa, Neisseria meningitidis
MALIVHKYGGTSVGSPERIKNVAKRVAKARAEGHDIVVVVSAMSGETNRLVALAHEMQEHPDPRELDVVLATGEQVTIGLLAMALKDIGVDAKSYTGWQVALKTDTAHTKARIESIDDEKMRADLTAGKVVIVAGFQGISSEGDISTLGRGGSDTSAVALAAALKADECQIYTDVDGVYTTDPRVVPEARRMDTVTFEEMIELASLGSKVLQIRSVEFAGKYKVRLRVLSSLQDGGNGTLITFEEDDNMERAAVTGIAFDKNQARINVRGVPDKPGVAYQILGAVADANIEVDMIIQNVGSEGTTDFSFTVPRGDYKQTLEILSERQDSIGAASIDGDDTVCKVSAVGLGMRSHVGVAAKIFRTLAEEGINIQMISTSEIKVSVLIDEKYMELATRVLHKAFNLG

SEQ ID NO: 7294 - protein, 130 aa, Neisseria meningitidis; identical to SEQ ID NO: 425

SEQ ID NO: 7295 - protein, 52 aa, Neisseria meningitidis
MKTPLPICTLSALAACTLSGQGGSRVYGEIKARDLCVTAPILLSAFCLACSR

SEQ ID NO: 7296 - protein, 390 aa, Neisseria meningitidis
MKQINQALQQKLVEFKEKSGMNQTQLARGIGTSPASISMYLNGTYAEKGGNYETIEPKIEAFLEMQDSKAQREELVLGFVSTKTTRRIAEVMRDAHEGGETVVIYGQAGLGKTQAVKNYCEKNPAAILIEANPSFTALVLMRKLATAAKVSAMGSLNDLFESVSDRLRDSGRLIVVDEAENLPLRALEIVRRLHDETGCGLVLSGMPRLVANLRGKHGELVQLYSRVSVALNLGESLPDDELFEIAKAALPDAVKHLLPDSVQALITVIGFNETLELVRLMGGTTYPLRQGYTKNSQSRVAYLEEIIGSEAAGRLVEAMAPCNLFIPRCETALYELRNRKIRSQFDRQTAGGTPAYEAVNDLALAHRLSDRHVWRILKQADKEAEQENLF

SEQ ID NO: 7297 - protein, 200 aa, Neisseria meningitidis
MFNIPAVAVSYLIGSLSFAVIVSKYYGMDDPRTYGSGNPGATNVLRSGKKKAAALTLLGDAAKGLVAVLLARVLQEPLGLSDSAIAAVALAALVGHMWPVFFGFKGGKGVATALGVLLALSPATALVCALIWLVMAFGFKVSSLAALTATIAAPVAASFFMPHVSWVWATVAIALLVLFRHKSNIVKLLEGRESKIGGSR

SEQ ID NO: 7298 - protein, 437 aa, Neisseria meningitidis
MMNTPHPRPKIAVIGAGWAGLSAAVTLARHADVTLFEAGRQAGGRARTLAGNTDGFGFLDNGQHILLGAYRGVLRLMKTIGSDPRAAFLRVPLHWHMHGGLQFRALPLPAPLHILGGVLLARRAPTAFKAKLLADMSDLQKSARLGQPDTTVAQWLKQRNVPRAAVMQFWQPLVWGALNTPLETASLRVLCNVLSDGVLTKKSGSDYLLPKQDLGAIVAEPALADLQRLGADIRLETRVCRLNTLPDGKVLVNGEAFDAAVPATAPYHAAALLPEGTPEHVQTAYQNLRYHAITTVYLRYAEPVRLPAPLTGLADGTVQWLLCRGRLGLPENEVSAVISVSDRVGAFANRAWADKAHADLKRILPHLGEPEAVRVITEKRATTAADAPPPDLSWLHRHRIFPAGDYLHPDYPATLEAAVQSGFASAEACLQSLSDAV

SEQ ID NO: 7299 - protein, 385 aa, Neisseria meningitidis
LNIRKTYYNNPVLMPSEHSGGVCYGRIMKPSILEKLQQLSDRLEEVTHLLGQPEATSDMDNYRKLTREHAELTPVVEVFQNYRLAQSDLADAEEMLSDPEMKDFAAEEIEAAKAKIGELDTELQKLLLPKDADDDKNIFIEIRAGTGGDEAALFAGDLLRMYSRYAERNRWQVEIVSANESELGGYKEVIARIVGLGAYSRLKFESGGHRVQRVPATESQGRIHTSACTVAVMPEADELEDIELNPADLRIDTFRASGAGGQHINKTDSAVRITHLPTGMVVECQDGRSQHANKAQAMKVLAARLNDAQKREAQAKEAAERKSLIGSGDRSERIRTYNYPQGRVTDHRINLTLHKLDFVMDGDLEEITNALIAEHQAELLAAMGD

SEQ ID NO: 7300 - protein, 942 aa, Neisseria meningitidis
MMDEKLNFSYLFGSNAPYIEELYEAFLENPDAVDEKWKQYFTDLSKQPGTVAVDVAHTPIRESFVTLAKKKIASAVAGGADEAMLKKQVSVLRLISAYRIQGVGAAQLDPLKRIPPRDIEALDPKFHGLSDADMALQFNMGEGDFANRGKLPLSQIISNLKQTYCGHIALEYIYIPNTEERRWVRNYFESVLSTPHYNADQKRRILKEMTAAETLERYLHTKYVGQKRFGVEGGESAIAGLNYLIQNAGKDGVEEVIIGMAHRGRLNVLVNILGKKPGDLFAEFEGRAEIKLPSGDVKYHMGFSSDIATPHGPMHVSLAFNPSHLEIVNPVVEGSARAKQKRLGENGRDKVLPVLIHGDSAFIGLGVNQATFNLSKTRGYTTGGTVHIVINNQIGFTTSDIRDTRSTVHCTDIAKMVSAPVIHVNGDDPERVCFAIQAALDYRKKFHKDIVIDVVCYRKWGHNEGDDPTLTQPMMYKKVSQHPGARALYTEQLIAEGVVTQAEADGYIQAYRDALDKGEHVEQTTLSNFQRTQIDWSKYQGKDWREHIETGLPAADIERLTEKFTAVPEGFALHPTAKRVIEARKAMASGKQAIDWGMAETLAYASLVTKGHGVRISGEDSGRGTFSHRHAVLHDQKREKWDDGTYVPLRHMGEGMGEFLVIDSILNEEAVMAFEYGFACSAPDKLTIWEAQFGDFANGAQVTIDQFLSSGETKWGRLCGLTTILPHGYDGQGPEHSSARVERWLQLCSENNMQVIMPSEASQMFHLLQRQVLGSYRKPLVIFMSKRLLRFKGAMSPLENFTEGSTFRPVIGDTAERASNDSVKRVVLCAGQVYYDLEAGRAERKLEDDVAIVRVEQLYPFPYDEVKAELAKYPNAKSVVWAQEEPKNQGAFYQIRHRIEDVISEEQKLSYAGRPSSASPAVGYSSKHIAQLKQLVEDALAL

SEQ ID NO: 7301 - protein, 626 aa, Neisseria meningitidis
MNIFYEESGQFKIAAIIQKNDATYQVDTPHGKRTKVKANNVFAEFDGDMAAFLENAQAQAADIDTDLLWEVCGEEEFTAEAIAEEYYGHAPTKTELAATLIALYAAPMYFYKKAKGVFKAAPEETLKQALAAIERKKQQDAQIDAWAEALKRGEMPSEIAADLKTILHAPDKQSLTYKAFTKAADALKTSAYELAKKTGGITSIPQYLQDGFEIKYFPKGTGFPDLALPEMPDLPKADVTAFSIDDESTTEVDDALSLTDLDNGTKRVGIHIAAPSLAVKPGDKMEKNIMERLSTVYFPGGKITMLPENWIAAFSLDAGAHRPAVSIYFDVDGEFNVGAPTCKIEAVNIATNLRIQAIEPHFNAETGLDEAGEMMFAHHQDLIWFYQFATALQKARGKYEPDRAPQYDYSIELDEEGKVSVVRRERGSPIDTLVSEMMILANSTWAQMLHDNDLPGLFRVQPTGKVRMSTKSEPHIGMGVQHYGWFTSPLRRAADYINQKQLISLIDDTAEPLYQNSDAELFAALRDFDAAYTAYADFQRQMEAYWSLVYLQQQGTSELTATILKEDLVRIEGLPLVTRATGIPFDALPKSQALFKITELDAEKQFVSLNYIKAVAPAGTTAGNAV

SEQ ID NO: 7302 - protein, 68 aa, Neisseria meningitidis
MKFGKSLEGRLDARLIESALDYIHYSERFLAFEILCTYIEDFDVRLTEQESREISFINKEFEIESTSD

SEQ ID NO: 7303 - protein, 321 aa, Neisseria meningitidis; identical to SEQ ID NO: 2168

SEQ ID NO: 7304 - protein, 546 aa, Neisseria meningitidis
LSLPYKRWHYFNLIKNSLQKGCLKQQQTLTATTLKRNTIMTVIKQEDFIQSICDAFQFISYYHPKDYIDALYKAWQKEENPAAKDAMTQILVNSRMCAENNRPICQDTGIATVFLKVGMNVQWDADMSVEEMVNEGVRRAYTWEGNTLRASVLADPAGKRQNTKDNTPAVIHMSIVPGGKVEVTCAAKGGGSENKSKLAMLNPSDNIVDWVLKTIPTMGAGWCPPGILGIGIGGTPEKAVLMAKESLMSHIDIQELQEKAASGAELSTTEALRLELFEKVNALGIGAQGLGGLTTVLDVKILDYPTHAASKPIAMIPNCAATRHVEFELDGSGPVELTPPRVEDWPDLTYSPDNGKRVDVDKLTKEEVASWKTGDVLLLNGKILTGRDAAHKRLVDMLNKGEELPVDFTNRLIYYVGPVDPVGDEVVGPAGPTTATRMDKFTRQMLEQTDLLGMIGKSERGVATCEAIADNKAVYLMAVGGAAYLVAKAIKSSKVLAFPELGMEAIYEFEVKDMPVTVAVDSKGESIHATAPRKWQAKIGIIPVES

SEQ ID NO: 7305 - protein, 96 aa, Neisseria meningitidis
MAKYFTETGISVREHFDFFGEFVVSPAARSGDLALTYGLRLEAGEEGLSLAELFDKRSDSQEPVEGGRIDIGGFMLTAKEVDGGGNIGSMGLKVLR

SEQ ID NO: 7306 - protein, 176 aa, Neisseria meningitidis; identical to SEQ ID NO: 1829

SEQ ID NO: 7307 - protein, 366 aa, Neisseria meningitidis
MTRIAILGGGLSGRLTALQLAEQGYQIALFDKGCRRGEHAAAYVAAAMLAPAAEAVEATPEVVRLGRQSIPLWRGIRCRLNTHTMMQENGSLIVWHGQDKPLSSEFVRHLKRGGVADDEIVRWRADDIAEREPQLGGRFSDGIYLPTEGQLDGRQILSALADALDELNVPCHWEHECVPEGLQAQYDWLIDCRGYGAKTAWNQSPEHTSTLRGIRGEVARVYTPEITLNRPVRLLHPRYPLYIAPKENHVFVIGATQIESESQAPASVRSGLELLSALYAIHPAFGEADILEIATGLRPTLNHHNPEIRYNRARRLIEINGLFRHGFMISPAVTAAAARLAVALFDGKDAPERDKESGLAYIRRQD

SEQ ID NO: 7308 - protein, 360 aa, Neisseria meningitidis
MPSEAASDGILPLYPTRTIFQKPIMLPFFPEPSLSYTQQNRTAVLLLNLGTPDAPTAQAVRPYLKSFLTDRRVVELPKWLWYPILHGLVLTLRPKKSAHAYEKIWFKEGSPLEVYTARQAAALAKRMPDLIVRHAMTYGNPSVADVLSELKAQGAGRLLVIPMYPQYAASSSGAAVDKVCEQLLLQRNQMSVRTVSRFYDDTGYIDAMKNHILRYWAEHGRGKKLMLSFHGVPQKHHDLGDPYPDECRHTAKLLAEALELTEDQYVVSFQSQFGRAKWVTPSTQDLFGKLPKQGVTELDVFCPGFLADCLETMEEIALMGREQFYEAGGKSYRYIPCLNDNPDWIDALVALAEENLGSWR

SEQ ID NO: 7309 - protein, 525 aa, Neisseria meningitidis
MRANPKTQAMPSETISLMKTRSLISLLCLLLCSCSSWLPPLEERTESRHFNTSKPVRLDNILQIRHTPHTNGLSDIYLLNDPHEAFAARAALIESAEHSLDLQYYIWRNDISGRLLFNLVYLAAERGVRVRLLLDDNNTRGLDDLLLALDSHPNIEVRLFNPFVLRKWRALGYLTDFPRLNRRMHNKSFTADNRATILGGRNIGDEYFKVGEDTVFADLDILATGSVVGEVSHDFDRYWASHSAHNATRIIRSGDIGKGLQALGYNDETSRHALLRYRETVEQSPLYQKIQTGCIDWQSVRTRLISDDPAKGLDRDRRKPPIAGRLQDALKQPEKSVYLVSPYFVPTKSGTDALAKLVQDGIDVTVLTNSLQATDVAAVHSGYVKYRKPLLKAGIKLYELQPNHAVPATKDKGLTGSSVTSLHAKTFIVDGKRIFIGSFNLDPRSARLNTEMGVVIESPKIAEQMERTLADTTPAYAYRVTLDRHNRLQWHDPATRKTYPNEPEAKLWKRIAAKILSLLPIEGLL

SEQ ID NO: 7310 - protein, 489 aa, Neisseria meningitidis; identical to SEQ ID NO: 1073

SEQ ID NO: 7311 - protein, 431 aa, Neisseria meningitidis
VIAMIYIVLFLAVVLAVVAYNMYQENQYRKKVRDQFGHSDKDALLNSKTSHVRDGKPSGGSVMMPKPQPAVKKTAKPQDPAMRNLQEQDAVYIAKQKQAKASPFKTEIETALEESGIIGNSAHTVSEPQTGHSAPKPADAPAKPAPVPQTPAKPLITLKELSKVELPWFDVRFDFISYIALTEAKELHALPRLSNRCRYQIVGCTMDDHFQIAEPIPGIRYQAFIVGIQAVSRNGLASQEELSAFNRQVDAFAQSMGGQTLHTDLAAFIEVASALDAFCARVDQTIAIHLVSPTSISGVELRSAVTGVGFVLEDDGAFHYTDTSGSTMFSICSLNNEPFTNALLDNQSYKGFSMLLDIPHSPAGEKTFDDLFMDLAVRLSGQLNLNLVNDKMEEVSTQWLKDVRTYVLARQSEMLKVGIEPGGKTALRLFS

SEQ ID NO: 7312 - protein, 503 aa, Neisseria meningitidis
MKWLKRLTVIVGTFYRYRLAGLCASLMGSGWICALLKMMPQSSKLKNEPPAVRLRLALESLGPIFIKFGQVLSTRPDLIPHDYAVELAKLQDKVPPFDARLSREQIEKSLGQSIEKLYAEFETEPIASASIAQVHKARLHSGEQVAVKVLRPNLLPVIEQDLSLMRFGAGWVERLFADGKRLKPREVVAEFDKYLHDELDLMREAANASQLGRNFQNSDMLIVPKVFYDYCTSDVLTIEWMDGTPVSDIAKLKADGIDLHKLADYGVEIFFTQVFRDGFFHADMHPGNILVAADNRYIALDFGIVGTLTDYDKRYLAINFLAFFNRDYRRVATAHIESGWVPADTRAEELEAAVRAVCEPVFNKPISQISFGLVLMRLFEVSRRFNVEIQPQLVLLQKTLLNIEGLGRQLDPDLDLWKTAKPFLVKWMNGQVGPKALWRNLKNEAPDWAQIIPSLPRKISALIDENRQQEMRDAYIHLVKVQQRQSLWLAVIAVVLLLILLLK

SEQ ID NO: 7313 - protein, 392 aa, Neisseria meningitidis
MTGRTGRNGSTQAQPERVMLVGVMLDKDGTGSSATRLNGFQTALAEAVELVKAAGGDSVRVETAKRDRPHTALFVGTGKAAELSEAVAADGIDLVVFNHELTPTQERNLEKELKCRVLDRVGLILAIFARRARTQEGRLQVELAQLSHLAGRLIRGYGHLQSQRGGIGMKGPGETKLETDRRLIAHRINALKKQLVNLKKQRALRRKPRESGTIKTFALVGYTNVGKSSLFNRLTKSGIYAKDQLFATLDTTARRLYISPECSIILTDTVGFVSDLPHKLISAFSATLEETAQADVLLHVVDAAAPNSGQQIEDVENVLQEIHAGDIPCIKVYNKTDLLPSEEQNTGIWRDAAGKIAAVRISVAENTGIDALREAIAESCAAAPNTDETEMP

SEQ ID NO: 7314 - protein, 177 aa, Neisseria meningitidis; identical to SEQ ID NO: 1513

SEQ ID NO: 7315 - protein, 181 aa, Neisseria meningitidis
MKHYALLISFLALSACSQGSEDLNEWMAQTRREAKAEIIPFQAPTLPVAPVYSPPQLTGPNAFDFRRMETDKKGENAPDTKRIKETLEKFSLENMRYVGILKSRQKVSGFIEAEGYVYTVGVGNYLGQNYGRIESITDDSIVLNELIEDSTGNWVSRKAELLLNSSDKNTEQAAAPAAEQN

SEQ ID NO: 7316 - protein, 233 aa, Neisseria meningitidis; identical to SEQ ID NO: 3223

SEQ ID NO: 7317 - protein, 426 aa, Neisseria meningitidis
MENSLKEAALKFHEFPVPGKISVTPTKSLATDKDLALAYSPGVAAPCMEIHADPQNAYKYTAKGNLVAVISNGTAVLGLGDIGALAGKPVMEGKGVLFKKFAGVDVFDIEIDEKDPQKLVDIIAALEPTFGGINLEDIKAPECFYIERELRKRCKIPVFHDDQHGTAIITAAAVLNALRFTGRKIEEATLVCSGAGAAAIACLNQLLDLGLKRENVTVCDSKGVIYQTREDKDRMDESKQFYAIEDNGQRVLADAVKGKDIFLGLSGANLLTPEILNTMNEKPIVFAMANPNPEILPPLAKETRPDVVIGTGRSDFPNQVNNVLCFPFIFRGALDVGATTINEEMKRACVYALADLAMEEVTEEVVAAYGKKFEFGAEYLIPTPFDSRLLPRVATAAAKAAMESGVATRPIADLEAYAAKLSEWKL

SEQ ID NO: 7318 - protein, 446 aa, Neisseria meningitidis
LHTLLAFIFAILILVSLHEFGHYAVARLCGVKVVRFSVGFGKPFFTRKRGDTEWCLAPIPLGGYVKMVDTREGEVSEADLPYAFDKQHPAKRIAIVAAGPLTNLALAVLLYGLSFSFGVTELRPYVGTVEPDTIAARAGFQSGDKIQSVNGTPVADWGSAQTEIVLNLEAGKVAVGVQTASGAQTVRTIDAAGTPEAGKIAKNQGYIGLMPFKITTVAGGVEKGSPAEKAGLKPGDRLTAADGKPIASWQEWANLTRQSPGKKITLTYERAGQTHTADIRPDTVEQPDHTLIGRVGLRPQPDRAWDAQIRRSYRPSVIRAFGMGWEKTVSHSWTTLKFFGKLISGNASVSHISGPLTIADIAGQSAELGLQSYLEFLALVSISLGVLNLLPVPVLDGGHLVFYTAEWIRGKPLGERVQNIGLRFGLALMMLMMAVAFFNDVTRLLG

SEQ ID NO: 7319 - protein, 303 aa, Neisseria meningitidis
MDTLFSLKVFRQVVQSGGFTRAADALGISTAMASKHVSHLENTVQAKLLHRNSRNLSLTEAGEEYYRQCSYALDTLDDAAQKAAGGTEKPQGLLRVTMPLWFAGSQICNWLAEYRERYPEVALELILDNRHVDLIAEGVDLALRVSQTLSPSLIARPLAEIEFALLASPDFLRRNGVPETPEEVAGLPAVLPTYTNQQKLDLTRKSDGKKYRLELTPVIRTDNTLMMREMIKAGACIGYQPLWAAEHDLRCGTLVRLLPGYAVPTDRLNAVYADRAFLSAKVRSFIDFLNEKIASRKGCRNAV

SEQ ID NO: 7320 - protein, 145 aa, Neisseria meningitidis
MSRYLITFDMDTNCLKDNYHGNNYTNAYSDIKTILARHGFENIQGSVYLGREGISEAHGTIAIQELTARFDWFYSCISNIKFYRLESDLNAQFIADGVYQAKQAFLQRVEQLRISLTEAGLSDEQINQVLEKQKFELESPNLKLN

SEQ ID NO: 7321 - protein, 175 aa, Neisseria meningitidis; identical to SEQ ID NO: 5147

SEQ ID NO: 7322 - protein, 286 aa, Neisseria meningitidis
MKPYSANPNLTEPRRLRVLLIAAALGFLLLMLVVPLVAVFYEALKGGWDLYLKSLNDPEAWSAIKLTLITALIVVPVNAVLGVAMAWLLTRFDFRGKQLLTTLLDLPFSVSPVVAGLMFVLLFGAHTALGGWLEAQGIQIIFAIPGIVLATLFVTFPFVAREIIPLMQAQGDSEEQAALILGASGWQMFWRVTLPNIKWALLYGIILTNARAMGEFGAVSVVSGHIRGETNTVPLLVEIFYNEYNFTGAFALSGVLALLALATLAVQNIITKLQDKKLAAAERNAI

SEQ ID NO: 7323 - protein, 211 aa, Neisseria meningitidis
LNIKYSGIENRFETAILKKNGVRSGFVSFAPNLAAVKLNDYAKVRKRITKTKQKADIVIVMFHGGAEGKQAEHLPFDTEIFYGENRGNVVEFARLAVDSGADVVFGQGPHVTRAVELYRDRFISYSGGNFATYGAINTSGISGIAPIFKIITDKQGRFVSGNIIPITQVGDKIPKIDPEKTVIGRIIYLNRSDFPKGNGLDVSPDGSITRR

SEQ ID NO: 7324 - protein, 378 aa, Neisseria meningitidis
MEMKQADSTIKSRAAVAFAPNQPLQIVEIDVEMPRKGEVLIRNTHTGVCHTDAFTLSGSDPEGVFPVVLGHEGAGVVVAVGEGVSSVKPGDHVIPLYTAECGECEFCCSGKTNLCVSVRDTQGKGLMPDGTTRFSYQGQPIYHYMGCSTFSEYSVVAEVSLAKINPEANHEQVCLLGCGVTTGIGAVHNTAKVQEGDSVAVFGLGAIGLAVVQGARQAKAGRIIAIDTNPSKFELAKQFGATDCLNPNDYDKPIKDVLLDINKWGIDHTFECIGNVNVMRQALESAHRGWGQSIIIGVAGAGQEISTRPFQLVTGRVWKGSAFGGVKGRSELPKMVEDSMKGDIELEPFVTHTMTLDQINKAFDLMHEGKSIRAVIHY

SEQ ID NO: 7325 - protein, 155 aa, Neisseria meningitidis; identical to SEQ ID NO: 5339

SEQ ID NO: 7326 - protein, 415 aa, Neisseria meningitidis
MQLTAVGLNHQTAPLSIREKLAFAAAALPKAVRNLARSNAATEAVILSTCNRTELYCVGDSEEIIRWLADYHSLPIEEIRPYLYALDMQETVRHAFRVACGLDSMVLGEPQILGQIKDAVRVAQEQESMGKKLNALFQKTFSVAKEVRTDTAVGENSVSMASASVKLAEQIFPDIGDLNVLFIGAGEMIELVATYFAAKSPRLMTVANRTLARAQELCDKLGVNAEPCLLSDLPAILHDYDVVVSSTASQLPIVGKGMVERALKQRQSMPLFMLDLAVPRDIEAEVGDLNDAYLYTVDDMVNIVQSGKEARQKAAAAAETLVSEKVAEFVRQQQGRQSVPLIKALRDEGEKARKQVLENAMKQLAKGATAEEVLERLSVQLTNKLLHSPTQTLNKAGEEDKDLVHAVAQIYHLDK

SEQ ID NO: 7327 - protein, 118 aa, Neisseria meningitidis; identical to SEQ ID NO: 680

SEQ ID NO: 7328 - protein, 138 aa, Neisseria meningitidis; identical to SEQ ID NO: 774

SEQ ID NO: 7329 - protein, 96 aa, Neisseria meningitidis
MDDLILYFLSGIFGNQVAECIIKNNREIKVPFIVLYAIFFTLIYTVALLFLSLIYWVNGAEIAWKGIGIFSMSVSFCIVFCLYLIDKAGRCKDKKQ

SEQ ID NO: 7330 - protein, 65 aa, Neisseria meningitidis; identical to SEQ ID NO: 127

SEQ ID NO: 7331 - protein, 275 aa, Neisseria meningitidis
MPELPEVETTLRGIAPHIEGKTVEAVVLRQLKLRWQINPDLGEILSGRQVLSCGRRAKYLLIRFQTGVLLIHLGMSGSLRIFTPSDGRIGRPDRHDHVDIVFSDGTVMRYRDPRKFGAILWYEGIEEHHPLLEKLGPEPLSEAFCADYLYARLKAQKRAVKLALMDNAVVVGVGNIYANESLFRAGISPHRPANRLKKKECALLVETVKAVLQRAIETGGSTLRDFVDSDGKSGYFQQEYTVYGRHNQPCPRCGGLVVKETLGQRGTFYCPNCQK

SEQ ID NO: 7332 - protein, 122 aa, Neisseria meningitidis; identical to SEQ ID NO: 3130

SEQ ID NO: 7333 - protein, 197 aa, Neisseria meningitidis
MVRTVKSYNGEADDLAGQIHTLPAVWVTYGGSKVEPASTGGVCGRYQDTAEFVVMVAARNLRNEQAQRQGGIDSREIGSNDLIRAVRRLLDGQRLGFADSRGLVPKAVRAIANHVLVQNAAVSIYAVEYAIRFNTCGLENDRYPERTDNPDDPNHIFTKYQGTLSEPWPDFEGLDGKIYDPQSADEIPVNLTLKDKQ

SEQ ID NO: 7334 - protein, 323 aa, Neisseria meningitidis
MTEYPGIGSPLFYGVFFAAVLVMIALDMFSLKKNGSHKVGVKEALAWSGLWVAVSCLFAGWLYFELAGNPGYGAAVAKEKVLEFFTGYILEKSLAVDNIFVFLMIFGYFKVAPQFQHRVLLYGVLGALVLRTVMIFVGAALVQQFEWILYLFGAFLLYTGIHMMKPEGDEKEDLANSRLLNTVKKVVPVGTEFHGEKFFTVENGKKIATPLFLVLVMIELSDVVFAVDSIPAVFAVTTDPFIVLTSNIFAILGLRAMYFLLADVAERFIFLKYGLAFVLGFIGVKMLVMHWVHIPISVSLSVVFGALGASVLTSLVYTKKTGR

SEQ ID NO: 7335 - protein, 169 aa, Neisseria meningitidis; identical to SEQ ID NO: 219

SEQ ID NO: 7336 - protein, 188 aa, Neisseria meningitidis; identical to SEQ ID NO: 2794

SEQ ID NO: 7337 - protein, 704 aa, Neisseria meningitidis
MDLLSVFHKYRLKYAVAVLTILLLAAVGLHASVYRTFTPENIRSRLQQSIAHTHRKISFDADIQRRLLPRPTVILKNLTITEPGGDQTAVSVQETKIGLSWKNLWSDQIQIEKWVVSSAELALTRDGKGVWNIQDLIDSQKRQASVNRIIVENSTVRLNFLQEQLILKEINLNLQSPDSSGQPFESSGILVWGKLSVPWKSRGLFLSNGIGPPEISPFHFEASTSLDGHGITISTTGSPSVRFNAGGADAAGLGLRADTSFRNLHLTAQIPALALRNNSIKIETVNGAFTAGGEYARWDGSFKLDKANLHSGIANIGNAEISGSFKTPRHQTNFSLNSPLVWTENKGLDAPRLYVSTLQDTVNRLPQPRFISRLDGSLSVPNLQNWNAELNGTFDRQTVAAKFRYTHEDAPHLEAAVALQKLNLTPYLDDVRQQNGKIFPDTLAKLSGDIEAHLKIGKVQLPGLQLDDMETYLHADKGHIALSRFKSGLYGGHTEGGISIANTRPATYRLQQNASNIQIQPLLQDLFGFHSFSGNGDAVIDLTAGGETRKELIRSLQGSLSLNISNGAWHGIDMDNILKNGISGKTADNAAPSTPFHRFTLNSEISDGISRHIDTELFSDSLYVTSNGYTNLDTQELSEDVLIRNAVHPKNKPIPLKITGTVDKPSITVDYGRLTGGINSRKEKQKILEDTLLEQWQWLKPKEP

SEQ ID NO: 7338 - protein, 671 aa, Neisseria meningitidis
MKSYPDPYRHFENLDSAETQNFAAEANAETRARFLENDKARALSDGILAQLQDTRQIPFCQEHRARMYHFHQDAEYPKGVYRVCTAATYRSGYPEWKILFSVADFDELLGDDVYLGGVSHLVEQPNRALLTLSKLGSDTAYTLEVDLEAGELVEGGFHFPAGKNHVSWRDENSVWVCPAWNERQLTQSGYPREVWLVERGKSFEESLPVYQIGEDGMMVNAWRYLDPQGSPIDLIEASDGFYTKTYLRVSAEGEAKPLNLPNDCDVVGYLAGHLLLTLRKDWNRANQSYPSGALVAVKLNRGELGAAQLLFAPDETQALESVETTKRFVVASLLENVQGRLKAWRFADGKWQEVELPRLPSGALEMTDQPWGGDVVYLAASDFTTPLTLFALDLNVMELTVMRRQPQQFDSDGINVQQFWTTSADGERIPYFHVGKNAAPDMPTLVYAYGGFGIPELPHYLGSIGKYWLEEGNAFVLANIRGGGEFGPRWHQAAQGISKHKSVDDLLAVVRDLSERGISSPEHIGLQGGSNGGLITAAAFVREPQSIGALVCEVPLTDMIRYPLLSAGSSWTDEYGNPQKYEVCKRRLGELSPYHNLSDGIDYPPALITTSLSDDRVHPAHALKFYAKLRETSAQSWLYSPDGGGHTGNGTQRESADELACVLLFLKEFLG

SEQ ID NO: 7339 - protein, 271 aa, Neisseria meningitidis; identical to SEQ ID NO: 3345

SEQ ID NO: 7340 - protein, 96 aa, Neisseria meningitidis; identical to SEQ ID NO: 6139

SEQ ID NO: 7341 - protein, 377 aa, Neisseria meningitidis; identical to SEQ ID NO: 1690

SEQ ID NO: 7342 - protein, 72 aa, Neisseria meningitidis
MLKTLTFAALHFSVAFSVTYVLTGSIGVSGAVALVEPLINTVVFYFHEKAWNLYEKNKTVKQTQPFQLHRCS

SEQ ID NO: 7343 - protein, 150 aa, Neisseria meningitidis; identical to SEQ ID NO: 3757

SEQ ID NO: 7344 - protein, 104 aa, Neisseria meningitidis
MKLIYTVIKIIILLLFLLLAVINTDAVTFSYLPGQKFDLPLIVVLFGAFVVGIIFGMFALFGRLLSLRGENGRLRAEVKKNARLTGKELTAPPAQNAPESTKQP

SEQ ID NO: 7345 - protein, 217 aa, Neisseria meningitidis
MKFKYVFLLACVVVSLSYRLNAAPMFNDNPVVYGKIKVQSWKERRDFNIVKQDLDFSCGAASVATLLNNFYGQKLTEEEVLEKLDKEQMRASFEDMRRIMPDLGFEAKGYALSFEQLAQLKIPVIVYLKYRKDDHFSVLRGIDGNTVLLADPSLGHVSMSRAQFLDAWQTREGNLAGKILAVIPKKAETISNKLFFTQHPKRQTEFTVGQIRQARAE

SEQ ID NO: 7346 - protein, 89 aa, Neisseria meningitidis; identical to SEQ ID NO: 1367

SEQ ID NO: 7347 - protein, 51 aa, Neisseria meningitidis
VLWVKRIQRQIDGSLLLISDNSTYPPMPLALAEHPDIQIIGQVVQVSKDLN

SEQ ID NO: 7348 - protein, 188 aa, Neisseria meningitidis
MPSEACWRFRRHILIEKMMTLKTAPLKRRFAAMLYEMLLVGAATCLAALIAGIAAIFLNPVSIAVSALVTSILIMGAWWLYFRANWHGQGQTLAMRTWKIGLCDLNGIQPSLHLLRLRFIWACIFIVFIPMLAYAGLRHFLGIPPKGAAGAALIWLILPWGFALLNPDRQFLYDFLAGTRLVAVKGKP

SEQ ID NO: 7349 - protein, 214 aa, Neisseria meningitidis
MKLKHLLPLLLSAVLSAQAYALTEGEDYLVLDKPIPQEQSGKIEVLEFFGYFCVHCHHFDPLLLKLGKALPSDAYLRTEHVVWQPEMLGLARMAAAVNLSGLKYQANPAVFKAVYEQKIRLENRSVAGKWALSQKGFDGKKLMRAYDSPEAAAAALKMQKLTEQYRIDSTPTVIVGGKYRVIFNNGFDGGVHTIKELVAKVREERKRQTPAVQK

SEQ ID NO: 7350 - protein, 592 aa, Neisseria meningitidis
MTVLKLSHWRVLAELADGLPQHVSQLARMADMKPQQLNGFWQQMPAHIRGLLRQHDGYWRLVRPLAVFDAEGLRELGERSGFQTALKHECASSNDEILELARIAPDKAHKTICVTHLQSKGRGRQGRKWSHRLGECLMFSFGWVFDRPQYELGSLSPVAAVACRRALSRLGLDVQIKWPNDLVVGRDKLGGILIETVRTGGKTVAVVGIGINFVLPKEVENAASVQSLFQTASRRGNADAAVLLETLLVELDAVLLQYARDGFAPFVAEYQAANRDHGKAVLLLRDGETVFEGTVKGVDGQGVLHLETAEGKQTVVSGEISLRSDDRPVSVPKRRDSERFLLLDGGNSRLKWAWVENGTFATVGSAPYRDLSPLGAEWAEKADGNVRIVGCAVCGEFKKAQVQEQLARKIEWLPSSAQALGIRNHYRHPEEHGSDRWFNALGSRRFSRNACVVVSCGTAVTVDALTDDGHYLGGTIMPGFHLMKESLAVRTANLNRHAGKRYPFPTTTGNAVASGMMDAVCGSVMMMHGRLKEKTGAGKPVDVIITGGGAAKVAEALPPAFLAENTVRVADNLVIYGLLNMIAAEGREYEHI

SEQ ID NO: 7351 - protein, 415 aa, Neisseria meningitidis
MFSLEAWIGLRYLRAKKRNGFMSFITMVSIAGIALGVTALIVVLSVMNGFQKEIRGQLLNVAPHAEIGYIDNTDTDWRNLLRFTENRKGILAAAPYVSNQALLANAGEIRGVQMRGILPSEERKVVEYGDKMPAGKFEDLIPGEFDIILGVGLAEALGAEVGNKVTVITPEGNVTPAGVVPRLKQFTVVGLVKTGVYEVDNSLAMTHIQDARVLYRLDKEVAGLRLKLADPQNAPALTATLIPEAQRDAVWVRDWTYSNRSYFEAVELEKRMMFIILTLIIAVAAFNLVSSLVMAVTEKQADIAILRTLGLSPAGVMKIFMVQGAFSGFFGTLAGVVCGVLLGWNVGRVVAFFENLLGVHLINSQVYFIDYLPSDVDMGDVALIACISLGLSFVATLYPSRRASKTQPAEALRYE

SEQ ID NO: 7352 - protein, 296 aa, Neisseria meningitidis; identical to SEQ ID NO: 337

SEQ ID NO: 7353 - protein, 484 aa, Neisseria meningitidis; identical to SEQ ID NO: 2793

SEQ ID NO: 7354 - protein, 63 aa, Neisseria meningitidis
MNTPFSFFMNCFSIPETPERSDSRLRYAQKKSDIRVATETFTKTCDPNKIRYGKGDKLQALNE

SEQ ID NO: 7355 - protein, 943 aa, Neisseria meningitidis
MNKKHGFPLTLTALAIATAFPAYAAQAGGATPDAAQTQSLKEITVRAAKVGRRSKEATGLGKIVKTSETLNKEQVLGIRDLTRYDPGVAVVEQGNGASGGYSIRGVDKNRVAVSVDGVAQIQAFTVQGSLSGYGGRGGSGAINEIEYENISTVEIDKGAGSSDHGSGALGGAVAFRTKEAADLISDGKSWGIQAKTAYGSKNRQFMKSLGAGFSKDGWEGLLIRTERQGRETRPHGDIADGVEYGIDRLDAFRQTYDIKRKTREPFFSVEGERESKPVAKLAGYGKYLNNQLNRWVKERIEQNQPLSAEEEAQVREAQARHENLSAQAYTGGGRILPDPMDYRSGSWLAKLGYRFGGRHYVGGVFEDTKQRYDIRDMTEKQYYGTDEAEKFRDKSGVYDGDDFRDGLYFVPNIEEWKGDKNLVRGIGLKYSRTKFIDEHHRRRRMGLLYRYENEAYSDNWADKAVLSFDKQGVATDNNTLKLNCAVYPAVDKSCRASADKPYSYDSSDRFHYREQHNVLNASFEKSLKNKWTKHHLTLGFGYDASKAISRPEQLSHNAARISESTGFDENNQDKYLLGKPEVVEGSVCGYIETLRSRKCVPRKINGSNIHISLNDRFSIGKYFDFSLGGRYDRKNFTTSEELVRSGRYVDRSWNSGILFKPNRHFSVSYRASSGFRTPSFQELFGIDIYHDYPKGWQRPALKSEKAANREIGLQWKGDFGFLEISSFRNRYTDMIAVADHKTKLPNQAGQLTEIDIRDYYNAQNMSLQGVNILGKIDWNGMYGKLPEGLYTTLAYNRIKPKSVSNRPGLSLRSYALDAVQPSRYVLGFGYDQPEGKWGANIMLTYSKGKNPDELAYLAGDQKRYSTKRASSSWSTADVSAYLNLKKRLTLRAAIYNIGNYRYVTWESLRQTAESTANRHGGDSNYGRYAAPGRNFSLALEMKF

SEQ ID NO: 7356 - protein, 238 aa, Neisseria meningitidis
MTDTAENQTQNNWQAGHPRSIRSFVLRQSHMTAAQQRAIDTLWDSFGIDYQATPADLDARFGSSRPKILEIGFGMGTATAEIARRLPETDFLAIDVHGPGVGNLLKLIDENHLENIRVMRHDAVEVVENMLQDGSLDGIHIFFPDPWHKKRHHKRRLIQAPFIAKLLPKLKTGGYIHLATDWEEYAQQMLEVLSSFDSLQNTAADYAPTPDYRPETKFEARGKRLGHGVWDLVFKRIG

SEQ ID NO: 7357 - protein, 307 aa, Neisseria meningitidis
MENQRPLLGFALALLAAMTWGTLPIAVRQVLKFVDAPTLVWVRFTVAAAVLFVLLALGGRLPKRRDFSWCSFRLLLLGVAGISANFVLIAQGLHYISPTTTQVLWQISPFTMIVVGVLVFKDRMTAAQKIGLVLLLAGLLMFFNDKFGELSGLGAYAKGVLLCAAGSMAWVCYAVAQKLLSAQFGPQQILLLIYAASAAVFLPFAEPAHIGSLDGTLAWVCFAYCCLNTLIGYGSFGEALKHWEASKVSAVTTLLPVFTVIFSLLGHYVMPDTFAAPDMNGLGYAGALIVVGGAVTAAVGDRLFKRR

SEQ ID NO: 7358 - protein, 640 aa, Neisseria meningitidis
MQLLAAEGIHQHQLNVQKSTRFIGIKVGKSNYSKNELNETKLPVRVIAQTAKTRSGWDTVLEGTEFKTTLSGADIQAGVGEKARADAKIILKGIVNRIQTEEKLESNSTVWQKQAGSGSTVETLKLPSFEGPALPKLTAPGGYIADIPKGNLKTEIEKLAKQPEYAYLKQLQTVKDVNWNQVQLAYDKWDYKQEGLTGAGAAIIALAVTVVTSGAGTGAVLGLNGAAAAATDAAFASLASQASVSFINNKGNIGNTLKELGRSSTVKNLMVAVATAGVADKIGASALNNVSDKQWINNLTVNLANAGSAALINTAVNGGSLKDNLEANILAALVNTAHGEAASKIKQLDQHYIAHKIAHAIAGCAAAAANKGKCQDGAIGAAVGEILGETLLDGRDPGSLNVKDRAKIIAKAKLAAGAVAALSKGDVSTAANAAAVAVENNSLNDIQDRLLSGNYALCMSAGGAESFCESYRPLGLPHFVSVSGEMKLPNKFGNRMVNGKLIINTRNGNVYFSVGKIWSTVKSTKSNISGVSVGWVLNVSPNDYLKEASMNDFRNSNQNKAYAEMISQTLVGESVGGSLCLTRACFSVSSTISKSKSPFKDSKIIGEIGLGSGVAAGVEKTIYIGNIKDIDKFISANIKK

SEQ ID NO: 7359 - protein, 147 aa, Neisseria meningitidis; identical to SEQ ID NO: 2466

SEQ ID NO: 7360 - protein, 359 aa, Neisseria meningitidis; identical to SEQ ID NO: 2157

SEQ ID NO: 7361 - protein, 78 aa, Neisseria meningitidis
LRILRQTALKWRGGDCGDFSCLFQKSGARSLGETEKKAIISWLADREDVATLYATPLVDGFYGDDGWENYSETYKQAD

SEQ ID NO: 7362 - protein, 328 aa, Neisseria meningitidis
MQYRIRRENEAPEAKNAGETLWERDIMREVLLSAYQDRRRERMWKNIWRAVSTLILVALIAGIFRKDEAALQLAGNTPHTAVVNLYGEIGNGVEDQVKKLKDGMEAAYKNPQAKAIVIRANSPGGSPVVSNTAFEEIRRLKAQHPGIPVYLVAEDMCASGCYYIAAAADKIYADPSSIVGSIGVIGSSFDATGLMEKIGVKRRVKIAGSNKGMGDPFSPETPEQSKIWEEMLTGIHGEFIKAVKTGRGGRLKFRQYPDVFSGRVYTGADALKVGLVDGLGNIYSVARDVVKAPDVVDYTPKDDFGRILGRRFGAELKASVREALQAVR

SEQ ID NO: 7363 - protein, 288 aa, Neisseria meningitidis
MMKTLLPFFGVVRVSGEDRQTFLHGQLSNDINHLQTGQACYATYNTPKGRVIANMIVVNRGGDLLLIMAQDLLEATVKRLRMFVLRAKAVFEILEDYAVGAELEASAEPLAAQEPSLAFTAECGSDGICSVVLPHRGILHIAPKNALPPYDAAAENAWRLHEIRSGYPWICAATKETAVAQMLNQHIIGGVHFKKGCYPGQEIIARAQYRGQVKRGLAVLSGNSAVEAGTLLTADGEEAGIVLDSVQDSENFTALTVIKFSAAQKTLTVPNGGIFKAVHLFFKTENAE

SEQ ID NO: 7364 - protein, 488 aa, Neisseria meningitidis
MAEATDVVLVGGGIMSATLGVLLKELEPSWEITLIERLEDVALESSNAWNNAGTGHSALCELNYAPLGANGIIDPARALNIAEQFHVSRQFWATLVAEGKLEDNSFINAVPHMSLVMNEDHCSYLQKRYDAFKTQKLFENMEFSTDRNKISDWAPLMMRGRDENQPVAANYSAEGTDVDFGRLTRQMVKYLQGKGVKTEFNRHVEDIKRESDGAWVLKTADTRNPDGQLTLRTRFLFLGAGGGALTLLQKSGIPEGKGYGGFPVSGLFFRNSNPETAEQHNAKVYGQASVGAPPMSVPHLDTRNVDGKRHLMFGPYAGFRSNFLKQGSLMDLPLSIHMDNLYPMLCAGWANMPLTKYLLGELRKTKEERFASLLEYYPEANPDDWELITAGQRVQIIKKDSEKGGVLQFGTEIVAHADGSLAALLGASPGASTAVPLMIRLMHQCFPERAPSWEDRLKELVPGYGIKLNENPERADEIIAYTAKVLDI

SEQ ID NO: 7365 - protein, 484 aa, Neisseria meningitidis
MSIEPTPPNLENDGIENDVERVSADFDRVHSLCEILEPAFEQIENGTPLEDAPLRDKLTELTVLLSELHPADVAAVLESLPPRERNIVWILVKPEDDGEVLLEVSDAVRETLIESMDKDELLAAVDDLDADELAELADDLPHQVVYEALQTRDEEERAQVKAAMSYEDNQVGAIMDFELVSIRADVACEVVLRYLRRFDSLPDHTDKIFVVDENDVLQGVLPIRKLLVADPEDLVENVMAKDVVRFRAEDDVEEAAQAFERYDLVTAPVVDENKKLIGRITIDEMVDVIREESEADMLNMAGLQEEEDLFAPVWDSVKNRWMWLAVNLCTAFLASRVIGAFEGSIEKIVALAALMPIVAGIGGNSGNQTITMIVRAMAMGQLTDMQAGRLLKKEVGVALVNGIIWGTVMGAVSWLLYGSLGIGLVMIAAMTLNLLLAATVGVLIPVVMEKFGRDPALGSSVLITAVTDSGGFLIFLGLATLFLL

SEQ ID NO: 7366 - protein, 94 aa, Neisseria meningitidis; identical to SEQ ID NO: 6698

SEQ ID NO: 7367 - protein, 636 aa, Neisseria meningitidis
MNILSVENASFAIGHVALLDKTSFQLDSGEKVGLIGRNGAGKSSFLKILAGLQKLDDGQIIVQNNLKIVYVPQESFFDKDATVFDTVAEGLGEIRDLLRRYHHVSHDLEHNSDDVLLKELNELQLEIEAKDGWKLDAAVKQTLGELGLPENEKIGNLSGGQKKRVALAQAWVQKPDVLLLDEPTNHLDIDAIIWLENLLKAFEGSLVVITHDRRFLDNIATRIVELDRGILRSYPGSFSKYSEKKAQELAVEAEHNRLFDKFHAQEEAWIRKGIEARRTRNEGRVRRLEELRRQRAERRNVQGQVNFKLDSGEKSGKIIAELEHASFAYGGKVIMDKFSAILQRGDKIGLIGPNGIGKTTFLKLILGELQPTYGRIRIGSKQEVAYFDQFRSALNENDTVFYTLGQGNDYVEVGGKKKHVMSYLEDFLFHPARAQSPVSSLSGGERNRLLLAKLFTRPANILVLDEPTNDLDIDTQELLEDLLRDYQGTVFLVSHDRMFLDNVITQSIVFEGQGRLKEYIGGYQDYIDAKSREDKIQTASAPKASDAEPAKEKPKANRTVKLSYKEQRELDALPDEIAALEAEQAEINTQLSYPEIFKDYEKAGALQNRAEEIEMLLLEKLERWELLETKRNGNAV

SEQ ID NO: 7368 - protein, 114 aa, Neisseria meningitidis; identical to SEQ ID NO: 402

SEQ ID NO: 7369 - protein, 310 aa, Neisseria meningitidis
MYEIKQPFHSGYLQVSEIHQIYWEESGNPDGVPVIFLHGGPGAGASPECRGFFNPDVFRIVIIDQRGCGRSRPYACAEDNTTWDLVADIEKVREMLGIGKWLVFGGSWGSTLSLAYAQTHPERVKGLVLRGIFLCRPSETVWLNEAGGVSRIYPEQWQKFVAPIAENRRNRLIEAYHGLLFHQDEEVCLSAAKAWADWESYLIRFEPEEVDEDAYASLAIARLENHYFVNGGWLQGDRAILNNIGKIRHIPTIIVQGRYDLCTPMQSAWALSKAFPEAELRVVQAGHRAFDPPLVDALVQAVEDILPHLL

SEQ ID NO: 7370 - protein, 147 aa, Neisseria meningitidis
MPFRLFLGILCGLSMVAPVYAQGQPDTVGDFIQKKKVIVDTSKAELCFADDRQCHPVLIGVATPKGTFGLTLNSTDKPGYGGEVIGFKQEGDFLFALHRVWNQIPSERRNERIASPSVSDRIMTNGCINVSDAVYEKLRHYFVLEVI

SEQ ID NO: 7371 - protein, 107 aa, Neisseria meningitidis
MMTESEFIRASEALFEHIEDQIDENGWDFDCRFAGNVLTIEAGDGAQIIVNRHTPNQELWIAAKSGGYHFAEQNGKWLATRDGRDFYDVLNEALSAASGEAVEIAEL

SEQ ID NO: 7372 - protein, 404 aa, Neisseria meningitidis
MEWEFNSYYTLIAATLVLLVGKFLVQKIKFLRDFNIPEPVAGGLIAAIVLFALHEAYGVSFKFEKPLQNAFMLIFFTSIGLSADFSRLKAGGLPLVVFTAIVGGFILVQNFVGVGLATALGLDPLIGLITGSVSLTGGHGTSGAWGPNFETQYGLVGATGLGIASATFGLVFGGLIGGPVARRLINKMGRKPVENKKQDQDDNADDVFEQAKRTRLITAESAVETLAMFAACLAFAEIMDGFDKEYLFDLPKFVWCLFGGVVIRNILTAAFKVNMFDRAIDVFGNASLSLFLAMALLNLKLWELTGLAGPVTVILAVQTVVMVLYATFVTYVFMGRDYDAAVLAAGHCGFGLGATPTAVANMQSVTHTFGASHKAFLIVPMVGAFFVDLINAAILTGFVNFFKG

SEQ ID NO: 7373 - protein, 185 aa, Neisseria meningitidis
MKPKFKTVLTALLLAVSLPSMAATHVLMETDMGNIRLVLDESKAPKTVANFVRYARKGFYDDTVFHRVIDGFVIQGGGLTEDLAQKASDKAVANESGNGLKNTAGTIAMARTTAPDSATSQFFINLADNASLDYKNGQYGYTVFGRVESGMNTVSKIARVKTATRGFYQNVPVQPVKIRRVVVGQ

SEQ ID NO: 7374 - protein, 767 aa, Neisseria meningitidis
MNTQAHAPHTDSNTLMLGRYAERAYLEYAMSVVKGRALPEVSDGQKPVQRRILFAMRDMGLTAGAKPVKSARVVGEILGKYHPHGDSSAYEAMVRMAQDFTLRYPLIDGIGNFGSRDGDGAAAMRYTEARLTPIAELLLSEINQGTVDFVPNYDGAFDEPLHLPARLPMVLLNGASGIAVGMATEIPPHNLNEVTQAAIALLKKPTLETADLMQYIPAPDFAGGGQIITPADELRRIYETGKGSVRVRARYEIEKLARGQWRVIVTELPPNANSAKILAEIEEQTNPKPKAGKKQLNQDQLNTKKLMLDLIDRVRDESDGEHPVRLVFEPKSSRIDTDTFINTLMAQTSLEGNVSMNLVMMGLDNRPAQKNLKTILQEWLDFRTVTVTRRLKFRLNQVEKRLHILEGRLKVFLHIDEVIKVIRESDDPKADLMAAFGLTEIQAEDILEIRLRQLARLEGFKLEKELNELREEQGRLNILLSDENEKRKLIVKEMQADMKQYGDARRTLVEEAGRAVLTQTTADEPITLILSEKGWIRSRAGHNLDLSQTAFKEGDCLKQTLEGRTVLPVVILDSSGRTYTLDAAEIPGGRGDGVPVSSLIELQNGAKPVAMLTGLPEQHYLLSSSSGYGFITKLGDMVGRVKAGKVVMTADSGETVLPPVAVYASSFINPDCKIIAATSQNRALAFPIGELKIMAKGKGLQIIGLNAGESMTHTAVSSELEILIESEGRRGAAHKDRIPISLLEAKRGKKGRLLPISGSLKQLSSPK

SEQ ID NO: 7375 - protein, 369 aa, Neisseria meningitidis
MKLPIKRHTLFNPSEAAQHFKASTTIYLKGNQMQVYYDKDADLSLIKGKTVAIIGYGSQGHAHAANLKDSGVNVVIGLRQGSSWKKAEAAGHVVKTVAEATKEADVVMLLLPDETMPAVYHAEVTANLKEGATLAFAHGFNVHYNQIVPRADLDVIMVAPKGPGHTVRSEYKRGGGVPSLIAVYQDNSGKAKDIALSYAAANGGTKGGVIETTFREETETDLFGEQAVLCGGVVELIKAGFETLTEAGYAPEMAYFECLHEMKLIVDLIFEGGIANMNYSISNNAEYGEYVTGPEVVNASSKEAMRNALKRIQTGEYAKMFIQEGNVNYASMTARRRLNADHQVEKVGAQLRAMMPWITANKLVDQDKN

SEQ ID NO: 7376 - protein, 287 aa, Neisseria meningitidis
MRILLTGSKSQLARCLRDRLPEDWETIATDSASLDITDADAVCNMVKSFQPDAIVNTAAYTAVDKAEGDAAAAFAVNASAVYNLALAAHRAHARFIHISTDYVFDGKGKRPYQESDFTNPSNVYGQSKTAGELLALSANPDSLILRTSWLFSEYGDNFIRTMLNLARERSPLSAVHNQIGCPTYAGDLSATIIRLLQHSNPVRGIYHYAGSKSVSWYEFAQHIFQAASQQQTSFPVPELTAVSDKEYPTAAPRPAYSILDCRKIENDFGIKPSDWQKALAQVVSKLL

SEQ ID NO: 7377 - protein, 230 aa, Neisseria meningitidis; identical to SEQ ID NO: 1269

SEQ ID NO: 7378 - protein, 704 aa, Neisseria meningitidis
MFLFSDGLQSINNNNRRKRIVKNAYIPSRGIRKIPHLSTLLPEFHICKDGKEAEAVVGWGLRPTTHKARAFAAEHQLPFIALEDGFLRSLGLGVAGYPPYSIVYDDIGIYYDTTRPSRLEQLILAADTMPSETLAQAQQAMDFILQHHLSKYNHAPELSDDHPLRSPSKPETVLIIDQTFGDMAIQYGGADASTFELMFQTALNENPQADIWVKTHPDVLCGKKQGYLTQLAQQHRVHLLAEDINPISLLQNVDKVYCVTSQMGFEALLCGKPLTTFGLPWYAGWGVSDDRHPEINRLVQTQRRATRNLLQLFAAAYLQYSRYLNPNTGEAGSLFDVIDYLATVKRKNDKLRGELYCVGMSLWKRAVAKPFFNVPSCRLKFISSTQKLARVKLSDDARILAWGNGKEAIVRFAEQHHIPLLRMEDGFIRSVGLGSNLVPPLSLVTDDMSIYFNAETPSRLEYILQNQNFDDQDFQTALKLQKMLTENHISKYNVGSSDFTAPSTDKTVILVPGQVEDDASIRYGSPQIYRNLDLLRTVRERNPNAYIIYKPHPDVVSGNRIGHISPEDAARYADQTAEQADILTCLQYADEIHTMTSLTGFEALLRGKKVSCYGLPFYAGWGLTQDLLPIPRRSRRLELWQLIAGTLIHYPDYIHPETHQAINAETAAQILIRQKNMQKNNNGLHRGCFAKKLGKIKQLYRSFK

SEQ ID NO: 7379 - protein, 164 aa, Neisseria meningitidis
MNNRHFAVIALGSNLENPAQQVRAALDTLSSHPDIRLKQASSLYMTAPVGYDNQPDFVNAVCTVSTTLDGIALLAELNRIEADFGRERSFRNAPRTLDLDIIDFDGISSDDTRLTLPHPRAHERSFVIRPLAEILPDFVLGKHGKVAELSKRLGNQGIRLLPDR

SEQ ID NO: 7380 - protein, 458 aa, Neisseria meningitidis
MKHIHIIGIGGTFMGGLAAIAKEAGFEVSGCDAKMYPPMSTQLEALGIDVYEGFDAAQLDEFKADVYVIGNVAKRGMDVVEAILNLGLPYISGPQWLSENVLHHHWVLGVAGTHGKTTTASMLAWVLEYAGLAPGFLIGGVPENFGVSARLPQTPRQDPNSQSPFFVIEADEYDTAFFDKRSKFVHYRPRTAVLNNLEFDHADIFADLGAIQTQFHYLVRTVPSEGLIVCNGRQQSLQDTLDKGCWTPVEKFGTEHGWQAGEANADGSFDVLLDGKTAGRVKWDLMGRHNRMNALAVIAAARHVGVDIQTACEALGAFKNVKRRMEIKGTANGITVYDDFAHHPTAIETTIQGLRQRVGGARILAVLEPRSNTMKLGTMKSALPVSLKEADQVFCYAGGVDWDVAEALAPLGGRLNVGKDFDAFVAEIVKNAEVGDHILVMSNGGFGGIHGKLLEALR

SEQ ID NO: 7381 - protein, 89 aa, Neisseria meningitidis; identical to SEQ ID NO: 4489

SEQ ID NO: 7382 - protein, 158 aa, Neisseria meningitidis
MQKIPLTVRGAELLKQELQQLKSVARPEVIEAIAEARSHGDLSENAEYEAAKERQGFIEGRISELEHKLSVAHIINPTEIHAEGKIVFGTTVTLEDLETEEHVIYQIVGEDEADIKQGKIYVGSPIARALIGKEEGDTAEVQAPGGVREYDIIEVRYI

SEQ ID NO: 7383 - protein, 161 aa, Neisseria meningitidis; identical to SEQ ID NO: 1189

SEQ ID NO: 7384 - protein, 93 aa, Neisseria meningitidis
MNTIPLHTILKLMAHPERMAILIQLLDSERNIAELAKSLSLPATAVSNHLNRLRVEGLVDFTRYHRIIEYRLVSEEAAAILHTVRDLENKRVA

SEQ ID NO: 7385 - protein, 164 aa, Neisseria meningitidis
MRKSRLSQYKQNKLIELFVAGATARTAAELVGVNKNTAAYYFHRLRLLIYQNSPHLEMFDGEVEADESYFGGQRKGKRGRGAAGKVAVFGLLKRNGKVYTVTVPNTQTATLFPIIREQVKPDSIIYTDCYRSYDVIRCERIPFLRNFVFVSITAHILLNDKTIL

SEQ ID NO: 7386 - protein, 302 aa, Neisseria meningitidis
  misc_feature 298, 299, 300: 'Xaa' is any amino acid
MRKKLTALVLSALPLAAVADVSLYGEIKAGVEGRNFQLQLTEPPSKSQPQVKVTKAKSRIRTKISDFGSFIGFKGSEDLGEGLKAVWQLEQDVSVAGGGATQWGNRESFVGLAGEFGTLRAGRVANQFDDASQAIDPWDSNNDVASQLGIFKRHDDMPVSVRYDSPDFSGFSGSVQFVPIQNSKSAYTPAHYTRQNNADVFVPAVVGKPGSDVYYAGLNYKNGGFAGSYAFKYARHANVGRDAFELFLLGSTSDEAKGTDPLKNHQVHRLTGGYEEGGLNLALAAQLDLSENGDKAKXXXHT

SEQ ID NO: 7387 - protein, 74 aa, Neisseria meningitidis
MMKNKYILIKAAISITAISIFYLLTQESSGKTEEPSYFLMFMFLNLLWFEENKTVMAAVTAMIAAHFIFVALSD

SEQ ID NO: 7388 - protein, 140 aa, Neisseria meningitidis
MAYATVEDMVARFGELEVLQLTDRNNEGLIDREVAQTALVDATAEIDAYLGRFRRPFEDLPPILVRLCCDIARYRLTAAQGVLITDEIRNRYKIDVLDLLRAMAKGEVQLGVDDSGEEVAAGEDGIVFVNGKNKVFGRDH

SEQ ID NO: 7389 - protein, 455 aa, Neisseria meningitidis
MLDLHTEFSRLLPADEIAEPSPTLLKDQRNRFTSAPDIILQPLSVKSVQTIMRFCHQHRIPVTPQGGNTGLCGAAVSENGVLLNLSKLNRIRSINLSDNCITVEAGSVLQTVQQAAEASNRLFPLSLASEGSCQIGGNIACNAGGLNVLRYGTMRDLVIGLEVVLPNGELVSHLHPLHKNTTGYDLRHLFIGSEGTLGIITAATLKLFANPLDKATAWVGIPDIESAVRLLTETQAHFAERLCSFELIGRFAAELSSEFSKLPLPTHSEWHILLELTDSLPDSNLDDRLVEFLYKKGFTDSVLAQSEQERIHMWALRENISASQRKLGTSIKHDIAVPIGRVADFVRRCAKDLEQNFKGIQIVCFGHLGDGSLHYNTFLPEILSNEVYRYENDINSTVYRNVLACNGTIAAEHGIGIIKKQWLDKVRTPAEIALMKSIKQHLDPYNIMNPGKLLP

SEQ ID NO: 7390 - protein, 255 aa, Neisseria meningitidis
MALAKRIIPCLDVKDGRVVKGVNFIGLRDAGDPVEAAKRYNGEGADELTFLDITASSDNRDTILHIIEEVAGQVFIPLTVGGGVRTVADIRRLLNAGADKVSINTAAVTRPDLIDEAAGFFGSQAIVAAVDAKAANPENTRWEIFTHGGRNPTGLDAVEWAVEMQKRGAGEILLTGMDRDGTKQGFNLPLTRAVAEAVDIPVIASGGVGNVRHLIEGITEGKADAVLAAGIFHFGEIAIREAKRAMREAGIEVRL

SEQ ID NO: 7391 - protein, 205 aa, Neisseria meningitidis
MKKTIFNITKMDCPSEEQLIRMRLKDVSDIYELQFDIAGRCLTVYHDNQDTTILQVLEPLNFDSHIISTEVIVDKIVFNKPDEHLEKRLLYQVLMINFVFFIIECSVGIFANSMGLIADSLDMLADSFVYILALSAIGMTLAYKKRVAFLAGITQIILALFGVIEVIRRFIGAEQLPNYQLMIGTAFLALIANWLCLYLLSKNQK

SEQ ID NO: 7392 - protein, 861 aa, Neisseria meningitidis
MLEAYRKAAAERAALGIPALPLNAQQTADLVELLKSPPAGEGEFLVELLAHRVPPGVDDAAKVKASFLAAVAEGSASSPLISPEYATELLGTMLGGYNIHALIELLDDDKLASIAAKGLKHTLLMFDSFHDVQEKAEKGNKYAQEVLQSWADAEWFASRAKVPEKITVTVFKVDGETNTDDLSPAPDAWSRPDIPLHALAMLKNPRDGITPDKPGEVGPIKLLEELKAKGHPVAYVGDVVGTGSSRKSATNSVIWHTGEDIPFVPNKRFGGVCLGGKIAPIFFNTQEDSGALPIEVDVSALKMGDVVDILPYEGKIVKNGETVAEFELKSQVLLDEVQAGGRINLIIGRGLTAKAREALKLPASTAFRLPQAPAESKAGFTLAQKMVGRACGLPEGQGVRPGTYCEPRMTTVGSQDTTGPMTRDELKDLACLGFSADMVMQSFCHTAAYPKPVDVKTHKELPAFISTRGGVSLRPGDGVIHSWLNRLLLPDTVGTGGDSHTRFPIGISFPAGSGLVAFAAATGVMPLDMPESVLVRFSGKLQPGVTLRDLVNAIPLYAIKQGLLTVAKAGKKNIFSGRILEIEGLPDLKVEQAFELTDASAERSAAGCTVKLNKEPIIEYMKSNVVLMKNMIANGYQDPRTLERRIKAMEKWLANPELLEADKDAEYAAVIEINMDDIKEPIIACPNDPDDVCFMSERSGTKIDEVFIGSCMTNIGHFRAASKLLEGKADTPVRLWIAPPTKMDAKQLSDEGHYGVLGRAGARMEMPGCSLCMGNQAQVREGATVMSTSTRNFPNRLGKNTFVYLGSAELAAICSKLGKIPTVEEYQANIGIINEQGDKIYRYMNFNEIDSYNEVAETVNV

SEQ ID NO: 7393 - protein, 274 aa, Neisseria meningitidis
MLKKFVLGGIAALVLAACGGSEGGSGASSAPAQSAVSGSLIERINNKGTVTVGTEGTYAPFTYHDKDGKLTGYDVEVTRAVAEKLGVKVEFKETQWDSMMAGLKAGRFDVVANQVGLTSPERQATFDKSDPYSWSGAVLVVRNDSNIKSIADIKGVKTAQSLTSNYGEKAKAAGADLVAVDGLAQSLTLIEQKRADATLNDELAVLDYLKKNPNAGVKIVWSAPADEKVGSGLIVNKGNDEAVAKFSTAINELKADGTLKKLGEQFFGKDISVQ

SEQ ID NO: 7394 - protein, 758 aa, Neisseria meningitidis
MTTLHFSGFPRVGAFRELKFAQEKYWRKEISEQELLAVAKDLREKNWKHQAAANADFVAVGDFTFYDHILDLQVATGAIPARFGFDSQNLSLEQFFQLARGNKDQFAIEMTKWFDTNYHYLVPEFHADTEFKANAKHYVQQLQEAQALGLKAKPTVVGPLTFLWVGKEKGTVEFNRLSLLQKLLPVYVEILNALVEAGAEWIQIDEPALAVDLPKEWVEAYKDVYATLSKVNAKILLSTYFGSVAEHAALLKALPVDGLHIDLVRAPEQLDAFADYDKVLSAGVIDGRNIWRANLNKVLETVEPLQAKLGDRLWISSSCSLLHTPFDLSVEEKLKANKPDLYSWLAFTLQKTQELRVLKAALNEGRDSVAEELAASQAAADSRANSSEIHRADVAKRLADLPANADQRKSPFADRIKAQQAWLNLPLLPTTNIGSFPQTTEIRQARAAFKKGELSAADYEAAMKKEIALVVEEQEKLDLDVLVHGEAERNDMVEYFGELLSGFAFTQYGWVQSYGSRCVKPPIIFGDVSRPEAMTVAWSTYAQSLTKRPMKGMLTGPVTILQWSFVRNDIPRSTVCKQIALALNDEVLDLEKAGIKVIQIDEPAIREGLPLKRADWDAYLNWAGESFRLSSAGCEDSTQIHTHMCYSEFNDILPAIAAMDADVITIETSRSDMELLTAFGEFKYPNDIGPGVYDIHSPRVPTEAEVEHLLRKAIEVVPVERLWVNPDCGLKTRGWKETLEQLQVMMNVTHKLRAELAK

SEQ ID NO: 7395 - protein, 300 aa, Neisseria meningitidis
MENMVTFSKIRPLLAIAAAALLAACGTAGNNAVRKPVQTAKPAAVVGLALGGGASKGFAHVGIIKVLKENGIPVKVVTGTSAGSIVGSLFASGMSPDRLELEAEILGKTDLVDLTLSTSGFIKGEKLQNYINRKVGGRQIQQFPIKFAAVATDFETGKAVAFNQGNAGQAVRASAAIPNVFQPVIIGRHTYVDGGLSQPVPVSAARRQGANFVIAVDISARPGKNISQGFFSYLDQTLNVMSVSALQNELGQADVVIKPQVLDLGAVGGFDQKKRAIRLGEEAARAALPEIKRKLAAYRY

SEQ ID NO: 7396 - protein, 433 aa, Neisseria meningitidis
MAIYQSGVIFDQVDTANPDCWTLDEYVKRGGYTALRKILSENISQTDVIDEVKTSGLRGRGGAGFPTGLKWSFMPRSFPGEKYVVCNTDEGEPGTFKDRDIIMFNPHALIEGMIIAGYAMGAKAGYNYIHGEIFEGYQRFEAALEQARAAGFLGKNILGSDFEFELFAHHGYGAYICGEETALLESLEGKKGQPRFKPPFPASFGLYGKPTTINNTETFSSVPFIIRDGGQAFADKGIPNAGGTKLFCISGHVERPGNYEVPLGTPFAEVLKMAGGMRGGKKLKAVIPGGSSAPVLPADIMMQTNMDYDSISKAGSMLGSGAIIVMDEDVCMVKALERLSYFYYDESCGQCTPCREGTGWLYRIVHRIVEGKGKMEDLDLLDSVGNQMAGRTICALADAAVFPVRSFTKHFRDEFVHYIEHGGPMKEHKWGGW

SEQ ID NO: 7397 - protein, 433 aa, Neisseria meningitidis
MPSETARPLYADTCAAHTLVWFRQNLRIRDNAALCAAVAEGLPIIGIWIDDAETDNPRRAAFYRQSAAELAQGLAGRGIPLYTAASPAELVRLAVRLNIRTVIADESHTFADKLADNALWHELDKHGIALTFVNDRAVFGKTDLIPDGGTAYADFDRYREVWLDRFSKQPPAGPDLFAAYRQPFPENLSAPQPAALSDGIFLPQNSGETAAWRQWRRFLEQADSYSVLKDFPSRKHTSLMGAYLSAGCISPRLLARESLERRLNAWADNIIRRDFFLQLALQHTDDDPSDGNPEHTLRLTLWQQGRTGIPIIDAAMRCLHKTGSLHPALRRLSADFFCHVLNLPRREGEIWFARQLTDFDAAINQGNWRLAASRHTCPDIAAAAHKTDPDGTFVRRHIPELAHLSADTVHTPWRFACSVDTHGYPAHPVAGIP

SEQ ID NO: 7398 - protein, 642 aa, Neisseria meningitidis
MSRNQNHEEYQDDTRPLSIEEQRARLRQLIIMGKERGYITYSEINDALPDDMSDADQIDNIVSMISGLGIQVTEHAPDAEDILLSDNAAVTDDDAVEEAEAALSSADSEFGRTTDPVRMYMREMGQVDLLTREDEIIIAKKIENALKNMVQAISACPGSIAEILELIEKIRKDEIRVDEVVEAIIDPNEVLLNELGLGHLETTAPEKPSNDNSDENEDDEESEEDADEISAANLAELKQKVIGHFAQIEKDYKKMIGRLEKHHSRHKDYLAYRDAIANKLLEVRFATRQIDSLSSSLRGKVENIRKLEREIRDICLDRVHMERDYFIQNFLPEITNLEWIEEEIAKGRVWSDALDRFRHAILEKQTELADMEKETRISIEELKEINKNMVSSEKETAAAKQEMIQANLRLVISIAKKYTNRGLQFLDLIQEGNIGLMKAVDKFEYRRGYKFSTYATWWIRQAITRSIADQARTIRIPVHMIETINKMNRISRQHLQETGEEPDSAKLAELMQMPEDKIRKIMKIAKEPISMETPIGDDDDSHLGDFIEDANNVAPADAAMYTSLHEVTKEILESLTPREAKVLRMRFGIDMNTDHTLEEVGRQFDVTRERIRQIEAKALRKLRHPTRSDRLRSFLDSEDSKL

SEQ ID NO: 7399 - protein, 115 aa, Neisseria meningitidis
MRLNHKQGEAGEDAALAFLQSQGCTLLARNWHCAYGEIDLIVKNGGMILFVEVKYRKNRQFGGVAYSISPSKLLKLQRSVEYYLQQNRLTNVPCRLDAVLIEGSRPPEWIQNITG

SEQ ID NO: 7400 - protein, 589 aa, Neisseria meningitidis
MHAHASDLANDSFIRQVLDRQHFEPDGKYHLFGSRGELAERSGHIGLGKIQSHQLGNLMIQQAAIKGNIGYIVRFSDHGHEVHSPFDNHASHSDSDEAGSPVDGFSLYRIHWDGYEHHPADGYDGPQGGGYPAPKGARDIYSYDIKGVAQNIRLNLTDNRSTGQRLADRFHNAGSMLTQGVGDGFKRATRYSPELDRSGNAAEAFNGTADIVKNIIGAAGEIVGAGDAVQGISEGSNIAVMHGLGLLSTENKMARINDLADMAQLKDYAAAAIRDWAVQNPNAAQGIEAVSNIFMAAIPIKGIGAVRGKYGLGGITAHPIKRSQMGAIALPKGKSAVSDNFADAAYAKYPSPYHSRNIRSNLEQRYGKENITSSTVPPSNGKNVKLADQRHPKTGVPFDGKGFPNFEKHVKYDTKLDIQELSGGGIPKAKPVFDAKPRWEVDRKLNKLTTREQVEKNVQEIRNGNINSNFSQHAQLEREINKLKSADEINFADGMGKFTDSMNDKAFSRLVKSVKENGFTNPVVEYVEINGKAYIVRGNNRVFAAEYLGRIHELKFKKVDFPVPNTSWKNPTDVLNESGNVKRPRYRSK

SEQ ID NO: 7401 - protein, 164 aa, Neisseria meningitidis
MKKTLLAIVAVSALSACRQAEEGPPPLPRQISDRSVGHYCSMNLTEHNGPKAQIFLNGKPDQPVWFSTIKQMFGYTKLPEEPKGIRVIYVTDMGNVTDWTNPNADTEWMDAKKAFYVIDSGFIGGMGAEDALPFGNKEQAEKFAKDKGGKVVGFDDMPDTYIFK

SEQ ID NO: 7402 - protein, 90 aa, Neisseria meningitidis; identical to SEQ ID NO: 1142

SEQ ID NO: 7403 - protein, 674 aa, Neisseria meningitidis
MNDMTLYLIIALVPLAGSLIAGLFGNKIGRAGAHTVTILGVAVSAVLSAYVLWGFIDGSRAKFDENVYTWLTMGGLDFSVGFLVDTMTAMMMVVVTGVSLMVHIYTIGYMHDEKVGYQRFFSYISLFTFSMLMLIMSNNFIQLFFGWEAVGLVSYLLIGFYFKRPSATFANLKAFLINRVGDFGFLLGIGLVLAYFGGSLRYQDVFAYLPNVQNATIQLFPGVEWSLITVTCLLLFVGAMGKSAQFPLHVWLPDSMEGPTPISALIHAATMVTAGLFMVSRMSPIYEMSSTALSVIMVIGAITALFMGFLGVIQNDIKRVVAYSTLSQLGYMTVALGASAYSVAMFHVMTHAFFKALLFLAAGSAIIGMHHDQDMRHMGNLKKYMPVTWLTMLIGNLSLIGTPFFSGFYSKDSIIEAAKYSTLPGSGFAYFAVLASVFVTAFYAFRQYFMVFHGEEKWRSLPEHHSDGHGEEHHGLGKNDNPHESPLVVTLPLILLAVPSVIIGYIAIEPMLYGDFFKDVIFVNADAHPTIHIMKEEFHGALAMVSHSLHSPVLYLAIAGVLSAWLLYVKLPHLPAKIAQTFRPIYVLFENKYYLDALYFNVFAKGTRALGTFFWKVGDTAIIDNGIVNGSAKLVGAIAAQVRKAQTGFIYTYAAAMVFGVLVLLGMTFWGLFR

SEQ ID NO: 7404 - protein, 92 aa, Neisseria meningitidis; identical to SEQ ID NO: 1005

SEQ ID NO: 7405 - protein, 252 aa, Neisseria meningitidis
MGDSVIYYVEQADEPVNRADERARKTFKYFWRELFWERRRIISALDFAMVKVPFFQDGEDGEICEHMWIDDIYFDGLYIYGVLNNEPGELTNVEQGESVCVPVDDISDWMFVCNGIPYGGFTIQAMRGQMTEEERTEHDAAWGIDFGDPGQILLVYEEKEHPENLEEHPMCRNCIDDFRQQLSQNSDYLREQDEDGYTPLHHEAIAGNALMVQAMLEYGANPASTTSEGYTALDFACLTGWQNVADLLEPRH

SEQ ID NO: 7406 - protein, 39 aa, Neisseria meningitidis
LPDVLMLFVLFLYMLMLVTSRFFGKFNRQGADTLFHLFA

SEQ ID NO: 7407 - protein, 238 aa, Neisseria meningitidis
MSDKKYNVDEGEIAKFSRIADKWWDKSGEFKTLHDINPLRLDYIDGHADLCGKRVLDVGCGGGILAESMARRGAAFVKGIDMAEQSLETARLHAALNNVADIEYECIRVEDLAEAEPHSFDVVTCMEMMEHVPDPAAIVRACANLVKPDGMVFFSTINKNPKSYLHLIVAAEYLLKFVPKGTHDWKKFIAPAELARMCRQAGLDVADTKGMTYHVLSQTYALCDSTDVNYMFACRPAF

SEQ ID NO: 7408 - protein, 427 aa, Neisseria meningitidis
MNRNEILFDRAKAIIPGGVNSPVRAFGSVGGVPRFIKKAEGAYVWDENGTRYTDYVGSWGPAIVGHAHPEVVETVCEAALGGLSFGAPTEGEIVIAEEIAKIMPSVERLRLVSSGTEATMTAIRLARGFTGRDKIIKFEGCYHGHSDSLLVKAGSGLLTFGNPSSAGVPADFTKHTLVLEYNNIAQLEEAFAQSGNEIACVIVEPFVGNMNLVRPTEAFVKALRGLTEKYGAVLIYDEVMTGFRVALGGAQSLHGITPDLTTMGKVIGGGMPLAAFGGRKDIMECISPLGGVYQAGTLSGNPIAVAAGLKTLEIIQREGFYENLTARTEQLVQGFRTAADAAGIEFTADSVGGMFGLYFAAHAPRNYADMARSNIEGFKQFFHGMLDRNVAFGPSAYEAGFVSAAHTPELIDETVAVAVEVFKAMAE

SEQ ID NO: 7409 - protein, 122 aa, Neisseria meningitidis
MSTFFRQTAQAMIAKHIDRFPLLKLDQVIDWQPIEQYLNRQRTRYLRDHRGRPAYPLLSMFKAVLLGQWHSLSDPELEHSLITRIDFNLFCRFDELSIPDYSTLCRYRNRRRKTTPYPNCSN

SEQ ID NO: 7410 - protein, 92 aa, Neisseria meningitidis; identical to SEQ ID NO: 752

SEQ ID NO: 7411 - protein, 295 aa, Neisseria meningitidis
MYTGRFAPSPTGLLHIGSLLTAVASYADARAHGGKWLIRMEDLDPPREMPGAASHILHTLEAFGFEWDGEVAYQSRRYALYEETLCRLKTAGLVYPCHCSRKDWQAGARRGADGFVYNGRCRHPGQRPALQGKQPAWRIRVPDRIIGFSDGIVGGYAQNLARDIGDFVLLRADGYWAYQLAVVADDAEQGVTHIVRGQDLLVSTPRQIYLQQCLDVPTPQYAHLPLLTNAQGQKWSKQTLAPALDLNRREQLLRQVFRYLKLPEAPETDRPAELLDWAVAHWDMDKVPKHAVTAP

SEQ ID NO: 7412 - protein, 230 aa, Neisseria meningitidis
MKLIKYLQYQGIGSRKQCQWLIAGGYVFINGTCMDDTDADIDSSSVETLDIDGEAVTVVPEPYFYIMLNKPEDYETSHKPKHYRSVFSLFPDNMRNIDMQAVGRLDADTTGVLLITNDGKLNHSLTSPSRKIPKLYEVTLKHPTGETLCETLKNGVLLHDENETVCAADAVLKNPTTLLLTITEGKYHQVKRMIAAAGNRVQHLHRRRFAHLETENLKPGEWKFIECPKF

SEQ ID NO: 7413 - protein, 203 aa, Neisseria meningitidis
MFLMLMSDSPQLREFLVRNIDNIANDTEAFVNRYDLNRHMIYNTLLMVEGKQLDRLKQRSEKVLAHPTPSKWLQKRLYDYRFFLAFAEQDAEAMKAALEPLFDKKTARMAAKETLSYFDFYLQPQIVTYAKIASMHGFDLGIDQEIAPRDLIVYDPLPADEYQDIFDFMKQYDLSYPYEYLQDWIDYYTFKTDKLVFGNAKRE

SEQ ID NO: 7414 - protein, 348 aa, Neisseria meningitidis
MSDDKSKALAAALAQIEKSFGKGAIMKMDGSQQEENLEVISTGSLGLDLALGVGGLPRGRIVEIFGPESSGKTTLCLEAVAQCQKNGGVCAFVDAEHAFDPVYARKLGVKVEELYLSQPDTGEQALEICDTLVRSGGIDMVVVDSVAALVPKAEIEGDMGDSHVGLQARLMSQALRKLTGHIKKTNTLVVFINQIRMKIGVMFGSPETTTGGNALKFYSSVRLDIRRTGSIKKGEEVLGNETRVKVIKNKVAPPFRQAEFDILYGEGISWEGELIDIGVKNDIINKSGAWYSYNGAKIGQGKDNVRVWLKENPEIADEIDAKIRALNGIEMHITEGTQDETDGERPEE

SEQ ID NO: 7415 - protein, 113 aa, Neisseria meningitidis; identical to SEQ ID NO: 3580

SEQ ID NO: 7416 - protein, 88 aa, Neisseria meningitidis; identical to SEQ ID NO: 255

SEQ ID NO: 7417 - protein, 215 aa, Neisseria meningitidis; identical to SEQ ID NO: 1509

SEQ ID NO: 7418 - protein, 444 aa, Neisseria meningitidis
VGEPENKSSEPVREIQASKEMPSETSSPRKENETEVHIPAAPFIVKQSGSNALAVCALVLAALGLGTSGFLFVQGQNVLKNQELAFNQKIDKAALGESENAALLKDNLNRQAAIQSELDRLDGNVKANGEQILEMQKSYRELTKGRADWLVDETETILNLAAQQLVLTGNIQTAVGVLEHIDSRLSRFNQAELLPIKQAVSSDLAELKNRPYVDISGTALRLDRLETAVSGLPLMLDGVLKPGVQVKNEAASASWWQNVWEKSLGTLKGLVEIRRLENNDAMLISPEQAYFVRENLRLRLLDARTALMQRNSEVYQGDLNNAEAAVRQYFDAKSPATQSWLKELAELKALDVRMTADDGLKNSLNAVRAYRDGTRMTAAENQEAEQAASEPANEKTASEPAAASDVKTIEAPSLPSERKPEQPAKKQTVPEKAGRSPSAKGERA

SEQ ID NO: 7419 - protein, 268 aa, Neisseria meningitidis
MKKTLTLLAVSALFATSAHAHRVWVETAHTHGGEYLKADLGYGEFPELEPIAKDRLHIFSKPMQLVTEKGKENMIQRGTYNYQYRSNRPVKDGSYLVIAEYQPTFWSKNKAGWKQAGIKEMPDASYCEQTRMFGKNIVNVGHESADTAIITKPVGQNLEIVPLDNPANIHVGERFKVRVLFRGEPLPNATVTATFDGFDTSDRSKTHKTEAQAFSDSTDDKGEVDIIPLRQGFWKANVEHKTDFPDQSVCQKQANYSTLTFQIGHSHH

SEQ ID NO: 7420 - protein, 145 aa, Neisseria meningitidis
MIGLLIITHETIGEAYRKLAHHFFPGGLPENVRILGVQPTEDQDDINNNAIAALQEFPDNDGVLIMTDIFGATPCNAARRLVRENKSAILTGLNAPMMVKAVQYSPAAEDLAAFTECVREAAVKGIFAITSAPEDLVCRRSGDAV

SEQ ID NO: 7421 - protein, 76 aa, Neisseria meningitidis; identical to SEQ ID NO: 6364

SEQ ID NO: 7422 - protein, 38 aa, Neisseria meningitidis; identical to SEQ ID NO: 6664

SEQ ID NO: 7423 - protein, 209 aa, Neisseria meningitidis
  misc_feature 2, 3: 'Xaa' is any amino acid
VXXDDTLSELLKLINCQLTEKGLKIEKASAAVVDATIIQTAGSKQRQAIEVDEEGQISSQTTPSKDSDARWIKKNGLYKLGYKQHTRTDAEGYIEKLHITPANAHECKHLSPLLEGLPKGTTVYADKGYDSAENRQHLKEHRLLDGIMRKACRNRPLTETQTKRNRYLSKTRYVVEQSFGTLHRKFRYARAAYFGLICARCRLKGSPDA

SEQ ID NO: 7424 - protein, 92 aa, Neisseria meningitidis; identical to SEQ ID NO: 600

SEQ ID NO: 7425 - protein, 321 aa, Neisseria meningitidis
MLRLTALAVCTALALGACSPQNSDSAPQAKEQAVSAAQSESASLTVKTAHGDVQIPQNPERIAVYDLGMLDTLSKLGVKTGLSVDKNRLPYLEEYFKTTKPAGTLFEPDYETLNAYKPQLIIIGSRAAKAFDKLNEIAPTIEMTADTANLKESAKERIDALAQIFGKQAEADKLKAEIDASFEAAKTAAQGKGKGLVILVNGGKMSAFGPSSRLGGWLHKDIGLPAVDEAIKEGSHGQPISFEYLKEKNPDWLFVLDRSAAIGEEGQAAKDVLDNPLVAETTAWKKGQVVYLVPETYLAAGGAQELLNASKQVADAFNAAK

SEQ ID NO: 7426 - protein, 207 aa, Neisseria meningitidis; identical to SEQ ID NO: 4832

SEQ ID NO: 7427 - protein, 354 aa, Neisseria meningitidis
MKAARFYDKGDIRIEDIPEPTVAPGTVGINVAWCGICGTDLHEFMEGPIFIPPCGHPHPISGESAPVTMGHEFSGVVYAVGEGVDDIKVGQHVVVEPYIIRDDVPTGEGSNYHLSKDMNFIGLGGCGGGLSEKIAVKRRWVHPISDKIPLDQAALIEPLSVGHHAYVRSGAKEGDVALVGGAGPIGLLLAAVLKAKGIKVIITELSKARKDKARESGVADYILDPSEVDVVAEVKKLTNGEGVDVAFECTSVNKVLDTLVEACKPAANLVIVSIWSHPATINVHSVVMKELDVRGTIAYCNDHAETIKLVEEGKINLEPFITQRIKLDELVSEGFERLIHNNESAVKIIVSPNL

SEQ ID NO: 7428 - protein, 471 aa, Neisseria meningitidis
MNLHAKDKTQHPENVELLSAQKPITDFKGLLTTIISAVVCFGIYHILPYSPDANKGIALLIFVAALWFTEAVHITVTALMVPILAVVLGFPDMDIKKAMADFSNPIIYIFFGGFALATALHMQRLDRKIAVSLLRLSRGNMKVAVLMLFLVTAFLSMWISNTATAAMMLPLAMGMLSHLDQEKEHKTYVFLLLGIAYCASIGGLGTLVGSPPNLIAAKALNLDFVGWMKLGLPMMLLILPLMLLSLYVILKPNLNERVEIKAESIPWTLHRVIALLIFLATAAAWIFSSKIKTAFGISNPDTVIALSAAVAVVVFGVAQWKEVARNTDWGVLMLFGGGISLSTLLKTSGASEALGQQVAATFSGAPAFLVILIVAAFIIFLTEFTSNTASAALLVPIFSGIAMQMGLPEQVLVFVIGIGASCAFMLPVATPPNAIVFGTGLIKQREMMNVGILLNILCVVLVALWAYAVLM

SEQ ID NO: 7429 - protein, 346 aa, Neisseria meningitidis
MKAMVYHGANDIRFEEKPRPQIIDPTDAVVKIVKTTICGTDLGIWKGKNPEVADGRILGHEGIGIVEEVGEAVKNIKVGDKVIISCVSKCCTCDNCKTQLYSHCRNGGWILGYMIDGTQAEYVRTPYADNSLVPLPDNVNEEIALLLSDALPTAHEIGVQYGDVKPGDTVFIAGAGPVGMSALLTAQLYSPAAIIVCDMDENRLKLAKELGATHTINPASGEVSKQVFAIVGEDGVDCAIEAVGIPATWNMCQDIVKPGGHIAVVGVHGQSVDFKLEKLWIKKLAITTGLVNANTTEMLMKAISSSSVDYTKMLTHHFKFSELEKAYDVFKHAAENQVMKVVLEAD

SEQ ID NO: 7430 - protein, 223 aa, Neisseria meningitidis
MTFQLILFYIFAVIILYGALKTVTAKNPVHAALHLVLTFCVSAMLWMLMQAEFLGVTLVVVYVGAVMVLFLFVVMMLNIDIEEMRAGFWRHAPVAGVVGTLLAVALILILVNPKTDLAAFGLMKDIPADYNNIRDLGSRIYTDYLLPFELAAVLLLLGMVAAIALVHRKTVNPKRMDPADQVKVRADQGRMRLVKMEAVKPQVESAEESEVSDDLKPKEEGKA

SEQ ID NO: 7431 - protein, 489 aa, Neisseria meningitidis
MPSETDMFCVGNVSDENGRTKIMKKIQADVVVIGGGTAGMGAFRNARLHSDNVYLIENNVFGTTCARVGCMPSKLLIAAAEARHHALHTDPFGVHLDKDSIVVNGEEVMRRVKSERDRFVGFVVADVEEWPADKRIMGSAKFIDEHTVQIDDHTQITAKSFVIATGSRPVILPQWQSLGNRLIINDDVFSWDTLPKRVAVFGPGVIGLELGQALHRLGVKVEIFGLGGIIGGISDPVVSDEAKAVFGEELKLHLDAKTEAKLDADGNVEVHWEQDGEKGVFVAEYMLAAVGRRPNVDNIGLENINIEKDARGVPVADPLTMQTSIPHIFIAGDASNQLPLLHEAADQGKIAGDNAGRYPNIGGGLRRSTIGVVFTSPQIGFVGLKYAQVAAQYQADEFVIGEVSFKNQGRSRVMLVNKGHMRLYAEKATGRFIGAEIVGPAAEHLAHLLAWAHQMKMTVPQMLDMPFYHPVIEEGLRTALRDADAKLKA

SEQ ID NO: 7432 - protein, 636 aa, Neisseria meningitidis
MNLETLIALPRNIKKICFLIHDFLMIFIAFWFTQSLKADYSDEWFDFANWQSFLLTALLTITLFIRMGLYHAVTRFVSFRILTTALAGSLASAVLFFLNTLIFEERLRLALPIVYFLLLFVSVTGSRMVLRGLLSEHPKKQMIPVIIYGAGRSGRQLLEAVKQMREYSAAAFVDDDPKLWHTVIYDLAVYQPDAIAFLIERYGVEKILLAIPGATQEQRRRIINKLEAYPCEVLTIPGMKDLMDGKISIGTLKKISVSDLLGRDSVAPDDRLMSADIEGKTVMVTGAGGSIGSELCRQIIRRRPEKLLLFELSEFALYAIEKELRETCIQKRLDTEILPFLGSVQNRTLLEHVMTAFSVATVYHAAAYKHVPMVEFNTVEGIRNNIFGTLECALAATTSGVRTFVLISTDKAVRPTNTMGASKRMAELCLQALAAEPGQKTRFSMVRFGNVLGSSGSVVPLFEKQIAEGGPLTLTHPEITRYFMTIPEAAQLVIQAGAMGTGGDVFVLDMGESVKIIDLARQMITLSGLKPNTPEQPDGDIEILITGLRPGEKLYEELLIGDNVRKTGHPRIMTANETMLPWHELSALLDRIRAACDRYDQQAIRTLLINAPTGFAPSDGICDLLWVRETHRKNAV

SEQ ID NO: 7433 - protein, 265 aa, Neisseria meningitidis
MNRLYPHPIIAREGWPIIGGGLALSLLVSICCGWWSLPFWVFTVFALQFFRDPAREIPLNPEAVLSPVDGRIVVVERARDPYRDVDALKISIFMNVFNVHSQKSPADCTVTKVVYNKGKFVNADLDKASTENERNAVLATTASGREITFVQVAGLVARRILCYTQAGAKLSRGERYGFIRFGSRVDMYLPVDAQAQVAIGDKVTGVSTVLARLPLTAPQTESEPESEPALQTAPVETAANPSAEQRQIEAAAAKIQAAVQDVLKD

SEQ ID NO: 7434 - protein, 125 aa, Neisseria meningitidis; identical to SEQ ID NO: 535

SEQ ID NO: 7435 - protein, 215 aa, Neisseria meningitidis; identical to SEQ ID NO: 4487

SEQ ID NO: 7436 - protein, 300 aa, Neisseria meningitidis
LKDACNNLFERQFSFIEKTPKGEKVVRTRWVSQVAYIEQQATVELVFAPNVAPLITMLEKNFTSYELDQVSSLSSKYAVRLYEIIISWRAAGKTPMFSTMELRERLGMMPDEYQKMELFKRKVLDFAVKQINDKTDISITYEQHKEGRKIVGFTFSILHKIGSKDIPLENQSELFAGMTDLEAGTIRVRAEAYIASLIAKGQNVTKAHRLNILKKAVEERWGFEDVAKDNGAKNPENKNAKVVLNEWEKISNGTRFKDKDGTIWVKDSGMLRTEGTNRWIADSQIAKLFPMLTVMVEEGI

SEQ ID NO: 7437 - protein, 352 aa, Neisseria meningitidis
MRPLNVQIRLGNLRHNYRILKEMHGGKLLAVVKADAYGHGAVRCAFALADLADGFAVATIDEGIRLRESGITHPIVLLEGVFEASEYEAVEQYSLWPAVGNQWQLEALLIRHWKKTVKVWLKMDSGMHRTGFFPHDYASAYAALKQSEYVDSIVKFSHFSCADEPESGMTEIQMEAFDLGTEGLEGEESLANSAAILNVPEARRDWGRAGLALYGISPFGGGDDRLKPVMRLSTRIFGERVLQPHSPIGYGATFYTSKSTRVGLIACGYADGYPRRAPSNSPVAVDGKLTRVIGRVSMDMMTIELDASQEGLGHEVELWGDTVNINTVAEAAGTIPYELMCNIKRAKFTYIE

SEQ ID NO: 7438 - protein, 548 aa, Neisseria meningitidis
MKHLHDLPAWSKLWNHFDDSKTLHMREMFEQDPQRAERYWLQVGGLTLDYSKNRINDETMSLLFELAREAGVPERMRQMFHGEKINTTENRAVLHVALRNRTNSPIVVDGEDVMPKVNRVLQRMGEFAHEVRSGSWLGYTNQVITDVVNIGIGGSDLGPLMMCTALKPFGHPRLNMHFVSNVDGSQLRDVLSKVHPETTLFIIASKTFTTQETLTNALTAREWFLNHAGDEEAVAKHFAAVSTNQKAVAEFGIDTANMFEFWDWVGGRYSLWSAIGLPIMLYLGEENFIEMLNGAHLMDQHFINTPLERNLPVILALIGIWYINYYGGGSHVIAPYDQHLHRLPKFIQQLDMESNGKQVTLDGKAVGHETSPIIWGETGINGQHAFFQLLHQGTHITPIDLIASLEKRSNLPGHHEILLANVFAQAEAFMRGKTPDEVRAELKAQGMDEVRIEELVPHKTFSGNRPTNLILMDKVNPRNMGSLIAMYEHKTFVQGIIWGINSFDQWGVELGKQLAKTILGELTGETGPQKHDSSTERLINLYLQTNRK

SEQ ID NO: 7439 - protein, 287 aa, Neisseria meningitidis
MKTFFKTLSAAALALILAACGGQKDSAPAASASAAADNGAAKKEIVFGTTVGDFGDMVKEQIQAELEKKGYTVKLVEFTDYVRPNLALAEGELDINVFQHKPYLDDFKKEHNLDITEVFQVPTAPLGLYPGKLKSLEEVKDGSTVSAPNDPSNFARVLVMLDELGWIKLKDGINPLTASKADIAENLKNIKIVELEAAQLPRSRADVDFAVVNGNYAISSGMKLTEALFQEPSFAYVNWSAVKTADKDSQWLKDVTEAYNSDAFKAYAHKRFEGYKSPAAWNEGAAK

SEQ ID NO: 7440 - protein, 418 aa, Neisseria meningitidis
VANKLRNYTINFGPQHPAAHGVLRMILELDGEQIVRADPHIGLLHRGTEKLAETKTYLQALPYMDRLDYVSMMVNEQAYCLAVEKLVGIDVPIRAQYIRVMFAEVTRILNHLMGIGSHAFDIGAMTAILYAFRDREELMDLYEAVSGARMHAAYFRPGGVYRDLPDFMPKYEGSKFRNAKVLKQLNESREGTMLDFIDAFCERFPKNIDTLETLLTDNRIWKQRTVGIGVVSPERAMQKGFTGVMLRGSGVEWDVRKTQPYEVYDKMDFDIPVGVNGDCYDRYLCRMEEMRQSVRIIKQCSEWLRVNPGPVITTNHKFAPPKRTEMKTGMEDLIHHFKLFTEGMHVPEGETYTAVEHPKGEFGVYIISDGANKPYRLKIRAPGFAHLQGMDEMAKGHMLADVVAIIGTQDIVFGEVDR

SEQ ID NO: 7441 - protein, 225 aa, Neisseria meningitidis; identical to SEQ ID NO: 1002

SEQ ID NO: 7442 - protein, 178 aa, Neisseria meningitidis
MAASVRILGIDPGSRVTGFGVIDVRGRDHFYVASGCIKTPADAPLADRIAVIVRHIGEVVTVYKPQQAAVEQVFVNVNPASTLMLGQARGAALAALVSHKLPVSEYTALQVKQAVVGKGKAAKEQVQHMVVQMLGLSGTPQPDAADGLAVALTHALRNHGLAAKLNPSGMQVKRGRFQ

SEQ ID NO: 7443 - protein, 95 aa, Neisseria meningitidis; identical to SEQ ID NO: 3028

SEQ ID NO: 7444 - protein, 263 aa, Neisseria meningitidis
MNVYFLGGGNMAAAVAGGLVKQGGYRIYIANRGAEKRERLEKELGVETSETLPELHSDDVLILAVKPQDMEAACKNICTNGALVLSVAAGLSVDTLSRYLGGTRRIVRVMPNTPGKIGLGVSGMYAEAEVSETDRRIADRIMKSVGLTVWLDDEEKMHSITGISGSGPAYVFYLLDALQNAAIRQGFDMAEARALSLATFKGAVALAEQTGEDFEKLQKNVTSKGGTTHEAVEAFRRHRVAEAISEGVCACVRRSQEMERQYQ

SEQ ID NO: 7445 - protein, 77 aa, Neisseria meningitidis; identical to SEQ ID NO: 760

SEQ ID NO: 7446 - protein, 291 aa, Neisseria meningitidis; identical to SEQ ID NO: 2244

SEQ ID NO: 7447 - protein, 392 aa, Neisseria meningitidis; identical to SEQ ID NO: 633

SEQ ID NO: 7448 - protein, 1161 aa, Neisseria meningitidis
MRLTHIKLSGFKSFTDPTTIHVPGQLVAVIGPNGCGKSNVIDAVRWVLGEASAKQLRGESMQDVIFNGAATRRPAPRASVELVFDNSDHSLQGAWGQYAEVSIKRQLTRQGESTYFINNQTVRRRDITDLFLGTGVGARGYAVIEQGMISRIIEARPEELRAYIEEAAGVSKYKERRKETEGRLKDTREHLQRLGDLQNELARQVEKLEKQAETAERYKSLTAQLNQQQDLLDYAQWRQSLAAADKATAQHQSLQAQQDETAAQVQALNDEVHALQTAEQSQQQAVHELSNKRGVLREQIARLEEQIRHQQNLHQRIERDKQAAQAQLQRIHQEQQQIRVQLEENELQVEEKQTELAEWAMQVAEHEERLPELEEAQATLNAAFQTQQDEANRIRRELALKQQQLAHAEQTIAKHEERKGRLKQENQALNLPDEAETAAAQEAAALLQSQQEHYEEQIIAAEEALHAAREAFQTASNRFQSLKQQHITLQAQQQALSQILSQQQEAADFWQATDHAAAPQLWQHITAPAEWQHALSVILAERLHARAVPQGFVPPEPLPQGQAAWLSDDLSGGIKKSLPVQALLNQIQAQPPFQTALHYWLDGVLCAPDLSYALAHQNDLGAHQIWLTPEGHQVDKVSVLLYAKPAQESLIAQKARLDGIASELENLAPELSAAEAAFKQAEAAVRSSEVQHKNLMQQQQQHTRQYSQAQQRAAELLARTNQGQIRREHIERELAQLAEEQTVLQHTSDGLSDDIVTLQEAAAELEHQQQTTAHSRQEQQGRLKQAQLALLEANRQYGLAEVAVHKLNQQKQNYRQQIAQLEQQTLDWQERQQELALAYETEFQNDEQHIKLEELSEAVQTLDEEYIVVQEKLAQIQEQGREQYAKVQTLQTKLPQLQAATQTALLQQQEALINAKRYHQNLTERAADLDALEALAKESPKVLNSSIGSLSQQIEALGAVNLAALQELEEARERDGYYRSQSEDVQAAITLLEEAIAQIDDKTKARFKETFDAVNSKVQTFFPTLFGGGEATLKMIGDDLLTAGVSIMARPPGKKNSTIHLLSGGEKALTAMSLVFALFSLNPAPFCLLDEVDAPLDDANTSRFCRLVKEMSAQTQFLYISHNRLTMEMAEQLVGVTMQEKGVSRVVAVDIKQALEMAEAV

SEQ ID NO: 7449 - protein, 99 aa, Neisseria meningitidis
MGYRVGINCFDTRLQADDYLLSSLPPTVTQDGKIIRPERVGDKWILNGKPVTLSYPKCSNYEQVKSGAYLGSMVLILFVVIYGFRLLINFLKDIGKVGA

SEQ ID NO: 7450 - protein, 221 aa, Neisseria meningitidis
MDAWFEDTAMGRYVAKLEQDFFGRYLDSYRFSGMCAVQVGGPWLSLSEDVVCVPRDMSMSAENMALADVSADMLLFPHTLEGGVPSQILSEAHRILKPCGRLMLTGFNPYSLWGFSRWFDGERLPEKRFCLPLPELKRRLADVGFDIEFGKFMVYLPPVSSLGQIRFWRFMEKAGDRWWPQCAAVYGLVLVKRAAGVTPLPAWDGYLGGKALAAGAARVAD

SEQ ID NO: 7451 - protein, 272 aa, Neisseria meningitidis
MNTIFKISALTLSAALALSACGKKEAAPASASEPAAASSAQGDTSSIGSTMQQASYAMGVDIGRSLKQMKEQGAEIDLKVFTEAMQAVYDGKEIKMTEEQAQEVMMKFLQEQQAKAVEKHKADAKANKEKGEAFLKENAAKDGVKTTASGLQYKITKQGEGKQPTKDDIVTVEYEGRLIDGTVFDSSKANGGPVTFPLSQVIPGWTEGVQLLKEGGEATFYIPSNLAYREQGAGDKIGPNATLVFDVKLVKIGAPENAPAKQPAQVDIKKVN

SEQ ID NO: 7452 - protein, 472 aa, Neisseria meningitidis
MSIKNAVKLIEESEARFVDLRFTDTKGKQHHFTVPARIVLEDPEEWFENGQAFDGSSIGGWKGIQASDMQLRPDASTAFVDPFYDDVTVVITCDVIDPADGQGYDRDPRSIARRAEAYLKSSGIGDTAYFGPEPEFFVFDGVEFETDMHKTRYEITSESGAWASGLHMDGQNTGHRPAVKGGYAPVAPIDAGQDLRSAMVNILEELGIEVEVHHSEVGTGSQMEIGTKFSTLVKRADQTQDMKYVIQNVAHNFGKTATFMPKPIMGDNGSGMHVHQSIWKDGQNLFAGDGYAGLSDTALYYIGGIIKHAKALNAITNPSTNSYKRLVPHFEAPTKLAYSAKNRSASIRIPSVNSSKARRIEARFPDPTANPYLAFAALLMAGLDGIQNKIHPGDPADKNLYDLPPEEDALVPTVCASLEEALSALKADHEFLLRGGVFSKDWIDSYIAFKEEDVRRIRMAPHPLEFEMYYSL

SEQ ID NO: 7453 - protein, 103 aa, Neisseria meningitidis
MVVFQKTGRLFYNGGVQMETMPSETAFRRHRFLYRSGKIRMRCAGLSALLTILPSETIFSGLKFDAKPVSDGIGVVKSCRLCVKPPRSAYFAISLFQELKNVY

SEQ ID NO: 7454 - protein, 217 aa, Neisseria meningitidis
MFSVPRSFLPGVFVLAALAACKPQDNSAAQVASSSASASAAENAAKPQTRGTDMRKEDIGGDFTLTDGEGKPFNLSDLKGKVVILSFGFTHCPDVCPTELLTYSDTLKQLGGQAKDVKVVFVSIDPERDTPEIIGKYAKQFNPDFIGLTATGGQNLPVIKQQYRVVSAKVNQKDDSENYLVDHSSGAYLIDKNGEVAIFSPYGSEPETIAADVRTLL

SEQ ID NO: 7455 - protein, 492 aa, Neisseria meningitidis
LPCFNAYFLFQGWFMPLLSVEFALFFLAFLPIYWGLAKYPSVQNLLLLAAGMGWLYHIGPVFAAIIVLYSSCVYLLGELLRSDRENTRRFWLGCGIAASLTVLGFFKYFDFFRPMIAQYAGKGGAIDILMPLGLSYYTFQSLAYLVYCFRAPHAARFSWHELLLHLSFFPTVTSGPIIRAAAFKSADGEQAGALAQIRTRRARSPVRPALAVSLILLGIAKKWWLAGMLAENWVSPVFENPAQFDGWGVLGGVYGYTFQLFLDFSGYSDLVIGMAMLLGFRLPKNFSAPLRALNIRAFWDKWHISLSTWIRDYIYIPLGGSKKGFLRTQLNLMAAMVLSGIWHGYGWNFLIWGALHGTALVLLNTGDRYFGRDALCRLKYFAPLSWLITFHFVCLSFVVFNTANPDDAGAVFSALFANANGWNAPQQANMLLLASFASVMLLYPYLQRAFDGAVKGLEKIPMWLWFIPVSAVLLLIIVLAPSGIPGFIYANF

SEQ ID NO: 7456 - protein, 464 aa, Neisseria meningitidis
LIQSAAQLYRQRIFSSFNIYISVGLQGDTMKPVNIGLLGLGTVGGGTAAVLRDNAEEISRRLGREIRISAVCDLSEEKARQTCPSAAFVKDPFELVAREDVDVVVELFGGTGIAKDAVLKAIENGKHIVTANKKLLAEYGNEIFPLAEKQNVIVQFEAAVAGGIPIIKALREGLAANRIKSIAGIINGTSNFILSEMREKGSAFADVLKEAQALGYAEADPTFDIEGNDAGHKITIMSALAFGTPMNFSACYLEGISKLDSRDIKYAEELGYRIKLLGITRKTGKGIELRVHPTLIPESRLLANVNGVMNAVRVNADMVGETLYYGAGAGALPTASAVVADIIDIARLVEADTAHRVPHLAFQPAQVQAQTILPMDEITSSYYLRVQAKDEPGTLGQIAALLAQENVSIEALIQKGVIDQTTAEIVILTHSTVEKHIKSAIAAIEALDCVEKPITMIRMESLHD

SEQ ID NO: 7457 - protein, 251 aa, Neisseria meningitidis
MGRLLLGSIRMSIIVENLTVSYRRRPAVHHVDITFEEHSMWAVFGPNGAGKSTFLKSLMGLQPIDTGSIRLDGLTRQNIAYLPQQSDIDRSQPMTVFDLAAMGLWYEIGFFKGINTAQKQRVHEALERVGMQRFADRQIAYLSNGQFQRVLFARMLVQNAKFLLLDEPFNAVDARTTYELLDVLQKCHCGGHAIIAVLHDYEQVRAYFPNTLLLAREKIAAGATETILTEPYLAQANAKMQQQESPDWCAS

SEQ ID NO: 7458 - protein, 417 aa, Neisseria meningitidis; identical to SEQ ID NO: 1859

SEQ ID NO: 7459 - protein, 216 aa, Neisseria meningitidis
MPSENTKGTTMTTHHVELRKVTKRFGAQKAVNQVDLVLKAGESVGLAGHNGAGKSTIMKLILGLITPTEGEVMLLGERTGSKAGARLRSQIGYLPETVALHPSLIGIETLDFYAKLKKQPLTQNRGLLERVGISQAAHRRVGTYSKGMRQRLALAQALLGEPKVLLFDEPTTGLDPASRQMFYEVVRELNGRGATVLLSTHALAELDGHADRIIVD

SEQ ID NO: 7460 - protein, 384 aa, Neisseria meningitidis
MTETTQTPTLKPKKSVALSGVAAGNTALCTVGRTGNDLSYRGYDILDLAQKCEFEEVAHLLIHGHLPNKFELAAYKTKLKSMRGLPIRVIKVLESLPAHTHPMDVMRTGVSMLGCVHPERESHPESEARDIADKLIASLGSILLYWYQYSHNGKRIEVESDEETIGGHFLQLLHGKRPSESHIKAMHVSLILYAEHEFNASTFTARVIAGTGSDMYSSITGAIGALKGPKHGGANEVAYDIQKRYRNADEAEADIRERIGRKEIVIGFGHPVYTISDPRNVVIKEVARGLSKETGDMRLFDIAERLESVMWEEKKMFPNLDWFSAVSYQKLGVPTAMFTPLFVISRTTGWSAHVLEQRKDGKIIRPSANYTGPEDLAFVEIEER

SEQ ID NO: 7461 - protein, 233 aa, Neisseria meningitidis
MTEPAAEGGKAAKALKKYLITGILVWLPIAVTVWVVSYIVSASDQLVNLLPKQWRPQYVLGFNIPGLGVIVAIAVLFVTGLFAANVLGRQILAAWDSLLGRIPVVKSIYSSVKKVSESLLSDSSRSFKTPVLVPFPQPGIWTIAFVSGQVSNAVKAALPKDGDYLSVYVPTTPNPTGGYYIMVKKSDVRELDMSVDEALKYVISLGMVIPDDLPVKTLAGPMPSEKADLPEQQ

SEQ ID NO: 7462 - protein, 144 aa, Neisseria meningitidis
MRIRRRLKQGVIMAKTNNKPETAETAAPSFEDIKAELDAVQAELAAARNDVEMLTTALEKAEDDKKALSAELAELKVQHTQRAADALADSRDVMLVSTGADGKEFWRGGLLFDGGWREVKRAEVGEAVWKAICAEPMLQRKAVE

SEQ ID NO: 7463 - protein, 98 aa, Neisseria meningitidis
MFRILLLLFPCAILAACTRNIPANPAVSNCAHLQNRTILYFDAHGKPADGAVKGGFYKIIEIQGANCILIQDFNSTGNALGGSYVPDCRKSSLFPKNI

SEQ ID NO: 7464 - protein, 127 aa, Neisseria meningitidis
MTFAYWCILIACLLPLFCAAYAKKAGGFRFKDNHNPRGFLAHTQGAAARAHAAQQNGFEAFAPFAAAVLTAHATGNAAQSTINTLACLFILFRLAFIWCYIADKAAMRSLMWAGGFACTVGLFVAAA

SEQ ID NO: 7465 - protein, 326 aa, Neisseria meningitidis
VQPGLWASDGIFSEWRHSCRRRGSRMGKGGDIVVGNGKKYAAPLLVLGCVVFGLGSLIVRSVPVGSYAIAFWRLLISVFVFWFLARFFRQKFPKNRKTVRYALTAGVFLAFDLALWHESIHAVGPGISTLLNSLQIFFLSAIGVFFFGERLSGLKKAGLISAVAGVAMIAGAEFGYNGNAVWGFASGLVSGLMLALSMVFVRKTHEIEPVALFPSMMILSLGGAVSLVVPALLMDGGALYPTTWKDAGLVLVYGVVMQCFAWAMVAYAIPLLSLSLTGLLLLSEPVAALFIDYFGLGKPIEGVQWAGVALTLSAIYLGSLKRQSSH

SEQ ID NO: 7466 - protein, 186 aa, Neisseria meningitidis; identical to SEQ ID NO: 104

SEQ ID NO: 7467 - protein, 219 aa, Neisseria meningitidis
MSNQQALVIFSGGQDSTTCLIQAIQTYGRENVQAITFQYGQRHAVELERARWIAQDLGVKQTVLDLSLMRQITHNALMDDTAAIETAENGVPNTFVDGRNALFLLYAAIYAKGQGIRHIIAGVCETDFSGYPDCRDVFVKSMNVTLNLAMDYDFQIHTPLMYLTKAQTWALADEMGVLDYIREQTHTCYNGIVGGCRECPSCILRERGLAEYLESKKAV

SEQ ID NO: 7468 - protein, 69 aa, Neisseria meningitidis
MTESRQTRLQVKCPTCQTAVVWKPENAFRPFCSQRCKLIDLGGWADGKYTVSGQTESLPEISEPDMAYR

SEQ ID NO: 7469 - protein, 212 aa, Neisseria meningitidis
MSTFFQQTAQAMIAKHINRFPLLKLDQVIDWQPIEQYLNRQKTRYLRDHRGRPAYPLLSMFKAVLLGQWHSLSDPELEHSLITRIDFNLFCRFDELSIPDYSTLCRYRNWLAQDDTLSELLKLINRQLTEKGLKVEKASAAVIDATIIQTADGKQRQAIEVDEEGQVSGQTTRSKDSDARWIKKNGLYKLGYKQHTRTDAEGYIEKLHIIVD

SEQ ID NO: 7470 - protein, 915 aa, Neisseria meningitidis
MQQQHLFRLNILCLSLMTALPVYAENVQAGQAQEKQLDTIQVKAKKQKTRRDNEVTGLGKLVKTTDTLSKEQVLDIRDLTRYDPGIAVVEQGRGASSGYSIRGMDKNRVSLTVDGLAQIQSYTAQAALGGTRTAGSSGAINEIEYENVKAVEISKGSNSVEQGSGALAGSVAFQTKTADDVIGEGRQWGIQSKTAYSGKNRGLTQSIALAGRIGGAEALLIHTGRRAGEIRAHEAAGRGVQSFNRLVPVEDTNQYANFIVEEECESKNYETCKANPKKDVVGKDERQTVSTRDYTGPNRFLADPLSYESRSWLFRPGFRFENKRHYIGGILERTQQTFDTRDMTVPAFLTKAVFDENKKQAGSLSGNGKYAGNHKYGGLFTNGENGALVGAEYGTGVFYDETHTKSRYGLEYVYTNADKDTWVDYARLSYDRQGIGLDNHFQQTHCSADGSDKYCRPSADKPFSYYKSDRVIYGESHKLLQAAFKKSFDTAKIRHNLSVNLGFDRFGSDLRHQDYFYQNANRAYSSKIPTQNGNQNISPNGSQDKPYWVSIGGGNVVTGQICRLGNNTYTDCTPRSINGKSYYAAVRDNVRLGRWADVGAGLRYDYRSTHSDDGSVSTGTHRTLSWNAGVVLKPFTWMDLTYRTSTGFRLPSFSEMYGWRSGDKIKAVKIDPEKSFNKEAGIVFKGDFGNLEASWFNNAYRDLIVRGYEAQIKNGKEEAKGDPAYLNAQSARITGINILGKIDWNGVWDKLPEGWYSTFAYNRVRVRDIKKRADRTDIQSHLFDAIQPSRYVVGLGYDQPEGKWGVNGMLTYSKAKEITELLGSRALLNGNSRNTKATARRTRPWYIVDVSGYYTIKKHFTLRAGVYNLLNHRYVTWENVRQTAGGAVNQHKNVGVYNRYAAPGRNYTFSLEMKF

SEQ ID NO: 7471 - protein, 590 aa, Neisseria meningitidis
MIPSDFIDELLAKTDIVDIIDEQVPLKKGGANYMACCPFHKEKTPSFSVSPTKQFYHCFSCGAHGSAIGFVMEHQGLSFPEAVQFLADRVGMVVPKVHGQNDNPEVRAERKKKQQTLEETTAAAADFYAQQLKFNPAAKAYLDKRGLSAEVIAHYGLGYAPDGWQPLTQVFQPYPNTALVDTGMVIDNEGRHYDRFRHRIMFPIRNPRGQVIGFGGRVLDDSKPKYLNSPDTPLFDKGKNLYGLYEGRAAVKEAGRILVVEGYMDVVALAQFGVGYGVAALGTATTAEHVKILMRQADSIYFCFDGDSAGRKAAWRALENALPQLKDDKSLHFLFLPEEHDPDSYIRAYGKAQFEDALLNQSKPLSEYFWEHLSDGIHLNTQEGKAELVKTSSPLLAQITAPALAYLLKQRLSELVGIDPDNLAQLLGQEAPKRHVKQKNYKLPPISVKQPVMLTLVQRQIRSLLINPDWAAYIDLPDYLALDGDFACLANLAESIKNHAAVPETAQVLEYMRGSPYEETITRIFHSTHQSEEMNSSSEEDCENFQIGMKKLLNELKYSQIETLKQKSLQSGLNESEKKLLLSLLTAKQN

SEQ ID NO: 7472 - protein, 138 aa, Neisseria meningitidis
MLKHLAFLLPAMMFALPTSAAVLTSYQEPGCTYDGNVGKDGKPAGKGTWRCQDGRNYTGSFKNGKFDGQGVYTVAANREIFIEPFNSDSTKFRNMVLSGTFKKGLAHGRFTVSQNGETLFIMKCENGMIKEVKLPKNK

SEQ ID NO: 7473 - protein, 329 aa, Neisseria meningitidis
MKQPVFAVTSGEPAGIGPDICLDLAFARLPCRCAVLGDKNLLRARAEALGKSVVLRDFDPESGGAAYGELEVLHIPAAEAVEAGRLNPANAAYVLQLLDTALAGISDGIFDGIVTAPLHKGIINDARASTGFFSGHTEYLAEKSGTGQVVMMLAGKGLRVALVTTHLPLKDVAAAITQPLIESVARILHHDLKHKFCIKNPKILVAGLNPHAGEGGHLGHEETDTIIPALENLRRERINLAGPYPADTLFQPFMLEGADAVLAMYHDQGLPVLKYHSFGQGVNITLGLPFIRTSVDHGTALDLAATGRADSGSLITAVETAVEMARGSL

SEQ ID NO: 7474 - protein, 488 aa, Neisseria meningitidis
MRQMPSEAVFLQFRQTRKIMKYISTRGETAHKPFSEVLLMGLAPDGGLMLPEHYPQIGRETLDKWRGLAYPELAFEIMRLFVTDIPEDDLRDILNRTYTEAAFGTKEITPVRTLSDGIKIQALSNGPTLAFKDMAMQFLGNAFEYVLNKEGKKLNILGATSGDTGSAAEYALRGKKGVNVFMLSPDGKMSAFQRAQMYSLQDENIHNIAVKGMFDDCQDIVKAVQNDAAFKEKYHIGTVNSINWGRIVAQVVYYFAGYFNATSSNDETVSFCVPSGNFGNVCAGHIAKQMGLPIRRLIVATNENDVLDEFFKTGAYRPRNSAHTYVTSSPSMDISKASNFERFVFDLMDRDPAEINTLWAEVAAGKGFDLRFALDKVGGKYGFTSGKSTHADRLATIKQVYEQDQELIDPHTADGVKVAREVREEGEMVVCLETALAAKFDATIREAVGDAAIPRPAALEGLENLPQRVQTVPNSADAVKGIIEQTLA

SEQ ID NO: 7475 - protein, 215 aa, Neisseria meningitidis
MKTKFYNHQGGHLILYFAGWGTPPDAVNHLILPENHDLLICYDYQDLNLDFDFSAYRHIRLVAWSMGVWAAERALQGIRLKSATAVNGTGLPCDDNFGIPCTVFKGTLENLTENTRLKFERRMCGDKASFEDYQQFPARPFGEIHQELIALFAMIGQDRRTDLIRWTNALVGSGDKIFMPANQHRYWTPRCTVREIDVGHYLFSRFTHWSALWNH

SEQ ID NO: 7476 - protein, 197 aa, Neisseria meningitidis; identical to SEQ ID NO: 763

SEQ ID NO: 7477 - protein, 61 aa, Neisseria meningitidis; identical to SEQ ID NO: 965

SEQ ID NO: 7478 - protein, 675 aa, Neisseria meningitidis
LSLSEFIERRTSFNPMVILTTLFFVCVLVVLVLTVPDQVQMWLDRAKEVIFTEFSWFYVLTFSIFLGFLLILSVSSLGNIRLGRDEDVPEFGFLSWLAMLFAAGMGVGLMFFGVAEPLMHYFSDITAGTPEHRQQQALLHTVFHWGVHAWSVYGTIALALAYFGFRYKLPLALRSCFYPLLKEKISGRFGDAIDIMALLATFFGIITTLGFGASQLGAGLQEMGWIAENSFSVQVLIIAAVMSLAVVSAISGVGKGVKVLSELNLGLAFLLLFFVLAAGPTVYLLSAFGDNIGNYLGNLVRLSFKTYAYEREHKPWFESWTVLYWAWWCSWAPFVGLFIARISKGRTIREFVFGVLLIPGLFGVLWFTVFGNTAIWLNDGVAGGMLEKMTSSPETLLFKFFNYLPLPELTSIVSLLVISLFFVTSADSGIYVLNNITSRDKGLSAPRWQAVMWGVLMSAVAVLLMRSGGLGNLQSMTLIVSLPFALLMLIMCFSLWKGLSADKKYFETRVNPTSVFWTGGKWKERLVQIMSQTQEQDILKFLKQTASPAMHELQRELSEEYGLSVRVDKMFHRDEPAIEFVIRKETMRDFMYGIKSVGQDVSDQLINDGKLPHIRHQTTYKPYAYFFDGRVGYDVQYMNKDELIADILKNYERYLMLLDDVGQELMAHEQVELAE

SEQ ID NO: 7479 - protein, 230 aa, Neisseria meningitidis; identical to SEQ ID NO: 675

SEQ ID NO: 7480 - protein, 67 aa, Neisseria meningitidis
MKKSLIALCVAHCAKLKNDFGVPPLPEIKITPSPVRVGSLKQHPSLRLGKSGVAAAKRAARKRKNRR

SEQ ID NO: 7481 - protein, 498 aa, Neisseria meningitidis
MSLALVYSRALSGMNAPLVEVEAHLANGLPHFNIVGLPDMEVKESRDRVRAAIIQSGFEFPAKKITVNLAPADLPKESGRFDLPIAIGILAASGQVAPEKLEEYEFAGELALSGLLRPVRGALAMAWQGMQAKRAFVLPEENAGQAAVMRGITVYGARSLGEVAAHLNGIEPLAQTECQVPQMPFEHGGQPDLCDVKGQHTARLALEIAAAGGHSLLMMGPPGTGKSMLSQRLPGILPPLTEDELVEVWALRSLLPNHQQQLDSNRPFRSPHHSASAAAMVGGGSDPRPGEISLAHHGVLFLDELPEFDRKVLEVLREPLENGEIHISRAARQAVYPAKFQLVAAMNPCPCGYLGHPVKPCRCTPESVARYRSKISGPLLDRIDLTIEVPSLSAAELMQQEAGESSASVLERVIAARDKQYARQGKVNAALSVSELDTSARIQKEAQEALGGLLEKLSLSARSFHRIMRVARTLADLAGDEEVGRSHVMKAIGFRRAL

SEQ ID NO: 7482 - protein, 1155 aa, Neisseria meningitidis
  misc_feature 1150, 1151: 'Xaa' is any amino acid
MNEGEVVLTPEQIQTLRGYAFRGDTYGGWRYLANLGDRYADDAAAIVGKDANLNGLNLWMKKGVENLWDDTVGKKTRLEKFDRVALQHFSQYVDLINENNGRLPNTSEIERSYYKAVTENGVSSSAAIDLVINRSLPDMADGYWALGLGIEAERIHNEQAVNNPNGSERDNRKQLISALDKGFDGSFKEKHFTFLQSVIMDVTKLGVEYTIDGWQKIGGWGNGIINDLYKSVVKREWTGIFEIVNNNIKQFRDLFPNPEGWIDDGHQCFAPWVKETKKRNGKYHVYDPLALDLDGDGIETVAAKGFSGSLFDHTNNGIRTATGWVSADDGLLVRDLNGNGIIDNGAELFGDNTKLADGSFAKHGYAALAELDSNGDNIINAADAAFQSLRVWQDLNQDGISQANELRTLEELGIQSLDLAYKDVNKNLGNGNTLAQQGSYTKTDGTTAKMGDLLLAADNLHSRFKDKVELTAEQAKAANLAGIGRLRDLREAAALSGDLANMLKAYSAAETKEAQLALLDNLIHKWAETDSNWGKKSPMRLSTDWTQTANEGIALTPSQVAQLKKNALVSLSDKAKAAIDAARDRIAVLDAYTGQDSNTLYYMSEEDALNIVKVTNDTYDHLAKNIYQNLLFQTRLQPYLNQISFKMENDTFTLDFSGLVQAFNHVKETNPQKAFVDLAEMLAYGELRSWYEGRRLMTDYVEEAKKAGKFEDYQKVLGQETVALLAKTSGTQADDILQNVGFGHNKNVSLYGNDGNDTLIGGAGNDYLEGGSGSDTYVFGEGFGQDTVYNYDYATGRKDIIRFTDGITADMLTFTREGNHLLIKAKDGSGQVTVQSYFQNDGSGAYRIDEIHFDNGKVLDVATVKELVQQSTDGSDRLYAYQSGNTLNGGLGDDYLYGADGDDLLNGDAGNDSIYSGNGNDTLDGGEGNDALYGYNGNDALNGGEGNDHLNGEDGNDTLIGGAGNDYLEGGSGSDTYVFGKGFGQDAVYNYDYATGRKDIIRFTDGITADMLTFTREGNHLLIKAKDGSGQVTVQSYFQNDGSGAYRIDEIHFDNGKVLDVATVKELVQQSTDGSDRLYAYQSGNTLNGGLGDDYLYGADGDDLLNGDAGNDSIYSGNGNDTLNGGEGNDALYGYNGNDALNGGEGNDHXXHTLN

SEQ ID NO: 7483 - protein, 66 aa, Neisseria meningitidis; identical to SEQ ID NO: 2062

SEQ ID NO: 7484 - protein, 165 aa, Neisseria meningitidis
MNSLPIADLLVSAVIAACIVLSAMRGVIAEAGSMAAWVVSFFFAKLFAASFADLAFASFQPRLFALALSFISLFVIACLIQKMLRSLLTSAVSAVGLGFANRILGGVFGALKGVLIVTLLVMLASKTDLPDTEEWRQSYTLPFFVSLSEAVLNHSGGTAETPEDD

SEQ ID NO: 7485 - protein, 408 aa, Neisseria meningitidis; identical to SEQ ID NO: 1777

SEQ ID NO: 7486 - protein, 206 aa, Neisseria meningitidis
MKPQFITLDGIDGAGKSTNLAVIKAWFERRGLPVLFTREPGGTPVGEALREILLNPETKAGLRAETLMMFAARMQHIEEVILPALSDGIHVVSDRFTDATFAYQGGGRGMPSEDIEILEHWVQGGLKPDLTLLLDVPLEVSMARIGQTREKDRFEQEQADFFMRVRGVYLDRAAACPERYAVIDSNRNLDEVRNSIEKVLDGHFGC

SEQ ID NO: 7487 - protein, 284 aa, Neisseria meningitidis
LFSEHGGLEMKPDIYALLERALLSGDPDEKGRLTDEAFAAVQNADGAETNAPPADFPRAGRPDKPVLVAPSQLTPRKMNTTEGYAAMLHAIAHIEFNAINLALDAAYRFRTLPFQFVRDWVKVAKEEVYHFRLMRERLRAFGFDYGDFEAHNHLWDMAYKTAYDPLLRMALVPRVLEARGLDVTPGIRAKVAQRGDSETCGVLDIIYRDEVGHVAIGNRWYQHLCRERGLEPVALFRSLIARYDMFIFRGYVNIEAREKAGFSRFELDMLEDFEQGLKQNKHAV

SEQ ID NO: 7488 - protein, 100 aa, Neisseria meningitidis
MQRQSLTNADGEVRELAAEDFALARPIAEALPEDLAQVLFSHQKQLEEKGVMQKRNTGKTPKQLVTIRLSADVVEKFRAGGKGWQTRINEVLRQYIAQLK

SEQ ID NO: 7489 - protein, 253 aa, Neisseria meningitidis
MTEFVVLIPARLDSSRLPGKALADIHGKPMVVRVAEQAAKSKAARVVVATDHPDIQTACQAHGIEVVMTSNRHESGTTRLAEASVALKLPPHLIVVNVQGDEPLIAPELIDRTAEVLVENNVQMATAAHELHDFDELMNPNAVKVVLDKNRNAIYFSRAPIPYPRDAIRAGKREMPSETAVLRHIGIYAYRAGFLQRYAEMSVSPLETIESLEQLRVLWHGYPIAVETAKEAPAAGVDTQEDLDRVRAVFQTV

SEQ ID NO: 7490 - protein, 524 aa, Neisseria meningitidis
MFRRYLPNRQMNMVSKLDKYWQHPALYWPLLILFAAATPFTFAPYYHFWLMPLIFGAFVRLIELRPRFAVSSAYLFGLTAYTTQFYWIHTALHDVSGLPDLYAVPLTFLLPAYLALYPALCFWLWKKFTLPRGIKIGLVLPILWTLTEFARERFLTGFGWGAIGYSQITPDSPLAGFAPLGGIHMVTLATAFLGVWLVLASNNTARSGKRLLPIILIAALLAAGYTARQTDFTRPDGSRSTVALLQGNIDQTLKWREDQVIPTIQKYYEQVGKTTADIVILPETAIPVMRQNLPENILAKFAEQAQNNGSALAVGISQYTSDGNGYENAVINLTGYQENNQDGIPYYAKNHLVPFGEYKPLPFLTTPLYKMMDMPLSDFRKGGGKQSALLMKNQKIAFNICYEDGFGDELIAAAKDATLLANASNMAWYGKSNAMYQHLQQSQARAMELGRYMVRATNTGATAIISPKGNIIAQAQPDTETVLEGHIKGYVGETPYMKTGSSWWLMGILALAALILFIFRNKEH

SEQ ID NO: 7491 - protein, 524 aa, Neisseria meningitidis; identical to SEQ ID NO: 2756

SEQ ID NO: 7492 - protein, 513 aa, Neisseria meningitidis
MKFLDREASIAKPGFNRWLVPPAALAVHLAIGQIYAYSVFNAPLTKLIGITESAAGDWKLTTVGWIFSIALAMLGASAALFGTWMERVGPRKAIFAAACCFSLGFFVSAFGVRTHNLFLLYLGNGVIGGVGLGLGYIGPVSTLMKWFPDKPGMATGLAIMGFGGGAMLASPLSVSLMNTFSNAASVGVAETFAVLGLLYLALMMFGAFTIRVPADGWKPEGYTAPKTQNKLVSSNHVNVSQAMKTPQFWLLFWVLCLNVTAGIGVLGQASVMIQELFSETSIGRQAAVGAGAAAGFVSLLSLFNMGGRFLWSSVSDKIGRKNTYTIFFVLGSLLYFAVPSIGEGGSKALFIIGFCVIISMYGGGFAAIPAYLKDLFGTYQVGAIHGRILLAWSTAAVIGPVLVNYIRQSQIDSGIPAAQAYSVTMYIMACLLIIGLLCNLAVKSVHEKHHEKDIKTAAHSGNPDDETAISDAYLVGEKVSGGGISVWWRWALAVIPLAYGVVMVFVKALDLFS

SEQ ID NO: 7493 - protein, 1978 aa, Neisseria meningitidis
MNKGLHRIIFSKKHSTMVAVAETANSQGKGKQAGSSVSVSLKTSGDLCGKLKTTLKTLVCSLVSLSMVLPAHAQITTDKSAPKNQQVVILKTNTGAPLVNIQTPNGRGLSHNRYTQFDVDNKGAVLNNDRNNNPFVVKGSAQLILNEVRGTASKLNGIVTVGGQKADVIIANPNGITVNGGGFKNVGRGILTTGAPQIGKDGALTGFDVRQGTLTVGAAGWNDKGGADYTGVLARAVALQGKLQGKNLAVSTGPQKVDYASGEISAGTAAGTKPTIALDTAALGGMYADSITLIANEKGVGVKNAGTLEAAKQLIVTSSGRIENSGRIATTADGTEASPTYLSIETTEKGAAGTFISNGGRIESKGLLVIETGEDISLRNGAVVQNNGSRPATTVLNAGHNLVIESKTNVNNAKGPATLSADGRTVIKEASIQTGTTVYSSSKGNAELGNNTRITGADVTVLSNGTISSSAVIDAKDTAHIEAGKPLSLEASTVTSDIRLNGGSIKGGKQLALLADDNITAKTTNLNTPGNLYVHTGKDLNLNVDKDLSAASIHLKSDNAAHITGTSKTLTASKDMGVEAGSLNVTNTNLRTNSGNLHIQAAKGNIQLRNTKLNAAKALETTALQGNIVSDGLHAVSADGHVSLLANGNADFTGHNTLTAKADVNAGSVGKGRLKADNTNITSSSGDITLVAGNGIQLGDGKQRNSINGKHISIKNNGGNADLKNLNVHAKSGALNIHSDRALSIENTKLESTHNTHLNAQHERVTLNQVDAYAHRHLSITGSQIWQNDKLPSANKLVANGVLALNARYSQIADNTTLRAGAINLTAGTALVKRGNINWSTVSTKTLEDNAELKPLAGRLNIEAGSGTLTIEPANRISAHTDLSIKTGGKLLLSAKGGNAGAPSAQVSSLEAKGNIRLVTGETDLRGSKITAGKNLVVATTKGKLNIEAVNNSFSNYFPTQKAAELNQKSKELEQQIAQLKKSSPKSKLIPTLQEERDRLAFYIQAINKEVKGKKPKGKEYLQAKLSAQNIDLISAQGIEISGSDITASKKLNLHAAGVLPKAADSEAAAILIDGITDQYEIGKPTYKSHYDKAALNKPSRLTGRTGVSIHAAAALDDARIIIGASEIKAPSGSIDIKAHSDIVLEAGQNDAYTFLKTKGKSGKIIRKTKFTSTRDHLIMPAPVELTANGITLQAGGNIEANTTRFNAPAGKVTLVAGEELQLLAEEGIHKHELDVQKSRRFIGIKVGKSNYSKNELNETKLPVRVVAQTAATRSGWDTVLEGTEFKTTLAGADIQAGVGEKARADAKIILKGIVNRIQSEEKLETNSTVWQKQAGRGSTIETLKLPSFESPTPPKLTAPGGYIVDIPKGNLKTEIEKLAKQPEYAYLKQLQVAKNVNWNQVQLAYDKWDYKQEGLTRAGAAIVTIIVTALTYGYGATAAGGVAASGSSTAAAAGTAATTTAAATTVSTATAMQTAALASLYSQAAVSIINNKGDVGKALKDLGTSDTVKQIVTSALTAGALNQMGADIAQLNSKVRTELFSSTGNQTIANLGGRLATNLSNAGISAGINTAVNGGSLKDNLGNAALGALVNSFQGEAASKIKTTFSDDYVAKQFAHALAGCVSGLVQGKCKDGAIGAAVGEIVADSMLGGRNPATLSDAEKHKVISYSKIIAGSVAALNGGDVNTAANAAEVAVVNNALNFDSTPTNAKKHQPQKPDKTALEKIIQGIMPAHAAGAMTNPQDKDAAIWISNIRNGITGPIVITSYGVYAAGWTAPLIGTAGKLAISTCMANPSGCTVMVTQAAEAGAGIATGAVTVGNAWEAPVGALSKAKAAKQAIPTQTVKELDGLLQESKNIGAVNTRINIANSTTRYTPMRQTGQPVSAGFEHVLEGHFHRPIANNRSVFTISPNELKVILQSNKVVSSPVSMTPDGQYMRTVDVGKVIGTTSIKEGGQPTTTIKVFTDKSGNLITTYPVKGN

SEQ ID NO: 7494 - protein, 282 aa, Neisseria meningitidis; identical to SEQ ID NO: 1323

SEQ ID NO: 7495 - protein, 446 aa, Neisseria meningitidis
MLNPSRKLVELVRILDEGGFIFSGDPVQATEALRRVDGSTEEKIIRRAEMIDRNRMLRETLERVRAGSFWLWVVAATFAFFTGFSVTYLLMDNQGLNFFLVLAGVLGMNTLMLAVWLAMLFLRVKVGRFFSSPATWFRGKDPVNQAVLRLYADEWRQPSVRWKIGATSHSLWLCTLLGMLVSVLLLLLVRQYTFNWESTLLSNAASVRAVEMLAWLPSKLGFPVPDARAVIEGRLNGNIADARAWSGLLVGSIACYGILPRLLAWVVCKILLKTSENGLDLEKPYYQAVIRRWQNKITDADTRRETVSAVSPKIILNDAPKWAVMLETEWQDGEWFEGRLAQEWLDKGVATNREQVAALETELKQKPAQLLIGVRAQTVPDRGVLRQIVRLSEAAQGGAVVQLLAEQGLSDDLSEKLEHWRNALAECGAAWLEPDRAAQEGRLKDQ

SEQ ID NO: 7496 - protein, 527 aa, Neisseria meningitidis
MPNKKKKAAFARAATENGVPDVSNIKNSYDDLMYESGAFSQTAINNLEARARLMGLQPAPAANAKVLELGCSMGGNIITQALYYPDAEFVGIDLSGRQVAQGNAIIEKMGLKNVRLEEKDILTIDESFGKFDYIIVHGIWSWVPDAVKDKIFSICWNNLTKHGIAYISYNVYPGWKRQEQLREIMYFAGRDVLEEPLEARTRKGLDALKALAEILENDKGLDGGGKLPAIQKILNHNFYYIAHEYMEAFNDPIYVNGFIEWANRHRLAYIGDTNLHVSFVSWMAEHTRERILALAGDDYIAKEFYSDILSDRQFRRSLLCREEVGDTVRRDESVAVEVIESLNFRPARGETINFDENDILLSGIRDVMKTGEAFKTEDVAENLARRFPGLEFDRMKINSQLLLQTILGRFSVSSDNAGKPFFEDHKTYVPARFTNYAAAFVEHGAEAFVRPANRYNESTPSFGYGHLYIMRQLSRPTSKQALIETVAENLNIVSTTPDGLTFHPPAEVYVEEILADLADRHFLVSAD

SEQ ID NO: 7497 - protein, 530 aa, Neisseria meningitidis
MRAFSVRNHKGSFMNRTYANFYEMLAAACRKNGNGTAVFDGKEKTAYRALKQEAEAVAAYLQNIGVKFGDTVALAVSNSTEFITAYFAISAIGAVAVPMNTFLKNSEYAYILNDCKARFLFASAGLSKELAGLKAQTPVEKIIWTDKSRPTGETAEGDAFFEDVRRFPEKPDLGRQPRINDLAHIIYTSGTTGHPKGALISYANLFANLNGIERIFKISKRDRFIVFLPMFHSFTLTAMVLLPIYMACSIILVKSVFPFSNVLKQTLLKRATVFLGVPAIYTAMSKAKIPWYFRWFNRIRLFISGGAPLAEQTILDFKAKFPRAKLLEGYGLSEASPVVAVNTPERQKARSVGIPLPGLEAKAVDEELVEVPRGEVGELIVRGGSVMRGYLNMPAATDETIVNGWLKTGDFVTIDEDGFIFIVDRKKDLIISKGQNVYPREIEEEIYKLDAVEAAAVIGVKDRYADEEIVAFVQLKEGMDLGENEIRRHLRTVLANFKIPKQIHFKDGLPRNATGKVLKRVLKEQFDGNK

SEQ ID NO: 7498 - protein, 76 aa, Neisseria meningitidis; identical to SEQ ID NO: 374

SEQ ID NO: 7499 - protein, 711 aa, Neisseria meningitidis
MNNPLVNQAAMVLPVFLLSACLGGGGGSFDLDSVDTEAPRPAPKYQDVSSEKPQAQKDQGGYGFAMRLKRRNWYPSAKENEVKLNEGDWEATGLPTEPKELPKRQKSVIEKVETDSDSNIYSSPYLTPSNHQNGGAGNGVNQPKNKAKGYENFQYVYSGWFYKHAKQNRDLPNNIVRQGDDGYIFYHGKEPSRQLPASGTVTYKGVWHFATDVKKSQNFREIIQPSKSQGDRYSGFSGDEGEEYSNKNEPTLQSGHEGYGFTSNLQVDFDNKKLTGKLIRNNANQNNTNNDKHTTQYYSLDATLKGNRFSGKAEATDKPKNGETKEHPFVSDSSSLSGGFFGPKGEELGFRFLSDDKKVAVVGSAKTKDKDANGNTEAASGGTGAAASGGAAAMPSENGKLTTVLDAVELTHGGTAIKKLDNFSNAAQLVVDGIMIPLLPEASESGNTNQGTNGGTAFTRKFDHTPKSDEKDTQAGTAENGNPAASNTAGDANGKTKTYEVEVCCSNLNYLKYGLLTRKTAGNTGEGGNGSQTAAQTDAQSMFLQGERTPVSDMAARTEANAKYRGTWYGHIANDTSWSGNASDKEGGNKADFTVNFGEKKITGTLTAENRQAATFTIEGTIQDNGFSGTAKTADLGFDLDQSNTTGTPKAYITNAKVQGGFYGPKAEEMGGWFAYPGDKQTENATVASGNGNSASSATVVFGAKRQQLVQ

SEQ ID NO: 7500 - protein, 680 aa, Neisseria meningitidis
MMSPETRKQLKITDVSAKKLDKLNLHTAWDLVLHLPLRYEDETHIMPIKDAPIGVPCQVEGEVIHQEVTFKPRKQLIVQIADGSGSVLFLRFIHFYASHQKQTAVGKRIRAVGEIKHGFYGDEMIHPKIRDAEGGGLAESLTPVYPTVNGLNQPTLRRIIQTALDVTPLHDTLPDALLCRLKLPHLAESLRLLHSPPPSFTIHQLSDGTLPAWQRLKFDELLAQQLSMRLARQKRIGGTAAALGGDGTLTQALRQALPFALTDAQEKVVSEICRDMAQTYPMHRLLQGDVGSGKTIVAALSALTAIESGAQVAVMAPTEILAEQHFIKFKQWLEPLGIEVVRLFGSLRKKAKDEAKAKLADGSVKIAVGTHALFSDGVAFHNLGLTIVDEQHRFGVAQRLALKNKGREVHQLMMSATPIPRTLAMSFFADLDVSVIDELPPGRTPIKTRLVNNVRRAEVEGFVLGTCRKGRQAYWVCPLIEESETLQLQTAAETLARLQTALPELNIGLVHGRMKAAEKAEVMARFSSGGLNVLVATTVIEVGVDVPNAALMVIEHAERMGLAQLHQLRGRVGRGAAESVCVLLFAEPLGELAKARLKVIYEHTDGFEIARQDLNIRGPGEFLGARQSGVPMLRFAKLEEDLHLLEQARETAPMLIEQNPEIVEAHLARWLSGREGYLGV

SEQ ID NO: 7501 - protein, 355 aa, Neisseria meningitidis
LFCRIGNFAFCGVVSAGCLLNNKHSYSYAKEPHTVKPRFYWAACAVLLTACSPEPAAEKTVSAASASAATLTVPTARGDAVVPKNPERVAVYDWAALDTLTELGVNVGATTAPVRVDYLQPAFDKAATVGTLFEPDYEALHRYNPQLVITGGPGAEAYEQLAKNATTIDLTVDNGNIRTSGEKQMETLARIFGKEARAAELKAQIDALFAQTREAAKGKGRGLVLSVTGNKVSAFGTQSRLASWIHGDIGLPPVDESLRNEGHGQPVSFEYIKEKNPDWIFIIDRTAAIGQEGPAAVEVLDNALVRGTNAWKRKQIIVMPAANYIVAGGARQLIQAAEQLKAAFKKAEPVAAGKK

SEQ ID NO: 7502 - protein, 168 aa, Neisseria meningitidis
MFEQEDEWISKTQMKKQMNDLQDLGMALTKLSNDTLKKIGLDADLYEAVTAYKKITSNGALKRQAQFIGRLMRDTDPAPIEAFLAKLRGDDAAHNAFLQRVEQARVRLLADDGALTQFMSDFPHADAGKLRTLIRNTKKEQEQNKPPKNFRALFQELKTVMENGDAEI

SEQ ID NO: 7503 - protein, 134 aa, Neisseria meningitidis
MTAQPCPICTAQNEDVLLQTPNLRVIAVHNDSGSPAFCRVIWRKHIAEMTDLSAAERGELMEMVYKVEAAMRQVFRPAKINLASLGNVVPHLHWHIIARFENDASFPAPIWANPVRKHGMTLPQDWTEQLKKLL

SEQ ID NO: 7504 - protein, 213 aa, Neisseria meningitidis
MLKPETIHISGPAGILETIHIPSEQVPARGVAVINHPNPLQGGTNTNKVIQTAAKALSKLGFHCYLPNLRGVGGSGGTHDYGRGETQDCLAVIDYARAQHPEAPEFALSGFSFGGYVATFAAQARTPDLLLLIGAAVCHYTDRPEPSAVPNVAKTLMIHGAEDEVVEIGKALKWAEPQDLPVITIAGSTHFFHGKLIVLRDTILRFAPVCLNG

SEQ ID NO: 7505 - protein, 412 aa, Neisseria meningitidis
MAFYAFKAMRAAALAAAVALVLSSCGKGGDAAQGGQPAGREAPAPVVGVVTVHPQTVALTVELPGRLESLRTADVRAQVGGIIQKRLFQEGSYVRAGQPLYQIDSSTYEAGLESARAQLATAQATLAKADADLARYKPLVAAEAVSRQEYDAAVTAKRSAEAGVKAAQAAIKSAGISLNRSRITAPISGFIGQSKVSEGTLLNAGDATVLATIRQTNPMYVNVTQSASEVMKLRRQIAEGKLLAADGVIAVGIKFDDGTVYPEKGRLLFADPAVNESTGQITLRAAVPNDQNILMPGLYVRVLMDQVAVDNAFVVPQQAVTRGAKDTVMIVNAQGGMEPREVTVAQQQGTNWIVTSGLKDGDKVVVEGISIAGITGAKKVTPKEWASSENQAAAPQSGVQTASEAKPASEAK

SEQ ID NO: 7506 - protein, 336 aa, Neisseria meningitidis
MSKKRVLTGVTTTGIPHLGNYVGAIRPAVRAAQNLDTESFLFLADYHGIIKCHEPEMIHQSTQAVAATWLACGLDPERTTFYRQSDTPEVMELNWILTCITAKGLMNRAHAYKAAVQANAENGQEDPDFGVEMGLFSYPILMTADILMFNANEVPVGRDQIQHVEMARDIAGRFNHRFRELFTLPEVKIDENVELLVGLDGRKMSKSYGNTIPLWENDKKTQKSVNKIITNMKEPGEPKQPDESPLFEIYKAFSTPSETVEFTKMLADGLAWGEAKKLLAAKINAELAEPRERYNELTADPSQIEEILQAGAAKARKEARELLDKVRDAVGIRPLK

SEQ ID NO: 7507 - protein, 274 aa, Neisseria meningitidis
LIQFRFSNTRNHLYMKTKLIKILTPFTVLPLLACGQTPVSNANAEPAVKAESAGKSVAASLKARLEKTYSAQDLKVLSVSETPVKGIYEVVVSGRQIIYTDAKGGYMFVGELINIDTRKNLTEERAADLNKIDFASLPLDKAIKEVRGNGKLKVAVFSDPDCPFCKRLEHEFEKMTDVTVYSFMMPIAGLHPDAARKAQILWCQPDRAKAWTDWMRKGKFPVGGSICDNPVAETTSLGEQFGFNGTPTLVFPNGRSQSGYSPMPQLEEIIRKNQ

SEQ ID NO: 7508 - protein, 236 aa, Neisseria meningitidis
MTSCEPVKEQTSFNNPEPMTGFEHTVTFDFQGIKMVIPYGYLARYTQDNATKWLSDTPGQDAYSINLIEISVYYKKTDQGWVLEPYNQQNKAHFIQFLRDGLDSVDDIVIRKDACSLSTTMGERLLTYGVKKMPSAYPEYEAYEDKRHIPENPYFHKLYYIKKGENPAIITHRNNRINQTEEDNYSTSVGSCINGFTVRYYPFIREKQQLTQQELVGYHQQVEQLVQSFVNNPSKK

SEQ ID NO: 7509 - protein, 259 aa, Neisseria meningitidis; identical to SEQ ID NO: 331

SEQ ID NO: 7510 - protein, 279 aa, Neisseria meningitidis
MTATAAAIDRLLPQTQCRECGYDGCLPYAQAVATGEAYNLCAPGGEAVIRDISALLGKPLVAPAKTQAKALARIDESACIGCTACIRACPADAIMGAGKLMHTVIADECTGCGLCVAPCPVDCIHMQPVADTVLPRARRFSLSADSRFAAAEHARARYLKRNERKQREADERKAMLAEREAAVRNARPQTPDTPKKPAFNPADLIAKAMAKAQTQQDRLAAADNRKDYQAKQIAEARERAELRRAQRDMKYGSDSEKAAALEYLKQYKAKQDAAQNTAS

SEQ ID NO: 7511 - protein, 392 aa, Neisseria meningitidis; identical to SEQ ID NO: 276

SEQ ID NO: 7512 - protein, 558 aa, Neisseria meningitidis
LQKPTAKNAKLGDNTALKIHPILIKPSTKEIQMSSIKRALISLSDKTGAVEFAQTLHKLGVEILSTGGTAKLLADAGVPVIEVADYTGFPEMLDGRVKTLHPKIHGGILGRRDLDEHVAKMEEHGIGNIDLVCVNLYPFAATIAKPNCTLEDAIENIDIGGPTMVRSAAKNWKHVAIVTDTADFPAIAAELEANNGALSDKTRFNLSRKAFSHTAQYDGMISNYLTSLSDDVLSGTPEIAGFPGRFNQSWIKVQDMRYGENPHQRAAFYRDIDPAAGSLAAYKQLQGKELSYNNIADADAAWEAVKSFDVPACVIVKHANPCGVAIASNTLDAYKLAYATDTTSAFGGIIAFNREVDGATVKQITDNQFMEVLMAPKFTAEALEIAAAKKNVRVLEVPLEAGANRFELKRVGGGLLVQTPDIHRISRADLKVVSKRQPTEQEWNDLLFVWNVAKYVKSNAIVFGKGGQTYGIGAGQMSRVDSTRIAARKAQDAGLDLNGACAASDAFFPFRDGVDVIAEQGIKAIIHPAGSMRDQEVFDAADEHGIAMVVTGIRHFRH

SEQ ID NO: 7513 - protein, 153 aa, Neisseria meningitidis
MSDLPSISRFLADEAATLDLGAAWSSRLNAPLVIYLEGDLGAGKTTLTRGILRGLGHQGAVKSPTYAIVESYPLERFTLHHFDLYRFSFPEEWEDAGLDELFAANSVCLIEWPQQGGEFTPPADITATLTHDGDGRKCLLTAHTERGRESLPL

SEQ ID NO: 7514 - protein, 304 aa, Neisseria meningitidis; identical to SEQ ID NO: 3139

SEQ ID NO: 7515 - protein, 344 aa, Neisseria meningitidis
MQTLTIIRPDDMHLHLRDGDALKAVAPYTARQMGRAVIMPNLKPPVVSVADALAYKARIMAALPEGSAFEPLMTLYLTDNATPELVREAKAAGIVAFKLYPAGATTNSDSGVTDLFKLIPVLEEMAKQGILFLVHGEVTDPEIDIFDREAAFIGRVMKPVLAQVPNLKVVFEHITTAEAARLVLEAGDNVAATVTPQHLLLNRNDLLVGGVRPHHFCLPVLKRETHRQALVAAVTGEKAHKFFLGTDSAPHAKSAKENACGCAGMFSAMTAIELYAEVFEKAGALDKLEAFASKNGARFYGIPENTDTITLVKQSQTVPASVPYGDGELVPMRAGGEIGWTVQY

SEQ ID NO: 7516 - protein, 591 aa, Neisseria meningitidis
MNKIYRIIWNSALNAWVVVSELTRNHTKRASATVKTAVLATLLFATVQASANNEEQEEDLYLDPVQRTVAVLIVNSDKEGTGEKEKVEENSDWAVYFNEKGVLTAREITLKAGDNLKIKQNGTNFTYSLKKDLTDLTSVGTEKLSFSANGNKVNITSDTKGLNFAKETAGTNGDTTVHLNGIGSTLTDTLLNTGATTNVTNDNVTDDEKKRAASVKDVLNAGWNIKGVKPGTTASDNVDFVRTYDTVEFLSADTKTTTVNVESKDNGKKTEVKIGAKTSVIKEKDGKLVTGKDKGENGSSTDEGEGLVTAKEVIDAVNKAGWRMKTTTANGQTGQADKFETVTSGTNVTFASGKGTTATVSKDDQGNITVMYDVNVGDALNVNQLQNSGWNLDSKAVAGSSGKVISGNVSPSKGKMDETVNINAGNNIEITRNGKNIDIATSMTPQFSSVSLGAGADAPTLSVDGDALNVGSKKDNKPVRITNVAPGVKEGDVTNVAQLKGVAQNLNNRIDNVDGNARAGIAQAIATAGLVQAYLPGKSMMAIGGGTYRGEAGYAIGYSSISDGGNWIIKGTASGNSRGHFGASASVGYQW

SEQ ID NO: 7517 - protein, 139 aa, Neisseria meningitidis
MAQLPLYLTSEIKDFTVGTPKVLESFSKHIPYGVVFEDDGDTGYFYAASQDGILDALHIYNVEDVSDKHIPNHVLILWDDACTIAALCINDYIHAVYDFVEQAGYCRNGFPEAGGEWVKVENRVLDDELLDKILSRKST

SEQ ID NO: 7518 - protein, 178 aa, Neisseria meningitidis; identical to SEQ ID NO: 1654

SEQ ID NO: 7519 - protein, 46 aa, Neisseria meningitidis
MDTLLKIIIALSFSGAEALAVWLFITAADAVLRRFQKPSHYRRVKK

SEQ ID NO: 7520 - protein, 144 aa, Neisseria meningitidis; identical to SEQ ID NO: 4312

SEQ ID NO: 7521 - protein, 153 aa, Neisseria meningitidis
MNIIMDSTRKFGILWEENSECNGFIYGKIQIIIGENIYPKICPYGYFTLNAVFNSLKSSFEEKYYAGGNNGLDFGEQLFDIDKYNSLELCNIFSIDTTYMSGGGNCEIDCLVLEMGYSGEEERLFYSFDNGKNFKEIRYKKGTVESVIFQLNL

SEQ ID NO: 7522 - protein, 262 aa, Neisseria meningitidis
MMENGKTVPRWRFALKSAGWHLLISLSVAGLAALLVFKVWYPYPYAELTGGLSLYQLVVAVDIVCGPLLTLILASPKKKTKARMVDFSMVGIIQLAALVYGLHSVSLARPVVEAFEQDRMTIVTAAEVVVEDLHKAPEGLQSLSWFGIRRIALKEPEDADEKNKTLDLSLKGIEPSMRPDQWLPYSDKEAEEIRKHLKPLKVLADARKTTVADILKQAGLAEGEELYYLPFTSSRQKEWIVITDKEGNTKGYAPIDGFIITP

SEQ ID NO: 7523 - protein, 528 aa, Neisseria meningitidis; identical to SEQ ID NO: 2150

SEQ ID NO: 7524 - protein, 201 aa, Neisseria meningitidis
MTRQSLQQAAESRRSIYSLNKNLPVGKDEVVQIVEHAVLHTPSSFNSQSARVVVLFGEEHDKVWQFVEDALRAVVPADSFEPTAQKLNLFKAGAATILFYEDQNVVKGLQEQFPAYAANFPVWADQANAMVQYAVWTTLAAVGVGANLQHYNPLPDAAIAKAWNIPENWLLRAQMVVGGIEGAAGEKTFEPVAERLKVFGA

SEQ ID NO: 7525 - protein, 367 aa, Neisseria meningitidis
MLILQAERDSLLKPLQAVTGIVERRHTLPILSNVLIEGKGGQTKLLATDLEIQIDTTGPESGAGDFRITTNAKKFQDILRALPAGALVSLDWDDSRLTLKAGKSRFALQTLPAADFPMMNVGEDISATFSLEQERFKTMLSQVQYSMAVQDIRYYLNGLLMQVEGSQLRLVATDGHRLAYAACAIDADLPRAEVILPRKTVLELFKLLNNPDDPIQIELLDKQVRFQCNGTTIVSKVIDGKFPDFNRVIPLDNDKIFVLSRAELLGALERVSILANEKFRGARLFLQPGLLSVVCSNNEQEEAREEIEIAYQGGELEAGFNIGYLMDVLRNIHSDDMQLAFGDANRSTLFTVPNNPNFKYIVMPMRI

SEQ ID NO: 7526 - protein, 867 aa, Neisseria meningitidis
MSKTVHYLKDYQTPAYHILKTDLHFDINEPQTVVKSRLTVEPQRVGEPLVLDGSAKLLSVKINGAAADYVLEGETLTIAGVPSERFTVEVETEILPAENKSLMGLYASGGNLFTQCEPEGFRKITFYIDRPDVMSKFTTTIVADKKRYPVLLSNGNKIDGGEFSDGRHWVKWEDPFSKPSYLFALVAGDLAVTEDYFTTMSGRNVKIEFYTTEADKPKVGFAVESLKNAMKWDETRFGLEYDLDIFMVVAVGDFNMGAMENKGLNIFNTKFVLADSRTATDTDFEGIESVVGHEYFHNWTGNRVTCRDWFQLSLKEGLTVFRDQEFSGDRASRAVRRIENIRLLRQHQFPEDAGPTAHPVRPASYEEMNNFYTMTVYEKGAEVVRMYHTLLGEEGFQKGMKLYFQRHDGQAVTCDDFRAAMADANGINLDQFALWYSQAGTPVLEAEGRLKNNIFELTVKQTVPPTPDMTDKQPMMIPVKVGLLNRNGEAVAFDYQGKRATEAVLLLTEAEQTFLLEGVTEAVVPSLLRGFSAPVHLNYPYSDDDLLLLLAHDSDAFTRWEAAQTLYRRAVAANLATLSDGVELPKHEKLLAAVEKVISDDLLDNAFKALLLGVPSEAELWDGAENIDPLRYHQAREALLDTLAVHFLPKWHELNRQAAKQENQSYEYSPEAAGWRTLRNVCRAFVLRADPAHIETVAEKYGEMAQNMTHEWGILSAVNGNESDTRNRLLAQFADKFSDDALVMDKYFALVGSSRRSDTLQQVRTALQHPKFSLENPNKARSLIGSFSRNVPHFHAEDGSGYRFIADKVIEIDRFNPQVAARLVQAFNLCNKLEPHRKNLVKQALQRIRAQEGLSKDVGEIVGKILD

SEQ ID NO: 7527 - protein, 84 aa, Neisseria meningitidis
MFDGEVEADESYFGGQRKGKRGRGAAGKVAVFGLLKRNGKVYTVTVPNTQTATLFPIIREQVKPDSIIYTDCYRSYDVIRCERI

SEQ ID NO: 7528 - protein, 187 aa, Neisseria meningitidis
MKILALLIAATCALSACGSQSEEQPASAQPQEQAQSELKTMPVSYTDYQSAANKGLNDQKTGLTLPEHVVPIDNAEGKNLLHDFSDGLTILTVDTDKADKITAVRVVWNTDAMPQKAEKLSKAAAALIAATAPEDRTMLRDTGDQIEMAIDSHNAQKEPTREWARGGIAYKVTVTNLPSVVLTAKAE

SEQ ID NO: 7529 - protein, 96 aa, Neisseria meningitidis; identical to SEQ ID NO: 4744

SEQ ID NO: 7530 - protein, 66 aa, Neisseria meningitidis; identical to SEQ ID NO: 3365

SEQ ID NO: 7531 - protein, 277 aa, Neisseria meningitidis
MAIVKMKPTSAGRRGMVRVVTEGLYKGAPYAPLLEKKNSTAGRNNNGHITTRHKGGGHKHHYRVVDFKRNKDGIPAKVERIEYDPNRTAFIALLCYADGERRYIIAPRGIQAGAVLVSGAEAAIKVGNTLPIRNIPVGTTIHCIEMKPGKGAQIARSAGASAVLLAKEGAYAQVRLRSGEVRKINVDCRATIGEVGNEEQSLKKIGKAGANRWRGIRPTVRGVVMNPVDHPHGGGEGRTGEAREPVSPWGTPAKGYRTRNNKRTDNMIVRRRYSNKG

SEQ ID NO: 7532 - protein, 354 aa, Neisseria meningitidis
MISLKNDTFLRALLKQPVEYTPIWMMRQAGRYLPEYKATRAKAGSFLDLCKNTELATEVTIQPLERFDLDAAILFSDILTVPDAMGLGLYFAEGEGPKFKRALQHEADIAKLHVPDMEKLQYVFDAVTSIRKALDGRVPLIGFSGSPFTLACYMVEGGGSKEFRTIKTMMYSRPDLLHKILDTNAQAVTAYLNAQIDAGAQAVQIFDTWGGVLSDAAFKEFSLKYIRQIVAGLKRESEGRRVPVIVFAKGGGLWLESMAQIGADALGLDWTCNIGEARRRVGKQVALQGNFDPFALFGTPESIRTEVARILADYGHGSGHVFNLGHGINQHADPEHAKILVDTVHELSRQYHGG

SEQ ID NO: 7533 - protein, 275 aa, Neisseria meningitidis
MKLIEQHQIFGGSQQVWAHHAQTLQCEMKFAVYLPNNPENRPLGVIYWLSGLTCTEQNFITKSGFQRYAAEHQVIVVAPDTSPRGEQVPNDDAYDLGQSAGFYLNATEQPWAANYQMYDYILNELPRLIEKHFPTNGKRSIMGHSMGGHGALVLALRNQERYQSVSAFSPILSPSLVPWGEKAFTAYLGKDREKWQQYDANSLIQQGYKVQGMRIDQGLEDEFLPTQLRTEDFIETCRAANQPVDVRFHKGYDHSYYFIASFIGEHIAYHAAFLK

SEQ ID NO: 7534 - protein, 118 aa, Neisseria meningitidis
MAERNNAALQEAITIVNGLAKTDGCILATYTSDTPDKKKDREAILTVLNQREFVCAGVLGGALHEKMYKDFEYSMLLRDWDNLSSFIFEIRRIRSAPTAFQEFEAVARKWKKKPLKTK

SEQ ID NO: 7535 - protein, 143 aa, Neisseria meningitidis
MGSNAWLFWALASAGFASLTAIFAKMGLQGIDSDFATFIRTLVILAALLLFLTYTGKWQGVNGFTGRNWTFLILSGLATGASWLAYFKALQLGNASQVAPIDKFSLVLVALMAVVFLDERPNTQEWIGLGLVTAGVLVLALKR

SEQ ID NO: 7536 - protein, 162 aa, Neisseria meningitidis
MTVLTVILALALIAVGTAGIVYPALPGLALMFAGTWLLAYAGGYQIYGAGVLWTVGLISLAGILADYVAGIWGTKYTGAGKLAVRGALAGSIIGIFFSLPGLILGPFIGAAAGELIERRNMLQAGKAGLGTLLGLVVGTAFKIGCAVSILFILLVKYIAYLF

SEQ ID NO: 7537 - protein, 82 aa, Neisseria meningitidis; identical to SEQ ID NO: 1233

SEQ ID NO: 7538 - protein, 431 aa, Neisseria meningitidis
MAQKIQSVKGMNDLLPVKQKDFKLTAAFWQAFEDTVGRWTRAYGYQQIRTPIVEQTGLFVRSIGEETDVVGKEMYTFSDSNDSLSLSLRPEGTASCLRAVVEHNLLYNSPQKLWYMGPMFRRERPQKGRYRQFHQVGIEALGFEGPDIDAEIIAMSADLWEKLGIREYLTLEINSLGNREERAAHRAALVEYLTRYEDKLDEDSKRRLKTNPLRVLDTKNPDLQEICNAAPRLVDYLGEDSQNHYVRFKAMLDGLGIQYIENPRLVRGLDYYNQTVFEWTTDKLGAQATVCGGGRYDGLIEELGGKPAPSIGFAMGIERLLLLVSEYGSLEVNAAPDVYAMHQGEGADLQVMKYAQALRAQGFNVMQHSGYQSLKAQMKKADNSGARFALIVAQDELANGTVTLKDMNGAHGQQTVAAEDLTPTLQQWKNA

SEQ ID NO: 7539 - protein, 69 aa, Neisseria meningitidis; identical to SEQ ID NO: 5143

SEQ ID NO: 7540 - protein, 288 aa, Neisseria meningitidis; identical to SEQ ID NO: 2832

SEQ ID NO: 7541 - protein, 414 aa, Neisseria meningitidis; identical to SEQ ID NO: 1660

SEQ ID NO: 7542 - protein, 263 aa, Neisseria meningitidis
MIALTGTAAAAQELQTANEFTVHTDLSSISSTRAFLKEKHKAAKHISVRADIPFDANQGIRLEAGFGRSKKNIINLETDENKLGKTKNVKLPTGVPENRIDLYTGYTYTQTLSDSLNFRVGAGLGFESSKDSIKTTKHTLHSSRQSWLAKVHADLLSQLGNGWYINPWSEVKFDLNSRYKLNTGVTNLKKDINQKTNGWGFGLGANIGKKLGESASIEAGPFYKQRTYKESGEFSVTTKSGDVSLTIPKTSIREYGLRVGIKF

SEQ ID NO: 7543 - protein, 201 aa, Neisseria meningitidis; identical to SEQ ID NO: 3643

SEQ ID NO: 7544 - protein, 280 aa, Neisseria meningitidis
MQNHVISLASAAERRAHIAATFGVRGIPFQFFDALMPSEELNRMMAELVPGLAKQHLLSEVEKACFMSHAVLWKQALDEGLPYVAVFEDDVLLGKDAEKFLAEDTWLEERFDKDSAFIVRLETMFAKVIVRPDKVLNYENRSFPLLESEHWGTAGYIISREAMRFFLERFAVLPAEWIKAVDWMMFTYFFDKEGMPVYQVNPALCTQELHYAKFLSKNSMLGSDLEKDREQERRHRRSLKVMFDLKRALGKFGREKKKRMERQRQAELEKAYGRRVISFK

SEQ ID NO: 7545 - protein, 258 aa, Neisseria meningitidis
MAKKFDKDSFSGTLIVVLAVSLICSVIVAGAVVGLKPIQEKQKLQDKQGYILSVAGLMDKDTDIGKTFAERIEQRVVDLATGEYVADAPKDFSARIAGKDPAQSIRIKTEDDLAGIKSRAKYTEVYLVKGEDGKIGQIILPMHGNGLWSVMYGFVAIQPDGNTINGITYYEQGETPGLGGEIGNPLWQQKFVGKKLFDGQGKLALHVGKGAGSDKEHGVDALSGASLTSKGVQGSFAYWFGENGYIPYLNKLKSAGAQ

SEQ ID NO: 7546 - protein, 115 aa, Neisseria meningitidis
MASSGVNKEIKGRKLSLWAKRQAGSVKWFCGQPVERDNAKAANDDVTAAAAANGKKIDTKHLPSTCRDAASAVCTKHPSIARITANGRKTSSFPRRRESRSVGTETYRVKRFLRS

SEQ ID NO: 7547 - protein, 467 aa, Neisseria meningitidis
VKPLRRLTNLLAACAVAAAALIQPALAADLAQDPFITDNAQRQHYEPGGKYHLFGDPRGSVSDRTGKINVIQDYTHQMGNLLIQQANINGTIGYHTRFSGHGHEEHAPFDNHAADSASEEKGNVDEGFTVYRLNWEGHEHHPADAYDGPKGGNYPKPTGARDEYTYHVNGTARSIKLNPTDTRSIRQRISDNYSNLGSNFSDRADEANRKMFEHNAKLDRWGNSMEFINGVAAGALNPFISAGEALGIGDILYGTRYAIDKAAMRNIAPLPAEGKFAVIGGLGSVAGFEKNTREAVDRWIQENPNAAETVEAVFNVAAAAKVAKLAKAAKPGKAAVSGDFADSYKKKLALSDSARQLYQNAKYREALDIHYEDLIRRKTDGSSKFINGREIDAVTNDALIQAKRTISAIDKPKNFLNQKNRKQIKATIEAANQQGKRAEFWFKYGVHSQVKSYIESKGGIVKTGLGD

SEQ ID NO: 7548 - protein, 117 aa, Neisseria meningitidis; identical to SEQ ID NO: 545

SEQ ID NO: 7549 - protein, 427 aa, Neisseria meningitidis; identical to SEQ ID NO: 146

SEQ ID NO: 7550 - protein, 114 aa, Neisseria meningitidis; identical to SEQ ID NO: 53

SEQ ID NO: 7551 - protein, 237 aa, Neisseria meningitidis
MMSPVLYLIPTPLGTPDTPCLLPHEQQAIVGLTDFVVEAEKTARAHLKHLGVTTPIRELNLQTLNEHTDLKTLPELLKPLQEGRSMGIVSEAGCPAVADPGANLVALAHKHGFEVRPLVGPSSLLLALMASGANGQNFAFKGYLPSEKNERIQSLKALEQRSRQQNETQLFIETPYRNDALLADAVENLHPETRLCVATDLTLPTQEIISQTIAQWRKRKEMPNLKKRPTIFVMYAG

SEQ ID NO: 7552 - protein, 91 aa, Neisseria meningitidis
MNASNWSVYLILCENSAFYCGISPNPQQRLAAHASGKGAKYTRVFKPVAMRIVAGGMDKGTALRQEIAVKKLTAAQKRQLWEQAEKMPSET

SEQ ID NO: 7553 - protein, 357 aa, Neisseria meningitidis
  misc_feature 3, 4: 'Xaa' is any amino acid
VCXXITSGDNKTALYVYDLESSGTLIKKIEVPGGKGGLSSPTLVDKDLDGTVDIAYAGDRGGSMYRFDLSNQDPNQWSVRAIFEGTKPITSAPAISQLKDKRVVIFGTGSDLSEDDVLSTSEQYIYGIFDDDTVANNVNVKLSGLGGGLLEQELKQEDKTLFLTDYKRSDGSGSKGWVVKLKGGQRVTVKPTVVLRTAFVTIHKYTGTDKCGAETAILGINTADGGKLTKKSARPIVPAENQAVAQYSGHKKGINGKSIPIGCMQKGNEIVCPNGYVYDKPVNVRYLDEKKTDGFSTTADGDAGGSGTFKEGKKPARNNRCFSGKGVRTLLMNDLDSLDITGPMCGMKRISWREVFY

SEQ ID NO: 7554 - protein, 321 aa, Neisseria meningitidis; identical to SEQ ID NO: 6649

SEQ ID NO: 7555 - protein, 1204 aa, Neisseria meningitidis
MSASIQAFDPLTVPISGTNLIEASAGTGKTYGIAALFTRLIVLEQKNVERVLVVTFTKAATAELKTRLRGRLDDVLQVLESKGIAKLGDDTLSDGIAAYCAEHHEGDTFLPELLKQALQKEGRTRLIVRLKAAIGQFDNAAIYTIHGFCQRILRDYAFLCQAPFDVEMTEEDGDRLLIPAQDFWRERVSNDPVLAALALKRKAVPQTVLAQISRYLSRPYLNFRRPQADLKQAQRNAETSWQTICRLLPELEAGFWRIHPDLNGNSYRKNSFGNLFKELAQKSAAGQLPFLDKDTHDRLLKLASDKLEAGLKKGKTPDAAVFAELQKLADFGRDLNALEEAEEATMIRLQLDLIEYLNRSLAEMKKSRRERGFDDLLLDVHTALTDNPHADTLARAVAENWETALIDEFQDTDPLQYEIFQKIFIAQNRPLFLVGDPKQAIYSFRGADIYAYLQAAEDARHRYTLATNYRSHAALIGSIGALFRLKERPFVLENIGYSEVGAARAESRLSPERPAVQVRWLHENDNEKANKDVLRRRAADYCADEIAHALNEAARGRLNFKGCPLQSGDIAVLVRTHNEAVMVSAALKKRQVQSVLLSRESVFASPEAAALSALIGFWLEPRRAGTLRFVLTSSIFGYDAQQLHDFNQNESEILHWAESARTALDNWNKYGIFAAMQQFSQTHGIETRLLSRNNGRSLTNYFQLLELLAAEDAQNRNPAALHKWLGDQISLAENNSGDNRAIRLESDEDLVKIVTMHASKGLQYPLVYCPFAWDAQDTGPSDWQILHQGANRTELLAKAQLSEDEQKQYADEEMAERLRLLYVALTRAEEQLNIYAAYSTNTADNPLAYLIEGSPQDSRETVRRAYACEKDGIAMLKRNWRRVADNAPSGTNFAFTENAPPPAAYRSNAGQTAEFAANSIPERGFRFVRHTSFTALSRHTQTPDGGEEDACPSLDAAETSVPAMPSETPTASDGISIHDFPKGTQAGLCLHEILEDFKFGQAAAGQETLIADKLKKYGFEEIWLPAVAEMAEACRKTPLTGAYDLSDISPECRCPEMGFTLHTEDFSLKRLRDWFARDDIRLPEVCRAAAETLDFHTVNGFLNGFVDMVCQDPDGNICVIDYKSNHLGTDASAYTQQAMDEAVAHHHYYLQALIYAVAAARYFKLRGQPPAAVSVRYLFLRGLDGKGGGVWRWDIDAAALEQIK

SEQ ID NO: 7556 - protein, 460 aa, Neisseria meningitidis
MARDNRIQMFPHEWRASTTLSGVYALRMLGMFLVLPVLAVYAASLPGAEGNKTLVGLAMGIYGLTQALLQLPLGIASDKFGRKKTIYAGLVVFAAGSFLAAAADTLPMLVAARAIQGAGAVSAAVTALLADLTRDGVRTRAMAMIGLSIGLTFSVSLVVAPVIADAVGVRGLFMLTGILTVISIGVVAWMTPDPEVSKLHEDTQAQPSRIGEVLKNRRLLTLDFGIFALHAAQMALFTALPFAMTQLGLEKIQHWKVYLPSTITGLVVMVPLIIVGETRNKLKQVFVLGIVCIAAAQLGLLSGMRSVGLITAYLVVYFIGFNVLEASLPSMVSKIAPSDLKGTAMGVYNTMQSLGLFAGGAAGGLLFQKYGFSGVFAFCSILMLLWLVIAVLSPAPKPVKNLSYPVGGVWQGNQEGLYRALSELEGVEDIGFSFDGQTVYLKVLQKGFDQAAAEKIITGV

SEQ ID NO: 7557 - protein, 451 aa, Neisseria meningitidis
MKAPELLLPAGGLERMRAAYDYGADAVYAGSPRYSLRARNNEFAKLDVLEQGIKEAHERNKKFFLTVNTLPHNSKLKTFVADMEPLIAMKPDALIMADPGLIMTVREKWPEMPIHLSVQANTTNYWGVKFWQNIGVERIILSRELSMEEIAEIRQECPDIELEVFIHGALCIAYSGRCLLSGYFNHRDPNQGTCTNSCRWDYKVHNATESDAGDAQLLQGFNFEKAQEEANQNFEGINGQKRHPYADKVFLIEESNRPGEMMPIMEDEHGTYIMNSKDLRGIEVVEKLAKIGVDSLKVEGRTKSLYYVARVAQSYRKAIDDAVAGRPFDYSLLSELEGLANRGYTSGFLERHQTQDYQNYLTGHSTAKQSQYVGHVTEIDENGWATVEVKNRFAVSDSLEIIHPSGNQTIKLEQMTRKGQPVDVAPGNGIQVKIPNMQGKEKALIARVLNP

SEQ ID NO: 7558 - protein, 335 aa, Neisseria meningitidis
MSTFFQQTAQAMIAKHIDRFPLLKLDQVIDWQPIEQYLNRQRTRYLRDHRGRPAYPLLSMFKAVLLGQWHSLSDPELEHSLITRIDFNLFCRFDELSIPDYSTLCRYRNWLAQDDTLSELLELINCQLTEKGLKVEKASAAVVDATIIQTAGSKQRQAIEVDEEGQVSGQTTPSKDSDARWIKKNGLYKLGYKQHTRTDAEGYIEKLHITPANAHECKHLSPLLEGLPEGTTVYADKGYDSAENRQHLEEHQLQDGIMRKACRNRPLSEVQTKRNRYLSKTRYVVEQSFGTLHRKFRYARAAYFGLIKVSVQSHLKAMCLNLLKAANRLSAPVAA

SEQ ID NO: 7559 - protein, 333 aa, Neisseria meningitidis
MQFPYRNVPASRMRRMRRDDFSRRLMREHTLTADDLIYPVFVLEGSAREEDVPSMPGVKRQSLDRLLFTAEEAVKLGIPMLALFPVVTANKTERAQEAYNPEGLVPSTVRALRERFPELGIMTDVALDPYTVHGQDGLTDENGYVMNDETVEVLVKQALCHAEAGAQVVAPSDMMDGRIGAIREALEDAGHIHTRIMAYSAKYASAFYGPFRDAVGSSGNLGKADKKTYQMDPANTDEALHEVALDIQEGADMVMVKPGLPYLDVVRRVKDEFGVPTYAYQVSGEYAMLQAAIANGWLDGGKVVLESLLAFKRAGADGILTYYAIEAAKMLKR

SEQ ID NO: 7560 - protein, 208 aa, Neisseria meningitidis
MRKIRTKICGITTPEDAAAAAAAGADAVGLVFFQGSSRAVDIARAKKITAALPPFVSVVALFVNESAQNIRRILAEVPIHIIQFHGDEDDAFCRQFHRPYIKAIRVQTASDIRNAATRFPDAQALLFDAYHPSEYGGTGNRFDWTLLAEYSGKPWVLAGGLTPENVGEAVRITGAESVDVSGGVEASKGKKDAAKVAAFIATANRLSR

SEQ ID NO: 7561 - protein, 181 aa, Neisseria meningitidis
MGKTVTLTAGHSNTDPGAVNGSDREADLAQDMRNIVASILRNDYGLTVKTDGTGKGNMPLRDAVKLIRGSDVAIEFHTNAAANKTATGIEALSTPKNKRWCQVLGKAVAKKTGWKLRGEDGFKPDNAGQHSRLAYAQAGGIVFEPFFISNDTDLALFKTTKWGICRAIADAIAMELGAAKV

SEQ ID NO: 7562 - protein, 45 aa, Neisseria meningitidis
MSWYGLSRLSYSGLNLNQDKATKPQTVQIVRQGEATPYWFKFNPL

SEQ ID NO: 7563 - protein, 259 aa, Neisseria meningitidis
MKEHKARKRFGQNFLQDTRIISDIVNAVRPQADDVVIEIGPGLAAITEPLAKKLNRLHVVEIDRDIVCRLKTLPFADKLVIHEGDVLQFDFNGIAGKKKIVGNLPYNISTPLLFKLAEVADDVVDMHFMLQKEVVERMVAAPKSNDYGRLGVMLQYFFDMEMLIDVPPESFDPAPKVDSAVVRMIPVKHRIGKADDFEHFAKLVKLAFHQRRKTIRNNLKELAGDDDLQAVGINPQDRAEHIAPEKYVALSNYLAGKVV

SEQ ID NO: 7564 - protein, 47 aa, Neisseria meningitidis
LISNHDTEFTRDIYSSAILKTVEVQRNIAAKGSSSRKKVGELLAIYA

SEQ ID NO: 7565 - protein, 197 aa, Neisseria meningitidis
MRNKNRIIEAFPFNYNQRQYAVILTRYKPDEPRPDDYAQAKLEFFNLNSENSIFAYADFYEVHFKSATDFINFFKINVQAGAAKIREIFQSFSNLFADFIPTQTKKDLDIIYKKIVATRLEPNSPNTIYCYDVRRNGKDKAGKPNRRSVENSEKAKILRPELYEKFKADSNYSFFFSDNPSDEKTDAEIIREVTNRQ

SEQ ID NO: 7566 - protein, 269 aa, Neisseria meningitidis
MAKIGDFAVKSMIGIRSKQMITLPSLNNLPSKWDEIRHWLESRVFECGVMPHPNLTECEAKQFERDFWDNIGCAPEEYVRIRRAIRLLEARYPDSLNELVCAAIATPLGEMLAVFGSRGLCLLEFVGQKHLEQEIAAVQKALRGRFVFREDERTQLLRQELDLYFKGRLKTFATPLEQIGTEFQKQAWDALLAIPYGETRSYKEQAQRLGNPKAVRAVAAANGQNKVSILIPCHRVIGSDGKLTGYAGGLNRKQFLLALEHGEVQTALF

SEQ ID NO: 7567 - protein, 445 aa, Neisseria meningitidis
MSNHTSWSSKIGFVLAAAGSAIGLGAIWKFPYTAGTNGGAVFFLLFLIFTILVALPVQLAEFYIGRTGGKNAVDSFRVLRPGTQWLWVGRMGVAACFILLSFYSVVGGWVLNYVVHSFTGAVHTGADFEALFGATISNPAGSLSYQALFMLITVWVVKGGISDGIEKANRYLMPGLFILFIALAIRSLTLPGAMEGVSFLLKPNWSYFKADTMITALGQAFFALSIGVSAMITYASYLGKDQDMFRSGHTIMWMNLLVSLLAGLVIFPAVFAFGFEPSQGPGLIFIVLPAVFMKMPFGTVLFAVFMLLVVFATLTSAFSMLETVIASTIRQDERKRKKHTWLIGTAIFIIGIPSALSFGVWGEFKVFGKTIFDLWDYVISAVIMPIGALSVSIFTAWIQDKQSVLKDAGAGSTVPRAVLLLWLNTLRYLAPIAIIIVFINSLDIL

SEQ ID NO: 7568 - protein, 305 aa, Neisseria meningitidis; identical to SEQ ID NO: 1198

SEQ ID NO: 7569 - protein, 156 aa, Neisseria meningitidis; identical to SEQ ID NO: 681

SEQ ID NO: 7570 - protein, 134 aa, Neisseria meningitidis; identical to SEQ ID NO: 1773

SEQ ID NO: 7571 - protein, 1815 aa, Neisseria meningitidis
MKTKRFKINAISLSIFLAYALTPYSEAALVRDDVDYQIFRDFAENKGKFFVGATDLSVKNKQGQNIGNALSNVPMIDFSVADVNRRTLTVIDPQYAVSVKHVKGDEISYYGHHNGHLDVSNDENEYRSVAQNDYEPNKNWHHGNQGRLEDYNMARLNKFVTEVAPIAPTSAGGGVETYKDKNRFSEFVRVGAGTQFEYNSRYNMTELSRAYRYAIAGTPYQDVNVTSNLNQEGLIGFGDNSKHHSPEKLKEVLSQNALTNYAVLGDSGSPLFAYDKQEKRWVFLGAYDYWAGYQKNSWQEWNIYKKEFADEIKQRDNAGTIKGNGEHHWKTTGTNSHIGSTAVRLANNERDANNGQNVTFENNGTLVLDQNINQGAGGLFFKGDYTVKGINNDITWLGAGIDVADGKKVVWQVKNPNGDRLAKIGKGTLEINGTGVNQGQLKVGDGTVILNQQADADKKVQAFSQVGIVSGRGTLVLNSSNQINPDNLYFGFRGGRLDANGNDLTFEHIRNVDEGARIVNHNTGHASTITLTGKSLITDPKTISIHYIQNNDDDDAGYYYYRPRKPIPQGKDLYFKNYRYYALKSGGSVNAPMPENGQTENNDWILMGSTQEEAKKNAMNHKNNQRISGFSGFFGEENGKGHNGALNLNFNGKSAQNRFLLTGGTNLNGKISVTQGNVLLSGRPTPHARDFVNKSSARKDAHFSKNNEVVFEDDWINRTFKATEIAVNQSASFSSGRNVSDITANITATDNAKVNLGYKNGDEVCVRSDYTGYVTCNTGNLSDKALNSFGATQINGNVNLNQNAALVLGKAALWGQIQGQGNSRVSLNQHSKWHLTGDSQVHNLSLADSHIHLNNASDAQSANKYHTLKINHLSGNGHFHYLTHLAKNLGDKVLVKESASGHYQLHVQDKTGEPNQEGLNLFDASSVQDRSRLSVSLANNHVDLGALRYTIKTENGITRLYNPYAENRRRVKPAPSPATNTASQAQKATQTDGAQIAKPQNIVVAPPSPQANQAEEAKRQQAKAEQVKRQQAEAERKSAELAKQKAEAEREARELATRQKAEQERSSAELARRHEKEREAAELSAKQKVEAEREAQALAVRRKAEAEEAKRQAAELARRHEKEREAAELSAKQRVGEEERRQTAQSQPQRRKRRAAPQDYMAASQDRPKRRGHRSVQQNNVEIAQAQAELARRQQEERKAAELLAKQRAEAEREAQALAARRKAEAEEAKRQAAELAHRQEAERKAAELSANQKAAAEAQALAARQQKALARQQEEARKAAELAVKQKAETERKTAELAKQRAAAEAAKRQQEARQTAELARRQEAERQAAELSAKQKAETDREAAESAKRKAEEEEHRQAAQSQPQRRKRRAAPQDYMAASQNRPKRRGRRSTLPAPPSPSFDSSAYAAPRALHNPDWYENDYEEIPLDALEDENVSESVDTSDKQPQDNTELHEKYENDYEEIPLDALEDEDVSESVDTSDKQPQDNTELHEKVETVSLQPRAAQPRAQAATQLQAQAAAQADAVSTNTNSALSDAMASTQSILLDTGASLTRHIAQKSRADAEKNSVWMSNTGYGRDYASAQYRRFSSKRTQTQIGIDRSLSENMQIGGVLTYSDSQHTFDQASGKNTFVQANLYGKYYLNDAWYVAGDIGAGSLRSRLQTQQKANFNRASIQTGLTLGNTLKINQFEIVPSAGIRYSRLSSADYKLGNDSVKVSSMSVKTLTAGLDFAYRFKVGNLTVKPLLSAAYFANYGKGGVNVGGNSFVYKADNQQQYSAGAALLYRNVTLNVNGSITKGKQLEKQKSGQIKIQIRF

SEQ ID NO: 7572 - protein, 132 aa, Neisseria meningitidis
  misc_feature 127, 128: 'Xaa' is any amino acid
MNNPLVNQAAMVLPVFLLSACLGGGGGSFDLDSVDTEAPRPAPKYQDVSSEKPQAQKDQGGYGFAMRLKRRNWYPSAKENEVKLNEGDWEATGLPTEPKELPKRQKSVIEKVETDSDSNIYSSPYLXXHTLN

SEQ ID NO: 7573 - protein, 51 aa, Neisseria meningitidis; identical to SEQ ID NO: 1536

SEQ ID NO: 7574 - protein, 279 aa, Neisseria meningitidis
MLVAFLIMLREGIEAALIVGIVAGFLKQSGHSKLMPKVWFGVVLASLMCLGLGYGIHSATGEIPQKQQEFVVGIIGLVAVAMLTYMILWMKKAARSMKRQLQDSVQAALNRGSGQGWALVGMAFLAVAREGLESVFFLLAVFKQSPTWQMPAGAVAGVLAAAVIGALIYQGGMRLNLAKFFRWTGAFLIVVAAGLLAGSLRALHEAGIWNALQDIVFDSSKYLHEDSPLGVLLGGFFGYTDHPTQGETLVWLLYLIPVITWFLCGSRPSETLTRKEELK

SEQ ID NO: 7575 - protein, 225 aa, Neisseria meningitidis
LVKTADGYKAIARIRTGDRVFAKDEASGKTGYKPVTARYGNPYQETVYIEISDGIGNNQTLISNKIHPFYSQGKWIQAGRLKKGDTLLSESGAKQTVQNITLKQQPLKAYNLTVADWHTYFVKGNRAETEGVWVHNDCPPRKTPSTPIYGNDSEAYAAAKELGYRKIKERTRNDAAIFKKGKSYISRDVDSHNGGAWKEASSPEKLNRKETRNGTFDKNLNRIGD

SEQ ID NO: 7576 - protein, 140 aa, Neisseria meningitidis
MALIKEPLDKVKQRNEELEAAEEAAAQEALGREQEAARVSEWEERYKLSRSEFEQFWKGLPQTVQNKLQASQKTWKSGMDKICANNAKAEGKTPNGIKFSELACKTAKTEARLEELHNRKKALIDEMAREADKKELSKRL

SEQ ID NO: 7577 - protein, 362 aa, Neisseria meningitidis
MKHFPSKVLTTAILATFCSGALAATSDDDVKKAATVAIVAAYNNGQEINGFKAGETIYDIGEDGTITQKDATAADVEADDFKGLGLKKVVTNLTKTVNENKQNVDAKVKAAESEIEKLTTKLADTDAALADTDAALDETTNALNKLGENITTFAEETKTNIVKIDEKLEAVADTVDKHAEAFNDIADSLDETNTKADEAVKTANEAKQTAEETKQNVDAKVKAAETAAGKAEAAAGTANTAADKAEAVAAKVTDIKADIATNKADIAKNSARIDSLDKNVANLRKETRQGLAEQAALSGLFQPYNVGRFNVTAAVGGYKSESAVAIGTGFRFTENFAAKAGVAVGTSSGSSAAYHVGVNYEW

SEQ ID NO: 7578 - protein, 468 aa, Neisseria meningitidis
VEFSTKTEILQEQQAGAQLFVCTEASQLSNPTVLALLSSLEEGQNFADTKIPTGNGLQAVAVCCLKSTGRAALNKAAAEAAKWAQNQETVNVDVHVFEEAQAAAVAEAFAIAFGNAAYRFDRYKKEAKPAKFETAVFHTAHEAAVKEALRVAEAQVYGQSLCRDLGNAAPNECTPEFLARTAKAEAEKLGAHAKIIEKDYIKENMGSFWSVAKGSAEAPYLVELSYFGAADKEAAPVVLVGKGITFDTGGISLKPGLNMDEMKFDMCGAATVISTFCAAVKLQLPINLIAVVATCENMPSGAANKPGDVVKSMKGLTIEVLNTDAEGRLILCDALTYAEQFKPKAVIDVATLTGACIVALGHDVSGVMGNNQDLIDSLLAASYNVDDKAWQLPLFETYKDQLKSNFADIPNIGTPGAGTITAATFLSYFTEDYPWAHLDIAGTAWKSGAEKGATGRPVPLLLNYLRNL

SEQ ID NO: 7579 - protein, 283 aa, Neisseria meningitidis
MITHPQFDPVLISIGPLAVRWYALSYILGFILFTFLGRRRIAQGLSVFTKESLDDFLTWGILGVILGGRLGYVLFYKFSDYLAHPLDIFKVWEGGMSFHGGFLGVVIAIWLFGRKHGIGFLKLMDTVAPLVPLGLASGRIGNFINGELWGRVTDINAFWAMGFPQARYEDAEAAAHNPLWAEWLQQYGMLPRHPSQLYQFALEGICLFAVVWLFSKKQRPTGQVASLFLGGYGIFRFIAEFARQPDDYLGLLTLGLSMGQWLSVPMIVLGIVGFVRFGMKKQH

SEQ ID NO: 7580 - protein, 226 aa, Neisseria meningitidis
MTYTITPIGTARSPYKQKFGIARQPGLVSAAKACIELNPKFTADSVRGLEDFDYVWISFIFHGVLDEGWAQMVRPPRLGGKQKMGVFATRSPHRPNHLGLSLLKLERIETGKPVRLYCSGADLLDGTPIVDIKPYIPFVESKPDAASGFVSGKPVELEVVWQENIGAENLSANTKNLISQSIAQDPRPAYQNIPERIYVMNIADYEVRFQIEENRATVIDLSPTPL

SEQ ID NO: 7581 - protein, 71 aa, Neisseria meningitidis
MKAIHPYACPRCCRLPANTFRTGMANSASKFCIAKGGRREAKKDESGGGYALCHLPDSRIVEEWEYFRSQY

SEQ ID NO: 7582 - protein, 2514 aa, Neisseria meningitidis
MNKTLYRVIFNRKRGAVVAVAETTKREGKSCADSDSGSAHVKSVPFGTTHAPVCRSNIFSFSLLGFSLCLAVGTANIAFADGIIADKAAPKTQQATILQTGNGIPQVNIQTPTSAGVSVNQYAQFDVGNRGAILNNSRSNTQTQLGGWIQGNPWLARGEARVVVNQINSSHSSQMNGYIEVGGRRAEVVIANPAGIAVNGGGFINASRATLTTGQPQYQAGDLSGFKIRQGNVVIAGHGLDARDTDFTRILSYHSKIDAPVWGQDVRVVAGQNDVVATGNAHSPILNNAAANTSNNTANNGTHIPLFAIDTGKLGGMYANKITLISTAEQAGIRNQGQLFASSGNVAIDANGRLVNSGTMAAANAKDTDNTAEHKVNIRSQGVENSGTAVSQQGTQIHSQSIQNTGTLLSSGEILIHNSGSLKNETSGTIEAARLAIDTDTLNNQGKLSQTGSQKLHIDAQGKMDNRGRMGLQDTAPTASNGSSNQTGNSYNASFHSSTTTPTTATGTGTATVSISNITAPTFADGTIRTHGALDNSGSIIANGQTDVSAQQGLNNAGQIDIHQLNAKGSAFDNHNGTIISDAVHIQAGSLNNQNGNITTRQQLEIETDQLDNAHGKLLSAEIADLAVSGSLNNQNGEIATNQQLIIHDGQQSTAVIDNTNGTIQSGRDVAIQAKSLSNNGTLAADNKLDIALQDDFYVERNIVAGNELSLSTRGSLKNSHTLQAGKRIRIKANNLDNAAQGNIQSGGTTDIGTQHNLTNRGLIDGQQTKIQAGQMNNIGTGRIYGDNIAIAATRLDNQDENGTGAAIAARENLNLGIGQLNNRENSLIYSGNDMAVGGALDTNGQATGKAQRIHNAGATIEAAGKMRLGVEKLHNTNEHLKTQLVETGREHIVDYEAFGRHELLREGTQHELGWSVYNDESDHLRTPDGAAHENWHKYDYEKVTQKTQVTQTAPAKIISGNDLTIDGKEVFNTDSQIIAGGNLIVQTEKDGLHNEQTFGEKKVFSENGKLHSYWREKHKGRDSTGHSEQNYTLPEEITRNISLGSFAYESHRKALSHHAPSQGTELPQSNGISLPYTSNSFTPLPSSSLYIINPVNKGYLVETDPRFANYRQWLGSDYMLDSLKLDPNNLHKRLGDGYYEQRLINEQIAELTGHRRLDGYQNDEEQFKALMDNGATAARSMNLSVGIALSAEQVAQLTSDIVWLVQKEVKLPDGGTQTVLVPQVYVRVKNGDIDGKGALLSGSNTQINVSGSLKNSGTIAGRNELIINTDTLDNIGGRIHAQKSAVTATQDINNIGGMLSAEQTLLLNAGNNINSQSTTASSQNTQGSSTYLDRMAGIYITGKEKGVLAAQAGKDINIIAGQISNQSEQGQTRLQAGRDINLDTVQTSKHQATHFDADNHVIRGSTNEVGSSIQTKGDVTLLSGNNLNAKAAEVSSANGTLAVSAKNDINISAGINTTHVDDASKHTGRSGGGNKLVITDKAQSHHETAQSSTFEGKQVVLQAGNDANILGSNVISDNGTQIQAGNHVRIGTTQTQSQSETYHQTQKSGLMSAGIGFTIGSKTNTQENQSQSNEHTGSTVGSLKGDTTIVAGKHYEQIGSTVSSPEGNNTIYAQSIDIQAAHNKLNSNTTQTYEQKGLTVAFSSPVTDLAQQAIAVAQSSKQVGQSKNDRVNAMAAANAGWQAYQTGKSAQNLANGTTNAKQVSISITYGEQQNRQTTQVQANQAQASQIQAGGKTTLIATGAAEQSNINIAGSDVAGKAGTILIADNDITLQSAEQSNTERGQNKSAGWNAGAAVSFGQGGWSLGVTAGGNVGKGYGNGDSITHRHSHIGDKGSQTLIQSGGDTTIKGAQVRGKGVQVNAKNLSIQSVQDRETYQSKQQNASAQVTVGYGFSAGGDYSQSKIRADHVSVTEQSGIYAGEDGYQIKVGNHTDLKGGIITSTQSAEDKGKNRFQTATLTHSDIKNHSQYKGESFGLGASASISGKTLGQGAQNKPQNKHLTSVADKNSASSSVGYGSDSDSQSSITKSGINTRNIQITDEAAQIRLTGKTAAQTKADIDTNVTTDTAERHSGSLKNTFNKEAVQSELDLQRTVSQDFSKNVQQANTEINQHLDKLKADKEAAETAAAEALANGDMETAKRKAHEAQDAAAKADNWQQGKVILNMLASGLAAPTQSGAGIAAATASPAVSYAIGQHFKDLAGQNANGKLTASQETAHVLAHAVLGAAVAAVGDNNALAGALSAGGSEAAAPYISKWLYGKEKGSDLTAEEKETVTAITNVLGTATGAAVGNSATDAAQGSLNAQSAVENNDTVEQVKFALRHPRIAIAIGSVHKDPGSTLEPNISTIASTFQLNLFPNSEFGGEGGVGNAFRHVLWQATITREFGKDIAVKVGNSHESGEKINYSIRRNLSLDKADEMIDQLNNEIGREIALNTNRLNTKELVGLILETYKNNGFYQAERNSNGNYDVVRKRLSEKDYQNTSNILIHLDNTGAGFKIQQRRKQIRAQISARQWRR

SEQ ID NO: 7583 - protein, 156 aa, Neisseria meningitidis
LNITVLAVGTKMPRWVDEAVAEYAKRFGRDVAYALKEIKPEKRGAGVNAAQGMAAEEKRILEAIPQGAFLVVLDERGKAPTSVELAEHLKSWRQNGEHVCFVIGGADGMTDRLKQQARMMMRLSSLTLPHGMVRVFLTEQLYRAVSILHNHPYHRE

SEQ ID NO: 7584 - protein, 950 aa, Neisseria meningitidis
MKLSELFNPNEFAARHLSFGDEAALLAAVGEKSMDDFVGNTVPQSIRMPSELDLPEALTEADALAKLKGIASKNVINKSYIGLGYYPTRVPNVILRNVLENPGWYTAYTPYQAEIAQGRLEALLNFQQVCIDLTGFPVAGASLLDEATAAAEAMAMAHRVGKVKSERFFVDERVYPQTLDVMKTRAKYFGFELVVGDFAKADEGEYFGALFQYVGKDGDVQDLQSVIGRLKAKGTIVAVSADIMSLVLLKSPAELGADIALGNTQRFGVPMGFGGPHAAYFAFKDEFKRSAPGRIIGVSKDASGKPALRMALSTREQHIRREKATSNICTAQALLANLAGMYAVYHGPEGVKRIANRIHALASAFADALVSDGIKVVHEVFFDTVTVDFGNKEKADQVFAAALESGYNLRRVNDTQVAAAFHETSAYEDLVDLYRAFTGKDAFAFADDVKGRLNAELLRQDDILQHPVFNRYHTEHEMLRYLKKLEDRDLAMNRSMISLGSCTMKLNATAEMLPITWAEFSDIHPYAPEAQTAGYRELLADMENSLKSITGFDAISFQPNSGAQGEYSGMLAIRRYQEAQGEAHRNICLIPKSAHGTNPATAAMLGLKVVVVDTDEHGNVNIDDLKAKAEQYRDALSAIMITYPSTHGVYEEGIRDICRIIHENGGQVYMDGANLNAQIGIMQPAEVGADVLHMNLHKTFCIPHGGGGPGMGPIGLKAHLAPFAPGHALTDTHSTSAGQTAVAAAAYGSASILPITWMYLTMMGKQGMEQATRWALLNANYVAKALGEDYPILYTGKNGRVAHECIVDLRPLKAESGITETDIAKRLMDYGFHAPTVSFPVAGTLMIEPTESESKAELDRFIAALKQIKQEVLKVGRGEWPKDDNPLVNAPHTAADITGNWAHPYSREEAVFPLPFVREHKFWPSVNRVDDVYGDRNLVCSCPPMENYED

SEQ ID NO: 7585 - protein, 388 aa, Neisseria meningitidis
MNLHEYQAKELLASYGLPVQGGILAHNGEEAAAAYDKLGGKFAVVKAQVHAGGRGKAGGVKVVKSREEAKEVAESLIGTNLVTYQTDANGQPVNSVLVCEDMYPVQTELYLGAVVDRSTRRITFMASTEGGVEIEKVAAETPEKIFKVTVDPLVGLQPCQAREVAFQLGLKDKQINEFVKLMTGAYKAFVENDFALFEVNPLAVRENGALACVDGKIGIDSNALYRLPKIAELRDKSQENERELKASEFDLNYVALEGNIGCMVNGAGLAMATMDIIKLKGGQPANFLDVGGGATKDRVVEAFKLILEDKSVQGVLINIFGGIVRCDMIAEAIVAAVKEINVNVPVVVRLEGNNAELGAKILNESGLKLTSADGLNDAAEKIVAAVNA

SEQ ID NO: 7586 - protein, 263 aa, Neisseria meningitidis
MARHPYRRLRPAKSGFPEVGISEEGNIRSLHLGSDTVQSSMNLDHPSELVLSYSRAMMGWLLFTDALPQHITQIGLGGGSFARWIDTYLPDTRQTAVDINPQVIAIARNLFELPFEGEKFEIIEADGAEYIKVFRHNTDVILVDGFDGEQIIDALVEEPFFRDCRNALSSDGIFVTNWWSGDKRYQRFIERLLSVFEGRVLELPAESHGNVAVMAFQSSPKEQNIDKLKKRADKLSNAYGLDFHRMLAGLKASNPNNGKHFHL

SEQ ID NO: 7587 - protein, 421 aa, Neisseria meningitidis
MFSFFRRKKKQETPAPDEAQIQETAAKAESEVAQIVENIKEDAESLTESVKGQVESAVETVSGAVEQVKEAVAEMLSEAEEAAEKAAEQVEAAKEAVAETISEAVGQVKEAVATTEEHKLSWAARLKQGLTKSRDKMAKSLAGVFGGGQIDEDLYEELETVLITSDMGMEATEYLMKDVRDRVSLKGLKDGNELRGALKEALYDLIKPLEKPLVLPETKEPFVIMLAGINGAGKTTSIGKLAKYFQAQGKSVLLAAGDTFRAAAREQLQAWGERNNVTVISQTTGDSAAVCFDAVQAAKARGIDIVLADTAGRLPTQLHLMEEIKKVKRVLQKAMPDAPHEIIVVLDANIGQNAVNQVKAFDDALGLTGLIVTKLDGTAKGGILAALASDRPVPVRYIGVGEGIDDLRPFDARAFVDALLD

SEQ ID NO: 7588 - protein, 52 aa, Neisseria meningitidis
VVEQSFGTLHRKFRYARAAYFGLIKVSAQSHLKAMCLNLLKAANRLSAPAAA

SEQ ID NO: 7589 - protein, 343 aa, Neisseria meningitidis
MPDFQRITIENIEYFIVDSIQNLRAEDSFIHRNNKLSVFGGNGEARKYVGSYIDDSGRKLSTFFEYENWGITETKNGRRVEYPFIQKNCFFYKKNLQRYLVDAKVEYHKQEQKYHHDISRFYDDYVLSINNLPTENIFFSIHDVSDHLENSKGYRRGYIRSEDDIWSIWRKIVLPKISYLSILKLLPVKDIEDSEPLFYFRIFLDYQFRSIVHPQLLSREKLEIPASEFNQFVEQEIIKQKSRKGQQKYRKDVINHMSQCPFTLITDEILLRASHIKPYMVCITEKNEKEALDYLNGLALTPTYDWLFDQGYITFLDDGRLICGTRLSRYTWEKLNINPNAKN

SEQ ID NO: 7590 - protein, 211 aa, Neisseria meningitidis
MPMNLFQNAKFFTTINHLKDLPDTPLEIAFVGRSNAGKSSAINTLTNHVRLAYVSKTPGRTQHINFFELQNGNFMVDLPGYGYAQVPEAVRAHWVNLLGDYLQQRKQLIGLVLIMDARHPLKELDIRMLDFFHTTGRPVHILLSKADKLSKNEQIKTLSQVKKLLKPYSDRQNISVQLFSSLKKQGIDEANRTVGSWLDAADAAASSPEEN

SEQ ID NO: 7591 - protein, 314 aa, Neisseria meningitidis
MSASKKFPIPLSYFSIALGLFALGLSWRYGASVGLLPALAAESLLAAASVVWLLLVAAYLIKMFAYRNDFLSDLRDLVQCCFISAIPITAMLEGLALKPYQAGAAAVLIYVGVAGQLAFSMYRAAGLWRGLHSLEATTPIIYLPTVATNFVSASSLAALGHHDYAALFFGAGMFSWLSLEASILGRLRTAAPVGTAARGVVGIQLAPAFVGCGAYFAVGGKVDGFALALIGYGCLQLLFLLRLTRWFWEGGFTMSFWGFSFGFAAMAGCGLHLAASGVLSGLGLTLATAGSAGVALLLVGTLHRIATGRFLVRS

SEQ ID NO: 7592 - protein, 221 aa, Neisseria meningitidis
MMDSRKFTEASKRRLSELLDAKSEQGNTMRCDEVQGFMTALLSGPDKLTPLDWLPEVLGDESQFTAAERSEIERLVLAMAMETTAAMSDKKLPDLWLYENEDGGSDFYTWCNAYLYGLDIVPTDWFEAVDDEAFEELFYPIMALGGIYDEEENGTIRLQFTEGELAELESELPYALADIYRYWQAVINKPQTVRREGKKTGRNDPCPCGSGRKYKACCGKN

SEQ ID NO: 7593 - protein, 89 aa, Neisseria meningitidis; identical to SEQ ID NO: 494

SEQ ID NO: 7594 - protein, 355 aa, Neisseria meningitidis; identical to SEQ ID NO: 6342

SEQ ID NO: 7595 - protein, 177 aa, Neisseria meningitidis
MAEFATIARPYAKALFGLAQEKNQIESWLGGLEKLAAVVQEGKVASLIDRPETNASEKADILIDLVGLKDKELKNFVIVLAGQKRLSILPEVYAQYQDLTLSFNHIKSAVIYSAYPLTDKQVGELVQMLNKRFDSELKISVEIEPELIGGIKVEVGDQVLDLSVQGKLSALYTTMTN

SEQ ID NO: 7596 - protein, 332 aa, Neisseria meningitidis
MKIAIYGTKSYDREHFTRANRHFGFELEFFDFMLDAKTAKMAEGAEAVCIFVNDDGSRPVLEKLAQIGVKTVALRCAGFNNVDLKAAEELGLKVVRVPAYSPESVAEHTVGLMLTLNRRIHKAYQRTRDANFSLEGLTGFNMYGKTAGVIGTGKIGIATMRILKGFGMNLLAYDPFCNPEAEKIGGKYVDLDELYARSDIITLHCPATPENHYMLNEAAFDKMKDGVMIINTSRGGLIDSAAAIEALKRRKIGALGMDVYENERELFFEDKSNDVITDDVFRRLSSCHNVLFTGHQAFLTEEALGNISEVTLSNIREVGQTGDCGNAVRADG

SEQ ID NO: 7597 - protein, 242 aa, Neisseria meningitidis
MLLGVNIDHIATVRNARGTTYPSPVEAALVAETHGADLITMHLREDRRHIKDADVFAVKNAIRTRLNLEMALTEEMLENALKVMPEDVCIVPEKRQEITTEGGLDVLAQQEKIAGFTKILTDAGIRVSLFIDADDRQIQAARDVGAPVVELHTGAYADARSHAEQIRQFERIQNGAHFAGDLGLVVNAGHGLTIHNVTPIAQILAIRELNIGHSLIAQALFLGLPEAVRQMKEAMFRARLLP

SEQ ID NO: 7598 - protein, 261 aa, Neisseria meningitidis
MNPFLNTAFKAARRAGQMMIRAAGNLDAVKTDSKAFNDFVSDVDRNSEIILVEALKEAYPHHKITCEESGSHGKAAAEYEWIIDPLDGTTNFLHGHPQYAISMALLHKGVLQEALVYAPERNDVYMASRGKGALLNDRRIRVSNRIELNRCLIGTGFPVVDQSMMDKYLAILKDFLSKTAGGRREGAASLDLCAVATGSFDGFFEFNLKPWDIAAGALIVQEAGGIVTDMTGEDSWLESGDIVAANPKVLAQMLKIISAHV

SEQ ID NO: 7599 - protein, 505 aa, Neisseria meningitidis; identical to SEQ ID NO: 2655

SEQ ID NO: 7600 - protein, 128 aa, Neisseria meningitidis
MNLETKPIAETPNFIVLDQYEKIEQSGSYQSENRLEAELIADLQNQGYEYRKDLNSQSRLLENLRAQLQRLNDVAFSDGEWARFLTEYLDRPSENITDKTRKIHDDHIYDFAFDDGPWIRISSATLVY

SEQ ID NO: 7601 - protein, 544 aa, Neisseria meningitidis; identical to SEQ ID NO: 3460

SEQ ID NO: 7602 - protein, 416 aa, Neisseria meningitidis
MFSKSVTLAQYDPDLAAAIAQEDQRQQDHVELIASENYVSCAVMDAQGSQLTNKYAEGYPGKRYYGGCEYVDIVEQLAIDRVKELFGAAYANVQPHSGSQANQAVYASVLKPGDTILGMSLAHGGHLTHGASVNISGKLYNAVTYGLDENEVLDYAEVERLALEHKPKMIVAGASAYALQIDWAKFREIADKVGAYLFVDMAHYAGLVAGGEYPNPVPFCDFVTTTTHKTLRGPRGGVILCRDNTHEKALNSSIFPSLQGGPLMHVIAAKAVAFKEALQPEFKQYAKQVKINAAAMAEELVKRGLRIVSGRTESHVFLVDLQPMKITGKAAEAALGKAHITVNKNAIPNDPEKPFVTSGIRIGSAAMTTRGFNEADARVLANLVADVLSNPEDEANLAKVRKQVTALCNKYPVYGA

SEQ ID NO: 7603 - protein, 135 aa, Neisseria meningitidis; identical to SEQ ID NO: 4758

SEQ ID NO: 7604 - protein, 317 aa, Neisseria meningitidis; identical to SEQ ID NO: 4876

SEQ ID NO: 7605 - protein, 768 aa, Neisseria meningitidis
MAKNLLIVESPSKAKTLKKYLGGDFEILASYGHVRDLVPKSGAVDPDNGFAMKYQLISRNGKHVDAIVAGAKEAENIYLATDPDREGEAISWHLLEILKSKRGLKNIKPQRVVFHEITKNAVLDAVAHPREIEMDLVDAQQARRALDYLVGFNLSPLLWKKIRRGLSAGRVQSPALRLICERENEIRAFEAQEYWTVHLDSHKGRSKFTAKLAQYNGAKLEQFDLPNEAAQADVLKELEGKEAVVTAIEKKKRSRNPAAPFTTSTMQQDAVRKLGFTTDRTMRTAQQLYEGIDVGQGAIGLITYMRTDSVNLADEALTEIRHYIENKIGKEYLPSAAKQYKTKSKNAQEAHEAIRPTSVYRTPESVKPFLSADQFKLYQMIWQRTVACQMTPAKFDQTTVDITVGKGVFRVTGQVQTFAGFLSVYEESSDDEEGEDSKKLPEMSEGDKLPVDKLYGEQHFTTPPPRYNEATLVKALEEYGIGRPSTYASIISTLKDREYVTLEQKRFMPTDTGDIVNKFLTEHFAQYVDYHFTAKLEDQLDEIADGKRQWIPLMDKFWKPFIKQVEEKEGIERAKFTTQELDETCPKCGEHKLQIKFGKMGRFVACAGYPECSYTRNVNETAEEAAERIAKAEAEQAELDGRECPKCGGRLVYKYSRTGSKFIGCVNYPKCKHVEPLEKPKDTGVQCPQCKKGNLVERKSRYGKLFYSCSTYPDCNYATWNPPVAEECLNCHWPVLTIKTTKRWGVEKVCPQKECGWKEQIEPPAPKE

SEQ ID NO: 7606 - protein, 310 aa, Neisseria meningitidis
VLSAMKKRVRKPAAVRSDADIAALFHAHRMKQAQQSRILNMLAVEIRPGFVLDNKRAPDIRSALLDVYGEADGKPFFLPLNLLLGFMGAHEWHKKGVAVPQLGGSIHVPFGVFSPLRGEYLDLLAHAPSTGFQTAFDIGTGSGVLAAILAKQGIPSVIGTDTNPKAVACARANIARLGFEKQVEIRETDLFPEGFADLIVCNPPWLPAKPTSAVESALYDPESAMLAAFLRDAPKHLNPDGEIRLIISDLAEHLHLRPSDFLDKAFAQAGLRVADMMKTKPKHKKAANPSDPLAFARTRETTFLYRLKKA

SEQ ID NO: 7607 - protein, 348 aa, Neisseria meningitidis
MEARPPRANEAQAPRAVEMKKESRPAFDAAAVFDAAAVPVSDSGFAANANVRRFVDDEVGKGDFSRAEWQDFFDKAAYKADIVKIMHRPSTSRPWYVFRTGNSGKAKFRGARRFYAENRALIDDVAQKYGVPAELIVAVIGIETNYGKNTGSFRVADALATLGFDYPRRAGFFQKELVELLKLAKEEGGDVFAFKGSYAGAMGMPQFMPSSYRKWAVDYDGDGHRDIWGNVGDVAASVANYMKQHGWRTGGKMLVSATLAPGADVQAIIGEKTALTRTVADLKAYGIIPGEELADDEKAVLFKLETAPGVFEYYLGLNNFYTVWQYNHSRMYVTAVRDIANSLGGPGL

SEQ ID NO: 7608 - protein, 384 aa, Neisseria meningitidis
MSIHLDFGISPKTFRQTYLYQKPKLFKGAVRNLESASWKDINEIYQRADPTAPLFHLRKKGAIVPKEEYVESFDDLGKTRYRFIKSVIYEHMKNGASLVYNHINNEPFSDHIARQVARFAGAHTIVSGYLAFGSDESYKNHWDPRDVYAIQLFGKKRWQLTAPDFPMPLYMQQTKDTDISIPEHIDMDIILEAGDVLYIPRGWWHRPIPLGCETFHFAVGTFPPNGYNYLEWLMKKFPTIESLRHSFSDWEQDRTRINDTAAQIAAMIADPVNYEAFSEDFLGKERTDTAFHLEQFANPNATPLSDDVRLRLNANNLDTLEKGYLIGNGMKISVDELGKKVLEHIGKNEPLLLKNLLVNFNQGKYEEVRKLIYQLIELDFLEIL

SEQ ID NO: 7609 - protein, 140 aa, Neisseria meningitidis; identical to SEQ ID NO: 4493

SEQ ID NO: 7610 - protein, 132 aa, Neisseria meningitidis; identical to SEQ ID NO: 1178

SEQ ID NO: 7611 - protein, 37 aa, Neisseria meningitidis
MSQKAAADQLNLPDCSILLQWLRLYHLNGINGLKPKP

SEQ ID NO: 7612 - protein, 370 aa, Neisseria meningitidis
MSTFFRQTAQAMIAKHINRFPLLKLDQVIDWQPIEQYLNRQKTRYLRDHRGRPAYPLLSMFKAVLLGQWHSLSDPELEHSLITRIDFNLFCRFDELSIPDYSTLCRYRNWLAQDDTLSELLELINCQLTEKGLKVEKASAAVIDATIIQTAGSEQRQAIEVDEEGQISGQTTPSKDSDARWIKKNGLYKLGYKQHTRTDAEGYIEKLHITPANAHECKHLSPLLEGLPEGTTVYADKGYDSAENRQHLEEHQLLDGIMSKACRNRPLSEVQTKRNRYLSKTRYSGLNLNQDKATKPQTVQIVRQGEATPYWFKFNPLYVVEQSFGTLHRKFRYARAAYFGLIKVSAQSHLKAMCLNLLKAANRLSAPAAA

SEQ ID NO: 7613 - protein, 336 aa, Neisseria meningitidis
MSIKILIISPSWIGDCVMTQPLFRRLKELHPGCTIDVFAPKWSMAVFERMPEVNEILENSFGHGALELKRRWRVGRDLGRRGYDQVIVLPGSLKSAIIALATGIGKRTGYVGESRYFLLNDIRRLDKERLPLMVDRYTALAHPSQEDFDGHSGFPEFSIDERRREISVETFGLDIGKPVLAFCPGAEFGPAKRWPTRHFAELGKHYLAAGWQVWLFGSQKDDEIAEEINRLSDGMCVNLCGKTDLSQAMDLLSLADTVVCNDSGLMHLAAALGRKVVAVYGSSSPTHTPPLSDRAKIVSLHLECSPCFKRECPLGHTDCLNRLYPEKIVQAVEEAV

SEQ ID NO: 7614 - protein, 433 aa, Neisseria meningitidis
MPSEHQHISSLLDFDRTHLLHPYTSMTDPLPVYPVKRAEGVFIELADGTRLIDGMSSWWCAIHGYNHPVLNQAVETQMKQMAHVMFGGLTHEPAVELGKLLVGILPQGLNRIFYADSGSISVEVALKMAVQYQQARGLTAKQNIATVRRGYHGDTWNAMSVCDPETGMHHIFGSALPQRYFVDNPKSRFDDEWDGADLQPVRALFEVHHADIAAFILEPVVQGAGGMYFYHPQYLRGLHDLCDEFDIMLIFDEIATGFGRTGKMFACEHAEVVPDIMCIGKGLSGGYMTLAAAITSQKVTETISRGEAGVFMHGPTFMANPLACAVACASVKLLLSQDWQANIRRIESILKGRLKAAWDIRGVKDVRVLGAIGVIELEKGVDMARFQADCVAQGIWVRPFGRLVYLMPPYIISDGVLTKLADKTVQILKEHSK

SEQ ID NO: 7615 - protein, 190 aa, Neisseria meningitidis
LPYYLYCLRLRRLVLIFVNPLYLHQFHETQVGSVKQLIAHFDRLIDELDKQIDDHTHTHFDGKAQVAEQIKGIGSITTATLMAMLPELRRLSHKRIAGLAGIAPHPRESGETKFKSRCFGGRSAVRKALYMATVAATRFEPLIRDFHQRPLSEGKPYKVAVTACMRKLLTISNARMRDYFAENDTAENGI

SEQ ID NO: 7616 - protein, 339 aa, Neisseria meningitidis
MKKILVTGGTGFIGSHTVVSLLKSGHQVVILDNLCNSSINILPRLKTITGQEIPFYQGDIRDREILRRIFAENRIDSVIHFAGLKAVGESVAEPMKYYDNNVSGSLVLAEEMARAGVFSIVFSSSATVYGDPGKVPYTEDMPPGDTTSPYGASKSMVERILTDIQKADPRWSMILLRYFNPIGAHESGLIGEQPNGIPNNLLPYICQVAAGKLPQLAVFGDDYPTPDGTGMRDYIHVMDLAEGHVAAMQAKSNVAGTHLLNLGSGRASSVLEIIRAFEAASGLTIPYEVKPRRAGDLACFYADPSYTKAQIGWQTQRDLTQMMEDSWRWVSNNPNGYDD

SEQ ID NO: 7617 - protein, 245 aa, Neisseria meningitidis; identical to SEQ ID NO: 388

SEQ ID NO: 7618 - protein, 594 aa, Neisseria meningitidis
MALVELKVPDIGGHENVDIIAVEVNVGDTIAVDDTLITLETDKATMDVPAEVAGVVKEVKVKVGDKISEGGLIVVVEAEGTAAAPKAEAAAAPAQEAPKAAAPAPQAAQFGGSADAEYDVVVLGGGPGGYSAAFAAADEGLKVAIVERYKTLGGVCLNVGCIPSKALLHNAAVIDEVRHLAANGIKYPEPELDIDMLRAYKDGVVSRLTGGLAGMAKSRKVDVIQGDGQFLDPHHLEVSLTAGDAYEQAAPTGEKKIVAFKNCIIAAGSRVTKLPFIPEDPRIIDSSGALALKEVPGKLLIIGGGIIGLEMGTVYSTLGSRLDVVEMMDGLMQGADRDLVKVWQKQNEYRFDNIMVNTKTVAVEPKEDGVYVTFEGANAPKEPQRYDAVLVAAGRAPNGKLISAEKAGVAVTDRGFIEVDKQMRTNVPHIYAIGDIVGQPMLAHKAVHEGHVAAENCAGHKAYFDARVIPGVAYTSPEVAWVGETELSAKASGRKITKANFPWAASGRAIANGCDNGFTKLIFDAETGRIIGGGIVGPNGGDMIGEVCLAIEMGCDAADIGKTIHPHPTLGESIGMAAEVALGTCTDLPPQKKK

SEQ ID NO: 7619 - protein, 456 aa, Neisseria meningitidis
MINPIASLSPLDGRYAQSVEALRPIFSEYGLMKARVKVELNWLKALAAEPKIAEVPPFSAETLAEIDTVIENFSLEDAAAVKAIEATTNHDVKAIEYWLKKRFAEVPEVAAVSEFIHFACTSEDINNLSHALMLQEAREAVLLPKLAEIIEKLTAMAHDLAAVPMMSRTHGQPATPTTLGKETANVVYRLQRQFKNLQAQEFLGKINGAVGNYNAHMVAYPDVDWETHCRNFVEISLGLTFNPYTIQIEPHDYMAEFFQTLSRINTILIDFNRDVWGYISLGYFKQKVKAGEVGSSTMPHKVNPIDFENSEGNLGMANAVLGFLSEKLPISRWQRDLTDSTVLRNMGVGVGYAVLGFAAHLRGLNKLEPNPAALAADLDATWELLAEPIQTVMRRYGVANPYEKLKDLTRGKGGITPEVLKGFIGLLEIPAEAKAKLLELTPALYVGKAEALAKRI

SEQ ID NO: 7620 - protein, 436 aa, Neisseria meningitidis
MYAKKGGLGLVKSRRFAPLFATQFLGAFNDNVFKTALFVMIGFYGLGQNGFLPAGQMLNLGALLFILPYFLFSSLSGQLGNKFDKAVLARWVKVLEMIIMAVAAYGFYIRSAPLLLACLFCMGAQSTLFGPLKYAILPDYLDDKELMMGNSLIESGTFVAILFGQILGTAVAGVPPYIVGILVLLVAVGGTVGSLFMPSVPAKAADTQIEWNIVRGTKSLLRETVRHKPVFTAIIGISWFWFVGAVYTTQLPTFTQIHLGGNDNVFNLMLALFSIGIAAGSVLCAKFSRERLMLAWVTVGALGLTVCGLVLVWLTHGHRFEGLNGIFWFLSQGWAYPVMAVMTLIGFFGGFFSVPLYTWLQTASSETFRARAVAANNIVNGIFMVSAAVLSAVLLFLFDSISLLYLIVALGNIPLSVFLIKRERRFLGAAAIRKKP

SEQ ID NO: 7621 - protein, 361 aa, Neisseria meningitidis
MIYLFTGNMGTGKTSRVVSMILNNEDGLFKMKLEDGTEVDRPLYFCHIDGLDKRQFKAHELTEEQIMSAPLRDVIPEGAVLIVDEAHYTYPVRAAGRPVPPYIQELTELRHHGHTVILMTQHPSQLDIFVRNLVSKHVHLERKAIGMKQYYWYKCVTSLDNPAGVSGVEVASWKPPKEAFKYYKSASQHQKFKKKVPWAVWALIAIVGFVGWKSYGIFKVYSKATDSRIEQEAQKESVVQTMTEQPASSEEMPLKNSDNLKPEDFVPTLPEKPESKPIYNTVRQVKTFEQIAGCIDGGKSDCTCYSNQGTPLKEITKIMCKEYVKNGLPFNPYKDEQQRTEQVEQSAKADKPQVLVMGGKP

SEQ ID NO: 7622 - protein, 447 aa, Neisseria meningitidis
MSQNHTILQSLPVGQKVGIAFSGGLDTSAALLWMKLKGALPYAYTANLGQPDEDDYNAIPKKAMEYGAENARLIDCRAQLAHEGIAAIQCGAFHVSTGGIAYFNTTPLGRAVTGTMLVSAMKEDDVNIWGDGSTYKGNDIERFYRYGLLTNPALKIYKPWLDQQFIDELGGRHEMSEFLIANGFNYKMSVEKAYSTDSNMLGATHEAKDLEFLNSGIKIVKPIMGVAFWDENVEIEPEEVSVRFEEGVPVALNGKEYADPVELFLEANRIGGRHGLGMSDQIENRIIEAKSRGIYEAPGMALFHIAYERLVTGIHNEDTIEQYRINGLRLGRLLYQGRWFDSQALMLRETAQRWVAKAVTGEVTLELRRGNDYSILNTESPNLTYQPERLSMEKVEDAAFTPLDRIGQLTMRNLDITDTRAKLGIYSQSGLLSLGEGSVLPQLGNKQ

SEQ ID NO: 7623 - protein, 380 aa, Neisseria meningitidis
MPLPSPEARQFSLKLQTLIAEKIGKHGNWIPFSRFMELVLYAPQYGYYTGGSHKIGNTGDFITAPTLTSLFAQTLARQLQELLSQTAGNIYEFGAGTGQLAADLLGSISDGISRYYIIEISPELAARQKNLIQARAPEASQKVVHLTALPEAFDGIIIGNEVLDAMPVEIVRKNEGGSFEHVGVCLDNDRFTYSARPLHDLQLSALASLYFPQTDYPYTSELHPQQYAFIRTLASRLEHGCMIFIDYGFDAAQYYHPQRNQGTLIGHYRHHIIHNPFDFIGLADLTAHVNFTDIAQAGTDAGLDLIGYLPQSHFLLNLGITELLAQTGKTDSAAYICEAAAVQKLIDQHEMGELFKVIAFGKNIGIDWAGFRFGDICHKL

SEQ ID NO: 7624 - protein, 150 aa, Neisseria meningitidis
MQTKALGTVDEIGDTVQQVGKQASGQKTSGGNPAIDSDPYSPSSVAARIEAGKARSDLQIKDILSNTTQRSKTKGPAVQYDKVGDYNDALNDFNSLNVRNVQTRPNGTITGNLPDGRAVNARNDSSGGEPTLEITISNNRKIKIRYGNTR

SEQ ID NO: 7625 - protein, 107 aa, Neisseria meningitidis; identical to SEQ ID NO: 4856

SEQ ID NO: 7626 - protein, 658 aa, Neisseria meningitidis
MSRIAALPDHLVNQIAAGEVVERPANALKEIVENSIDAGATAIEVELAGGGIRLIRVSDNGGGIHPDDIELALHRHATSKIKTLNDLEHVASMGFRGEGLASIASVSRLTLTSRQNDSSHATQVKAEDGKLSSPTAAAHPVGTTIEAAELFFNTPARRKFLKSENTEYAHCATMLERLALAHPHIAFSLKRDGKQVFKLPAQSLHERIAAIVGEDFQTASLGIDSGNGALRLYGAIAKPTFAKGKTDKQYCFVNHRFVRDKVMLHAVKQAYRDVLHNALTPAFVLFLDLPPEAVDVNVHPTKTEIRFRDSQQVHQLVFHTLNKALADTRANLTESVGNAGEVLHDITGVVSTPMPSENDSENLFDSVSNYPTGNKSDTHNAFGSSGKTAPMPYQSAYAPQQRSLSLRESRAAMNTYAELYKKTDDIDLELSRFEQARFGNMPSETPAPQTDTPLSDGIPSQSELPPLGFAIAQLLGIYILAQAEDSLLLIDMHAAAERVNYEKMKRQRQENGNLQSQRLLIPVTFAASHEECAALADYAETLAGFGLELSDMGGNTLAVRAVPAMLGKADVVSLAKDVLNELAQVGSSQTIEEHENRILATMSCHGSIRAGRRLTLPEMNALLRDMENTPRSNQCNHGRPTWVKLTLKELDALFLRGQ

SEQ ID NO: 7627 - protein, 489 aa, Neisseria meningitidis
MTTARWVIDKHLQNFHILCKFAGILKTNSFISVEDKAKLSEKLEKLDLYHRRNTGKSLDATTHKIKELSFYMFGYRDVCGQVTQKFLFSPLGNLFLKHLDNNEYIQKIFLTMLWAIPFPHPYIKTDESIQLYPMRLIFKLLSDERLDCKLFSYEYIYLISFVKSADQNSYEKLVQDILVLRTCAEVKIKHQLTAENSRSHAYVNAAHEWESYFSKTLTDAGVLQKTDGKIICRLKHGKTETYRKVTSSEFSIPKQLQEFVKKLQSAYSFSEMPLNLNDSDRLKIDVIKEIYSFYPKELLEEIGELKDEAAYELLHLPRLIEQYADNNNGTEAYLFEDVLEMGFNMFYNVEAKKIGGPGNTDLECLYITQKRKFAVEAKSTKNKLSGINSGRLEDHKNKIKAIYTIVVTPRYVPAVLSDIRNCPIVIIRANTFAEFLYNCLINRSSIPEIDYRYFDEIIIKNLGKDISSEISNLTMQQFASNTTMEAYST

SEQ ID NO: 7628 - protein, 500 aa, Neisseria meningitidis
MAKVLIVPVSAGLDASAAAQAFAKALDAQIFQAVDATAETLLAQGKSDDWFDALVGKVAALDAANLVIEGIAPDADKIYLAGKNVELALSLDAAAVFAVRSDNADADELANRVNLAKQFFAAAPGVLEGFVVDGAAASVAEAAAEKTGLTFFGSSDALKDVSVLAGREAKRLSPAQFRYNLIDFARQADKRIVLPEGAEPRTVQAAAICHEKGIARCVLLAKREEVEAVAKERGISLPDSLEIIDPASLVEQYVEPMCELRKSKGLTPEDARKQLQDTVVLGTMMMAQNDVDGLVSGAVHTTANTIRPALQLIKTAPGASLVSSVFFMLLPNQVLVFGDCAVNPNPTAQQLADIAIQSADSAKAFGIDPKVAMISYSTVNSGSGPDVDTVIEATKLAREKRPDLAIDGPLQYDAATVPGVGKSKAPGSPVAGQATVLVFPDLNTGNCTYKAVQRNANVLSVGPLLQGLRKPVNDLSRGALVEDIVFTIALTAVQAKQMEG

SEQ ID NO: 7629 - protein, 253 aa, Neisseria meningitidis
METAKPVMLIVRPSGRAAEDVETCLNAGWRAEVLSPVEIEADAAGLELLSEQYARADAVFWVSPTAVETAVPYLNLSDGIKAQIAVGQGSRRALERCLVRTVIAPDDGNDSEAVLRLPVWNSLPEGARVLFVRGHGGRDFLMNALQEKGFRTEVAEVYFRRHKPLNFQNFQTENIAAAYITSTELVRLLFGQLPPQFSRFFKSLLYFTHHPRIAEALKREGVCSVETVPTLEAALSHSSISVSDGMVFPGTSN

SEQ ID NO: 7630 - protein, 204 aa, Neisseria meningitidis
MRITVIITTLQSAQRKPMPWNLPIFLTWLRVLLIPVLTALFYLPFPWFAEETINLTAAVIFAVAALTDWFDGFLARLWKQTSDFGAFLDPVADKLMVAVSLLLLVKLDRTYVLFAMIIIGREITISALREWMAQMGKRNSVAVATVGKFKTAAQMLAIFLLLLNFPDFYGFNLAFIGNVLMFIASLLTVWSMLYYLKMAWKEIA

SEQ ID NO: 7631 - protein, 288 aa, Neisseria meningitidis
MKWLFILLVAINIAVFGGTVGYKLTLKQAGRIPEAQNAANNLQVQPVAPTMPVVRNIPASGPVVQAASESDTGALLKQGDILSEEQAEQLRLKKEAEQKKLKEKKQREEKARREKLAAEKAQAERENGAADALCAAQASLTMDEDDYHRIKGLLGKWSHVASRSVEKRTAQAKPADKTYRVVLPVSADAENQAAELSAKGFNPIPFDGALSLGVGNSRENAQALQNRLAGAGFGGAHIVEHFAEADRQDDSLSVSRMTVLFTGVNAADADEIRKITSLYGKLNLKSCK

SEQ ID NO: 7632 - protein, 172 aa, Neisseria meningitidis; identical to SEQ ID NO: 471

SEQ ID NO: 7633 - protein, 508 aa, Neisseria meningitidis
MNTPLPYSDYLIRILTASVYDVAVETPLEPARSLSVRLKNNILLKREDLQPVFSFKIRGAYNKMSKLPKDALACGVIAASAGNHAQGVALSAQRLGCRAVIVMPETTPKIKVDAVKSHGGEVVLRGVSYNDAYDYAMELAEKEGLTYIAPFDDPDVIAGQGTVGMEIVSQHPDPIRAVFVPIGGGGLAAGVAAFIKQVRPEIKVIGVQTNDSCCMKQSVEAGEIVHLKDVGLFSDGTAVKVVGNETFRLCKELLDEIITVDTDAVCGAVKDIFDDTRSITEPAGALALAGLKAYIAREGAENQTLIAVTSGANMNFHRLRHVSERSELGEGNEGIFAVTIPEERGSFLKFVNILGNRNITEFNYRYGDDEKAHIFVGLQAAGPQDLAVIGSRLDEAGLPNVDLTNNEIAKIHIRYMVGGRTDKVENERLVSFEFPERPGALARFLNHMQGGWNITLFHYRNHGADYGRILVGIDVPPHDAAAFDGFLESLGYSYHEETQNAAYKLFLA

SEQ ID NO: 7634 - protein, 291 aa, Neisseria meningitidis
MFQKHLQKASDSVVGGTLYVVATPIGNLADITLRALAVLQKADIICAEDTRVTAQLLSAYGIQGKLVSVREHNERQMADKIVGYLSDGMVVAQVSDAGTPAVCDPGAKLARRVREAGFKVVPVVGASAVMAALSVAGVEGSDFYFNGFVPPKSGERRKLFAKWVRAAFPIVMFETPHRIGATLADMAELFPERRLMLAREITKTFETFLSGTVGEIQTALSADGNQSRGEMVLVLYPAQDEKHEGLSESAQNIMKILTAELPTKQAAELAAKITGEGKKALYDLALSWKNK

SEQ ID NO: 7635 - protein, 380 aa, Neisseria meningitidis
MGKSLTEIAEELKGNDKKVQLIYAFNGTGKTRLSREFKNLIAPTSSEEPDGEPTRRKFLYYNAFTEDLFFWDNDLLANEAPRLKIQKNSFTDWLLRDNGLDGAVIKNFQYYTDDKLTPDFNDDFSEIAFYFARGNDEQIENIKISKGEESNFIWSIFYVLIRQVIAELNIPEDSEEGRSTDQFDDLEYIFIDDPVSSLDENHLIQQAVDLADLIKLSKPRLKFIITTHNVLFYNVLYNELKKLEKEKKSYLLLKNEDGSFDILEKQGDSNKSFSYHLHLKGVIEKAIENQQVERFHFMLLRNLYEKTANFLGYKQRSDILPEDSRRNYFQRIINFTSHSTLSNEAFAEPTPQEQETVKLLLQHLLDNYNFFQDDEQRDKP

SEQ ID NO: 7636 - protein, 183 aa, Neisseria meningitidis
LSGININLKNGDSLLIRGPSGCGKTSLLRALAGLWPFGSSGKVSRPPHQDILFLPQRPYTAQGSLRDAVCYPDIDKQHPELAEAMNTCRLGYLVDKLDKTDDWQHKLSPGELQRVAFVRALLSKPKIVLLDEATAALDEPTEALLYRALKQKLPDSIIISIGHRSTLNAFHNMRLDVGNVACG

SEQ ID NO: 7637 - protein, 102 aa, Neisseria meningitidis; identical to SEQ ID NO: 427

SEQ ID NO: 7638 - protein, 833 aa, Neisseria meningitidis
VLKTPPTLAAELSGKTGVSISAPYANENSRILLSTTDISSENGKIKIQSYGDQYYYARQSELYTFERRSYKTGKWYNRKHITEVKEHKNAKPDAVTLSASQGIDIKSGGSIDAYATAFDAPKGSINIEAGRKLTLYAVEELNYDKLDSQKRRRFLGISYSKAHDTTTQVMKTALPSRVVAESANLQSGWDTKLQGTQFETTLGGATIRAGVGEQARADAKIILEGIKSSIHTETVSSSKSTLWQKQAGRGSNIETLQLPSFTGPVAPVLSAPGGYIVDIPKGNLKTQIETLTKQPEYAYLKQLQVAKNINWNQVQLAYDKWDYKQEGMTPAAAAVVVIVVTVLTYGALSAPAAAGTAGAAGAGAGGAAAGTAAGTGVAAGTAATTGVAAGTSAAAITTAAGKAALASLASQAAVSLINNKGDINHTLKELGKSSTVRQAATAAVTAGVLQGISGLNTQAAEAVSKHFHSPAAGKLTANLINSTAAASVHTAINGGSLKDNLGDAALGAIVSTVHGEVASKIKFNLSEDYIAHKIAHAVAGCASAVANKGKCRDGAIGAAVGEMVGETLLDGRDVGKLSPQERQKVIAYSQIIAGSAVALVKGDVNTAANAATVAVENNSLLARRRVNIRWTSRQELEHEYAILEIQAITNQIRRLDPKFNGIAIMRNPREPWTRHDVQTYRQYYNQLRESRGFAVDPIYRIRINNGNEFNRIMSSKYPYNELYVANPKSATGYFRVDSYNPATEEIISRKFTQFSQIQESTGIGYIKEAVRKYSPGAVISNVPSTPTTIRGRKLEGKLILEVPAQVNPIPQSVLRAAQEENVIIRDTTGRIYK

SEQ ID NO: 7639 - protein, 896 aa, Neisseria meningitidis
MSDNRLDTARRHSLFLARQLDNGKLKPEIFLPMLDKVLTEADFQAFADWGEIRAEENEEELARQLRELRRYVVSQIIVRDINRISDLNEVTRTITLFADFAVNTALDFAYAYYRDMYGTPIGRYTKSPQHLSVVAMGKAGGYELNVSSDIDLIFVYPESGDTDGRRERGNQEFFTKVGQKLIALLNDITADGQVFRVDMRLRPDGDSGALVLSETALEQYLITQGREWERYAWCKGRVVTPYPNDIKALVRPFVFRKYLDYGAYEAMRKLHRQISSEVSKKGMADNIKLGAGGIREVEFIAQIFQMIRGGQMRALQLKGTQETLKKLAELGIMLSEHVETLLAAYRFLRDVEHRLQYWDDQQTQTLPTSPEQRQLLAESMGFDSYSAFSDGLNVHRNKVNQLFNEILSEPEEQTQDNSEWQWAWQDKPDEEGRRCRLKAHGFDAETVAARLDQIRHGHKYRHLSAHAQPRFDAVVPLFVQAAAAQSNPTDTLMRLLDFLENISRRSAYLAFLNEHPQTLAQLAQIMGQSSWVAAYLNKYPILLDELISAQLLDTAFDWQALAAALSDDLKACGGDTEAQMDTLRRFQHAQVFRLAVQDLAGLWTVESLSDQLSALADTILAAALLCAWADMPKKHRDTPQFAVVGYGKLGGKELGYASDLDLVYLYDDPHPDAGDVYSRLARRLTNWLSAATGAGSLYETDLRLRPNGDAGFLAHSIAAFEKYQRENAWTWEHQSLTRARFICGTSEIQTAFDRIRTEILTAERDQTALAGEIIEMREKMFPTHPPADSNVKYARGGVVDVEFIVQYLILAHARQYPQLLDNYGNIALLNISADCGLIDKTLAGQSRTAYRFYRRQQHNTKLRDAAKTEVTGELLAHYGNVRKLWREVFGEEAATV

SEQ ID NO: 7640 - protein, 386 aa, Neisseria meningitidis
LKTNMPTMGAEMNTRNMRYILLTGLLPMASAFGETALQCAALTDNVTRLACYDRIFAAQLPSSAGQEGQESKAVLNLTETVRSSLDKGEAVIVVEKGGDALPADSAGETADIYTPLSLMYDLDKNDLRGLLGVREHNPMYLMPLWYNNSPNYAPGSPTRGTTVQEKFGQQKRAETKLQVSFKSKIAEDLFKTRADLWFGYTQRSDWQIYNQGRKSAPFRNTDYKPEIFLTQPVKADLPFGGRLRMLGAGFVHQSNGQSRPESRSWNRIYAMAGMEWGKLTVIPRVWVRAFDQSGDKNDNPDIADYMGYGDVKLQYRLNDRQNVYSVLRYNPKTGYGAIEAAYTFPIKGKLKGVVRGFHGYGESLIDYNHKQNGIGIGLMFNDLDGI

SEQ ID NO: 7641 - protein, 395 aa, Neisseria meningitidis
MNTLLNQLKPYPFARLREAMQGISAPEGLEAVPLHIGEPKHPTPKVITDALTASLHELEKYPLTAGLPELRQACANWLKRRYDGLTVDADNEILPVLGSREALFSFVQTVLNPVSDGIKPAIVSPNPFYQIYEGATLLGGGEIHFANCPAPSFNPDWRSISEEVWKRTKLVFVCSPNNPSGSVLDLDGWKEVFDLQDKYGFIIASDECYSEIYFDGNKPLGCLQAAAQLGRSRQKLLMFTSLSKRSNVPGLRSGFVAGDAELLKNFLLYRTYHGSAMSIPVQRASIAAWDDEQHVIDNRRMYQEKFERVIPILQQVFDVKLPDASFYIWLKVPDGDDLALARNLWQKAAIQVLPGRFLARDTEQGNPGEGYVRIALVADVATCVKAAETIVSLYR

SEQ ID NO: 7642 - protein, 710 aa, Neisseria meningitidis
MSIVSAPLPALSALIILAHYHGIAANPADIQHEFCASAQSDLNETQWLLAAKSLGLKAKVVRQPVKRLAMATLPALVWCDDGNHFILAKTDGGGEHAQYLIQDLTTNKSAVLSFAEFSNRYSGKLILVASRASVLGSLAKFDFTWFIPAVIKYRRLFFEVLVVSVVLQLFALITPLFFQVVMDKVLVHRGFSTLDVVSVALLVVSLFEIVLGGLQTYLFAHTTSRIDVELGARLFRHLLSLPLSYFEHRRVGDTVARVRELEQIRNFLTGQALTSVLDLAFSFIFLAVMWYYSSTLTWVVLASLPAYAFWSAFISPILRTRLNDKFARNADNQSFLVESITAVGTVKAMAVEPQMTQRWDNQLAAYVASGFRVTKLAVVGQQGVQLIQKLVTVATLWIGARLVIEGKLTVGQLIAFNMLSGQVAAPVIRLAQLWQDFQQVGISVARLGDILNAPTENASSHLALPDIRGEITFEHVDFRYKADGRLILQDLNLRIRAGEVLGIVGRSGSGKSTLTKLVQRLYVPEQGRVLVDGNDLALAAPAWLRRQVGVVLQENVLLNRSIRDNIALTDTGMPLERIIEAAKLAGAHEFIMELPEGYGTVVGEQGAGLSGGQRQRIAIARALITNPRILIFDEATSALDYESERAIMQNMQAICANRTVLIIAHRLSTVKTAHRIIAMDKGRIVEAGTQQELLAKPNGYYRYLYDLQNG

SEQ ID NO: 7643 - protein, 93 aa, Neisseria meningitidis
MIHEEISAMPMGYETLIGDMGSALSGGQKQRIVLARALYCEPKILFLDEATSHLDIANEKAVNANLNGLSIIKIMAAHRKETVESADRKMSLG

SEQ ID NO: 7644 - protein, 668 aa, Neisseria meningitidis
MADMKKITPQNLRPLLSESLGHTDFVNVLNALIKFLRRGGKKCAGERFDLIIDTFKQDRELLSRFSRCFYIWLAQIHIYPALIKLGIFSRHSFAREMGIRIYERFSPSYKDFANLGEVFLYLFHSENDDKWLQTLNIRQWLVLYELIRSHAEPSKLQTAGIRLADARLRAIEMLSVWTASEAIEPDLIRIAPRLLEADSSFVALQRETAKLVEHYRNGTAPYDTAHLEVMFDQCFSQIDYLRRKGTGAGSGSSVKVAHLLERLRQTVDRLKLLTDIQTGAGNSNRLTIALMNSLIYAAVEQYSTRHLRRSSIRMLARSITENKSHHGEHYITRNRKEYFKMFYSAAGGGIIIALMALLKIRIGSLGLSPFLTSLSAGFNYGIGFMIIHMLHCTVATKQPAMTAASFAEQVDLNEGGKAVDNKLAKLLIDVCRSQSVAVFGNVSIAILLACAISFGYAHLYRLPILDAHTAAYQFKSIDIIAYPTLWYAAIAGLWLFCSGIIAGFFDNRADYLNLRQRLPFNPLLRKIMRPGPRRVLAAYIHKHYGSLVGNFIFGMLLGMTGYFGHLLGLPLDIRHVAFSSANLGYAAVSGNVGLGTFVLGIFSVLAIGLVNLCVSFSLALFVALRSRGTKIGSIRNLIKSFWNQIKSNPCILFLPPAKEQGHPPSDKP

SEQ ID NO: 7645 - protein, 264 aa, Neisseria meningitidis
MTTILAFDIETVPDVQGIRTLYELPSSLPDDEVVLFAQQKRRAQTGGDFMQHHLHQVVAISCCMRWGQDKVHVGTIGEMDDGEEVVIAKFFELIEKHTPQLVSWNGGGFDLPVLHYRSLIYGINAARYWDMGDGDFGDSRDFKWNNYISRYHQRHCDLMDLLALYQPRANVPLDDMAKLCGFPGKLGMDGSKVWEAFHTGRLKEIRNYCETDAANTYLMYLRFCLVSGRLDADEYEMEIKRMRNYLSAQAGEKPHWEEFVRAWE

SEQ ID NO: 7646 - protein, 107 aa, Neisseria meningitidis; identical to SEQ ID NO: 2524

SEQ ID NO: 7647 - protein, 343 aa, Neisseria meningitidis; identical to SEQ ID NO: 614

SEQ ID NO: 7648 - protein, 259 aa, Neisseria meningitidis
LAWKVLAVNISDMAAMGAIPRWVLLSAALPELDEVWLKRFCGSFFGLAKKFGVTLIGGDTTKGDMAFNVTIIGELPKGRALRRDAAVAGDDIWVSGRIGMAAAALNCRLKRCVLPDEVFAECEQKLLHPEPRVGLGLALLPFARAAQDVSDGLAQDLGHILTASGKGAEIWADSLPSLSVLKDILPRAQWLSYTLAGGDDYELVFTAPESCRSRVFDAAERCGVPVTRIGKINGGCRLKVLDADGRELELHSLGFDHFG

SEQ ID NO: 7649 - protein, 2273 aa, Neisseria meningitidis
MNKRCYKVIFNKKRSCMMAVAENVHRDGKSMQDSEAASVRVTGAASVSSARAAFGFRMAAFSVMLALGVAAFSPAPASGIIADKSAPKNQQAVILQTANGLPQVNIQTPSSQGVSVNRFKQFDVDEKGVILNNSRSNTQTQLGGWIQGNPHLARGEARVIVNQIDSSNPSLLNGYIEVGGKRAEVVVANPSGIRVNGGGLINAASVTLTSGVPVLNNGNLTGFDVSSGKVVIGGKGLDTSDADYTRILSRAAEINAGVWGKDVKVVSGKNKLDFDGSLAKTASAPSSSDSVTPTVAIDTATLGGMYADKITLISTDNGAVIRNKGRIFAATGGVTLSADGKLSNSGSIDAAEITISAQTVDNRQGFIRSGKGSVLKVSDGINNQAGLIGSAGLLDIRDTGKSSLHINNTDGTIIAGKDVSLQAKSLDNDGILTAARDVSVSLHDDFAGKRDIEAGRTLTFSTQGRLKNTRIIQAGDTVSLTAAQIDNTVSGKIQSGNRTGLNGKNGITNRGLINSNGITLLQTEAKSDNAGTGRIYGSRVAVEADTLLNREETVNGETKAAVIAARERLDIGAREIENREAALLSSSGDLHIGSALNGSRQVQGANTSLHNRSAAIESSGNIRIATKDLQNTNEHLRFHTEETHREHRIEYQAEGRTERYPEGSQKELGWEIFEDESLHMRTPDGSPHSVWYKYDYERITAESKITESKPGQIISGGNLVLDAAKLKNHNSRIIAGGRLIVGTPESALDNDETLGTKTITDKGDLHRYHRHHKKGRDSTGYSRSPYEPAPEVSSIRMGISAYKGYAPQQASDIPGTVVPVVAENGIHPTFTLPNSSLFAIAPNNKGYLIETDPAFTDYRKWLGSGYMLAALQQDPNHIHKRLGDGYYEQKLVNEQIAKLTGYRRLDGYTNDEEQFKALMDNGITIAKELQLTPGIALSAEQVARLTSDIVWLENETVTLPDGTTQTVLKPKVYVRARPKDMNGQGALLSGSVVDIGSGAIENRGGLIAGREALILNAQNIKNLQGDLQGKNIFAAAGSDITNTGSIGAENALLLKASNNIESRSETRSNQNEQGSVRNIGRVAGIYLTGRQNGSVLLDAGNNIVLTASELTNQSEDGQTVLNAGGDIRSDTTGISRNQNTIFDSDNYVIRKEQNEVGSTIRTRGNLSLNAKGDIRIRAAEVGSEQGRLKLAAGRDIKVEAGKAHTETEDALKYTGRSGGGIKQKMTRHLKNQNGQAVSGTLDGKEIILVSGRDITVTGSNIIADNHTILSAKNNIVLKAAETRSRSAEMNKKEKSGLMGSGGIGFTAGSKKDTQTNRSETVSHTESVVGSLNGNTLISAGKHYTQTGSTISSPQGDVGISSGKISIDAAQNRYSQESKQVYEQKGVTVAISVPVVNTVMGAVDAVKAVQTVGKSKNSRVNAMAAANALNKGVDSGVALYNAARNPKKAAGQGISVSVTYGEQKNTSESRIKGTQVQEGKITGGGKVSLTASGAGKDSRITITGSDVYGGKGTRLKAENAVQIEAARQTHQERSENKSAGFNAGVAIAINKGISFGFTAGANYGKGYGNGDETAYRNSHIGSKDSQTAIESGGDTVIKGGQLKGKGVGVTAESLHIESLQDTAVFKGKQENVSAQVTVGYGFSVGGSYNRSKSSSDYASVNEQSGIFAGGDGYRIRVNGKTGLVGAAVVSDADKSKNLLKTSEIWHKDIQNHASAAASALGLSGGFSYSPKPTSGQYSTKKEAEIGKIGGKPVSLMRFDQVSAKDDELNEKYRSERIEKGETFKEANLNQNNAGGLKFGLKQNDIHSNDKYALAKMGLGNLLGNAKESESRQSITRSVISEGDWQIASAQGRKNIAGIEKGTSSAHKALAKADREGLLKEVELNRDVAKEFINETLIGGIADEAYRSQFIAEHRLMTFKMDENGEPIEDKQLEEDINKQFDNSVKLKKEFASFKDYWEAYKAIGGNIYELREVSDQERKNLKTARYTDPETGKTVEKIVVGVNGIFNNIQAAAKFAAQQYVGRFNPEKNRYERTYENVYFLHNPETNGRGFSKLPEIAVAAFHKMLEGAKIGNKTVIGLSNSGLALGNIMEDYGKDKNGLFVGSHSRGTLVVDNVLNTLNTQANRDKKILSNTELKMVGPAANVVRADKRLFQLQQGVTTPRTADFARQSIQIENHELDLIGMLIGRNPATVGTNTRQKSQWQAIRDIIGDYTSPHNCYGMANKQCVTDGYRDPENKQTQSPTGVFERGVSNEIEIMYRPVRIYDLQHPKGKTK

SEQ ID NO: 7650 - protein, 90 aa, Neisseria meningitidis
MKMQKELSVYLKQILQAAQYIRLYTDKMDYGQFSADTKTVQAVVFNLFLIGENATHILKSYPEFAEETKYLNWIGMRGYCAIGLPMATLK

SEQ ID NO: 7651 - protein, 144 aa, Neisseria meningitidis
MKTFSAKPHEVKREWFVIDAQDKVLGRVAAEVASRLRGKHKPEYTPHVDTGDYIIVINADKLRVTGAKFEDKKYFRHSGFPGGIYERTFREMQEQFPGRALEQAVKGMLPKGPLGYAMIKKLESVCGCGTRPCCATTQSFGTEI

SEQ ID NO: 7652 - protein, 58 aa, Neisseria meningitidis
MGGVFFSVAFRQAQIHIYSGLNLNQDKATKPQTVQIVRQGNATLYWFKFNPLYCPKTA

SEQ ID NO: 7653 - protein, 604 aa, Neisseria meningitidis
MSEHDMQNTNPPLPPLPPEITQLLSGLDAAQWAWLSGYAWAKAGNGASAGLPALQTALPAAEPFSVTVLSASQTGNAKSVADKAADSLEAAGIQVSRAELKDYKAKNIAGERRLLLVTSTQGEGEPPEEAVVLHKLLNGKKAPKLDKLQFAVLGLGDSSYPNFCQAGKDFDRRFEELGAKRLLERVDADLDFTASANAWTDNIAALLKEEAAKNRATPAPQTTPPAGLQTAPDGRYCKAAPFPAALLANQKITARQSDKDVRHIEIDLSGSDLHYLPGDALGVWFDNDPALVREILDLLGIDPATEIQAGGKMMPVARALSSHFELTQNTPAFVKGYAAFAHYEELDKIIADNAVLQDFVQNTPIVDVLHRFPASLTAEQFIRLLRPLAPRLYSISSAQAEVGDEVHLTVGVVRFEHEGRARTGGASGFLADRLEEDGTVRVFVERNDGFRLPEDSRKPIVMIGSGTGVAPFRAFVQQRAAENAEGKNWLIFGNPHFARDFLYQTEWQQFAKDGFLHRYDFAWSRDQEEKIYVQDKIREQAEGLWQWLQEGAHIYVCGDAAKMAKDVEAALLDVIIGAGHLDEEGAEEYLDMLREEKRYQRDVY

SEQ ID NO: 7654 - protein, 334 aa, Neisseria meningitidis
MQRQIKLKNWLQTVYPERDFDLTFAAADADFRRYFRATFSDGSSVVCMDAPPDKMSVAPYLKVQKLFDMVNVPQVLHADTDLGFVVLNDLGNTTFLTAMLQEQGETAHKALLLEAIGELVELQKASREGVLPEYDRETMLREINLFPEWFVAKELGRELTFKQRQLWQQTVDTLLPPLLAQPKVYVHRDFIVRNLMLTRGRPGVLDFQDALYGPISYDLVSLLRDAFIEWEEEFVLDLVIRYWEKARAAGLPVPEAFDEFYRWFEWMGVQRHLKVAGIFARLYYRDGKDKYRPEIPRFLNYLRRVSRRYAELAPLYALLVELVGDEELETGFTF

SEQ ID NO: 7655 - protein, 156 aa, Neisseria meningitidis
MYDVNTHDVRRFFARVWQQRLNPLQLSALEQKALRIVEAHPEYHRYLERIEDHLDTDWLPENGESNPFLHMSLHLSVQEQAGIDQPHGIRAIHDTLCAKRGWLEAEHEMMEALAETLWTAQRYGTGLDVNFYMTRLRKLIGLGAEDQARLNPHEIA

SEQ ID NO: 7656 - protein, 377 aa, Neisseria meningitidis
MSYSTFPKTKNDALNEPMFFGQPVNVARYDQQKYEVFEKLIEKQLSFFWRPEEIDVSRDRIDYANLPEHEKHIFISNLKYQTLLDSIQGRSPNVALLPLVSIPELETWIETWSFSETIHSRSYTHIIRNIVNDPSVVFDDIVENEYITARAEDIACYYDDLIEYTQYYNLLGEGVHNVGGKPVTVSLRGLKKKLYLCLMCVNVLEAIRFYVSFACSFAFAERELMEGNAKIIKLIARDEALHLTGTQHMLNLMRSGVDDSEMAEIAAELQDECFQLFKKAAEQEKEWAAYLFKDGSMIGLNKEILSQYVEYITNLRMQAVGLPAGFEGANQNPIPWINAWLSSDNVQVAPQEVEISSYLIGQIDSEVNTDDLGDFEL

SEQ ID NO: 7657 - protein, 197 aa, Neisseria meningitidis
LYGSHRLLCTQTDGDNAQKKTTTYKEQDPAKVTHYLTQPAEFSDYQRVYLDETGFDRHLFRPYARSLKGQIVKAQISGKRYRRLSLVSAQVGNRLIAPMVYQNTMTGVFFEAWFQQCLLPALTQKSVIILDNARFHRMGVLREMAEKLGHKVLPLAPYSPELNPIEKVWANIKRYLRTVLSDYARFNDALLSYFDFN

SEQ ID NO: 7658 - protein, 242 aa, Neisseria meningitidis
MTKQLKLSALFVALLASGTAVAGEASVQGYTVSGQSNEIVRNNYGECWKNAYFDKASQGRVECGDAVAAPEPEPEPEPAPAPVVVVEQAPQYVDETISLSAKTLFGFDKDSLRAEAQDNLKVLAQRLSRTNVQSVRVEGHTDFMGSDKYNQALSERRAYVVANNLVSNGVPVSRISAVGLGESQAQMTQVCEAEVAKLGAKVSKAKKREALIACIEPDRRVDVKIRSIVTRQVVPAHNHHQH

SEQ ID NO: 7659 - protein, 333 aa, Neisseria meningitidis
MKRKIWLLPLLAVSAYLQAQTEVRLAVHKSFSLPKGLIARFERANDAKVSIIQAGGANEMLNKLILSRANPIADAVYGLDNANIGKAREMGILAAAQPESAPVAVGLPSALAVDYGYVSINYDKKWFEGKKLPLPQTLQDLTRPEYKNLLVVPSPATSSPGLGFLMANISGLGEEGAFKWWAQMRQNGVKVAKGWSEAYYTDFSHNGGAYPLVVGYAASPAAEVYFSKGKYSEPPTGNLFLKGGVFRQVEGAAVLKGAKQPELAAKLVQWLQSREVQQAVPSEMWVYPAVKNTRLPDVFRFAQAPTHTTAPAQRDIDANQRGWVSRWIRTVLK

SEQ ID NO: 7660 - protein, 633 aa, Neisseria meningitidis
MTTPKKTAKTSGNEARELADLSEDIGIRFKYPNSERVYLQGSRDDIRVPLREIRQDDTYTAQGAEANPPIPVYDTSGVYGDPAAHIDLKQGLPHIRTAWLNERGDTEILPKLSSEYGIERAHDPKTAHLRFNQITRPRRAKSGSNVTQLHYARQGIITPEMEFVAIRERLKLDELSQKSEYAKLLKQHAGQSFGANIPTHPDQITPEFVRQEIAAGRAIIPANINHPELEPMIIGRNFRVKINGNLGNSAVTSSLTEEVEKMVWSLRWGADTIMDLSTGAHIHETREWIIRNAPVPIGTVPIYQALEKTGGIAEDLTWDLFRDTLIEQAEQGVDYFTIHAGVLLRYVPMTANRLTGIVSRGGSIMAKWCLAHHRENFLYTHFDEICEIMKAYDVSFSLGDGLRPGCIADANDESQFAELHTLGELTDKAWKHDVQVMIEGPGHVPLQRVKENMTEELQHCFEAPFYTLGPLVTDIAPGYDHITSGIGAANIGWYGTAMLCYVTPKEHLGLPDKEDVRTGIITYKLAAHAADLAKGWPGAQLRDNALSKARFEFRWRDQFRLSLDPERAESFHDETLPAEGAKIAHFCSMCGPKFCSMKITQEVRDYADKQKAQRQGMEEKAVEFVKKARRFTV

SEQ ID NO: 7661 - protein, 285 aa, Neisseria meningitidis
  misc_feature 2, 3: 'Xaa' is any amino acid
VXXEIRRHRTQGQQYSAEKAQRQSQTIKQRKRQPYKLDSQLIQHIDPFIRRKLSPEQVCAYVRKHHQITLHHSTIYRYLRQDKSNGSTLWQHLRICSKPYRKRYGSTWTRGKVPNRVGIENRPAIVDQKSRIGDWEADTIVGKGQKSALLTLVERVTRYTIICKLDSLKAEDTARAAVRALKAHKDRVHTITMDNGKEFYQHTKITKALKAETYFCRPYHSWEKGLNENTNGLIRQYFPKQTDFRNISDREIRRVQDELNHRPRKTLGYETPSVLFLNLFQPLIH

SEQ ID NO: 7662 - protein, 962 aa, Neisseria meningitidis
MSNTTVEQFAAELKRPVEDLLKQLKEAGVSKNSGSDSLTLDDKQLLNAYLTKKNGSNSSTISIRRTKTEVSTVDGVKVETRKRGRTVKIPSAEELAAQVKAAQTQAAPVRPEQTAEDAAKARAEAAARAEARAKAEAEAAKLKAAKAGNKAKPAAQKPTEAKAETAPVAAETKPAEESKAEKAQADKMPSEKPAEPKEKAAKPKHERNGKGKDAKKPAKPAAPAVPQPVVSAEEQAQRDEEARRAAALRAHQEALLKEKQERQARREAMKQQAEQQAKAAQEAKTGRQRPAKPAEKPQAAAPAVENKPVNPAKAKKEDRRNRDDEGQGRNAKGKGGKGGRDRNNARNGDDERVRGGKKGKKLKLEPNQHAFQAPTEPVVHEVLVPETITVADLAHKMAVKGVEVVKALMKMGMMVTINQSIDQDTALIVVEELGHIGKPAAADDPEAFLDEGAEAVEAEALPRPPVVTVMGHVDHGKTSLLDYIRRTKVVQGEAGGITQHIGAYHVETPRGVITFLDTPGHEAFTAMRARGAKATDIVILVVAADDGVMPQTIEAIAHAKAAGVPMVVAVNKIDKEAANPERIRQELTAHEVVPDEWGGDVQFIDVSAKKGLNIDALLEAVLLEAEVLELTAPVDAPAKGIIVEARLDKGRGAVATLLVQSGTLKKGDMLLAGTAFGKIRAMVDENGKSITEAGPSIPVEILGLSDVPNAGEDAMVLADEKKAREIALFRQGKYRDVRLAKQQAAKLENMFNNMGETQAQSLSVIIKADVQGSYEALAGSLKKLSTDEVKVNVLHSGVGGITESDVNLAIASGAFIIGFNVRADASSRKLAENENVEIRYYNIIYDAINDVKAAMSGMLSPEEKEQVTGTVEIRQVISVSKVGNIAGCMVTDGVVKRDSHVRLIRNNVVIHTGELASLKRYKDDVKEVRMGFECGLMLKGYNEIMEGDQLECFDIVEVARSL

SEQ ID NO: 7663 - protein, 522 aa, Neisseria meningitidis
LSLSMTLAEFWPMCLRRLRDMLPPGQFAQWIAPLTVGEEGGVWVVYGKNQFACNMLKSQFAGKIEAVREELAAGRSAFVFKPGEGVRYEMAAVESAVEPAEPSLHAGSEEMPVQEVLLDELPSEEPVKPAASKTAADILAERMKNLPHEPRHTAEPASRPESAVLAKARTDAQRDAEEARYEQTNLSPDYTFDTLVEGKGNRLAAAAAQAIAESPGQSYNPFFLYGSTGLGKTHLVQAVGNELLKNRPDAKVRYMHSDDYIRSFMKAVRNNTYDVFKQQYKQYDLLIIDDIQFIKGKDRTMEEFFYLYNHFHNEKKQLILTCDVLPAKIEGMDDRLKSRFSWGLTLELEPPELEMRIAILQKKAEAAGISIEDEAALFIANLIRSNVRELEGAFNRVSASSRFMNRPVIDIDLARTALQDIIAEKHKVITADIIIDAVAKYYRIKISDVLGKKRTRNIARPRQVAMSLTKELTTLSLPSIGDSFGGRDHTTVMHGIRAVSKLREEDPELAQDYEKLLILIQN

SEQ ID NO: 7664 - protein, 133 aa, Neisseria meningitidis; identical to SEQ ID NO: 1383

SEQ ID NO: 7665 - protein, 473 aa, Neisseria meningitidis
MFRRHFCFQMQGKPMAKTLKTLYQCTECGGTSPKWQGKCPHCGEWNTLQESLAAPEPKNARFQSWAADTSTVQSLSAVTATEVPRNPTGMGELDRVLGGGLVDGAVILLGGDPGIGKSTLLLQTIAKMAQSRKVLYVSGEESAQQVALRAQRLELPTDGVNLLAEIRMEAIQAALKQHQPEVVVIDSIQTMYSDQITSAPGSVSQVRECAAQLTRMAKQMGIAMILVGHVTKDGAIAGPRVLEHMVDTVLYFEGDQHSNYRMIRAIKNRFGAANELGVFAMTENGLKGVSNPSAIFLASYRDDTPGSCVLVTQEGSRPLLVEIQALVDDAHGFTPKRLTVGLEQNRLAMLLAVLNRHGGIACFDQDVFLNAVGGVKIGEPAADLAVILAMLSSFRNRPMPEKTVVFGEIGLSGEVRPVARGQERLKEAEKLGFKRAIVPKANMPRNAKEFPNLKIYGVSSLQEAIDICRDSRE

SEQ ID NO: 7666 - protein, 127 aa, Neisseria meningitidis; identical to SEQ ID NO: 1134

SEQ ID NO: 7667 - protein, 110 aa, Neisseria meningitidis
MSSELIVHTSDAAFEKDVLNADIPVLLDFWAPWCGPCKMIAPILDDIAAEFEGRLKVVKINIDDNEATPSRFGVRGIPTLMVFKNGEVVATKVGALAKGQLTAFVEASIA

SEQ ID NO: 7668 - protein, 252 aa, Neisseria meningitidis
MDKLDYCRRFFATWLGFVIFGVGGIMMKLVLLPYTLNGTSGSVARQLAARRIIGTSWRLFVAYLKWSGVLEVSFKGVEKLNRPGQLILANHPSLLDVVLLVGHVPEMNCIVKKDLQHNPAMSSQIKGAGYIPNEESEAMLETVKAVFDSGQSLLVFPEGTRTGWDGRVKMHRGAVSLGLRYAEVITPVCIKMNPPNFKKGQPWYRIPPKRIRYEITVGDDILPQDWLAEKPLPIAARRLNEYLQDYFTRKTI

SEQ ID NO: 7669 - protein, 483 aa, Neisseria meningitidis
VNYFPIFANLAGRPVLVVGGGAVAARKISLLLKAGAEVRVAAKHLNAELSALAAENKILWLAEEFRAEHIRTVFLIIAASSDQALNRRVFHLAESCQKPVNVVDDRDHCSFIFPSVIDRNPVQIAVSSSGSAPVLARLLRERLEALLPPSLGDMAEISGRWRDAVKGKLKSVTERRRFWEKQFNGRFAALVKNRQNTLAERELAGQLEQSRQNDQGGSVSLVGAGPGDAGLLTLKGLQEIQQADVVLYDALVSDGILSLVRRDAERIFVGKRARGERTPQEDTNALMVRLAREGRRVVRLKGGDPFVFGRGGEELETLARHQIPFSVVPGITAAVGATAYAGIPLTHRDYAQSAVFVTGHRKADAPDIEWQTLARSRQTLVIYMGALKAALIAERLQQHGRSPDTPAAVISQGTLPAQKTATGTLANLAELAETAPNPALIVIGEVVGLHEKLAWFGENGEGENRVGQTYPALGGLNAGQRAA

SEQ ID NO: 7670 - protein, 562 aa, Neisseria meningitidis
MRSMIYGSMPSEKLTIFQTAFVMQVNIQIPCMLYRRGSVKPPLFEAPRLLPSFTDPVVPKLSAPGGYIVDIPKGNLKTEIEKLAKQPEYAYLKQLQVAKNVNWNQVQLAYDKWDYKQEGLTRAGAAIIALAVTVVTAGAGVGAALGLNGAAAAAADAAFASLASQASVSLINNKGDVGKTLKELGRSRTVKNLVVAAATAGVSNKLGASSLATWSETPWVNNLNVNLANAGSAALINTAVNGGSLKDNLEANILAALVNTAHGEAASKIKGLDQHYVAHKIAHAVAGCAAAAANKGKCQDGAIGAAVGEIVGEALVKNTDFSDMTPEQLDLEVKKITAYAKLAAGTVAGVTGGDVNTAAQTAQNAVENNAVKAVVTAAKVVYKVARKGLKNGKINVRDLKQTLKDEGYNLADNLTTLFDETLDWNDAKAVIDIVVGTELNRANKGEAAQKVKEVLEKNRPYIPNKGAVPNMSTYMKNNPFGKQLAQISEKTTLPTQQGQSVFLVKRNQGLLKTGDRFYLDGQHKNHLEVFDKNGNFKFVLNMDGSLNQMKTGAAKGRKLNLK

SEQ ID NO: 7671 - protein, 208 aa, Neisseria meningitidis
MRKSRLSQYKQNKLIELFVTGVTARTAAELVGVNKNTAAYYFHRLRLLIYQNSPHLEMFDGEVEADESYFGGQRKGKRGRGAAGKVAVFGLLKRNGKVYTVTVPNTQTATLFPIIREQVKPDSIFYTDCYRSYDVLDVREFSHFSFAETSFSYQSQHTFCRTTKPYWNELLESGKTSFTQVRHSQSAFAVFKGVRMAFQQDKSSCSIL

SEQ ID NO: 7672 - protein, 118 aa, Neisseria meningitidis; identical to SEQ ID NO: 367

SEQ ID NO: 7673 - protein, 114 aa, Neisseria meningitidis
MNLENYENILIKLLFYHNNLVNEYSYFIENKNLFKIVSRTKTSKGFFFTIEKPLNFLSKKTYFEFNFKYLHSGKERFGSFMCWINTNLMEFEGVFFNDLLPDNMIINNFFEIND

SEQ ID NO: 7674 - protein, 259 aa, Neisseria meningitidis; identical to SEQ ID NO: 588

SEQ ID NO: 7675 - protein, 109 aa, Neisseria meningitidis; identical to SEQ ID NO: 3636

SEQ ID NO: 7676 - protein, 468 aa, Neisseria meningitidis
MNDYAAMPSEDREVGALSLPPHSMEAEQSVLGGLMLENPAWDRIADVVSGEDFYRHEHRLIFRSIAKLINESRPADVITVQEDLQRNEELEAAGGFEYLITLAQNTPSAANIRRYAEIVRERSIMRQLAEVGTEIARSAYNPQGRDAGQLLDEAENKVFQIAESTAKSKQGFLEMPDLLKEVVQRIDMLYSRDNPDEVTGVPTGFIDLDKKTSGLQPGDLIIVAGRPSMGKTAFSINIAEHVAVEGRLPVAVFSMEMGGAQLVMRMLGSVGRLDQSVLKTGRLEDEHWGRLNEAVVKLSDAPVYIDETPGLTALELRARARRLARQFNNKLGLIVIDYLQLMAGSGRSDNRASELGEISRSLKALAKELQVPIIALSQLSRTVESRTDKRPMMSDLRESGAIEQDADLIMFMYRDEYYNQDSPMKGLAECIIGKHRNGPVGKIFLTWTGQFTKFDNAAYIPEEAKIED

SEQ ID NO: 7677 - protein, 272 aa, Neisseria meningitidis; identical to SEQ ID NO: 1395

SEQ ID NO: 7678 - protein, 62 aa, Neisseria meningitidis
MEEVKANPQGKTPARIPPMSDTKNGWLAKDGWVKRVQNVNKIEIHYIENSRTGEKTDFKFKD

SEQ ID NO: 7679 - protein, 86 aa, Neisseria meningitidis
LTKAVRRKNVQTPKICYAFRTPSAYGQYLADAGFDYLSFANNHSNDFGAQGITATAASGSSFTYSIALKPLPITRPKLRKIPPSPR

SEQ ID NO: 7680 - protein, 477 aa, Neisseria meningitidis
MNEYSQLIKHPDISLPPVSDGIKVDNPATGETLAFVRKTDSDKLKNLIQKAAAAQKLWAAKTALERADVLWRWYFQIKENKEALARLMTMEQGKSLTEARGEIDYAASFVRWFAEEARRIDGDVLTSVKASQKLVVLKQPVGVTAAITPWNFPSAMIARKAAPALAVGCAMIVKPASLTPLSAYALASLAYEAGIPQDLLPVVSGSASEIGHEFATNPIIRKISFTGSTEVGAKIFADSAADIKKLSLELGGNAPFIVFDDADLDKAVEGALASKFRNSGQTCVCTNRVYAQSAIYDEFCRKLSEKAAALKLGNGLEDGVNQGPLIEEKAVEKVEQHIADALAKGASCLTGGKRSALGGTFFEPTVLSGVTAQMAVAREETFGPLCPVFRFETEAEVIEAANNTEYGLAAYLFTADTARQWRVGEALEYGMVGINTGLISNEAAPFGGVKRSGLGREGSKYGADEYLELKYLCMDVG

SEQ ID NO: 7681 - protein, 207 aa, Neisseria meningitidis; identical to SEQ ID NO: 1335

SEQ ID NO: 7682 - protein, 418 aa, Neisseria meningitidis
MNAAQLDHTAKVLAEMLTFKQPADAVLSAYFREHKKLGSQDRHEIAETAFAALRHYQKISTALRRPHAQPRKAALAALVLGRSTNISQIKDLLDEEETAFLGNLKARKTEFSDSLNTAAELPQWLVEQLKQHWREEEILAFGRSINQPAPLDIRVNTLKGKRDKVLPLLQAESADAEATPYSPWGIRLKNKIALNKHELFLDGTLEVQDEGSQLLALLVGAKRGEIIVDFCAGAGGKTLAVGAQMANKGRIYAFDIAEKRLANLKPRMTRAGLTNIHPERIGSEHDARIARLAGKADRVLVDAPCSGLGTLRRNPDLKYRQSAETVANLLEQQHSILDAASKLVKPQGRLVYATCSILPEENELQVERFLSEHPEFEPVNCAELLAGLKIDLDTGKYLRLNSARHQTDGFFAAVLQRK

SEQ ID NO: 7683 - protein, 168 aa, Neisseria meningitidis
MAHPQEIREKLRRLYVSGEQTLETAALMCEIPQTTARAWKRADKEKGDDWDKMRAAYTLAGGGIEDLSRAMLAGFMVQYNSTMTMLQDSSTEDLPPSDRAKLLASLADAFTKTVSANARVMPETSKLATALELIEFLMAFVQEKHPKHLPAFVEVLEPFGVEVEKKFG

SEQ ID NO: 7684 - protein, 189 aa, Neisseria meningitidis
MEILTQLGYQVVKLPANIDETVRQNEDPARYVQRMAEEKNRTALTLFCETNGTMPDFPLITADTCVVSAGIILGKPHSQAEAIEFLNRLSGKQHTVLTAVCIHYRGNAENRVQTNRVVFKPLSSEEISAYVQSGEPMDKAGAYAVQGIGGIFIQSIEGSFSGIMGLPVYETVSMLQDLGYRSPLSALKP

SEQ ID NO: 7685 - protein, 741 aa, Neisseria meningitidis
MTQKSTIVYTHTDEAPALATQSLLPIVQAFARHADIDVKTSDISLSGRILAAFPEYLTEAQRVPDALAELGELVKQPDANVIKLPNISASVPQLTAAIKELQSKGFAVPDYPADPQTDEEKAVRERYDRIKGSAVNPVLREGNSDRRAPKAVKNFAKKNPHSMGAWTKDSKTHVATMQSGDFFHNEQSVIVPEATSVSIVFTDKQGNKKELREPVALKAGEIIDATVMSKKALLAFLAEQVKDAKAKGVLFSLHMKATMMKVSDPIIFGHAVKVFFAPVFEKFGDKLAAAGVNVNNGFGNLLANLDKLDADTRTAVEAEIAAVYAANPDLAMVDSDKGITNLHVPSDVIVDASMPAMIRNSGRMWDKNGKAQDTKAVIPDSSYAGVYQATIDFCREHGAFDPTTMGTVPNVGLMAQAAEEYGSHNKTFEIEADGQVQVIDAAGKVLMQHDVEAGDIWRMCQTKDAPVKDWVQLAVNRARLSNTPAVFWLDENRPHDKSLLAKVKAYLAELDTNGLDIRVLAPEEAAKFSLGRLKNGEDTISVTGNVLRDYLTDLFPILELGTSAKMLSIVPLMNGGGMFETGAGGSAPKHVQQFLEENHLRWDSLGEFLALAVSFEHLAQKTGNAKAQVLADTLDAATEKLLLNDKSPKRKAGELDNRGSHFYLTLYWAQELAAQDKDAELKAAFTPLAAALTADEAKIVAELSAVQGKAADIGGYYAANPEKAAQVMRPSVTFNQALNAL

SEQ ID NO: 7686 - protein, 267 aa, Neisseria meningitidis
MNLFFDTELGKQQNKATHKIRVMSEAWLEKNGYCPCCGSKPMQRFANNKPVADLFCPNCHEQYELKSKNQKTIGNSVPDGAYHTMLERIRSDTNPNFFFLAYKKADYSIRQLVLVPKHFITPDMIIPRNKGIKNRPNHIMCSINLAPLPESGKIFLIDNSRIIEPETVLKKWQSNLFLRNQNAERKGWLLAVMKCIDQLPEEFTLSQMYEFENKLSIQFPQNNHIRDKIRQQLQILRDQNTIEFIGRGLYKKSINCAQLPRYFDFKS

SEQ ID NO: 7687 - protein, 65 aa, Neisseria meningitidis
MSDPILDALARIENKTDQTLKNQKEMQAEIAQIRQDTKRTAITFGALGGGVITVGWELLKAKMGL

SEQ ID NO: 7688 - protein, 301 aa, Neisseria meningitidis
MDILDKLVDFAQLTGSVDVQCLLGGQWSVRHETLQREGLVHIVTSGSGYLCIDGETSPRPVSTGDIVFFPRGLGHVLSHDGKCGESLQPDMRQHGAFTVKQCGNGQDMSLFCARFRYDTHADLMNGLPETVFLNIAHPSLQYVVSMLQLESKKPLTGTVSMVNALSSVLLVLILRAYLEQDKDVELSGVLKGWQDKRLGHLIQKVIDKPEDEWNVDKMVAAANMSRAQLMRRFKSRVGLSPHAFVNHIRLQKGALLLKKNPDSVLSVALSVGFQSETHFGKAFKRQYHVSPGQYRKEGGQK

SEQ ID NO: 7689 - protein, 72 aa, Neisseria meningitidis; identical to SEQ ID NO: 113

SEQ ID NO: 7690 - protein, 123 aa, Neisseria meningitidis; identical to SEQ ID NO: 616

SEQ ID NO: 7691 - protein, 55 aa, Neisseria meningitidis; identical to SEQ ID NO: 1257

SEQ ID NO: 7692 - protein, 716 aa, Neisseria meningitidis
MLTDLEKNAIRDHYQNIGKNLPGFRPRASQREMIAAVANAFSRTLAREEGGEPPKREGESIAVIEGPTGVGKSLAYLLAGGIMAQTRGKRLIVSSATVALQEQLVDRDLPFLVEKSGLELTFALAKGRGRYLCPYKLYRLTQSNAQQNLLGFEAPAVLWDSKPKPEELKLLRDIADEFSARRFNGDRDTWPEKIDDAIWLKVTNDRHGCLKTACPNRPECPFYLARDVLETVDVVVANHDLLLADISMGGGVILPAPENSFYCIDEAHHLPKKALSRFAAEHSWNIAVWTLEKLPQLTGKIAALTDKAELANLADEAAASLLDSLHEWQFHLAEEPSLSLGVSENDRRTNSEPTWLWEDGKIPEGLETTVSNTAIAARSLLKHVIGLNDALSAARREKEQDGALLDRLTSEFGLFIARIEQISAVWDLLSTVPLEGEEPLAKWITRRADDKNDYIFNASPISSASHLANSLWRRAAGAVLTSATLQSLGNFNLMLRQTGLQWLPETTTLALKSPFDFEKQGELYIPPIYASPKDPEAHTAAVIEWLPKLISPTEAIGTLVLFSSRKQMQDVALRLPGDYLPLLLVQGELPKAVLLQKHHRAIEEGKASIIFGLDSFAEGLDLPGTACVQVIIAKLPFAMPDNPIEKTQNRWIEQRGGNPFIEITVPEAGIKLIQAVGRLIRTEQDYGRVTILDNRIKTQRYGQQLLAGLPPFKRIG

SEQ ID NO: 7693 - protein, 166 aa, Neisseria meningitidis; identical to SEQ ID NO: 743

SEQ ID NO: 7694 - protein, 318 aa, Neisseria meningitidis; identical to SEQ ID NO: 6240

SEQ ID NO: 7695 - protein, 321 aa, Neisseria meningitidis; identical to SEQ ID NO: 6173

SEQ ID NO: 7696 - protein, 375 aa, Neisseria meningitidis
MYTFRPFPKLHTETHIMNIQNIRTLLDTVAVPNTARTLGGEKAVRSVEQRSDGIHIALHFGFPVAHIASETADRIQEILMPLTGDTHIHLSMDTEIGTHKVQPGVTTIKGVKNIIAVASGKGGVGKSTTTANLAAAMARMGARVGVLDADLYGPSQPTMLGVDDRKPDQKNQKLIPVESSDGIQVMSIGFLVDTDQAVVWRGPMVSQALQQLMFQSEWDEVDYLFIDLPPGTGDIQLTLSQRIPVTGSVIVTTPQDIALIDARKAVDMFRKVNIPILGVLENMSVHICSNCGHSEALFGTDGGKDFAARLNVPLLGQLPLSLPVREAMDGGTPAQLFDEHPAIARIYTDAAFQIALSIADKGKDFSSRFPKIVIE

SEQ ID NO: 7697 - protein, 591 aa, Neisseria meningitidis
MSIVLHGVAAGKGIAVGCAHLIARGTEEVPQYDVAEADTDAEAERFDAAVKATRKELEQLRSAIPENAPTELGAFISLHLMLLTDVTLSREPVDILREQKINAEWALKQQSDKLAAQFDNMDDAYLRERKQDMLQVVRRIHNNLIGQGNELEVADNLFDETVLIANDLSPADTVLFKEQRIAAFVTDAGGPTGHTAILGRSLDIPSVVGLHNARKLITEGETVIVDGINGVLIIAPDESVLNEYRRRAREYRSHKRDLNKLKKTAAATADGVCIELVGNIESAEDVKPLHNLGADGIGLFRSEFLYLNRDTMPSEDEQYEVYSAIVKKMKGKSVTIRTVDLGVDKNPRWFGKNSTPNGSLNPALGMTGIRLCLAEPVMFRTQMRAILRAAVHGPVRMMWPMITSVSEVRQCLIHLDTAQRQLAERGDAFGKVGIGCMIEIPSAALTVGSILKLVDFISVGTNDLIQYILSVDRGDDSVSHLYQPGHPAVLKMLQHVIRTANRMDKDVSVCGEMAGDTAFTRVLLGMGLRRFSMNPNNILPVKNIILHSNVGQLESDIVKVIRCEDEEKSEKLIKQMNSVSVEEEADFKGRK

SEQ ID NO: 7698 - protein, 183 aa, Neisseria meningitidis; identical to SEQ ID NO: 1173

SEQ ID NO: 7699 - protein, 262 aa, Neisseria meningitidis
MNPKIVFFDIDDTLYRKYTDTLRPSVKTAVAALRGKGILTALATGRSLATIPEKVRDMMAEAGMDAVVTINGQFALLHGKTVREVPMDAGLMGRVCAHLDGLGMDYAFVGGEGIAVSALSECVCRALKHIASDFFADKDYFSSKPVYQMLVFAEENEMPLWSDIVEREGLKTVRWHEEAVDLLPAGASKTDGIRSVVEALGWEMADVMAFGDGLNDVEMLSEVGFGVAMGNGEQAAKEAAKYVCPSVDEDGVLRGLQDLGVI

SEQ ID NO: 7700 - protein, 472 aa, Neisseria meningitidis
MNIHTLLSKQWTLPPFLPKRLLLSLLILLAPNAVFWVLALLTATARPIVNLDYLPAALLIALPWRFVKIAGVLAFWLAVLFDGLMMVIQLFPFMDLIGAINLVPFILTAPAPYQIMTGLLLLYMLAMPFVLQKAAAKTDFRHIAVCAAVVAAAGYFTGHLSYYDRGRMANIFGANNFYYAKSQAMLYTVSQNADFITAGLVDPVFLPLGNQQRAATHLNEPKSQKILFIVAESWGLPANPELQNATFAKLLAQKDRFSVWESGSFPFIGATVEGEMRELCAYGGLRGFALRRAPDEKFARCLPNRLKQEGYATFAMHGAGSSLYDRFSWYPRAGFQEIKTAENLIGKKTCAIFGGVCDSELFGEVSAFFKKHDKGLFYWMTLTSHADYPESDIFNHRLKCTEYGLPAETDLCRNFSLHTQFFDQLADLIQRPEMKGTEVIIVGDHPPPVGNLNETFRYLKQGHVAWLNFKIK

SEQ ID NO: 7701 - protein, 358 aa, Neisseria meningitidis
VCRMFGGISVKMAAFPSEAESPVMYPLARRILFALDAEKAHHFTLDALYTVYKLGLIPVTDNRTKPVKLMGMDLPNPVGLAAGLDKNGEYIDALGALGFGFIEIGTVTPNPQPGNPQPRLFRVPEHQGIINRMGFNNHGIDTMIRNIEKSKFSGVLGINIGKNAVTPIENAADDYLICLEKAYAHASYITVNISSPNTKNLRALQGGDELSALLEALKNKQAQLASVHGKYVPLAVKIAPDLDEAQIEDIAHVVKSVEMDGIIATNTTIDKSSLGSHPLAGEQGGLSGLPVHEKSNRVLKLLADHIDGKLPIIGVGGIMEGEDSADKIRLGATAVQVYSGLIYKGPALVKECLKALAR

SEQ ID NO: 7702 - protein, 43 aa, Neisseria meningitidis; identical to SEQ ID NO: 3165

SEQ ID NO: 7703 - protein, 52 aa, Neisseria meningitidis
MELHDRQEMPSERIFRSVLRLVGVSSETVKRKFAGVELSYAGKAAGESLYCL

SEQ ID NO: 7704 - protein, 461 aa, Neisseria meningitidis
MSSGLVTAAYIVAAILFIFSLAGLSKQETAKQGCYSGIAGMAVALFVTVFSDNTHGLGWIIIAMLIGAAIGIYKAKKVEMTEMPELIALLHSFVGLAAVLVGFNSYIAPGNVSHDMHTIHLVEVYLGIFIGAVTFTGSLVAFGKLNGKISSSPLQLPAKHKLNALALAVSFVLLLVFVGIDGSGFILLIMTLIALAFGWHLVASIGGADMPVVVSMLNSYSGWAAAAAGFMLSNDLLIVTGALVGSSGAILSYIMCKAMNRSFVSVIAGGFGSDSGTLSSGSQEIGEYREVKAADIAEMLKGANNVIITPGYGMAVAQAQYPVAEITELLRKNGTEVRFGIHPVAGRLPGHMNVLLAEAKVPYDIVLEMDEINDDFPETDVVLVIGANDTVNPAAQTDPNSPIAGMPVLEVWKAKEVVVFKRSMNTGYAGVQNPLFFNENSVMCFGDAKKTVDDILSELKK

SEQ ID NO: 7705 - protein, 608 aa, Neisseria meningitidis
LSETDSIMKKLICLFAVFLMLCGRAFALDANDLLPPEKAFVPELAVADDGVNVRFRIADGYYMYQAKIVGKTDPADLLGQPSFSKGEEKEDEFFGRQTVYHHEAQVAFPYAKAVGEPYKLVLTYQGCAEAGVCYPPVDTEFDIFGNGTYHPQTDEPASAKDRFLQPSSQNGSGALPPPKGDEGGDSRFKLSWDTLNANLLAFFLAGLGLSFTACMYPLLPIVSSIVVGDKKAGKARAFVLSVVYVQGLALTYTLVGIVAGLTGALLTVWLQQAWVVLAASALMVVLALSMFGLFNIQLPNAVQSYFQNQSSRLSGGKIVSVFIMGILSALIVGPCVAPPLAFALGYIGQTGDAVLGGLALYTLALGTGVPLIAIGTFGGHILPKAGDWMNAVKYAFGFILLAVAVYLATPHLPYYLVVALYTLLMLVPAFMLLVNGRRQKRRPKAVAFALGGILLIGGAWFGWQGANGKTTALHHFLTLNPPAEAGKSSEHGKMFADTAALKAAMDTALKEHPDKPVVLDFYADWCISCKEMAAYTLNQPEVHQAVDMERFFQIDVTANTPEHQALLKEYGLFGPPGVFVVRSDGSRSEPLLGFVKADKFIEWYEQNR

SEQ ID NO: 7706 - protein, 1389 aa, Neisseria meningitidis
MTDTAPTDTDPTENGTRKMPSEHRPTPPAKKRRPLLKLSAALLSVLILAVCFLGWLAGTEAGLRFGLYQIPSWFGVNISSQNLKGTLLDGFDGDNWSIETEGADLKISRFRFAWKPSELMRRSLHITEISAGDIAIVTKPTPPKEERPPLSLPDSIDLPAAVYLDRFETGKISMGKAFDKQTVYLERLDASYRYDRKGHRLDLKAADTPWSSSSGAASVGLKKPFALDTAIYTKGGLEGKTIHSTARLSGSLKDVRAELAIDGGNIRLSGKSVIHPFAESLDKTLEEVLVKGFNINPAAFVPSLPDAGLNFDLTAIPSFSDGIALEGSLDLENTKAGFADRNGIPVRQVLGGFVIRQDGTVHIGNTSAALLGRGGIRLSGKIDTEKDILDLNIGINSVGAEDVLQTAFKGRLDGSIGIGGTTASPKISWQLGIGTARTDGSLAIASDPANGQRKLVLDTVNIAAGQGSLTAQGYLELFKDRLLKLDIRSRAFDPSRIDPQLPAGNINGSINLAGELAKEKFTGKMRFLPGTFNGVPIAGSADIVYESRHLPRAAVDLRLGRNIIKTDGGFGKKGDRLNLNITAPDLSRFGFGLAGSLNVRGHLSGDLDGGIRTFETDLSGAARNLHIGKAADIRSLDFTLKGSPDTSRPIRADIKGSRLSLSGGAAVVDTADLMLDGTGVQHRIRTHAAMTLDGKPFKFDLDASGGINRELTRWKGSIGILDIGGAFNLKLQNRMTLEAGAERVAASAANWQAMGGSLNLQHFSWDKKTGISAKGGAHGLHIAELHNFFKPPFEHNLVLNGDWDVAYGRNARGYLNISRQSGDAVLPGGQALGLNAFSLKTRFQNDRIGILLDGGARFGRINADLGIANAFGGNMANAPLGGRITASLPDLGALKPFLPAAAQNITGSLNAAAQIGGRVGSPSVNAAVNGSSNYGKINGNITVGQSRSFDTAPLGGRLNLTVADAEVFRNFLPVGQTVKGSLNAAVTLGGSIADPHLGGSINGDKLYYRNQTQGIILDNGSLRSHIAGRKWVIDSLKFRHEGTAELSGTVGMENSGPDVDIGAVFDKYRILSRPNRRLTVSGNTRLRYSPQKGISVTGMIKTDQGLFGSQKSSMPSVGDDVVVLGEVKKEAAAPLPVNMNLTLDLNDGIRFAGYGADVTIGGKLTLTAQSGGSVRGVGTVRVIKGRYKAYGQDLDITKGTVSFVGPLNDPNLNIRAERRLSPVGAGVEILGSLNSPRITLTANEPMSEKDKLSWLILNRAGSGSSGDNAALSAAAGALLAGQINDRIGLVDDLGFTSKRSRNAQTGELNPAEQVLTVGKQLTGKLYIGYEYSISSAEQSVKLIYRLTRAIQAVARIGSRSSGGELTYTIRFDRFSGSDKKDSAGNGKGK

SEQ ID NO: 7707 - protein, 144 aa, Neisseria meningitidis; identical to SEQ ID NO: 3188

SEQ ID NO: 7708 - protein, 142 aa, Neisseria meningitidis; identical to SEQ ID NO: 5523

SEQ ID NO: 7709 - protein, 103 aa, Neisseria meningitidis; identical to SEQ ID NO: 3787

SEQ ID NO: 7710 - protein, 307 aa, Neisseria meningitidis; identical to SEQ ID NO: 1349

SEQ ID NO: 7711 - protein, 303 aa, Neisseria meningitidis
MVHIMFNQAAQELTTIRDILRFAVSRFNEAGLFFGHGTDNAHDEAAYLILHTLNLPLDMLAPYLDAKLLEAEKEEVLAVIERRAVEHIPAAYLTHQAWQGEFDFYVDERVIIPRSFIYELLGDGLRPWIEYDELVHNALDLCTGSGCLAIQMAHHYPDAQIDAVDVSLDALEVAGINVEDYGLEERIRLIHTDLFEGLEGTYDLIVSNPPYVDAESVELLPEEYLHEPELALGSGADGLDATRQILLNAAKFLNPKGVLLVEIGHNRDVLEAAYPELPFTWLETSGGDGFVFLLTREQLLGEE

SEQ ID NO: 7712 - protein, 71 aa, Neisseria meningitidis; identical to SEQ ID NO: 1785

SEQ ID NO: 7713 - protein, 85 aa, Neisseria meningitidis
MVLLLIVNKYWKVNDMKNEIQKNMDKYNPWHEDDFESYEDIARDVSLTTDKTFIEHYLLEVYSEENGHFDQENVHAMIEEIKNAI

SEQ ID NO: 7714 - protein, 81 aa, Neisseria meningitidis
MLKSIELNSHIRNRLAEYLKGRGMDFQTAMQEEKGNKEIAAIVHSGLPTLVRKLYSEQKMQKFFWEKRDLIADYISRRMQG

SEQ ID NO: 7715 - protein, 94 aa, Neisseria meningitidis
MKKLLLAAVVSLSAAAAFAGDSAERQIYGDPHFEQNRTKAVKMLEQRGYQVYDVDADDHWGKPVLEVEAYKDGREYDIVLSYPDLKIIKEQLDR

SEQ ID NO: 7716 - protein, 106 aa, Neisseria meningitidis; identical to SEQ ID NO: 2510

SEQ ID NO: 7717 - protein, 107 aa, Neisseria meningitidis
MGDSVLSAIQQTITQRKSANPSESYVAQLLHKGEDKILKKVIEEAGEVLMASKDKNPSHLVYEVADLWFHTMILLTHHDLKAEDVLDELARRQGLSGLVEKAARTES

SEQ ID NO: 7718 - protein, 112 aa, Neisseria meningitidis; identical to SEQ ID NO: 3481

SEQ ID NO: 7719 - protein, 131 aa, Neisseria meningitidis
MMRQRGKKMLFEENPIDGQFAEYECGAGGIRLAGQSFHKPVLVHKDSVCLSQCRTLSDLTPENLLSDVKPVDYPEILIIGTGAAQEFIHPKIMADFSRIGISVECMNTDSAFRTLVFLHSEGRRAWAWLQP

SEQ ID NO: 7720 - protein, 131 aa, Neisseria meningitidis
MMYSFEANANAVKISETVSVDTGQGAKIHKFVPKNSKTYSSDLIKTVDLTHIPTGAKARINAKITASVSRAGVLAGVGKLARLGAKFSTRAVPYVGTALLAHDVYETFKEDIQARGYQYDPETDKFAKVSG

SEQ ID NO: 7721 - protein, 138 aa, Neisseria meningitidis; identical to SEQ ID NO: 489

SEQ ID NO: 7722 - protein, 148 aa, Neisseria meningitidis; identical to SEQ ID NO: 4244

SEQ ID NO: 7723 - protein, 423 aa, Neisseria meningitidis
MFQWLYDVLWLLAPIWIRRYLDKRSGSAPAYRAHRDERFGKPYPNPVTGAVWIHAVSVGETRAAQSLIRELRRRFPDAPLLMTQMTPTGRETAQVLFPDAQCRYLPYDKKTWVRQFLREHRPMFGILMETEIWPNLMRECRRAGVPLFLANARLSEKSLNGYLKVRRLIRPAAASLTGCLAQTEADAARLAKLGAASVQVCGNTKYDIIPSEQMKTLAGQFEKRIGGRPVAVCGSTRVYRGEDEAEKLLAAWQQYRGDALLVVVPRHPEHFQTVFETAKRFGFKVQRRSDGLPVEPDTQVWIGDSMGELYAYYLCADVAFVGGSLVDSGCQNIIEPLSCGVPTIFGFSTYNFSEACRHALASGAAVQVESADAWREAVEKTLSSEGGGMQMQARVDGFIAQHRGAGARIAEAVREAVCGYRGR

SEQ ID NO: 7724 - protein, 685 aa, Neisseria meningitidis
MTRKILVTSALPYANGSIHLGHMVEHIQTDVWVRFQKLRGHACHYCCADDTHGTPVMLAAQKQGIAPEDMIAKVREEHLADFTGFFIGYDNYYSTHSPENKQFSQDIYRALKANGKIESRVIEQLFDPEKQMFLPDRFVKGECPKCHAQDQYGDNCEVCGTTYSPTELINPYSAVSGTKPELRESEHFFFKLGECADFLKAWTSGNNPHDGKPHLQAEALNKMKEWLGEGEETTLSDWDISRDAPYFGFEIPDAPGKYFYVWLDAPVGYMASFKNLCDRIGVDFDEYFKADSQTEMYHFIGKDILYFHALFWPAMLHFSGHRAPTGVYAHGFLTVDGQKMSKSRGTFITAKSYLEQGLNPEWMRYYIAAKLNSKIEDIDLNLQDFISRVNSDLVGKYVNIAARASGFIAKRFEGRLKDVADSELLAKLTAQSEAIAECYESREYAKALRDIMALADIVNEYVDANKPWELAKQEGQDERLHEVCSELINAFTMLTAYLAPVLPQTAANAAKFLNLEAITWANTRDTLGKHAINKYEHLMQRVEQKQVDDLIEANKQSIAAAAAPAAEEGKYEKVAEQASFDDFMKIDMRVAKVLNCEAVEGSTKLLKFDLDFGFEKRIIFSGIAASYPNPAELNGRMVIAVANFAPRKMAKFGVSEGMILSAATADGKLKLLDVDTGAQPGDKVG

SEQ ID NO: 7725 - protein, 175 aa, Neisseria meningitidis
MEMKQMLLAVGVVAVLAGCGKDAGGYEGYWREKSDKKEGMIAVKKEKGNYFLNKIHVVTGKEESLLLSEKDGALSINTGIGEIPIKLSDDGKELYVERRQYVKTDAAMKDKIIAHQKKCGQTAQAYRDARNALPSNQTYQQHLAAIEQLKRRFEAEFDELEKEIKCNGRSPALLL

SEQ ID NO: 7726 - protein, 466 aa, Neisseria meningitidis
MTPSALKKTVLLLGTAFAAASVHASGYHFGTQSVNAQSTANAAAAEAADASTIFYNPAGLTKLDSSQISVNANIVLPSIHYEADSATDFTGLPVQGSKSGKITKTTVAPHIYGAYKVNDNLTVGLGVYVPFGSATEYEKDSVLRHNINKLGLTSIAVEPVAAWKLNDRHSFGAGIIAQHTSAELRKYADWGIKSKAEILTAKPPKPNGVAEAAKIQADGHADVKGSDWGFGYQLAWMWDINDRARVGVNYRSKVSHTLKGDAEWAADGAAAKAMWSTMLAANGYTANEKARVKIVTPESLSVHGMYKVSDKADLFGDVTWTRHSRFDKAELVFEKEKTVVKGKSDRTTITPNWRNTYKVGFGGSYQISEPLQLRAGIAFDKSPVRNADYRMNSLPDGNRIWFSAGMKYHIGKNHVVDAAYTHIHINDTSYRTAKASGNDVDSKGASSARFKNHADIIGLQYTYKFK

SEQ ID NO: 7727 - protein, 105 aa, Neisseria meningitidis; identical to SEQ ID NO: 3792

SEQ ID NO: 7728 - protein, 430 aa, Neisseria meningitidis
MAVFPLSAKHRKYALRALAVSIILVSAAYIASTERTERVRPQRVEQNLPPLSWGGSGVQTAYWVQEAVQPGDSLADVLARSGMARDEIARITEKYGGEADLRHLRADQSVHVLVGGDGGAREVQFFTDEDGERNLVALEKKGGIWRRSASEADMKVLPTLRSVVVKTSARGSLARAEVPVEIRESLSGIFAGRFSLDGLKEGDAVRLMYDSLYFHGQQVAAGDILAAEVVKGGTRHQAFYYRSDKEGGGGGNYYDEDGKVLQEKGGFNIEPLVYTRISSPFGYRMHPILHTWRLHTGIDYAAPQGTPVRASADGVITFKGRKGGYGNAVMIRHANGVETLYAHLSAFSQAEGNVRGGEVIGFVGSTGRSTGPHLHYEARINGQPVNPVSVALPTPELTQADKAAFAAQKQKADALLARLRGIPVTVSQSD

SEQ ID NO: 7729 - protein, 370 aa, Neisseria meningitidis
MQTAARRSFDYDMPLIQTPTSACQIRQAWAKVADTPDRETADRLKDEIKALLKEKNAVLVAHYYVDPLIQDLALETGGCVGDSLEMARFGAEHEAGTLVVAGVRFMGESAKILCPEKTVLMPDLEAECSLDLGCPEEAFSAFCDQHPDRTVVVYANTSAAVKARADWVVTSSVALEIVSYLKSRGEKLIWGPDRHLGDYICRETGADMLLWQGSCIVHNEFKGQELAALKAEHPEAVVLVHPESPQSVIELGDVVGSTSKLLKAAVSRPEKKFIVATDLGILHEMQKQAPDKQFIAAPTAGNGGSCKSCAFCPWMAMNSLGGIKYALTSGRNEILLDRKLGEAAKLPLQRMLDFAAGLKKKDVFNGMGPA

SEQ ID NO: 7730 - protein, 164 aa, Neisseria meningitidis
MTFNQEQDYWAGYKANERALIIQTWSGFGRYAPDHLYPPHILPLDTDNETLGTTVLQALANSRTFVYDSPEDQDFFDTEKIRQRYEDWVAKLCGNLGYKTRRALFKNMMSVDIWLHNGCLKISPSRHVKLEAWDAIDADDVILSLDNSPEEIGAGLKLALSRCR

SEQ ID NO: 7731 - protein, 207 aa, Neisseria meningitidis
MMKPHNLFQFLAVCSLTVAVASAQAGAVDALKQFNNDADGISGSFTQTVQSKKKTQTAHGTFKILRPGLFKWEYTKPYRQTIVGDGQTVWLYDVDLAQVTKSSQDQAIGGSPAAILSNKTALESSYTLKEDGSSNGIDYVLATPKRNNAGYQYIRIGFKGGNLAAMQLKDSFGNQTSISFGGLNTNPQLSRGAFKFTPPKGVDVLSN

SEQ ID NO: 7732 - protein, 302 aa, Neisseria meningitidis; identical to SEQ ID NO: 1790

SEQ ID NO: 7733 - protein, 279 aa, Neisseria meningitidis; identical to SEQ ID NO: 2627

SEQ ID NO: 7734 - protein, 100 aa, Neisseria meningitidis; identical to SEQ ID NO: 1675

SEQ ID NO: 7735 - protein, 242 aa, Neisseria meningitidis; identical to SEQ ID NO: 5032

SEQ ID NO: 7736 - protein, 112 aa, Neisseria meningitidis
MKYIVSISLAMGLAACSFGGFKPNPWDAASFWELKNYANPYPGSASAALDQYPSKARRRQLKDMQECGYDPIDGGKSEADACLRKKGWCRKGFDPYPENKKYEWPREEGKTK

SEQ ID NO: 7737 - protein, 442 aa, Neisseria meningitidis
MNTTSQFTSNFWNIYIAVIVLLSFIALAWLLLSQNVVKRPKKGEEVQTTGHEWDGIAEYDNPLPRWWFWLCVLTWLFGIGYLVMYPGVGDYKGLLKWTSHNQYEKEVKKADEQYGKLYAKFADMPIEKVAKDPQAKQIAQNLFNTYCIQCHGSDAKGSKGFPNLTDSDWLWGGDPDKIHETIEKGRVATMPAWGPALGEEGVKDVAHYVMSLSKPEGQYDEERAARGQALFSGPPANCFTCHGDKGQGIQGLGPNLTDDVWLWGGTQKSIIETITNGRSSQMPAWGHFLDKDKLHIMTAYVWGLSDKDGKAPVKKAEPAPTPAPAAEPAASAPAEAAQAVSEAKPAAAEPKAEEKAAPAAKADGKVYETVCAACHGNAIPGIPHVGIKADWADRIKKGKDTLHKHAIEGFNTMPAKGGRGDLSDDEVKAAVDYMVNQSGGKF

SEQ ID NO: 7738 - protein, 77 aa, Neisseria meningitidis
MEATVYLEDNEYIALCDLLKLVGLAESGGQAKAFIAEGLVLRNGETETRKTAKIRGGEVIEFDGARLEIADGYDPEV

SEQ ID NO: 7739 - protein, 105 aa, Neisseria meningitidis
MVVRGGIYLVSLDPTVGSEIKKTRPCVVVSPPEIHNYLKTVLIVPMTSGSRPAPFRVNVRFQDKDGLLLPEQIRAVDKAGLVKHLGNLDNSTAEKLFAVLQEMFA

SEQ ID NO: 7740 - protein, 273 aa, Neisseria meningitidis
MTFDKWLGLSKLPKNEARMLLQYVSEYTRVQLLTRGGEEMPDEVRQRADRLAQRRLNGEPVAYILGVREFYGRRFTVNPSVLIPRPETEHLVEAVLARLPENGRVWDLGTGSGAVAVTVALERPDAFVRASDISPPALETARKNAADLGARVEFAHGSWFDTDMPSEGKWDIIVSNPPYIENGDKHLLQGDLRFEPQIALTDFSDGLSCIRTLAQGAPDRLAEGGFLLLEHGFDQGAAVRGVLAENGFSGVETLPDLAGLDRVTLGKYMKHLK

SEQ ID NO: 7741 - protein, 124 aa, Neisseria meningitidis; identical to SEQ ID NO: 1678

SEQ ID NO: 7742 - protein, 69 aa, Neisseria meningitidis
MKKMFVLFCMLFSCAFSLAAVNINAASQQELEALPGIGPAVLAKLKDQASVGAPAPKGPAKPVLPADKK

SEQ ID NO: 7743 - protein, 99 aa, Neisseria meningitidis
MKKMFVLFCMLFSCAFSLAAVNINAASQQELEALPGIGPAKAKAIAEYRAQNGAFKSVDDLTKVKGIGPAVLAKLKDQASVGAPAPKAPAKPVLPADKK

SEQ ID NO: 7744 - protein, 99 aa, Neisseria meningitidis; identical to SEQ ID NO: 7743

SEQ ID NO: 7745 - protein, 99 aa, Neisseria meningitidis; identical to SEQ ID NO: 7743

SEQ ID NO: 7746 - protein, 179 aa, Neisseria meningitidis
MNIIDTAIPDVKLLEPQVFGDARGFFMETFRDEWFKTQVCERTFVQENHSKSGKGVLRGLHYQTENTQGKLVRVVVGEVFDVAVDMRKDSPTFGKWVGEILSAENKRQLWVPEGFAHGFYVLSDEAEFVYKCTDYYNPKAEHSLIWNDPTVGIDWPLQGEPNLSPKDLAGKVLSEAVTF

SEQ ID NO: 7747 - protein, 288 aa, Neisseria meningitidis
MKGIILAGGSGTRLYPITRGVSKQLLPVYDKPMIYYPLSVLMLAGIRDILVITAPEDNASFKRLLGDGSDFGISISYAVQPSPDGLAQAFIIGEEFIGNDNVCLVLGDNIFYGQSFTQTLKQAAAQTHGATVFAYQVKNPERFGVVEFNENFRAVSIEEKPQRPKSDWAVTGLYFYDNRAVEFAKQLKPSARGELEITDLNRMYLEDGSLSVQILGRGFAWLDTGTHESLHEAASFVQTVQNIQNLHIACLEEIAWRNGWLSDEKLEELARPMAKNQYGQYLLRLLKK

SEQ ID NO: 7748 - protein, 757 aa, Neisseria meningitidis; identical to SEQ ID NO: 1692

SEQ ID NO: 7749 - protein, 183 aa, Neisseria meningitidis; identical to SEQ ID NO: 1696

SEQ ID NO: 7750 - protein, 185 aa, Neisseria meningitidis
MMQKHKCLIDFILTVASQIAYADLPLSLEELLTDKGKFKLESSISYINTERNQSEFANPIYVQTSATKIATVMAMMITPVMAQNLDSQVFDSQNVKAIQLSQAEMKETQGEFVPIIAAAAFGGALGAWGYHGANLYNHGKLGTAQGAATATGIGAATGVAAKQGWLLLPEADWLGIWHGDRVFMH

SEQ ID NO: 7751 - protein, 221 aa, Neisseria meningitidis
MMMHASVQSRFAPILYVLIFFAGFLTAQIWFNQKAYTEELPPLLSALSAVALVWLAWAFVSARSKAKAEKFYREKMIQNESIHPVLHASLQHLEHKPQILALLVKNHGKGMAEQVRFKAEVLPDDEDARTIAAELAKMDMFALGTDAVASGETYGRVFADIFELSAALEGRAFKGMLKLTAEYKNIFGDACRSETALELGALNQALQEISKTSEKSKRIFY

SEQ ID NO: 7752 - protein, 405 aa, Neisseria meningitidis; identical to SEQ ID NO: 3566

SEQ ID NO: 7753 - protein, 308 aa, Neisseria meningitidis
MKVIFAGTPDFAAAALRAVAAAGFEIPLVLTQPDRPKGRGMQLTAPPVKQAALELGLRVEQPEKLRNNAEALQMLKEVEADVMVVAAYGLILPQEVLDTPKHGCLNIHASLLPRWRGAAPIQRAIEAGDAETGVCIMQMDIGLDTGDVVSEHRYAIQPTDTANEVHDALMEIGAAAVVADLQQLQSKGRLNAVKQPEEGVTYAQKLSKEEARIDWSKSAAVIERKIRAFNPVPAAWVEYQGKPMKIRRAEVVAQQGAAGEVLSCSADGLVVACGENALKITELQPAGGRRMNIAAFAAGRHIEAGAKL

SEQ ID NO: 7754 - protein, 189 aa, Neisseria meningitidis
MAAGKHTKHSNRVRIIGGQCRGRKLSFTSADGLRPTPDSVREKLFNWLGQDLTGKTVLDLFGGSGALGIEAASRNAKRVLISDNNRQTVQTLQKNSRELGLGQVQIVFSDGIAYLKTVSEQFDVVFLDPPFAWQDWQILFDALKPCLNPRAFVYLEAGTLPNIPDWLTEYREGKSGQSTFELRVFQVAE

SEQ ID NO: 7755 - protein, 123 aa, Neisseria meningitidis; identical to SEQ ID NO: 130

SEQ ID NO: 7756 - protein, 1391 aa, Neisseria meningitidis; identical to SEQ ID NO: 4736

SEQ ID NO: 7757 - protein, 106 aa, Neisseria meningitidis
MGMNQQRLTQVILAPIVSEKSNVLAEKRNQMTFKVLANATKPEIKAAVELLFGVQVADVTTVTIKGKVKRFGRTLGRRSDVKKAYVSLAAGQELDLEAAAAAADKE

SEQ ID NO: 7758 - protein, 237 aa, Neisseria meningitidis
MMVYIMNAFDIKSTKMDVLSISLHTSDLFDLEDVLVKLGKKFQESGVVPFVLDVQEFDYPESLDLAALVSLFSRHGMQILGLKHSNERWAAAAMKYHLLFCLSHSENVKELGQVEVQKTEDGQKARKTVLITSPVRTGQQVYAEDGDLIVTGAVSQGAELIADGNIHIYAPMRGRALAGAKGDTSARIFIHSMQAELVSVAGIYRNFEQDLPNHLHKQPVQILLQDNRLVISAIGSE

SEQ ID NO: 7759 - protein, 394 aa, Neisseria meningitidis
MTPQVLTILGSTGSIGESTLDVVSRHPEKFRVFALAGHKQVEKLAAQCQTFRPEYAVVADTEHAARLEALLKHDGTATQVLHGAQALVDVASADEVSGVMCAIVGAAGLPSALAAAQKGKTIYLANKETLVVSGALFMETARANGAAVLPVDSEHNAIFQVLPRDYTGRLNEHGIRSIILTASGGPFLTTDLGAFDSITPAQAVKHPNWRMGRKISVDSATMMNKGLELIEAHWLFNCPPDKLEVVIHPQSVIHSMVRYRDGSVLAQLGNPDMRTPIAYCLGLPERIDSGVGDLDFDALSALTFQKPDFDRFPCLKLAYEAMNAGGAAPCVLNAANEAAVAAFLDGQIKFTDIAKTVAHCLAQDFSDGIGDIGGLLAQDARTRAQARAFIGTLR

SEQ ID NO: 7760 - protein, 375 aa, Neisseria meningitidis
MNTSQRNRLVSRWLNSYERYRYRRLIHAVRLGGAVLFATALARLLHLQHGEWIGMTVFVVLGMLQFQGAIYSKAVERMLGTVIGLGAGLGVLWLNQHYFHGNLLFYLTVGTASALAGWAAVGKNGYVPMLAGLTMCMLIGDNGSEWFDSGLMRAMNVLIGAAIAIAAAKLLPLKSTLMWRFMLADNLTDCSKMIAEISNGRRMTRERLEQNMVKMRQINARMVKSRSHLAATSGESRISPAMMEAMQHAHRKIVNTTELLLTTAAKLQSPKLNGSEIRLLDRHFTLLQTDLQQTVALINGRHARRIRIDTAINPELEALAEHLHYQWQGFLWLSTNMRQEISALVILLQRTRRKWLDAHERQHLRQSLLETREHG

SEQ ID NO: 7761 - protein, 185 aa, Neisseria meningitidis; identical to SEQ ID NO: 5793

SEQ ID NO: 7762 - protein, 628 aa, Neisseria meningitidis
MIYPKTYDVIVVGGGHAGTEAALAAARMGAQTLLLSHNIETLGQMSCNPSIGGIGKGHLVRELDALGGAMALATDKSGIQFRRLNASKGAAVRATRAQADRILYKAAIREMLENQENLDLFQQAVEDVTLEGERISGVITAMGVEFKARAVVLTAGTFLSGKIHIGLENYEGGRAGDPAAKSLGGRLRELKLPQGRLKTGTPPRIDGRTIDFSQLTEQPGDTPVPVMSVRGNADMHPRQVSCWITHTNTQTHDIIRSGFDRSPMFTGKIEGVGPRYCPSIEDKINRFADKDSHQIFLEPEGLTTHEYYPNGISTSLPFDIQIALVRSMKGLENAHILRPGYAIEYDYFDPRNLKASLETKTIEGLFFAGQINGTTGYEEAAAQGLLAGANAVQYVRGQDPLLLRREQAYLGVLVDDLITKGVNEPYRMFTSRAEYRLQLREDNADMRLTEDGYKIGLVGEAQWRMFNEKREAVEREIQRLKTTWYTPQKLAEDEQIRVFGQKLSREANLHDLLRRPNLDYAALMTLEGAMPSENLSAEVIEQVEIQVKYQGYIDRQNEEIDSRRDIETLKLPDGIDYGKVKGLSAEVQQKLNQHKPETVGQASRISGVTPAAVALLMVHLKRGFKDAK

SEQ ID NO: 7763 - protein, 919 aa, Neisseria meningitidis
MKRMLFNATQAEELRVAIVDGQNLLDLDIETLGKEQRKGNIYKGIITRIEPSLEACFVDYGTDRHGFLPFKEVSRSYFQDYEGGRARIQDVLKEGMEVIVQVEKDERGNKGAALTTFISLAGRYLVLMPNNPRGGGVSRRIEGEERQELKAAMAELDIPNGMSIIARTAGIGRSAEELEWDLNYLKQLWQAIEEAGKAHHDPYLLFMESSLLIRAIRDYFRPDIGEILVDNQEVYDQVAEFMSYVMPGNIGRLKLYEDHTPLFSRFQIEHQIESAFSRSVSLPSGGAIVIDHTEALVSIDVNSARATRGADIEDTAFKTNMEAAEEVARQMRLRDLGGLVVIDFIDMENPKHQRDVENVLRDALKKDRARVQMGKLSRFGLLELSRQRLKPALGESSHVACPRCAGTGVIRGIESTALHVLRIIQEEAMKDNTGEVRAQVPVDVATFLLNEKRAELFAMEERLDVNVVLIPNIHLENPHYEINRIRTDDVEEDGEPSYKRVAEPEEDESAKPFGSERAKAARPEPAVKGVRHTSPAPTAAPEKKTSWWDSFKAWLKRIFGGSETQAAPAAETSEKRSTANRSGSRANNRRQNPRRSKREGSKVEVREVAGKTAGQEARADKAETRNNGNRRRSERGDRAAERANEAEIQGRNVQPAATVADAAPSETEVQTGKRRRNGSRSERGQTAPETAAVAETTVQTAENTPSEPHTAEDKGSKPKSERNRRERDSRDAKERRERNNQRDRRQNGKKRNIPSAAKIEQYLNIHDTADKVRSAAAHVFGETDANAPITVSIADPVAERDLPTASPAVSNGDAPVYDAAEKIRRVTAAILPEGVAPKAEAQEMPSETATFTAAAEQARETAQTGGLVLIETDPAALKAWAAQPEVQTGRGLRRSEQPKPSEVATVPAEEMIQVETRQG

SEQ ID NO: 7764 - protein, 658 aa, Neisseria meningitidis
MNEFSLAPIVIVLLVSVITVILCRKFNIPSMLGYLLVGFLAGPGMLSLIPKSHATDYLGEIGIVFLMFSIGLEFSLPKLRAMRRLVFGLGGLQVGITMLSVMGILMLTGVPFNWAFAVSGALAMSSTAIVSRILSEKTELGQPHGQMAMGVLLMQDIAVVPLMILIPALAGGGDGNIWAALGLAFAKMLLTLGLLFFVGSKIMSRWFRMVAKRKSSELFMINVLLVTLGVAYLTELEGLSMALGAFVAGMLLSETEYRFQVEDDIRPFRDILLGFFFITVGMKLDIQALIGGWRQVLMLLAMLLVLKALVVFAIAFKMKHSVGDSLKTALYLAQGGEFGFVMLAIAGQLDMVSPEWEQAATAAVLLSMIIAPFLLGGSDALVGRLVKSSWDMKSLDLHSMLVETMSKSDHVLIVGFGRGGQTVGRVLAQEDIPYFALDLDIARVQVARSAGEPVSFGDAKRREVLEAAGLGRAKMVVLTLNNMHETQHVLDNVLSMYPNMPVYVRATNDDYVKTFTDIGAEEAVSDTKETGLVLAGYAMLGNGASYRHVYQTMANIRHSRYAALEGLFVGSDDEAGFGENGETVRHAFPLAAEAYAVGKTVGTLPMAAYGIKLLFVRRRTGRIENPDASFTLEGGDVLVVAGKKEEIISFENWSLQGI

SEQ ID NO: 7765 - protein, 461 aa, Neisseria meningitidis
MISIFDIFKIGIGPSSSHTVGPMKAAAAFAAGLDAQAVRIVIDIYGSLALTGYGHGTFDALMLGLEGSLPHDIPLAGIPERLERIRTQHILRLNGQEIRFIPDRDLNILGNQVLPKHPNSLRFTAYASDGTVLNEQVYYSVGGGFVVTEEDFDRQAETEKAVPYPYTSCAELLARCRLNRLDISEVVLANEAALAGCGEAEIRRRAAAVADVMEGCIKRGLAADGELPGGLNVRRRAPQLAAKLKVLRETEIVNTQLWPMVYAMAVNEENAAGGRVVTALTNGAAGIIPAVLHYFRKFNPHATQERVENFLLTAGAIGILYKTNASISGADVGCQGEVGVACSMAAGAYAEVIGGTPKQVENAAEMAMEHHLGLTCDPVGGLVQIPCIERNGIAAEKALKLGTLALLEDGTDKKVSLDEVIRTMLQTGRDMKATYKETSLAGLAATLRKKAVPVSVRVVEC

SEQ ID NO: 7766 - protein, 290 aa, Neisseria meningitidis
MEIWNMLDTWLGAVPIRAEAVESVAAVAALLLARALLLNIHFKRHPDFGIESKRRFLVASRNITLLLVLFSLAFIWSAQIQTLALSMFAVAAAVVVATKELIMCLSGSILRSATQQYSVGDYIEINGLRGRVVDINLLNTLMMQVGPNPLVGQLAGTTVSFPNSLLLSHPVRRDNILGDYVIHTVEIPVPIHLDSDEAVCRLKAVLEPLCAPYIPAIQRHLENVQAEKLFITPAARPRVTRVPYDDKAYRIIVRFASPVSKRLEIQQAVMDEFLRVQYRLLNHPAGSETL

SEQ ID NO: 7767 - protein, 119 aa, Neisseria meningitidis
MINLELKAINLYDCAFEDFVPEIKDNFCVGIDLDIGTDDSDAADIFSVRICSPKWILHNCFQNQRVKWGAGMMIMNEFNHSVIKSEIEKILKECSKETWEKSLTYLLRFFSWEFEDYQC

SEQ ID NO: 7768 - protein, 483 aa, Neisseria meningitidis; identical to SEQ ID NO: 5802

SEQ ID NO: 7769 - protein, 358 aa, Neisseria meningitidis
MQEWFQNLFAATLGLGDLGITVGLVVSVIVKIVIILIPLILTVAYLTYFERKVIGFMQLRVGPNVTGPWGLIQPFADVFKLLFKEVTRPKLSNKALFYIGPIMSLAPSFAAWAVIPFNEEWVLTNINIGLLYILMITSLSVYGVIIAGWASNSKYSFLGAMRASAQSISYEIAMSAALVCVVMVSGSMNFSDIVAAQAKGIAGGSVFSWNWLPLFPIFIVYLISAVAETNRAPFDVAEGESEIVAGHHVEYSGFAFALFFLAEYIFMILIAALTSLMFLGGWLSPFPQSWGIVGTPSAFWMFAKMAAVLYWYLWIRATFPRYRYDQIMRLGWKVLIPIGFAYIVILGVWMISPLNLWK

SEQ ID NO: 7770 - protein, 113 aa, Neisseria meningitidis; identical to SEQ ID NO: 1729

SEQ ID NO: 7771 - protein, 618 aa, Neisseria meningitidis
MLNKIFSWFESRIDPYPEAAPKTPEKGLWRFVWSSMAGVRKWIAALAALTAGIGIMEALVFQFMGKIVEWLGKYAPAELFAEKGWELAAMAAMMVFSVAWAFAASNVRLQTLQGVFPMRLRWNFHRLMLNQSLGFYQDEFAGRVSAKVMQTALALRDAVMTVADMVVYVSVYFITSGVILASLDSWLLLPFIGWIVGFASVMRLLIPKLGQTAAWQADARSLMTGRITDAYSNIATVKLFSHGAREAAYAKQSMEEFMVTVRAQMRLATLLHSCSFIVNTSLTLSTAALGIWLWHNGQVGVGAVATATAMALRVNGLSQYIMWESARLFENIGTVGDGMATLSKPHTILDKPRALPLNVPQGAIKFEHVDFSYEAGKPLLNGFNLTIRPGEKVGLIGRSGAGKSTIVNLLLRFYEPQSGTVSIDGQDISGVTQESLRAQIGLVTQDTSLLHRSVRDNIIYGRPDATDAEMVSAAERAEAAGFIPDLSDAKGRRGYDAHVGERGVKLSGGQRQRIAIARVMLKDAPILLLDEATSALDSEVEAAIQESLDKMMDGKTVIAIAHRLSTIAAMDRLVVLDKGRIIEEGTHAELLEKRGLYAKLWAHQSGGFLNEHVEWQHD

SEQ ID NO: 7772 - protein, 357 aa, Neisseria meningitidis
MMKIKALMIAAALLAAADVHAAPQKAKTASAKAAKAAKAAKAAKVAKVAKVAKVAKVAKVAATAQKEAAPAQQQGGIRFSDGIAAVADNEVITRRRLAEAVAEAKANLPKDAQISESELSRQVLMQLVNQSLIVQAGKRRNIQASEAEIDAVVAKNPALKNLSPAQRRDFADNIIAEKVRQQAVMQNSRVSEAEIDAFLEQAQKQGITLPEGAPLRQYRAQHILIKADSENAAVGAESTIRKIYGEARSGTDFSSLARQYSQDASAGNGGDLGWFADGVMVPAFEEAVHALKPGQVGAPVRTQFGWHIIKLNEVRDAGTPQERIRNSVRQYIFQQKAEQATVNLLRDLHSGAYVDIR

SEQ ID NO: 7773 - protein, 214 aa, Neisseria meningitidis; identical to SEQ ID NO: 1743

SEQ ID NO: 7774 - protein, 82 aa, Neisseria meningitidis; identical to SEQ ID NO: 1744

SEQ ID NO: 7775 - protein, 216 aa, Neisseria meningitidis
MITISNEDNMILMSRYPDKYFDLAIVDPPYGILNKTKRGGDYKFNMNEYSQWDIKPDQTYFNELFRVSKNQIIWGGNYFGELWLRSEYNKGFIIWDKNQPETLNNFSMAEMAWSSFDRPSKIFRFSVRKNRNKTHPTQKPVELYQWLLKMYAKQGDKILDTHLGSGTLAIACCIAQFDLTACEINSDYYQQSIEKIKNNLPEARISFGHPGYCIIE

SEQ ID NO: 7776 - protein, 473 aa, Neisseria meningitidis
MTTIYNTLTRQKEPFSPIDPENVRMYVCGMTVYDYCHLGHARVMVVFDMIARWLRECGYPLTYVRNITDIDDKIIARAAENGETIGKLTARFIQAMHEDADALGVLRPDIEPKATENIPQMIAMIETLIQNGKAYPAANGDVYYAVREFAAYGQLSGKSLDDLRAGERVEVDGFKRDPLDFVLWKAAKAGEPAWESPWGNGRPGWHIECSAMSENLFGDTFDIHGGGADLQFPHHENEIAQSVGATGHTCGHHHAQTHHGQSIASHVKYWLHNGFIRVDGEKMSKSLGNFFTIREVLKQYDPEVVRFFILRAHYRSPLNYSDAHLDDAKGALTRLYTTLKNTPPADPMPSEAGDDYTRRFYVAMNDDFDTVKAVAVLFELAGEVNKTNDAQLAGRLKALGGIIGLLQRDPTEFLQGGAASDGLSNEEIEDLIARRKQARADKNWAESDRIRDLLNEHKIILEDNAGGTTWRRG

SEQ ID NO: 7777 - protein, 464 aa, Neisseria meningitidis
MTVKTRFAPSPTGYLHIGGVRTALFSWAFARHHKGEFLLRIEDTDLARSTAESVNIILDGMKWVGLNYDNADNVVYQTRRFDRYKEVIAELLEKGHAYYCYCSKEELEAMREKAEKEGSATYDRRWRPEVGKTLPEIPSDVQPVVRFKTPLDGVTKWTDLVKGEISIPNEALDDLIIARADGTPTYNFCVVVDDYDMGVTHVIRGDDHVNNTPKQINILKAIDANLPEYGHLPMILNEQGKKISKRSGDTVAITDFGAMGILPEAMLNYLARLGWAHGDDEFFTMEQFIEWFDLKDVSPSPSRMDLKKLYWINGEHIKITPNGKLAELVKPRLALRDIHETEKPALEDVLELVKDRPQDLNTLADECFYFYVKQTPAEADVQKHWDDEAAARMLRFAERLEGLEDWNAEAIHDLFKPFCDEEGIKMGKLGMPLRLAVCGTAKTPSVDAVLALIGKEEVLKRIRA

SEQ ID NO: 7778 - protein, 441 aa, Neisseria meningitidis
MKKYLFRAALYGIAAAILAACQSKSIQTFPQPDTSVINGPDRPVGIPDPAGTTVGGGGAVYTVVPHLSLPHWAAQDFAKSLQSFRLGCANLKNRQGWQDVCAQAFQTPVHSFQAKQFFERYFTPWQVAGNGSLAGTVTGYYEPVLKGDDRRTAQARFPIYGIPDDFISVPLPAGLRSGKALVRIRQTGKNSGTIDNTGGTHTADLSRFPITARTTAIKGRFEGSRFLPYHTRNQINGGALDGKAPILGYAEDPVELFFMHIQGSGRLKTPSGKYIRIGYADKNEHPYVSIGRYMADKGYLKLGQTSMQGIKSYMRQNPQRLAEVLGQNPSYIFFRELAGSSNDGPVGALGTPLMGEYAGAVDRHYITLGAPLFVATAHPVTRKALNRLIMAQDTGSAIKGAVRVDYFWGYGDEAGELAGKQKTTGYVWQLLPNGMKPEYRP

SEQ ID NO: 7779 - protein, 456 aa, Neisseria meningitidis
MPQNTLNIVILAAGKGTRMYSKMPKVLHRIGGKPMVGRVIDTAAALNPQNICVVIGHGKEQVLDTVKRDVVWVEQTEQLGTGHAVKTALPHLSAEGRTLVLYGDVPLIDVETLETLLEAAGNEVGLLTDVPNDPTGLGRIIRDSNGSVTAIVEEKDADAVQKAVKEINTGILVLPNAKLENWLNSLSSNNAQGEYYLTDLIAKAVADGIKVHPVQVRASHLAAGVNNKLQLTELERIFQTEQAQELLKAGVTLRDPARFDLRGRLKHGQDVVIDVNCIFEGDIELGDNVEIGANCVIKNAKIGANSKIAPFSHLESCEVGENNRIGPYARLRPQARLADDVHVGNFVEIKNAAIGKGTKANHLTYIGDAEVGCKTNFGAGTIIANYDGVHKHKTVIGDEVRIGSNCVLVAPVTLGNKVTTGAGSTITRNVEDNKLALARARQTVIEGWVRPEKDKQ

SEQ ID NO: 7780 - protein, 99 aa, Neisseria meningitidis
MKKMFVLFCMLFSCAFSLAAVNINAASQQELEALPGIGPAKAKAIAEYRAQNGAFKSVDDLTKVKGIGPAVLAKLKDQASVGAPAPKAPAKPAIPAAKK

SEQ ID NO: 7781 - protein, 288 aa, Neisseria meningitidis; identical to SEQ ID NO: 7747

SEQ ID NO: 7782 - protein, 387 aa, Neisseria meningitidis; identical to SEQ ID NO: 30

SEQ ID NO: 7783 - protein, 205 aa, Neisseria meningitidis
MPYTEDMRPGDTANPYGASKAMVERMLTDIQKADPRWSMILLRYFNPIGAHESGLIGEQPNGIPNNLLPYICQVAAGKLPQLAVFGDDYPTPDGTGMRDYIHVMDLAEGHVAAMQAKSNVAGTHLLNLGSGRASSVLEIIRAFEAASGLTIPYEVKPRRAGDLACFYADPSYTKAQIGWQTQRDLTQMMEDSWRWVSNNPNGYDD

SEQ ID NO: 7784 - protein, 185 aa, Neisseria meningitidis
MNIIDTAIPDVKLLEPQVFGDARGFFMETFRDEWFKTQVCERTFVQENHSKSGKGVLRGLHYQTENTQGKLVRVVVGEVFDVAVDMRKDSPTFGKWVGEILSAENKRQLWVPEGFAHGFYVLSDEAEFVYKCTDYYKPEAEQVLIWNDPTVGIGWPLQTAPLLSPKDLAGKTWAQAEKLRLPLYR

SEQ ID NO: 7785 - protein, 96 aa, Neisseria meningitidis
LKVPAKRYFTLDELCGLLQISPYGFAQWQHDHGVVVGYGGERYTRLDVVKLLKLQSTFAPYAEGAESGSDGNRPVTLQEIGDALKDLLADLDKELC

SEQ ID NO: 7786 - protein, 257 aa, Neisseria meningitidis
MNTIADVQSSRDLRNLPINQVGIKDLRFPITLQTAEGIQSTIARLTMTVYLPAEQKGTHMSRFVALMEQHAEALDFAQLRKLTTEMVALLDSRAGKISVSFPFFRKKTAPVSGIRSLLDYDVCLTGEIKDGAYGHSMKVMIPVTSLCPCSKEISQYGAHNQRSHVTVSLTADAEVGIEEVIDYVEAQASCQLYGLLKRPDEKYVTEKAYENPKFVEDMVRDVATSLIADKRIKSFVVESENFESIHNHSAYAYIAYP

SEQ ID NO: 7787 - protein, 68 aa, Neisseria meningitidis; identical to SEQ ID NO: 3821

SEQ ID NO: 7788 - protein, 125 aa, Neisseria meningitidis
MCELKNFRRNITCFEGYDENSFIGKWYDDGVWDDEEYWKLENDLIEVRKKYPYPMDIPRYVVIGIGTIIDFLMVPNWKLFEIKASPWLPDSVGINERYERLKTMLRYIFTEKDIVNVQFDYYNKK

SEQ ID NO: 7789 - protein, 165 aa, Neisseria meningitidis
LPKMPIEKQKEKSMVDAVVKTPEFLPFTSVGIFRFGADITQYKNILETFMYEPPDEFRTEYYESPDSNLLISVKKKNKIISIFCYQELYFMGVNIIGLNFEDFKQLFHYPKSYGVDKYYLSNESYPTYVYEFDEIGVQAWEAKGKIVTIIAGGKDNYSTEPYYDE

SEQ ID NO: 7790 - protein, 125 aa, Neisseria meningitidis
MCEFKDIIRNVPYFEGYDENSFIGKWYDDGVWDDEEYWKLENDLIEVRKKYPYPMDIPRYVVIGIGTIIDFLMVPNWKLFEIKASPWLPDSVGIHERYERFTTMLRYIFTEKDIVNVRFDYYNKK

SEQ ID NO: 7791 - protein, 135 aa, Neisseria meningitidis
MCEFKDFRRNIPCFKEYDENSFIGKWYDDGVWDDEEYWKLENDLIEVRKKYPYPMDIPRDIVIGIGTIIDFLMVQNWKLFEIKASTWLPKSVKINERYERFRVMLRYIFTDLDVEDWKFFYFPIQHSKGRLRRKV

SEQ ID NO: 7792 - protein, 369 aa, Neisseria meningitidis
MSLTRLILKFYALLRLFLGKNARTAWISHPACAGHEPGANHPDSPDRILCIEQALRRAGIWQHLQTIEAEEISDTRLALVHSSKYLNRLESCLPQKGKISRLDNDTAISTGSLSAARFAAGSAVQAVDMVMNRKAWHAFCAARPPGHHAGSGKAGGFCLLNNVAAGVMHAIAEYRLKRIAVIDFDVHYGDGTAEIFKDDPRILFFNLFETDLFPFPENNDMPDGGNMVHLPLPPGTGSRTFREAVRRQWLPRLAAFKPELVLLSAGFDAHRLDESGRLNLHEADFAWLTHKIIQTASGCPGKIISVLEGGYTLEPLAQSAAEHIRVLAGLGKSDAATAYQKTLDPTKKRFAKPKTGQVRQPTQSDRYDI

SEQ ID NO: 7793 - protein, 180 aa, Neisseria meningitidis
MRTHRKTCSAVCFAFQTASKPAVSIRHPSEDIMSLKIRLTEDMKTAMRAKDQVSLGTIRLINAAVKQFEVDERTEADDAKITAILTKMVKQRKDSAKIYTEAGRQDLADKENAEIEVLHRYLPQMLSAGEIRTEVEAAVAETGAAGMADMGKVMGLLKTRLAGKADMGEVNKILKAVLTA

SEQ ID NO: 7794 - protein, 307 aa, Neisseria meningitidis
MNTGKPQKRAVNGVLLLDKPEGLSSNTALQKARRLFHAEKAGHTGVLDPLATGLLPVCFGEATKFAQYLLDADKAYTATLKLGEASSTGDAEGEIIATARADISLAEFQTACQALTGNIRQVPPMFSALKHEGKPLYEYARKGIVIERKARYITVYAIDIAEFDAPKAVIDVRCSKGTYIRTLSEDIAKHIGTFAHLTALRRTETAGFTIAQSHTLEALANLNETERDSLLLPCDVLVSHFPQTVLNDYAVHMLHCGQRPRFEEDLPSDTPVRVYTENGRFVGLAEYQKEICRLKALRLMNTAASAA

SEQ ID NO: 7795 - protein, 301 aa, Neisseria meningitidis
MGLDGLAAYLDAYLENIVREGKSEHTVAAYRRDLQELLALLEEMPSANPSNCTRGDFVQALRRLSGRGLGERTLARKLSSWRQYCVWLVKRGLMHADPTADIKPPKQPERVPKALPQEWLNRMLDLPVDGGDPLAVRDHALFELMYGSGLRVSEIHGLNADDVYLDEAWVHVIGKGRKQRQVPLVGKSVEALKNYLPLRQTASDGKALFTGRNGTRLSQRQIQKRLAQWAAQNGDGRHVSPHMMRHSYAGHLLQASRDIRAVQELLGHSSLSTTQIYTKLDFDHIARLYDEAHPRAKRQDE

SEQ ID NO: 7796 - protein, 143 aa, Neisseria meningitidis
MTENAQDKARQAVETVVKSPELVEQILSDEYVQIMIARCFHSGPLPPPSDLAQYNDIISNGADRIMAMAEKEQAVRHETIRQDQTFNRRGQLYGFISAILILLFAVFLVWSGYPATAASLAGGTVFALAGAFVIGRSRDQGKN

SEQ ID NO: 7797 - protein, 130 aa, Neisseria meningitidis
MGKRMTFDTAKSRFQEKFPHLELLEFSGIYKPSSVRCPTHGVVQLLYYDTAIKSKYGCPECGKLKMKENTPPQNQKPVSILDTATGETLTFPSVQAAAKALNTPYGSIRTKLDGRSNPDNLVCNRYKVLL

SEQ ID NO: 7798 - protein, 186 aa, Neisseria meningitidis
MTANFAQTLVEIQDSLYRVVSTVQYGDDNLKRLTADKRKQYELNFKISEGSTRVESDFKETLVRFGRDMLQDMPPKIRSATLVALTTLLVGGALGYGYLEYLKQVASEGYQTERLYNAVDRLAESQERITSAILKGARGADFVQIGRRSYSREDISEANRRAERVPYGAELVSDGNFTAVLSDIGD

SEQ ID NO: 7799 - protein, 106 aa, Neisseria meningitidis
LLMCVLLHRRLSHAGDESVYVAQSPLAASEGRGARERGGQVLSHWLSPYYLSNYGCIMRLCLFFVKHYTVKMCKYLVRTYTLFFTFSSIGYQCVQRKFENFYILVV

SEQ ID NO: 7800 - protein, 399 aa, Neisseria meningitidis
LPTFPNHTMHTISFPNRTRLTALPPLSLYIHIPWCIKKCPYCDFNSHSLKNGLPEAAYIDALLTDLQLELPNIWGRPVETIFFGGGTPSLFQAESIDRLLSGVRSLLRLQPEAEITLEANPGTFEIEKFQGFKDAGITRLSIGVQSFNDDMLSRLGRVHNGKEALTAIDTALKLFDKVNIDLMYALPNQTVQTALDDVQTAIATGATHISAYHLTMEPNTPFGHTPPKGLPQDEAALDIEDAVHGALEGAGFVHYETSAFAKPAMQCRHNLNYWQFGDYLGIGAGAHGKISYPDRIERTVRRRHPNDYLALMQSQPSEAVERKTVAAEDLPFEFMMNALRLTDGVPAAMLQERTGVPSAKIMAQIETARQKGLLETDPAVFRPTEKGRLFLNDLLQCFL

SEQ ID NO: 7801 - protein, 86 aa, Neisseria meningitidis; identical to SEQ ID NO: 3834

SEQ ID NO: 7802 - protein, 129 aa, Neisseria meningitidis
MWKISKENCEDLGFAIVCMFYDAINLSEFKLWLDIVVRDIPIDTIPLYIFDLIDFDKSIGEIYDVIGVVNYGYISNDQKNALTGIAFLRGIDVYDPPISKEKALKALEKYPEIYQRFQHFFPFVELPLF

SEQ ID NO: 7803 - protein, 511 aa, Neisseria meningitidis; identical to SEQ ID NO: 3843

SEQ ID NO: 7804 - protein, 74 aa, Neisseria meningitidis
MKKNAPKSFEEALSRLESLTQSMQGEMPLEDALAAYQEGNELVRYCQTKLAQVEQKLQVLDTDGLKELNLESDE

SEQ ID NO: 7805 - protein, 121 aa, Neisseria meningitidis
VWGRYEKLRIFYDPTRAIYDSGADYLTREKHRLVVIANSAWGLLLNLSCYYDEVLEKRKIPFGKQEIDDDMDKVSALKRKFKDISEIKVGDGWEYPFNYEQGMKELDEVLLKYIPFFEEER

SEQ ID NO: 7806 - protein, 451 aa, Neisseria meningitidis
MSDFFHSDVLSVSELNAFAKSLLENHLAGLWIAGEVSNLTRAASGHYYFSLKDSRAQVRCAMFKGAAVRLAKPLKEGDHIEVSGKISIYEARGEFQITVNEVRLKGLGQLYEAYERLKAQLQAEGAFAAERKKPLPVRPQCIGIVTSLAAAALRDVVTTLKRRAPEIPVIVYPTPVQGAGSELQIAQAIKTASQRAECDVLIVCRGGGSIEDLWAFNEEPVVRAIESCTVPVVSGVGHETDFTLADFVADMRAPTPTGAAELVSPNRQESLHRLAQAQCRLKTVLEQRYFDASQKLDWLARQIRHPRQKLDEQRASIGKLAQTLSYSMTQNVRTHTARFERQTQALKHCRPDVSVCKKNIDRFQTALSHAFHQLLTHRRQSLTAQAALLEAVSPQHILERGFSVVKNTRGQVIRNADVLKQGQKLHIIFADGETDVRVSKEQGQQDLFDCI

SEQ ID NO: 7807 - protein, 90 aa, Neisseria meningitidis
VFAVIFFSTLGCILAWIRDIPKIKSKKILARSLYIIGIINVIIGYVLIKNILVSVSDGGGIKYVAIYLSNLFFWTVLMYVLVKRLSKKPS

SEQ ID NO: 7808 - protein, 90 aa, Neisseria meningitidis; identical to SEQ ID NO: 1507

SEQ ID NO: 7809 - protein, 161 aa, Neisseria meningitidis
MAKHEIEERGDGLIEKMVAVNRVTKVVKGGRIMAFSALTVVGDGDGRIGMGKGKSKEVPVAVQKAMDQARRSMIKVPLKNGNYSSGYWPSWCYSIYAACRGWRKSRWTYAFGFCYGHSYLRQSARIYPIYRTCNIRWFVVAYSCYRSQTWLDSGRHFGSPW

SEQ ID NO: 7810 - protein, 37 aa, Neisseria meningitidis; identical to SEQ ID NO: 970

SEQ ID NO: 7811 - protein, 137 aa, Neisseria meningitidis; identical to SEQ ID NO: 1900

SEQ ID NO: 7812 - protein, 811 aa, Neisseria meningitidis
MHHFGRAATSCAAVWMRAFIKNYVLTLLFLKYVSDKHKYGGGMIELHAGTTFDDIVKLKNTADIGDRLNKIIAQIAEANDLKGVIDVTDFNDEDKLGKGKEMIDRLSRLVGIFKKLNLSSNQAEDDDLLGDAYEYLMRHFATESGKSKGQFYTPAEVSRIMAKIIGISADCRPAPAFMTRPAARVRCCSKPPPKPAAKSAFTVRKKMWQPRPLPVIFCTTTKPPKSTPGTPCPIRLSVMKTTGLRPSILPLPIRLIPPEKNGDYAFLLHLLKSLKPSGKGAIILPHGVLFRGNAEARIRTELLNLDLIKGIIGLPANLFYGTGIPACIIVIDKEHAQTAQFAEEGTNQVISGGSVFMIDASRGFIKDGNKNRLREQDIHKIIDTFTNLVTAVWCIAKSQHKITTLICLAISTAEKSKTCKISPPIYLYGGIPAHDMDALEAYWQVLGRMKNELFAEHDGHFTTIQRNRLQIFPTLNSLKSCGIGVEFRANLVQPQISTIKSKAAKSKPIYWRTPITPPSKPDTQSLPRGTLKTTLPPSNRAGLSGNGAKACWTRSNPAALKNTISTKSRTTGRKPCKTMFISSPKMAGRRLKTWPKSPKKAMKPRTPSSLRKPKPTKKAKPKPSASAKNTAAKSSPPSWLPAATFQTASPSWKKNKASWNAAKNWKTTKNTAAKRVRTTYWMQKANFPPNFKPHWKKAAKKANGLFYKPPKHRRKKPRKTQSKPKSKPTLPYSNNLADFPKPKSSSLPFKTNGLPIYKAESKIAWKTVFSSLSAATRWKTATAARWPSLPEKWKSGKAKSMPTLKIWVLEA

SEQ ID NO: 7813 - protein, 73 aa, Neisseria meningitidis
LKVVPERTVSADAKTRDPMWDNAALQTSEGVNFIARFLGFFSDGEYRYVDVLQPNHSDIIRYSGKDFSAKSNI

SEQ ID NO: 7814 - protein, 75 aa, Neisseria meningitidis; identical to SEQ ID NO: 1799

SEQ ID NO: 7815 - protein, 119 aa, Neisseria meningitidis
LNNIPVEIRLLKNRTVLVLTYGDEPKNLPAEFLRVYSPSAEVRGHGVGQDVLQTGKADVQITDLQPVGQYALKISFSDGHDSGLYDWAYLHRLAYGYDAMWQEYLDKLAASGASRFEEK

SEQ ID NO: 7816 - protein, 553 aa, Neisseria meningitidis
MLTYTPPDARPPAKTHEKPWLLLLMAFAWLWPGVFSHDLWNPDEPAVYTAVEALAGSPTPLVAHLFGQTDFGIPPVYLWVAAAFKHLLSPWAADSYDAARFAGVFFAVIGLTSCGFAGFNFLGRHHGRSVVLILIGCIGLIPVAHFLNPAAAAFAAAGLVLHGYSLARRRVIAASFLLGTGWTLMSLAAAYPAAFALMLPLPVLMFFRPWQSRRLMLTAVASLAFALPLMTVYPLLLAKTQPALFAQWLDYHVFGTFGGVRHVQTAFSLFYYLKNLLWFALPALPLAVWTVCRTRLFSTDWGILGVVWMLAVLVLLAVNPQRFQDNLVWLLPPLALFGAAQLDSLRRGAAAFVNWFGIMAFGLFAVFLWTGFFAMNYGWPAKLAERAAYFSPYYVPDIDPIPMAVAVLFTPLWLWAITRKNIRGRQAVTNWAAGVTLTWALLMTLFLPWLDAAKSHAPVVRSMEASLSPELKRELSDGIECIGIGGGDLHTRIVWTQYGTLPHRVGDVQCRYRIVLLPQNADAPQGWQTVWQGARPRNKDSKFALIRKIGENI

SEQ ID NO: 7817 - protein, 208 aa, Neisseria meningitidis
MRCFMIQNVVTSIILYSGTAVDLLIILMLFFAKRKSRKDIINIYLGQFLGSVSLILLSLLFAFVLDYIPSKEILGLLGLIPILLGIKVLLLGDSDGEAIAKEGLRKDNKNLIFLVAMITFASCGADNIGVFVPYFTTLNLANLIVALLTFLVMIYLLVFSAQKLAQVPSVGETLEKYSRWFVAVVYLGLGIYILVENNSFDMLWTVLG

SEQ ID NO: 7818 - protein, 274 aa, Neisseria meningitidis
VNRTAFCCLSLTTALILTACSSGGGGVAADIGAGLADALTAPLDHKDKGLQSLTLDQSVRKNEKLKLAAQGAEKTYGNGDSLNTGKLKNDKVSRFDFIRQIEVDGQLITLESGEFQVYKQSHSALTAFQTEQIQDSEHSGKMVAKRQFRIGDIAGEHTSFDKLPEGGRATYRGTAFGSDDAGGKLTYTIDFAAKQGNGKIEHLKSPELNVDLAAADIKPDGKRHAVISGSVLYNQAEKGSYSLGIFGGKAQEVAGSAEVKTVNGIRHIGLAAKQ

SEQ ID NO: 7819 - protein, 338 aa, Neisseria meningitidis
MNTRPFYFGLIFIAIIAILANYLGNTDFSHHYHISALIIAILLGMAIGNTIYPQFSTQVEKGVLFAKGALLRTGIVLYGFRLTFGDIADVGLNAVVTDAIMLISTFFFTALLGIRYLKMDKQLVYLTGAGCSICGAAAVMAAEPVTKAESHKVSVAIAVVVIFGTLAIFTYPLFYTWSQHLINAHQFGIYVGSSVHEVAQVYAIGENIDPIVANTAVISKMIRVMMLAPFLLMLSWLLTRSNGVSENTSHKITIPWFAVLFIGVAIFNSFDLLPKELVKLFVEIDSFLLISSMAALGLTTQASAIKKAGLKPFVLGILTYLWLVVGGFLVNYGISKLI

SEQ ID NO: 7820 - protein, 87 aa, Neisseria meningitidis; identical to SEQ ID NO: 205

SEQ ID NO: 7821 - protein, 287 aa, Neisseria meningitidis; identical to SEQ ID NO: 1804

SEQ ID NO: 7822 - protein, 380 aa, Neisseria meningitidis
MQKWQTELYSTPLWLCLTPKSAVKVLLLITAMITLVLTEMRLNVLSTFMSKGLYDSMQDLNASAFWMFAAMNAGVVLIRAFNNVVNDFLDQGLAIKWSERLNEVLTARWLADKNYYRLQMRRHAPDNIDQRIQQDAQEFIASTIEFVRGMVNSVVTSLEFAVVLRGLAGILTVFGFDIPHGIVWFVYIFVILATFIAMWIGNPLIRYNYENEKLNGDYRYSLIRVRDHAESVAFYSGEKHEHDQLSDRFKAIIRNRWRIARQSVCLSGFNDMFTNGIKLFPIILQAPRLFAGQIKIGDIQQTVQAFARLQNALSFFRMFYNKFTAYRARLERLYGFLLSTEEQHSARQPEISEVSDGIALECKAAAAFARIGGSFCTAEA

SEQ ID NO: 7823 - protein, 558 aa, Neisseria meningitidis
MSQQYVYSMLRVSKVVPPQKTIIKDISLSFFPGAKIGLLGLNGAGKSTVLRIMAGVDKEFEGEAVPMGGIKIGYLPQEPELDPEKTVREEVESGLGEVAAAQKRLEEVYAEYANPDADFDALAEEQGRLEAIIAAGSSTGGGAEHELEIAADALRLPEWDAKIDNLSGGEKRRVALCKLLLSKPDMLLLDEPTNHLDAESVEWLEQFLVRFPGTVVAVTHDRYFLDNAAEWILELDRGHGIPWKGNYSSWLEQKEKRLENEAKSEAARVKAMKQELEWVRQNAKSRQAKSKARLARFEEMSNYEYQKRNETQEIFIPVAERLGNEVIEFVNVSKSFGDKVLIDDLSFKVPAGAIVGIIGPNGAGKSTLFKMISGKEQPDSGEVKIGQTVKMSLIDQSREGLQNDKTVFDNIAEGRDILQVGQFEIPARQYLGRFNFKGSDQSKIAGQLSGGERGRLHLAKTLLSGGNVLLLDEPSNDLDVETLRALEDALLEFAGSVMVISHDRWFLDRIATHILACEGDSKWVFFDGNYQEYEADKKRRLGEEGAKPKRIKYKPVTR

SEQ ID NO: 7824 - protein, 694 aa, Neisseria meningitidis
MDYLSRLSFGFNKKLPVILQTEVAECGLACLTSILSYYGFHTDLRTLRQKYTLSLKGANLADIMRFGNEMNLTPRALRLELDELSNLQLPCILHWNLNHFVVLCSISKDSIVIMDPAVGMRKIKMDEVSQKFTGIALELFPNTHFEEKKETKKIKILSLLRGSGLKRSLIQMLILAISLEVFALVSPFFMQWVIDHVIVTADKNLLLTLTLGFGLLTILQQLISLLQAWVGMHLSTTLNLQWKANIFKRLLDLPNDYFSKRHLGDVISRFGSIDHIQETLTSTFFVLVLNSLMAVFTFVLMTIYSTQLSLIVLLTLVLYILIRWLAYYPLRNATEENIVHEAKQNSYFMETIRGIQSVKLFDKHYQRHGTWMSLFVNTVNTKLTTDKLSALFEFSNKLLFSMENVIIIYLGASAILDGSFTVGVLMAFLAYKGQFESRTASLVDQYIQIKMLGLHAERLADITLNETETEIIKYNHIPKLDNEQLVLKVENVSFRYADNEPYLFENINLEFKDNEAVVLTGQSGRGKSTLLNILTGSLKPETGTVSINGHDIYQVSPSFIRGLSGIVRQDDVLFAGSIGENISFFDESPNMELIEQCAKMAQIHDDILKMPMGYETLIGDMGNILSGGQKQRVILARALYKRPKILFLDEASSHLDVENEQKINHNLKSLGIMKIMVAHRQETIQSADKILNLG

SEQ ID NO: 7825 - protein, 463 aa, Neisseria meningitidis
MFPDFSQTLSKDRHFLRSAFKNPNKYGGLSKIEEKYRKSHEIFLKRLAALPKPEFDNTLPVHEKLEEIKKAIAKNQVTIICGETGSGKTTQLPKICLELGRGAAGLIGHTQPRRLAARSVAERIAEELKSEIGSAVGYKVRFTDHTSRDACVKLMTDGILLAETQTDRYLAAYDTIIIDEAHERSLNIDFLLGYLKQLLPRRPDLKVIITSATIDAERFSRHFNGAPVLEVSGRTYPVEILYRPLTGKDEDDAEVELTDAIVDAADELARHGEGDILVFLPGEREIRETAEALRKSTLRRNDEILPLFARLSHAEQHKIFHPSGAKRRIVLATNVAETSLTVPGIKYVIDTGLARVKRYSARAKVEQLHIEKISQAAARQRSGRCGRVSAGVCIRLFSEEDFNSRPEFTDPEIVRSNLAAVILRMAALKLGDVAAFPFLEMPDSRYINDGFQVLLELGAVEAV

SEQ ID NO: 7826 - protein, 214 aa, Neisseria meningitidis
MGRHFGRRRFLTVAAVAAAGAAVSFLPNPFAADDEKRNGDEKRNENVFFWKGVALGSGAELRLFGVDDRRAADLVNKVLAEVARLEKIVQPLPRQPDQPPEQGRLSDFAVGGFFGTVEPVPRYSRADGRRVRSDSAGVVETVCRLFCRPSRCGNAASSKQRGRSPETGRLRQSLVRPNPFCRKGYGFVLERHRARLWINKNQYGVASPLKENDS

SEQ ID NO: 7827 - protein, 271 aa, Neisseria meningitidis
LTAYNESTYSSSKGIIYANPHPLRRTAGFFNRCLCRGRIHAAIRQPVRRRRLHAKPAFERALRLLLFRRQCFARAVVEKSARRDKSFVLTVYDKDAPTGLGWMHRVVADIPADVHRRNATSLQLSRCANIADRTGLDALGGRRHSRRCPPPQRGLAAIKPLRQHRRRPVRSHIGGNQFADLPHQVDAFVHGKTDAVMLQPRQHAAKRGLRSIVRHFFIRQYRSLIIKRRAHTPGIRQLYRIAHCLRRPVLCGEPFYGFLFESNPLRLIEAV

SEQ ID NO: 7828 - protein, 368 aa, Neisseria meningitidis
MGLKKACLTVLCLIVFCFGIFYTFDRVNQGERNAVSLLKEKLFNEEGEPVNLIFCYTILQMKVAERIMAQHPGERFYVVLMSENRNEKYDYYFNQIKDKAERAYFFHLPYGLNKSFNFIPTMAELKVKSMLLPKVKRIYLASLEKVSIAAFLSTYPDAEIKTFDDGTGNLIQSSSYLGDEFSVNGTIKRNFARMMIGDWSIAKTRNASDEHYTIFKGLKNIMDDGRRKMTYLPLFDASELKTGDETGGTVRITFGFARQRDEGNFGKGGKKLQNTICRAASPPNLRAFRRNHIKFALCHRRLYFARDEKPAYEVNLYLFQRRGVDDEGFSQCARLRIETGFPSGRLLAQAGVCPVYPIRHPDFDIRKL

SEQ ID NO: 7829 - protein, 352 aa, Neisseria meningitidis
MSSRKIIHIDMDAFYASVELREQPHLKGRPVVVAWEGARSVICAASYEARQFGLHSAMSVATAKRLCPQAVYVPPHFDLYRQVSAQIHAVFRRYTDLIEPLSLDEAYLDVTRNFKNIPYAGDVAKEIRAAIFAETGLTASAGIAPNKFLAKIASDWRKPNGQFVLPPHKVMAFLETLPLGKIPGVGKVTLKKMQSLGMRTAGDLRRFERGELLNHFGRYGYRLYDLVRGTDERPVKAERERLQISTEITLPEDLPLEQAAGHLPHLAEDLWRQITRKNVEAQSVTLKLKTYDFRIITRTLTYSSVLPDCAALLQAAQMLMARVSPQTEDAFRLIGIGVGHLVPKNQQQDLWA

SEQ ID NO: 7830 - protein, 421 aa, Neisseria meningitidis
MQQIKFIDLFSEMSGIRKGFEQACRKQSVACECVFTSEIKPAALEVLKQNYPDEVPYGDITKIETGDIPDFDILLAGFPCQAFSFAKRLGFEDTRGTLFFDVARILKAKKPKGFILENVEGLVTHDRKDSTQKIGRTLTVILETLEALGYYVSWKVLNAKDFGIPQNRKRIYLTGSLKSKPDLSFETSPSPKLKNILESGLPTESSPFIKKLLKKFPPSELYGKSVKDKRGGKNNIHSWDIELKGAVTEEEKQLLNILLKERRKKWASEIGIDWMDGMPLTKAQISTFYKHPDLQNILDSLTDKGYLVLEHPKQKIGGQRIKDESLPKGYNIVSGKKSFEINKILDQNDVAPTLVAMNMEHLFVVDNGGLRTLTGKEGLRLFGYPDDYSFDIPKKDRCDLLGNTVAVPVIKAVSERLLHTL

SEQ ID NO: 7831 - protein, 333 aa, Neisseria meningitidis
MHTPLTYIDLFSGAGGLSLGFEQAGFQQLLSVEMESDYCQTYRTNFPHHQLLQKDLTTLTEQDLINCLNGQAVDLIIGGPPCQGFSMAGKIGRTFTDDPRNHLFKEFVRIVKIVQPYFFVMENVARLYTHNSGKTRIEIIQAFQNIGYSVECKILSAADFGVPQIRSRVIFIGRRDKGKISFPEPLQISHQTVGSAIGHFPKLAAGESNPHVANHEAMNHSAQMLEKMAFVKNGGNRNDIPEPLRPKTGDIRKYIRYNSNKTAVCITGDMRKVFHYEQNRALTVRELAALQSFPDNFIFCGSKIAQQQQVGNAVPPLLAKAIAESILKMSENE

SEQ ID NO: 7832 - protein, 1084 aa, Neisseria meningitidis
MRTTPTFPTKTFKPTAMALAVATTLSACLGGGGGGTSAPDFNAGGTGIGSNSRATTAKSAAVSYAGIKNEMCKDRSMLCAGRDDVAVTDRDAKINAPPPPPNLHTGDFPNPNDAYKNLINLKPAIEAGYTGRGVEVGIVDTGESVGSISFPELYGRKEHGYNENYKNYTAYMRKEAPEDGGGKDIEASFDDEAVIETEAKPTDIRHVKEIGHIDLVSHIIGGRSVDGRPAGGIAPDATLHIMNTNDGTKNEMMVAAIRNAWVKLGERGVRIVNNSFGTTSRAGTADLFQIANSEEQYRQALLDYSGGDKTDEGIRLMQQSDYGNLSYHIRNKNMLFIFSTGNDAQAQPNTYALLPFYEKDAQKGIITVAGVDRSGEKFKREMYGEPGTEPLEYGSNHCGITAMWCLSAPYEASVRFTRTNPIQIAGTSFSAPIVTGTAALLLQKYPWMSNDNLRTTLLTTAQDIGAVGVDSKFGWGLLDAGKAMNGPASFPFGDFTADTKGTSDIAYSFRNDISGTGGLIKKGGSQLQLHGNNTYTGKTIIEGGSLVLYGNNKSDMRVETKGALIYNGAASGGSLNSDGIVYLADTDQSGANETVHIKGSLQLDGKGTLYTRLGKLLKVDGTAIIGGKLYMSARGKGAGYLNSTGRRVPFLSAAKIGQDYSFFTNIETDGGLLASLDSVEKTAGSEGDTLSYYVRRGNAARTASAAAHSAPAGLKHAVEQGGSNLENLMVELDASESSATPETVETAAADRTDMPGIRPYGATFRAAAAVQHANAADGVRIFNSLAATVYADSTAAHADMQGRRLKAVSDGLDHNGTGLRVIAQTQQDGGTWEQGGVEGKMRGSTQTVGIAAKTGENTTAAATLGMGRSTWSENSANAKTDSISLFAGIRHDAGDIGYLKGLFSYGRYKNSISRSTGADEHAEGSVNGTLMQLGALGGVNVPFAATGDLTVEGGLRYDLLKQDAFAEKGSALGWSGNSLTEGTLVGLAGLKLSQPLSDKAVLFATAGVERDLNGRDYTVTGGFTGATAATGKTGARNMPHTRLVAGLGADVEFGNGWNGLARYSYAGSKQYGNHSGRVGVGYRF

SEQ ID NO: 7833 - protein, 330 aa, Neisseria meningitidis
MKQKIFVLYTGGTIGMTQSSEGLRPDTALVSQALSPFSDGLDFEWHVCNPLIDSSSVTLQHWRDWLDIIADKLPSCDGILILHGTDSMAYTANLLALALQGLGKPIVLTGSQWPYAAENSDAPRNLSTAVAAFSLKLKQTVIAFDGKLYPAVGSSKVSTETAAGFDNPHFGTLAEWDETRGWHNLRLPSQDAAAVSDGLKIRYPDPQAKIAVRTLIPGFAVQELADGLGQLPAQALILQSYGHGNTPADEGFIRAVRDFARQGKLLLNISQVRQGKTAAVYAQGNAFRNSGIINGGKCNLETATALMTLAVSQGWGKEDVYKELVRLKLV

SEQ ID NO: 7834 - protein, 729 aa, Neisseria meningitidis
MIYHRIAVNVPLSDGLLTYSHSDPLPPGTRVLVPFRNKTVVGMVWETDIAPDMDTARILGVQTTFSDEPLLPESWRDLLAFTSRYYHYPTGQAVFAALPQGLKETRAVEMPQPPLFYALNEAGRAQTPPPARFNKKAALWDALLSGEMTMAALKQVNAQAAKLIEDWAEQGWIETTEAAKPVLRSCNGQASHSEFVLNADQQKASDAIQTALGRFQPFLLYGITGSGKTEVYFDAMAKVLAQGRQVLFLLPEINLTPQLLKRVENRFADVPTAVLHSRMAAGRRTQDYLRAMSGQAKLVIGTRLAVFTPMDDVGLIVVDEEHDGSFKQDNELRYHARDLAVWRAKQGGCPVVLGSATPSLESWHKAQSGAYRLLQLTERAHAAAQLPQVEILNAGRLKLDNGFSPQALQLLKQNFEAGGMSLVYLNRRGFAPALFCGDCGHTFGCPNCSAKMVLHQRARQLRCHHCDHRESIPFKCPDCGNQDLTAVGHGTQRVEETLRSFLPKAAVVRVDRDSTAHKNDWADLYRRIADNEIDILVGTQMLAKGHDFARLNLVIVLNADGSLYSADFRAPERLFAELMQVSGRAGRADKPGKVLIQTQLPEHPVFAAVKAQDYAVFAENELNERQMFAMPPFGFQTAVRADAPRVADAMEFLNAAKETLAPLLPESVSQFGAAPMLMVRLAERERAQIFLESVSRQDLHRAVSLWVQVLQQNRDSKIRWSVDVDPQEA

SEQ ID NO: 7835 - protein, 300 aa, Neisseria meningitidis
MNPAMIERLKAVENQAEAMERGARSAYLKQQAQELGISLATLYRKLEAVSVKPTRKRRSDAGKTELKPEEAKLISAVLVEAMRRNGKRLMSVRQAVEMLRANGKIEAARIDGETGEVIPSVRTAFRPLARHRPHRPVMAHPRRRHEDQTPLYRPTVGLGGRNTPRAAHTDRRQHPPFPRHPPTAQTRPPPDHISIKFAHNAIRRLGYDGSTPGKSKHTMHGFRHLFTNISLTAGKDTLTTDLALGHISRAALQRAGFSSLHHYLTADSYRLQERRELAEWYSRRHRQAYEAAAQNTCNKT

SEQ ID NO: 7836 - protein, 469 aa, Neisseria meningitidis
MNFPKTAASLLLLLASLAAHALDTGRIPQNEIAVYVQELDSGKVIIDHRSDVPVNPASTMKLVTAFAAFKTFGSNYRWATEFKSNGTVNDGTLDGNLYWAGSGDPVFNQENLLDAQKQLREQGILNITGHLMLDHSLWGEVGSPDDFEADSGSPFMTPPNPTMLSAGMVMVRAERNAAGSTDILTDPPLPHIFAQNNLKITASQAACPSIKKLMRASFSDNTLKLRGNIPESCLGKPVGVRMFALDELIRQSFTNHWLLGGGRISDGIGIADTPEGAQTLAVAHAKPMKEILTDMNKRSDNLIARSVFLKLGGDGKLPAVSEQAASAVRRELAVSGIDVADLVLENGSGLSRKERVTARMMAQMLETAYFSPFAQDFIDTLPIAGTDGTLRNRFKQSGGLLRLKTGTLNNVRALAGYWLGDKPMAVVVIINSGRAVSLLPDLDNFVANNIISGGDGWLDAKLMCKERRA

SEQ ID NO: 7837 - protein, 393 aa, Neisseria meningitidis
  misc_feature 3, 4: 'Xaa' is any amino acid
VCXXRHPRRRRRPAGLSFAAELAGSGLKVTLIERSPLTVLQNPPYDGREIALTHFSREIMQRLGMWDKIPENEIYPLRDAKVLNGRSDYQLHFPQPTEARGEPADCLGYLISNHNIRRAAYEVVSQLDNVSILTDTVVKEVKTSDNEAQVILENGKILTARLLLAADSRFSQTRRQLGISSDMHDYSRTMFVCRMKHTLSNQHTAYECFHYGRTIALLPLEEHLTNTVITVDTDKINSVQNLSPEELAASVKEQLKGRLGDMELVSSIHHYPLVGMIAKRFYGKRSALIGDAAVGMHPVTAHGFNLGLSSADILAKLILEAEQRGQDIGASSLLEKYSSKHMLHAHPLYHGTNMMLKLFTNETAPAKLLRGLVLRASNNFPPLKKLITKQLTG

SEQ ID NO: 7838 - protein, 702 aa, Neisseria meningitidis
MKTDIQTELTQALLPHEKVWANEEKTILAKNILLDLVEKTDPTIIGLLLSNDELKRHFFVEVNGVLVFKLQDFRFFLDKHSVNNSYTKYANRIGLTDSNRFLKDSSDIVLDFPFKDCVLNGGQSTEEGEEIYFKRNNSQPASQPASQPASQPASQPASQPASQPIYTKLTRKRQEIFFNQTLAFDEIDRLFDAKAFSKFSRYTADGKQAVGEIKRHSDGTPAENLIIKGNNLIALHSLAKQFKGKVKLIYIDPPYNTGNDGFKYNDKFNHSTWLTFMKNRLEIAKELLMKDGSIFVSIDDNEQAYLKILMDEVFGNENFICNFIWEKKTGASDAKQIATITEFVLCYSKNFKTVKLNKNTFSYDTERYKLSDKFEQERGKYYIDNLDRGGLQYSDSLNFAIQCPDGTFTYPNGRTEFVNDGWIWKWSKNKIDWAITNGFLEFRKSKSKKSGWSVCYKNYMLVDNENKPIERSAPYKNLIQDILNTHATDELKKLFGSKVFTTPKPESLLQYLIQIATSESDIVLDYHLGSGTTAAVAHKMNRQYIGIEQMDYIETLAVERLKKVIDGEQGGISKAVNWQGGGEFVYAELAPFNETAKQQILACEDSDGIKTLFEGLCERYFLKYNVSVNEFSQIIQEPEFQSLPLDEQKQMVLEMLDLNQMYVSLSEMDDEQFADCLNDDDKALSRAFYQSVKNQAEKKDGE

SEQ ID NO: 7839 - protein, 924 aa, Neisseria meningitidis
MANNKTLFEVIENERKAVKKYKPELLEMPEFTSKNLKYDFFEWQKSALENFLIFDRTSKLDDFPDLKNKPTHLLFNMATGAGKTMMMAALILYYFEKGYRHFLFFVNQNNIVDKTENNFTDPTHAKFLFTEKILQGDTVIPIRKVETFSPHSDGIEIKFTSIQKLYNDIRTRRENQTTLADLHKLNLVMLGDEAHHLNAQTKGKKQGELDLEKEMNDRTSNAEIERKGWEHMVLELLLNKNGNHSQNVLLEFTATLPENADVQQKYADKIITKFGLKEFLQKGYTKEINLVSSTLGKKERVLHALLFAWYRHRIALKYGIANFKPVMLFRSKTIDESKADYLAFLNWAENVQAVDFSFLTTFSTSLNDSDSDNANEQGKTRTEQALKFMQEKGVEFAHLADWVKQNYQKHNVIITNSETNKTKTEKTDSETEKLLNNLEAADNPIRAIFTVDRLTEGWDVLNLFDIVRLYEGQNGGGSNKKSGKTAAATVSEKQLIGRGVRYFPFAFEGKQPNKRKFDNDMQHELRILEELFYYTHDEQSRYITELKNELRKDGYLPEKDDDKVLATFKLKSEFADNQDFRELLIWANKKIPNPNARANNADSLKANPQTLPFQVHGNQLLQETQFTADENDEIARQIDTQNNFTQIIKMSEMERHIFNKSLHIKGKNGQSLFHFDRLQSKLNIYNRNELQNNLLKDQIEFLGLGQDKQISPDDKLAGCLKILEMVEKHLNESDMPFIGTKEFTPKKLWEIFGTPKQKWVKKDDIKTAIATQNDWYVMDNFAGTSLEEALIQFISEHLGDLKSKYDVHLIRNEEVFKLNNFSDGEGFMPDFILLLKNKQKSSSNGVDDFLHYQIFIEPKGEHLVENDSWKDAFLKAITAEYGTDKILQKDTPHYRLIGLPFFTDNQENEQFTKSFPLGAASLEK

SEQ ID NO: 7840 - protein, 327 aa, Neisseria meningitidis; identical to SEQ ID NO: 294

SEQ ID NO: 7841 - protein, 385 aa, Neisseria meningitidis
MDMQNKAKKLIEMIQTAPVEWKPLGEVAKVLRGKRLTKKELIEGGKYPVFHGGLIPLGWFDQFNRRANQTMIINTGSIGEVIWSGVDFWSSDGTFVIQTPNYLDDKFIFYFLKTREGYIKSQKRVGGVPTIDRLVVENISIPIPPLETQQKIVKILDKFTELATLEAELTLRKRQYRYYRDFLLDFNNQIGGVADGYKGRLKDVVWKTLGEVFNIFAGGDVPKDAFSEVETEEFCIPILSNGIGSKALYGWTNVAKINQPSLTISARGTIGWASFQNKPFFPIVRLLVLTPKIELNLKYAYYFMKSIESNYKVPESGIPQLTKPMIKDISIPIPPLPEQEKIVAILDKFDTLTHSISEGLPYEIALRRKQYEYYRGQLLSFPKAA

SEQ ID NO: 7842 - protein, 162 aa, Neisseria meningitidis
MLKITLIAACAENLCIGAGNAMPWHIPEDFAFFKAYTLGKPVIMGRKTWESLPVKPLPGRRNIVISRQADYCAAGAETAASLEAALALCAGAEEAVIMGGAQIYGQAMPLATDLRITEVDLSVEGDAFFPAIDRTHWKEAERTERRVSSKGTRYAFVHYLRY

SEQ ID NO: 7843 - protein, 508 aa, Neisseria meningitidis
MDYPPLKGAALAWVTLSLGLAVFMEVLDTTIANVAVPVIAGNLGAATTQGTWVITSFSVANAVSVPLTGFLAKRIGEVKLFTAAAVGFVITSWLCGIAPNLQSLVVFRILQGFIAGPLIPLSQSLLMASYPPAKRTLALALWAMTVVVAPVLGPILGGWISGNWHWGWIFFINIPIGIISAWITWKHLKYRETETVKMPTDYVGLTLMVVGIGALQMMLDRGKELDWFASGEIITLGVVALVCLSYFIVWELGEKYPIVDLSLFKDRNFTVGVIATSLGFMVYMGTLTLLPLVLQTNLGYTSTWAGLAAAPVGILPVFLSPLIGRFGNKIDMRLFVTASFLTFAFTFYWRTDFYADMDIGNVIWPQFWQGVGVAMFFLPLTTITLSHMKGGQIAAAGSLSNFLRVLMGGVGVSVVSTLWERREALHHTRFAEHITPYSATLHETAAHLSQHGVSDIQTLGIINNTITQQGFIIGSNEIFMAGSLLFIIMIPVIWLAKPPFHNGGGGGH

SEQ ID NO: 7844 - protein, 547 aa, Neisseria meningitidis
MNAFTRAWYALERHYQDTRHVLLRDRFACEPDRFERMHERLDGMLFDYSKNRLGEDTLQLLCNLADAADLEGKMRALRTGAKVNGSEGRAALHTALRLPDGADAVYVDGRDVLPEIRRELNRALKFAHSLDDGSYQGITGKRITDFVHIGIGGSDLGPAMCVQALEPFRRHITVHFAANADPACLDAVLCRLNPETTVFCVASKSFKTPETLLNAQAVKAWYRGAGFSESETACHFCAVSADTAAAAAFGIAAERVFAMYDWVGGRYSVWSPVGLPVMVAVGGARFRELLAGAHAMDRHFFSTPTRHNIPVLMALIAVWYNNFQHADGQTAVPYSHNLRLLPAWLNQLDMESLGKSRASDGSPAVCKTGGIVFGGEGVNCQHAYFQLLHQGTRLIPCDFIVPMTAQGREDGRSRFTVANAFAQAEALMKGKTLDEARAELADLPEAERERLAPHKEFPGNRPSNSILIDRLTPYNLGMLMAAYEHKTFVQGAIWNVNPFDQWGVEYGKQLAKTIIGELEGGTSVHDASTEGLMAFYRECRLKGGGAA

SEQ ID NO: 7845 - protein, 244 aa, Neisseria meningitidis; identical to SEQ ID NO: 1832

SEQ ID NO: 7846 - protein, 702 aa, Neisseria meningitidis
MKISFHLALLPTLIIASFPVAAADTQDNGEHYTATLPTVSVVGQSDTSVLKGYINYDEAAVTRNGQLIKETPQTIDTLNIQKNKNYGTNDLSSILEGNAGIDAAYDMRGESIFLRGFQADASDIYRDGVRESGQVRRSTANIERVEILKGPSSVLYGRTNGGGVINMVSKYANFKQSRNIGAVYGSRANRSLNMDINEVLNKNVAIRLTGEVGRANSFRSGIDSKNVMVSPSITVKLDNGLKWTGQYTYDNVERTPDRSPTKSVYDRFGLPYRMGFAHRNDFVKDKLQVWRSDLEYAFNDKWRAQWQLAHRTAAQDFDHFYAGSENGNLIKRNYAWQQTDNKTLSSNFTLNGDYTIGRFENHLTVGMDYSREHRNPTLGYSRAFTASIDPYDRASWPASGRLQPILTQNRHKADSYGIFVQNIFSATPDLKFVLGGRYDKYTFNSENKLTGSSRQYSGHSFSPNIGAVWNINPVHTLYASYNKGFAPYGGRGGYLSIDTSSSAVFNADPEYTRQYETGVKSSWLDNRLDTTLSAYQIERFNIRYRPDAENNPYTWAVGGKHRSRGVELSAIGQIIPKKLYLRGSLGVMQAKVVEDKKNPDRVGIHLNNTSNVTGNLFFRYPTENLYGEIGVTGTGKRYGYNSRNKEVTTLPGFARVDAMLGWNHKNVNVTFAAANLFNQKYWRSDSMPGNPRGYTARVNYRF

SEQ ID NO: 7847 - protein, 1028 aa, Neisseria meningitidis
MNQNHFSLKILTVMLLSAYGGSFADGVVPVSDGNTVSLDTVNVRGSHALLGKTEKTRSYTIDRMSTATGMRIAGKDTPQSVSVITRSRLDDKAVHTLEEAMKNTTGVNVVRDSGLQTRFLSRGFYIDQIGEDGMTVNVAGRSGYTAKIDVSPSTDLAVYDHIEVVRGATGLTQSNSEPGGTVNLIRKPTASFKHTGELTADHRGSRRAVLDVSGSLNKANTLRGRLVGAEEYKKSFKDRVWGRKHMVYGIAEADAGDSSVLTLGGMYQKSREVPDFSGIILPCENQKTAPFSSTPACNRPLQLPRNTYLGEDWSRLSADKYNLFSGFKHVFDNGWQLNAEVSYTKNESDAKVGQFFLKNEYAAGLSGEDAVGFLTEKNEVIPFEPKDKALEKLKAYRDETAKEYRERKDDFVKNRFDNTAFEQYRSRRAAERKAGFDKCMSDPFALDFICQGSWGDPGVDADKAEFVDKALAKEGIFNNAAQRFPNSLYDSSFNRKATANRRYSYMPLRHTKDDRQWGIKLDLTGTYGLFGREHDFFVGYAYGDEKIRSEYLEIYERRYRVRPNTGATHGVYAGSCQEEPDGDLSSPLVRGHKEPDWQAYDEKGNRTVYAEECRNAKKIKTEPKLDAEGKQVYYYDEYSGSRTPVYVDVYELDEKGNKIQETNPDGTPAFTGFSGTVPVWKTVKVADDHVPALYNYAKYLNTNKTHSLTASTRFNVTGRLHLLGGLHYTRYETSQTKDMPVRYGQPASDFQTASSIRADQDHYTAKMQGHKLTPYAGITYDLTPQQSIYGSYTKIFKQQDNVDVSAKTVLPPLVGTNYEVGWKGAFLQGRLNASFALFYLEQKNRTVVDFGYVPGAGGKQGSFQTVAKPIGKVVSRGAEFELSGELNEDWKVFAGYTYNKSRYKNAAEVNAERLAKNSSADPYNFSNFTPVHIFRFGTSFHIPNTGLTVGGGVSAQSGTSSLYNIRQGGYGLIDGFVRYELGKHAKLSLIGTNLNGRTYFENNYNRTRGANNFYGEPRTVSMKLDWQF

SEQ ID NO: 7848 - protein, 209 aa, Neisseria meningitidis
MSETENQALTFAKRLKADTTAVHDSVDNLVMSVQPFVSKENYIKFLKLQSVFHKAVDHIYKDAELNKAIPELEYMARYDAVTQDLADLGDKPYEYGKPLPHETGNKAIGWLYCAEGSNLGAAFLFKHAQKLDYNGEHGARHLAPHPDGRGKHWRAFVEHLNALNLTPEAEAEAIQGAREAFAFYKVVLRETFGLAADAEAPEGMMPHRH

SEQ ID NO: 7849 - protein, 170 aa, Neisseria meningitidis
MGSKFFFLLLRFAGSGLPPSHMRGIGIVGRRVRGFLARRVSPHIGRGVNIERGAYVFPDTVLGDGSGIGANCEICRGLVVGKNVMMEPECLFYSNNHKFDRKKRFEGYTEIRPITLEDDVWPGHRVIVMAGVTVGRGSVVGAGAVVTKDIPPYSLAAGNPAVVKKNLPEG

SEQ ID NO: 7850 - protein, 808 aa, Neisseria meningitidis
MSAQTDPGYFFMPNHIILIGASEQPYSLGERVLSNLLSTPFQGKITPVNPRHHTIAGLPAYTSLNKIPGNADLIIAVTLPDSYDTLFKTCRKKQLRHIILIQDWDNLSAAELHTAETAIRKHHGNGLNITACTTAGIQLPSLGLNISTQDGYAAGHTAILTGNAAVSRQIDNILNKLRQGTSRHISLHPGISPITSADWLNRFGHSLHTKTAVLHHNPEEDQRKLFSAIRQFTRHTPLILHITCRTTETDRAVLHCLARHCNFLVSFNADDLEAALRAQLSDLPPLSRLDILSDTPAEWLHAHAPKNLTLHFPNLPHHIRNGHLTGTPTPSICHDIASRQLAHPDTQAVLTILSPSGHEDYKKTARALIRLSEQTAKPLLVSSPFSDGITHFDTPTQAIRTLSYRNTAAALKQAQLDIAPPQPCRLKTPQPQNIKKALAAANPSLLAEALHLPPYRHTTHNAVQFQFDSHPLYGDILTARCNGQTTAVLPPFTTLDSRHLARFAELDGTQTLDQFLHTLTVIPEYRQHILGITLNLNGGQYSSDFLLKTPETHDTPKRKNTGKAAQTLEHAAAKMQSAAAYLKHKNPTAAEFLRHTSEAAAELLGSKTETGAAVPNVLAPYPAAYPKTLSLRNNTTVTITPILPEDAEAKQQFVRSLGPEARYTRFMTHTNELPAATLARLCNPDYHCEAAWTAKDADSNIVAVVRHSRLNRNECEFGITLAEHMRGSGLAQKMMELIIQTAAQQGYRTMSADILKTNTPMIKLAEKSGFTLKESDTEKNLYRAYLNLAADKTTEKTNKNLRTDHKIT

SEQ ID NO: 7851 - protein, 621 aa, Neisseria meningitidis
MSQALPYRPDIDTLRAAAVLSVIVFHIEKDWLPGGFLGVDIFFVISGFLMTTILHREMWGGRFSLKAFYIRRIKRILPAFFAVLAATLAGGFFLFTKDDFFLLWKSALTALGFASNLYFARGKDYFDPAQEEKPLLHIWSLSVEEQFYFVFPILLLLVARKSLRVQFGFLAALCALSLAASFIPSALDKYYLPHLRACELLIGSLTAVWMRCRQPAVGRRCAAVGALFAVCILSTCLFSYSEQTAYFPGPAALIPCLAVAALIYFNHYEHPLKKFFQSKITVAAGLISYSLYLWHWPILAFMRYIGPDNLPPYSPAAAVVLILLLSLFSYHCIEKPFKKWQGSFAQSVLWIYALPMLILGAGSFFAMRLPFMAQYDRLGLTRSNTSCHNNTGKQCLWGDTEKQPELLVLGDSHADHYKTFFDAVGKKEKWSATMVSADACAYVEGYASRVFQNWAACRAVYRYAEEHLPRYSKVVLAMRWGSQMPENSRSLAYDAGFFQKFDRMLHKLSSEKQAVYLMADNLASSYNVQRAYILSSRIPGYRQALRPDDESTLKANARIRELAAKYPNVYIIDAAAYIPADFQIGGLPVYSDKDHINPYGGTELAKRFSEKQRFLDTRHNH

SEQ ID NO: 7852 - protein, 622 aa, Neisseria meningitidis
MQAVRYRPEIDGLRAVAVLSVMIFHLNNRWLPGGFLGVDIFFVISGFLITGIILSEIQNGSFSFRDFYTRRIKRIYPAFIAAVSLASVIASQIFLYEDFNQMRKTVELSAVFLSNIYLGFQQGYFDLSADENPVLHIWSLAVEEQYYLLYPLLLIFCCKKTKSLRVLRNISIILFLILTASSFLPSGFYTDILNQPNTYYLSTLRFPELLAGSLLAVYGQTQNGRRQTANGKRQLLSSLCFGALLACLFVIDKHNPFIPGMTLLLPCLLTALLIRSMQYGTLPTRILSASPIVFVGKISYSLYLYHWIFIAFAHYITGDKQLGLPAVSAVAALTAGFSLLSYYLIEQPLRKRKMTFKKAFFCLYLAPSLILVGYNLYARGILKQEHLRPLPGAPLAAENHFPETVLTLGDSHAGHLRGFLDYVGSREGWKAKILSLDSECLVWVDEKLADNPLCRKYRDEVEKAEAVFIAQFYDLRMGGQPVPRFEAQSFLIPGFPARFRETVKRIAAVKPVYVFANNTSISRSPLREEKLKRFAANQYLRPIQAMGDIGKSNQAVFDLIKDIPNVHWVDAQKYLPKNTVEIYGRYLYGDQDHLTYFGSYYMGREFHKHERLLKSSHGGALQ

SEQ ID NO: 7853 - protein, 205 aa, Neisseria meningitidis
MAVRSKSSKAWLHEHVNDHYVHMAQKDGYRARAAYKLLEINEKDKLIKPGTVLADLGSAPGSWSQVAAKLTGTSGAVFALDILPMEAIGGVSFIQGDFRENDVLAQFETLLDNRPLDLVICDMAPNMSGNAVSDQARSFYLCELALDFASQHLKTGGSFLVKVFQGGRLSGIHGSHARNFRHGADAQTRSLAQSLQDFIYWAKIN

SEQ ID NO: 7854 - protein, 324 aa, Neisseria meningitidis
MQENPTVWLFDLDNTLHNADAGIFTLINRAMTRYMARRLKLSESAASDLRQDYWHRYGATLAGLQIHHPEIDIAEFLRKSHPIDALLTRLHGMPETQNTLSRLKGRKAVFSNGPSFYVRAVVGALGLENRFDALFGTDDFGLLYKPNPQAYLNVCRLLDVPPECCIMVDDSTDNLHQAKAFGMKTVWFGAKSHALPFIDTCARDMAQLARYAETLSERRQNHYNTPPPKIRKKTMRKTFLILMTAAALLSGCAWETYQDGNGKTAVRQKYPAGTPVYYQDGSYSKNMNYNQYRPERHAVLPNQTGNNADEESRQHWQKPKFQNR

SEQ ID NO: 7855 - protein, 152 aa, Neisseria meningitidis; identical to SEQ ID NO: 1438

SEQ ID NO: 7856 - protein, 407 aa, Neisseria meningitidis
MNRPKQPFFRPEVAVARQTSLTGKVILTRPLSFSLWTTFASISALLIILFLIFGNYTRKTTVEGQILPASGVIRVYAPDTGTITAKFVEDGEKVKAGDKLFALSTSRFGAGGSVQQQLKTEAVLKKTLAEQELGRLKLIHGNETRSLKATVERLENQELHISQQIDGQKRRIRLAEEMLQKYRFLSANDAVPKQEMMNVKAELLEQKAKLDAYRREEVGLLQEIRTQNLTLASLPQRHETEQSWLERTIADISQEVLDFEMRSEQIIRAGRSGYIAIPNVEVGQQVDPSKLLLSIVPERTELYAHLYIPSSAAGFIKPKDKVVLRYQAYPYQKFGLASGSVVSVAKTALGRQELSGLGMVSSDLAKSNEPVYLVKIKPDKSTITAYGEEKPLQIGMTLEADILHEKR

SEQ ID NO: 7857 - protein, 474 aa, Neisseria meningitidis
MFFSALKSFLSRYITVWRNVWAVRDQLKPPKRTAEEQAFLPAHLELTDTPVSAAPKWAARFIMAFALLALLWSFGKIDIVAAASGKTVSGGRSKTIQPLETAVVKAVHVRDGQHVKQGETLAELEAVGTDSDVVQSEQALQAAQLSKLRYEAVLAALESRTVPHIDMAQARSLGLSDADVQSAQVLAQHQYQAWAAQDAQLQSALRGHQAELQSAKAQEQKLVSVGAIEQQKTADYRRLRADNFISEHAFLEQQSKSVSNWNDLESTRGQMRQIQAAIAQAEQNRVLNTQNLKRDTLDALRQANEQIDQYRGQTDKAKQRQQLMTIQSPADGTVQELATYTVGGVVQAAQKMMVIAPDDDKMDVEVLVLNKDIGFVEQGQDAVVKIESFPYTRYGYLTGKVKSVSHDAVSHEQLGLVYTAVVSLDKHTLNIDGKAVNLTAGMNVTAEIKTGKRRVLDYLLSPLQTKLDESFRER

SEQ ID NO: 7858 - protein, 752 aa, Neisseria meningitidis
MYTRIMEISPWTLRSAKLEKEHKRLQESLTSLGNGYMGMRGSFEETYSADSHLGTYIAGVWFPDKTRVGWWKNGYPKYFGKAINAFNFSKVKIFVDGQEVDLAKNDVAGFSVELDMQHGVLRRSFTVFGVRFNVCKFLSVAQKELAVIRWEAVSVDGKTHQVRIDSIIDADVKNEDSNYEEKFWQVLDKGVSDSLSYIAAQTVANPFGVEQFIVNAEQTFAGSFKALGGSQTDWQVSNSFESEVGSTPETFEKRVIVTTSRDYQSLEAVKAAGRALSEKIAGVAFETLLDAHKAGWLHRWEIADVVIEGSDEAQQGIRFNLFQLFSTYYGEDARLNIGPKGFTGEKYGGATYWDTEAYAVPLYLALAEPEVTRNLLQYRRNQLPQAQHNAREQGLAGALYPMVTFTGIECHNEWEITFEEIHRNGAIPYAIYNYTNYTGDEGYLAKEGLEVLVEVSRFWADRVHFSKRNGKYMIHGVTGPNEYENNINNNWYTNTLAAWVLDYTREALAKYPRPDLNVRADELEKWADISANMYRPHDEELGVFVQHDGFLDKDIRPVSALSPDDLPLNQKWSWDKILRSPFIKQADVLQGIYFFSDRFNIDEKRRNFDFYEPMTVHESSLSPCIHSILAAELGKEEKAVEMYQRTARLDLDNYNNDTEDGLHITSMTGSWLAIVQGFAQMKTWGGKLSFAPFLPSAWTGYAFHINYRGRLIKVAVGKENVVFTLLKGESLDLQVYGKDITLDGSHTVALEK

SEQ ID NO: 7859 - protein, 434 aa, Neisseria meningitidis
MKKHIWAASLLPASLSAEPLNWWKPYSAVNSGDTAWVMTAAALVLLMTLPGLALFYGGMVRKKNLLSTMMHSFSIATLVGILWVAVGYSLAFTPGNAFIGGLGRVFLSGMQIDATAQMLTVSPNAPTVPEPVFMFFQMTFAIISTAIITGAFAERMKYSAMMLFSGIWFLLVYVPGAHWVWGGGFMSKGGVLDYAGGTVVHINAGIAGLVAALVLGRRIGYGREAMPPHNMAMTLIGAAMLWFGWFGFNAGSALAADAAAGMAMAVTQVSAVFGAAGWLACEKIAGHKPSALGLASGAVSGLVGITPAAGFTGPSGAAAIGILTAAACFVSVTVVKHKLRYDDSLDAFGIHGFGGLVGGILTGIFFDNRIFGGDAAVWQQLWIQVKDGVVMAAYSGLMSWAILKVVGKICGGLRVGKDVEREGLDLNIHGERVE

SEQ ID NO: 7860 - protein, 384 aa, Neisseria meningitidis
MKFTKHPVWAMAFRPFYSLAALYGALSVLLWGFGYTGTHELSGFYWHAHEMIWGYAGLVVIAFLLTAVATWTGQPPTRGGVLVGLTIFWLAARIAAFIPGWGASASGILGTLFFWYGAVCMALPVIRSQNQRNYVAVFALFVLGGTHAAFHVQLHNGNLGGLLSGLQSGLVMVSGFIGLIGTRIISFFTSKRLNVPQIPSPKWVAQASLWLPMLTAMLMAHGVLAWLSAVFAFAAGVIFTVQVYRWWYKPVLKEPMLWILFAGYLFTGLGLIAVGASYFKPAFLNLGVHLIGVGGIGVLTLGMMARTALGHTGNPIYPPPKAVPVAFWLMMAATAVRMVAVFSSGTAYTHSIRTSSVLFALALLVYAWKYIPWLIRPRSDGRPG

SEQ ID NO: 7861 - protein, 240 aa, Neisseria meningitidis
MKPAYFISDLHLSEKQPELTALLLRFLRSSAAGQARAIYILGDLFDFWVGDDEVSELNTSVAREIRKLSDKGVAVFFVRGNRDFLIGQDFCRQAGMTLLPDYSVLDLFGCKTLICHGDTLCTDDRAYQRFRKIVHRKRLQKLFLMLPLKWRTRLATKIRRVSKMEKQVKPADIMDVNAAFTARQVRAFGAERLIHGHTHREHIHHENGFTRIVLGDWHNDYASILRVDGDGAVFVPLEKY

SEQ ID NO: 7862 - protein, 83 aa, Neisseria meningitidis
LYCLRLRRLVLIFVNPLYADAGDVYCVYNIRLKQYTACQVTRVEEHGGKKNTCDPAGFGLAGQQTAWGGGAGGFEIALQRLKE

SEQ ID NO: 7863 - protein, 141 aa, Neisseria meningitidis
MYWERGLHMYKASAVVPTGYVRVGNTAPLVGEDTQRYASFWGDGYDVYRQLRWQQIPEKQRKAFKKAAKSKKTVMFAGREYGISKQNLSDVWDDFEDAMELKAFPCLSSLFLTKWHKNLYDSGLTKTSTALPRLSSKRTIL

SEQ ID NO: 7864 - protein, 317 aa, Neisseria meningitidis
MNTAAIYRQYQTYVRSDKSGWALDGCSDSALIAQAKQPGLHLEMCINRFDSGITLSRMRGGGTGAFPTEIHNFSHNCALFVMVSGQNRLQMGGREYRPSAGEILVRGDLADVSETLLPDNSGMCALHLDFSLEKLRRWHDEGLLDERLFSPQTIGRFALQRLAQNAAALTAAACPLLQRPFESDGFGLLADEAAALELSARLLRFTFRRHDNGYRRRRIDEAADILQHEFARPLTIAEIARRVGLNECYLKRYFKAQTGETVAGCLRRLRLEHALALIESGSTVQAAMHFCGYRHAGRFNEAFRRHYGFLPSDVKKC

SEQ ID NO: 7865 - protein, 119 aa, Neisseria meningitidis
MTDRPSLLWIKPGQAEIMEYCEPEEASDPYATYRRANLMAGLPLFVVILVLLNIVFPLPAYPLAWLVPAGFMVLGGGFPLSLPLVALLVLTCCILAHCPPLSRLLCYPCPNHPMSKNSA

SEQ ID NO: 7866 - protein, 214 aa, Neisseria meningitidis
LAVQSAEDKYADLKRHIHDIYRRHKGRYGYRRIAAAIRHAGTPVNHKKVSRLMAKTGLKAVIRRRKYRSFKGEVGKIAPNILRRCFHAEKPNEKWVTDVTEFNVGGEKIYLSPIMDLFNGEIVSYRIQIRPTFDLAGEILKGAPEKPGSSEKPILHSDQGWQYQMFFIKSSKATVWFRVCPARETAWTMRQWKVSSERNRNVSIRANMIPLPNR

SEQ ID NO: 7867 - protein, 55 aa, Neisseria meningitidis
  misc_feature 2, 3: 'Xaa' is any amino acid
VXXALKFDQLILEFPERGDGAWVHIGFRRNSPQRNQILTATKKNGKTVYLPGLHP

SEQ ID NO: 7868 - protein, 106 aa, Neisseria meningitidis
VDWMGSLFLPGGALLFLSVVSTTLSARLGMPLLLVSPANVLDRAAEALAIAAFLMLVARPSAVFGGLWKFNYSLREKAYSRIEMQSDTVLQAGIWRGTSCPTARSI

SEQ ID NO: 7869 - protein, 69 aa, Neisseria meningitidis
MGSALKRTNMPSEPLDGIPKTKQSRENMNEQDLDLDNLDNLLEDFDGVTVEGGVDSENDDGCEGGACKI

SEQ ID NO: 7870 - protein, 492 aa, Neisseria meningitidis
MSHLFRKEVFVAQQNKWTGQVILTRPFSFLFLTFCAFLIALCIIIFLIFGSYTNKTTVEGQLLPTMGVVRVYSSDIGTITHKFVEDGNFVKAGEPLFKLSTSRFGEKGNVQAKLAAEANLKKTLALQELERLKRIHQNEQKNVHNNIHRLNNQLENIKQQITGQNRQIRLAEKTLNKNKFLASQGAVSQQDKMTAESHLLEQRSRLESLKREQNNAIRELDEQKITLSSLPERHKTELSQLNRAITEMNQEILDFDLKSEQTIRASKSGDLCKNNLLTKFDAKCAKKFSIANLPNIEQKVGKIRKVLHFENEIEHKILVTYVIAKVSGYISTINVDIGQQVEPSKLLLSIVPEQTELVANLYIPSKAVGFIKPKDKVVLRYQAYPYQKFGHATGEIISVARTALGKQKLSGLGIIFTNPTLLNEPAYLVKVKLEKQTIKAYGENKPLQIGMILEADILHERKNCTNGYLTHFTAFQEKSIKNGLFIKTVLWI

SEQ ID NO: 7871 - protein, 63 aa, Neisseria meningitidis
LPKFGEFHLPSPPPRGRGQVAADFAVAGGLRKNARNINSGNFSGSLYRKAGGTNAANVFSDDL

SEQ ID NO: 7872 - protein, 78 aa, Neisseria meningitidis; identical to SEQ ID NO: 3900

SEQ ID NO: 7873 - protein, 127 aa, Neisseria meningitidis; identical to SEQ ID NO: 3901

SEQ ID NO: 7874 - protein, 63 aa, Neisseria meningitidis; identical to SEQ ID NO: 5865

SEQ ID NO: 7875 - protein, 96 aa, Neisseria meningitidis
LRQAFQTAFLKCVYLWCSKRSSESAASAKLKRGINEVKICLNLKGSLHPNPLSRGRGLGRGGQTESLLGRHFQCAGCFYSGLTKIRTRRRSRRQYK

SEQ ID NO: 7876 - protein, 168 aa, Neisseria meningitidis
VETTFALLNFKESLCYIYPPTEPVRYVSSIVALNVHSPNGTGDWHSAKALSDRAYPEKFYIYGENQERNTNHLFGDNGIIDGTDRLNKMGYFPENIPVWLADHPRACVDYLYTAVLQTGSIGRVILDDWFPSDEDKQSVYDLLNQIEPHLNTQEWENLQLWKRKNPIM

SEQ ID NO: 7877 - protein, 140 aa, Neisseria meningitidis
MLIGLLPWALILGMQGGQKGMSWLEMLLMTSMNFAGGSEFATVNLWAEPLPILLIATVTFMINSRHILMGAALAPHLKGIPLKKAVPALFFMCDESWAMAFSEIQKRKAAGLPAFNMPFYSGLTKTSTALPRLSSKKTIL

SEQ ID NO: 7878 - protein, 97 aa, Neisseria meningitidis; identical to SEQ ID NO: 1875

SEQ ID NO: 7879 - protein, 147 aa, Neisseria meningitidis
MKKQITEATMMLSIIAPAMANGLDNQAFEDQVFHTRADAPMQLAELSQKEMKETEGAAAPLVAIGILHAGRFLAQRWVTQRVAAQALSRGANVYARTSQQARAVANQAWGRQNVIRHGQKEIHSNYSHFQNSSQKIRGHAFYGNKHR

SEQ ID NO: 7880 - protein, 139 aa, Neisseria meningitidis
MSFGYLIATSQPCELLTKSRGETFSLIMDKMDLWIYFRFCEGNIYTIRKNETESCLTERGGEWLKHIYEFNRGSFIFSYVLLKKRESEENFAEIVLKSIKNNKILTVKVRSGLHFDLRNIYRIEMYSGLNLNQYGVASP

SEQ ID NO: 7881 - protein, 80 aa, Neisseria meningitidis; identical to SEQ ID NO: 1154

SEQ ID NO: 7882 - protein, 78 aa, Neisseria meningitidis
MLRVQKWGNSAAVRLPADMLKQLDFKIGDALVAEVHNGELRVRAARRFRLADLLAEMEETPPRVEGWEILDDAGNEVV

SEQ ID NO: 7883 - protein, 64 aa, Neisseria meningitidis
LDYRFGRQYRLLKTDDFSSVFAFRKRRSRDLLQVSRSDGNGLGHPRLGLVVGKKTPNGPTNGIT

SEQ ID NO: 7884 - protein, 100 aa, Neisseria meningitidis
MLNEIFEIYSRQGESLIGIGIREAALPVPIAIDILNLFINERILVLGGDIYIKKDNYFYQTYDNWYYEGSNLFNSIDKAMHYLSQIKLENAYVSFVLKFI

SEQ ID NO: 7885 - protein, 67 aa, Neisseria meningitidis
MDTTLKYKAEALLGEPLLDEPVRPESWECCGSDCGEACIQTIYWADKAKYDVQRQKLKEAGWSDDAV

SEQ ID NO: 7886 - protein, 68 aa, Neisseria meningitidis; identical to SEQ ID NO: 3911

SEQ ID NO: 7887 - protein, 64 aa, Neisseria meningitidis; identical to SEQ ID NO: 631

SEQ ID NO: 7888 - protein, 147 aa, Neisseria meningitidis; identical to SEQ ID NO: 4898

SEQ ID NO: 7889 - protein, 65 aa, Neisseria meningitidis; identical to SEQ ID NO: 3913

SEQ ID NO: 7890 - protein, 267 aa, Neisseria meningitidis
MADILPSDKRRQPPKTKGSTMNIIEQEMKHSSLRKIDAEIAKIIADAHKINAESVKIAQESRWYPMIAATGLVTAIAAVLALIFKFAPQAPRGALSHEQNEQSRTIQPLPRMDYRARRRKPFHYPLPLSPPDCQNPQADRRRMPGQALPPFRKRHHPLRFYFFRRQTGRRSPICRHPYRNLPPGSQKNMRNKINRNDMELGYTPYNLRTLRNRCKLTQAELAQIVGVKHYIQVGRWEAEPDTETRRADMPLEKWRQFLDWIEKTNAV

SEQ ID NO: 7891 - protein, 326 aa, Neisseria meningitidis
MAMAENGKYLDWAREVLHAEAEGLREIAAELDKNFVLAADALLHCKGRVVITGMGKSGHIGRKMAATMASTGTPAFFVHPAEAAHGDLGMIVDNDVVVAISNSGESDEIAAIIPALKRKDITLVCITARPDSTMARHADIHITASVSKEACPLGLAPTTSTTAVMALGDALAVVLLRARAFTPDDFALSHPAGSLGKRLLLRVADIMHKGGGLPAVRLGTPLKEAIVSMSEKGLGMLAVTDGQGRLKGVFTDGDLRRLFQECDNFTGLSIDEVMHTHPKTISAERLATEALKVMQANHVNGLLVTDADGVLIGALNMHDLLAARIV

SEQ ID NO: 7892 - protein, 293 aa, Neisseria meningitidis
MPSEKTLFPLPDTLLRPIVEQALSEDLGRRGDITSAAVIAPDKTAKLFLVSREDGVIAGMDLARLAFQTMDPSVRFQAEIRDGQAVRAGQTLAAVEGNARALLAAERTALNYLTHLSGIATATARAVAEVAEYGTDIVCSRKTIPLLRVLQKYAVRAGGGVNHRMGLDDAVLIKDNHLAYCGSIAQAVQQAKQAVGALTCVEIEVDTLAQLDEAIAAGAERILLDNMDDETLKEAANRCHTQTAHPHTIYCEASGGIGFDRLKRVAQTGVDGIALGYLTHSSRSLDIGLDFVA

SEQ ID NO: 7893 - protein, 144 aa, Neisseria meningitidis
MKKQISSAVMMLSMIAPAMANGLDNQTFENQVFHTQADAPMQLAELSQKEMKETEGEWIPNAVGGIMGGVGGHFSYMASAIASGSYNRNEHWTAIGGGALIGAMNPINGGRALINGMRGVAVGTVAGGINGYAGSTGKNTDIRR

SEQ ID NO: 7894 - protein, 100 aa, Neisseria meningitidis; identical to SEQ ID NO: 1890

SEQ ID NO: 7895 - protein, 92 aa, Neisseria meningitidis
MKTLVLLLLSFSTTTAFAAYGLGLGQAPKYPAGFRAYGYVYSGRQGVLKTEADAIKLDTLFKRFVYRPSAANQNPVGQRSDGIPANHTKEKP

SEQ ID NO: 7896 - protein, 73 aa, Neisseria meningitidis; identical to SEQ ID NO: 3916

SEQ ID NO: 7897 - protein, 72 aa, Neisseria meningitidis
MSMPEIPKWYDDDGQIVSCTEKIKVMSENMAELYQTAQDAFEDALLMGCGERQLRDYLLALIEGLENPYRKV

SEQ ID NO: 7898 - protein, 97 aa, Neisseria meningitidis
MTAMPSEPPFRRHFTHQNRKTAPKIIITKHNGKPDTKPNTAAKMPSEAVGATILIWGPLQGRITFLNHPFDSQINSAFACQKQNQYFAVRIGTFIVD

SEQ ID NO: 7899 - protein, 67 aa, Neisseria meningitidis
MPSEAAWAFRRHFLRLKQRIGNPALPVHGNLHLKTICIPNHTPIPVSIMCTLSVLGNHLFFAYNSRI

SEQ ID NO: 7900 - protein, 65 aa, Neisseria meningitidis; identical to SEQ ID NO: 1894

SEQ ID NO: 7901 - protein, 53 aa, Neisseria meningitidis
MKISALDHLVLTVADIDRTIAFYSELNLNRYSVGSPCRTICTVCGSPPCPDFC

SEQ ID NO: 7902 - protein, 97 aa, Neisseria meningitidis
MEEVSFGSDRKALLFGSQKINLHGRGAEIQPNAQHAACGTADLCLLTDTPLETVLQELSAHGIKPLSGIVARTGAMGKIQSVYLRDPDGNLLEISSY

SEQ ID NO: 7903 - protein, 74 aa, Neisseria meningitidis; identical to SEQ ID NO: 3918

SEQ ID NO: 7904 - protein, 177 aa, Neisseria meningitidis
MFPPDKTLFLCLSALLLASCGTTSGKHRQPKPKQTVRQIQAVRISHIDRTQGSQELMLHSLGLIGTPYKWGGSSTATGFDCSGMIQFVYKNALNVKLPRTARDMAAASRKIPDSRLKAGDLVFFNTGGAHRYSHVGLYIGNGEFIHAPSSGKTIKTEKLSTPFYAKNYLGAHTFFTE

SEQ ID NO: 7905 - protein, 109 aa, Neisseria meningitidis
LINMKTSTVVFGGFFMADNGERIQIPVLENPDIREINHFFSVSNFEKKTGVLVFRIIPEPEFGNTELTVYFKKGYYSGLTKTSTALPRLAVLVFVNPLYQTKTNTRANS

SEQ ID NO: 7906 - protein, 410 aa, Neisseria meningitidis
MPSAHYPEMSEKLMAVLMAMLVTLMPFSIDAYLPAIPEMAQSLNADVHRIEQSLSLFMFGTAFGQVVGGSVSDIKGRKPVALTGLIVYCLAVAAIVFVSSAEQLLNLRVVQAFGAGMTVVIVGAMVRDYYSGRKAAQMFALIGIILMVVPLVAPMVGALLQGLGGWQAIFVFLAAYSLVLLGLVQYFLPKPAVGGKIGRDVFGLVAGRFKRVLKTRAAMGYLFFQAFSFGSMFAFLTESSFVYQQLYRVTPHQYAWAFALNIITMMFFNRVTAWRLKTGVHPQSILLWGIVVQFAANLSQLAAVLFFGLPPFWLLVACVMFSVGTQGLVGANTQACFMSYFKEEGGSANAVLGVFQSLIGAGVGMAATFLHDGSATVMAATMTASTSCGIALLWLCSHRAWKENGQSEYL

SEQ ID NO: 7907 - protein, 336 aa, Neisseria meningitidis
MHIGGYFIDNPIALAPMAGITDKPFRRLCRDFGAGWAVCEMLTSDPTLRNTRKTLHRSDFADEGGIVAVQIAGSDPQQMADAARYNVSLGAQLIDINMGCPAKKVCNVQAGSALMQNEPLVAAILEAVVRAAGVPVTLKTRLGWHDDHQNLPVIAKIAEDCGIAALAVHGRTRTQMYKGEARYELIAETKCRLNIPVWVNGDITSPQKAQAVLKQTAADGIMIGRGAQGRPWFFRDLKHYAEHGVLPPALSLAECAAAILNHIRAIHAFYGDTAGVRIARKHIGWYIDEMPDGEQTRREINRLDSAAAQYDMLAGYLERLAEKTDSWACAYRPNAF

SEQ ID NO: 7908 - protein, 99 aa, Neisseria meningitidis; identical to SEQ ID NO: 3688

SEQ ID NO: 7909 - protein, 68 aa, Neisseria meningitidis; identical to SEQ ID NO: 531

SEQ ID NO: 7910 - protein, 86 aa, Neisseria meningitidis
MPSPRPSPTGEGEGCSRFCGCRRFERQLRFAAVVSGHLKNKKQPAQPVFLAKPLIPTATTSSLPWERVRERATNCKAYTNSNPTTE

SEQ ID NO: 7911 - protein, 451 aa, Neisseria meningitidis
MSSPSNTNRQTWSSRLTYILTVAGATVGFGATWRFPYLVGENGGAYVFLFCIAMLVIGIPMILVENVIGRRKGVNALDAFGGPMNGKPIAKIWKLVGWMGFGAFGIMAYYMVLGGWVISYIVNIIGGNLNISSPVDGVVTKGFFAEHIDSPWEIAFYTLLFVAVNQWILVKGVIGGIEKAAKLMPLLFLFLIAMVVRNVTLPGAMEGVAFYLKPDFSKITAELFVFVLGQVFFALSLGFGVMITLSSYLDKNENLVQTAVITAITNTIIAILAGFMIFPSLFSFGVAPDSGPTLVFQSLPIVFSHMWAGSVFAVIFFSLLLIAALTTSLTIYEVLITTIQEKTKIRRTAAITIVLAAIFIFGNIPSILSYGPWKDVLFGKNIFDAFDYISGNILFMLTALGSALFAGFVMKDEAKDELLYKGNHTTVNIWFAYVKYLVPLVILLIFVSNLF

SEQ ID NO: 7912 - protein, 139 aa, Neisseria meningitidis
LSYNNEGLMSVGQVREIFERFGKYNLVQTEYRRFKADKTENRNHKANSIFEYLHETFAKIVCRNLTHKNAPKNFQLPKTFLILSKKEKSEKFCILKMRLSIKFPMLLQRSLHILEKTFYSGLTKTSTALPRLSSKRTIL

SEQ ID NO: 7913 - protein, 357 aa, Neisseria meningitidis
MRPFFVGATVLAILGALVFFISPGAVVLHRQIFLELMLPAAYGGFLTAALLDWTVFSGNLKPVATLMAALLLAASAILPFSPQTASFFVAAYWLVLLLFCARLIWLDRNTDNFALLMLLAAFTVFQTAYAVSGDLNLLRAQVHLNMAAVMFVSVRVSILLGAEALKECRLKDPVFIPNVVYKNIAITFLLLHAAAELWLPAQTAGFTALAVGFILLAKLRELHHHELLRKHYVRTYYLLQLFAAAGYLWTGAAKLQNLPASAPLHLITLGDMMGGVMMVWLTAGLWHSGFTKLDYPKLCLIAVLLLFMAAVSRAFLMNVNPIFFITVPAILTAVVFTLYLFTFVPIFRANAFTDDPE

SEQ ID NO: 7914 - protein, 335 aa, Neisseria meningitidis
MIFSIIVPIYNVENLRCCVDSVLAENFADYEMILVDDGSPDGCGKICDEYAGKYPHIKVIHQENGGLSDARNAGIRAAKGDYLIFLDSDDYWADTNRSKNGGGILFDLQQLADKKVDLILHPSSFNYRDIPKGADFSDNDFVRHFETLVEGRYYIANAWTKIVRREIIIKNNLFFPKGYIHEDFPYSLQLARFIKTFAFYDNPFYQYRVLGGSISHNIKYKNFSDVLTHLDWGVDFLVENKNSPIYGGLQKFVFDNIGYLRSILVRLYFSKNIILIYRKYFSFKEKCRKIFGAKAIRPVFIGKTAFIIGLPILRLLVPPMLYPAIKAVYQKFFSE

SEQ ID NO: 7915 - protein, 218 aa, Neisseria meningitidis; identical to SEQ ID NO: 3932

SEQ ID NO: 7916 - protein, 390 aa, Neisseria meningitidis
MDLSIVVPIYNVESYLEACLSSIESILSNENVELILVNDGSKDGSEDICYKYIDKTTNNKQQTTNNKQQTTNNKQQTTNNKQQTTNNKQQTTNNKQQTTNNKQQTTNNKQQTTNNKQQTTNNKHRTPNIKYIYQDNQGLSEARNTGIKNSNGKYIVFIDSDDFINCQILLDFLSKDDTDMPDVVFLNAVKYDKGSVSYFGEDYQPEKILNQSKVEVLKGLCRFRKFPGSAWNKIIKRELIIREKLFFERGIYSEDIEWSMRLFNAATTFSYLDGCYYYYRQGRKDSITGTVSEKSIKSLLYILEKNAEMEFNRDISSYLYSFLSYEYLVLLFIMTSKNIECDADIKRRAYHLRFMLLKSNKLIYKLIFPIITLLGVDITGRILKAIRGNI

SEQ ID NO: 7917 - protein, 350 aa, Neisseria meningitidis
VFETPTFEQIRERILRDTKSLWPDADISPDSDHYVHASRLASCAEGQYAHQSWIVRQIFPDTADREYLERHASMRGLSRRNPTTASGTLTVSGIAQSMLSDDLQVRIGQRFYRTTARAVIGSGGTAEIPAIADEPGAAANVDGEAQLMAAPAGVATECRLTVQGGTDRESDASLLARLLEIIRRPPAGGNRYDYKNWALSVDGVTSAYVYPLRRGLGTVDIAITSADGVSSEETVRRVQAYIDEMRPVTAKNALVLKPTVTAVPVTVQVKLDGIDLDEAKRRIRTALKEYFDTLIPGDGLTVSQIEAAISNVDGVIDRRLTAPTANRAADTVNRIEWFKAGAINVTEMPS

SEQ ID NO: 7918 - protein, 350 aa, Neisseria meningitidis
MKLKIDIATNNFKHGGGTERYTLDLVKGLNRQNITPAVYATKFDHSIPEYALIEPHLVDQHRTLKKLRSFLFSSRLAQTRKNSAAKLIACHHADYADLLICGGTHLGYLHHMAQKPNLLDRLAIRRNRSNYATAKLIMAHSHMMRRELVGLYGVPPERIQVAPPPADTERFFPQPGETADLRAKYGFADHETVFLFPSTGHTRKGLELLADFFEHTSLPVKLAVVGSPLPRPMKNVVGLGFCTDMPELYRAADFTIMASLYEPFGLVGVESVLCGTRVVLSENMACTEVMNEEAGFFFSRQNPETLAQAVAQAVSLKKQGGHRLSDPMRALNYNPALDKHIGLILEMLAA

SEQ ID NO: 7919 - protein, 169 aa, Neisseria meningitidis
MKRTKKYPFLTLQRQRFHLNFENASSAAGIPAERDFYRWAWSALKNEYRRADISLILLDEEEARAYNRDYRGKDYATNVLSFALNEGEILPCQVSEKLYGDLIICPQVVLKEAAEQGKTPEQHFAHLTIHGTLHLMGYDHIEDDEAEIMEAEEIRLMRAAGFPNPYQED

SEQ ID NO: 7920 - protein, 235 aa, Neisseria meningitidis
MDTFLDRLKFLWPHGAKPSDIYNKIEMSASGFNRVWKEGAIPTADYLVKIHCDLNWLLTGKGLPYLDKARPENAGAFSVSRNSDGITDTMGNPVDLSEFVFVPRYNVAAAAGYGAPVFGEEPLFCLAFRKYWIDNYVTKQPEKLSVITVKGDSMEGVLNHEDSILINHAETDPRDGLYVLRIGNDLFVKRVQRIPGKLLVTSENPRYAPFEIDLSNAQDDIAIIGRVEWYGRSID

SEQ ID NO: 7921 - protein, 705 aa, Neisseria meningitidis
MGKANAFTAPITVVNYDEQALNNTEARTLVDAVAKKDASVWQFGGESNTLTGLYFRGYQLDSRQFSVNGLAGMYGTQGTASVQVGSAQLIKGASTAVNGMDPEGAVSGSVNIETKKAADEGNRKIGLGWFSNNRAQGTFDLGQRFGENKAFGVRANGKLRHGDTPRHGYSEDNKEFAVNADYRGETLRVAFDSIYAKRKTNGGRARMQDIQNAGGRLFGAPDGKTNLLPSWNWQNTAGQTNMLTFEWDAFDNAQITGGIGYNKARYYGTLISPTVCLNATSTCTDMQNTNASGKVTARNYDYNTGTARLTDQYFRTLSMNLTARGEFETGPVTHNWSMAFDRVIRQRKTINGSGNGNSKIEVKANENIANQLASFTADYPNSWENSANLDANIKVNSLALSDTLGFVDNKYRLTLGGRFQTVEYTDKKSQSGDAKRFSPMLMAAWVPQPDLVVYGNYMEDLEPADIKTDDSGETTMAKPRVSRQFEVGVRKNWGNFVTTLNAFQIKRPYWRGHTTTKTTKGVTTTLTYGNNSDFARYKAQGGVAGDEQGMERNRGIEFNAYANLLNKTLRPTLGLMYLQSTVKEYPNSRDMLVNGVQVANPRVIAKAGLEWDTPFAKGLTLNGNVSYFGKSDQDTQKQYAFPSYTLIDVGARYKTKLGKNTLTVSSSVENLFNKNYWQVQRGQYDRSFAVVGMPRTYWLKAELDF

SEQ ID NO: 7922 - protein, 433 aa, Neisseria meningitidis
MWTGFFSKSGTGIAEERHQNRRACTDVPLLAERNSKHPDRPLRFCKIWIKFKPVQRCLALPYYLYCLRLRRLVLIFVNPLYRQSGLDIYAWHGMYFFPRFPFIDIDRIRWVCAGLKAFKHYIRENGLPDLIHAHCMNYAGILAFKISQKYGIPYVVTEHSSTITRGLVRPHQWQPMKNAAAHAAARLAVSRHFAHVLQHKYGCEWQYLPNILGGIFNRPFEQREKNNKPHFVFCTVSHLRRLKGHDVLLTAFARALAQCPQLRLNIGGSGQEEQRLKQQAADLGITHAVTFLGALQPEAVLDLMRNSDAFVLASRTETFGVVYIEALSQGLPVIATRCGGAESIVSDGNGYLVPVDDDDALADALIKMCEHHSDFEPARLRENCLNEFGENAVIGRLIGIFRQAIAEYGKKIPVKYSGLTKIRTRRRSRRQYK

SEQ ID NO: 7923 - protein, 320 aa, Neisseria meningitidis
MQARLLIPILFSVFILSACGTLTGIPSHGGGKRFAVEQELVAASARAAVKDMDLQALHGRKVALYIATMGDQGSGSLTGGRYSIDALIRGEYINSPAVRTDYTYPRYETTAETTSGGLTGLTTSLSTLNAPALSRTQSDGSGSKSSLGLNIGGMGDYRNETLTTNPRDTAFLSHLVQTVFFLRGIDVVSPANADTDVFINIDVFGTIRNRTEMHLYNAETLKAQTKLEYFAVDRTNKKLLIKPKTNAFEAAYKENYALWMGPYKVSKGIKPTEGLMVDFSDIRPYGNHTGNSAPSVEADNSHEGYGYSDEVVRQHRQGQP

SEQ ID NO: 7924 - protein, 136 aa, Neisseria meningitidis
MIDVKIDNIFVVLNQIERLGNGIENRYLLMRRLSETMHTAVKLNFRYAGRPKWLGYRDGKPLSDSGRLKDSFSTLSDNDTALVGTNIVYAAIHNFGGMAGRNRKVRIPQREFLTLTDDDKQALMDDVQDYFSGLIP

SEQ ID NO: 7925 - protein, 707 aa, Neisseria meningitidis
LKGAQLIGKGIQADTRNLHIESVQDTETYQSKQQNASAQVTVGYGFSASGDYSQSKIRADHASVTEQSGIYAGEDGYQIKVRDNTDLKGGIITSSQSAEDKGKNLFQTATLTHSDIQNHSRYEGKSFGIGGSFDLNGGWDGTVTDKQGRPTDRISLAAGYGSDSDSQSSITKSGINTRNIHITDEAGQLARTGRTAKETEARIYTGIDTETADQHSGRLKNSFDKDAVAKEINLQREVTKEFGRNATQAVAAVADKLGNTQSYERYQEARTLLEAELQNTDSEAEKAAFRASLGQVNAYLAENQSRYDTWKEGGIGRSILHGGAAIGYAAGGNVGTAAVGANVDWNNRQLHPKETQILNKLSKGKSAEEQYRLKAAACALTRCAEGVPDFDPLYKGLKNLQDAGKQFVAEQNVLMRTDAFKYGTWNSLNDIRSSYDRAATKIKGAGNMGLGATTFVGSGAIGGGLCSTGIGCAAGGLIATAGMTGGYTQASEGSRQLFGTYQSDFGKKVVLSLGTPIEYESPLVSDAKNLAVWGLETLITRKLGNLATGVKTSLTPKTADVQRNILSQSEVGIKWGKGIEGQGMPWEDYVGKGLSANARLPKNFKTFDYFDRGTGTAISAKTLDTQTTARLSKPEQLYSTMKGYIDKTANFKSYELSEVPLRADMIKQREIHLAIPAQTNKEQRLQLQRVVEYGKSQNITVKITEIE

SEQ ID NO: 7926 - protein, 133 aa, Neisseria meningitidis
MRKSRLSRYKQKLIELFVAGVTARTTAELVGVNKSTAAYYFHRLRLLIYQNSPHLEMFDGEVEADESYFAERQNHINGIENFWNRAKRHLRKFDGIPKAHFELYLKGYERRFNNSEIKVQISILKQLVKSSLS

SEQ ID NO: 7927 - protein, 659 aa, Neisseria meningitidis
MSQLANAIRFLSADAVQKANSGHPGAPMGMAEMAETLWTKFLNHNPANPKFYNRDRFVLSNGHASMLLYSLLHLTGYNLSIEDLKNFRQLHSKTPGHPEYGYTDGVETTTGPLGQGIANAVGMALAEKILAAEFNKDGLNIVDHYTYVFMGDGCLMEGVSHEACSLAGTLGLGKLIVLYDDNNISIDGKVDGWFTENIPQRFESYGWHVVPNVNGHDTAAIQAAIEAARAETGKPSIICYKTLIGKGSANKEGSHKTHGAPLGADEIEATRKHLGWTYPAFEIPQEIYDAWNAKEQGAKLEADWNELFAQYQAKYPAEAAEFVRRMDKKLPDNFDEYVQAALKEVCAKAETIATRKASQNSIEILAKELPELVGGSADLTPSNLTDWSNSVSVTRDKGGNYIHYGVREFGMGAIMNGLVLHGGVKPFGATFLMFSEYERNALRMAALMKINPVFVFTHDSIGLGEDGPTHQPIEQTATLRLIPNMDVWRPCDTAESLVAWAEAVKAADHPSCLIFSRQNLKFQARSEQQLNDIKRGGYVISEAQGNAQAVIIATGSEVELALEAQKALAAQNIAVRVVSMPSTNVFDRQDAAYQAAVLPEGLPRIAVEAGHADGWYKYVGLNGAVVGINRFGESAPADLLFKAFGFTVDNVVDTVKSVL

SEQ ID NO: 7928 - protein, 117 aa, Neisseria meningitidis
VITLRIVWAVANRAKRPQSDCKAAAAGHGILYLLMLAVPVIGMIRQYGSGRGPLKVFGVEVMQGSPEKIEWMANLGNTFHGNLGLLLFAAVAGHVAMVVAHRVQGRDVLCRMTGRVR

SEQ ID NO: 7929 - protein, 723 aa, Neisseria meningitidis
MNTPLFRLSLLSLTLAAGFAHAAENNAKVVLDTVTVKGDRQGSKIRTNIVTLQQKDESTATDMRELLKEEPSIDFGGGNGTSQFLTLRGMGQNSVDIKVDNAYSDSQILYHQGRFIVDPALVKVVSVQKGAGSASAGIGATNGAIIAKTVDAQDLLKGLDKNWGVRLNSGFASNEGVSYGASVFGKEGNFDGLFSYNRNDEKEYEAGKGFRNFNGGKTVPYSALDKRSYLAKIGTTFGDGDHRIVLSHMKDQHRGIRTVREEFTVGDASSRTNITRQAPSYRETTQSNTNLAYTGKDLGFVEKLDANAYVLEKKRYSADDKDNGYAGNVVGPNHTRITTRGMNFNFDSRLAEQTLLKYGINYRHQEIKPQAFLNGEFEISGKKKDPKDPKKEIDKTDEEKAKDKKDMDLVHSYKLSNPTKTDTGAYIEAIHEIDGFTLTGGLRYDRFKVKTHDGKTVSSSNLNPSFGVIWQPHEHWSFSASHNYASRSPRLYDALQTHGKRGIISIADGTKAERARNTEIGFNYNDGTFAANGSYFWQTIKDALANPQNRHVSAAVREAVNAGYIKNHGYELGASYRTGGLTAKVGVSHSKPRFYDTHPKKLLSANPEFGAQVGRTWTASLAYRFQNPNLEIGWRGRYVQKAVGSILVAGQKDRNGKLENVVRKGFGVNDVFANWKPLGKDTLNVNLSVNNVFNTFYYPHSQRWTNTLPGVGRDVRLGVNYKF

SEQ ID NO: 7930 - protein, 702 aa, Neisseria meningitidis
MTLKASKQASKQASKQASKQASGRVNLLTLSVLSLFCTPYVGSDAYDPVKEAEIKNKFILEAAEDRNSHVWRGPCSISFDCFGMFRAQLGSNTRSTKIGDDADFSFSDKPKPGTSHYFSSGKTDQNSSEYGYDEINIQGKNYNSGILAVDNMPVVKKYITEKYGADLKQAVKSQLQDLYKTRPEAWAENKKRTEEAYIAQFGTKFSTLKQTMPDLINKLVEDSVLTPHSNTSQTSLNNIFNKKLHVKIENKSHVAGQVLELTKMTLKDSLWEPRRHSDIHTLETSDNARIRLNTKDEKLTVHKDYAGGADFLFGYDVRESDEPALTFEDKVSGQSGVVLERRPENLKTLDGRKLIAAKTADSGSFAFKQNYRQGLYELLLKQCEGGFCLGVQRLAIPEAEAVLYAQQAYAANTLFGLRAADRGDDVYAADPSRQKLWLRFIGGRSHQNIRGGAAADGWRKGVQIGGEVFVRQNEGSRLAIGVMGGRAGQHASVNGKGGAAGSDLYGYGGGVYAAWHQLRDKQTGAYLDGWLQYQRFKHRINDENRAERYKTKGWTASVEGGYNALVAEGIVGKGNNVRFYLQPQAQFTYLGVNGGFTDSEGTAVGLLGSGQWQSRAGIRAKTRFALRNGVNLQPFAAFNVLHRSKSFGVEMDGEKQTLAGRTALEGRFGIEAGWKGHMSARIGYGKRTDGDKEAALSLKWLF

SEQ ID NO: 7931 - protein, 517 aa, Neisseria meningitidis
MDFSWLAEPHTWIGFATLLVLEVVLGIDNLVFVAILANKVQPARRDRARIIGLGLAVVIRIIMLAFMAHIITLTEPLFQIGGLAVSGKDMIMLAGGIFLLYKATTELHERLEGHNRFTVADSQKHAPFWGVVAQILILDAVFSIDSVITAVAMVDHIVVAMGAVVVAMAVMISASKLLTEFVDRHPTVVMLCLGFLLMIGFSLIAEAFHFHIPKGYLYAAIGFSILIELFNQISQRNSRKNDYIGSSWRKRTAENVLGMMGIRESVLADAGGESGDDAHFEENEKSMIRSVLTLAERPIMGVMIPRRDIERLDISQSREEQCAQLQNTPYSRLLVVGKAGVDEPLGYINKKDLLSQLLETGGLDIQTALRQPLVLPDSTTALGAIELFRQSSADYALVVDEFGAVLGMVTMKDLLETIAGEFPEEFEREEEPAVQGNPDESLTVEGALEYVELAPQLNLPQQEEDADFHTVAGLIMEELQTIPDVGDFADFHGWRFEVVEKEGQRIERVKITKLPEE

SEQ ID NO: 7932 - protein, 679 aa, Neisseria meningitidis
MKLEASKQASKQQKFKKSFIVSLFFSILYTSPLLAVDYVYDKTKLTNDEITRLKKLRDKTSEYWKKETYLITEDNPKVPPFPALYPRTYQFENINNSKKISFYDQEYTEGYLVGFARGLGVAKRNGDTEEQIRKYFKECFNSNTKIRDYSTCQAEKFGSHPLIVKSHIFSLGPKIKNSHINSEILSVGNYTEWANQVIHHIENYVSFAAHLYSGLDPFHYIEVTDNSHVIGQTISLDEFRLENSLWEPRWDSNVGKLKTTNADIRFNTKSESLLVKEDYAGGARFRFAYDPKEAKNTALIFEKNVTGTSDIIFENPIDDLKSLDGHQIIKVNGTADKHAFRLSGKHQKGIYTLSLQQRPEGFFTKVQERDDMAIYAQQAQAANTLFALRLNNKNSDIFDRTLPRKGLWLRVIDGHSNQWVQGKTAPVEGYRKGVQLGGEVFTWQNESNQLSIGLMGGQAEQRSTFHNPDTDNLTTGNVKGFGAGVYATWHQLQDKQTGAYADSWMQYQRFRHRINTEDGTERFTSKGITASIEAGYNALLAEHFTKKGNSLRVYLQPQAQLTYLGVNGKFSDSENAHVNLLGSRQLQTRVGVQAKAQFSLYKNIAIEPFAAVNALYHNKPFGVEMDGERRVINNKTAIESQLGVAVKIKSHLTLQATFNRQTGKHHQAKQGALNLQWTF

SEQ ID NO: 7933 - protein, 686 aa, Neisseria meningitidis
MLPTQPNPTQPNPTQPNPTQPNPSPDLSDTAGANTEAIYTSDGITANSTQLEQLKKLFPACFDADGNFLIDRLQAEIAPQTDIGREFYEMNWLGKSYARLLRNLPPETLISEDKTHNAKPENAGSQNLLIRGDNLEVLKHLKNAYTNSVKMIYIDPPNTGSDGFVYQDDRKFTPAELARLANIDEDEAARILDFTDKGSNSHSAWLTFMYPRLYVARELLKDDGVIFISIDDNEAAQLKLLCDEVFGEGNFVAQLPWRKRTAKSDVPFGISQDYEWIFVFAKSCQFIAATKGKERRYYETDDFPDRPWRTHDLTKQTTAAERPNSFFTMVDPKTGKKYPANPNATWRVTKDTFQDYYNKGKIVFPDDYDFLNISNPVMRYFKDDDMKKAGEDFGKVAVSSRLPENVGTLADAVAEYLAIFSRTLPENIGMTKEGTKEITDLFGSKIFTFPKPSQLIKFLVSISSKSNDLILDFFAGSGTTAHAVMQLNAEGQNGNRRYICVQLPEKTAEKSEARKAGYPTIFDITKARIEKAAAKIRVEHPDYTGDSGFKIFQTADNFRQHPDKDFSPEQPDLPLNDELSEEQLQTLLTTWTLYDGAALTTPVEPVRLGAYTAYLCEKRLYLMNAGFTSADLLAFIRKLDDDADFNPNRVIVFGSNMASAMQHELDQAVRGYANKKEIELNVVIRV

SEQ ID NO: 7934 - protein, 98 aa, Neisseria meningitidis
  misc_feature 3, 4: 'Xaa' is any amino acid
VCXXGYGDETDSTVLELTHNWDTERYDLGNAYGHIAVEVDDAYEACERVKRQGGNVVREAGPMKHGTTVIAFVEDPDGYKIEFIQKKSGDDSVAYQTA

SEQ ID NO: 7935 - protein, 289 aa, Neisseria meningitidis
VKASSPETILEKTVAEVQTPEELHDFLKVYETDAVAETAPETPDFNAAADDLSALLQPAEAPSVEENITETVAETPDFNATADDLSALLQPSKVPAVEENAAETVADDLSALLQPAEAPAVEENVTETVAETPDFNATADDLSALLQPSEAPAVEENAAETVADDLSALLQPAEAPAVEENAAEITLETPDSNTSEADALPDFLKDGEEETVDWSIYLSEENIPNNADTSFPSESVGSDAPSEAKYDLAEMYLEIGDRDAAAETVQKLLEEAEGDVLKRAQALAQELGI

SEQ ID NO: 7936 - protein, 1277 aa, Neisseria meningitidis
MTTTTAPQRIREIPYNYTSYTDREIVIRLLGDEAWQILQDLRGQRKTGRSARMLFEVLGDIWVVVRNPYLVDDLLEHPKRRAALVREMRHRLNEIRKRRDDNRQVDVLVAAAEKAVERFDSSFDETSQKRRQILERLSKITKPHNIMFDGLARVTHVTDATDWRVEYPFVVVNPDTEAEVAPLVRALIELDLVIIPRGGGTGYTGGAIPLDAMSAVINTEKLDKHRGVEYVELAGLDGKHPIIRCGAGVVTRRVEETAHQAGLVFAVDPTSADASCVGGNVAMNAGGKKAVLWGTALDNLAYWQMVNPQGEWLRIERVRHNFGKIHDEETAVFDVHTLDSDGLNIVKTERLEIPGHKFRKVGLGKDVTDKFLSGLPGVQKEGTDGIITGVAFVLHKMPKYTRTVCMEFFGTVATATPSIVEIRDFLLAHDSVRLAGLEHLDWRYVRAVGYATKAAGKGRPKMVLLADVVSDDEAAVEAAAEHICELARARDGEGFIAVSPEARKTFWLDRSRTAAIAKHTNAFKINEDVVIPLERLGEYSDGIERINIELSIQNKLKLCAALEQYLSGKLPIDKMGTDLPTAELLGERGKHALAHVAAVKERWDWLLANLDTPLADYKARYGAAVHAAPEAKDNESCFTAFRDFRLRVSVKADVMKPLAEIFSGKTDTKIIQGLGKIHAKTVRGRVFVALHMHAGDGNVHTNIPVNSDDAEMLQTAYRSVERIMKIARSLGGVISGEHGIGITKLEFLSDEEMQPFWDYKNQVDPKHTFNRHKLMKGSDLRNAYTPSFELLGAESLIMEKSDLGTIADSVKDCLRCGKCKPVCSTHVPRANLLYSPRNKILGVGLLTEAFLYEEQTRRGVSVKHFEELMDIGDHCTVCHRCVKPCPVNIDFGDVTVAVRNYLADSGHKRFAPAAAMGMAFLNATGPKTIKALRAAMIQTGFPAQNFAYKIGKLLPIGTKKQKAEPKATVGKAPIKEQVIHFINRPLPKSVPAKTPRSLLGIEDGKSIPIIRNPAAPEDAEAVFYFPGCGSERLFSQIGLAVQAMLWHVGVQTVLPPGYMCCGYPQDAGGNKAKAEEMSTNNRVAFHRMANTLNYLDIKTVVVSCGTCYDQLEKYRFEEIFPGCRIIDIHEYLLEKGVKLDGVQGQQYLYHDPCHTPIKTMNATQMASSLMGQKVVLSDRCCGESGMFAVKRPDIATQVKFRKQEEIEKNLKELPQGEPVKMLTSCPACLQGLSRYTDDNNMPADYIVIEMAKHILGENWLDEFVKKANNGGVEKVLL

SEQ ID NO: 7937 - protein, 239 aa, Neisseria meningitidis
MATLSDKTILVTGASQGLGEQVAKAYAAAGATVILVARHQKKLEKVYDAIVEAGYPEPFAICFDLISAEEKEFEHFAATIAEATQGKLDGIVHCAGYFYALSPLDFQTVAEWVNQYRINTVAPMGLTRALFPLLKQSPDASVIFVGESHGETPKAYWGGFGASKAALNYLCKVAADEWERFGNLRANVLVPGPINSPQRIKSHPGEAKSERKSYGDVLPAFVWWASTESKGRSGEIVYL

SEQ ID NO: 7938 - protein, 377 aa, Neisseria meningitidis; identical to SEQ ID NO: 997

SEQ ID NO: 7939 - protein, 303 aa, Neisseria meningitidis
MVHIMFNQAAQELTTIRDILRFAVSRFNEAGLFFGHGTDNAHDEAAYLILHTLNLPLDMLAPYLDAKLLEAEKEEVLAVIERRAVEHIPAAYLTHQAWQGEFDFYVDERVIIPRSFIYELLGNGLRPWIEYDELVHNALDLCTGSGCLAIQMAHHYPDAQIDAVDVSLDALEVAGINVEDYGLEERIRLIHTDLFEGLEGTYDLIVSNPPYVDAESVELLPEEYLHEPELALGSGADGLDATRQILLNAAKFLNPKGVLLVEIGHNRDVLEAAYPELPFTWLETSGGDGFVFLLTREQLLGEE

SEQ ID NO: 7940 - protein, 249 aa, Neisseria meningitidis; identical to SEQ ID NO: 2006

SEQ ID NO: 7941 - protein, 322 aa, Neisseria meningitidis
MTAKPFSLNLTNLLLLAVLFAVSLSVGVADFRWSDVFSLSDSQQVMFISRLPRTFAIVLTGASMAVAGMIMQILMRNRFVEPSMAGAGQSAALGLLLMSLLLPAAPLPVKMSVAAVAALIGMLVFMMLIRRLPPTAQLMVPLVGIIFGGVVEAVATFIAYENEMLQMLGVWQQGDFSGVLLGRYELLWATGILALFAYLIADRLTILGLGETVSVNLGLNRTAILWSGLIIVALITSLVIVTVGNIPFVGLVVPNIISRLIGDRLRQSLPAVALLGASLVLLCDIIGRVIVFPFEIPVSTVFGVLGTALFLWLLLRKPAYAV

SEQ ID NO: 7942 - protein, 375 aa, Neisseria meningitidis
MNTSQRNRLVSRWLNSYERYRYRRLIHAVRLGGAVLFATALARLLHLQHGEWIGMTVFVVLGMLQFQGAIYSKAVERMLGTVIGLGAGLGVLWLNQHYFHGNLLFYLTVGTASALAGWAAVGKNGYVPMLAGLTMCMLIGDNGSEWFDSGLMRAMNVLIGAAIAIAAAKLLPLKSTLMWRFMLADNLTDCSKMIAEISNGRRMTRERLEENMAKMRQINARMVKSRSHLAATSGESRISPAMMEAMQHAHRKIVNTTELLLTTAAKLQSPKLNGSEIRLLDRHFTLLQTDLQQTVALINGRHARRIRIDTAINPELEALAEHLHYQWQGFLWLSTNMRQEISALVILLQRTRRKWLDAHERQHLRQSLLETREHG

SEQ ID NO: 7943 - protein, 245 aa, Neisseria meningitidis; identical to SEQ ID NO: 4045

SEQ ID NO: 7944 - protein, 382 aa, Neisseria meningitidis
MPLPLPSPEARQFSLKLQTLIAEEIGKHGNWIPFSRFMELVLYAPQYGYYTGGSHKIGNTGDFITAPTLTSLFAQTLARQLQELLSQTAGNIYEFGAGTGQLAADLLGSISDGISRYYIIEISPELAARQKNLIQARAPEASQKVVHLTALPEAFDGIIIGNEVLDAMPVEIVRKNEGGSFEHVGVCLDNDRFTYSARPLHDLQLSALASLYFPQTDYPYTSELHPQQYAFIRTLASRLERGGMIFIDYGFDAAQYYHPQRNQGTLIGHYRHHVIHNPFDFIGLADLTAHVNFTDIAQAGTDAGLDLTGYLPQSHFLLNLGITELLAQVGKTDSPAYIREAAAVQKLIDQHEMGELFKVIAFGKNIGVDWAGFRFGDICHKL

SEQ ID NO: 7945 - protein, 145 aa, Neisseria meningitidis; identical to SEQ ID NO: 2247

SEQ ID NO: 7946 - protein, 348 aa, Neisseria meningitidis; identical to SEQ ID NO: 7414

SEQ ID NO: 7947 - protein, 157 aa, Neisseria meningitidis; identical to SEQ ID NO: 2553

SEQ ID NO: 7948 - protein, 81 aa, Neisseria meningitidis
MFQANIHQAKTNLSQLIQRAEAGEIVIIAKAGKPCVQLTGIEKPARNAGRLKKFSHMGNTDISRILEDDNETAALFEESAL

SEQ ID NO: 7949 - protein, 205 aa, Neisseria meningitidis; identical to SEQ ID NO: 2641

SEQ ID NO: 7950 - protein, 335 aa, Neisseria meningitidis
MSTFFRQTAQAMIAKHIDCFPLLKLDQVIDWQPIEQYLNRQKTRYLRDHRGRPAYPLLSMFKAVLLGQWHSLSDPELEHSLITRIDFNLFCRFDELSIPDYSTLCRYRNWLAQDDTLSELLELINRQLTEKGLKIEKASAVVVDATIIQTAGSKQRQAIEVDEEGQVSGQTTPSKDSDARWIKKNGLYKLGYKQHTRTDAEGYIEKLHITPANAHECKHLPPLLEGLPEGTTVYADKGYDSAENRQHLEEHQLQDGIMRKACRNRPLTEVQTKRNRYLSKTRYVVEQSFGTLHRKFRYARSTYFGLIKVSAQSHLKAMCLNLLKAANRLSAPAAA

SEQ ID NO: 7951 - protein, 150 aa, Neisseria meningitidis; identical to SEQ ID NO: 5989

SEQ ID NO: 7952 - protein, 60 aa, Neisseria meningitidis; identical to SEQ ID NO: 3237

SEQ ID NO: 7953 - protein, 119 aa, Neisseria meningitidis
MPRVKRGVTARARHQKIFALAKGYRGRRKNVYRVAKQAVMKAGQYAYRDRRQRKRQFRQLWIVRINAGARENGLSYSKFMNGLKRASIEIDRKVLADLAVFDKAAFAQLVEKAKSALAA

SEQ ID NO: 7954 - protein, 107 aa, Neisseria meningitidis; identical to SEQ ID NO: 150

SEQ ID NO: 7955 - protein, 39 aa, Neisseria meningitidis; identical to SEQ ID NO: 2850

SEQ ID NO: 7956 - protein, 273 aa, Neisseria meningitidis; identical to SEQ ID NO: 1044

SEQ ID NO: 7957 - protein, 268 aa, Neisseria meningitidis
MNPAPKNLLFSSLLFSSLLFSSAAQAASEDSSRSPYYVQADLAYAAERITHDYPKPTDANNTSTVSDYFRNIRAHSIHPRVSVGYDFGGWRIAADYAGYRKWNDNKYSVNTKEVLRNNSTGTENWQELKTENQENGSFHAASSLGLSAIYDFKLNDKFDKFKPYIGARVAYGHVKHQVHSVETETTTVFSKPKGTTVPGIISEKPISKPPYHESNSISSLGLGVIAGVGFDITPKLTLDTGYRYHNWGRLENTRFKTHEVSLGMRYRF

SEQ ID NO: 7958 - protein, 333 aa, Neisseria meningitidis
MQFPYRNVPASRMRRMRRDDFSRRLMREHTLTADDLIYPVFVLEGSAREEDVPSMPGVKRQSLDRLLFTAEEAVKLGIPMLALFPVVTANKTERAQEAYNPEGLVPSTVRALRERFPELGIMTDVALDPYTVHGQDGLTDENGYVMNDETVEVLVKQALCHAEAGAQVVAPSDMMDGRIGAIREALEDAGHIHTRIMAYSAKYASAFYGPFRDAVGSSGNLGKADKKTYQMDPANTDEALHEVALDIQEGADMVMVKPGLPYLDVVRRVKDEFGVPTYAYQVSGEYAMLQAAVANGWLDGDKVVLESLLAFKRAGADGILTYYAIEAAKMLKR

SEQ ID NO: 7959 - protein, 547 aa, Neisseria meningitidis
MNAFTRAWHALERHYQDTRHVLLRDRFACEPDRFERMHERLDGMLFDYSKNRLGEDTLQLLCNLADAADLEGKMRALRTGAKVNNSEGRAALHTALRLPDGAGAVYADGRDVLPEIRRELNRALKFAHSLDDGSYQGTTGKRITDFVHIGIGGSDLGPAMCVQALEPFRRHIAVHFAANADPACLDAVLCRLNPETTVFCVASKSFKTPETLLNAQAVKAWYRGAGFSESETACHFCAVSADTAAAAAFGIAAERVFAMYDWVGGRYSVWSPVGLPVMVAVGGARFRELLAGAHAMDSHFFHTPPRRNIPVLMALIAVWYNNFQHADGQTAVPYSHNLRLLPAWLNQLDMESLGKSRASDGSPAVCKTGGIVFGGEGVNCQHAYFQLLHQGTRLIPCDFIVPMTAQGVEEGRSRFTVANAFAQAEALMKGKTLDEARAELADLPEAERERLAPHKEFPGNRPSNSILLDRLTPYNLGMLMAAYEHKTFVQGTIWNVNPFDQWGVEYGKQLAKTIIGELEGGTSVHDASTEGLMAFYRECRLKGGGAA

SEQ ID NO: 7960 - protein, 279 aa, Neisseria meningitidis
MTATAAAIDRLLPQTQCRECGYDGCLPYAQAVATGEAYNLCAPGGETVIRDISALLGKPLVAPAKTQAKALARIDETACIGCTACIRACPADAIMGAGKLMHTVIADECTGCGLCVAPCPVDCIHMQPVADTVLPRARRFSLSADSRFAAAEHARARYLKRNERKQREADERKAMLAEREAAVRNARPQTPDTPKKPAFNPADLIAKAMAKAQTQQDRLAAADNRKDYQAKQIAEARERAELRRAQRDMKYGSDSEKAAALEYLKQYKAKQDAAQNTAS

SEQ ID NO: 7961 - protein, 278 aa, Neisseria meningitidis
MDKERILTPAVVFSVALLHLAMVALLWQAHKLPVIESGNVIEFVDLGDFGGGDGAPEGAGAPAAPEPQPEPEPPKPVEPPKPVLKPVVTKKADADIQQPKEEPKPEEKPKPEEKPKPEPKPEAKPVPKPAEKPVEKPSEKPAEHPSNASAKADSEQGNGEETGTKGDGTGRGEGSGKGSGGVKGEHGEGAGSSKGNPLRANGSIPRPAYPTLSMENDEQGTVVLSVLVSPGGHVESVKIVKSSGFSRLDNAARKAAQNGHFQANAWTEFKVPVKFELN

SEQ ID NO: 7962 - protein, 367 aa, Neisseria meningitidis
MNTTANPSNIIVGLSGGVDSSVTAALLKQQGYQVRGVFMQNWEDDDNDEYCSIKQDSFDAIAVADIIGIDIDIVNFAAQYKDKVFAYFLQEYSAGRTPNPDVLCNAEIKFKCFLDYAVGQGADTIATGHYARKEVRNGVHYLLKGLDRNKDQSYFLYRLKPFQLERAIFPLGGLEKPEVRRLAAEFNLPTAAKKDSTGICFIGERPFREFLQKYLPTDNGKMVTPEGKTVGEHVGLMFYTLGQRKGLGIGGAGEPWFVAAKDLTKNELIVVQGHDHPLLYTRSLVMNDLSFTLPERPKAGRYTCKTRYRMADAPCELRYLDEETAELVFDEPQWAVTPGQSAVLYDGDICLGGGIIQTTDKPVIITR

SEQ ID NO: 7963 - protein, 427 aa, Neisseria meningitidis; identical to SEQ ID NO: 146

SEQ ID NO: 7964 - protein, 287 aa, Neisseria meningitidis
MSEIGLVKIYFGKVRDLYEIDDKRMLMVASDRLSAFDVILDDPIPSKGEILTQISNFWFKKLVHIMPNHFTGQTVYDVLPENEAKALEKRAVVAKKLTPVKVEAIVRGYLAGSGWKDYQKTGSVCGIQLPEGMQEAQQLPEVIFTPSTKAAVGDHDENISFEECERIIGKELAAEVRAKAIQLYTEAAEYAKSRGIIICDTKFEFGLDTNGTLTLMDEVLTPDSSRFWPADQYKVGTNPPSFDKQFVRDWLEQSGWNKKAPAPKVPANVIQKTVEKYQEALTLLTQD

SEQ ID NO: 7965 - protein, 195 aa, Neisseria meningitidis; identical to SEQ ID NO: 3348

SEQ ID NO: 7966 - protein, 261 aa, Neisseria meningitidis
VRHISSTNNEHIRHLHRLLSQGKFRRQYAQTVLEGVHLLQVFLQSGGMPVGVYIPEGKMPSEEIRRLRAVVPEGRIFSVSDGILKKISSLSCADDILALIDIPLGGTLPDKGDCVVLDGVQDPGNVGTVLRSAAAAGVGTVVLGRGCADAWSPKVLRAGMGAHFLSGIYPQADLEIWLARYKGRVFATALREEKQAVLYGEDLCGPTAWVFGNEGAGVGKAVLDRADKCVRIPMHDATESLNVAMAATICLFEQMRQRSAY

SEQ ID NO: 7967 - protein, 112 aa, Neisseria meningitidis; identical to SEQ ID NO: 191

SEQ ID NO: 7968 - protein, 118 aa, Neisseria meningitidis; identical to SEQ ID NO: 2954

SEQ ID NO: 7969 - protein, 96 aa, Neisseria meningitidis
MPRLIVALFMALVPMLKDLFFKILAGLGASFVSYEALSLSTDAILKYFQNAYGNIPPDILNMFALAGIPEALNIIFGGFSFSFGIWSSYRVLKFLK

SEQ ID NO: 7970 - protein, 160 aa, Neisseria meningitidis
MSLLTLLRPATVQDCKDIFKVHLHSVQYTCILSYNEHALKVWEGLLNTESYLPTISDPDKALWVAEYKGNIQGFFQIDCQEAQLDALYVHPLFHNLGLGTALLHQAETIAHKSGLSFLKLYASLNSVPFYLLNRYESLGSAVLQLDPSIKIKCELMRKHL

SEQ ID NO: 7971 - protein, 524 aa, Neisseria meningitidis; identical to SEQ ID NO: 2756

SEQ ID NO: 7972 - protein, 67 aa, Neisseria meningitidis; identical to SEQ ID NO: 966

SEQ ID NO: 7973 - protein, 490 aa, Neisseria meningitidis
MNQTSRDLTRISHNTKIVATLGPGSNNVELLEDMIRVGGLNVVRFNFSHGTPEFHQENARIVREAAKRAGQEIAIIADLQGPKIRVGKIAGGGIELNKGETLLLDAALEGEGTREAVGLDYRDLPDDVAAGDVLWLDDGLLTLTVESVEGSRIITRVENSHVLKSNKGINKRGGGLSAGALTEKDFRDLKTAIAIGCDYLAISFVKSAEDLHIARAKVEEEMKGSTAVRPGLVSKIERVEAIENLDEIILAGDGIMVARGDLAVEVGHAAVPALQKRMIRRARELRRFSITATQMMESMITNPVPTRAEVSDVANAVLDGTDAVMCSAETAVGAYPFETVSQMAIICAAAEKEQDSLNGVAEQVEYPEAVSTNLAVAGGAVSVARAVHAKAIVALTESGSTAFEISRHNITLPIFALTPSVSAQRRMAMYRGVRPLILATSTDHDTALNEVETMLVEHNILHSGDQYIITSGSQMRESGSTNTLEVLRVK

SEQ ID NO: 7974 - protein, 333 aa, Neisseria meningitidis; identical to SEQ ID NO: 7659

SEQ ID NO: 7975 - protein, 796 aa, Neisseria meningitidis
MTEQKHEEYGADSIQVLEGLEAVRKRPGMYIGDTQDGSGLHHMVFEVLDNAIDEALAGHCDKITVTIHADHSVSVADNGRGMPTGIHPKEGRSAAEVIMTVLHAGGKFDNNSYKISGGLHGVGVSVVNALSDWVTLTIYRDGKEHFVRFVRGETEEPLNVVGDSDKKGTTVRFLASTETFGNVEYSFDILAKRIRELSFLNNGVDIELTDERDGKHESFALSGGVAGFVQYMNRKKTPLHEKIFYAFGEKDGMSVECAMQWNDSYQESVQCFTNNIPQRDGGTHLTALRQVMTRTINSYIEANEVAKKAKVETAGDDMREGLTCVLSVKLPDPKFSSQTKDKLVSGEIGPVVNEVISQALTDFLEENPAEAKIITGKIVDAARAREAARKAREITRRKGVMDGLGLPGKLADCQEKDPALSELYLVEGDSAGGSAMQGRDRKFQAILPLKGKILNVEKARFEKMLASQEVAALITALGAGIGKEEFNAEKLRYHRIIIMTDADVDGAHIRTLLLTFFYRQMPELVERGYIYIAQPPLYKAKYGKQERYLKDELEKDQWLLGLALEKAKIVSDSRTIEGEELANTAKQFLLAKTVIEQESRFVDELVLRAMLHASPIDLTSSENADKAVAELSGLLDEKEVALERIEGHEGHRFIKITRKLHGNVMVSYIEPKFLNSKAYQTLTQTAAALKGMVGEGAKLYKGENGYDADSFETALDILMSVAQKGMSIQRYKGLGEMNPEQLWETTMDPAVRRLLKVRIEDAIAADEVFVTLMGDEVEPRRAFIENNALIAQNIDA

SEQ ID NO: 7976 - protein, 250 aa, Neisseria meningitidis; identical to SEQ ID NO: 2637

SEQ ID NO: 7977 - protein, 131 aa, Neisseria meningitidis
MPSDVGIRLQTAFKRKLKMKKIFYFLMVVFSTSVWAGDAEDNLLSIQSGYRALLQKQNNLDGKIIGMQSDLEDARRRLQAAQADIARLEAEIPAAMAQKARQAEELRQIGVRLDHAWNAVYGAGGTKASGN

SEQ ID NO: 7978 - protein, 159 aa, Neisseria meningitidis
MSKQTYPVTPAVRVLRENGIKFEPFIYPYEEHGGTAQFAHLFGKDEHLVIKTIVLQDENGKGLIVLMHGDKQISTRNLARHLGAKHIEPATPAQANKWTGYLVGGTTPFGIRTKLDIYVEQSVMDLETIYINGGKRGFIIGIRPGDLNILNPKTIQAAV

SEQ ID NO: 7979 - protein, 219 aa, Neisseria meningitidis; identical to SEQ ID NO: 2874

SEQ ID NO: 7980 - protein, 471 aa, Neisseria meningitidis
MNLHAKDKTQHPENVELLSAQKPITDFKGLLTTIISAVVCFGIYHILPYSPDANKGIALLIFVAALWFTEAVHITVTALMVPILAVVLGFPDMDIKKAMADFSNPIIYIFFGGFALATALHMQRLDRKIAVALLRLSRGSMKAAVLMLFLVTAFLSMWISNTATAAMMLPLAMGMLSHLDREKERKTYVFVLLGIAYCASIGGLGTLVGSPPNLIAAKALNLDFVGWMKLGLPMMLLILPLMLLSLYVILKPNLNERVEIKAESIPWTLHRVIALLIFLATAAAWIFSSKIKTAFGISNPDTVIALSAAVAVVVFGVAQWKEVARNTDWGVLMLFGGGISLSTLLKTSGASEALGQQVAATFSSAPAFLVILIVAAFIIFLTEFTSNTASAALLVPIFSGIAMQMGLPEQVLVFVIGIGASCAFMLPVATPPNAIVFGTGLIKQREMMNVGILLNILCVVLVALWAYAVLM

SEQ ID NO: 7981 - protein, 81 aa, Neisseria meningitidis; identical to SEQ ID NO: 2565

SEQ ID NO: 7982 - protein, 244 aa, Neisseria meningitidis
MKIFKPALWKIPPIENGSETALAEKTETLKQRLHRIAGSHRDARFASSLAAEDMVITDLIAGENLNIGIFTLDTGLLHAETLNLLDRIERVYPHMQIKRFQPIREDALHYVESKGRFAFYDSVEARRECCRIRKTEPLDRAIAGADAWLTGQRREQSATRTELPFAEYDAGRGIDKYNPIFDWSEHDVWAYILANNVPYNDLYRQGFPSIGCDPCTRPVKAGEDIRAGRWWWEDKNSKECGLHK

SEQ ID NO: 7983 - protein, 758 aa, Neisseria meningitidis
MAQTTLKPIVLSILLINTPLLAQAHETEQSVDLETVSVVGKSRPRATSGLLHTSTASDKIISGDTLRQKAVNLGDALDGVPGIHASQYGGGASAPVIRGQTGRRIKVLNHHGETGDMADFSPDHAIMVDSALSQQVEILRGPVTLLYSSGNVAGLVDVADGKIPEKMPENGVSGELGLRLSSGNLEKLTSGGINIGLGKNFVLHTEGLYRKSGDYAVPRYRNLKRLPDSHADSQTGSIGLSWVGEKGFIGAAYSDRRDQYGLPAHSHEYDDCHADIIWQKSLINKRYLQLYPHLLTEEDIDYDNPGLSCGFHDDDDAHAHAHNGKPWIDLRNKRYELRAEWKQPFPGFEALRVHLNRNDYHHDEKAGDAVENFFNNQTQNARIELRHQPIGRLKGSWGVQYLGQKSSALSAIPETVKQPMLIDNNVRHYSFFGVEQANWDNFTLEGGVRVEKQKASIQYDKALIDRENYYNQPLPDLGAHRQTARSFALSGNWYFTPQHKLSLTASHQERLPSTQELYAHGKHVATNTFEVGNKHLNKERSNNIELALGYEGDRWQYNLALYRNRFGNYIYAQTLNDGRGPKSIEDDSEMKLVRYNQSGADFYGAEGEIYFKPTPRYRIGVSGDYVQGRLKNLPSLPGREDAYGNRPFIAQDDQNAPRVPAARLGIHLKASLTDRIDANLDYYRVFAQNKLARYETRTPGHHMLNLGANYRRNTRYGEWNWYVKADNLLNQSVYAHSSFLSDTPQMGRSFTGGVNVKF

SEQ ID NO: 7984 - protein, 406 aa, Neisseria meningitidis
MAVNLTEKTAEQLPDIDGIALYTAQAGVKKPGHTDLTLIAVAAGSTVGAVFTTNRFCAAPVHIAKSHLFDEDGVRALIINTGNANAGTGAQGRIDALAVCAAAARQIGCKPNQVLPFSTGVILEPLPADKIIAALPKMQPAFWNEAARAIMTTDTVPKAASREGKVGDKHTVRATGIAKGSGMIHPNMATMLGFIATDAKVSQPVLQLMTQEIADETFNTITVDGDTSTNDSFVIIATGKNSQSEIDNIADPRYAQLKELLCSLALELAQAIVRDGEGATKFITVRVENAKTRDEARQAAYAVARSPLVKTAFFASDPNLGRLLAAIGYAGVVDLDTDLVEMYLDDILVAEHGGRAASYTEAQGQAVMSKAEITVRIKLHRGQSAATVYTCDLSHGYVSINADYRS

SEQ ID NO: 7985 - protein, 246 aa, Neisseria meningitidis; identical to SEQ ID NO: 2993

SEQ ID NO: 7986 - protein, 222 aa, Neisseria meningitidis
MTTHLSNVAPDLQNYLNAIGEPEHPVLMRLREKTGHHRMGKMAIAREQAAVLVWLAKLIRAEKYLEVGVFTGYSSTALALALPEHGRITACDINVSFTDTARQVWNEAGVAHKISLHLQPALLTLDDLIVQGEAGSYDLALIDADKPPTPQYFERCLKLVRQGGIIAIDNILLNGRVMREAASDAPPSVGILKDFNQNLPNDPRIVPITLPVGDGLTLLLKK

SEQ ID NO: 7987 - protein, 256 aa, Neisseria meningitidis
MEPERLQKVLAASGVGSRREMEEWITNGWITVNGKTAQLGDKVTPDDHVTVKGSIIKLKWADRLPRIILYYKQEGEIVSRDDPQGRVSIFDRLPQAASSRWVAIGRLDINTSGLLILTTSGELVQRFAHPSFEVEREYAVRVLGGLTGEQMRVLTEEGVMLEDGLAKVERIREQGGEGANKWYNVVIKEGRNREVRRIFESQGLTVSRLVRVGFGPIGLPNRLKRGQFYELNPAEVANILKWAEMLLPGEYRRKKA

SEQ ID NO: 7988 - protein, 335 aa, Neisseria meningitidis
MYPLARRILFALDAEKAHHFTLDALYTVYKLGLIPVTGNRTKPVKLMGMDLPNPVGLAAGLDKNGEYIDALGALGFGFIEIGTVTPKPQPGNPQPRLFRVPEHQGIINRMGFNNHGIDTMIRNIEKSKFSGVLGINIGKNAVTPIENAADDYLICLEKAYAHASYITVNISSPNTKNLRALQGGDELSALLEALKNKQAQLASVYGKYVPLAVKIAPDLDEAQIEDIAHVVKSVEMDGIIATNTTIDKSSLGSHPLAGEQGGLSGRPVHEKSNRVLKLLADHIDGKLPIIGVGGIMEGRDAADKIRLGATAVQVYSGLIYKGPALVKECLKALAR

SEQ ID NO: 7989 - protein, 172 aa, Neisseria meningitidis; identical to SEQ ID NO: 2773

SEQ ID NO: 7990 - protein, 436 aa, Neisseria meningitidis
MYAKKGGLGLVKSRRFAPLFATQFLGAFNDNVFKTALFVMIGFYGLGQNGFLPAGQMLNLGALLFILPYFLFSSLSGQLGNKFDKAVLARWVKVLEMIIMAVAAYGFYIRSAPLLLACLFCMGAQSTLFGPLKYAILPDYLDDKELMMGNSLIESGTFVAILFGQILGTAVAGVPPYIVGILVLLVAVGGTVGSLFMPSVPAKAADTQIEWNIVRGTKSLLRETVRYKPVFTAIIGISWFWFVGAVYTTQLPTFTQIHLGGNDNVFNLMLALFSIGIAAGSVLCAKFSRERLMLAWVTVGALGLTVCGLVLVWLTHGHRFEGLNGIFWFLSQGWAYPVMAVMTLIGFFGGFFSVPLYTWLQTASSETFRARAVAANNIVNGIFMVSAAVLSAVLLFLFDSISLLYLIVALGNIPLSVFLIKRERRFLGAAAIRKKP

SEQ ID NO: 7991 - protein, 389 aa, Neisseria meningitidis
MPQIKIPAVYYRGGTSKGVFFKRSDLPEAAREAGSARDKILLRVLGSPDPYGKQIDGLGNASSSTSKAVILDKSERADHDVDYLFGQVSIDKPFVDWSGNCGNLTAAVGAFAIEQGLVDKSKIPSDGICTVKIWQKNIGKTIIAHVPMQHGAVLETGDFELDGVTFPAAEVQIEFLDPADGEGSMFPTGNLVDEIDVPNIGRLKATLINAGIPTIFLNAVDLGYTGKELQDDINNDAAALEKFEKIRAYGALKMGLISDVSEAAARAHTPKVAFVAPAADYTASSGKTVNAADIDLLVRALSMGKLHHAMMGTASVAIATAAAVPGTLVNLAAGGGTRKEVRFGHPSGTLRVGAAAECQDGQWTATKAVMSRSARVMMEGWVRVPEDCF

SEQ ID NO: 7992 - protein, 55 aa, Neisseria meningitidis; identical to SEQ ID NO: 2625

SEQ ID NO: 7993 - protein, 288 aa, Neisseria meningitidis; identical to SEQ ID NO: 464

SEQ ID NO: 7994 - protein, 193 aa, Neisseria meningitidis; identical to SEQ ID NO: 519

SEQ ID NO: 7995 - protein, 161 aa, Neisseria meningitidis; identical to SEQ ID NO: 5306

SEQ ID NO: 7996 - protein, 64 aa, Neisseria meningitidis
MNIILNGGPAELHGTSVADLIAQTAPQQPFAVAVNTVFIPKGAYAETVLNENDKIDIVRPVVGG

SEQ ID NO: 7997 - protein, 209 aa, Neisseria meningitidis; identical to SEQ ID NO: 1847

SEQ ID NO: 7998 - protein, 852 aa, Neisseria meningitidis
MPANLSSALETFKQQRDAAEAHYLKANRVSVFFREYTAAVETLLAALWAEYFQNSALCLMAVGGFGRGELYPCSDVDLAVVSPAPLSDGIQEQIARFVQTLWDCKLMPSVKSGSVDELCESVRNDITGDTAFLEARFLFGNRQTVDKLAEKMNAQRNVAAFVEAKLVEMEHRHAKSQGSGAVLEPNIKSCPGGLRDIHTLLWIAKAQGLATDLPDLLKQRILTRAEAGMLSHGYRRLAHIRIHLHLNANRAEDRLLFDLQPQVAESMGYEGLNLRRQSEELMRVFYRAIKTVKQLGGILTPMLQSRVSSTPLRVTLRIDDDYIQVNNQIAARHTDIFFRRPEHIFKIVEIMQQRNDITALEPQTLRAWWGATRKINRSFYQNSENRHRFAGFFRNGNGLTQTLRFLNLYGVLGRYLPAWEKIVGLLQHDLFHIYPVDDHILTVVRNVRRLALDMHSHELPYASALMQSFEKQDILYLAAFFHDIAKGRGGDHAIQGIADARQFAADHFLTGEESDLLAWLVENHLLMSAVAQKEDIQDPDVLDAFCKRVQTHERLSALYLLTISDIRGTNPKLWNAWRASLLESLFHAAGRYLTGNGGNPHTLFGRRRQEAADLLTRAAVPEKQQKKLWNALGSAYFARHQSREILWHAANLVHDFETPIVRSRILPQSDSFQVMVFMPNGPRLFARLCRIFSRHGFDILAARAFITEHDYILDTFIVQIPSQHAPEDYPDIQSALEAELNSFIHGHTVAEISSHSRRISRRSRYMPIAPSITITPEEDYPDWYSVEITAVNRPFLLADMAEIFFAHNVSLRYAKISTLDERAEDSFTVFSPDLKNPKIQSSLKQTLLEQLS

SEQ ID NO: 7999 - protein, 328 aa, Neisseria meningitidis
MNLPIQKFMMLFAAAISLLQIPISHANGLDARLRDDMQAKHYEPGGKYHLFGNARGSVKKRVYAVQTFDATAVSPVLPITHERTGFEGVIGYETHFSGHGHEVHSPFDHHDSKSTSDFSGGVDGGFTVYQLHRTGSEIHPEDGYDGPQGSDYPPPGGARDIYSYHIKGTSTKTKINTVPQAPFSDRWLKENAGAASGFLSRADEAGKLIWENDPNQNWWGNRMDDVRGIIQGAANPFLTGFQGLGVGAITDSAVNPVTYAAARKTLQGIHNLGNLSPEAQLAAATALQDSAFAVKDGINSAKQWADAHPNITATAQTALAIAEAATTV

SEQ ID NO: 8000 - protein, 128 aa, Neisseria meningitidis; identical to SEQ ID NO: 1074

SEQ ID NO: 8001 - protein, 371 aa, Neisseria meningitidis; identical to SEQ ID NO: 3554

SEQ ID NO: 8002 - protein, 718 aa, Neisseria meningitidis
MPAPQLSAPYDPLTAEARALLFHTASYLKPEEQAELEKAVAYAFRAHDGQTRKSGEPYITHPIAVATQLALWHMDIQGLCAGVMHDVLEDTGVTKGEMAAVFGNTVAEMVDGLSKLEKLKFEDHAEHQAESFRKLILAMTKDVRVIVVKLADRLHNMRTLGSMRPDKRRRIARETLEIYAQIANRIGLNNAYQELQDLSFQNLHPNRYETLKKAMDKSRKNRQDVVGKVLRAFGQRLVGANIEAKIKGREKNLYGIHQKMMAKKLRFAEVMDIYGFRVIVNSIPACYAALGALHTLYQPKPGRFKDYIAIPKSNGYQSLHTTLVGPYGLPIEVQIRTKEMDAVAEGGIAGHWSYKSYSKTVDQAVLHTNRWLKNILDLQASSANAIEFLEHVKVDLFPNEIYILTPKGKILTLPKGATPVDFAYAVHTDIGHKTVAARINNIMMPLRTKLKTGDSVEIITSEHAKPNPAWLNFAVSGRARSAIRQYIKNLNRHDAVVLGESLLQKALSSLLPKDVLLSDGIKEKYLADLNDKQTSFEEVLYNVGMGHTLPVYVAMHIAELAGEHFGSEVRLSSIKVDGQESGHIHFAECCHPVPGDSIRLLLVKGKGMIIHRDSCPTLLKSDPEQQLDADWENMNGQNYRVGLQVQSEDSHGLLALMAQAISDSGADIESVETPSKSQSGTEGFVEFKFLLKVKNLDQLNQIIQNLHSIPYIRKVIRS

SEQ ID NO: 8003 - protein, 324 aa, Neisseria meningitidis
MDTLTRFLPEHLQQNQLPEALGGVLLSVVSACTEINAKVRLGALAGVLGMAGTGNIQGEDQKKLDVIANNIMIDTLKANPAVAGLASEEEDSFVSAGENGRYLVLFDPLDGSSNIDVNISVGTIFSILEKPEGALATESFLQTGRQQLAAGYVLYGPQTQLVFTFGHGVYMFTLNAENEFVLTKEKPKVPESTKEFAINMSNRRHWLPPVQQYIDELLAGETGTRGKNYNMRWVASMVAEIHRILMRGGVFMYPQDKRDPSKPGKLRLMYEANPMALILEQAGASASNARQDILGIRPESLHQRVAVIMGSSEEVDYLNRLHSK

SEQ ID NO: 8004 - protein, 245 aa, Neisseria meningitidis; identical to SEQ ID NO: 4611

SEQ ID NO: 8005 - protein, 436 aa, Neisseria meningitidis
MSVTVETLENLERKVVLSLPWSEINAETDKKLKQTQRRAKIDGFRPGKAPLKMIAQMYGASAQNDVINELVQRRFHDVAVAQELKVAGFPRFEGVEEQDDKESFKVAAIFEVFPEVVIGDLSAQEVEKVTASVGDAEVDQTVEILRKQRTRFNHVEREARNSDRVIIDFEGKIDGEPFAGGASKNYAFVLGAGQMLPEFEAGVVGMKAGESKDVTVNFPEEYHGKDVAGKTAVFTITLNNVSEATLPEVDADFAKALGIADGDVAKMREEVQKNVSREVERRVNEQTKESVMNALLKAVELKAPVALVNEEAARLANEMKQNFVNQGMADAANLDLPLDIFKEQAERRVSLGLILAKLVDENKLEPTEEQVKAVVANFAESYEDPQEVIDWYYAEPSRLQAPTSLAIESNVVDFVLGKAKVNEKALSFDEVMGAQA

SEQ ID NO: 8006 - protein, 215 aa, Neisseria meningitidis
MASKSSKTNLDLNNLHLLNLPARLFIALLAVAAVLGLGYAGLFKSQMESLEEYEAKETELKNTYKQKSIDAASLNNLRDELASIRSAFDIMLKQLPTDAEIPNLVQELHQAGSSNGLRLDSVMPQPPVDDGPIKRLPYSISITRNYEQISQFTRDVGSLSRIITLESLKIAQSPENGGNPDGKSSILNLSAIATTYQAKSVEELAAEAAQNAEQK

SEQ ID NO: 8007 - protein, 269 aa, Neisseria meningitidis; identical to SEQ ID NO: 3459

SEQ ID NO: 8008 - protein, 121 aa, Neisseria meningitidis; identical to SEQ ID NO: 1070

SEQ ID NO: 8009 - protein, 475 aa, Neisseria meningitidis; identical to SEQ ID NO: 3229

SEQ ID NO: 8010 - protein, 156 aa, Neisseria meningitidis
LNITVLAVGTKMPRWVDEAVAEYAKRFGRDVAYVLKEIKPEKRGAGVNAAQGMAAEEKRILEAIPQGAFLVVLDERGKAPTSVELAEHLKTWQQNGEHVCFVIGGADGMTDRLKQQARMMMRLSSLTLPHGMVRVLLTEQLYRAASILHNHPYHRE

SEQ ID NO: 8011 - protein, 530 aa, Neisseria meningitidis
VGLLGTIATSVFQVGKAMDGRRWAVWGAFALLPSAFLAAMVVAPLWAVAAYDGLAWRAVLSDAYMLKRLAWTVFQAAATCVLVLPLGVPVAWVLARLAFPGRALVLRLLMLPFVMPTLVAGVGVLALFGADGLLWRGWQDTPYLLLYGNVFFNLPVLVRAAYQGFVQVPAARLQTARTLGAGAWRRFWDIEMPVLRPWLAGGVCLVFLYCFSGFGLALLLGGSRYATVEVEIYQLVMFELDMAVASVLVWLVLGVTAAAGLLYAWFGRRACSDKAVSPVMPSEPQSVGEYVLLAFAAAVLSVCCLFPLLAIVVKAWSAGESWRVLMESETWQAVWNTLRFSAAAVFAAAVLGVVYAAAARRSAWMRGLMFLPFMVSPVCVSAGVLLLYPQWTASLPLLLAMYALLAYPFVAKDVLSAWDALPPDYGRAAAGLGANGFQTACRITFPLLKPALRRGLTLAAATCVGEFAATLFLSRPEWQTLTTLIYAYLGRAGEDNYARAMVLTLLLAAFALGIFLLLDGGEGGKRTETL

SEQ ID NO: 8012 - protein, 239 aa, Neisseria meningitidis
LTLTRKTLFLLTAAFGTHSLQTASADAVVKAEKLHASANRSYKVAGKRYTPKNQVAEFTQTGNASWYGGRFHGRKTSGGERYDMNAFTAAHKTLPIPSYVRVTNTKNGKSVIVRVNDRGPFHGNRIIDVSKAAAQKLGFVSQGTAHVKIEQIVPGQSALVAENKDIFIDLKSFGTEHEAQAYLNQAAQNLASSASNPNLSVEKRHYEYVVKMGPFSSQERAAEAEAQARGMVRAVLTAG

SEQ ID NO: 8013 - protein, 548 aa, Neisseria meningitidis; identical to SEQ ID NO: 3866

SEQ ID NO: 8014 - protein, 154 aa, Neisseria meningitidis; identical to SEQ ID NO: 3531

SEQ ID NO: 8015 - protein, 514 aa, Neisseria meningitidis; identical to SEQ ID NO: 3437

SEQ ID NO: 8016 - protein, 478 aa, Neisseria meningitidis
MPLLSVEFALFFLAFLPIYWGLAKYPSAQNLLLLAAGMGWLYHIGPVFAAIIVLYSSCVYLLGELLRSDRENTRRFWLGCGIAASLTVLGFFKYFDFFRPLIAQYAGKGGAIDILMPLGLSYYTFQSLAYLVYCFRAPHAARFSWHELLLHLSFFPTVTSGPIIRAAAFKSADGEQAGALAQIRTRQPRSPVRPALAVSLILLGIAKKWWLAGMLAENWVSPVFENPAQFNGWGVLAGVYGYTFQLFLDFSGYSDLVIGMAMLLGFRLPKNFSAPLRAANIRAFWDKWHISLSTWIRDYIYIPLGGSKKGFLRTQLNLMAAMVLSGIWHGYGWNFLIWGALHGTALVLLNTGDRYFGRNALCRLKYLAPLSWFVTFHFVCLSFVVFNTASPDDAGAVFNALFANANGWNAPQQANMLLLASFASVMLLYPYLQRAFDGAVKGLEKIPMWLWFIPISIILLLIIVLAPSGIPGFIYANF

SEQ ID NO: 8017 - protein, 257 aa, Neisseria meningitidis
MKPKIQRHGEILSLVRRHQFMSVDELAAALDVTPQTIRRDIRELEEAGSLKRHHGGASSGGNLPEGLPADRQTRCQNEKNAIARLIAEHIPDGSSLFVSIGTTMEAVVSELVRRRGSLRVITNNIHAASIASARTDYTVIITSGVVRPLDGGITGVATVDFINQFKVDYAVMSTHGVESDGSLLDDDYKEVSVMQAMIANARVRFLGVDHSKFRSNALVRLGDITAFDKVFTDRLPDTAMQKMLKEAGVECLIADAV

SEQ ID NO: 8018 - protein, 810 aa, Neisseria meningitidis
MPIPFKPVLAAAAIAQAFPAFAADPAPQSAQTLNEITVTGTHKTQKLGEEKIRRKTLDKLLVNDEHDLVRYDPGISVVEGGRAGSNGFTIRGVDKDRVAINVDGLAQAESRSSEAFQELFGAYGNFNANRNTSEPENFSEVTITKGADSLKSGSGALGGAVNYQTKSASDYVSEDKPYHLGIKGGSVGKNSQKFSSITAAGRLFGLDALLVYTRRFGKETKNRSTEGDIEIKNDGYVYNPTDTGGPSKYLTYVATGVARSQPDPQEWVNKSTLFKLGYNFNDQNRIGWIFEDSRTDRFTNELSNLWTGTTTSAATGDYRHRQDVSYRRRSGVEYKNELEHGPWDSLKLRYDKQRIDMNTWTWDIPKNYDLRGINGEVYHSFRHIRQNTAQWTADFEKQLDFSKAVWAAQYGLGGGRGDNANSDYSYFAKLYAPKILASNQAKITMLIENRSKYKFAYWNNAFHLGGNDRFRLNAGIRYDKNSSSAKDDPKYTTAIRGQIPHLGSERAHAGFSYGTGFDWRFTKHLHLLAKYSTGFRAPTSDETWLLFPHPDFYLKANPNLKAEKAKNWELGLAGSGKAGNFKLSGFKTKYRDFIELTYMGVSSDDKNNPRYAPLSDGTALVSSPVWQNQNRSAAWVKGIEFNGTWNLDSIGLPKGLHTGLNVSYIKGKATQNNGKETPINALSPWTAVYSLGYDAPSKRWGINAYATRTAAKKPSDTVHSNDDLNNPWPYAKHSKAYTLFDLSAYLNIGKQVTLRAAAYNITNKQYYTWESLRSIREFGTVNRVDNKTHAGIQRFTSPGRSYNFTIEAKF

SEQ ID NO: 8019 - protein, 208 aa, Neisseria meningitidis; identical to SEQ ID NO: 3590

SEQ ID NO: 8020 - protein, 612 aa, Neisseria meningitidis
MLPARFTILSVLAAALLAGQAYAAGAADAKPPKEVGKVFRKQQRYSEEEIKNERARLAAVGERVNQIFTLLGGETALQKGQAGTALATYMLMLERTKSPEVAERALEMAVSLNAFEQAEMIYQKWRQIEPIPGKAQKRAGWLRNVLRERGNQHLDGLEEVLAQADEGQNRRVFLLLAQAAVQQDGLAQKASKAVRRAALRYEHLPEAAVADVVFSVQGREKEKAIGALQRLAKLDTEILPPTLMTLRLTARKYPEILDGFFEQTDTQNLSAVWQEMEIMNLVSLHRLDDAYARLNVLLERNPNADLYIQAAILAANRKEGASVIDGYAEKAYGRGTGEQRGRAAMTAAMIYADRRDYTKVRQWLKKVSAPEYLFDKGVLAAAAAVELDGGRAALRQIGRVRKLPEQQGRYFTADNLSKIQMFALSKLPDKREALRGLDKIIEKPPAGSNTELQAEALVQRSVVYDRLGKRKKMISDLERAFRLAPDNAQIMNNLGYSLLSDSKRLDEGFALLQTAYQINPDDTAVNDSIGWAYYLKGDAESALPYLRYSFENDPEPEVAAHLGEVLWALGERDQAVDVWTQAAHLTGDKKIWRETLKRHGIALPQPSRKPRK

SEQ ID NO: 8021 - protein, 1071 aa, Neisseria meningitidis; identical to SEQ ID NO: 373

SEQ ID NO: 8022 - protein, 637 aa, Neisseria meningitidis
MNPSPLLDLIDSPQDLRRLDKKQLPRLAGELRAFLLESVGQTGGHFASNLGAVELTIALHYVYNTPEDKLVWDVGHQSYPHKILTGRKNQMHTMRQYGGLAGFPKRCESEYDAFGVGHSSTSIGAALGMAAADKLLGSDRRSVAIIGDGAMTAGQAFEALNCAGDMDVDLLVVLNDNEMSISPNVGALPKYLASNVVRDMHGLLSTVKAQTGKVLDKIPGAMEFAQKVEHKIKTLAEEAEHAKQSLSLFENFGFRYTGPVDGHNVENLVDVLEDLRGRKGPQLLHVITKKGNGYKLAENDPVKYHAVANLPKESAAQMPSEKEPKPAAKPTYTQVFGKWLCDRAAADSRLVAITPAMREGSGLVEFEQRFPDRYFDVGIAEQHAVTFAGGLACEGMKPVVAIYSTFLQRAYDQLVHDIALQNLPVLFAVDRAGIVGADGPTHAGLYDLSFLRCVPNMIVAAPSDENECRLLLSTCYQADAPAAVRYPRGTGTGVPVSDGMETVEIGKGIIRREGGKTAFIAFGSMVAPALAVAEKLNATVADMRFVKPIDEELIVRLARSHDRIVTLEENAEQGGAGGAVLEVLAKHGICKPVLLLGVADTVTGHGDPKKLLDDLGLSAEAVERRVRAWLSDRDAAN

SEQ ID NO: 8023 - protein, 312 aa, Neisseria meningitidis; identical to SEQ ID NO: 2391

SEQ ID NO: 8024 - protein, 798 aa, Neisseria meningitidis; identical to SEQ ID NO: 2881

SEQ ID NO: 8025 - protein, 469 aa, Neisseria meningitidis
MTAQTLYDKLWNSHVVREEEDGTVLLYIDRHLVHEVTSPQAFEGLKMAGRKLWRIDSVVSTADHNTPTGDWDKGIQDPISKLQVDTLDKNIKEFGALAYFPFMDKGQGIVHVMGPEQGATLPGMTVVCGDSHTSTHGAFGALAHGIGTSEVEHTMATQCITAKKSKSMLIAVDGKLKAGVTAKDVALYIIGQIGTAGGTGYAIEFGGEAIRSLSMEGRMTLCNMAIEAGARSGMVAVDQTTIDYVKDKPFAPEGEAWDKAVEYWRTLVSDEGAVFDKEYRFKAEDIEPQVTWGTSPEMVLDISSKVPNPAEETDPVKRSGMERALEYMGLEAGTPLNEIPVDIVFIGSCTNSRIEDLREAAAIAKDRKKAANVQRVLIVPGSGLVKEQAEKEGLDKIFIEAGFEWREPGCSMCLAMNADRLAPGQRCASTSNRNFEGRQGNGGRTHLVSPAMAAAAAVTGRFTDIRMMA

SEQ ID NO: 8026 - protein, 233 aa, Neisseria meningitidis
MFRIVKWLIALPVGIFIFFNAYVYGNIITYRAVAPHRTAFMSMRMKQFEQEGRDVALDYRWVPYNRISVNLKKALIASEDAHFAGHGGFDWGGIQNAIRRNRNSGKVKAGGSTISQQLAKNLFLNESRSYIRKGEEAAITAMMEAVTDKDRIFELYLNSIEWHYGVFGAEAASRYFYQIPAAKLTKQQAAKLTARVPAPLYYADHPKSKRLRNKTNIVLRRMGSAELPESDTD

SEQ ID NO: 8027 - protein, 793 aa, Neisseria meningitidis
MKPLQMLPIAALVGSIFGNPVFAADEAATETTPVKAEVKAVRVKGQRNAPAAVERVNLNRIKQEMIRDNKDLVRYSTDVGLSDSGRHQKGFAVRGVEGNRVGVSIDGVNLPDSEENSLYARYGNFNSSRLSIDPELVRNIDIVKGADSFNTGSGALGGGVNYQTLQGRDLLLPERQFGVMMKNGYSTRNREWTNTLGFGVSNDRVDAALLYSQRRGHETESAGKRGYPVEGAGSGANIRGSARGIPDPSQHKYHSFLGKIAYQINDNHRIGASLNGQQGHNYTVEESYNLLASYWREADDVNRRRNTNLFYEWTPESDRLSMVKADVDYQKTKVSAVNYKGSFPIEDSSTLTRNYNQKDLDEIYNRSMDTRFKRITLRLDSHPLQLGGGGRHRLSFKTFASRRDFENLNRDDYYFSGRVVRTTSSIQHPVKTTNYGFSLSDQIQWNDVFSSRAGIRYDHTKMTPQELNAECHACDKTPPAANTYKGWSGFVGLAAQLNQAWRVGYDITSGYRVPNASEVYFTYNHGSGNWLPNPNLKAERSTTHTLSLQGRSEKGTLDANLYQSNYRNFLSEEQKLTTSGDVSCTQMNYYYGMCSNPYSEKLEWQMQNIDKARIRGIELTGRLNVDKVASFVPEGWKLFGSLGYAKSKLSGDNSLLSTQPLKVIAGIDYESPSEKWGVFSRLTYLGAKKVKDAQYTVYENKGWGTPLQKKVKDYPWLNKSAYVFDMYGFYKPVKNLTLRAGVYNVFNRKYTTWDSLRGLYSYSTTNSVDRDGKGLDRYRAPSRNYAVSLEWKF

SEQ ID NO: 8028 - protein, 158 aa, Neisseria meningitidis
MPIEIERRFLIGNDNWRQYADEPLLLRQGYLSVEKERTVRVRIAGQRAWLTLKGYISEISRSEFEYEIPLADAEKMMETMCPFKMEKWRYPVRWGGSLFEIDVFLGDNAPLVVAEIELPDENADFDRPDWLGREITADGMFTNAYLSKHPFSSWKNAV

SEQ ID NO: 8029 - protein, 303 aa, Neisseria meningitidis
MDTLFSLKVFRQVVQSGGFTRAAGALGISTAMASKHVSHLENTVQAKLLHRNSRNLSLTEAGEEYYRQCSYALDTLDDAAQKAAGGTEKPQGLLRVTMPLWFAGSQICNWLAEYRERYPEVTLELILDNRHVDLIAEGVDLALRVSQTLSPSLIARPLAEIEFALLASPDFLRRNGVPETPEEVAGLPAVLPTYTNQQKLDLTRKSDGKKYRLELTPVIRTDNTLMMREMIKAGACIGYQPLWAAEHDLRCGSLVRLLPEYTVPTDRLNAVYADRAFLSAKVRSFIDFLNEKIASRKGYRNAV

SEQ ID NO: 8030 - protein, 168 aa, Neisseria meningitidis; identical to SEQ ID NO: 2631

SEQ ID NO: 8031 - protein, 459 aa, Neisseria meningitidis
MFAFKSLLDMPRGEALAVVVALIAAMGYTIISLEWLPHMSIIAAIVVLILYGLARGLKYNDMQQGMIGALNQGMGAIYLFFFIGLMVSALMMSGAIPTLMYYGFGLISPTYFYFSAFALCSVIGVSIGSSLTTCATVGVAFMGMAAAFQADMAMTAGAIVSGAFFGDKMSPLSDTTGISASIVGIDLFEHIKNMMYTTIPAWLISAALMLWLLPNVAAQDLNSVESFRSQLEATGLVHGYSLIPFALLVILALMRINAVVAMLFTVMVAVAVTYLHSTPDLRQLGAWFYGGYKLEGEAFKDVVKLISRGGLESMFFTQTIVILGMSLGGLLFALGVIPSLLEAIRTFLTNAGRATFSVAMTSVGVNFLIGEQYLSILLSGETFKPVYDRLGLHSRNLSRTLEDAGTVINPLVPWSVCGVFISHALGVPVWEYLPYAFFCYLSLALTLLFGWTGLTLSKK

SEQ ID NO: 8032 - protein, 160 aa, Neisseria meningitidis; identical to SEQ ID NO: 1377

SEQ ID NO: 8033 - protein, 99 aa, Neisseria meningitidis; identical to SEQ ID NO: 2699

SEQ ID NO: 8034 - protein, 244 aa, Neisseria meningitidis
MASHNTTHQMKTLCSSCSLRELCLPVGLLPNELSQLDAVIRQSRRLKKGEYLFCVGEAFTSLFAIRSGFFKTTVASQDGRDQVTGFFMSGELIGMDGICSHVHSCDAVALEDSEVCELPFTHIEELGQNIPSLRTYFFRMMSREIVRDQGVMLLLGNMRAEERIAAFLLNLSQRLYSRGFAANDFILRMSREEIGSYLGLKLETVSRTLSKFHQEGLISVEHKHIKILNLQVLKKMVSGCSHAI

SEQ ID NO: 8035 - protein, 274 aa, Neisseria meningitidis; identical to SEQ ID NO: 5218

SEQ ID NO: 8036 - protein, 315 aa, Neisseria meningitidis; identical to SEQ ID NO: 5319

SEQ ID NO: 8037 - protein, 507 aa, Neisseria meningitidis
MTVIKQEDFIQSICDAFQFISYYHPKDYIDALYKAWQKEENPAAKDAMTQILVNSRMCAENNRPICQDTGIATVFLKVGMDVQWDADMSVEEMVNEGVRRAYTWEGNTLRASVLADPAGKRQNTKDNTPAVIHMSIVPGGKVEVTCAAKGGGSENKSKLAMLNPSDNIVDWVLKSIPTMGAGWCPPGILGIGIGGTPEKAVLMAKESLMSHIDIQELQEKAASGAELSTTEALRLELFEKVNALGIGAQGLGGLTTVLDVKILDYPTHAASKPIAMIPNCAATRHVEFELDGSGPVELTPPRVEDWPDLTYSPDNGKRVDVDKLTKEEVASWKTGDVLLLNGKILTGRDAAHKRLVDMLNKGEELPVDFTNRLIYYVGPVDPVGDEVVGPAGPTTATRMDKFTRQMLEQTGLLGMIGKSERGVATCEAIADNKAVYLMAVGGAAYLVAKAIKSSKVLAFPELGMEAIYEFEVKDMPVTVAVDSKGESIHATAPRKWQAKIGIIPVES

SEQ ID NO: 8038 - protein, 250 aa, Neisseria meningitidis
MDLDLLSEEARREMLACAEEAVPSEMCGVLVFSYEGYEFLPLSNCAENPHETFEISADDWMAAERVGEIVAVVHSHPRGEPFLSGADRWMQVETGLPWILVTQGRLKLFRPVPHLRGRVFEYGKTDCGALVRDAFMLMGLVFPDHPRGDMDEDAAAGFWEKHLENCGFSRVSDGLCAGDVVLTATGGHASHAVLYLGNDWMLHHAYNQLSCRVPYTRYWADVTHSVWRHPDFEPAMMQALENDFTHMEQA

SEQ ID NO: 8039 - protein, 477 aa, Neisseria meningitidis
MSQYDVVVIGAGPGGYVAAIRAAQLGFKTACVDAGVNKAGNAPALGGTCLNVGCIPSKALLQSSEHFHAAQHDFAEHGITVGDVKFDAAKMIERKDAIVTKLTGGVKFLFQKNKVTSLFGTASFAGKNGDAYQIEVDNKGEKTVIEAKHVIVATGSVPRPLPQVAIDNVNVLDNEGALNLTEVPAKLGVIGSGVIGLEMGSVWNRVGAEVTILEAAPTFLAAADQQIAKEAFKYFTKEQGLSIELGVKIGDIKSEGKGVSVAYETAAGEAKTEVFDKLIVAIGRIPNTKGLNAEAVGLEKDERGFIKVDGECRTNLPNVWAIGDVVRGPMLAHKASDEGVAVAERIAGQKPHIDFNNVPFVIYTDPEIAWVGKTEEQLKAEGVEYKKGTSGFGANGRALAMGKAKGTVKVLADAKTDRILGVHMIGPVVSELVTEGVTALEFFASSEDIARIIHAHPTLSEVVHEAALAADKRALHG

SEQ ID NO: 8040 - protein, 238 aa, Neisseria meningitidis; identical to SEQ ID NO: 3066

SEQ ID NO: 8041 - protein, 416 aa, Neisseria meningitidis; identical to SEQ ID NO: 5338

SEQ ID NO: 8042 - protein, 473 aa, Neisseria meningitidis; identical to SEQ ID NO: 2148

SEQ ID NO: 8043 - protein, 403 aa, Neisseria meningitidis; identical to SEQ ID NO: 69

SEQ ID NO: 8044 - protein, 354 aa, Neisseria meningitidis; identical to SEQ ID NO: 3291

SEQ ID NO: 8045 - protein, 505 aa, Neisseria meningitidis; identical to SEQ ID NO: 1186

SEQ ID NO: 8046 - protein, 198 aa, Neisseria meningitidis; identical to SEQ ID NO: 1998

SEQ ID NO: 8047 - protein, 50 aa, Neisseria meningitidis; identical to SEQ ID NO: 2715

SEQ ID NO: 8048 - protein, 451 aa, Neisseria meningitidis
MKAPELLLPAGGLERMRAAYDYGADAVYAGSPRYSLRARNNEFAKLDVLEQGIKEAHDRNKKFFLTVNTLPHNSKLKTFVSDMEPLIAMKPDALIMADPGLIMTVREKWPEMPIHLSVQANTTNYWGVKFWQNIGVERIILSRELSMEEIAEIRQQCPDIELEVFIHGALCIAYSGRCLLSGYFNHRDPNQGTCTNSCRWDYKVHNATESDAGDAQLLQGFNFEKAQEEANQNFEGINGQKRHPYADKVFLIEESNRPGEMMPIMEDEHGTYIMNSKDLRGIEVVEKLAKIGVDSLKVEGRTKSLYYVARVAQSYRKAIDDAVAGRPFDYSLLSELEGLANRGYTSGFLERHHTQDYQNYLTGHSTAKQSQYVGHVTEIDKNGWATVEVKNRFAVGDSLEIIHPGGNQTIKLEQMTRKGQPVDVAPGNGIQVKIPNMQGKEKALIARVLNP

SEQ ID NO: 8049 - protein, 41 aa, Neisseria meningitidis; identical to SEQ ID NO: 6310

SEQ ID NO: 8050 - protein, 142 aa, Neisseria meningitidis; identical to SEQ ID NO: 2751

SEQ ID NO: 8051 - protein, 887 aa, Neisseria meningitidis
MSTQLHDVDPIETQEWLDALSSVLEYEGGERAQYLLENLVKYCRDKGVRMPHGTTTPYLNTVSVENEKGIPGDQNIEHRIRAFVRWNAAAIVLRAGKKDLELGGHIASFQSAATMYEVGFNHFWKAKGEGEEGDLVFFQGHVAPGIYARAFVEGRLTEDQLNNFRQEVDGHGLPSYPHPHLLPDFWQFPTVSMGLGPIMAIYQARFLKYLESRGLAKTKGRKVWCFCGDGEMDEPESQGAIALAAREGLDNLIFVINCNLQRLDGPVRGNGKIIQELEGNFAGAGWNVVKVIWGRRWDRLLAKDKDGILRQRMEECLDGDYQTYKSKDGAYVREHFFNTPELKALVADMTDEQLWALNRGGHDPQKVYNAYDRAANHADGKPTVILAKTIKGYGMGASGEGQNVAHQAKKMDKASLKQFRDRFDIPVTDEQIESGDLPYLTFAPDTEEYKYLHARRDALGGYLPQRKPTQEVLEVPELSAFDAQLKSSGEREFSTTMAFVRILSTLLKDKKIGKRVVPIVPDESRTFGMEGMFRQYGIWNPKGQQYTPQDKDQLMFYKESVDGQILQEGINEPGAMADWIAAATSYANSNFAMIPFYIYYSMFGFQRIGDLAWAAGDMHARGFLLGGTAGRTTLNGEGLQHEDGHSHIQADLIPNCVSYDPTFQYEVAVIVQDGLRRMYANNEDVFYYITLMNENYTHPDMPEGAEQDILKGMYLLKAGGKGDKKVQLMGSGTILQEVIAGAELLKADFGVEADIWSCPSFNLLHRDAVEVERFNRLHPLEAEKVPFVTSKLQGHDGPVIAATDYIRSYADRIRAYIPNDYHVLGTDGFGRSDSRANLRRFFEVDRYNVAVAALSALAEQGKVSKETVQQAIEKYGIKADSAPSWKR

SEQ ID NO: 8052 - protein, 61 aa, Neisseria meningitidis; identical to SEQ ID NO: 2069

SEQ ID NO: 8053 - protein, 208 aa, Neisseria meningitidis; identical to SEQ ID NO: 1121

SEQ ID NO: 8054 - protein, 274 aa, Neisseria meningitidis
MIKKTIGGIIPIFTAVFIPASAGAADLMLAQEYKGQDIAGWAMSEKLDGVRAYWDGKHLVSRQGYVFTPPKGFTAQFPPYPLDGELYSGRGQFEQISATVRSASSDWRGIRLHVFDVPKAQGNLYQRLAVATQWLKTHPNAPITIIPQIKVRDRQHAMDFLKQIEAQGGEGVMLRQPESRYSGGRSSQLLKLKSQYDDECTVTRHYEGKGRNAGRLGAVGCKNRYGEFRIGSGFKDKDRDNPPKIGTLITYRYRGFTQKGTPKFATFVRVRTDR

SEQ ID NO: 8055 - protein, 178 aa, Neisseria meningitidis; identical to SEQ ID NO: 1831

SEQ ID NO: 8056 - protein, 400 aa, Neisseria meningitidis
MKNYHAPDEKGFFGEHGGLFVSETLIPALQELADAYKAAKNDPEFWEAFRHDLKHYVGRPSPVYHAARLSEHLGGAQIWLKREDLNHTGAHKVNNTIGQALLAKRMGKKRVIAETGAGQHGVASATVAARFGMTCDVYMGADDIQRQMPNVFRMKLLGANVVGVESGSRTLKDAMNEAMREWVARVDDTFYIIGTAAGPAPYPEMVRDFQCVIGNEAKAQMQEAIGRQPDVAVACVGGGSNAIGLFHPYIGEENVRLVGVEAGGLGVNTPDHAAPITSGAPIGVLHGFRSYLMQDENGQVLGTHSVSAGLDYPGIGPEHSHLHDIKRVEYTVAKDDEALEAFDLLCRFEGIIPALESSHAVAWAVKNAPKMGKDQVILVNLSGRGDKDINTVAKLKGIKL

SEQ ID NO: 8057 - protein, 228 aa, Neisseria meningitidis
METFKDRLVFLWKSEAKQAKIASDIEMTIAGFSRIWNEGGLPKSETLKKIKQLKGCSIDWLLTGEGNPFPDEAPKKSLAYDTLGNEVDTDEFVFVPRYDIRAAAGYGQFVDHEEPVFTMAFRRHWIENYVTRNTKNLSVISVKGDSMEGVLNDGDSILVNHSENTPRDGLYVLRINENLLVKRLQIVPGGIINVISANEAYPAFEINLNHPADDVEIIGRVEWFGRTI

SEQ ID NO: 8058 - protein, 212 aa, Neisseria meningitidis; identical to SEQ ID NO: 3448

SEQ ID NO: 8059 - protein, 79 aa, Neisseria meningitidis
MGLKMNKRRAEIIFVNGKWLVNCYSYGIFVTEAEFDTLFLALGSARQYIESGEIVSLSVCDVFLALGSRESRRSFGLCN

SEQ ID NO: 8060 - protein, 56 aa, Neisseria meningitidis; identical to SEQ ID NO: 1209

SEQ ID NO: 8061 - protein, 129 aa, Neisseria meningitidis
MTGFKIGVLSGMTNPSIRKPAPRHSHESGNLESRGFQSFPIDSRRVRGLDSRLRGNDEFRDCGIVGNGGFQDCGIVGNDGFQDYGVVGNDGSGISTPAPRLSTAGASKMPSEGSDGIGIGESEAVAHAQ

SEQ ID NO: 8062 - protein, 611 aa, Neisseria meningitidis
VNTTPIHSKLAEITGRIIERSRPTREKYLAKIRSAKQMGRLERNQLGCSNLAHGYAAMPKSIKIEMLQETVPNLGIITAYNDMVSAHQPFKDFPDQIKDEAQKNGATAQVAGGTPAMCDGITQGYAGMELSLFSRDVIAMSTAVGLSHQMFDGSLFMGVCDKIVPGLMIGALSFGHIPGIFVPAGPMSSGIGNKEKARTRQLFAEGKVGRNELLKSEMGSYHSPGTCTFYGTANSNQMMMEMMGVHLPAAAFVHPYTDLREALTRYAAGHLARGIKNGTIKPLGEMLTEKSFINALIGLMATGGSTNHTMHLVAMARAAGVILNWDDFDEISSIIPLLIRVYPNGKADVNHFTAAGGLPFVIRELLNAGLLHDDVDTVVGHGMRHYTKEPFLIDGKLEWREAPETSGNDDILRKADNPFSPDGGLRLMKGNIGRGVIKVSAVREGCRIIEAPAIVFNDQREVLAAFERGELERDFVCVVRYQGPRANGMPELHKLTPPLGILQDRGFKVALLTDGRMSGASGKVPASIHMTPEALMGGNIAKIRTGDLIRFDSVSGELNVLINETEWNAREVESIDLGANQQGCGRELFANFRSMTSSAETGAMSFGGEFA

SEQ ID NO: 8063 - protein, 215 aa, Neisseria meningitidis
MKTKFYNHQGGHLILYFAGWGTPPDAVNHLILPENHDLLICYDYQDLNLDFDFSAYRHIRLVAWSMGVWAAERALQGIRLKSATAVNGTGLPCDDNFGIPCAVFKGTLENLTENTRLKFERRMCGDKVSFEDYQQFPARPFDEIHQELTALFEMIGQDRRADLIRWTNALVGSGDKIFMPANQHRYWTPRCTVREIDGGHYLFSRFTHWSALWNH

SEQ ID NO: 8064 - protein, 242 aa, Neisseria meningitidis
MSQITMRQMIEAGVHFGHQTRFWNPKMAQYIFGARNKIHIVNLEKTLPMFQDAQEAVRRLVANKGTVLFVGTKRQARDIIREEATRAGMPFVDHRWLGGMLTNYKTVKQSIKRLEEKTAALENAAESGFSKKEILEMQRDVEKLERSLGGIKNMKGLPDAIFVIDTGYQKGTLVEAEKLGIPVIAVVDTNNSPDGVKYVIPGNDDSAKAIRLYCRGIADAVLEGKNQALQETVAAAQEAAAE

SEQ ID NO: 8065 - protein, 40 aa, Neisseria meningitidis; identical to SEQ ID NO: 2556

SEQ ID NO: 8066 - protein, 671 aa, Neisseria meningitidis; identical to SEQ ID NO: 3253

SEQ ID NO: 8067 - protein, 107 aa, Neisseria meningitidis; identical to SEQ ID NO: 2467

SEQ ID NO: 8068 - protein, 325 aa, Neisseria meningitidis
MQENPTVWLFDLDNTLHNADAGIFTLINRAMTRYMARRLKLSESAASDLRQDYWHRYGATLAGLQIHHPEIDIAEFLRESHPIDAILTRLHGMPETQNTLSRLKGRKAVFSNGPSFYVRAVVNALGLENRFDALFGTDDFGLLYKPNPQAYLNVCRLLDVPPECCIMVDDSADNLHQAKALGMKTVRFGAKSHALPFIDASVSDMAQLARYAETLSEHRQNHYNTPYPPKIRKNVMRKTFLILMTAAALLSGCAWETYQDGNGKTAVRQKYPAGTPVYYQDGSYSKNMNYNQYRPERHAVLPDQTDGSEQDVRGQNWQKPKFQNR

SEQ ID NO: 8069 - protein, 219 aa, Neisseria meningitidis
MKTAILIDGAFFIKRVRSLGLSQNPHDAKRIADLAFRYSMLHLKDKINGTDQMDDLYRIFFYDCVPFEKKMHNPVSHRAIDFSKTPEAIFRCNLHTELKKKRKLALRLGKLSDNTAWILKPQVMKNLLKNPSTQITENDVVLDVKQKGVDMRIGLDISSITLKKQADKIILFSGDSDFVPAAKLARREGIDFILDPMWNHVPPDLMEHIDGLKTKCPKP

SEQ ID NO: 8070 - protein, 517 aa, Neisseria meningitidis
MNRTYANFYEMLAAACRKNGNGTAVFDGKEKTAYRALKQEAEAVAAYLQNIGVKFGDTVALAVSNSTEFITAYFAVSAIGAVAVPMNTFLKNSEYAYILNDCKARFLFASAGLSKELAGLKAQTPVEKIIWTDKSRPAGEMAEGDAFFEDVRRFPEKPDLGRQPRINDLAHIIYTSGTTGHPKGALISYANLFANLNGIERIFKISKRDRFIVFLPMFHSFTLTAMVLLPIYMACSIILVKSVFPFSNVLKQALLKRATVFLGIPAIYTAMSKAKIPWYFRWFNRIRLFISGGAPLAEQTILDFKAKFPRAKLLEGYGLSEASPVVAVNTPERQKARSVGIPLPGLEAKAVDEELVEVPRGEVGELIVRGGSVMRGYLNMPAATDETIVNGWLKTGDFVTIDEDGFIFIVDRKKDLIISKGQNVYPREIEEEIYKLDAVEAAAVIGVKDRYADEEIVAFVQLKEGMDLGENEIRRHLRTVLANFKIPKQIHFKDGLPRNATGKVLKRVLKEQFDGNK

SEQ ID NO: 8071 - protein, 105 aa, Neisseria meningitidis; identical to SEQ ID NO: 895

SEQ ID NO: 8072 - protein, 444 aa, Neisseria meningitidis
MAKKYFGTDGVRGEVGQFPITPDFVLKLGYAAGQVLVQHDTDQKPTVLIGKDTRISGYMLEAALVAGFTAAGVNVVQTGPLPTPGVAYLTRALRLSAGVMISASHNAYSDNGIKFFAEGGVKLSDEVELEIEAKIDGEMKTQPSARLGRARRISGADDRYIEFCKSTFPSHSDLRGLKLVVDTANGAGYGVAPKVFHELGAQVVSIGNEPNGYNINEKCGATYTKTLQAAVLQHEADYGIALDGDGDRLMMVDKNGQVYDGDSLIYVIAKARAREGINIGGVVGTVMTNMAMEIALKEQGVDFCRAKVGDRYVLAQLNQRSWLIGGEASGHILCMDKHNTGDGIISALQVLAALQTLNQDLATVCADWQPYPQTMINVRIQKGQKWQEASKDVLAEVEKELEGKGRVVLRASGTEPVVRVMVEARQADWARDGAERIASAIGSL

SEQ ID NO: 8073 - protein, 84 aa, Neisseria meningitidis
LSAQNYARELEQARAEAKKYEVKAHAVGMALAKKQAEVSRLKTENKKEIENVLTQDRKNAGDGCIDGFGHHGLQLYKRALGYGN

SEQ ID NO: 8074 - protein, 685 aa, Neisseria meningitidis
MPEQNRILCRELSLLAFNRRVLAQAEDKNVPLLERLRFLCIVSSNLDEFFEVRMAWLKRENKLHPRRRLDNGKMPSETIADVTEAARSLIRHQYDLFNNVLQPELARESIHFYRRRNWTGTQKKWIEDYFDRELLPILTPIGLDPSHPFPRPLNKSLNFAVELDGTDAFGRPSGMAIVQAPRILPRVVPLPSELCGGGHGFVFLSSILHAHVGKLFPGMNVKGCHQFRLTRDSDLTVDEEDLQNLRAAIQNELHDREYGDGVRLEVADTCPAYIRDFLLAQFKLTAAELYQVKGPVNLVRLNAVPDLVNRPDLKFPTHTPGRLKALGKTASIFDLVRQSPILLHHPYQSFDPVVEMMREAAADPDVLAVKMTIYRTGTRSELVRALMKAALAGKQVTVVVELMARFDEANNVNWAKQLEEAGAHVVYGVFGYKVHAKMALVIRREDGVLKRYAHLGTGNYHQGTSRIYTDFGIITADEQITADVNTLFMEITGLGKPGRLNKLYQSPFTLHKMVIDRIARETEHAKAGKPARITAKMNSLIEPTVIEALYRASAAGVQIDLIVRGMCTLRPGVKGLSENIRVRSIIGRQLEHARVYCFHNNGADDTFISSADWMGRNFFRRIETAAPIAAPELKKRVIREGLEMALADNTHAWLMQPDGGYIRAAPAEGESEADLQNDLWTLLGG

SEQ ID NO: 8075 - protein, 418 aa, Neisseria meningitidis
VANKLRNYTINFGPQHPAAHGVLRMILELEGETIVRADPHIGLLHRGTEKLAETKTYLQALPYMDRLDYVSMMVNEQAYCLAVEKLAGIDVPIRAQYIRVMFAEVTRILNHLMGIGSHAFDIGAMTAILYAFRDREELMDLYEAVSGARMHAAYFRPGGVYRDLPDFMPKYESSKFRNAKVLKQLNESREGTMLDFIDAFCERFPKNIDTLETLLTDNRIWKQRTVGIGVVSPERAMQKGFTGVMLRGSGVEWDVRKTQPYEVYDKMDFDIPVGVNGDCYDRYLCRMEEMRQSVRIIKQCSEWLRVNPGPVITTNHKFAPPKRTEMKTGMEDLIHHFKLFTEGMHVPEGETYTAVEHPKGEFGVYIISDGANKPYRLKIRAPGFAHLQGMDEMAKGHMLADVVAIIGTQDIVFGEVDR

SEQ ID NO: 8076 - protein, 310 aa, Neisseria meningitidis; identical to SEQ ID NO: 2407

SEQ ID NO: 8077 - protein, 351 aa, Neisseria meningitidis; identical to SEQ ID NO: 1414

SEQ ID NO: 8078 - protein, 242 aa, Neisseria meningitidis; identical to SEQ ID NO: 3156

SEQ ID NO: 8079 - protein, 127 aa, Neisseria meningitidis; identical to SEQ ID NO: 2622

SEQ ID NO: 8080 - protein, 201 aa, Neisseria meningitidis; identical to SEQ ID NO: 2357

SEQ ID NO: 8081 - protein, 389 aa, Neisseria meningitidis
MSKKLHPQTLAIRGGKEQTEYREHNQALFLTSSFMWDNAQHAADLFSKKIKGFTYTRTANPTTAAFEKRIAALEGAERAVATSTGMSAIQAAFFTFLQAGDHVVSSRSLFGTTVGFINNIVTKFGIEVSHVSPTDINEWKAAVKANTKLLFLETPSNPLGEVANLEALAELAHGIGAILVVDNSLLSPIGSQPLKHGADISVSSATKAIDGHGRVMGGVLAGSEELMAQAAVYCNSCGLAMSPFNAWQLLSGVETLSLRMEKQFDNALKIAQWLQAQPQVQAVYYTGLPDHPQAALIRKQQNGGGIVIGFEVADQAAAWKVVDGVELFSRTANLGDVRSTITHPWTTTHGRMQPEEKLAANIRPGLVRLSVGLEYVGDLIDDLKQALAR

SEQ ID NO: 8082 - protein, 615 aa, Neisseria meningitidis; identical to SEQ ID NO: 5697

SEQ ID NO: 8083 - protein, 405 aa, Neisseria meningitidis
MALIVHKYGGTSVGSPERIKNVAKRVAKARAEGHDIVVVVSAMSGETNRLVALAHEMQEHPDPRELDVVLSTGEQVTIGLLAMALKDIGVEAKSYTGWQVALKTDTAHTKARIESIDDEKMRADLAAGKVVIVAGFQGISSEGDISTLGRGGSDTSAVALAAALKADECQIYTDVDGVYTTDPRVVPEARRMDTVTFEEMIELASLGSKVLQIRSVEFAGKYKVRLRVLSSLQDGGNGTLITFEEDDNMERAAVTGIAFDKNQARINVRGVPDKPGVAYQILGAVADANIEVDMIIQNVGSEGTTDFSFTVPRGDYKQTLEILSERQDSIGAASIDGDDTVCKVSAVGLGMRSHVGVAAKIFRTLAEEGINIQMISTSEIKVSVLIDEKYMELATRVLHKAFNLG

SEQ ID NO: 8084 - protein, 286 aa, Neisseria meningitidis; identical to SEQ ID NO: 2687

SEQ ID NO: 8085 - protein, 446 aa, Neisseria meningitidis
LHTLLAFIFAILILVSLHEFGHYIVARLCGVKVVRFSVGFGKPFFTRKRGDTEWCLAPIPLGGYVKMVDTREGEVSEADLPYAFDKQHPAKRIAIVAAGPLTNLALAVLLYGLSFSFGVTELRPYVGTVEPDTIAARAGFQSGDKIQSVNGTPVADWGSAQTEIVLNLEAGKVAVGVQTASGAQTVRTIDAAGTPEADKIAKNQGYIGLMPFKITTVAGGVEKGSPAEKAGLKPGDRLTAADGKPIASWQEWANLTRQSPGKKITLTYERAGQTHTADIRPDTVEQPDHTLIGRVGLRPQPDRAWDAQIRRSYRPSVVRAFGMGWEKTVSHSWTTLKFFGKLISGNASVSHISGPLTIADIAGQSAELGLQSYLEFLALVSISLGVLNLLPVPVLDGGHLVFYTAEWIRGKPLGERVQNIGLRFGLALMMLMMAVAFFNDVTRLLG

SEQ ID NO: 8086 - protein, 99 aa, Neisseria meningitidis; identical to SEQ ID NO: 1940

SEQ ID NO: 8087 - protein, 765 aa, Neisseria meningitidis
MLAPELEQILQQLYREARKAHYEFISLEHLLLVLIEEDASVPNVLKLCGADLKVVSEQLAASVAENTPLIPEHLLDTVETRPTLGFQRVMQRAMVHTQSAGKAAVEPLDVLVALMSETDSHTVYFLKLQSVTRFEVLRCIAHGSPDEDEDEDDGNYSSDGMDDDNENRAKPGKNPLSAYTVNLNAEVKAGRIDPLIGRKHEMERLVQILCRRRKNNPLLVGEAGVGKTALAEGLAHQIVNGGIPDALKDAEVYALDMGSLLAGTKYRGDFEARVKSVLKQLEKIPHAILFIDEIHTIIGAGSTSGGTMDASNLLKPALAKGSLRCIGATTYDEYRTIFDKDHALSRRFQKIDVVEPTVSETVQILRGLKPMFEAFHQVRYTQGALEAAAELSARYINERFLPDKAIDVMDEAGAAQRILPKSKQKKVIGKAQIETVIAKVSRIPEKTVSHDDKQVLQFLGRDLKNMVYGQENAIDALVAAVKMSRSGLALPDKPIGSFLFSGPTGVGKTEAAKQLAYSLGVPLQRFDMSEYMERHAVSRLIGAPPGYVGFEQGGLLTEAVNKQPHCVLLLDEIEKAHPDIFNVLLQVMDAGKLTDNNGKSADFRNVILIMTTNAGAESLSRPSLGFTAKRERGDEMQAINKLFTPEFRNRLDAIIPFAPLSEPIIVKVVDKFLLQLEHQLLDKKVEAEFTSALHKYLAEKGFDPQMGARPMHRLIQEKIRKPLADELLFGKLSDGGFVRIDWDAAKEEAVLKFKKSKVKIKTASA

SEQ ID NO: 8088 - protein, 119 aa, Neisseria meningitidis; identical to SEQ ID NO: 3189

SEQ ID NO: 8089 - protein, 227 aa, Neisseria meningitidis
MQHDVYDYTAHTVSKNTVLQKTYRLLGFSFIPAAAGAALAANAGFNFYAAFGSRWIGFAVVLAFFYGMIHFIEKNRYSNTGVTLLMVFTFGMGVLIGPVLQYALHIADGAKIVGIAAAMTAAVFLTMSALARRTRLDMNALGRFLTVGAVILMVAVVANLFLGIPALALTISAGFVLFSSLMIMWQVRTVIDGGEGSHISAALTLFISLYNIFSSLLNILLSLNGED

SEQ ID NO: 8090 - protein, 306 aa, Neisseria meningitidis; identical to SEQ ID NO: 1708

SEQ ID NO: 8091 - protein, 58 aa, Neisseria meningitidis; identical to SEQ ID NO: 903

SEQ ID NO: 8092 - protein, 99 aa, Neisseria meningitidis; identical to SEQ ID NO: 1110

SEQ ID NO: 8093 - protein, 94 aa, Neisseria meningitidis; identical to SEQ ID NO: 1124

SEQ ID NO: 8094 - protein, 357 aa, Neisseria meningitidis
MRPFCVGATVLAILGALVFFISPGVVVLHRQIFLELMLPAAYGGFLTAALLDWTGFSGNLKPATTLMAVLLLVAAVLLPFLPQLAAFFVAAYWLVLLLFCAWLIWLARNTDNFALLMLLAAFTVFQTAYAATGDLNLLRAQVHLNMAAVMFVSIRVSVLLGAEALKECRLKDPVFIPNIVYKNIAITFLLLHAAAELWLPAQTAGFTALAVGFILLAKLRELHHHELLRKHYVRTYYLLQLFAAAGYLWTGAAKLQNLPASAPLHLITLGGMMGGVMMVWLTAGLWHSGFTKLDYPKLCRIAVPILFAAAVSRTVLMNVNPIFFITVPAILTVAVFVLYLFTFVPIFQANAFTGDPE

SEQ ID NO: 8095 - protein, 431 aa, Neisseria meningitidis
MLDIQLLRSNTAAVAERLARRGYDFDTARFDALEERRKSVQVKTEELQASRNSISKQIGALKGQGKHEEAQAAMDQVAQIKTDLEQAAADLEAVQKELDAWLLSIPNLPHEDVPFGKDETENVEVRKVGTPREFDFEIKDHVDLGEPLGLDFEGGAKLSGARFTVMRGQIARLHRALAQFMLDTHTLQHGYTEHYTPYIVDDTTLQGTGQLPKFAEDLFHVTRGGDETKTTQYLIPTAEVTLTNTVADSIIPSEQLPLKLTAHSPCFRSEAGSYGKDTRGLIRQHQFDKVEMVQIVHPEKSYEALEEMVGHAENILKALELPYRVITLCTGDMGFGATKTYDLEVWVPAQNTYREISSCSNCEDFQARRMKARFKDENGKNRLVHTLNGSGLAVGRTLVAVLENHQNADGSINIPAALQPYMGGVAKLEVK

SEQ ID NO: 8096 - protein, 436 aa, Neisseria meningitidis
MIVPDLFVAHFREAVPYIRQMRGKTLVAGIDDRLLEGDTLNKLAADIGLLSQLGIRLVLIHGARHFLDRHAAAQGRTPHYCRGLRVTDETSLEQAQQFAGTVRSRFEAALCGSVSGFARAPSVPLVSGNFLTARPIGVIDGTDMEYAGVIRKTDTAALRFQLDAGNIVWLPPLGHSYSGKTFYLDMLQTAASAAVSLQAEKLVYLTLSDGISRPDGTLAETLSAQEAQSLAEHAGGETRRLISSAVAALEGGVHRVQILNGASDGSLLQELFTRNGIGTSIAKEAFVSIRQAHSGDIPHIAALIRPLEEQGILLHRSREYLENHISEFSILEHDGNLYGCAALKTFTEADCGEIACLAVSPQAQDGGYGERLLAHIIDKARGIGISRLFALSTNTGEWFAERGFQTASEDELPETRRKDYRSNGRNSHILVRRLHR

SEQ ID NO: 8097 - protein, 488 aa, Neisseria meningitidis; identical to SEQ ID NO: 2117

SEQ ID NO: 8098 - protein, 950 aa, Neisseria meningitidis
MCNHHPQHSHDNDTIRIRGARTHNLKNVDLDIPRHKLVVVTGLSGSGKSSLAFDTLYAEGQRRYVESLSAYARQFLQMMDKPDVDLIEGLSPAISIEQKSTSHNPRSTVGTVTEIHDYLRLLYARVGTPYCPEHKLPLSSQTVSQMVDAVLKLPEDTRVMILAPAVRERKGEFVDFFADLQAQGFARVRVDGEVYQLDEVPKLEKNIKHNIDVVIDRVKVKADIKQRLAESFETALRHGNERALAMEMESGEEHWFSARFACPVCSYSLPELEPRLFSFNNPMGSCPTCDGLGNTNFFDPEKVVAHPELSLATGAIDGWDKRNQFYFQMIQSLARHYGFDVQAAWETLPEKVKKVVLHGSGKEVIDFTYLSERGTTFNRSHAFEGIIPNLERRYRETDSETVREKLREYQNHRACPSCGGARLRKEARYVYVSGEPLHEVSAWPLTKTHQFFETLDLDGNKKQIAEKILKEITERLGFLINVGLDYLNLSRSAETLSGGEAQRIRLASQIGSGLTGVMYVLDEPSIGLHQRDNDRLLATLKRLRDLGNSVIVVEHDEDAIREADFVVDMGPGAGEHGGNVLIADTPENVAKCENSVTGQYLSGKKSIAVPSERTPVNPERMLVLKGARGNNLKNVTLELPLGLITCITGVSGSGKSTLINDTLAKITARELNRAQEEPAPYDDIRGLEHLDKVINVDQSPIGRTPRSNPATYTGLFTPIRELFAGVPLSRERGYNVGRFSFNVKGGRCEACQGDGVIKVEMHFLPDVYVPCEVCHGKRYNRETLEIQYKGKNISQVLDMTVEEAREFFDAVPTVSRKLQTLMDVGLGYIRLGQSATTLSGGEAQRVKLALELSKRDTGRTLYILDEPTTGLHFADIALLLEVIDRLKGKGNSIVIIEHNLDVIKTADYIVDLGPEGGDGGGRIIAEGSPEQVAKVKGSYTGKYLEVMLKY

SEQ ID NO: 8099 - protein, 468 aa, Neisseria meningitidis
MTAAPDILYRQAAALLEQSNTAQALPLLQQAAEQGYTEAAFVLGDHLLQNGHPEQALPWLEAAAAQRHPKALFSLLQQREHNGTPTGQLLNDYAWLGEQGHSEAQLILMRYHAQRNDPQSLYWAELAAARYAAPAYYHLARHHQRQGDVETAIEQYEKAAALGVTAACWQLGQIYFYGTGVSLNHAQAEHYLEPAAQAGHIAAQTLLADLLAAQRKPEALEWYRRAADKEQAEAQSKLAQYALTGELSERDPFQAARYAKAAAEKNHPEALKIMGDLYRYGLGIKADNHIAQDYYHRAAALGSAAAAQKLISDAALYHPQQYEQIKTAALQQQQTETIYRLAEAQACAIGRPADYNAARKNYMEAAGFHHKNAAAALGRIYHYGLGTAQDPRAAAHWYAIAAEQNHPSAQYHLACFYYHGQGIGCHVPTACYWLQAAISNGHTSAESLISLLEQWRREAHHAIGQKAV

SEQ ID NO: 8100 - protein, 69 aa, Neisseria meningitidis
MNYFGMVEFLRLMAIVRPPFVFFSGTRSELPAYLDLVAELRLTGWERFAGSQTLTVSSTSTAIQATTTT

SEQ ID NO: 8101 - protein, 258 aa, Neisseria meningitidis; identical to SEQ ID NO: 2774

SEQ ID NO: 8102 - protein, 365 aa, Neisseria meningitidis
MNQTFTLPDTRPYPQNPIKNHLLLNAYQLAHNSSQASRKLSSGQLQTEIRGMLEQNHYINLSLALTMSPDAGTYAALLSSVNAVLDCEKEGEVQWFALPVVLVSGCKKERAIEMKLPTEGLFACLQNYPHLRALTQETQWLPYLVHSSDLSAVAPDEWWRAKQNTEAAAQHLRRFAPRPLLLPEGQSVHVVYALGFGSGKVQTALGQNLLQAGLPLMQVWQENLASEGVTLFANPLSPDSPVRALSDGSHTRQRMAMDVFAANAIRAVRMQSPRVGVVAAAKAGGQILFGFNATDGAFEVVPQVFSWQLSFTDNIGVIQQNFLDLMAECRVEHVYLLHNPLGEQESIPSYAEALKREGHNPFFSA

SEQ ID NO: 8103 - protein, 341 aa, Neisseria meningitidis; identical to SEQ ID NO: 3492

SEQ ID NO: 8104 - protein, 365 aa, Neisseria meningitidis; identical to SEQ ID NO: 3268

SEQ ID NO: 8105 - protein, 410 aa, Neisseria meningitidis; identical to SEQ ID NO: 257

SEQ ID NO: 8106 - protein, 201 aa, Neisseria meningitidis; identical to SEQ ID NO: 2273

SEQ ID NO: 8107 - protein, 160 aa, Neisseria meningitidis; identical to SEQ ID NO: 515

SEQ ID NO: 8108 - protein, 415 aa, Neisseria meningitidis
MSQRRVVITGLGQVSPVGNTVAEAWDTLLTGKSGIGAITRFDASDINSRVAGEVRGFDIGQYISAKEARRMDVFIHYGIAAALQAIADSGLDDVENLDKDRIGVNIGSGIGGLPGIEVTGKAVIEGGARKINPFFIPGSLINLISGHVTILKGYRGPSYGMVSACTTGAHAIGDSLRMIKYGDADIMVAGGAEGAISTLGVGGFAAMKALSTRNDDPATASRPWDKGRDGFVIGEGAGILVLEELEHAKKRGAKIYAEIVGFGMSSDAYHITAPNEEGPALAVTRALKDAGINPEDVDYVNAHGTSTPLGDANETKALKRAFGEHAYKTVVSSTKSMTGHLLGAAGGVEAVYSILAIHDGKIPPTINIFEQDVEAGCDLDYCANEARDAEIDVAISNSFGFGGTNGTLVFKRFKG

SEQ ID NO: 8109 - protein, 169 aa, Neisseria meningitidis
MDILLKYWKPVGVLLLIVLIFTAWHFDRAEKYRMGREAAAAEISNRLKDGYIEQAKQARSAEQKAAAAFAERQTKLEEEKQNAEKTVAAMRLELNRLRHYAAAQNRNRNLPATTTAATASDGASDSQGWLLFGQCAEKYAGLAETADGHAADLREWQAYGHAVSSQRAE

SEQ ID NO: 8110 - protein, 218 aa, Neisseria meningitidis
MLPSKYEDNTLQIKEKSTERTAPFFVLEVTARSAADILGIHPNSAALFYRKIRMVINHHLALAADEVFEGPVEPDESDFGGRRKGRRGRGAAGKVVVFGILKRNGRVYTVVVDNAKSETLLPVIKKKIMPDSIVYTDSLSSYDKLDVSGFIHYRINHSKEFADRQNHINGIENFWNQAKRVLRKYNGIDRKSFPLFLKECEFRFNFGTPSQQLKILQK

SEQ ID NO: 8111 - protein, 526 aa, Neisseria meningitidis
MPSIKRALISLSDKTGAVEFAQTLTKLGVEILSTGGTAKLLADAGVPVIEVADYTGFPEMLDGRVKTLHPKIHGGILGRRDLDEHVAKMEEHGIGNIDLVCVNLYPFAATIAKPNCTLEDAIENIDIGGPTMVRSAAKNWKHVAIVTDTADFPAIAAELEANNGALSDKTRFNLSRKAFSHTAQYDGMISNYLTSLSDDVLSGTPEIAGFPGRFNQSWIKVQDMRYGENPHQRAAFYRDIDPAAGSLAAYKQLQGKELSYNNIADADAAWEAVKSFDVPACVIVKHANPCGVAIASNTLDAYKLAYATDTTSAFGGIIAFNREVDGATVKQITDNQFMEVLMAPKFTAEALEIAAAKKNVRVLEVPLEAGANRFELKRVGGGLLVQTPDIHRISRADLKVVSKRQPTEQEWNDLLFVWNVAKYVKSNAIVFGKGGQTYGIGAGQMSRVDSTRIAARKAQDANLDLNGACAASDAFFPFRDGVDVIAEQGIKAIIHPAGSMRDQEVFDAADEHGIAMVVTDVRHFRH

SEQ ID NO: 8112 - protein, 259 aa, Neisseria meningitidis; identical to SEQ ID NO: 2605

SEQ ID NO: 8113 - protein, 149 aa, Neisseria meningitidis
MEQVKIAISEQIKKQTDNNHYRNLQTIPSIGKDTASVLYAQLTEKHFKTANQFVSYAGLSPAIIQSGTSVRGRGRLSRYGNRRLKSTLYMPALCAYRFNAFPKLINNLKKAGKPKMVIIVAIMRKLAKLAYYIVKTGQPYDAERHRLNQ

SEQ ID NO: 8114 - protein, 233 aa, Neisseria meningitidis; identical to SEQ ID NO: 6431

SEQ ID NO: 8115 - protein, 741 aa, Neisseria meningitidis
MTQKSTIVYTHTDEAPALATQSLLPIVQAFARHADIDVKTSDISLSGRILAAFPEYLTEAQRVPDALAELGELVKQPDANVIKLPNISASVPQLTAAIKELQSKGFAVPDYPADPQTDEEKAVRERYDRIKGSAVNPVLREGNSDRRAPKAVKNFAKKNPHSMGAWTKDSKTHVATMQSGDFFHNEQSVIVPEATSVSIVFTDKQGNKKELREPVALKAGEIIDATVMSKKALLAFLAEQVKDAKAKGVLFSLHMKATMMKVSDPIIFGHAVKVFFAPVFEKFGDKLAAAGVNVNNGFGNLLANLDKLDADTRTAVEAEIAAVYAANPDLAMVDSDKGITNLHVPSDVIVDASMPAMIRNSGRMWDKNGKAQDTKAVIPDSSYAGVYQATIDFCREHGAFDPTTMGTVPNVGLMAQAAEEYGSHNKTFEIEADGQVQVIDAEGKVLMQHDVEAGDIWRMCQTKDAPVKDWVQLAVNRARLSNTPAVFWLDENRPHDKSLLAKVKAYLAELDTNGLDIRVLAPEEAAKFSLGRLKNGEDTISVTGNVLRDYLTDLFPILELGTSAKMLSIVPLMNGGGMFETGAGGSAPKHVQQFLEENHLRWDSLGEFLALAVSFEHLAQKTGNAKAQVLADTLDAATEKLLLNGKSPKRKAGELDNRGSHFYLTLYWAQELAEQDKDAELKAAFTPLAAALTADEAKIVAELSAVQGKAVDIGGYYAANPEKAAQVMRPSVTFNQALNAL

SEQ ID NO: 8116 - protein, 92 aa, Neisseria meningitidis
MYYQVGNKCLEKHQAENLYFSLVVPRIKENGQIVRPKYNGSLWKMSDGQPLRLLLAECSLKDNLQSGLETGWIVFGILASVYFVSLLKKVLK

SEQ ID NO: 8117 - protein, 157 aa, Neisseria meningitidis
MTDFSVWETAPFGATVDHILQRYHNVHRAQFEELVPLAQKVAQVHADTFPAEIAGLLAYMQNELLMHMMKEERMLFPMINQGVGRGAAMPISVMMHEHEEHDRAIARLKELTDNFQPPEGACGSWTRLYALAKEMVEDLNDHIHLENDILFARVLDS

SEQ ID NO: 8118 - protein, 448 aa, Neisseria meningitidis; identical to SEQ ID NO: 2224

SEQ ID NO: 8119 - protein, 218 aa, Neisseria meningitidis
VASVFLEGEAVEVGNIFCIGRNYAAHIEELKNEIPSEPVVFMKPSGSILNSGGTILLPEFSRDVQFECELVLLVGKDSDGMGEGEDILGCVAGYGVGLDLTARDIQCHLKAQGLPWLKAKGFRHSACVSDFAAADRIGNPEKVLFSLKQNGVLKQRGDTGLMIYPIREILHKLAADYGLGKGDLVFTGTPSGVGAIGAGDNLALELDGLVRASFTVGC

SEQ ID NO: 8120 - protein, 329 aa, Neisseria meningitidis
MTVFDISDLNLKDPDQQDADDLGMTLADYKKMIQEDNDYGRIWQKIQLKKAEQLQKEKEEAVKRKRKRKIFSDYRGHRFKSVKELCYDVYKGLTYGRGWNGSYQHIEVKGVDSGLYENNAELGRCNAVWPDGKVAHTLDYSVLYEDIPEGEKPEEEKKEPEKDHPKPVEKPDSSNPKPSENPNVGTLGGGASPAVGNAPGGGSLGASDGGGSTGAGNGGNNGSTAQGSGKGKGDGEDSEKMPDVPKYGEPDWGSLKSDGRFGSYATATAFSTGGHCINDIRLDMGQFGSHTLQMGFLCDVLKKLRYVFIAMAYLYSAILVFKTVNSLKG

SEQ ID NO: 8121 - protein, 89 aa, Neisseria meningitidis; identical to SEQ ID NO: 494

SEQ ID NO: 8122 - protein, 367 aa, Neisseria meningitidis
MDAKGNLKVVPLRRGKGDSAFIDTISFTFHESSVAKFFLITREFFPIKGVSDRDVLVRFSDILEWIFGFGISSHQPVGKGRFYESRWQMERDGVLYGQVYIGGQQETILVEMTGKGCAVAEEGWEERLYRFLTADTTYNAKITRCDVAKDFYENEISPDTAWEMYEQGKFDKRGKRPLVGKLGDDWLNPTEKGKTLTIGSKHSSVFCRIYDKAKEQGDTSGVFWCRFEQQYMGRNCYLSLDILLSPGSFWGGAFEICASLQQKGVTEHRCVSAKKRLELSIERSKQVASQQVGRAINMMVFMGMSDYEIVDYLRRKDGAMPHRLNPASFMIKEKRACEYIHDYEKEIEIIKFDEYGMVLDSLGDLND

SEQ ID NO: 8123 - protein, 590 aa, Neisseria meningitidis
MIPSDFIDELLAKTDIVDIIDEQVPLKKGGANYMACCPFHKEKTPSFSVSPTKQFYHCFSCGAHGSAIGFVMEHQGLSFPEAVQFLADRVGMIVPKVRGQNDNPEVRAERKKKQQTLEETTAAAADFYAQQLKFNPTAKAYLDKRGLSAEVIAHYGLGYAPDGWQPLAQVFQPYPNTALVDTGMVIDNEGRYYDRFRHRIMFPIRNPRGQVIGFGGRVLDDSKPKYLNSPDTPLFDKGKNLYGLYEGRAAVKEAERILVVEGYMDVVALAQFGVGYGVAALGTATTAEHVKILMRQADSIYFCFDGDSAGRKAAWRALENALPQLKDDKSLHFLFLPEEHDPDSYIRAYGKAQFEDALLNQSKPLSEYFWEHLSDGIHLNTQEGKAELVKTSSPLLAQITAPALAYLLKQRLSELVGIDPDNLAQLLGQEAPKRHVKQKNYKLPPISVKQPVMPTLVQRQIRSLLINPDWAAYIDLPDYLALDGDFACLANLAETIKNHPSVPATAQVLEHMRGSPYEETINRIFRSALQSEEMEGGGEEDCENFQIGIKKLLNELKYSQIETLKQKSLQSGLNESEKKLLLSLLTAKQN

SEQ ID NO: 8124 - protein, 117 aa, Neisseria meningitidis; identical to SEQ ID NO: 1331

SEQ ID NO: 8125 - protein, 394 aa, Neisseria meningitidis
MSLHSDILVVGAGPAGLSFAAELAGSGLKVTLIERSPLTVLQNPPYDGREIALTHFSREIMQRLGMWDKIPENEIYPLRDAKVLNGRSDYQLHFPQPTEARGEPADCLGYLISNHNIRRAAYEVVSQLDNVSILTDTVVKEVKTSDNEAQVILENGKILTARLLLAADSRFSQTRRQLGISSDMHDYSRTMFVCRMKHTLSNQHTAYECFHYGRTIALLPLEEHLTNTVITVDTDKINSVQNLSPEELAASVKEQLKGRLGDMELVSSIHHYPLVGMIAKRFYGKRSALIGDAAVGMHPVTAHGFNLGLSSADILAKLILEAEQRGQDIGASSLLEKYSNKHMLHAHPLYHGTNMMLKLFTNETAPAKLLRGLVLRAGNNFPPLKKLITKQLTG

SEQ ID NO: 8126 - protein, 525 aa, Neisseria meningitidis
MRTNPKTQAMPSETISLMKTRSLISLLCLLLCSCSSWLPPLEERTESRHFNTSKPVRLDNILQIRHTPHTNGLSDIYLLNDPHEAFAARAALIESAEHSLDLQYYIWRNDISGRLLFNLVYLAAERGVRVRLLLDDNNTRGLDDLLLALDSHPNIEVRLFNPFVLRKWRALGYLTDFPRLNRRMHNKSFTADNRATILGGRNIGDEYFKVGEDTVFADLDILATGSVVGEVSHDFDRYWASHSAHNATRIIRSGNIGKGLQALGYNDETSRHALLRYRETVEQSPLYQKIQTGRIDWQSVQTRLISDDPAKGLDRDRRKPPIAGRLQDALKQPEKSVYLVSPYFVPTKSGTDALAKLVQDGIDVTVLTNSLQATDVAAVHSGYVKYRKPLLKAGIKLYELQPNHAVPATKDKGLTGSSVTSLHAKTFIVDGKRIFIGSFNLDPRSARLNTEMGVVIESPKIAEQMERTLADTTPKYAYRVTLDRHNRLQWHDPATRKTYPNEPEAKLWKRIAAKILSLLPIEGLL

SEQ ID NO: 8127 - protein, 590 aa, Neisseria meningitidis
MILPARFSDGISLSLRLKLLTGVWVGLAALSVVLTLLLSLRLENAASVIEEAGNLRMQAYRLAYMAGEGSPRSQIDNQVDEFEKSLNRISQSDAIHPLIPSDTPLAYDLIQSMLIIDWQAHILPPLQSYRRPTQVDLYRFAGNIELFLQALENANEKNTWWLRRFQWAIMLMTLVSSVLMLFWHQIWVIRPLQALREGAERIGRRCFDIPVPEGGTPEFKQVGRCFNQMGGRLKILYDDLEGQVAEQTRSLEKQNQNLTLLYQTTRDLHQSYIPQQAAEHFLNRILPAVGADSGRVCLDGESDVYVSIHHADCGTAASDLGKYHEEIFPIEYQNETLGRLLLSFSDGISLTGDDRTLLQTLIRQLGVSLASAKQEEEKRLLAVLQERNLIAQGLHDSIAQALTFLNLQVQMLETAFAENKREEAAENISFIKTGVQECYEDVRELLLNFRTKISNKEFPEAVADLFARFTQQTGITVETAWENGSFLPPQEAQLQMIFILQESLSNIRKHARATHVKFTLSEHGGRFTMTIQDNGQGFDTEKIGEPTGSHVGLHIMQERAKRIHAVLEIRSQAQQGTTVSLTVASEESLK

SEQ ID NO: 8128 - protein, 693 aa, Neisseria meningitidis
MKSLKTFLIWGIVVLVGLASFTTLALSRGEQVSAVWMVTAAISVYCIAYRFYSLYIANRVMRLDPNRLTPAERHNDGLDYVPTHKGVLFGHHFAAIAGAGPLVGPVLAAQMGYLPGTLWIIFGVVFAGAVQDMMVLFVSMRRDGKSLGDIVKQELGTVPGVIASIGILMIMVIIMAVLALIVVKALVHSPWGTFTIAATMPIALFMGIYTRYIRPGKIGEISIVGFILLMLAVIYGEDVAKSSIGHWFDLDGIQLTWAIMIYGFVASVLPVWLLLTPRDYLSTFLKIGTIAALALGIVIVNPALQMPAVTHFIDGSGPVFSGALFPFLFITIACGAVSGFHALISSGTTPKMLENETHVRMIGYGGMLMESFVAIMALAAAASLDPGVYFAMNSPAALIGTDANTAAEVITTKLQFPVDAATLLHTAKEVGENTILSRAGGAPTLAVGMAHIMSRLIPGEAMMAFWYHFALLFEALFILTAVDAGTRVARFMIQDLGSIFYKPFGNTDSIPANLIATFFAVALWGYFLYTGVTDPLGGINSLWPLFGIANQMLAGVALIMCAVVLIKMKRDRYVWVVLVPAVGVLFVTCYAGLQKLFHSDPRISFLAHAGKYSDALAKNEVLAPAKDIGEMAQIIFNDKINAGLTILFLSVVVIVAAYGLRTALKARKVGWPTAKEIPAVYRDSKQPEAQSEA

SEQ ID NO: 8129 - protein, 194 aa, Neisseria meningitidis
MHILTAGVDEAGRGPFVGSVFAAAVILPETFDLPGLTDSKKLSEKKRDALAEMIKNQAAAWHVAAATPEEIASLNILHATMLAMKRAVDGLAVRPERIFIDGNRIPEHLGIPAEAVVKGDSKIIEISAASVLAKTARDAEMYALAQRHPQYGFDKHKGYGTKQHLEALKQYGVLPEHRRDFAPVRNLLAQQTLF

SEQ ID NO: 8130 - protein, 284 aa, Neisseria meningitidis
MKIVLISGLSGSGKSVALRQMEDSGYFCVDNLPLEMLPALVSYHIERADETELAVSVDVRSGIDIGQAREQIASLRGLGHRVEVLFVEAEEAVLVRRFSETRRGHPLSNQDMTLLESLKKEREWLFPLKEIAYCIDTSKMNAQQLRHAVRQWLKVERTGLLVILESFGFKYGVPNNADFMFDMRSLPNPYYDPELRPYTGMDKPVWDYLDGQPLVQEMVDDIERFVTHWLPRLEDESRSYVTVAIGCTGGQHRSVYVVEKLARRLKGRYELLIRHRQAQNLSDR

SEQ ID NO: 8131 - protein, 251 aa, Neisseria meningitidis; identical to SEQ ID NO: 2955

SEQ ID NO: 8132 - protein, 613 aa, Neisseria meningitidis
MQTNYLSETDSIMKKLICLFAVFLMLCGRAFALDANDLLPPEKAFVPELAVADDGVNVRFRIADGYYMYQAKIVGKTNPADLLGQPSFSKGEEKEDEFFGRQTVYHHEAQVAFPYAKAVGEPYKLVLTYQGCAEVGVCYPPVDTEFDISGNGTYHPQTDEPASAKDRFLQPSSQNGSGALPPPKGDEGGDSRFKLSWDTLNANLLAFFLAGLGLSFTACMYPLLPIVSSIVVGDKKAGKARAFVLSVVYVQGLALTYTLVGIVAGLTGALLTVWLQQAWVVLAASALMVVLALSMFGLFNIQLPNAVQSYFQNQSSRLSGGKIVSVFIMGILSALIVGPCVAPPLAFALGYIGQTGDAVLGGLALYTLALGTGVPLIAIGTFGGHILPKAGDWMNAVKYAFGFILLAVAVYLATPHLPYYLVVALYTLLMLVPACMLLVNGRRQKRRPKAVAFALGGILLIGGAWFGWQGANGKTTALHHFLTLNPPAEAGKSSEHGKMFADTAALKAAMDTALKEHPDKPVVLDFYADWCISCKEMAAYTLNQPEVHQAVDMERFFQIDVTANKPEHQALLKEYGLFGPPGVFVVRSDGSRSEPLLGFVKADKFIEWYEQNR

SEQ ID NO: 8133 - protein, 171 aa, Neisseria meningitidis
MKRTKKYPFLTLQRQRFHLNFENASSAAGIPAERDFYRWAWSALKNEYRRADISLILLDEEEARAYNRDYRGKDYATNVLSFALNEGEILPCQVSEKLYGDLIICPQVVLKEAAEQGKTPERHFAHLTIHGVLHLMGYDHIEDDEAEIMEAEEIRLMLAAGFPNPYQEDEY

SEQ ID NO: 8134 - protein, 78 aa, Neisseria meningitidis
VQADLAYAAERITHNYPEPTGADKDKISTVSDYFRNIRAHSIHPRVSVGYDFGDWRIAADYASYRKWKESNSSTRACP

SEQ ID NO: 8135 - protein, 344 aa, Neisseria meningitidis
LEDEDFIRAASMLAEEVFGFCIYKESKGSGGRFYERCWLMGSEDVLYGRVHFGGQNNTILFELTGTGCGVAKEGWESRLFAFLTNAIRPKITRVDIAKDFFNGEYSPNQAREDRNKGMFTCHHVKPKGECLGSDWEEDDEAKMTKGKTYGIGSRESSKYVRVYEKGKQLGDKTSTWTRFEIEFKAKDIVIPFEVLQNPGEYFGGAYPICERFAQKATRIHAVKEDKVISADRYLEWVKKQFGRAANGLKFIFPELDKAKLFELIEPSHHKLPKSLAPEAYDCAFLKAQAIHEQPAFKPYKDPYYMYEYYENLEKQLEQQKHVNNEESYNNFIYDKFARLPISWA

SEQ ID NO: 8136 - protein, 205 aa, Neisseria meningitidis; identical to SEQ ID NO: 721

SEQ ID NO: 8137 - protein, 328 aa, Neisseria meningitidis; identical to SEQ ID NO: 991

SEQ ID NO: 8138 - protein, 177 aa, Neisseria meningitidis
MAEFATIARPYAKALFGLAQEKSQIESWLGGLEKLAAVVQEGKVASLIDRPETNASEKADILIDLVGLKDKELKNFVIVLAGQKRLSILPEVYAQYQDLTLSFNHIKSAVIYSAYPLTDKQVGELAQMLNKRFDSELKISVEIEPELIGGIKVEVGDQVLDLSVQGKLSALYTTMTN

SEQ ID NO: 8139 - protein, 256 aa, Neisseria meningitidis; identical to SEQ ID NO: 975

SEQ ID NO: 8140 - protein, 107 aa, Neisseria meningitidis
MNAFAQALSSALDRCIATNTVAKQNRPVGFLYREAPVFENDSGWRFFSGDETDEYTDDPDNFSIVSLADIAKTNPETAVLLSQPEGSAWELAEDGTFQTVADWQPQD

SEQ ID NO: 8141 - protein, 181 aa, Neisseria meningitidis; identical to SEQ ID NO: 3612

SEQ ID NO: 8142 - protein, 389 aa, Neisseria meningitidis; identical to SEQ ID NO: 3300

SEQ ID NO: 8143 - protein, 380 aa, Neisseria meningitidis; identical to SEQ ID NO: 2973

SEQ ID NO: 8144 - protein, 563 aa, Neisseria meningitidis; identical to SEQ ID NO: 2966

SEQ ID NO: 8145 - protein, 146 aa, Neisseria meningitidis; identical to SEQ ID NO: 2999

SEQ ID NO: 8146 - protein, 279 aa, Neisseria meningitidis; identical to SEQ ID NO: 2627

SEQ ID NO: 8147 - protein, 209 aa, Neisseria meningitidis; identical to SEQ ID NO: 4591

SEQ ID NO: 8148 - protein, 841 aa, Neisseria meningitidis
MNPNSKHNTNFTNLLKPSDSDIKQFAAQHIRHLTDLLNRYAYEYYTLDAPSVPDAEYDKLFRELEALELNHPELKLPDSPTQRVGGEPLAGFAEVRHEVPMLSLTNAFSPQDENGVFDHAEMYAFDQRVRDGLDGGKPEYVIEPKFDGLAISLLYRDGVLVQAATRGDGTTGEDVTQNIKTVANIPLRLHGENTPELIEVRGEVLMQKADFAALNKRQAENGQKPFANPRNAAAGSLRQLDSRITAQRKLHFFPYSVARQQGGFVAEEHIQELAYFQALGFSLPNGNFGCFKNIDEVLAFYEQMQQKRPELPYEIDGMVVKVNSLAQQRELGFISRAPRWAIAHKFPAEEALTIVEAIDVQIGRTGAVTPVARLQPVFVGGVTVTNATLHNQDEVSRKDVRVGDTVVVRRAGDVIPEVVRVIFERRPMRETAVAVSDGIGHRQDDLFAETPSANQTQSVPLHKPYRLPTHCPICRSEIEREEGEAVARCSGGMLCQAQRAQGLIHFASRKAMDIDGLGEKQIEQLVAQDLVRHFADLYRLDIPTLQKMKETADKTVAESDQMPSEGSSVGASGKHKKQPVKWAENILAGIEASKTPELARFLFALGIRHVGERTAKTLAQAFGTLERVRRAPEPVLACLPDIGTVVARSIAHFFAQAEQQAMIDELLAAGVAPQTQAVTIPPARHAEPQRWIARLPGFKISENKAQALWELAGKNIEGLQTDKALPTDWQAWRSEPQNAALLENLKTFFAQMPSEDEAAQGSDGINKAVAGKTFVLTGTLPTLKRDQAQSLIEAAGGKVSGSVSKKTDYVVAGEAAGSKLEKANALGVSVLSEAELLTLLG

SEQ ID NO: 8149 - protein, 281 aa, Neisseria meningitidis
MKNKTSSLLLWLAAMMLTACSPSKEDKTKENGASAASSTASAASSSAPQTDLQPAASAPDNVKQAESVPPSNCTDLHPATGIDDLMQQIAEHIDSDCLFALSHHELETRFGLPGGGYDNIQRLLFPDIRPEDPDYHQKIILAIEDLRYGKRTISRQAQDALMEQERRLREATLLLIQGSQETRGQGEEPKRTRYFEVSATPAYSSRHNNGLGGNFQYIGQLPGYLKIHGEMLENQSLFRLSNRERNPDKPFLDIHFDENGKITRIVVYEKNIYFNPNLGRR

SEQ ID NO: 8150 - protein, 945 aa, Neisseria meningitidis
MLDKYNPAEIESKHYQNWEEQGYFQPDMDLTKPSFSIQLPPPNVTGTLHMGHAFNQTIMDGLTRYYRMKGCNTAWIPGTDHAGIATQIVVERQLAAQNVSRHDLGREKFLEKVWEWKEVSGGTITQQMRRVGCSADWTREYFTMDDVRAETVTEVFVRLFEQGLIYRGKRLVNWDPVLGTAVSDLEVESVEEQGSMWHIRYPLADNPAEAVIVATTRPETLLGDVAVAVNPEDERYTHLIGKELILPLTGRTIPVIADEYVEKDFGTGCVKITPAHDFNDYEVGKRHDTRLINVFDLEAKVLANAEVFNFKGEAQPGFALPEKYAGLDRFAARKQMVADLQEQGLLVEIKAHTLMTPKGDRTGSVIEPMLTSQWFVAMSATPNGGEPDSEFKGLSLADKAKKAVDSGTVRFIPENWVNTYNQWMNNIQDWCISRQLWWGHQIPAWYDEAGNVYVARNQAEAEKQAGKTGLTREEDVLDTWFSSALVPFSTLGWPSETDELKAFLPSNVLVTGYEIIFFWVARMIMMTTHFTGKVPFKDVYIHGIVRDHEGKKMSKSEGNVIDPVDLIDGIDLDKLLVKRTTGLRKPETAPKVEEATKKLFPEGIPSMGADALRFTMASYASLGRSVNFDFKRAEGYRNFCNKIWNATNFVLMNTENQDCGYGATAAEPRGYSFPDMWIVGRLNQTIEQVTQAYETYRFDLAAETLYSFVWNDYCDWYLELAKVQLQTGCASRQRATRHTLLRVLEAALRLLHPIIPFITEELWQTVAPMCDAKTADSIMLARFPEADGGDIVQTAFEQMTVLQDLIGAVRNLRGEMGIQPNVKAPLFVESADDLADYLKYLPMMTRLIEAQQVAALPESEDAPVAVCNGARLMLKVEIDKAAETARLSKEAEKLQKALDKLNAKLSKPGYTEKAPAHLVEKDKADLAELEDKMAKVQTQLSKLKD

SEQ ID NO: 8151 - protein, 213 aa, Neisseria meningitidis; identical to SEQ ID NO: 2602

SEQ ID NO: 8152 - protein, 219 aa, Neisseria meningitidis
MIKNISKLINHAVLIGFIPNIVFAYPIFAENPASYQNIHVRSWKARRDSGIVKQDLDFSCGAASIATLLNNFYGRHYSEAEILDKMDKTQMRASFDDMQRIMPELGFEAQGYALPFEQLVQLKIPVIVYLKYRKNNHFSVLNGINGETVLLADPSLGHVSMSKSQFLSAWKTRDGEMEGKILAIVPKNTDFVRNQMFFNKNPVRQTRFTVEQIQMRQKR

SEQ ID NO: 8153 - protein, 213 aa, Neisseria meningitidis
MKLYIYDHCPFCVRARMAAGLFGADVEEAVLANDDEATPIGMIGAKQVPVLQKEDGSFMGESLDIVRHFDREDRLKDEVRPEIRAWLDKVGGYNDKLVQPRVIKIGLPEFATPEAVKYFTDKKEKSIGSFSANLNKTAQYLERINADLQELENLMDGASDGINGGIGMEDILVFPVLRNLTVVRGIEWPQKVMGYLMMMSEKSGVPLYFDRAL

SEQ ID NO: 8154 - protein, 313 aa, Neisseria meningitidis
MSATEIKKSKAKITAYSKLVAGTASAVVGGDVNTAANAAQIAVENNTLYPRCVGAKCDEFQKEQQKWIRENPEEYREVLLLQTGFIPIIGDIQSFVQAQTAADHLFALLGVVPGIGESIQAYKVAKAAKNLQGMKKALDKAATVATAQGYVSKTKIKIGQIELRVTAATDKQLLKAIGEGRDTTGKMTEQLFDSLAKQNGFRVLSGGKYGGNNGFDHVWQAADGSVVLIVESKQIRNGTVQLNPNGAGGYTQMSREWIKQVVKSLPDGSPAKAVVLKANQNGKLKTAIAGVDRQTGKAVILSVKVPSKTNIRR

SEQ ID NO: 8155 - protein, 323 aa, Neisseria meningitidis; identical to SEQ ID NO: 3380

SEQ ID NO: 8156 - protein, 704 aa, Neisseria meningitidis; identical to SEQ ID NO: 7337

SEQ ID NO: 8157 - protein, 466 aa, Neisseria meningitidis
MTPSALKKTVLLLGTAFAAASVHASGYHFGTQSVNAQSTANAAAAEAADASTIFYNPAGLSKIDSSQISVNANIVLPSIHYEADSATDFTGLPVQGSKSGKITKTTVAPHIYGAYKVNDNLTVGLGVYVPFGSATEYEKDSVLRHNINKLGLTSIAVEPVAAWKLNDRHSFGAGIIAQHTSAELRKYADWGIKSKAEILTAKPPKPNGVAEAAKIQADGHADVKGSDWGFGYQLAWMWDINDRARVGVNYRSKVSHTLKGDAEWAADGAAAKAMWSTMLAANGYTANEKARVKIVTPESLSVHGMYKVSDKADLFGDVTWTRHSRFDKAELVFEKEKTVVKGKSDRTTITPNWRNTYKVGFGGSYQISEPLQLRAGIAFDKSPVRNADYRMNSLPDGNRIWFSAGMKYHIGKNHVVDAAYTHIHINDTSYRTAKASGNDVDSKGASSARFKNHADIIGLQYTYKFK

SEQ ID NO: 8158 - protein, 425 aa, Neisseria meningitidis
MRSSDILIVDDEIGIRDLLSEILQDEGYSVALAENAEEARKLRHQVRPAMVLLDIWMPDCDGITLLKEWAKNGQLNMPVVMMSGHASIDTAVEATKIGALDFLEKPISLQKLLSAVENALKHGAAKIETGPVFDKLGNSAAIQEMNREVGAAVKRASPVLLTGEAGSPFETVARYFHKNGTPWVSPARVEYLIDMPMELLQKAEGGVLYVGDIAQYSRNIQAGIAFIVGKAEHRRVRVVASGSRAAGSDGIACEEKLAELLSESVVRIPPLRMQHEDIPFLIQGIACNVAESQKIAPAAFSEEALAALTRYDWPGNFDQLQSVVATLLLEADGQEIGAAAVSSLLGQNVPAEGAEDMVGGFNFNLPLRELREEVERRYFEYHIAQEGQNMSKVAQKVGLERTHLYRKLKQLGIGVSRRAGEKTEE

SEQ ID NO: 8159 - protein, 172 aa, Neisseria meningitidis; identical to SEQ ID NO: 1304

SEQ ID NO: 8160 - protein, 462 aa, Neisseria meningitidis
MNTRTEHDTMGNVEVPSEAYWGAQTQRSRNNFKIGGETLPQPLIYALALVKKAAAATNVSLGRIKPEQADLITQAADDVLNGRLDGQFPLVVWQTGSGTQSNMNMNEVLANRANEIAGTGLAAYQPVHPNDHVNHAQSTNDAFPTAIHVAAAIEINRHLIPAVKALRDTLDKKAQAFAPIVKIGRTHLQDATPLTLGQEFSGYVSQLDHGLGRLNDALKDLYKLALGGTAVGTGLNSHPEYAEKAAAKLAELSGLPFVSAPNKFEALGGRDAAVAASGALKTLAASLNKIANDIRWLASGPRCGLGEIKIPENEPGSSIMPGKVNPTQCEAMTMVCCQVFGNDVTIGMAGASGNFELNVYMPVIAYNLLQSIRLLGDACNSFNEHCAVGIEPVPEKIDYFLHHSLMLVTALNRKIGYENAAKVAKTAYKNNKSLRETAVELGLLTGEEFDELVVPADMVHPR

SEQ ID NO: 8161 - protein, 434 aa, Neisseria meningitidis; identical to SEQ ID NO: 3368

SEQ ID NO: 8162 - protein, 270 aa, Neisseria meningitidis
MENIGRQRPIGVFDSGIGGLTNVRALMERLPMENIIYFGDTARVPYGTKSKATIENFSMQIVDFLLEHDVKAMVIACNTIAAVAGQKIRQKTGNMPVLDVISAGAKAALATTRNNKIGIIATNTTVNSNAYARAIHRNNPDTLVRTQAAPLLVPLVEEGWLEHEVTRLTVCEYLKPLLADGIDTLVLGCTHFPLLKPLIGREAHNVALVDSVITTAEETARVLAQEGLLNTDNNNPDYRFYVSDIPLKFRTIGERFLGRTMEQIEMVSLG

SEQ ID NO: 8163 - protein, 206 aa, Neisseria meningitidis; identical to SEQ ID NO: 1164

SEQ ID NO: 8164 - protein, 1045 aa, Neisseria meningitidis
MQNMKNQVRGSGMDARSNPANVSDDLQNSSGHIGVNTRYRLTKLGEQMARLPIDPKIARILLAAKKHDCMAEILVIASALSIQDPRERPLEARDAAAKAHERFTDKQSDFLAYLNIWDSFQRERDKGLSNKQLVQWCRQYFLSHLRMREWRELHHQLAQTAIEMGLTTKEAAFRRPPEGRQLTSSENAGDQDLSAKLKQKQLDKKQHRAQIRTAKEAGYEQIHRALLTGLIANVGMKSPDGNDYTGARGSRFHLFPASALFKAKPKWVMAAELVETTRLYARDVAVIQPEWIEQEAPHLVRYHYFEPHWEQKRGEVVASERVTLYGLTVLPRRPVSYGKVAPEEAREIFIRSALVAQECDLKADFFVHNKKLIKEITELEHKSRKQDVLVDDEALFAFYNERLPDFYTADAVSDDLHPTNPQQTAPSYAREERREGKTVAAQTNFSATAANPLPNPLPQEREQSAAASAVSNDLHPANPQQTAPSPVGEGRGEGKTVASQTNFSATTANPLPNPLPNPLPQEGEQSAAASAVSNDPQPQKQPAPQKDRLKPLPLADIRTFQVWLKTAERENPRLLFLSRDDLMQHAAAHITEEQFPKFWQTADGKFKLSYRFEPHHPLDGVTLTLPLTVLNRLHAPSLEWLVPGMLREKIQLLIKALPKQIRRICVPVPDFITQFLSQNPDRNAPILPQLAQAIAKTAGDIRILEQINQDEWAAFRLPEHCYFNLRIIDDGGQELAGGRKLHELQQQLGQAAAVTFRDNTQEFERDNVTTWDIGTLPESIKFARGKQQLTGYLGLQKEKDGRIALRLCDTTEAAEQAHRQGVIELMKLQLKEQVKDLNKGIQGFTQAAMLLKHINADTLCDDLTQAVCDRAFIGEDELPRNEKAFKEQIKRARSRLPAVKEALSRYLQETAAAYAELNSKLGKHPLTHLLRQRLQTLLAAGFATRTPWAQWPRLPIYLKAMTLRLEKYSSNPARDAAREADIQELEQMWQEKTDSLIKQGLPISDGLAAFKWMIEELRVSLFAQELKTPYPVSVKRLLKMWEDLN

SEQ ID NO: 8165 - protein, 294 aa, Neisseria meningitidis
MSSGNIHIHSMTGFANAAAECGSKRINLDLRAVNHRFLDIQIRMPDDLRYLESGIREKISSHIARGKVECKIQIQDAENGSQSLELNRDLVGQLAEINKDLRKHHDLAKLGVADILRFPGVLASQRENTEELAKSITELTEKALKDFTAARKREGKKLGEHLLQRLEAMEEIIDALSELFPTLLETHKEKIRARLVEAVGSIDNDRLQQEFALFIQKSDIDEEFSRLRTHIAEVRRIVTEHKGSSGKRLDFLMQELNREANTLGSKSIATECTQASVELKVLIEQMREQVQNIE

SEQ ID NO: 8166 - protein, 289 aa, Neisseria meningitidis
MKPIRKAVFPVAGMGTRFLPATKASPKEMLPIVDKPLIQYAVEEAVEAGCTEMVFVTGRNKRSIEDHFDKAYELETELEMRHKDKLLEHVRNILPPNITCLYIRQAEALGLGHAVLCARAAIGDEPFAVILADDLIDAPKGALKQMVEVYGRSGNSILGVETVEASQTGSYGIVETEQLKQFQRIIGIVEKPKPEDAPSNLAVVGRYILTPRIFDLLTGLPRGAGNEIQLTDGIAKLLDHEFVLAHPFEGTRYDCGSKLGYLEATVAYGLKHPETGEPFRRLLEKYRTE

SEQ ID NO: 8167 - protein, 765 aa, Neisseria meningitidis
MISQLTEKGVRVPGGFATTADAYRAFLAHNGLSERISAALAKLDVEDVAELARVGKEIRQWILDTPFPEQLDAEIEAAWNKMVADAGGADISVAVRSSATAEDLPDASFAGQQETFLNINGLENVKEAMHHVFASLYNDRAISYRVHKGFEHDIVALSAGVQRMVRSDSGASGVMFTLDTESGYDQVVFVTSSYGLGENVVQGAVNPDEFYVFKPTLKAGKPAILRKTMGSKHIKMIFTDKAEAGKSVTNVDVPEEDRNRFSITDEEITELAHYALTIEKHYGRPMDIEWGRDGLDGKLYILQARPETVKSQEEGNRNLRRFAINGDKTVLCEGRAIGQKVGQGKVRLIKDASEMDSVEAGDVLVTDMTDPDWEPVMKRASAIVTNRGGRTCHAAIIARELGIPAVVGCGNATELLKNGQEVTVSCAEGDTGFIYAGLLDVQITDVALDNMPKAPVKVMMNVGNPELAFSFANLPSEGIGLARMEFIINRQIGIHPKALLEFDKQDDELKAEITRRIAGYASPVDFYVDKIAEGVATLAASVYPRKTIVRMSDFKSNEYANLVGGNVYEPHEENPMLGFRGAARYVADNFKDCFALECKALKRVRDEMGLTNVEIMIPFVRTLGEAEAVVKALKENGLERGKNGLRLIMMCELPSNAVLAEQFLQYFDGFSIGSNDMTQLTLGLDRDSGLVSESFDERNPAVKVMLHLAISACRKQNKYVGICGQGPSDHPDFAKWLVEEGIESVSLNPDTVIETWLYLANELNK

SEQ ID NO: 8168 - protein, 257 aa, Neisseria meningitidis
MNTIADVQSSRDLRNLPINQVGIKDLRFPITLQTAEGIQSTVARLTMTVYLPAEQKGTHMSRFVALMEQHAEALDFAQLRRLTAEMVALLDSRAGKISVSFPFFRKKTAPVSGIQSLLDYDVSLTGEMKDGAYGHSMKVMIPVTSLCPCSKEISQYGAHNQRSHVTVSLTADAEVGIEEVIDYVEAQASCQLYGLLKRPDEKYVTEKAYENPKFVEDMVRDVATSLIADKRIKSFVVESENFESIHNHSAYAYIAYP

SEQ ID NO: 8169 - protein, 273 aa, Neisseria meningitidis; identical to SEQ ID NO: 221

SEQ ID NO: 8170 - protein, 107 aa, Neisseria meningitidis; identical to SEQ ID NO: 2106

SEQ ID NO: 8171 - protein, 179 aa, Neisseria meningitidis; identical to SEQ ID NO: 403

SEQ ID NO: 8172 - protein, 630 aa, Neisseria meningitidis; identical to SEQ ID NO: 2275

SEQ ID NO: 8173 - protein, 212 aa, Neisseria meningitidis
MQIAIIDYGMGNLHSVLKSVWTAGQLAGKNTEIFLSGDPDRVSRADKVIFPGQGAMPDCIAALTRGGLDEAVKDALKNKPFFGICVGAQLLFDHSEEGNTDGLGWFGGKVRRFERDLRDPQGCRLKVPHMGWNTVRQTQNHPLFQGIPQDTRFYFVHSYYFAPENPETILGESDYPSPFACIVGKDNVFATQFHTEKSHDAGLTMLKNFLNW

SEQ ID NO: 8174 - protein, 157 aa, Neisseria meningitidis
MSRNTEELQGISLLGNQKTRYPTGYAPEILEAFDNKHPDNDYFVKFVCPEFTSLCPMTGQPDFATIYIRYIPHIKMVESKSLKLYLFSFRNHGDFHEDCVNIIMKDLIALMDPKYIEVFGEFTPRGGIAIHPFANYGKAGTEFETLARKRLFEHDSQ

SEQ ID NO: 8175 - protein, 224 aa, Neisseria meningitidis
VQADLAYAAERITHDYPKATGANNTSTVSDYFRNIRAHSIHPRVSVGYDFGDWRIAADYASYRKWNNNKYSVNTKELENKHNNKKDLKTENQENGTFHAASSLGLSAIYDFKLNDKFKPYIGARVAYGHVRHSIDSTKKTTEVVTSTHGGADTKPTIYNGESTQNAYHESHSIRRLGLGVVAGVGFDITPKLTLDTGYRYHNWGRLENTRFKTHEVSLGMRYHF

SEQ ID NO: 8176 - protein, 475 aa, Neisseria meningitidis; identical to SEQ ID NO: 2942

SEQ ID NO: 8177 - protein, 461 aa, Neisseria meningitidis
MMARDNRIQMFPHEWRASTTLSGVYALRMLGMFLVLPVLAVYAASLPGAEGNKTLVGLAMGIYGLTQALLQLPLGIASDKFGRKKTIYVGLIVFAAGSFLAAAADTLPMLIAARAIQGAGAVSAAVTALLADLTRDGVRTRAMAMIGLSIGLTFSVSLVVAPVIADAVGVRGLFLLTGILTVASIGVVAWMTPDPEVSKLHEDTQAQPSRIGEVLKNRRLLTLDFGIFALHAAQMALFTALPFAMTQLGLEKIQHWKVYLPSTITGLVVMVPLIIVGETRNKLKQVFVLGIVCIAAAQLGLLSGMRSVGLITAYLVVYFIGFNVLEASLPSMVSKIAPSDLKGTAMGVYNTMQSLGLFAGGAAGGLLFQKYGFSGVFAFCSILMLLWLVIAVLSPAPKPVKNLSYPVGGVWQGNQEGLYRALSELEGVEDIGFSFDGQTVYLKVLQKGFDQAAAEKIITGV

SEQ ID NO: 8178 - protein, 295 aa, Neisseria meningitidis; identical to SEQ ID NO: 3063

SEQ ID NO: 8179 - protein, 328 aa, Neisseria meningitidis; identical to SEQ ID NO: 2126

SEQ ID NO: 8180 - protein, 278 aa, Neisseria meningitidis
MLPLKTPGVLPGFKLSLGLTVLCLSLLVVLPFAMMAAKAAEIGWGGFWNTIAEPNALAAVWLSLRMSFYAMLTNVVFGTLVAWVLVRYEFPGKGLANALVDLPFALPTAVTGIALATLYAPNGWIGRFFEPLGIKIAFTPVGIWIALVVVSLPFIVRAVQPVLEELSGEYEEAAATLGANRFTTFRRVLLPEITPALLTGAGMMFARATGEYGSVIFIAGNIPMVSEILPLIITGKLEQFDVQGASAVALFMLLVSFVILFALNVMQWALGRRSGAKG

SEQ ID NO: 8181 - protein, 311 aa, Neisseria meningitidis
MGHNMMTTQKWYEHITNVIIGNTANFNSGCPESIDYVDERKGVPLAAMKYILMYTEAAASHAYLFEHDLKKFKQYAYVAGKLGILQSVDDEDPEPFFFPCDMLNIQDPMFLMLMSDSPQLREFLVRNIDNIANDTEAFVNRYDLNRHMIYNTLLMVEGKQLDRLKQRSEKVLAHPTPSKWLQKRLYDYRFFLAFAEQDAEAMKAALEPLFDKKTARMAAKETLSYFDFYLQPQIVTYAKIASMHGFDLGIDQEIAPRDLIVYDPLPADEYQDIFDFMKQYDLSYPYEYLQDWIDYYTFKTDKLVFGNAKRE

SEQ ID NO: 8182 - protein, 398 aa, Neisseria meningitidis
MSQKLILVLNCGSSSLKGAVLDNGSGEVLLSCLAEKLNLPDAYITFKVNGEKHKVDLSAHPDHTGAVEALMEELKAHGLDSRIGAIGHRVVSGGELYSESILVDDEVIAGIEKCIPLAPLHNPAHLLGLRAAQSIFKGLPNVVVFDTSFHQTMPEVAYKYAVPQELYEKYGLRRYGAHGTSYRFVADETARFLGKDKKDLRMVIAHLGNGASITAVANGESRDTSMGLTPLEGLVMGTRSGDIDPSVFGFLAENANMTIAQITEMLNKKSGLLGISGLSNDCRTIEEEAAKGHKGAKLALDMFIYRLAKYIGSMAVAAGGLDALVFTGGIGENSDIIRERVIGYLGFLGLNIDQEANLKARFGNAAVITTADSKAVAVVIPTNEELMIAHDTARLSGL

SEQ ID NO: 8183 - protein, 539 aa, Neisseria meningitidis
MDNLVWDGVPDIRTLDQTIRKHAHPLNLIVCLPDNQIPDFQTAQDASDAECRLKHRLDQATQCLQFDSINLIEHILPDVRFWLVPPSRTRRLREHFHHISWQTEAIPQTESKPDKPWFALPQTSERQKPEHILVIGAGISGAATAHALASHGISVTVLEARKAAQAASGNRQGLLYAKISPHDTEQTELLLAGYGYTKRLLGHILPESETWGGNGIIHLNYSRTEQQRNHELGLQKHHNHLYRSITQAEAEKIAGIPLSVPYDHPSCGLYWQHGVWLNPPAFVRTLLNHPLIGLHEDTPLTDISHDGEKWIASTPNGIFSATHIIYCTGAHSPRLPETNLAALPLRQIRGQTGLTPSTPFSEQLRCAVSGESYISPSWHGLHCYGASFIPNSSHTGWNEAEEASNRQALAHLNPALSESLFAANPNPQKHQGHAAIRCDSPDHLPLVGALGDIAAMQQTYAKLALDKNYRIDAPCPYLPNAYANTAHGTRGLATAPICAAAVAAQILGLPHPFSQRLRHALHPNRTIIRAIVRRKDLTP

SEQ ID NO: 8184 - protein, 136 aa, Neisseria meningitidis
VEGYIEKLHITPANAHECKHLPPLLEGIAEGTTVYADKGYDSAENRQHLEERQLLDGIMRKACRNRPLSEAQTKRNRYLSKTRYVVEQSFGTLHRKFRYARSTYFGLIKVSAQSHLKAMCLNLLKAANRLSAPAAA

SEQ ID NO: 8185 - protein, 291 aa, Neisseria meningitidis; identical to SEQ ID NO: 2264

SEQ ID NO: 8186 - protein, 352 aa, Neisseria meningitidis; identical to SEQ ID NO: 2780

SEQ ID NO: 8187 - protein, 480 aa, Neisseria meningitidis; identical to SEQ ID NO: 3560

SEQ ID NO: 8188 - protein, 217 aa, Neisseria meningitidis
MKITHCKLKKKVQKELLRFFVLEVTARSAADILGIHPNSAVLFYRKIRMVISHYPALAADEVFEGSVELDESYFGGRRKGRRGRGAAGKVVVFGILKRNGRVYTVVVDNARSETLLPVIKRKIMPDSIVYTDSLSSYDKLHVSGFIHHRINHSKEFADRQNHINGIENFWNQAKRALRKYNEIDRKSFPLFLKECKFRFNFGTPSRQLKILRDWCGI

SEQ ID NO: 8189 - protein, 152 aa, Neisseria meningitidis; identical to SEQ ID NO: 1697

SEQ ID NO: 8190 - protein, 140 aa, Neisseria meningitidis; identical to SEQ ID NO: 662

SEQ ID NO: 8191 - protein, 215 aa, Neisseria meningitidis; identical to SEQ ID NO: 4487

SEQ ID NO: 8192 - protein, 371 aa, Neisseria meningitidis
MLKFTLHKKDGYARRGTLELNHGKIETPVFMPVGTYGSVKAMNPQNLHDIKAQIILGNTYHLWLRPGLEVVEQFGGLHGFIGWDKPILTDSGGFQVFSLSDMRKLTEEGCTFKSPINGDKLFLSPEISMKIQTVLNSDIAMQLDECTPGEATREQAKKSLQMSLRWAERSKKAFEDLKNPNALFGIVQGAMYEDLREESLRGLEQFDFPGLAVGGLSVGEPKPEMYRMLRAVGPILPEHKPHYLMGVGTPEDLVYGVAHGIDMFDCVMPTRNARNGWLFTRFGDLKIKNAKHKLDKRPIDESCTCYACQNFSRAYLHHLHRTGEILGAQLNTIHNLHFYQVIMAEMREAVEQGKFADWQARFHENRARGTD

SEQ ID NO: 8193 - protein, 267 aa, Neisseria meningitidis; identical to SEQ ID NO: 2269

SEQ ID NO: 8194 - protein, 258 aa, Neisseria meningitidis
MAKKFDKDSFSGTLIVVLAVSLICSVIVAGAVVGLKPIQEKQKLQDKQGYILSVAGLMDKDTDIGKTFAERIEQRVVDLATGEYVADAPKDFSARIAGKDPAQSIRIKPEDDLAGIKSRAKYTEVYLVKGEDGKIGQIILPMHGNGLWSVMYGFVAIQPDGNTINGITYYEQGETPGLGGEIGNPLWQQKFVGKKLFDGQGKLALHVGKGAGSDKEHGVDALSGASLTSKGVQGSFAYWFGENGYIPYLNKLKSAGAQ

SEQ ID NO: 8195 - protein, 148 aa, Neisseria meningitidis
MKAIQKGFTLIELMIVIAIVGILAAVALPAYQDYTARAQMSEALTLAEGQKSAVVEYYSDNGTFPNSNTSAGIAASNEIKGKYVASVKVEGNASVASITATMNSSNVNKDIKGKTLVLVGKQNSGSFSWECKKGSVDEKFLPSTCRTK

SEQ ID NO: 8196 - protein, 455 aa, Neisseria meningitidis
MPDLHTEFSRLLPADEIAELSPTLLKDQRNRFTSAPDIILQPRSVESVQTIMRFCYEHRIPVTPQGGNTGLCGAAVSENGVLLNLSKLNRIRSINLSDNCITVEAGSVLQTVQQAAEASNRLFPLSLASEGSCQIGGNIACNAGGLNVLRYGTMRDLIIGLEVVLPNGELVSHLHPLHKNTTGYDLRHLFIGSEGTLGIITAATLKLFARPSDKATAWVGIPDIESAVRLLTETQAHFAERLCSFELIGRFAAELSSEFSKFPLPTHSEWHILLELTDSLPDSNLDDRLVEFLYKKGFTDSVLAQSEQERIHMWALRENISASQRKLGTSIKHDIAVPIGRVADFVRRCAKDLEQNFKGIQIVCFGHLGDGSLHYNTFLPEILSNEVYRYENDINDAVYRNVLACNGTIAAEHGIGIIKKQWLDKVRTPAEIALMKSIKQHLDPYNIMNPGKLLP

SEQ ID NO: 8197 - protein, 61 aa, Neisseria meningitidis; identical to SEQ ID NO: 2615

SEQ ID NO: 8198 - protein, 216 aa, Neisseria meningitidis; identical to SEQ ID NO: 2167

SEQ ID NO: 8199 - protein, 265 aa, Neisseria meningitidis; identical to SEQ ID NO: 1691

SEQ ID NO: 8200 - protein, 861 aa, Neisseria meningitidis
MLEAYRKAAAERAALGIPALPLNAQQTADLVELLKSPPAGEGEFLVELLAHRVPPGVDDAAKVKASFLAAVAEGSASSPLISPEYATELLGTMLGGYNIHALIELLDDDKLAPIAAKGLKHTLLMFDSFHDVQEKAEKGNKYAQEVLQSWADAEWFTSRAKVPEKITVTVFKVDGETNTDDLSPAPDAWSRPDIPLHALAMLKNPRDGITPDKPGEVGPIKLLEELKAKGHPVAYVGDVVGTGSSRKSATNSVIWHTGEDIPFVPNKRFGGVCLGGKIAPIFFNTQEDSGALPIEVDVSALKMGDVVDILPYEGKIVKNGETVAEFELKSQVLLDEVQAGGRINLIIGRGLTAKAREALKLPASTAFRLPQAPAESKAGFTLAQKMVGRACGLPEGQGVRPGTYCEPRMTTVGSQDTTGPMTRDELKDLACLGFSADMVMQSFCHTAAYPKPVDVKTHKELPAFISTRGGVSLRPGDGVIHSWLNRLLLPDTVGTGGDSHTRFPIGISFPAGSGLVAFAAATGVMPLDMPESVLVRFSGKLQPGVTLRDLVNAIPLYAIKQGLLTVAKAGKKNIFSGRILEIEGLPDLKVEQAFELTDASAERSAAGCTVKLNKEPIIEYMKSNVVLMKNMIADGYQDPRTLERRIKAMEKWLANPELLEADKDAEYAAVIEINMDDIKEPIIACPNDPDDVCFMSERSGTKIDEVFIGSCMTNIGHFRAASKLLEGKADTPVRLWIAPPTKMDAKQLSDEGHYGVLGRAGARMEMPGCSLCMGNQAQVREGATVMSTSTRNFPNRLGKNTFVYLGSAELAAICSKLGKIPTVEEYQANIGIINEQGDKIYRYMNFNEIDSYNEVAETVNV

SEQ ID NO: 8201 - protein, 244 aa, Neisseria meningitidis
MLFRKTTAAVLAATLMLNGCTLMLWGMNNPVSETITRKHVDKDQIRAFGVVAEDNAQLEKGSLVMMGGKYWFVVNPEDSAKLTGILKAGLDKPFQIVEDTPSYARHQALPVKLESPGSQNFSTDGLCLRYDTDRPDDIAKLKQLEFEAVELDKQTIYTRCVSAKGKYYATPQKLNADYHFEQSVPADIYYTVTEKHTDKSKLFANILYTPPLFDTGCGGRGTGFACGGSGCGRGCRPQMNSNAV

SEQ ID NO: 8202 - protein, 156 aa, Neisseria meningitidis
MTDTDTQADRFEQMMWQAVDKLFERHDGKLESMDGWEQELVLIWRAEADIGNGGILQFVCNWGFPAAEKTCSVLKKIGAVHSAMLIHRAADALRKEIRHLQSEGKNLKEMWDITKHLDNKTASLPNSLDEQYWQDPDKLYLPGWQYYSGNPVQTLF

SEQ ID NO: 8203 - protein, 289 aa, Neisseria meningitidis
MKRIFLPALPAILPLSTYADLPLTIEDIMTDKGKWKLETSLTYLNSENSRAELAAPVYIQTGATSFIPIPTEIQENGSNTDMLAGTLGLRYGLTGNTDIYGSGSYLWHEERKLDGNGKTRNKRMSDISAGISHTFLKDDKNPALIGFLESTVYEKSRNKASSGKSWLIGATTYKAIDPVVLSLTAAYRINGSKTLSSNTKYKAGNYWMLNPNISFAANDRISLTGGIQWLGKQPDRLDGKKESARNTSTYAHFGAGFGFTKTTALNASARFNVSGQSSSELKFGVQHTF

SEQ ID NO: 8204 - protein, 284 aa, Neisseria meningitidis
MPPIPAPSAPSEHTVAWVFGQPVTDLPQDLFIPPDALKVVLGSFQGPLDLLLYLIRKQNIDVLDIPMVKITEQYLHYIAQIETYQFDLAAEYLLMAAMLIEIKSRLLLPRTETVEDEEADPRAELVRRLLAYEQMKLAAQGLDALPRAGRDFAWAYLPLEIAVEAKLPEVYITDLTQAWLGILSRAKHTRSHEVIKETISVRAQMTAILRRLNGHGICRFHDLFNPEQGAAYVVVNFIALLELAKEGLVGIVQEVGFGEIRISLNHEGAHSDGIFGTQGKCDVF

SEQ ID NO: 8205 - protein, 705 aa, Neisseria meningitidis
MRRFLPIAAICAVVLLYGLTAATGSTSSLADYFWWIVAFSAMLLLVLSAVLARYVILLLKDRRDGVFGSQIAKRLSGMFTLVAVLPGVFLFGVSAQFINGTINSWFGNDTHEALERSLNLSKSALNLAADNALGNAIPVQIDLISTASLSGNMGRVLEHYANGFTQLSLYNAASGKIEKSINPHKLDQPFPGKARWEKIQQAGSVRDLESIGGVLYAQGWLLVGTYNGRDYALFFRQPIPKGVAEDAVLIEKARAKYAELSYSKKGLQTFFLATLLIASLLSIFLALVMALYFARRFVEPVLSLAEGAKAVAQGDFSQTRPVLRNDEFGRLTKLFNHMTEQLSIAKEADERNRRREEAARHYLECVLEGLTTGVVVFDEQGCLKTFNKAAEQILGMPLTPLWGSSRHGWHGVSAQQSLLAEVFAAIGAAAGTDKPVHVKYAAPDDAKILLGKATVLPEDNGNGVVMVIDDITVLIHAQKEAAWGEVAKRLAHEIRNPLTPIQLSAERLAWKLGGKLDEQDAQILTRSTDTIVKQVAALKEMVEAFRNYARSPSLKLENQDLNALIGDVLALYEAGPCRFAAELAGEPLMVAADTTAMRQVLHNIFKNAAEAAEEADVPEVRVKSEAGQDGRIVLTVCDNGKGFGREMLHNAFEPYVTDKPAGTGLGLPVVKKIIEEHGGRISLSNQDAGGACVRIILPKTVKTYA

SEQ ID NO: 8206 - protein, 87 aa, Neisseria meningitidis; identical to SEQ ID NO: 932

SEQ ID NO: 8207 - protein, 315 aa, Neisseria meningitidis
MTDITPFANRLGKNIKHLMKWAKRNGIEAWRIYDRDIPQFPFAADVYGDRIHLQEYDTGWLMRPEEYEAWLAEVLEAVAFVTGFEPEQIRLKRRERQKGLQQYEKTGKAGDDFVITENGRKFWVNLDKYLDTGLFLDHRNTRKKVGETAAGKRFLNLFSYTGSFTVYAATGGAASSETVDLSNTYLDWARRNFELNGIDTERHKIVRADVFQYLQTAYGEGRRFDLIVMDPPSFSNSKKMSDILDIQRDHKKLIDGAVKLLASDGILYFSNNLRSFVLDDLVSEQYAVKDISKQSVPEDFRNKKIHRCWEIRHKS

SEQ ID NO: 8208 - protein, 69 aa, Neisseria meningitidis
MWHIVAIGYLFVAVMFSAAQPSIARTLIYLVFWAVLPTVFTVFVVTIRRRNRLMKQQEQAEFEQQRAQR

SEQ ID NO: 8209 - protein, 74 aa, Neisseria meningitidis; identical to SEQ ID NO: 5759

SEQ ID NO: 8210 - protein, 286 aa, Neisseria meningitidis
MAKVKGGLGRGLDSLLANGADNSSGDRLTTVAVKDIRPGRYQARVQIDDEALQELADSIKAQGVIQPVIVREHGLSRYELIAGERRWRAAQIAGLTEIPAVIKTISDETALAMGLIENLQRENLNPIEEAQGLKRLADEFGLTHETIAQAVGKSRSAISNSLRLLSLPEPVQEMLYQRRLEMGHARALLTLPVVEQLELAQKAVKNGWSVREVERRSQAALQNKRPEPKKTAAADIGRLNDLLTEKLGVNAEIKTANHKKGKIILHFDTPETFDHILKQLGIDYRP

SEQ ID NO: 8211 - protein, 122 aa, Neisseria meningitidis; identical to SEQ ID NO: 218

SEQ ID NO: 8212 - protein, 366 aa, Neisseria meningitidis; identical to SEQ ID NO: 1553

SEQ ID NO: 8213 - protein, 409 aa, Neisseria meningitidis; identical to SEQ ID NO: 4088

SEQ ID NO: 8214 - protein, 416 aa, Neisseria meningitidis; identical to SEQ ID NO: 2246

SEQ ID NO: 8215 - protein, 185 aa, Neisseria meningitidis
MDALKLLTNRRSSKKLKPPAPDAAELEQIFQAATQVPDHGNMRPFRFIVIQGEVGLQRFRDVLKQTVAELNFGDDAMKKAEKVGNMSPMVIGVTFAPNRDVPKPKPEWEQMLTAGCAAYALQLAATAQGFDNVWITGMWVNSPLLREAFGCADKDKIIGLMMVGTPTEEVHKPKNTDVEAFVSHW

SEQ ID NO: 8216 - protein, 105 aa, Neisseria meningitidis; identical to SEQ ID NO: 2941

SEQ ID NO: 8217 - protein, 929 aa, Neisseria meningitidis
MTDYSKTVNLLESPFPMRGNLAKREPAWLKSWYEQKRYQKLREIAKGRPKFILHDGPPYANGDIHIGHAVNKILKDIIIRSKTQAGFDAPYVPGWDCHGLPIEVMVEKLHGKDMPKARFRELCREYAAEQVACQKKDFIRLGVLGDWDKPYLTMDFKTEADTVRMLGEIYKSGYLYRGAKPVQFCLDCGSSLAEAEVEYKDKVSPAIDVGYPFKDTAALAAAFGLAGIEGKAFAVIWTTTPWTLPASQAVSAGADVVYQLIDTPKGKLVLAKDLAEDALKRYGFSDGIAILAETTGDKLENLHMNHPFLERDIPMLNGDHVTTDAGTGLVHTAPAHGLEDYAVCNKYGIELYNPVNAEGKYISETPRVAGMSVWEANPVILQWLEETGNLLASSKIEHSYAHCWRHKTPLIYRATGQWFVGMDKAGADGKTLRDKAIKAVDDTEFFPSWGRARLEAMIEGRPDWVVSRQRYWGTPMTFFVHKETGELHPNSAELLEKVAQRIEEKGIEAWFSLDKGELLSAEDCEHYDKLSDTMDVWFDSGSTHYSVVKQREELDWPADLYLEGSDQHRGWFQSSMLTGCASSMGRAPYKQLLTHGFVVDGEGKKMSKSIGNVVAPQEVYNEFGADILRLWAASTDYSGELAISKEILKRVTESYRRIRNTLSFLFANLSDFNPIEDAVQQADMVEIDRYAVVLARQLQERLAGDYYPRYAFHFAVKDIVSFCSEDLGAFYLDILKDRLYTTKADSHARRSAQTALYHITRSLVLLIAPILCFTGEEAWDIIGGGEEDSVLFHTWHEFPTINEKTEAELVKKWTAIREAREAVTAAIEPLRADKTVGSSLQAEAEITAPEEMAGYLNALGEELRFALLVSKAEVKVGSELAVAAKASDGEKCERCWHYTRDVGAVAGYETVCKRCAENVGGEGETRHYA

SEQ ID NO: 8218 - protein, 407 aa, Neisseria meningitidis; identical to SEQ ID NO: 3034

SEQ ID NO: 8219 - protein, 43 aa, Neisseria meningitidis; identical to SEQ ID NO: 2340

SEQ ID NO: 8220 - protein, 59 aa, Neisseria meningitidis
MSFDGSASKIEFSDLNEKNDKQTLCFQSLWEFNDECEKKESNSIYYIDLPENNPKDIKQ

SEQ ID NO: 8221 - protein, 182 aa, Neisseria meningitidis; identical to SEQ ID NO: 2877

SEQ ID NO: 8222 - protein, 151 aa, Neisseria meningitidis
  misc_feature 2, 3, 4: 'Xaa' is any amino acid
VXXXQFTRQTIGGVDIVRFPDGTMIQTGSYRFTRSGGPIENEVVFPVAFADGNVKCFVSERHSGRVTGDRRQHNWLFIRAKNHAAAIITNWYEGSCDWMAIGKAASGNAASSPIGPEIPETNEEPQRESGRTSTGPRNRRRRDGLLEALQD

SEQ ID NO: 8223 - protein, 164 aa, Neisseria meningitidis
MKKNILEFWVGLFVLIGAAAVAFLAFRVAGGAAFGGSDKTYAVYADFGDIGGLKVNAPVKSAGVLVGRVGAIGLDPKSYQARVRLDLDGKYQFSSDVSAQILTSGLLGEQYIGLQQGGDTENLAAGDTISVTSSAMVLENLIGKFMTSFAEKNADGGNAEKAAE

SEQ ID NO: 8224 - protein, 219 aa, Neisseria meningitidis
MSNQKALVIFSGGQDSTTCLIQAIQIYGRENVQAITFQYGQRHAVELERARWIAQDLGVKQTVLDLSLMRQITHNALMDDTAAIETAENGVPNTFVDGRNALFLLYAAIYAKGQGIRHIIAGVCETDFSGYPDCRDVFVKSMNVTLNLAMDYDFQIHTPLMYLTKAQTWALADEMGVLDYIREQTHTCYNGIVGGCRECPSCILRERGLAEYLESKKAV

SEQ ID NO: 8225 - protein, 259 aa, Neisseria meningitidis
MHIIDSHCHLNFEGLKERLPEVLSNMEANGVGQALAISVSRESFSEVFAIAEAHEHIYCTIGVHPDSKEAEEFSIAEMVAAAAHPKVVGIGETGLDYYWCKGDLSWQHKRFADHIEAANQTGLPVIVHTRDAAADTLSILKECRVNSGVIHCFSEDIGFARAAMDLGLYISFSGIVTFKNAPLVQEAAKYVPDDRILVETDAPFLAPVPKRGRQNEPAFVRYTAEHIAKLRNQTLEQVAAYTTENFYRLFQKVPDMRTV

SEQ ID NO: 8226 - protein, 145 aa, Neisseria meningitidis
VWAMMFSWFKLFHLFFVISWFAGLFYLPRIFVNMAMIDVPRGNPEYVRLSGMAVRLYRFMSPLGFGAVVFGAAIPFAAGWWGSGWVHVKLCLGLMLLAYQLYCGVLLRRFQDYSNAFSHRWYRVFNEIPVLLMVAALYLVVFKPF

SEQ ID NO: 8227 - protein, 371 aa, Neisseria meningitidis
MGLKKACLTVLCLIVFCFGIFYTFDRVNQGERNAVSLLKDKLFNEEGEPVNLIFCYTILQMKVAERIMAQHPGERFYVVLMSENRNEKYDYYFNQIKDKAERAYFFHLPYGLNKSFNFIPTMAELKVKSMLLPKVKRIYLASLEKVSIAAFLSTYPDAEIKTFDDGTGNLIQSSSYLGDEFSVNGTIKRNFARMMIGDWSIAKTRNASDEHYTIFKGLKNIMDDGRRKMTYLPLFDASELKTGDETGGTVRILLGSPDKEMKEISEKAAKDFNIQYVAPHPRQTYGLSGVTTLNSPYVIEDYILREIKKNPHTRYEIYTFFSGAALTMKDFPNVHVYALKPASLPEDYWLKPVYALFTQSGIPILTFDDKN

SEQ ID NO: 8228 - protein, 109 aa, Neisseria meningitidis
MGSLIIEDLQESFGKEAVKGKEITVHYTGWLEDGTKFDSSLDRRQPLTITLGVGQVIKGWDEGFGGMKEGGKRKLTIPSEMGYGAHGAGGVIPPHATLIFEVELLKVYE

SEQ ID NO: 8229 - protein, 71 aa, Neisseria meningitidis; identical to SEQ ID NO: 2068

SEQ ID NO: 8230 - protein, 443 aa, Neisseria meningitidis; identical to SEQ ID NO: 279

SEQ ID NO: 8231 - protein, 296 aa, Neisseria meningitidis; identical to SEQ ID NO: 337

SEQ ID NO: 8232 - protein, 196 aa, Neisseria meningitidis; identical to SEQ ID NO: 2662

SEQ ID NO: 8233 - protein, 558 aa, Neisseria meningitidis
MSVGLLRILVQNQVVTVEQAEHYCNESQAGKEVLPMLFSDGVISPKSLAALIARVFSYSILDLRHYPRHRVLMGVLTEEQMVEFHCVPVFRRGDKVFFAVSDPTQMPQIQKTVSAAGIEVELVIVEDDQLAGLLDWVGSRSTSLLQELGEGQEEEESHTLYIDNEEAEDGPVPRFIHKTLSDALRSGASDIHFEFYEHNARIRFRVDGQLREVVQPPIAVRGQLASRIKVMSRLDISEKRIPQDGRMQLTFQKGGKPVDFRVSTLPTLFGEKVVMRILNSDAASLNIDQLGFEPFQKKLLLEAIHRPYGMVLVTGPTGSGKTVSLYTCLNILNTESVNIATAEDPAEINLPGINQVNVNDKQGLTFAAALKSFLRQDPDIIMVGEIRDLETADIAIKAAQTGHMVFSTLHTNNAPATLSRMLNMGVAPFNIASSVSLIMAQRLLRRLCSSCKQEVERPSASALKEVGFTDEDLAKDWKLYRAVGCDRCRGQGYKGRAGVYEVMPISEEMQRVIMNNGTEVDILDVAYKEGMVDLRRAGILKVMQGITSLEEVTANTND

SEQ ID NO: 8234 - protein, 247 aa, Neisseria meningitidis
MLSARYLHLHEALGLGPMWLKRGAVVLPPATLPESPTQIRPQKQTVLSIPQRPSEQHTGQARLKTMKVLETTAVHTRKPAPETETPLSGLSDGIAPVSAASGITKLAVVSLCPPIEDAVYGQLFYGKAGVLLDNILKAVGLDAAYVHKTCWVKTAAVGNPMPSEAAIETATVSVMQELDGCRAPAVLFLGQAFVQPERQTMIETLCGSRPFFIIDHPARLLRQPELKARAWQVLKQLKRALRQGGGS

SEQ ID NO: 8235 - protein, 222 aa, Neisseria meningitidis; identical to SEQ ID NO: 197

SEQ ID NO: 8236 - protein, 92 aa, Neisseria meningitidis; identical to SEQ ID NO: 2038

SEQ ID NO: 8237 - protein, 389 aa, Neisseria meningitidis
MTAHKILPVLLSIILGISHATAASPAPNKPAVHAAPTFQTPETLTAAHIVIDLQSKQILSAKNINTPVEPAALTQLMTAYLVFKNMKSGNIRSEENLKIPESAWASEGSRMFVRPGDTVSTDKLLKGMIALSANDAALTLAGRLGNGSIENFVQQMNKEARRLGMKNTVFKNPTGLSREGQVSTAKDLALLSEALMRDFPEYYPLFSIKSFKFKNIEQNNRNILLYRDNNVNGLKAGHTESGGYNLAVSYSGNGRHILVITLGSESAETRASDNSKLLNWALQAFDTPKIYPKGKTVAQIQISGGSKKTVRAGFLKEAYITLPHKEAKTTEQILETIQPIPAPVKKGQILGKIKIRQNGYTIAEKEIVALENVKKRSRWQRLWACLTGQ

SEQ ID NO: 8238 - protein, 489 aa, Neisseria meningitidis; identical to SEQ ID NO: 2475

SEQ ID NO: 8239 - protein, 472 aa, Neisseria meningitidis
MNIHALLSKQWTLPPFLPKRLLLSLLILLAPNAMFWVLALLTATARPIVNLDYLPAALLITLPWRFVKIAGVLAFWLAVLFDGLMMVIQLFPFMDLIGAINLVPFILTAPAPYQIMTGLLLLYMLAMPFVLQKAAAKTDFRHIAVCAAVVAAAGYFIGHLSYYDRGRMANIFGANNFYYAKSQAMLYTVSQNADFITAGLVDPVFLPLGNQQRAATHLNEPKSQKILFIVAESWGLPANPELQNATFAKLLAQKDRFSVWESGSFPFIGATVEGEMRELCAYGGLRGFALRRAPDEKFARCLPNRLKQEGYATFAMHGAGSSLYDRFSWYPRAGFQEIKTAENLIGKKTCAIFGGVCDSELFGEVSAFFKKHDKGLFYWMTLTSHADYPESDIFNHRLKCTEYGLPAETDLCRNFSLHTQFFDQLADLIQRPEMKGTEVIIVGDHPPPVGNLNETFRYLKQGHVAWLHFKIK

SEQ ID NO: 8240 - protein, 131 aa, Neisseria meningitidis; identical to SEQ ID NO: 3391

SEQ ID NO: 8241 - protein, 716 aa, Neisseria meningitidis
MKTPPLKPLLITSLPVFASVFTAASIVWQLGEPKLAMPFVLGIIAGGLVDLDNRLTGRLKNIIATVALFTLSSLVAQSTLGTGLPFILAMTLMTFGFTILGAVGLKYRTFAFGALAVATYTTLTYTPETYWLTNPFMILCGTVLYSTAIILFQIILPHRPVQESVANAYDALGGYLEAKADFFDPDEAAWIGNRHIDLAMSNTGVITAFNQCRSALFYRLRGKHRHPRTAKMLRYYFAAQDIHERISSAHVDYQEMSEKFKNTDIIFRIHRLLEMQGQACRNTAQALRASKDYVYSKRLGRAIEGCRQSLRLLSDGNDNPDIRHLGRLLDNLGSVDQQFRQLQHNGLQAENDRMGDTRIAAIETGSLKNTWQAIRPQLNLESGVFRHAVRLSLVVAAACTIVEALNLNLGYWILLTALFVCQPNYTATKSRVRQRIAGTVLGVIVGSLVPYFTPSVETKLWIVIASTTLFFMTRTYKYSFSTFFITIQALTSLSLAGLDVYAAMPVRIIDTIIGASLAWAAVSYLWPDWKYLTLERTAALAVCSNGAYLEKITERLKSGETGDDVEYRATRRRAHEHTAALSSTLSDMSSEPAKFADSLQPGFTLLKTGYALTGYISALGAYRSEMHEECSPDFTAQFHLAAEHTAHIFQHLPETEPDDFQTALDTLRGELDTLRTHSSGTQSHILLQQLQLIARQLEPYYRAYRQIPHRQPQNAA

SEQ ID NO: 8242 - protein, 298 aa, Neisseria meningitidis
LNPTNDLKAWQQRAQAQTELLLERFLPSENEIPHTLHEAMRYAALDGGKRLRPMLVLAASELGEAVHEAVEQAMAAIEMIHVYSLVHDDMPAMDNDSLRRGKPTCHIQYDEATALLVGDALQTQAFDVLSRPTELPAARQLAMLSVLAKAGGSAGMAGGQAIDLANVGKQMVQADLEQMHSLKTGALIRAAVLLGAMSCPNLSEDSLAVLDDYAAKLGLAFQVIDDVLDCEADTATLGKTAGKDADNDKPTYVKLMGLEAARSYAHKLVAEAVALLEPFGDKALRLRQLAEFAVARKY

SEQ ID NO: 8243 - protein, 250 aa, Neisseria meningitidis; identical to SEQ ID NO: 3444

SEQ ID NO: 8244 - protein, 150 aa, Neisseria meningitidis
MQIILLEKIGGLGNLGDIVTVKNGYARNFLIPAGKAKRATEANMKEFEVRRAELEAKQAEILADARVRQEKLDGQTVTVAQKAGVDGRLFGSVTNADIAAAIVAAGIEAVKANVRLPNGPLKAVGEYEVEVALHTDAVAKITVAVVAATE

SEQ ID NO: 8245 - protein, 332 aa, Neisseria meningitidis
MSENKQNEVLSGYEQLKRRNRRRLVTASCLVAASCILLAAALSSGPAEQTAGETNGVENKAAGAAQTPALKSAADKPQDLAGEDKPSAADSEISEPENVGAPLVLINDRLEDSNIKGLEASEKLQQAETAKTAPKQAKQRAAEKVPATADSTDTVAVEKPKRTAETKPQKAERTAKAKPKAKETKTAEKVADKPKTAAEKTKPDTAKSDSAVKETKKADKAESKKTAEKDRSDGKKHETAQKTDKADKTKTAEKEKSGKKAAIQAGYAEKERALSLQRKMKAAGIDSTITEIMTDNGKVYRVKSSNYKNARDAERDLNKLRVHGIAGQVTNE

SEQ ID NO: 8246 - protein, 115 aa, Neisseria meningitidis; identical to SEQ ID NO: 2034

SEQ ID NO: 8247 - protein, 351 aa, Neisseria meningitidis
MPSETRLPNFIRVLIFALGFIFLNACSEQTAQTVTLQGETMGTTYTVKYLSNNRDKLPSPAEIQKRIDDALKEVNRQMSTYQPDSEISRFNQHTAGKPLRISSDFAHVTAEAVRLNRLTHGALDVTVGPLVNLWGFGPDKSVTREPSPEQIKQAASYTGIDKIILKQGKDYASLSKTHPKAYLDLSSIAKGFGVDKVAGELEKYGIQNYLVEIGGELHGKGKNARGEPWRIGIEQPNIVQGGNTQIIVPLNNRSLATSGDYRIFHVDKSGKRLSHIINPNNKRPISHNLASISVVADSAMTADGLSTGLFVLGETEALKLAEREKLAVFLIVRDTGGYRTAMSSEFEKLLR

SEQ ID NO: 8248 - protein, 472 aa, Neisseria meningitidis
MSIKNAVKLIEESEARFVDLRFTDTKGKQHHFTVPARIVLEDPEEWFENGQAFDGSSIGGWKGIQASDMQLRPDASTAFVDPFYDDVTVVITCDVIDPADGQGYDRDPRSIARRAEAYLKSSGIGDTAYFGPEPEFFVFDGVEFETDMHKTRYEITSESGAWASGLHMDGQNTGHRPAVKGGYAPVAPIDCGQDLRSAMVNILEGLGIEVEVHHSEVGTGSQMEIGTRFATLVKRADQTQDMKYVIQNVAHNFGKTATFMPKPIMGDNGSGMHVHQSIWKDGQNLFAGDGYAGLSDTALYYIGGIIKHAKALNAITNPSTNSYKRLVPHFEAPTKLAYSAKNRSASIRIPSVNSSKARRIEARFPDPTANPYLAFAALLMAGLDGIQNKIHPGDPADKNLYDLPPEEDALVPTVCASLEEALAALKADHEFLLRGGVFSKDWIDSYIAFKEEDVRRIRMAPHPLEFEMYYSL

SEQ ID NO: 8249 - protein, 896 aa, Neisseria meningitidis
MSDNRLDTARRHSLFLARQLDNGKLKPEIFLPMLDKVLTEADFQAFADWDKIRAEENEEELARQLRGLRRYVVSQIIVRDINRISDLNEVTRTITLFADFAVNTALDFAYAYYRDMYGTPIGRYTKSPQHLSVVAMGKAGGYELNVSSDIDLIFVYPESGDTDGRRERGNQEFFTKVGQKLIALLNDITADGQVFRVDMRLRPDGDSGALVLSETALEQYLITQGREWERYAWCKGRVVTPYPNDIKALVRPFVFRKYLDYGAYEAMRKLHRQIRSEVSKKGMADNIKLGAGGIREVEFIAQIFQMIRGGQMRALQLKGTQETLKKLAETGIMPSENVETLLAAYRFLRDVEHRLQYWDDQQTQTLPTSPEQRQLLAESMGFDSYSAFSDGLNVHRNKVNQLFNEILSEPEEQTQDNSEWQWAWQDKPDEEGRRCRLKAHGFDAETVAARLDQIRHGHKYRHLSAHAQPRFDAVVPLFVQAAAAQSNPTDTLMRLLDFLENISRRSAYLAFLNEHPQTLAQLAQIMGQSSWVAAYLNKYPILLDELISAQLLDTAFDWQALAAALSDDLKACGGDTEAQMDTLRRFQHAQVFRLAVQDLAGLWTVESLSDQLSALADTILAAALLCAWADMPKKHRDTPQFAVVGYGKLGGKELGYASDLDLVYLYDDPHPDAGDVYSRLARRLTNWLSAATGAGSLYETDLRLRPNGDAGFLAHSIAAFEKYQRENAWTWEHQSLTRARFICGTSEIQTAFDRIRTEILTAERDQTALAGEIIEMREKMFPTHPPADSNVKYARGGVVDVEFIVQYLILAHARQYPQLLDNYGNIALLNISADCGLIDKTLAGQSRTAYRFYRRQQHNTKLRDAAKTEVTGELLAHYGNVRKLWREVFGEEAATA

SEQ ID NO: 8250 - protein, 468 aa, Neisseria meningitidis; identical to SEQ ID NO: 3129

SEQ ID NO: 8251 - protein, 581 aa, Neisseria meningitidis
MERQTDEFAQAAARAAIWFLARYAGSGSEVLANCTERLFQALQNGHSFIRLSGGEADALSALAPVVGTSAAPLILEGRRLFLGRMWQLEYDLAAEIKRLAAADTSAPDAAGARQNLAKWFQGTGSEGQRDAAALALLQPFMVITGGPGTGKTTTVAKLLALICGEDENLPNIALAAPTGKAAAHMARALHRAINGFDAPEAVRRHLLKLEGQTVHRLLKLRPPKMQAAFDPVYPLPFDVLVIDEASMLDTALMLQLLKAVKTGARVILLGDENQLPSVGIGAVLSVLSQKTVLDGEAHQRLAGFLPEHGFSVSANPPVLAQNTAHLSFSHRFGDNSGIGCLARAAVSGDEGAWALFDRFPDELEHSECSPNARVERLYRAHKAYWQAVKDGNIEAAYAGISDIVVLAAWRQDAEDFNKAYCSHVRRKMNIPEHLAYFAGEPIMIRQNDYALELFNGDIGLIMEDVGRQGSLAAYFADADGFKKVAVSCLPDFEPAFAMTVHKSQGSEYREVWLLPPSAAPSDEGDDALSGLSKELLYTAITRAREKFVFFGGEETFRQAAATVKTRQTALGSMLERVFSQE

SEQ ID NO: 8252 - protein, 193 aa, Neisseria meningitidis; identical to SEQ ID NO: 1322

SEQ ID NO: 8253 - protein, 219 aa, Neisseria meningitidis
MDMLEILFRHQDFVAINKPGGISVHQDSGETGLARTLAIQLGVERVWLLHRLDKQTSGILLFALNRESASALSGQFAGKSIKKTYLALSDRKPSKKQGWIKGGMEKSRRGMWKLTRNTENIAVTRFHSISIAEKLRLFILEPHTGKTHQLRVAMKSLGSPILGDSLYGGTESETMFLYAWKIQFAYQNRQIEIVAPLKNEWQTENISHALEEFYMAKAG

SEQ ID NO: 8254 - protein, 324 aa, Neisseria meningitidis
MPSEKNIGFMAGSSRPLWVAFALLLVSCVLFMTLNVKGDWDFVLQLRLTKLAALLMVAYAVGVSTQLFQTLTNNPILTPSILGFDSLYVFLQTLLVFTFGGVGYASLPLTGKFGFELVVMMGGSLLLFYTLIKQGGRDLSRMILIGVIFGILFRSLSSLLSRMIDPEEFTAAQANMFAGFNTVHSELLGIGALILLVSAAVVWRERYRLDVYLLGRDQAVNLGISYTRNTLWILLWIAALVATATAVVGPVSFFGLLAASLANHFSPSVKHSVRLPMTVCIGGILLVGGQTVFEHLLGMQAVLSVVVEFAGGLVFLYLVLKHKK

SEQ ID NO: 8255 - protein, 548 aa, Neisseria meningitidis; identical to SEQ ID NO: 3181

SEQ ID NO: 8256 - protein, 174 aa, Neisseria meningitidis; identical to SEQ ID NO: 3281

SEQ ID NO: 8257 - protein, 97 aa, Neisseria meningitidis
MSNIKIVALVTVKPEYTETLVAQFKELVKASRAEEGNISYDLHQEIGKPNRFVFVENWKSQAAIDEHNASAHFQAFVQSVDGKTEALEIVLMNEVAA

SEQ ID NO: 8258 - protein, 87 aa, Neisseria meningitidis; identical to SEQ ID NO: 205

SEQ ID NO: 8259 - protein, 334 aa, Neisseria meningitidis
MSIKVAINGFGRIGRLALRQIEKAHDIEVVAVNDLTPAEMLLHLFKYDSTQGRFQGTAELKDDAIVVNGKEIKVFANPNPEELPWGELGVDVVLECTGFFTNKTKAEAHIRAGARKVVISAPSGNDVKTVVYGVNQDILDGSETVISAASCTTNCLAPMAAVLQKEFGVVEGLMTTIHAYTGDQNTLDAPHRKGDLRRARAAALNIVPNSTGAAKAIGLVIPELNGKLDGSAQRVPVATGSLTELVSVLERPVTKEEINAAMKAAASESYGYNEDQIVSSDVVGIEYGSLFDATQTRVMTVGGKQLVKTVAWYDNEMSYTCQLVRTLEYFAGKI

SEQ ID NO: 8260 - protein, 299 aa, Neisseria meningitidis
MWFKQISFYPLNKEKLPEADVLADKLAEAEFTHCQGLDWFSEGFTAPVSFSPELVFPADFTLRVALKKEEKVLPAGVIRDILEEKVAEIQNNEARNVGRKEKQELKEQITDDLLPRAFTRSSRTEAVFNTRHGYLLVNNAASAKAENILTKLREALGGLEASLPNTKQSPSSLMTGWLLQGHCEGGFELDSDCELKGTGDIVPVVKVSKQDLTADEVVQHVKNGKTVTQLGLVWREQIAFILTQDFTLKRIQYLDVLQEEAESNGDDAAGLAFASQILMAESVSIMLEELVSYLGGWQD

SEQ ID NO: 8261 - protein, 204 aa, Neisseria meningitidis; identical to SEQ ID NO: 504

SEQ ID NO: 8262 - protein, 240 aa, Neisseria meningitidis; identical to SEQ ID NO: 2593

SEQ ID NO: 8263 - protein, 445 aa, Neisseria meningitidis
MTFQNQKILVAGLGGTGISMIAYLRKNGAEVAAYDAELKPERVSQIGKMFDGLVFYTGRLKDALDNGFDILALSPGISERQPDIEAFKQNGGRVLGDIELLADIVNRRGDKVIAITGSNGKTTVTSLVGYLCIKCGLDTVIAGNIGTPVLEAEWQREGKKADVWVLELSSFQLENTESLRPTAATVLNISEDHLDRYDDLLDYAHTKAKIFRGDGVQVLNADDVFCRAMKRAGREVKWFSLEHEADFWLERETGRLKQGNEDLIATQDIPLQGLHNATNVMAAVALCEAVGLPREALLEHVKTFQGLPHRVEKIGEKNGVVFIDDSKGTNVGATAAAIAGLQNPLFVILGGMGKGQDFTPLRDALVGKAKGVFLIGVDAPQIRRDLDGCDLNMTDCATLEEAVQTAYAQAEAGDIVLLSPACASFDMFKGYAHRSEVFIGAFKAL

SEQ ID NO: 8264 - protein, 320 aa, Neisseria meningitidis
MPSISVRRLFDDNQYKLQLAWAAGNSGADNRIGVEADKPVLALVGHLNFIHPNQIQVVGLAESEYLNRLESGETGYQFGNLFDISMSLVIVANGLPVSPGLRDYCHKNDIPLLTSKLESPYLMDVLRIYLQRTLAASSVKHGVFLDVFEIGVLITGHSGLGKSELALELISRGHSLIADDAVELFRIGPETLEGRCSPMLRDFLEVRGLGILNIRHIFGETSIRPKKILQLIINLVEADDEYMKQLDRLSIRTETESILNVNVRSVTLPVAVGRNLAVLVEAAVRNYILQLRGKDSTREFLERHQTQLKENEQNHENRPD

SEQ ID NO: 8265 - protein, 144 aa, Neisseria meningitidis; identical to SEQ ID NO: 3606

SEQ ID NO: 8266 - protein, 214 aa, Neisseria meningitidis; identical to SEQ ID NO: 5138

SEQ ID NO: 8267 - protein, 473 aa, Neisseria meningitidis
MDTKEILGYAAGSIGSAVLAVIILPLLSWYFPADDIGRIVLMQTAAGLTVSVLCLGLDQAYVREYYAAADKDTLFKTLFLPPLLSAAAIAALLLSRPSLPSEILFSLDDAAAGIGLVLFELSFLPIRFLLLVLRMEGRALAFSSAQLVPKLAILLLLPLTVGLLHFPANTAVLTAVYALANLAAAAFLLFQNRCRLKAVRHAPFSPAVLHRGLRYGIPIALSSIAYWGLASADRLFLKKYAGLEQLGVYSMGISFGGAALLFQSIFSTVWTPYIFRAIEENAPPARLSATAESAAALLASALCLTGIFSPLASLLLPENYAAVRFIVVSCMLPPLFCTLVEISGIGLNVVRKTRPIALATLGALAANLLLLGLAVPSGGARGAAVACATSFWLFFVFKTESSCRLWQPLKRLPLYTHTLLCLTSSAAYTCFGTPANYPLFAGVWAVYLAGCILRHWKDLHKLFHYLKKQGFPL

SEQ ID NO: 8268 - protein, 117 aa, Neisseria meningitidis
VNRQTAYFLASFSLIALIILSLSWELWIAPLRPGGSWLALKALPLCLPLSGILKKKIYTYQYSSMLVLIYFAEAVMRLFDAYPAEQICAALSAVFSIIFFISCLSFVKQYKETNNAR

SEQ ID NO: 8269 - protein, 278 aa, Neisseria meningitidis
MQIIHTIRELRAWRKNAGKVAFVPTMGNLHEGHLALVREAKKRADNVVVSIFVNRLQFGQGEDFDKYPRTLQQDADKLEAEGVAVVFAPDEKELYPNVEQRYNVEPPNLQNELCGKFRPGHFRGVATVVSKLFNIVAPDVACFGKKDYQQLAVIKGLTEDLNFDVEIVPVDTGRAEDGLALSSRNQYLSAAERDEAPRLSRELKAVAESLAQGSLDYAGLERQAADHLTAAGWVVDYVEIRRADTLEVARAGDKKLVVLAAARLGTTRLIDNLEIKLP

SEQ ID NO: 8270 - protein, 285 aa, Neisseria meningitidis; identical to SEQ ID NO: 2591

SEQ ID NO: 8271 - protein, 333 aa, Neisseria meningitidis
MKSIGFFNNKGGVGKTTLLCNLAASLSIHFSKKVLVIDADPQCNASAYLLPENMLEDILMNDTESSIDKFYEPIRKGQGFPEKNPKIVRSDRFQIDLIVGNPKLAIREDFIATDWNDTKNGEARGFQTTFAMAELFSRMSDYDFILIDMGPSLGALNRSILLSSDYFLMPISADIFSMMAISNIQISFDGWKEDLINALERYNKREGKKFTISNDIPFEWKLDFLGYVRQQYKAKYSGGERQPVAAFERIINQQDEELKKLCLSFKHEDINSRKIGEIHTLSSVIPLSQQAHAPIFELAASDGIVGGHYSRVAEAEEYFKKIAERFLENIGID

SEQ ID NO: 8272 - protein, 90 aa, Neisseria meningitidis
LNVFGFSADDFSEKETTFGVWPCNWQAVQLFIGVSTQWRIGMSGATGLDYSAVAAVMECGNIKSKKRKALLEKVRLMELEVLSMWAGEHE

SEQ ID NO: 8273 - protein, 100 aa, Neisseria meningitidis; identical to SEQ ID NO: 2893

SEQ ID NO: 8274 - protein, 72 aa, Neisseria meningitidis
VVEQSFGTLHRKFRYARAAYFGLIKVSAQSHLKAMCLNLLKAANRLSAPAAAQKATGCLIIGYPGRIKGVFG

SEQ ID NO: 8275 - protein, 106 aa, Neisseria meningitidis; identical to SEQ ID NO: 2510

SEQ ID NO: 8276 - protein, 347 aa, Neisseria meningitidis
MSKKIKVGIVGATGYTGVELLRLLAAHPDVEVAAVTSRSEAGTAVADYFPSLRGVYGLAFQTPDEAGLEQCDIVFFATPNGIAMKDAPRLIEQGVRVIDLSADFRIWDIPTWEHWYGMPHAAPGLVSQAVYGLSELNREAVAQARLVANPGCYPTCVSLPLVPLLRQCRLKPGMPLIADCKSGVSGAGRKGNVGSLLCEVGDNFKAYGIAGHRHLPEIRQTIAGLQDGIAEGFVFTPHLAPMIRGMHATVYLHLSDGICPETILRDYYRDSLFVDILPAGSTPETRSVRGANLCRISIQQAAQSDVWVVLSVIDNLVKGAAGQAVQNMNIMFGLKETHGLGAIPLLP

SEQ ID NO: 8277 - protein, 96 aa, Neisseria meningitidis
MALTLADVDKIARLSRLHLTAAEKEKSLQELNDIFAMVEQMQTINTDGIEPMAHPHEAALRLREDEVTETDRAAEYQAVAPEVRNRLYIVPQVIEE

SEQ ID NO: 8278 - protein, 272 aa, Neisseria meningitidis; identical to SEQ ID NO: 1475

SEQ ID NO: 8279 - protein, 162 aa, Neisseria meningitidis; identical to SEQ ID NO: 2816

SEQ ID NO: 8280 - protein, 787 aa, Neisseria meningitidis
MQFSYSWLKTQADTELSADKLEHLLTMSGLEVEEAETAAPAFTGVVIAEVKSVEKHPDADRLNVTQVDAGTGGLVQIVCGAPNVKAGIKVPCSLPGAVLPGNFKIKPTKMRGVVSDGMLCSTDELGLPDDGVNGLHILPEDAPVGTNIREYLDLDDTLFTLKITPNRADCLSIKGIAREVSALTGCAFRQPEIHTAPITGSRKQPVQINAPADCGRFISRVIENVNAKAATPDWMKQRLERSGIRSISALVDIGNYVMLEIGQPMHVFDADKLSGSLHIRRAREGETLECLNEKTVSLSENTLVVADEKGVLSLAGLMGGAASAVSDGTQNIVLEAAWFAPEIIAGKSRQYGFGSDSSFRFERGVDYRLQADAMERATELVLQICGGAAGEMVEAQGELPEAKQVGLRLDRLKTVLGVDIPAEQVETILQHLGLQPEKTAEGFRVTAPSFRFDIEIEADLIEEIGRVYGYENIPDDYTSGRLKMLELPETRRPRFAVYNEMAAHGYREVVSYAFVDEQWEQDFAANADPIRLQNPLAAQYAVMRSTLIGGLVEILQNNLNRKQNRVRVFEIARVFGKGSDGRFVQNERIGGLWYGAAMPEQWGGKTRNADFYDIKADVENLLKNKAVEFVKTGHPALHPGRAANIVSDGKVIGFVGELHPKWLQKYDLPQAPLVFEIDMAAVLECGKTRYRAVSKFQPVRRDLAFVMPEAMSHDDLLLVLKGAANKLVQEISVFDVYRGTGLPEGMKSVAVKVILQDMENTLTDEAVEPLIGKLIGAATAAGARLRS

SEQ ID NO: 8281 - protein, 101 aa, Neisseria meningitidis; identical to SEQ ID NO: 1118

SEQ ID NO: 8282 - protein, 208 aa, Neisseria meningitidis
MTQEHFPSFFNQAPTITVQDALAEFLGAAENGILTYRYADAVRLCGHSCPTVAGAYLMVIKGLKALYGEELPERGGIEAFMQGARDEGTVGVTASVVQLLTGAAPETGFGGIGMQGRFARRHLLSFGVGEINGTLTLRRKDNGKTVAVSLNAALQPFAPEMRELMPKAVGGSASADELKQFGELWQERVRAFLIDQADNPEFVTVSEI

SEQ ID NO: 8283 - protein, 334 aa, Neisseria meningitidis
MQRQTELKNWLQTIYPERDFDLSFAAADADFRRYFRATFSDGSSVVCMDAPPDKMSVAPYLKVQKLFDMVNVPQVLHADTDLGFVVLNDLGNTTFLTAMLQEQGEAAHKALLLEAIGELVELQKASREGVLPEYDRETMLREINLFPEWFVAKELGRELTFKQRQLWQQTVDTLLPPLLAQPKVYVHRDFIVRNLMLTRGRPGVLDFQDALYGPISYDLVSLLRDAFIEWEEEFVLDLVIRYWEKARAAGLPVPEAFDEFYRWFEWMGVQRHLKVAGIFARLYYRDGKDKYRPEIPRFLNYLRRVSRRYAELAPLYALLVELVGDEELETGFTF

SEQ ID NO: 8284 - protein, 916 aa, Neisseria meningitidis
MLTNIAKKIFGSRNDRLLKQYRKSVARINALEEQMQALSDADLQAKTAEFKQRLADGQTLDGILPEAFAVCREASRRTLGMRHFDVQLIGGMVLHDGKIAEMRTGEGKTLVATLAVYLNALAGKGVHVVTVNDYLASRDAGIMEPLYNFLGLTVGVIISDMQPFDRQNAYAADITYGTNNEFGFDYLRDNMVTDQYDKVQRELNFAVVDEVDSILIDEARTPLIISGQADDNIQLYQIMNTVPPHLVRQETEEGEGDYWVDEKAHQVILSEAGHEHAEQILTQMGLLAENDSLYSAANIALMHHLMAALRAHTLFHKDQHYVIQDGEIVIVDEFTGRLMSGRRWSEGLHQAVEAKEGVEIKRENQTLASITFQNYFRLYTKLSGMTGTADTEAFEFQSIYNLETVIIPTNRPIQRKDFNDQIFRSAEEKFEAVVKDIEECHKRGQPVLVGTTSIENSELVSHLLQKAGLPHNVLNAKEHEREALIVAQAGKVGAITVATNMAGRGTDIVLGGNLKHQTDAIRADETLSDEEKQAQIAALENGWQAEHDKVMEAGGLHIIGTERHESRRIDNQLRGRSGRQGDPGSSRFYLSFEDPLLRLFALDRAAAILNRLAPERGVAIEHNLLTRQIEGAQRKVEGRNFDMRKQVLEYDDVANEQRKVIYSQRNEILTSKDISDLMQEIRSDVVSDLVDTYMPPDSMEEQWDIPTLENRLAAEFRLHEDIQSWLKADNAIDGQDIKERLIERIENEYAAKTELVGKQAMADFERNVMLQVIDNQWREHLAAMDYLRQGIHLRSYAQKNPKQEYKREAFTMFQDLWNGIKFHIASLLTSVQIEQNPVAVVEEQPIGNIQSIHSESPDMEELLGQSQTDLVTEAFNPDGTDFSPEALEARGQIVHRNDPCPCGSGLKYKQCHGKLA

SEQ ID NO: 8285 - protein, 427 aa, Neisseria meningitidis
MNRNEILFDRAKAIIPGGVNSPVRAFGSVGGVPRFIKKAEGAYVWDENGTRYTDYVGSWGPAIVGHAHPEVVEAVREAALGGLSFGAPTEGEIAIAEQIAKIMPSVERLRLVSSGTEATMTAIRLARGFTGRDKIIKFEGCYHGHSDSLLVKAGSGLLTFGNPSSAGVPADFTKHTLVLEYNNIAQLEEAFAQSGNDIACVILEPFVGNMNLVRPSEAFVKALRELTEKHGAVLIYDEVMTGFRVALGGAQSLHGITPDLTTMGKVIGGGMPLAAFGGRKDIMECISPLGGVYQAGTLSGNPIAVAAGLKTLEIIRREGFYENLTARTEQLVQGFQTAADAAGIEFAADSVGGMFGLYFASHTPRNYADMARSNIDAFKRFFHGMLDRGIAFGPSAYEAGFVSAAHTPELIDETVAVAVEVFKAMAA

SEQ ID NO: 8286 - protein, 498 aa, Neisseria meningitidis
MFSNYLLSLAIWIPIAAGVLVLATGSDSRAPLARVLAFMGALAGFLVTLPLFTGFDRLSGGYQFTEFHEWIPLLKINYALGVDGISVLFIILNAFITLLVVLAGWEVIQKRPAQYMAAFLMMSGLINGAFAAQDAILFYVFFEGMLIPLYLIIGVWGGPRRVYASVKLFLYTLMGSLLMLVAMVYLYYQTGSFSIVDFQNIKQIPLGVQQLLFVAFFLSFAVKVPMFPVHTWLPDAHVEAPTGGSMVLAAITLKLGAYGFLRFILPIMPDAARYFAPVIIVLSLIAVIYIGMVALVQTDMKKLVAYSSISHMGFVTLGMFLFVDGQLDDWALKGAIIQMISHGFVSAAMFMCIGVMYDRLHTRNIADYGGVVNVMPKFAAFMMLFGMANAGLPATSGFVGEFMVIMGAVKVNFWVGALAAMTLIYGASYTLWMYKRVIYGAIHNPHVAEMKDINCREFAILAVLAVAVLGMGLYPNAFIEVVHQAANDLIAHVAQSKI

SEQ ID NO: 8287 - protein, 196 aa, Neisseria meningitidis
MKKSSLISALGIGILSIGMAFAAPADAVSQIRQNATQVLSILKNGDANTARQKAEAYAIPYFDFQRMTALAVGNPWRTASDAQKQALAKEFQTLLIRTYSGTMLKLKNANVNVKDNPIVNKGGKEIIVRAEVGVPGQKPVNMDFTTYQSGGKYRTYNVAIEGASLVTVYRNQFGEIIKAKGVDGLIAELKAKNGSK

SEQ ID NO: 8288 - protein, 76 aa, Neisseria meningitidis
MNIVKKYAVKAALAAGIFTPAIVMADTFDASAIGTQVANVIMGFVSMVSAVGMAAITVILAIQGFKMAWSMIKSVR

SEQ ID NO: 8289 - protein, 133 aa, Neisseria meningitidis; identical to SEQ ID NO: 8

SEQ ID NO: 8290 - protein, 591 aa, Neisseria meningitidis; identical to SEQ ID NO: 3751

SEQ ID NO: 8291 - protein, 160 aa, Neisseria meningitidis
MKYLNLAAIALAATFAAHTASADELAGWKDGTAQSLQSLKAPVRIVNLWATWCGPCRKEMPAMSKWYKAQKKGSVDMVGIALDTSDNIGNFLKQTPVSYPIWRYTGANSRNFMKTYGNTVGVLPFTVVEAPKCGYRQTITGEVNEKSLTEAVKLAHSKCR

SEQ ID NO: 8292 - protein, 262 aa, Neisseria meningitidis
MNPKIVFFDIDDTLYRKYTDTLRPSVKTAVAALCGKGILTALATGRSLATIPEKVRDMMAETGMDAVVTINGQFALLHGKTVHEVPMDAGLMGRVCAHLDGLGMDYAFVGGEGIAVSALSECVCRALQHIASDFFADKDYFSSKPVYQMLVFAEENEMPLWSDIVEQEGLKTVRWHEEAVDLLPAGASKTDGIRSVVEALGLEMADVMAFGDGLNDVEMLSEVGFGVAMGNGEQAAKEAAKYVCPGVDEDGVLRGLQDLGVI

SEQ ID NO: 8293 - protein, 260 aa, Neisseria meningitidis
MTDILNKILTAKAQEVAAQKAAVNAEHIRALAAEAAPVRSFIGSIRGKHRLNLPAVIAEIKKASPSKGLIRPDFRPAEIARAYENAGAACLSVLTDEPYFQGSPEYLKQAREAVSLPVLRKDFIIDEYQVYQARAWGADAVLLIAAALEQEQLERFEAVAHELGMTVLLELHDESELEKCRNLTTPLWGVNNRNLRTFEVSLDQTLSLLPALEGKTVVTESGITGKADVEFMQSRGVHTFLIGETFMRADNIEAEVGKLF

SEQ ID NO: 8294 - protein, 178 aa, Neisseria meningitidis
MSSESASFNEVKNLKQQAIPSPTLKPKTKILWRVIAETSLPAAHSFSPSNSPIQNRACLSNISTSRAAYMDVQKQYSFETVAVCVLPNHIHAIWTLPPDDADYSLRWRLIKTKFSAHFPHAENLSASKQRRHERGIWQRCFYEHTVRDETDLQHRADYIHSNPIKQRMSRAKTESRKK

SEQ ID NO: 8295 - protein, 86 aa, Neisseria meningitidis; identical to SEQ ID NO: 3484

SEQ ID NO: 8296 - protein, 398 aa, Neisseria meningitidis
MQNYLTPNFAFAPMIPERASGSRVWDTKGREYIDFSGGIAVNALGHCHPALVDALNAQMHKLWHISNIYTTRPAQELAQKLVANSFADKVFFCNSGAEANEAALKLARKYARDRFGGGKSEIVACINSFHGRTLFTVSVGGQPKYSKDYAPLPQGITHVPFNDIAALEAAVGEQTCAVIIEPIQGESGILPATAEYLQTARRLCDRHNALLILDEVQTGMGHTGRLFAYEHYGIVPDILSSAKALGCGFPIGAMLATEKIAAAFQPGTHGSTFGGNPMACAVGSRAFDIINTPETLNHVREQGQKLQTALLDLGRKTGLFSQVRGMGLLLGCVLDEAYRGRASEITAAALKHGVMILVAGADVLRFAPSLLLNDEDMAEGLRRLEHALTEFAATSDNP

SEQ ID NO: 8297 - protein, 92 aa, Neisseria meningitidis; identical to SEQ ID NO: 8116

SEQ ID NO: 8298 - protein, 266 aa, Neisseria meningitidis
MKKTIFNITKMDCPSEEQLIRMRLKDVSDIYELQFDIAGRCLTVYHDNQDTTILQVLEPLNFDSHIISTEVIVDKIVFNKPDEHLEKRLLYQVLMINFVFFIIECSVGIFANSMGLIADSLDMLADSFVYILALSAIGMTLAYKKRVAFLAGITQIILALFGVIEVIRRFIGAEQLPNYQLMIGTAFLALIANWLCLYLLSKNQNKEIHIKASMIFTSNDIIINIGVIAAGALTLLTHSSYPDLIIGMIVFVIVLFGARNILKLAK

SEQ ID NO: 8299 - protein, 183 aa, Neisseria meningitidis
MKAYLALISAAVIGLAACSQEPAAPAAEATPAAEAPASEAPAAEAAPADAAEAPAAGNCAATVESNDNMQFNTKDIQVSKACKEFTITLKHTGTQPKASMGHNLVIAKAEDMDGVFKDGVGAADTDYVKPDDARVVAHTKLIGGGEESSLTLDPAKLADGEYKFACTFPGHGALMNGKVTLVD

SEQ ID NO: 8300 - protein, 337 aa, Neisseria meningitidis; identical to SEQ ID NO: 1101

SEQ ID NO: 8301 - protein, 432 aa, Neisseria meningitidis
MAKNVVVIGAQWGDEGKGKIVDWLAEEAGGVVRFQGGHNAGHTLVVGGKKTILRLIPSGILHESLDCFIGSGVVVSPEALLGEIDELNAAGVKNVEGRLKIAPTCPLILPYHIALDQAREASRGKGKIGTTGRGIGPAYEDKVARRAIRAADLLHPEKLREKLDAILAYYNVQLQHLHNAEPVKAEDVMAVIEKVALRIAPMITDVSRVLNEKNKNGEKLLFEGAQGALLDIDYGTYPFVTSSNCLAGAASAGAGVGPQMLDYVLGIVKAYTTRVGSGPFPTELFDEVGAGLAERGHEFGSVTGRARRCGWFDAAALKRSIQINGISGMCITKLDVMDGVETINICVGYELPDGGKTDILPCGSDAVETCKPIYETMPGWRESTFGVKSYDALPANAKAYLKRIEEVCGAPVAIVSTGPDREETIVLHHPFA

SEQ ID NO: 8302 - protein, 296 aa, Neisseria meningitidis
MFPVFHLSGESRRRMLQTALRFPYVFKARAEDSHKGTFGTLAVVGGSAGMSGAPVLAASAAMYLGCGKVWAGFNQDALPFAVIAGFPEIMLDTADGLSKRQDINAWVVGCGLGTGRAAVGTLAGILTEHTDKPVLLDADALNILSTDAETRNLARGCKNLILTPHPAEAARLLGTTVAQVQADRTAAVRKIGAIFGATVVLKGHKTLVAASDTEIYVNESGNAGLATAGSGDVLGGIIGSLLAQGVPVFEAACAGAWLHGAAADVIKESAGIAAGLLAGEIAPAARWLRNRITESM

SEQ ID NO: 8303 - protein, 321 aa, Neisseria meningitidis; identical to SEQ ID NO: 2168

SEQ ID NO: 8304 - protein, 75 aa, Neisseria meningitidis
METWVQNYTAIGGSLYLTAAAALLPIVFFFAALTVLKLKGYQAGLYTLLIALAVAVFGFGMPAGMAVSSLPPQPH

SEQ ID NO: 8305 - protein, 335 aa, Neisseria meningitidis
MSTFFQQTAQAMIAKHIDRFPLLKLDQVIDWQPIEQYLNRQRTRYLRDHRGRPAYPLLSMFKAVLLGQWHSLSDPELEHSLITRIDFNLFCRFDELSIPDYSTLCRYRNWLAQDNTLSELLELINRQLTEKGLKIEKASAAVVDATIIQTAGSKQRQTIEVDEEGQVSGQTTPSKDSDARWIKKNGLYKLGYKQHTRTDGEGYIEKLHITPANAHECKHLSPLLEGIAEGTTVYADKGYDSAENRQHLEEHQLLDGIMRKACRNRPLSEVQTKRNRYLSKTRYVVEQSFGTLHRKFRYARAAYFGLIKVSAQSHLKAMCLNLLKAANRLSAPAAA

SEQ ID NO: 8306 - protein, 88 aa, Neisseria meningitidis; identical to SEQ ID NO: 255

SEQ ID NO: 8307 - protein, 93 aa, Neisseria meningitidis
MIHEEICAMPMGYETLIGDMGSALSGGQKQRIVLARALYCEPKILFLDAATSHLDIANEKAVNANLNGLSIIKIMAAHRKETVESADRKMSLG

SEQ ID NO: 8308 - protein, 498 aa, Neisseria meningitidis; identical to SEQ ID NO: 2733

SEQ ID NO: 8309 - protein, 54 aa, Neisseria meningitidis; identical to SEQ ID NO: 2207

SEQ ID NO: 8310 - protein, 138 aa, Neisseria meningitidis
MLKHLAFLLPAMMFALPAASAVLTSYQEPGCTYEGDVGKDGKPAGKGTWRCQDGRNYTGSFKNGKFDGQGVYTVAANREIFIEPFNSDSTKFRNMVLSGTFKKGLAHGRFTVSQNGETLFIMKCENGMIKEVKLPKNK

SEQ ID NO: 8311 - protein, 199 aa, Neisseria meningitidis; identical to SEQ ID NO: 3649

SEQ ID NO: 8312 - protein, 441 aa, Neisseria meningitidis
MKKYLFRAALCGIAAAILAACQSKSIQTFPQPDTSVINGPDRPVGIPAPAGTTVAGGGAVYTVVPHLSLPHWAAQDFAKSLQSFRLGCANLKNRQGWQDVCAQAFQTPVHSFQAKQFFERYFTPWQVAGNGSLAGTVTGYYEPVLKGDDRRTAQARFPIYGIPDDFISVPLPAGLRSGKALVRIRQTGKNSGTIDNTGGTHTADLSQFPITARTTAIKGRFEGSRFLPYHTRNQINGGALDGKAPILGYAEDPVELFFMHIQGSGRLKTPSGKYIRIGYADKNEHPYVSIGKYMADKGYLKLGQTSMQGIKSYMRQNPQRLAEVLGQNPSYIFFRELTGSGNDGPVGALGTPLMGEYAGAVDRHYITLGAPLFVATAHPVTRKALNRLIMAQDTGSAIKGAVRVDYFWGYGDEAGELAGKQKTTGYVWQLLPNGMKPEYRP

SEQ ID NO: 8313 - protein, 431 aa, Neisseria meningitidis
MSVIQDLQSRGLIAQTTDIEALDALLNEQKISLYCGFDPTADSLHIGHLLPVLALRRFQQAGHTPIALVGGATGMIGDPSFKAAERSLNSAETVAGWVESIRSQLTPFLSFEGGNAAIMANNADWFGKMNCLDFLRDIGKHFSVNAMLNKESVKQRIDRDGAGISFTEFAYSLLQGYDFAELNKRHGAVLEIGGSDQWGNITAGIDLTRRLYQKQVFGLTLPLVTKSDGTKFGKTEGGAVWLNAKKTSPYQFYQFWLKVADADVYKFLKYFTFLSIEEIDAIEAKDKASGSKPEAQRILAEEMTRLIHGEEALAAAQRISESLFAEDQSSLTESDFEQLALDGLPAFEVSDGINVVEALVKTGLASSNKEARGFVNSKAVLLNGKPAEANNPNHAAERPDDACLLNGEHKRFGKYTILRRGKRNHALLVWK

SEQ ID NO: 8314 - protein, 309 aa, Neisseria meningitidis
LGKTRYRFIKSVIYEHMKNGASLVYNHINNEPFSDHISRQVARLAGAHTIVSGYLAFGSDESYKNHWDTRDVYAIQLFGKKRWQLTAPDFPMPLYMQQTKDTDISIPEHIDMDIILEAGDVLYIPRGWWHRPIPLGCETFHLAVGTFPPNGYNYLEWLMKKFPTIESLRHSFSDWEQDRTRINDTAAQIAAMIADPVNYEAFSEDFLGKERTDTAFHLEQFANPNATPLSDDVRLRLNANNLDTLEKGYLIGNGMKISVDELGKKVLEHIGKNEPLLLKNLLVNFNQGKYEEVRKLIYQLIELDFLEIL

SEQ ID NO: 8315 - protein, 419 aa, Neisseria meningitidis; identical to SEQ ID NO: 2185

SEQ ID NO: 8316 - protein, 216 aa, Neisseria meningitidis
MIRFEQVSKTYPGGFEALKNVSFQINKGEMIFIAGHSGSGKSTVLKLISGITKPSRGKVHFNNQDLGTLTDNQIGFMRQHIGIVFQDHKILYDRNVLQNVILPLRIIGYPPRKAEERARIAIEKVGLKGRELDDPVTLSGGEQQRLCIARAVVHQPGLLIADEPSANLDRAYALDIMELFKTFHEAGTTVIVAAHDETLMADYGHRILRLSKGRLA

SEQ ID NO: 8317 - protein, 397 aa, Neisseria meningitidis
MFFKHIEAAPADPILGLGEAFKAETRPEKVNLGIGVYKDASGATPLVKAVKEAEKRLLESETTKNYLTIDGVADYNAQTQILLFGKDHEIIASRRAKTAQSLGGTGALRIAAEFAKRQLNAQTIWISNPTWPNHNAIAKAVGIQDKPYRYYDAAKHGLDWDGMIEDLSQAQKGDIVLLHGCCHNPTGIDPTPEQWETLAKLSAEKGWLPLFDFAYQGFGNGLEEDAYGLRVFLKHNTELLIASSYSKNFGMYNERVGAFTLVAEDEATAARAHSQVKTIIRTLYSNPASHGANTIALVLKNDDLKAQWIAELDEMRGRIKAMRQKFVELLKAKGASQDFDFIIEQNGMFSFSGLTPEQVDRLKNEFAIYAVRSGRINVAGITDDNIDYLCESIVKVL

SEQ ID NO: 8318 - protein, 158 aa, Neisseria meningitidis
MPAVCQSGSAPKNAHTASAGTPAGESCKVIRDDTAGSGKNIIYRCSNGQAAINAAIADGVLESGIPVSFGGGGVPVANGRNLVTRQAANGVGKSDSEACEHALINAARKFQQTAGKLGGRSVTGFHSYFDKQPLQGGQYDCQTGSFHVRVVMRANVVR

SEQ ID NO: 8319 - protein, 494 aa, Neisseria meningitidis
MSKPVFKKIALYTLGAISGVAVSLAVQGFAAEKDRRDNEVLPVQSIRTMAEVYGQIKANYYQDKPDADLFEGAMKGMVAGLDPHSEYMDKKGYAEIKESTSGEFGGLGMEIGQEDGFVKVVSPIEDTPAEQAGVKSGDFIVKIDNVSTRGMTVSEAVKKMRGKPGTKITLTLSRKNADKPIVVNLTRAIIKVKSVRHHLIEPDYGYIRVSQFQERTVESVNTAAKELVKENKGKPLKGLVLDLRDDPGGLLNGAVGVSAAFLPPEAVVVSTKGRDGKDRMVLKAVPEDYVYGMGGDPLAGIPAELKTVPMTVLINSGSASASEIVAGALQDHKRAVIVGTQSFGKGSVQTLIPLSNGSAVKLTTALYYTPNDRSIQAQGIVPDVEVKDKERIFESREADLVGHIGNPLGGEDVNSETLAVPLEKDADKPAVKEKGKKKKDEDLSSRRIPNPAKDDQLRKALDLVKSPEQWQKSLGLAAKKPVSNKDKKDKKDKK

SEQ ID NO: 8320 - protein, 595 aa, Neisseria meningitidis
MSLVELKVPDIGGHENVDIIAVEVNVGDTIAVDDTLITLETDKATMDVPAEVAGVVKEVKVKVGDKISEGGLIVVVEAEGAAASPKAEAPVAAPAQEAPKAAAPAPQAAQFGGSADAEYDVVVLGGGPGGYSAAFAAADEGLKVAIVERYKTLGGVCLNVGCIPSKALLHNAAVIDEVRHLAANGIKYPEPELDIDMLRAYKNGVVSRLTGGLAGMAKGRKVDVIQGDGQFLDSHHLEVSLTAGDAYELAAPTGEKKIVAFKNCIIAAGSRVTKLPFIPEDPRIIDSSGALALKEVPGKLLIIGGGIIGLEMGTVYSTLGSRLDVVEMMDGLMQGADRDLVKVWQKQNEYRFDNIMVNTKTVAVEPKEDGVYVTFEGANAPKEPQRYDAVLVAAGRAPNGKLISAEKAGVAVTDRGFIEVDKQMRTNVPHIYAIGDIVGQPMLAHKAVHEGHVAAENCAGHKAYFDARVIPGVAYTSPEVAWVGETELSAKASGRKITKANFPWAASGRAIANGCDNGFTKLIFDAETGRIIGGGIVGPNGGDMIGEVCLAIEMGCDAADIGKTIHPHPTLGESIGMAAEVALGTCTDLPPQKKK

SEQ ID NO: 8321 - protein, 45 aa, Neisseria meningitidis; identical to SEQ ID NO: 645

SEQ ID NO: 8322 - protein, 141 aa, Neisseria meningitidis; identical to SEQ ID NO: 3723

SEQ ID NO: 8323 - protein, 291 aa, Neisseria meningitidis; identical to SEQ ID NO: 2469

SEQ ID NO: 8324 - protein, 427 aa, Neisseria meningitidis; identical to SEQ ID NO: 2465

SEQ ID NO: 8325 - protein, 90 aa, Neisseria meningitidis
MPIEDIPFYIFDLADFDGGIADIDNIVGFVSSYSLSKSKKNALTGIAFLRGIDVYDPPISKEKALKALKKHPEIYQKFQHFFPFVELPPL

SEQ ID NO: 8326 - protein, 385 aa, Neisseria meningitidis
MKFATQAIHSGYDCDEHNRALMPPIYQNSMFALHEIGENVPYRYSRLSNPTRQVLEDTVADLEHGAAGFAFSSGMAGIDAVWRTFLQPGDTIVAVADIYGGAYDLLVDVYQKWGVNVVFADLGNLDNLDKLLKAHKVKLVWLETPSNPLLRLVDIKALAAKAKAAGALVGIDNTFATPYLQQPLDMGCDFVFHSATKYLCGHSDVLMGIVVAKTKELAQPLHDMMVHTGAVAGPMDCWLVLRGIKTLALRMNAHCQNALEIARRLEAHPAIEKVFHPGLPSHEHYELAQAQMPKGIGGVVTVYLKNDTREAANSVIKNMKLVKMASSLGGVESLVNHCYSQSHSGVPHNVKMEMGIKVGLLRFSIGIEDADDIWNDISAALDTTL

SEQ ID NO: 8327 - protein, 103 aa, Neisseria meningitidis; identical to SEQ ID NO: 1510

SEQ ID NO: 8328 - protein, 319 aa, Neisseria meningitidis
MSKKTKQELENNKLSKRLRHAVGDAINDFNMIEPDDKIMVCLSGGKDSYALLDILRQLQASAPIDFELVAVNLDQKQPGFPEEVLPTYLESIGVPYKIVEEDTYSTVKRVLDEGKTTCSLCSRLRRGILYRTAKELGCTKIALGHHRDDILATMFLNMFYGGKLKAMPPKLVSDNGEHIVIRPLAYVKEKDLIKYAELKQFPIIPCNLCGSQPNLQRQVIGDMLRDWDKRFPGRIESMFSALQNVVPSHLADTELFDFAGLERGQTLKHGGDLAFDSEKMPERFSDGSEEDESEIKIAPQKAERKVINILANKPKTCGA

SEQ ID NO: 8329 - protein, 678 aa, Neisseria meningitidis
MTDNALLHLGEEPRFDQIKTEDIKPALQTAIAEAREQIAAIKAQTHTGWANTVEPLTGITERVGRIWGVVSHLNSVTDTPELRAVYNELMPEITVFFTEIGQDIELYNRFKTIKNSPEFDTLSPAQKTKLNHDLRDFVLSGAELPPEQQAELAKLQTEGAQLSAKFSQNVLDATDAFGIYFDDAAPLAGIPKDSLAMFAAAAQSESKTGYKIGLQIPHYLAVIQYADNRELREQIYRAYVTRASELSDDGKFDNTANIDRTLANALQTAKLLGFKNYAELSLATKMADTPEQVLNFLHDLARRAKPYAEKDLAEVKAFARESLGLADLQPWDLGYAGEKLREAKYAFSETEVKKYFPVGKVLNGLFAQIKKLYGIGFTEKTVPVWHKDVRYFELQQNGETIGGVYMDLYAREGKRGGAWMNDYKGRRRFADGTLQLPTAYLVCNFTPPVGGKEARLSHDEILTLFHETGHGLHHLLTQVDELGVSGINGVEWDAVELPSQFMENFVWEYNVLAQMSTHEETGEPLPKELFDKMLAAKNFQRGMFLVRQMEFALFDMMIYSEDDEGRLKNWQQVLDSVRKEVAVIQPPEYNRFALSFGHIFAGGYSAGYYSYAWAEVLSADAYAAFEESDDVAATGKRFWQEILAVGGSRSAAESFKAFRGREPRIDALLRHSGFDNAA

SEQ ID NO: 8330 - protein, 215 aa, Neisseria meningitidis; identical to SEQ ID NO: 709

SEQ ID NO: 8331 - protein, 377 aa, Neisseria meningitidis
MFKKFKPVLLSFFALVFAFWLGTGIAYEINPRWFLSDTATEVPENPNAFVAKLARLFRNADRAVVIVKESMRTEESLAETVDDGPLQSEKDYLALAIRLSRLKEKAKWFHVTEQEHGEEVWLDYYIGEGGLVAVSLLQRSPEAFVNAEYLYRNDRPFSVNVYGGTAHRENYETTGEYRVVWQPDGSVFDAAGRGKIGEDVYEHCLGCYQMAQVYLAKYRDVANDEQKVWDFREESNRIASDSRDYVFYQNMRELMPRGMKANSLVVGYDADGLPQKVYWSFDNGKKRQSFEYYLKNGNLFIAQSSTVALKADGVTADIQTYHAQQTWYLDGGRIIREEKQGDRLPDFPLNLENLEKEVRRYAEAAARRSGGRRDLSH

SEQ ID NO: 8332 - protein, 119 aa, Neisseria meningitidis
MNIKHLITAALIASAAFAAQAAPQKPLSAAQTAQHPAVWIDVRSEQEFSEGHLHNAVNIPVDQIVRRIHEAAPDKDTPVNLYCRSGRRAKAALQELKKAGYTNVANHGGYEDLLKKGMK

SEQ ID NO: 8333 - protein, 231 aa, Neisseria meningitidis; identical to SEQ ID NO: 2520

SEQ ID NO: 8334 - protein, 399 aa, Neisseria meningitidis
MSDQLILVLNCGSSSLKGAVIDRKSGSVVLSCLGERLTTPEAVITFNKDGNKRQVPLSGRNCHAGAVGMLLNELEKHGLHDRIKAVGHRIAHGGEKYSESVLIDQAVMDELNACIPLAPLHNPANISGILAAQEHFPGLPNVGVMDTSFHQTMPERAYTYAVPRELRKKYAFRRYGFHGTSMRYVAPEAARILGKPLEDIRMIIAHLGNGASITAIKNGKSVDTSMGFTPIEGLVMGTRCGDIDPGVYSYLTSHAGMDVAQVDEMLNKKSGLLGISELSNDCRTLEIAADEGHEGARLALEVMTYRLAKYIASMAVACGGVDALVFTGGIGENSRNIRAKTVSYLDFLGLHIDTKANMDKRYGNSGIISPTDSSPAVLVVPTNEELMIACDTAELAGIL

SEQ ID NO: 8335 - protein, 290 aa, Neisseria meningitidis
MSWLDKILPPKIKNRSKDGSSNVPEGLWHKCPSCSATVYSTELQQNNQVCPKCNHHNPLSARQRLNLLLDEDGREEVAGNVKPTDPLKFKDGKKYPDRLSAARKLTGEDDALVVMKGKMNGLPVVVAAFEFRFIGGSMGSVVGERFVQGVRRAVADNCPFVCVAASGGARMQEGVNSLMQMTKTSAALHLLTEKRLPFISVLTDPTMGGVSASFAFLGDVVLAEPNALIGFAGPRVIEQTVRETLPEGFQRAEFLLEKGAIDQIVDRREMKRRISDLITLLCRQDKVSAA

SEQ ID NO: 8336 - protein, 675 aa, Neisseria meningitidis
MEVIRYPDSPFKLHQPFPPAGDQPTAIAGLLEGLSDGLAYQTLLGVTGSGKTYTMANVIAQSGRPAIIMAHNKTLAAQLYAEMREFFPENAVEYFVSYYDYYQPEAYVPSRDLFIEKDSAINEHIEQMRLSATKNLMTRDDVIIVATVSAIYGIGDPTEYQQMVLSVKEGDTIEQRDIIATLVSMQYERGDLDFKRGSFRVRGDVIDVYPAESSENALRISLFDDEIDRLDMFDPLSGSLIQRVGRYTVFPSSHYVTPRDTVLRACESIKEELRERIDFFTKENRPVEQQRIEQRTRFDLEMLYEMGFCKGIENYSRHFSSKKEGEPPPTLMDYLPDNAIMFIDESHVTVTQIGGMYKGDASRKQNLVDYGFRLPSARDNRPLKFHEFEKVMPQTVFVSATPAKYEEEHAGQVVEQVVRPTGLVDPQIIIRPVATQVDDLMSEINDRIQKGERVLVTTLTKRMAEQLTDYYSELGIKVRYLHSDIDTVERVEIIRDLRLGLFDVLVGINLLREGLDIPEVSLVAILDADKEGFLRSHRSLIQTIGRAARNVNGVAILYADKITDSMKAAIDETERRREKQIKFNEEHGIVPQQIKKQVKDIIDGVYHEEDGGKGRRQGKNKVKVSEIHNEEDAVKEIAKLEKAMQQAARDLQFEEAAVLRDRIRGIKEGLLFGSE

SEQ ID NO: 8337 - protein, 608 aa, Neisseria meningitidis
LGISRKISLILSILAVCLPMHAHASDLANDSFIRQVLDRQHFEPDGKYHLFGSRGELAERSGHIGLGNIQSHQLGNLMIQQAAIKGNIGYIVRFSDHGHEVHSPFDNHASHSDSDEAGSPVDGFSLYRIHWDGYEHHPADGYDGPQGGGYPAPKGARDIYSYDIKGVAQNIRLNLTDNRSTGQRLADRFHNAGSMLTQGVGDGFKRATRYSPELDRSGNAAEAFNGTADIVKNIIGAAGEIVGAGDAVQGISEGSNIAVMHGLGLLSTENKMARINDLADMAQLKDYAAAAIRDWAVQNPNAAQGIEAVSNIFMAAIPIKGIGAVRGKYGLGGITAHPIKRSQMGAIALPKGKSAVSDNFADAAYAKYPSPYHSRNIRSNLEQRYGKENITSSTVPPSNGKNVKLADQRHPKTGVPFDGKGFPNFEKHVKYDTKLDIQELSGGGIPKAKPVFDAKPRWEVDRKLNKLTTREQVEKNVQEIRNGNKNSNFSQHAQLEREINKLKSADEINFADGMGKFTDSMNDKAFSRLVKSVKENGFTNPVVEYVEINGKAYIVRGNNRVFAAEYLGRIHELKFKKVDFPVPNTSWKNPTDVLNESGNVKRPRYRSK

SEQ ID NO: 8338 - protein, 157 aa, Neisseria meningitidis; identical to SEQ ID NO: 140

SEQ ID NO: 8339 - protein, 266 aa, Neisseria meningitidis
MDLSALKGRKAALYVSVMGDQGSGNISGGRYSIDALIRGGYQNNPESATQYSYPAYDTTATTKSDALSSVTTSTSLLNAPAAALTRNSGRKGERSAGLSVNGTGDYRNETLLANPRDVSFLTNLIQTVFYLRGIEVVPPEYADTDVFVTVDVFGTVRSRTELHLYNAETLKAQTKLEYFAVDRDSRKLLIAPKTAAYESQYQEQYALWMGPYSVGKTVKASDRLMVDFSDITPYGDTTAQNRPDFKQNNGKNPDVGNEVIRRRKGG

SEQ ID NO: 8340 - protein, 211 aa, Neisseria meningitidis
MIVSIDVDAQKTFTPLCPDELPVNEGHLIVEELNAQAALADLRVMTKDAHHMVAKWLVDNPVDMLKPTGLPDADLTWVAHAMVGTRGYELLDGLPSAKEYDYCVWKGVDPELHPYGACFHDIEEKLSTGLIEWLRCQNTDTVIIGGLATDYCVKTTVLQLLKGGNWQVIVNEAACRGIAPDTIETAWQEMSSAGAVILKNAEEIKKYINNQ

SEQ ID NO: 8341 - protein, 367 aa, Neisseria meningitidis; identical to SEQ ID NO: 1944

SEQ ID NO: 8342 - protein, 205 aa, Neisseria meningitidis
MSAYRKGNIFIISAASGTGKTTLVSRLLANHNGLRVSVSHTTRPPREGEVNGVHYHFVSKEEFESLIAQEAFLEYADVFGNYYGTSAEGVNALAAAGYDVILEIDVQGAAQVRNALPEAVGIFILPPSFDVLAARLNGRGTDSREVIQRRLSKARHEIEQSVLFDFVVVNDDLARAEEDLRHIVNACRLKRSRQLGFIADLLENS

SEQ ID NO: 8343 - protein, 346 aa, Neisseria meningitidis
MDISDFDFTLPEKLIAQHPPEVRGSSRLLVALPDMPMQDRVFGDLPDYVEAGDVLVFNNTKVMKARLFGQKDSGGRIEALIERVLDSHTALAHIRSSKSPKPGMGLVFEGGIRAVMVGREGELFCLRFEGGQTVYELLEQNGHLPLPPYIERAADADDDSRYQTVYAKYQGAVAAPTAGLHFTEELLRRLKDKGAVTAEVTLHVGAGTFQPVRVEKIEEHKMHSEWFEVPSETVAAVEAAKARGNKVWAVGTTSMRALESAARATGRLKAGQGDTDIFITPGYRFNVADRLVTNFHLPKSTLLMLVSAFSGMGHIRAAYRYAVEREYRFFSYGDAMILGRNEGVVR

SEQ ID NO: 8344 - protein, 102 aa, Neisseria meningitidis; identical to SEQ ID NO: 254

SEQ ID NO: 8345 - protein, 159 aa, Neisseria meningitidis; identical to SEQ ID NO: 2265

SEQ ID NO: 8346 - protein, 1375 aa, Neisseria meningitidis
MTYPIPKPREKSRWPNLSQGSLPLALARYLPHKRLKVVLTQDAEQALRLQTAWRFFRPHDTAVFLPDWETLPYERFSPHQDLVSERLSALWQIKSGAADVLFVPVATAMQKLPPVPFLAGRTFWLKTGQTLDIGRLKTDLVDAGYNHVSHVVAAGEFAVRGGIVDLFPMGSEMPYRIDLFDDEIDSIKTFDTDTQRTISPVSEIRLLPAHEFPTDSEAQKIFRSRFREEVDGNPNDAAVYKAVSNGHFGAGVEYYLPLFFENELETLFDYIGEDALFVSLGDVHAEANRFWSDVKSRYAMAQGDETYPPLLPQHLYLSADVFAGRLKNYGQVLPDVSGKEHALPDLAVNRQSDEPLQALKDFQTAFEGRILLCAESLGRRETMLGFLQQNGLKAKSVSDWQGFLSAHEPLMITVAPLAYGFKLGGLQSPNQQQTTSASEGEGDAVTDQTEFSASATNPLPSPLPQEREQSAAAVSDSLKAAAVSTESSLPLGTSNLHGQIRQQPAPSPVGEGWGEGKAVAAQTEFPASATNPLPSPLPQEREQSAAAVSDDLKTKSSLHPVANNLHGQIRQQPTPSPVGEGWGEGKAVAAQTEFSAAATKPLPSPLPQEREQSAAVVSDSLKAAAVSTESSLPPGKSNLHGQIQQQPAPSPVGEGWGEGKAVAAQSAIAVITESDLYQYVARSRVHNRRKKHAAVSDGLLRDLAEINIGDPVVHEEHGIGRYMGLITMDLGGETNEMMLLEYAGEAQLYVPVSQLHLISRYSGQAHENVALHKLGSGAWNKAKRKAAEKARDTAAELLNLYAQRAAQSGHKFEINELDYQAFADGFGYEETEDQAAAIAAVIKDLTQAKPMDRLVCGDVGFGKTEVALRAAFVAVMGGKQVAVLAPTTLLVEQHAQNFADRFADFPVKVASLSRFNNSKATKAALEGLADGTVDIVIGTHKLVQDNIRFKSLGLVIIDEEHRFGVRQKEQLKRLRANVDILTMTATPIPRTLSMALEGLRDFSLITTAPSRRLAVKTFVKPFSEGSVREAVLRELKRGGQVFFLHNEVDTIENMRERLETLLPEARIGVAHGQLRERELEQVMRDFLQQRFNVLLCSTIIETGIDIPNANTIIINRADKFGLAQLHQLRGRVGRSHHQAYAYLLTPEYITKDAEKRLDAIAAADELGAGFTLAMQDLEIRGAGEILGEGQSGEMIQVGFTLYTEMLKQAVRDLKKGRQPDLDAPLGITTEIKLHSPALLPESYCPDIHERLVLYKRLAVCETVQQINAIHEELVDRFGLPEQPVKTLIESHHLRLMAKELGIDAIDAAGEAVTVTFGKNNNVDPTEIILLIQNDKKYRLAGADKLRFTAEMENIEVRINTVKNVLKTLQNRCLPK

SEQ ID NO: 8347 - protein, 162 aa, Neisseria meningitidis
MLKITLIAACAENLCIGAGNAMPWHIPEDFAFFKAYTLGKPVIMGRKTWESLHVKPLPGRRNIVISRQADYCAAGAETAASLEAALALCAGAEEAVIMGGAQIYGQAMPLATDLRITEVDLSVEGDAFFPAIDRTHWKEAERTERRVSSKGTRYAFVHYLRY

SEQ ID NO: 8348 - protein, 374 aa, Neisseria meningitidis
MTATTASSAKPYLQIQGLVKKFGDNYAVDNIDLDIYQHEIFALLGSSGSGKSTLLRMLAGMESPNQGKIILDGQDITKLAPYDRPINMMFQSYALFPHMTVEQNIAFGLKQDKMPKGEIAARVEEMLRLVQMTKFAKRKPHQLSGGQQQRIALARSLAKRPKILLLDEPLGALDKKLRQQTQLELVNTLEQVGVTCIMVTHDQEEAMTMATRIAIMSDGQLQQVGTPSDVYDYPNSRFTAEFIGETNIFDGVVIEDHADYAVIECEGLENHVRIDHGLGGPSEQDLWVSIRPEDIDLYKEKPEYLGDYNWAKGTVKEIAYLGSFAIYHIKLANGRVVKSQVPAPYWYVRNITPPTWDETVYISWPENQPTPLFR

SEQ ID NO: 8349 - protein, 460 aa, Neisseria meningitidis
MNLPIQKFMMLFAAAISLLQIPISHANGLDARLRDDMQAKHYEPGGKYHLFGDGRGSVKNRVYAVQTFDATAVGPILPITHERTGFEGVIGYETHFSGHGHEVHSPFDNHDSRSTSDFSGGVDGGFTVYQLHRTGSEIHPEDGYDGPQGSDYPPPGGARDIYSYYVKGTSTKTKTNIVPQAPFSDRWLKENAGAASGFFSRADEAGKLIWESDPNKNWWANRMDDVRGIVQGAVNPFLMGFQGLGVGAITDSAVNPVTYAAARKTLQGIHNLGNLSPEAQLAAATALQDSAFAVKDGINSAKQWADAHPNITATAQTALSVAEAAGTVWGGKKVELNPTKWDWVKNTDYKTPAARPMQTLDGEMAGGNKPVVKSIRPTTRDELRQALQEQGFRRTGSDAAQYETWKGPDGVKIDIRPNGEVIRTQRVPRTDGVQGKYPQRQDYEGNPLPNNHHHSGYFVK

SEQ ID NO: 8350 - protein, 160 aa, Neisseria meningitidis; identical to SEQ ID NO: 182

SEQ ID NO: 8351 - protein, 145 aa, Neisseria meningitidis
MFTPFLFGWARPIPIDSRNFRNPRLAWRCVAASGPLSNLAMAVLWGVVLVLTPYVGGAYQMPLAQMANYGILINAILFALNIIPILPWDGGIFIDTFLSAKYSQAFRKIEPYGTWIILLLMLTGVLGAFIAPIVRLVIAFVQMFV

SEQ ID NO: 8352 - protein, 141 aa, Neisseria meningitidis; identical to SEQ ID NO: 26

SEQ ID NO: 8353 - protein, 60 aa, Neisseria meningitidis; identical to SEQ ID NO: 2489

SEQ ID NO: 8354 - protein, 313 aa, Neisseria meningitidis; identical to SEQ ID NO: 2172

SEQ ID NO: 8355 - protein, 481 aa, Neisseria meningitidis
MNWSDLNLMPALPEIALLSLLVLLLLADLWVSDDKRRWTHYGALATVAVTAVVQLAVWEQGSTSSFNGMYIADGMSRLAKMVLYALTFALFVYAKPYNQVRGIFKGEFYTLSLFALLGMSVMVSTGHFLTAYIGLELLSLALYALIALRRDSGFAAEAALKYFVLGALASGLLLYGISMVYGATGSLEFAGVLASSFNEEANEWLLKLGLVFIVVAVAFKLGAVPFHMWVPDVYHGAPTSVTALVGTAPKVAAVVFAFRILVTGLGTVHHDWSLMFALLAAASLLVGNLAAIMQTNIKRMLAYSTVSHMGFILLAFMAGAVGFAAGLYYAITYALMAAAGFGVLMVLSDGDNECENISDLAGLNQHRVWLAFLMLLVMFSMAGIPPLMGFYAKFGVIMALLKQGHVWLSVFAVVMSLIGAFYYLRVVKVMYFDESGRARPTVGGNNAAKFLLSVNALLLVLWGIMPQTVIDWCAKALENTL

SEQ ID NO: 8356 - protein, 423 aa, Neisseria meningitidis; identical to SEQ ID NO: 3402

SEQ ID NO: 8357 - protein, 214 aa, Neisseria meningitidis; identical to SEQ ID NO: 909

SEQ ID NO: 8358 - protein, 248 aa, Neisseria meningitidis; identical to SEQ ID NO: 2041

SEQ ID NO: 8359 - protein, 691 aa, Neisseria meningitidis; identical to SEQ ID NO: 2651

SEQ ID NO: 8360 - protein, 253 aa, Neisseria meningitidis
MDANKEPNWEKRLENLRQTRRMKVVPTYAPLSRPSETGTDASVPKLDDASRNRVLKAYLKKWQEEHNAAVADCGEEIETDPMIVLQENWLNAQASLQMSVSEKHIESRRRIRFDTKKDSVEFETGQIEGGENADEAESGTNEPAVSENGENDAEETLMPVQLNILNPKAVNRREVFCLSEQELTERLIKRLRPHLTDTVNGIIRTAVQKQMAVFTYQLQQMLHEQAGAVVEDVLEHDVRKILNDIKYELKYKR

SEQ ID NO: 8361 - protein, 338 aa, Neisseria meningitidis
MYRKLIALPFALLLAACGREEPPKALECANPAVLQGIRGNIQETLTQEARSFAREDGRQFVDADKIIAAAYGLAFSLEHASETQEGGRTFCIADLNITVPSETLADAKANSPLLYGETALSDIVRQKTGGNVEFKDGVLTAAVRFLPVKDGQTAFVDNTVGMAAQTLSVALLPYGVKSIVMIDGKAVKKEDAVRILSGKAREEEPSKPTPEDILEHNAAGGDADVPQAAEGAPEPEILHPDDGERADTVTVSRGEVEEARVQNQRAESEITKLWGGLDTDVQKELVGEQRKWAQEKISNCRQAAAQADRQEYAEYLKLQCDTRMTRERIQYLRGYSID

SEQ ID NO: 8362 - protein, 296 aa, Neisseria meningitidis; identical to SEQ ID NO: 64

SEQ ID NO: 8363 - protein, 242 aa, Neisseria meningitidis; identical to SEQ ID NO: 5117

SEQ ID NO: 8364 - protein, 481 aa, Neisseria meningitidis
MTQYTLKQASVLLQSKQISAVELASAYLAAIAEKNPALNGYITIDQDKTLAEARAADERIAQGNASALTGVPVAYKDIFCQTGWRSACASKMLDNFISPYTATVVQNLLDEGMVTLGRTNMDEFAMGSTNENSFYGAAKNPWNPEHVPGGSSGGSAAVVAARLAPAALGSDTGGSIRQPASHCGITGIKPTYGTVSRFGMVAYASSFDQAGPMAQTAEDCAILLNAITGFDPKDSTSLEREKEDYTRDLNQPLKGVKIGLPKEYFGEGNSADVLTALQNTIDLLKAQGAELIEVSLPQTKLSIPAYYVLASAEAGTNLSRYDGVRYGHRAAQFADLEEMYGKTRAEGFGSEVKRRIMIGTYVLSHGYYDAYYLKAQKLRRLVADDFQTAFARCDLILAPTAPTAAPKIGADASPVETYLSDIYTIAVNLAGLPALTLPAGFSGGGLPVGVQLVGNYFAEAKILGAAHQIQLNSDWHGKRPE

SEQ ID NO: 8365 - protein, 180 aa, Neisseria meningitidis; identical to SEQ ID NO: 2298

SEQ ID NO: 8366 - protein, 251 aa, Neisseria meningitidis
MIKIRNIHKTFGESTILRGINLDVGKGQVVVILGPSGSGKTTFLRCLNALEMPEDGQIEFDNERPLKIDFSKKPSKHDILALRRKSGMVFQQYNLFPHKTALENVMEGPVAVQGKPAAQAREEALKLLEKVGLGDKVDLYPYQLSGGQQQRVGIARALAIQPELMLFDEPTSALDPELVQDVLNAMKELAREGWTMVVVTHEIKFALEVATTVVVMDGGVIVEQGSPKELFDHPKHERTRRFLSQIQSTKI

SEQ ID NO: 8367 - protein, 291 aa, Neisseria meningitidis
MPTVRFTESVSKHDLDALFEWAKASYGAESCWKTLYLNGLPLGNLSPEWAERVKKDWEAGCSESSDGIFLNADGWSDMGGRLQHLTRTWNKAGLLHGWRNECFDLTDGGGNILFSLERAAFRPFGLLSRAVHLNGLTESDGRWHFWIGRRSPHKAVDPDKLDNTAAGGVSSGELPSETVCRESSEEAGLDKTLFPLIRPVSQLHSLRPVSWGVHNEILYVFDAVLPETFLPENQDGEVACFEKMDIGSLVATMLSGNMMHDAQLVTLDAFCRYGLIDAAHPLSEWLDGIRL

SEQ ID NO: 8368 - protein, 477 aa, Neisseria meningitidis; identical to SEQ ID NO: 3214

SEQ ID NO: 8369 - protein, 122 aa, Neisseria meningitidis; identical to SEQ ID NO: 2377

SEQ ID NO: 8370 - protein, 84 aa, Neisseria meningitidis; identical to SEQ ID NO: 3897

SEQ ID NO: 8371 - protein, 581 aa, Neisseria meningitidis; identical to SEQ ID NO: 2972

SEQ ID NO: 8372 - protein, 121 aa, Neisseria meningitidis; identical to SEQ ID NO: 4117

SEQ ID NO: 8373 - protein, 604 aa, Neisseria meningitidis
MPAETTVSGAHPAAKLPIYILPCFLWIGIVPFTFALRLQPSPDFYHDAAAAAGLIVLLFLTAGKKLFDVKIPPISFLLFAMAAFWYLQARLMNLIYPGMNDIVSWIFILLAVSAWACKSLVAHYGQERIVTLLAWSLLIGSLLQSCIVVIQFAGWEDTPMLQNIIVYSGQGVIGHIGQRNNLGHYLMWGILAAAYLNGQRKIPPALGAICLIMQTAVLGLVNSRTILTYIAAIALILPFWYFRSDKSNRRTMLGIAAAVFLTALFQFSMNTILETFTGIRYETAVERVANGGFTDLPRQIEWNKALAAFQSAPIFGHGWNSFAQQTFLINAEQHNIYDNLLSNLFTHSHNIVLQLLAEMGISGTLLVAATLLTGIAGLLKRPLTPASLFLICTLAVSMCHSMLEYPLWYVYFLIPFGLMLFLSPAEASDGIAFKKAANLGILTASAAIFAGLLHLDWTYTRLVNAFSPAPDDSAKTLNRKINELRYISANSPMLSFYADFSLVNFALPEYPETQTWAEEATLKSLKYRPHSATYRIALYLMRQGKVAEAKQWMRATQSYYPYLMPRYADEIRKLPVWAPLLPELLKDCKAFAAAPGHPEAKPCK

SEQ ID NO: 8374 - protein, 170 aa, Neisseria meningitidis
MLLKVVPERTVSADAKTRDPMWDNAALQTSEGVNFIARFLGFFSDGEYRYVDVLQPNHSDIIRYSGKDFPINQIFNHIHPARYAVTFENNVDSKLRRHWVAGATIRIIDRQTDEVIAKKTIYVFEKGLDGTGGARMPWKFAILCNKERLTSSEPLSDFVLSVLKPYILRP

SEQ ID NO: 8375 - protein, 570 aa, Neisseria meningitidis
MKASQFFISTLKEAPAEAALASHKLMIRAGLIKANASGLYTWMPMGLRVLRKVENVVREEMARAGSVELLMPVVQPAELWQESGRWEFYGKELLRLKDRHDRDFCMGPTCEEVIADIVRKEINSYKQLPKNFYHIQTKFRDEVRPRFGVMRAREFVMKDAYSFHADYASLQTTYDAMYDAYCRIFTRLGLAFRPVAADTGSIGGTGSHEFQVLAESGEDVIAYSDTSDYAANIELAPTLPLKGERTAAQAELTKVHTPNVKTIESLVEFLNIPVEQTLKSIVVESENEGEIVLLLLRGDHEFNDIKAEKLAGVKSPLTMASSAAIVEQFGANGGSLGPVGFKGKVYADFATEKGADWVIGANEDGYHYTGFNFGRDAAEPEFVDLRNVVEGDESPDGQGRLKLARGIEVGHVFQLRDKYTQAMNVSFLDNNGKSQIMEMGCYGIGITRVVAAAIEQNNDEKGIIWTKAMAPFEVVIVPMNYKKSDAVREAADKIYAELLAAGADVLLDDRDERAGVLLNDSELLGIPHRIVIGDRALKEGNVEYAERRNNEAQAVAIGEIVARVTASLNG

SEQ ID NO: 8376 - protein, 291 aa, Neisseria meningitidis
MEEGLIDRLLETLWLDRRLSQNTLNGYRRDLEKIARRLSQSGRMLKDADEADLAAAVYVDGEQRSSQARALSACKRLYIWMEREGIRTDNPTRLLKPPKIDKNIPTLITEQQISRLLAAPDTDTPHGLRDKALLELMYATGLRVSEAVGLNFSSVDLDRGCITALGKGDKQRMVPMGQESAYWVERYYTEARPLLLKGRNCDALFVSQKKTGISRQLAWMIVKEYAGRAGIGYISPHSLRHAFATHLVRHGLDLRVVQDMLGHADLNTTQIYTHVANVWLQGVVKEHHSRN

SEQ ID NO: 8377 - protein, 241 aa, Neisseria meningitidis
LLDHDNGFFDNSNQRPKSETIGTAWRNEDGSGKTFYVGRKKNSRFVRVYEKGRQLGDKESKWVRFEIQFNYGDIEIPLDILINQGSYFCGAFPICRKFKNMPVPERFDQRKKTLNLTFEHKLHYAKNAVGKLVNFMIEMGFDNSEIVESLKADSGFPKGLEPEKYALEMLRDGLKHGFIHEQPDIDLEIELDELGVIAFKNSDKFDREKRLFSPDYDAEKERKYQDYLDEVYHQNVNYDYF

SEQ ID NO: 8378 - protein, 219 aa, Neisseria meningitidis
MTTPKLIIFDWDGTLADTTQPIIDTMRRSFAECGFPPPEAERVRSLIGYSLPEIIRDLLEMPSETAVADIARTYSAHYLNPNNRNMTLFPDALPCLDKLKAQGFRLAVATGKGRAGLDNAISQTATGGYWLATACAGEYPSKPSPEMVFGICGELGFDPKEALVVGDTSHDLHMAANAGAAAVGVATGAHSREQLLSAPHLAVLDGLSELPGFLARHYA

SEQ ID NO: 8379 - protein, 199 aa, Neisseria meningitidis; identical to SEQ ID NO: 2043

SEQ ID NO: 8380 - protein, 225 aa, Neisseria meningitidis; identical to SEQ ID NO: 1002

SEQ ID NO: 8381 - protein, 252 aa, Neisseria meningitidis; identical to SEQ ID NO: 3275

SEQ ID NO: 8382 - protein, 83 aa, Neisseria meningitidis
LVLDDYFQSGLITRRMYFSLDKFHHIPVSGAVIYKDDPIYFRRLEKVLKANAKELDCYAYRVLADGRLFLVDRLITDFFDERK

SEQ ID NO: 8383 - protein, 876 aa, Neisseria meningitidis; identical to SEQ ID NO: 2451

SEQ ID NO: 8384 - protein, 65 aa, Neisseria meningitidis; identical to SEQ ID NO: 6901

SEQ ID NO: 8385 - protein, 492 aa, Neisseria meningitidis
MFSKLTPLAETGIPTLSCANAAGRLLHSDSRQIKQGDIFVACPGEYADGRSYIPAAVANGAAFVFWDDDGKFAWNPEWKVPNQGIKDLKHRAGILAAQVYGNVSDGLKFWGVTGTNGKTSITQWLAQAADLLGEKTAIVGTVGNGFWGALEETTHTTPAPVDVQTLLYRFRQQGATVAAMEVSSHGLDQSRVNGVSFRSAIFTNLTRDHLDYHGTMEAYGAIKSRLFYWHGLKHAVINVDDEYGAELVGRLKKDCPDLAVYSYGFSEHADIRITDFTASSDGIAAVFQTPWGEGKCRTRLLGRFNAQNLAACIALLCANGYPLDKVLDVLAKIRPASGRMDCIMNSGKPLVVVDYAHTPDALEKALATLQEIKPQGAALWCVFGCGGNRDRGKRPLMGAAAVQGADKVVVTSDNPRLENPHDIINDILPAVPAPECVEADRAAAIRYAVEQAAANDIILIAGKGHENYQDVQGVKHRFSDLEIVGQALLTRK

SEQ ID NO: 8386 - protein, 225 aa, Neisseria meningitidis
LVKTADGYKAIAHIQAGDRVLSKDEASGETGYKPVTARYGNPYQETVYIEISDGIGNSQTLISNRIHPFYSDGKWIKAEDLKAGSRLYSESGKTQTVRNTVVKPKPLKAYNLTVADWHTYFVKGNRAETEGVWVHNECPPRKTPSTPIYGNDSEAYAAAKELGYRKIKERTRNDAAIFKKGKSYISRDVDSHNGGAWKEASSPEKLNRKETRNGTFDKNLNRIGD

SEQ ID NO: 8387 - protein, 369 aa, Neisseria meningitidis
MSNWKPDIPYNDLPPLPPKQDIESKTILKRCITARASLARLKQAAELIPNQAMLINTLPVMEARASSEIENIVTTTDKLFQSLQMDTERQDPATKEALQYRTALFAGYESLTSRPLCTQTAIMVCNAIKHPYEMAIRKTGGTALKGGNSGNVVYTPPEGEETIRGKLANWERFIHESGDLDPLIIMAAAHYQFEAIHPFTDGNGRTGRILNSLLLIEKGLLDLPILYLSRYIIENRADYYRLLLGVTERQDWESWIIYILDGVADTADWTVSKIDAIRRLFEQTRQHIRTHAQGIYTHKLVNLLFEQPYTRIANLEAAGIAKRQTASKYLKELSDIGVLQEIVIGRDKLFIHPRLMELLRGEGNSFTSF

SEQ ID NO: 8388 - protein, 261 aa, Neisseria meningitidis
MNPFLNTAFKAARRAGQMMIRAAGNLDAVKTDSKAFNDFVSDVDRNSEIILVEALKEAYPHHKITCEESGSHGKAAAEYEWIIDPLDGTTNFLHGHPQYAISMALLHKGVLQEALVYAPERNDVYMASRGKGALLNDRRIRVSNRIELNRCLIGTGFPVVDQSMMDKYLAILKDFLAKTAGGRREGAASLDLCAVATGRFDGFFEFNLKPWDIAAGALIVQEAGGIVTDMTGEDGWLESGDIVAANPKVLAQMLKIISAHV

SEQ ID NO: 8389 - protein, 330 aa, Neisseria meningitidis
MKTHEISKDSVSLIGVAEHEAGQRLDNYLIKILKGVPKSHIHRIIRAGEVRLNKKRCKPDSRIAEGDTVRIPPVRVAEKEMPSERRAAVPARAFDVVYEDDALLVIDKPSGVAVHGGSGVSFGVIEQLRRARPEAKYLELVHRLDKDTSGLLMVAKKRSALVKLHEAIRNDHPKKIYLALGVGKLPDDNFHVKLPLFKYTGAQGEKMVRVSADGQSAHTVFRVLSRFSDGILHGVGLSHLTLVRATLKTGRTHQIRVHLQSQGCPIAGDERYGDYQANRRLQKLGLKRMFLHASELHLNHPLTGEPLVLKAELPLDLAQFAVMLENGTKM

SEQ ID NO: 8390 - protein, 187 aa, Neisseria meningitidis; identical to SEQ ID NO: 784

SEQ ID NO: 8391 - protein, 304 aa, Neisseria meningitidis
MKQINQALQQKLAEFKEKSGMSQTQLARGIGTSPASVSMYLNGTYAEKGGNYETIEPKIEAFLEMQDSKAKREELVLGFVSTKTTRRIVEAMRNAHEGGEISVIYGQAGLGKTQAVKNYCEKNPAAILIEANPSFTALVLMRKLATAAKVSAMGSLNDLFESVSDRLRDSGHLIVVDEAENLPLRALEIIRRLHDETGCGLVLSGMPRLVANLRGKYGELVQLHSRVAGALNLGDTMPDAELEQIARATLPEADDETIAELVKHSNGNTRRMSKLMRGSVRVANKNGIRMQAGIVKKYSTLIIR

SEQ ID NO: 8392 - protein, 256 aa, Neisseria meningitidis
MTTTEHDNDDAFLLRYSRHILLDEIGIEGQQKLSAAHILVVGCGGLGAAALPYLAASGIGTLTIADSDTVELHNLQRQVAFDEGDVGKPKAEALADRLKRINHNVDVRTVNEKLDGCRLTGLVQTADIVLDCCDNYATRQAVNRVCVQTKTPLVSGAAVRFEGQLAVYRPDLPDSPCYACLFDGGSASDGICSLFGVFSPLVGIIGCTQAAEALKILLDVGEPSHGRLAVYRALEGGWQYFDLPRNPECPICGTER

SEQ ID NO: 8393 - protein, 121 aa, Neisseria meningitidis; identical to SEQ ID NO: 1865

SEQ ID NO: 8394 - protein, 492 aa, Neisseria meningitidis
MKYKDLRDFIAMLEQQGKLKRVAHPISPYLEMTEIADRVLRAEGPALLFENPIKPDGTRYGYPVLANLFGTPERVAMGMGADSVSKLREIGQTLAYLKEPEPPKGIKDAFSKLPLLKDIWSMAPNVVKNAPCQEIVWEGEDVDLYQLPIQHCWPEDVAPLVTWGLTVTRGPHKKRQNLGIYRQQLIGKNKLIMRWLSHRGGALDYQEFRKLNPDTPYPVAVVLGCDPATILGAVTPVPDTLSEYQFAGLLRGSRTELVKCIGNDLQVPARAEIVLEGVIHPNETALEGPYGDHTGYYNEQDYFPVFTVERITMRENPIYHSTYTGKPPDEPAVLGVALNEVFVPLLQKQFPEITDFYLPPEGCSYRMAVVSMKKQYAGHAKRVMMGCWSFLRQFMYTKFIIVVDDDVNVRDWKEVIWAVTTRMDPVRDTVLVENTPIDYLDFASPVSGLGGKMGLDATNKWPGETDREWGRVIKKDPAVTAKIDGIWEELGL

SEQ ID NO: 8395 - protein, 57 aa, Neisseria meningitidis; identical to SEQ ID NO: 2401

SEQ ID NO: 8396 - protein, 271 aa, Neisseria meningitidis; identical to SEQ ID NO: 3345

SEQ ID NO: 8397 - protein, 408 aa, Neisseria meningitidis; identical to SEQ ID NO: 2386

SEQ ID NO: 8398 - protein, 49 aa, Neisseria meningitidis
MKFGDSKNFSRLENLKYPCEVMVTVEMTSTGKGMVPSLIDFQVAEKPKG

SEQ ID NO: 8399 - protein, 119 aa, Neisseria meningitidis
MYFVDRTAVVLKPTARFLEWLKSTDENMPDLTIEQLRANCSVFLVPQFDEPEAVVSYFDERYRQIFEAELAGWDINKDKWPQDMGLKAFWEFFDIEIHDMVLDMEEAELNITPVFDNMM

SEQ ID NO: 8400 - protein, 272 aa, Neisseria meningitidis; identical to SEQ ID NO: 1395

SEQ ID NO: 8401 - protein, 262 aa, Neisseria meningitidis
MNPQDKCWQVHRHLAEYADQRLTLVRNAPKYILLAGADADISRSLLAKRYPQAVFEEYDSRADFLAAAAAARKGGFWQRFTGKGVVQHCQSPIAPLPEACADMLWSNLGLLAAEQILPVLHNWACALKTDGLLFFTCFGRDTFTELKCRLKENGIESRSVMFPDMHDLGDMLAENGFYDPVTDTAKLVLDYKKAETFWADMDTLGVWRAMAWNDENAARSCVGTIFEREGGLGITLETVYGHAVKKLMLPQGENVVQFFPKR

SEQ ID NO: 8402 - protein, 207 aa, Neisseria meningitidis
MKIIHKGLVEYLPTFEAMKTFNANRTASTEDELWVVEHPPVFTQGLAGKPEHLLIRDDIPIVQIDRGGQITYHGPGQLVVYTMIDFKRRKTSVRNIVSALENSIIATLAEYGIEAAADPKRPGVYVGERKIASLGLRIKGGSVYHGLALNVNMDLSPFTHINPCGYAGMEMTQIADFVQPCPTPDEVAAKLTAHLETQFTPKADNNE

SEQ ID NO: 8403 - protein, 130 aa, Neisseria meningitidis; identical to SEQ ID NO: 4345

SEQ ID NO: 8404 - protein, 680 aa, Neisseria meningitidis
MMSPETQKQLKITDVSAKKLDKLNLHTAWDLVLHLPLRYEDETHIMPIKDAPIGVPCQVEGEVIHQEVTFKPRKQLIVQIADGSGSVLFLRFIHFYASHQKQTAVGKRIRAVGEIKHGFYGDEMIHPKIRDAEGGGLAESLTPVYPTVNGLNQPTLRRIIQTALDVTPLHDTLPDALLCRLKLPHLAESLRLLHSPPPSFTIHQLSDGTLPAWQRLKFDELLAQQLSMRLARQKRIGGTAAALGGDGTLTQALRQALPFALTDAQEKVVSEICRDMAQTYPMHRLLQGDVGSGKTIVAALSALTAIESGAQVAVMAPTEILAEQHFIKFKQWLEPLGIEVVRLFGSLRKKAKDEAKAKLADGSVKIAVGTHALFSDGVAFHNLGLTIVDEQHRFGVAQRLALKNKGREVHQLMMSATPIPRTLAMSFFADLDVSVIDELPPGRTPIKTRLVNNVRRAEVEGFVLGTCRKGRQAYWVCPLIEESETLQLQTATETLEQLQTALPELNIGLVHGRMKAAEKAEVMAQFAAGRLNVLVATTVIEVGVDVPNAALMVIEHAERMGLAQLHQLRGRVGRGAAESVCVLLFAEPLSELAKARLKVIYEHTDGFEIARQDLNIRGPGEFLGARQSGVPMLRFAKLEEDLHLLEQAREIAPILIEQNPEIVEAHLARWLSGREGYLGV

SEQ ID NO: 8405 - protein, 44 aa, Neisseria meningitidis; identical to SEQ ID NO: 6328

SEQ ID NO: 8406 - protein, 132 aa, Neisseria meningitidis
  misc_feature 3, 4: 'Xaa' is any amino acid
VCXXHAASSLGLSAIYDFKLNDKFKPYIGARVAYGHVKHQVHSVETKTTTVTSKPTATSPQGGPIIQTDPSKPPYHESHSISSLGLGVIAGVGFDITPKLTLDTGYRYHNWGRLENTRFKTHEVSLGMRYHF

SEQ ID NO: 8407 - protein, 186 aa, Neisseria meningitidis; identical to SEQ ID NO: 2093

SEQ ID NO: 8408 - protein, 368 aa, Neisseria meningitidis; identical to SEQ ID NO: 5075

SEQ ID NO: 8409 - protein, 408 aa, Neisseria meningitidis
MTFLQRLQGLADNKICAFAWFVVRRFDEERVPQAAASMTFTTLLALVPVLTVMVAVASIFPVFDRWSDSFVSFVNQTIVPQGADMVFDYINAFREQANRLTAIGSVMLVVTSLMLIRTIDNTFNRIWRVNSQRPWMMQFLVYWALLTFGPLSLGVGISFMVGSVQDAALASGAPQWSGALRTAATLTFMTLLLWGLYRFVPNRFVPARQAFVGALATAFCLETARSLFTWYMGNFDGYRSIYGAFAAVPFFLLWLNLLWTLVLGGAVLTSSLSYWRGEAFRRGFDSRGRFDDVLKILLLLDAAQKKGKALPVQEFRRHINMGYDELGELLEKLARHGYIYSGRQGWVLKTGADSIELNELFKLFVYRPLPVERDHVNQAVDAVMTPCLQTLNMTLAEFDAQAKKQQQS

SEQ ID NO: 8410 - protein, 66 aa, Neisseria meningitidis; identical to SEQ ID NO: 3561

SEQ ID NO: 8411 - protein, 416 aa, Neisseria meningitidis
MTKLTRRQIIRRTAGTLFALSPIASAVAKTVRAPQFTAVRIWPSHTYTRLTLESTTALKYQHFTLDNPGRLVVDIQNANINTVLHGLSQKVMADDPFIRNIRAGQNTPDTVRLVIDLKQPSYAQVFSLPPVGGFKNRLVVDLYPQGMDPDDPMMALLNGSLNKTRRGSPEADLAQNTPAQTERGKNGRRPVIMIDPGHGGEDPGAVSPGGLQEKHVVLSIARETKKQLEALGYNVFMTRNEDVFIPLGVRVAKGRARRADVFVSIHADAFTSPSARGTGVYMLNTKGATSSAAKFLEQTQNNADAVGGVPTSGNRNVDTALLDMTQTATLRDSRKLGKLVLEELGRLNHLHKGRVDEANFAVLRAPDMPSILVETAFLSNPAEEKLLGSESFRRQCAQSIASGVQRYINTSVLKRG

SEQ ID NO: 8412 - protein, 381 aa, Neisseria meningitidis
MTETQSLELAKELISRPSVTPDDQNCQKLLAERLHKIGFAAEELHFGDTKNIWLRRGTKAPVVCFAGHTDVVPTGPVEKWDSPPFEPAERDGRLYGRGAADMKTSIACFVTACERFVAEHPDHQGSIALLITSDEEGDALDGTTKVVDVLKARDELIDYCIVGEPTAVDKLGDMIKNGRRGSLSGNLTVKGKQGHIAYPHLAINPVHTFAPALLELTQEVWDEGNKYFPPTSFQISNINGGTGATNVIPGELSVKFNFRFSTESTEAGLKQRVHAILDKHGVQYDLQWSCSGQPFLTQAGKLTDVARAAIAETCGIEAELSTTGGTSDGRFIKAIAKELIELGPSNATIHQINENVRLDDIPKLSAVYEGILARLLAGNAV

SEQ ID NO: 8413 - protein, 499 aa, Neisseria meningitidis
VFKKYQYLALAALCAASLAGCDKAGSFFGADKKEASFVERIEHTKDDGSVSMLLPDFVQLVQSEGPAVVNIQAAPAPRTQNGSSNAETDSDPLADSDPFYEFFKRLVPNMPEIPQEEADDGGLNFGSGFIISKDGYILTNTHVVTGMGSIKVLLNDKREYTAKLIGSDVQSDVALLKIDATEELPVVKIGNPKDLKPGEWVAAIGAPFGFDNSVTAGIVSAKGRSLPNESYTPFIQTDVAINPGNSGGPLFNLKGQVVGINSQIYSRSGGFMGISFAIPIDVAMNVAEQLKNTGKVQRGQLGVIIQEVSYGLAQSFGLDKAGGALIAKILPGSPAERAGLQEGDIVLSLDGGEIRSSGDLPVMVGAITPGKEVSLGVWRKGEEITIKVKLGNAAEHIGASSKTDEAPYTEQQSGTFSVESAGITLQTHTDSSGGHLVVVRVSDAAERAGLRRGDEILAVGQVPVNDEAGFRKAMDKAGKNVPLLIMRRGNTLFIALNLQ

SEQ ID NO: 8414 - protein, 72 aa, Neisseria meningitidis; identical to SEQ ID NO: 1294

SEQ ID NO: 8415 - protein, 177 aa, Neisseria meningitidis; identical to SEQ ID NO: 3550

SEQ ID NO: 8416 - protein, 930 aa, Neisseria meningitidis
MSNRPTLLLVDGSSYLYRAYHAMGQNLTAPDGAPTGALYGVLNMLRRLRSEYPHDYCAVVFDAKGKNFRHQMFEEYKATRPPMPDDLRPQAEALPDLVRLTGWPVLVIGQVEADDVIGTLAKQGAEHGLRVIVSTGDKDMAQLVDERVTLVNTMSGETLDIEGVKAKFGVRPDQIRDYLALMGDKVDNVPGVEKCGPKTAVKWLEAYGSLQGVMEHASEIKGKVGENLRAALPRLPLSYDLVTIKTDVDLHAELSDGIESLRRTAPKWAQLVVDFKRWGFRTWLKEAESNMNTGSTDDVFGSDSIGEQAALNAEMPSEKQAEKATAPERLDYQAVTTEAQFAALLDKLSRANTIGIDTETTSLDAMNASLVGISIAFQAGEAVYIPVGHSLTAAPEQLDLQDVLGRLKPHLGNPALKKIGQNLKYDQHVFANYGIALNGIAGDAMLASYIIESHLGHGLDELSERWLGLETITYESLCGKGAKQIGFADVAIGQATEYAAQDADFALRLEAHLRAQMDEKQLEMYEKMELPVAQVLFEMERNGVQIDRAELARQSAELGAELMKLEQQAYAAADQPFNLNSPKQLQEILFDKMGIPTKGLKKTAKGGISTNEAVLEQLAPDYPLPKIILQNRSLAKLKSTYTDKLPEMISPKDGRVHTTYAQAVAITGRLASNNPNLQNIPIRTAEGRRVRRAFTAPQGSVIVSADYSQIELRIMAHLSGDKTLIAAFQNGEDVHRRTAAEVFGTAPENVSSEQRRYAKTINFGLIYGMGQYGLAKSLGIDNLSAKNFIDRYFARYPGVAEYMQRTKEQAAAQGYVETLFGRRLYLPDIRNKNANARAGAERAAINAPMQGTASDLIKRAMIDVRNCLSDGIGSKLVMQVHDELVLEVVETELDFVKEKLPQIMAKVDGGLLDVPLVAEVGVGENWEEAH

SEQ ID NO: 8417 - protein, 277 aa, Neisseria meningitidis; identical to SEQ ID NO: 3602

SEQ ID NO: 8418 - protein, 637 aa, Neisseria meningitidis
MLNITLPDGSVRQYESPVTVAQIAASIGVGLARAAVAGRVNGKLVDACDPIVENSAVQIITPKDQEGIEIIRHSCAHLVGHAVKQLYPNAKMVIGPVIEEGFYYDIATEKPFTPEDVAAIEARMKELIAQDYDVVKIMTPRAEAIKIFQERGEEYKLRLIDDMPEVEAMGMYHHQEYVDMCRGPHVPNTRFLKNFKLTKLAGAYWRGDSNNEMLQRIYGTAWATKDELKAYIQRIEEAEKRDHRKLGKQLDLFHLQDEAPGMVFWHPKGWALWQVIEQHMRKELNAAGYKEVKTPQIMDKTFWEKSGHWDNYKDNMFVTSSEKREYAVKPMNCPGHVQIFNNGLRSYRDLPMRLAEFGSCHRNEPSGALHGLMRVRGFVQDDAHIFCTEDQIVSEARAFNELLVRIYKQFGFHDVAVKLSLRPEQRAGSDEVWDKAEQGLRDALTACGVEWEELPGEGAFYGPKIEYHVKDALGRSWQCGTLQLDFVLPERLDAEYVTENNDRARPVMLHRAILGSLERFIGILIENHAGSFPLWLAPVQMVIMNITENQADYCREVAAKLQAAGFRAELDLRNEKIGYKIRDNSQYRFPYQIVVGDKEKQENKVAVRRKAEDLGSLDLDDFIAQLQQEITDALVNH

SEQ ID NO: 8419 - protein, 217 aa, Neisseria meningitidis
VFGYFVFLFDFFAFLFFANVFLAVNLLFLEKNIKNKLLFLLPISIIIWMVIHISMINIKFYKFEHQIKEQNISSITGVIKPHDSYNYVYDSNGYAKLKDNHRYGRVIRETPYIDVVASDVKNKSIRLSLVCGIHSYAPCANFIKFAKKPVKIYFYNQPQGDFIDNVIFEINDGNKSLYLLDKYKTFFLIENSVCIVLIILYLKFNLLLYRTYFNELE

SEQ ID NO: 8420 - protein, 93 aa, Neisseria meningitidis; identical to SEQ ID NO: 3308

SEQ ID NO: 8421 - protein, 97 aa, Neisseria meningitidis; identical to SEQ ID NO: 177

SEQ ID NO: 8422 - protein, 268 aa, Neisseria meningitidis
MKSSFVQTLTIAGSDSGGGAGIQADLKTFQMRGVFGTCVITAVTAQNTLGVSAVHLVPTETITAQIQAIREDFDIRAYKIGMLGTAEIIECVADKLKHCDFGRRVLDPVMIAKGGAPLLQDSAVAALTRLLLPDTDVLTPNLPEAEALTGVHIENRKDAERAAKILLDYGVKNVVIKGGHLNGSTSGRCTDWLFTQNETLELDSPRFPTAHTHGTGCTFSACITAELAKGSDVCKAVRTAKSYITAAISNPLEIGAGHGPVNHWAYRD

SEQ ID NO: 8423 - protein, 768 aa, Neisseria meningitidis
MAKNLLIVESPSKAKTLKKYLGGDFEILASYGHVRDLVPKSGAVDPDNGFAMKYQLISRNGKHVDAIVAGAKEAENIYLATDPDREGEAISWHLLEILKSKRGLKNIKPQRVVFHEITKNAVLDAVAHPREIEMDLVDAQQARRALDYLVGFNLSPLLWKKIRRGLSAGRVQSPALRLICERENEIRAFEAQEYWTVHLDSHKGRSKFTAKLAQYNGAKLEQFDLPNEAAQADVLKELEGKEAVVTAIEKKKRSRNPAAPFTTSTMQQDAVRKLGFTTDRTMRTAQQLYEGIDVGQGAIGLITYMRTDSVNLADEALTEIRHYIENKIGKEYLPSAAKQYKTKSKNAQEAHEAIRPTSVYRTPESVKPFLSADQFKLYQMIWQRTVACQMTPAKFDQTTVDITVGKGVFRVTGQVQTFAGFLSVYEESSDDEEGEDSKKLPEMSEGDKLPVDKLYGEQHFTTPPPRYNEATLVKALEEYGIGRPSTYASIISTLKDREYVTLEQKRFMPTDTGDIVNKFLTEHFAQYVDYHFTAKLEDQLDEIAGGKRQWIPLMDKFWKPFIKQVEEKEGIERAKFTTQELDETCPKCGEHKLQIKFGKMGRFVACAGYPECSYTRNVNETAEEAAERIAKAEAEQAELDGRECPKCGGRLVYKYSRTGSKFIGCANYPKCKHVEPLEKPKDTGVQCPQCKKGNLVERKSRYGKLFYSCSTYPDCNYATWNPPVAESCPKCAWPVLTIKTTKRWGVEKVCPQKECGWKEQIEPPAPKE

SEQ ID NO: 8424 - protein, 121 aa, Neisseria meningitidis
LDYRFGRQYRLLKTDDFSSVFAFRNRRSRDLLQVSRSNGNGLDHPRIGLVVGKKTAKRANERNYMKRVIRDWFRLNKNRLPPQDFVVRVHRKFDRSTAKQARAELAQLMFGNPATGCRKQA

SEQ ID NO: 8425 - protein, 149 aa, Neisseria meningitidis; identical to SEQ ID NO: 4552

SEQ ID NO: 8426 - protein, 186 aa, Neisseria meningitidis; identical to SEQ ID NO: 1480

SEQ ID NO: 8427 - protein, 422 aa, Neisseria meningitidis
VKPLRRLTNLLAACAVAAAAFGQPALAADLAQDPFITDNAQRQHYEPGGKYHLFGDPRGSVSDRTGQINVIQDYTHQMGNLLIQQAAIQGNLGYTVRFSGHGHEEHAPFDNHAADSASKEQGNVDEGFTVYRLNWEGHEHHPADAYDGPKGGNYPKPTGARDEYTYHVNGTARSIKLNPTDTRSIRQRISDNYNNLGSNFSDRADEANRKMFEHNAKLDRWGNSMEFINGVAAGALNPFISAGEAVDQWMQENPNAAETVEALVNVLPFAKVKNLTKAAKPGKAAVSGDFSDSYKHNTASRLSQSVDGEMFQTRNVDFKAKSIGTKIHDGAQGKHISGHRNYIEGKSTLNQNINPQELLNGIHSGAYPVISKGARGNPVVDFGYPIGSDGKSGLSTNFGTIHSGKNGVHIVPANPKTIKKVQ

SEQ ID NO: 8428 - protein, 284 aa, Neisseria meningitidis; identical to SEQ ID NO: 3000

SEQ ID NO: 8429 - protein, 167 aa, Neisseria meningitidis; identical to SEQ ID NO: 189

SEQ ID NO: 8430 - protein, 467 aa, Neisseria meningitidis
MKKIQADVVVIGGGTAGMGAFRNARLHSDNVYLIENNVFGTTCARVGCMPSKLLIAAAEARHHALHTDPFGVHLDKDSIVVNGEEVMQRVKSERDRFVGFVVADVEEWPADKRIMGSAKFIDEHTVQIDEHTQITAKSFVIATGSRPVILPQWQSLGNRLIINDDVFSWDTLPKRVAVFGPGVIGLELGQALHRLGVKVEIFGLGGIIGGISDPVVSDEAKAVFGEELKLHLDAKTEVKLDADGNVEVHWEQDGEKGVFVAEYMLAAVGRRPNVDNIGLENINIEKDARGVPVADPLTMQTSIPHIFIAGDASNQLPLLHEAADQGKIAGDNAGRYPNIGGGLRRSTIGVVFTSPQIGFVGLKYAQVAAQYQADEFVIGEVSFKNQGRSRVMLVNKGHMRLYAEKATGRFIGAEIVGPAAEHLAHLLAWAHQMKMTVPQMLDMPFYHPVIEEGLRTALRDADAKLKA

SEQ ID NO: 8431 - protein, 310 aa, Neisseria meningitidis; identical to SEQ ID NO: 714

SEQ ID NO: 8432 - protein, 161 aa, Neisseria meningitidis
MDALHTIARNLTKKRQTVSCAESCTGGMLAAAFTSVAGSSQWFDQSFVTYSNKAKEDRLGVLPETLLEHGAVSRQTVYEMARGAKAVAQADYAVGISGIAGPGGGSESKPVGTVWFGFAFPGGSCEAMRRFDGNRESVRAQAVAFALERLAGLIENGGDAV

SEQ ID NO: 8433 - protein, 107 aa, Neisseria meningitidis; identical to SEQ ID NO: 875

SEQ ID NO: 8434 - protein, 305 aa, Neisseria meningitidis
MEKAEHLNSSRFVNLVKSGGGSYVEGSYRFDTLSNGISIHGGTVTARCDFCSSRLAEPYVSFVLLLEGSLDFGINRCRFQIDADGGKIVLIAVGEEVLFSRYLYRGGKTVKMTIKGMEQWLLRPEYARFAPLLYREPVRIWDLPPNLRGLAASCLKAVPKGHLGETLRREADVLRLLSDLWDTVSDGIGPAAGQTAEADAMPSEDFSRTLNAAFAGGAHQVNRLTDALNISERTLQRRMRDHFGITTSEWLHHKQMQHALYLLQNGGKSIGETAYLCGYRHVSSFTQAFRQYFGSTPAETKKENR

SEQ ID NO: 8435 - protein, 321 aa, Neisseria meningitidis; identical to SEQ ID NO: 4435

SEQ ID NO: 8436 - protein, 271 aa, Neisseria meningitidis; identical to SEQ ID NO: 1333

SEQ ID NO: 8437 - protein, 143 aa, Neisseria meningitidis; identical to SEQ ID NO: 2432

SEQ ID NO: 8438 - protein, 225 aa, Neisseria meningitidis
MPAALIKDFLLTQGLKLPLDEVRAAYLTAQTVMDMGTASIDRSVLWRSDEGWKLADYLSCDNVREDALKRLFMALDSVFSRSTGVQSAAVYALMPSENQAFQLICLSRQGEVLENLWDLDEAAGKVSLACRSAQSGWMNVASDVRRWLDLGELSGERNHASAAQISIPVCTESGGVLGVVHVEFECAECADEAAQAEWVALALALSEPLKLLLGMSAGKDGSEDV

SEQ ID NO: 8439 - protein, 333 aa, Neisseria meningitidis; identical to SEQ ID NO: 465

SEQ ID NO: 8440 - protein, 185 aa, Neisseria meningitidis
MKPKFKTVLTALLLAVSLPSMAATHVLMETDMGNIRLVLDESKAPKTVANFVRYARKGFYDDTVFHRVIDGFVIQGGGFTEDLVQKATDKAVANESGNGLKNTAGTIAMARTANPDSATSQFFINLADNDSLNYKNGQYGYTVFGRVESGMNTVSKIARVKTATHGLYQNVPVQPVKIRRIVVGQ

SEQ ID NO: 8441 - protein, 136 aa, Neisseria meningitidis; identical to SEQ ID NO: 8184

SEQ ID NO: 8442 - protein, 295 aa, Neisseria meningitidis; identical to SEQ ID NO: 2981

SEQ ID NO: 8443 - protein, 140 aa, Neisseria meningitidis
MQVTSKWIDGMCFVGTTESGHSVVMEGSAAEGAAKRGPSPLEMLLLGVAGCSSIDVVMIAEKQRQKVTDCRATVTAKRADDAPRVFTEIHIHFKVFGHDLKESAIERAVQMSAEKYCSASIMLGKAAKITHSFEIAGADK

SEQ ID NO: 8444 - protein, 206 aa, Neisseria meningitidis; identical to SEQ ID NO: 1725

SEQ ID NO: 8445 - protein, 196 aa, Neisseria meningitidis
MLLFIDNYDSFTYNIVQYFTELGQEVAVRRNDDITLEEIEALNPQYLVIGPGPCSPKEAGISVAAMRHFAGRLPIMGVCLGHQTIGEAFGGRIVRAKTLMHGKVSPVSHSGKGMFKGLPNPVTCTRYHSLVIDRNTMPECLEVTAWTEDGEIMGVRHKEYAVEGVQFHPEALLTEHGHDMLNNFLVEFQNFKPQKI

SEQ ID NO: 8446 - protein, 111 aa, Neisseria meningitidis; identical to SEQ ID NO: 233

SEQ ID NO: 8447 - protein, 503 aa, Neisseria meningitidis
MKWLKRLTVIVGTFYRYRLAGLCASLMGSGWICALLKMMPQSSKLKNEPPAVRLRLALESLGPIFIKFGQVLSTRPDLIPHDYAVELAKLQDKVPPFDARLSREQIEKSLGQSIEKLYAEFETEPVASASIAQVHKARLHSGERVAVKVLRPNLLPLIEQDLSLMRFGAVWVERLFADGKRLKPLEVVAEFDKYLHDELDLMREAANAGQLGRNFQNSNMLIVPKVFYDYCTSDVLTIEWMDGTPVADIAKLKADGIDLHKLADYGVEIFFTQVFRDGFFHADMHPGNILVAADNRYIALDFGIVGTLTDYDKRYLAINFLAFFNRDYRRVATAHIESGWVPADTRAEELEAAVRAVCEPVFNKPISQISFGLVLMRLFEVSRRFNVEIQPQLVLLQKTLLNIEGLGRQLDPDLDLWKTAKPFLVKWMNGQVGPKALWRNLKNEAPDWAQIIPSLPRKISALIDENRQQEMRDAYIHLVKVQQRQSLWLAVIAVVLLLILLLK

SEQ ID NO: 8448 - protein, 54 aa, Neisseria meningitidis; identical to SEQ ID NO: 2634

SEQ ID NO: 8449 - protein, 351 aa, Neisseria meningitidis
MTILSDVKALGQQIWLDNLSRSLVQSGELAQMLKQGVCGVTSNPAIFQKAFAGDALYADEVAALKQQDLTPKQRYETMAVADVQAACDVCLAEHESTGGKTGFVSLEVSPELSKDAQGTVEEARRLYAAIGCKNAMIKVPATDAGIDALETLVSDGISVNLTLLFSRVQTLKAYAAYARGIAKRLAAGQSVAHIHVVASFFISRVDGALDTTLPDHLKGKIAIALAKAAYQDWAQYFGSPEFAALETQGANRVQLLWASTGVKNPAYPDTLYVDSLIGAHTVNTVPDATLKAFIDHGTAKATLTEGADEAQAQLAETAALGIDVETLAARLQEDGLKQFEEAFEKLLAPLV

SEQ ID NO: 8450 - protein, 1010 aa, Neisseria meningitidis
MFWIVLIVILLLALAGLFFVRAQSEREWMREVSAWQEKKGEKQAELPEIKDGMPDFPELALMLFHAVKTAVYWLFVSVVRFCRNYLAHESEPDRPVPPASANRADVPNASDGYSDSGNGTEEAETEAAEAAEEEAADTEDIATAVIDNRRIPFDRSIAEGLMPSESEISPVRPVFKEITLEEATRALNGAALRETKKRYIDAFEKNETAVPKVRVSDTPMEGLQIIGLDDPVLQRTYSRMFDADKEAFSESADYGFEPYFEKQHPSAFSAVKAENARNAPFRRHAGQAEAKSPDVSQGQSVSDGTAVRDARRRVSVNLKEPNKATVSAEARISRLIPESRTVVGKRDVEMPSETENVFTETVSSVGYGGPVYDETADIHIEEPAAPDAWVVEPPEVPKVPMPAIDIPPPPPVSEIYNRTYEPPSGFEQAQRSRIAETDHLADDVLNGGWQEETAAIADDGSEGAAERSSGQYLSETEAFGHDSRAVCPFEDVPSERPSCRVSDTEADEGAFQSEETDAVYEHLPTTDLLLPPLFNPGATQTEEELLENSITIEEKLAEFKVKVKVVDSYSGPVITRYEIEPDVGVRGNSVLNLEKDLARSLGVASIRVVETIPGKTCMGLELPNPKRQMIRLSEIFNSPEFAESKSKLTLALGQDITGQPVVTDLGKAPHLLVAGTTGSGKSVGVNAMILSMLFKAAPEDVRMIMIDPKMLELSIYEGIPHLLAPVVTDMKLAANALNWCVNEMEKRYRLMSFMGVRNLAGFNQKIAEAAARGEKIGNPFSLTPDNPEPLEKLPFIVVVVDEFADLMMTAGKKIEELIARLAQKARAAGIHLILATQRPSVDVITGLIKANIPTRIAFQVSSKIDSRTILDQMGAENLLGQGDMLFLPPGTAYPQRVHGAFASDEEVHRVVEYLKQFGEPDYVDDILSGGGSEELPGIGRSGDGETDPMYDEAVSVVLKTRKASISGVQRTLRIGYNRAARLIDQMEAEGIVSAPEHNGNRTILVPLDNA

SEQ ID NO: 8451 - protein, 235 aa, Neisseria meningitidis
LVKTADGYKAIARIRTGDRVFAKDEASGKTGYKPVTARYGNPYQETVYIEISDGIGNNQTLISNKIHPFYSQGKWIQAGRLKKGDTLLSESGAKQTVQNITFKQQPLKAYNLTVADWHTYFVKGSQAETEGVWVHNDCPYDKGNQRYKDASYHGKNDNSVKSRAPTNGQAALDNSVQVKSTSPRRVGVDKANNEIVVLDKTQTFNNGFAEYHGHVRSWQDLHTDQKNALKKAGLD

SEQ ID NO: 8452 - protein, 626 aa, Neisseria meningitidis; identical to SEQ ID NO: 2278

SEQ ID NO: 8453 - protein, 259 aa, Neisseria meningitidis; identical to SEQ ID NO: 2706

SEQ ID NO: 8454 - protein, 197 aa, Neisseria meningitidis; identical to SEQ ID NO: 2035

SEQ ID NO: 8455 - protein, 89 aa, Neisseria meningitidis; identical to SEQ ID NO: 1367

SEQ ID NO: 8456 - protein, 390 aa, Neisseria meningitidis
MNITIVAPYCSLPSEPHFNRFWYLAELLSQSHDVLLITSNFKHYDKSFRRPEDAEAASQGRLKVMLLEESGYSKNVSLGRVTSHHRFVKHFEKWLENCRPGEQDVVFSAYPLIATNLLLGKHKARLGYKLIVDVQDVWPESFSSVVPFLKKVPHKLLPFASRANRAYRYADALVAVSQTYLDRAKETNPNVPGEVIYIGADFPKLDAAPAKDFGDDKTRFFYLGTLSYSYDVETVCKGVRKLLDDGENVELHIMGGGPDLDRLKQYACDGIKFYGYIPYAEMMSVAKGCDIAINAIQSYSMASITNKLSDYMALQKPILNSQVNDEVAEVLTLLPHADYRSGDVDGFVQADKDILKRKNDPVQSEEIVRRFKRDVAYQKIVNLIERLAHE

SEQ ID NO: 8457 - protein, 239 aa, Neisseria meningitidis; identical to SEQ ID NO: 1086

SEQ ID NO: 8458 - protein, 1069 aa, Neisseria meningitidis
MFYLYQSNRLETLAALFARIQKVKPLKSVLQPEQIIVQSQGMRRYLNTCLARDLGVAANLSFSLPAGLTWKLMKKLIPGIPELSPFAPEVMRWRLLDLFRSEAFRNTAEFEDVRNVLQDYLGSGESADYQLAGQLADIFDQYLVYRPQWIDAWQQGRILSLGDDEIWQSKLWRYLDDGRQSAPHRVALWEKLLESLSSDKLPERYFVFGISTMAPMYLQLLHKLSEHCDVFVFALNPSGMYWGNVIEAAQILKGGGDPDLTQAGHPLLASLGKQGRDFFDFLNEMEIEGETPVFEEGGRDTLLHALQTDIQNLKMPSENVGSVGTDDGSIRIVSAHSPLRELQILKDKLLKILHEHPDWQPHDIAVLTPNIESYTPFIEAVFGQAQPGAQALPYSVSDVKISRRQPLFHALSCLFDLLESRFEVDKVLVLLETAPVLRRFGLTEDDLPLLHDMVADLNVRWGLDGEMRGGTDQLFTWKQAVERMILGWMLPEGGNPMWQDVSAWYADVNQTAMFGRFAAFLETLSDIVRIWRQPATVDEWVGRCRGLLETLFQAEADDQKAVQNLENEWVKWQAETELAQFSGQLPQQTVIRHIRRFLDSESEAGFLRGGITFCSMVPMRSLPFKVICLLGLNDGDFPRNTKAAVFDLIAKHPAKGDRARRDDDRYLFLEALISAREILYLSYIGRDIRKDEELAPSSLLGELIDTVAAMTGTNSRQLAQNWIEQHPLQAFSRRYFQEGGRSDGIFGTRTDYATALGQTPEPPQPFFDQPVENAEPVAEIGQDEFIRFWRNPVKVWLQQQLAWSEPHIGEAWEPAEPFEPQHADQIAETYIEARREGRDFAQTAARIGAESLLPSGELGRLWQQNFQTAAKQIDTAVLNSPKLPPLSYAIPSDGQILKGSLGNLYRCGQVFYAYGKPNAPQRIAFLLEHLIFCAVMPSEAETRQTFIVQSGETEILAEIAQDRALQLLSEWMAFFNIGQNRPLPFFAKTSLAAAEAFAQKQDWEAALKKAQTAYYGNKVSKGQKDYTEVALVFGNASQNPLEQPLFENLARLLADTLAAAEKREGAGAA

SEQ ID NO: 8459 - protein, 210 aa, Neisseria meningitidis; identical to SEQ ID NO: 5679

SEQ ID NO: 8460 - protein, 110 aa, Neisseria meningitidis
MQILSFQPDIAERMLEGTEGESVNENAQFVRTDNGYWIAWHEGVAALLAPDTPPGIPCFWVEGAESLEELCVMVERGEFDEVEEFDGDDDEWLETAQGCGHHGDACACGH

SEQ ID NO: 8461 - protein, 221 aa, Neisseria meningitidis; identical to SEQ ID NO: 2270

SEQ ID NO: 8462 - protein, 129 aa, Neisseria meningitidis; identical to SEQ ID NO: 3613

SEQ ID NO: 8463 - protein, 391 aa, Neisseria meningitidis; identical to SEQ ID NO: 7218

SEQ ID NO: 8464 - protein, 236 aa, Neisseria meningitidis; identical to SEQ ID NO: 3170

SEQ ID NO: 8465 - protein, 513 aa, Neisseria meningitidis
MKFLDREASIAKPGFNRWLVPPAALAVHLAIGQIYAYSVFNAPLTKLIGITESAAGDWKLTTVGWIFSIALAMLGASAALFGTWMERVGPRKAIFAAACCFSLGFFVSAFGVRTHNLFLLYLGNGVIGGVGLGLGYIGPVSTLMKWFPDKPGMATGLAIMGFGGGAMLASPLSVSLMNAFSNAASVGVAETFAVLGLLYLALMMFGAFTIRVPADGWKPEGYTAPKTQNKLVSSNHVNVSQAMKTPQFWLLFWVLCLNVTAGIGVLGQASVMIQELFSETSIGRQAAVGAGAAAGFVSLLSLFNMGGRFLWSSVSDKIGRKNTYTIFFVLGSLLYFAVPSIGEGGSKALFIIGFCVIISMYGGGFAAIPAYLKDLFGTYQVGAIHGRILLAWSTAAVIGPVLVNYIRQSQIDSGIPAAQAYGVTMYIMACLLIIGLLCNLAVKSVHEKHHEKDIKTAAHSGNPDDETAISDAYLVGEKVSGGGISVWWRWALAVIPLAYGVVMVFVKALDLFS

SEQ ID NO: 8466 - protein, 95 aa, Neisseria meningitidis; identical to SEQ ID NO: 4938

SEQ ID NO: 8467 - protein, 864 aa, Neisseria meningitidis
MSKSAVSPMMQQYLGIKAQHTDKLVFYRMGDFYEMFFDDAVEAAKLLDITLTTRGQVDGEPVKMAGVPFHAAEQYLARLVKLGKSVAICEQVGEVGAGKGPVERKVVRIVTPGTLTDSALLEDKETNRIVAVSPDKKYIGLAWASLQSGEFKTKLTTVDKLDDELARLQAAEILLPDSKNAPQLQTASGVTRLNAWQFAADAGEKLLTEYFGCQDLRGFGLDGKEHAVAIGAAGALLNYIRLTQNLMPQHLDGLSLETDSQYIGMDAATRRNLEITQTLSGKKSPTLMSTLDLCATHMGSRLLALWLHHPLRNRAHIRARQEAVAALESQYKPLQCRLKNIADIERIAARIAVGNARPRDLASLRDSLFELAQIDLSANGSSLLETLKAVFPENLSTAEQLRQAILPEPSVWLKDGNVINHGFHPELDELRRIQNHGDEFLLDLEAKERERTGLSTLKVEFNRVHGFYIELSKTQAEQAPADYQRRQTLKNAERFITPELKAFEDKVLTAQEQALALEKQLFDGVLKNLQTALPQLQKAAKAAAALDVLSTFSALAKERNFVRPEFADYPVIHIENGRHPVVEQQVRHFTANHTDLDHKHRLMLLTGPNMGGKSTYMRQVALIVLLAHTGCFVPADAATIGPIDQIFTRIGASDDLASNRSTFMVEMSETAYILHHATEQSLVLMDEVGRGTSTFDGLALAHAVAEHLLQKNKSFSLFATHYFELTYLPEAHAAAVNMHLSALEQGQDIVFLHQIQPGPAGKSYGIAVAKLAGLPVRALKSAQKHLNGLENQAAANRPQLDIFSTMPSEKGDEPNVGNFVDKAEEKHFEGILAAALEKLDPDSLTPREALSELYRLKDLCKSVS

SEQ ID NO: 8468 - protein, 266 aa, Neisseria meningitidis; identical to SEQ ID NO: 2607

SEQ ID NO: 8469 - protein, 145 aa, Neisseria meningitidis; identical to SEQ ID NO: 2822

SEQ ID NO: 8470 - protein, 238 aa, Neisseria meningitidis; identical to SEQ ID NO: 3469

SEQ ID NO: 8471 - protein, 263 aa, Neisseria meningitidis
MNVYFLGGGNMAAAVAGGLVKQGGYRIHIANRGAEKRERLGKELGVETSATLPELHSDDVLILAVKPQDMEAACKNIRTNGALVLSVAAGLSVDTLSRYLGGTRRIVRVMPNTPGKIGLGVSGMYAEAEVSETDCKIADRIMKSVGLTIWLEDEAQMHGITGISGSGPAYVFYLLDALQNAAIRQGFDMAEARALSLATFKGAVALAEQTGEDFEKLQKNVTSKGGTTHEAVEAFRRHRVAEAINEGVCACVRRSQEMERQYQ

SEQ ID NO: 8472 - protein, 556 aa, Neisseria meningitidis
MEKIWLDSYEKGVSAEIDITQYNSISDVFRQSVEKFARLPAFQNMGKTLTYAETGKLATDFASYLQNVLKLPRGERVAIMMPNVLQYPIALFGILQAGLVAVNTNPLYTPRELEHQLKDSGTTAIIVLENFANTLELVLPRTQIKHVIVASVGEMFGLLKGSLINFIIRKIKKMVPEYRIRETVSFQTALKEGAKHVFQPVALNREDTALLQYTGGTTGVAKGAVLSHGNICANMLQAKEWIKNQLREGKETVIAALPLYHIFALTVNLMIFANAGSKIILITNPRDMKGFIGELKKQRINVFIGVNTLFNAMVNRPDFAEVDFSELRLTLGGGMATQKAVAEKWKKITGTPIVEAYGLTEASPGVCCNPLNIESYSGSIGLPVSSTEVELRDANGKEVPVGQPGELWVKGPQVMQGYWNRPEETAKAIDARGFLETGDIAVMDEKGWLKLVDRKKDLIVVSGFNVYPNEIEEVIAHHGKVMEVACIGVPDEKTGEALKVFVVRKDPSLTKEELIAFCRTELTAYKVPKDIEFRDELPKSNVGKILRRELRQSTGK

SEQ ID NO: 8473 - protein, 90 aa, Neisseria meningitidis; identical to SEQ ID NO: 3546

SEQ ID NO: 8474 - protein, 79 aa, Neisseria meningitidis; identical to SEQ ID NO: 3404

SEQ ID NO: 8475 - protein, 274 aa, Neisseria meningitidis
VNRTAFCCLSLTTALILTACSSGGGGVAADIGAGLADALTAPLDHKDKGLQSLMLDQSVRKNEKLKLAAQGAEKTYGNGDSLNTGKLKNDKVSRFDFIRQIEVDGKLITLESGEFQVYKQSHSALTALQTEQVQDSEDSGKMVAKRQFRIGDIAGEHTSFDKLPKGGSATYRGTAFGSDDAGGKLTYTIDFAAKQGHGKIEHLKSPELNVELATAYIKPDEKHHAVISGSVLYNQDEKGSYSLGIFGGQAQEVAGSAEVETANGIHHIGLAAKQ

SEQ ID NO: 8476 - protein, 475 aa, Neisseria meningitidis; identical to SEQ ID NO: 3427

SEQ ID NO: 8477 - protein, 144 aa, Neisseria meningitidis; identical to SEQ ID NO: 2747

SEQ ID NO: 8478 - protein, 91 aa, Neisseria meningitidis
MTEQKNKTSLIEFPCTFPLKVMGAVHPEFEQAVLDTVRLHAPDTQAHHITTRPSSKGNYTGATVQVKVENQEQLDNIYRALTSHKLVKVVL

SEQ ID NO: 8479 - protein, 392 aa, Neisseria meningitidis
MAKMMKWAAVAAVAAAAVWGGWSYLKPEPQAAYITETVRRGDISRTVSATGEISPSNLVSVGAQASGQIKKLYVKLGQQVKKGDLIAEINSTSQTNTLNTEKSKLETYQAKLVSAQIALGSAEKKYKRQAALWKENATSKEDLESAQDAFAAAKANVAELKALIRQSKISINTAESELGYTRITATMDGTVVAILVEEGQTVNAAQSAPTIIQLANLDMMLNKMQIAEGDITKVKAGQDISFTILSEPDTPIKAKLDSVDPGLTTMSSGGYNSSTDTASNAVYYYARSFVPNPDGKLATGMTTQNTVEIDGVKNVLIIPSLTVKNRGGKAFVRVLGADGKAAEREIRTGMRDSMNTEVKSGLKEGDKVVISEITAAEQQESGERALGGPPRR

SEQ ID NO: 8480 - protein, 390 aa, Neisseria meningitidis
LITGTPGSGKTLKMVSMMANDEMFKPDENGIRRKVFTNIKGLKIPHTYIETDAKKLPKSTDEQLSAHDMYEWIKKPENIGSIVIVDEAQDVWPARSAGSKIPENVQWLNTHRHQGIDIFVLTQGSKLLDQNLRTLVRKHYHIASNKMGMRTLLEWKICADDPVKMASSAFSSIYTLDKKVYDLYESAEVHTVNKVKRSKWFYTLPVIILLIPVFVGLSYKMLSSYGKKQEEPAAQESAATEHQAVFQDKTEGEPVNNGNLTADMFVPTLSEKPESKPIYNGVRQVRTFEYIAGCVEGGRTGCTCYSHQGTALKEITKEMCKDYARNGLPFNPYKEESQGRDVQQSEQHHSDRPQVATLGGKPWQNLMYDNWQERGKPFEGIGGGVVGSAN

SEQ ID NO: 8481 - protein, 367 aa, Neisseria meningitidis
MITLITGVPGSGKTLSVVSDLAKKINNEWKDRKIFIEGIPELTIETTPIPEGHSINDMHVWLQYPENNGSVVIIDEAQNVFPPRSPAVKAPPLVEWLHVHRHSGIDIILITQMPQRIDKHVRDLVGAHYHIHKTPLGIFMRYFWDYCANNPRSEFANARPEVYKLDKKAFGLYKSAEIHTKVKTPKSRVLYIIPIALVLFALFFYLGYKLLLGLGNKDGTEEGEAKTQTIVSEEQLEQVRGMAYKASGEAGRNIGNQLGSDKENQNLTKEMLEPTIDGHPESKPIYNGVRQVRQMEFPVACVKSSNSCNCYSGQATILKEIDKKTCIDYVDNGMPFNPYKEEQREIKIDTDEQKPLKKQVLVMDAAK

SEQ ID NO: 8482 - protein, 66 aa, Neisseria meningitidis; identical to SEQ ID NO: 421

SEQ ID NO: 8483 - protein, 179 aa, Neisseria meningitidis
VAEFFFDLRKEIDKEWVFIDGSYVRCHQHASGARRGFDRAIGQSRGGNTTKIHLCVDSHGNPLDFKVTGGNVHDGQVANDLIEVIQEAQYFIADKGYDSQEIRDKAIEHGMKAIIPKRKNAKKPNPDFDSYLYKLRHLVENAFARLKQFRSIATRYEKLARNFKSMLYLACSIIHAKLN

SEQ ID NO: 8484 - protein, 60 aa, Neisseria meningitidis; identical to SEQ ID NO: 2815

SEQ ID NO: 8485 - protein, 203 aa, Neisseria meningitidis
MAAPAGVATECRLTVQGGTDRESDASLLARLLKIIRRPPAGGNRYDYKNWALSVDGVTSAYVYPLRRGLGTVDIAITSADGVPSEETVRRVQAYIDEMRPVTAKNALVLKPTVTAVPVTVQVKLDGIDLDEAKRRIRTALKEYFDTLIPGDGLTVSQIEAAISNVDGVIDRRLTAPTANRAADTVNRIEWFKAGAINVTEMPS

SEQ ID NO: 8486 - protein, 94 aa, Neisseria meningitidis; identical to SEQ ID NO: 944

SEQ ID NO: 8487 - protein, 169 aa, Neisseria meningitidis; identical to SEQ ID NO: 2049

SEQ ID NO: 8488 - protein, 1454 aa, Neisseria meningitidis
MKTTDKRTTETHRKAPKTGRIRFSPAYLAICLSFGILPQAWAGHTYFGINYQYYRDFAENKGKFAVGAKDIEVYNKKGELVGKSMTKAPMIDFSVVSRNGVAALVGDQYIVSVAHNGGYNNVDFGAEGSNPDQHRFTYKIVKRNNYKAGTNGHPYGGDYHMPRLHKFVTDAEPVEMTSYMDGRKYIDQNNYPDRVRIGAGRQYWRSDEDEPNNRESSYHIASAYSWLVGGNTFAQNGSGGGTVNLGSEKIKHSPYGFLPTGGSFGDSGSPMFIYDAQKQKWLINGVLQTGNPYIGKSNGFQLVRKDWFYDEIFAGDTHSVFYEPRQNGKYSFHDNNNGTGKIDAKHEHNSLPNRLKTRTVQLFNVSLSETAQEPVYHAAGGVNSYRPRLNNGENISFIDEGKGELILTSNINQGAGGLYFQGDFTVSPENNETWQGAGVHISEDSTVTWKVNGVANDRLSKIGKGTLHVQAKGENQGSISVGDGKVILDQQADENNKKQAFSEIGLVSGRGTVQLNADNQFNPDKLYFGFRGGRLDLNGHSLSFHRIQNTDEGAMIVNHNQDKESTVTITGNKDIATTGNNNSLDSKKEIAYNGWFGEKDTTKTNGRLNLVYQPAAEDRTLLLSGGTNLNGNITQTNGKLFFSGRPTPHAYNHLNDHWSQKEGIPRGEIVWDNDWINRTFKAENFQIKGGQAVVSRNVAKVKGDWHLSNHAQAVFGVAPHQSHTICTRSDWTGLTNCVEKTITDDKVIASLTNTDISGNVSLADHAHLNLTGLATLNGNLSANGDTRYTVSHNATQNGDLSLVGNAQATFNQATLNGNTSASGNASFNLSDHAVQNGSLTLSGNAKANVSHSALNGNVSLADKAVFHFESSRFTGQISGSKDTALHLKDSEWTLPSGTELGNLNLDNATITLNSAYRHDAAGAQTGSATDAPRRRSRRSLLSVTPPASVESRFNTLTVNGKLNGQGTFRFMSELFGYRSDKLKLAESSEGTYTLAVNNTGNEPASLEQLTVVEGKDNKPLSENLNFTLQNEHVDAGAWRYQLIRKDGEFRLHNPVKEQELSDKLGKAEAKKQAEKDNAQSLDALIAAGRDAVEKTESVAEPARQAGGENVGIMQAEEEKKRVQADKDTALAKQREAETRPATTAFPRARRARRDLPQLQPQPQPQPQRDLISRYANSGLSEFSATLNSVFAVQDELDRVFAEDRRNAVWTSGIRDTKHYRSQDFRAYRQQTDLRQIGMQKNLGSGRVGILFSHNRTENTFDDGIGNSARLAHGAVFGQYGIDRFYIGISAGAGFSSGSLSDGIGSKIRRRVLHYGIQARYRAGFGGFGIEPHIGATRYFVQKADYRYENVNIATPGLAFNRYRAGIKADYSFKPAQHISITPYLSLSYTDAASGKVRTRVNTAVLAQDFGKTRSAEWGVNAEIKGFTLSLHAAAAKGPQLEAQHSAGIKLGYRW

SEQ ID NO: 8489 - protein, 288 aa, Neisseria meningitidis
MAGETITAADYIKHHLQSLTSLSDVTQGQGLKNIADFSFINLDAVFFAVLLGVIGSFLLWRGAKKATAGVPGRFQAAVEILFEFVDDMCKSIIHNEKSRKAVAPLGLTLFVWIFLMNAMDMLPVDLLPMVWQGITGNHHALLRVVPTADLNTTLALAVGVLLICIYYNIKIKGLGGWFHELFSAPFGAKLAPANFLLNLVEFLSKTVSHGMRLFGNMYAGELVFLLIALLGGAWAAFGSVEVMDPILFVFHIIAGLAWAIFHILVITLQAFIFMALAFVYIGQAHDAH

SEQ ID NO: 8490 - protein, 320 aa, Neisseria meningitidis
MQARLLIPILFSVFILSACGTLTGIPSHGGGKRFAVEQELVAASARAAVKDMDLQALHGRKVALYIATMGDQGSGSLTGGRYSIDALIRGEYINSPAVRTDYTYPRYETTAETTSGGLTGLTTSLSTLNAPALSRTQSDGSGSKSSLGLNIGGMGDYRNETLTTNPRDTAFLSHLVQTVFFLRGIDVVSPANADTDVFINIDVFGTIRNRTEMHLYNAETLKAQTKLEYFAVDRTNKKLLIKPKTNAFEAAYKENYALWMGPYKVSKGIKPTEGLMVDFSDIRPYGNHTGNSAPSVETDNSHEGYGYSDEVVRQHRQGQP

SEQ ID NO: 8491 - protein, 383 aa, Neisseria meningitidis
MQTWQLPEHIADVLPTNARQLESAREQLLALFRVHGYELVQPPLMEYAHSLLTHIDAGLSLKTILVTDRLSGRQLGIRADITPQVARIDAHLLSANQGINRLCYAGPVLHAQPDGLLNMREPLQAGAEMYGFADIRGDIELIDLMLKSMKIADMGKVLLSLGHIGIFRALSDAAHLDAGQSATLLALMQDKDTGTVEAQVKAWKLDGMWAKAFSLLPRLYGGREVLSDARGRLPDLSAVGGALDELQAVCDAFPDCEIHIDLSELRVDNYHTGLLYAAYAADFHDAVARGGRYDGLGGYFGRARPATGFSFDLRSFIGRLPTSERQPAVLVDAEDAEAAREAVEALREQGQCVVIDYGIGHNVSEELAGRLKKTDGVWQVVKR

SEQ ID NO: 8492 - protein, 331 aa, Neisseria meningitidis
LKAAYQNIATVWQGDFHNAKQVLSAMKKRARKPAAVRSDADIAALFHAHRMKQAQQSRILNMLAVEIRPGFVLDNKRAPDIRAALLDVYGEADGKPFFLPLNLLLGFMGAHEWHKKGVAVPQLGGSIHVPFGVFSPLRGEYLDLLAHAPSTGFQTAFDIGTGSGVLAAILAKQGIPSVIGTDTNPKAVACARANIARLGFEKQVEIRETDLFPEGFADLIVCNPPWLPAKPTSAVESALYDPESAMLAAFLRDAPKHLNPDGEIRLIISDLAEHLGLRPADFLEKAFIRAGLRVADMMKTKPKHKKAANPSDPLAFARTRETTFLYRLKKA

SEQ ID NO: 8493 - protein, 105 aa, Neisseria meningitidis
LEMFDGEVEADESYFGGQRKGKRGRGAAGKVAVFGLLKRNGKVYTVTVPNTQTATLFPIIREQVKPDSIVYTDCYRSYDVLDVREFSHFSFAETSFSYQSQHTFC

SEQ ID NO: 8494 - protein, 686 aa, Neisseria meningitidis
MTQTLLIELLTEELPPKALNNLGNHFAAAVAEGLEKAQLVDGAAEFTAYASPRRLAVQVKNVKAVQADQKIVKKGPAVANAMKDGAPTKALEGFARGAGAKIEDLTIVHDGKQDVYAYEYVQTGKPLGELLEDIINQAVKKLPIPKVMRWGSSTFTFVRPVHGLIVLHGGDIVNVSVLGLQSSNQTLGHRFLSNGEITIENADSYAEQMRGQGKVVASFAERKAAIQTALEGQARRLNATVAADEALLDEVTALVEYPVVLEAGFEEHFLAVPQECLILTMQQNQKYFPLLDQNGKLMNRFLLVSNLQTEDPSHIIRGNERVLRARLSDAEFFYKQDQKATLESRLPKLSSVVYHNKIGSQAERIERLQSIAAHIAKALGADAAAAERAARLAKADLVTEMVGEFPELQGTMGKYYARLDGETEEIAEAVEQHYQPRFAGDKLPESKIAAAVALADKLETLVGIWGIGLIPTGDKDPYALRRAALGILRMLMQYGLDVNELIQTAFDSFPKGLLNEKTPSETADFMQARLAVLLQNDYPQDIVAAVLAKQPRRLDDLTAKLQAVAAFKQLPEAAALAAANKRVQNLLKKADAELGAVNESLLQQDEEKALFAAAQGLQPKIAAAVAEGNFQTALSELASVKPQVDAFFDGVMVMAEDAAVKQNRLNLLNRLAEQMNAVADIALLGE

SEQ ID NO: 8495 - protein, 321 aa, Neisseria meningitidis; identical to SEQ ID NO: 6649

SEQ ID NO: 8496 - protein, 74 aa, Neisseria meningitidis
MNSETLDVTGLKCPLPILRAKKALAQMQQGDVLTVLATDGGAPGDFEAFCRQTGHVLLDASEQEGVFTLVVKHK

SEQ ID NO: 8497 - protein, 148 aa, Neisseria meningitidis; identical to SEQ ID NO: 4019

SEQ ID NO: 8498 - protein, 51 aa, Neisseria meningitidis; identical to SEQ ID NO: 1872

SEQ ID NO: 8499 - protein, 329 aa, Neisseria meningitidis
MKQPVFAVTSGEPAGIGPDICLDLAFARLPCRCAVLGDKNLLRARAEALGKSVVLRDFDPESGGAAYGELEVLHIPAAEAVEAGRLNPANAAYVLQLLDTALAGISDGIFDGIVTAPLNKGIINDARASTGFFSGHTEYLAEKSGTGQVVMMLAGKGLRVALVTTHLPLKDVAAAITQPLIESVARILHHDLKHKFGIKNPKILVAGLNPHAGEGGHLGHEETDTIIPALENLRREGINLAGPYPADTLFQPFMLEGADAVLAMYHDQGLPVLKYHSFGQGVNITLGLPFIRTSVDHGTALDLAATGRADSGSLITAVETAVEMARGSL

SEQ ID NO: 8500 - protein, 287 aa, Neisseria meningitidis
MRILLTGSKSQLARCLRDRLPEDWETIATDSASLDITDADAVCNMVKSFQPDAIVNTAAYTAVDKAEGNAAAAFAVNASAVYNLALAAHRAHARFIHISTDYIFDGKGKRPYQESDFTNPSNVYGQSKTAGELLALSANPDSLILRTSWLFSEYGDNFVRTMLNLARERSPLSAVHNQIGCPTYAGDLAAAIIRLLQQTSPVRGIYHYAGGKSVSWYEFAQHIFQAASQQQTSFPVPELTAVSDKEYPTAAPRPAYSILDCRKIENDFGIKPSDWQKALAQVVSKLL

SEQ ID NO: 8501 - protein, 56 aa, Neisseria meningitidis; identical to SEQ ID NO: 326

SEQ ID NO: 8502 - protein, 265 aa, Neisseria meningitidis
MNRLYPHPIIAREGWPIIGGGLALSLLVSMCCGWWSLPFWVFTVFALQFFRDPAREIPQNPEAVLSPVDGRIVVVERARDPYRDVDALKISIFMNVFNVHSQKSPADCTVTKVVYNKGKFVNADLDKASTENERNAVLATTASGREITFVQVAGLVARRILCYTQAGAKLSRGERYGFIRFGSRVDMYLPVDAQAQVAIGDKVTGVSTVLARLPLTAPQIESEPESEPALQTAPVETAANPSAEQRQIEAAAAKIQAAVQDVLKD

SEQ ID NO: 8503 - protein, 518 aa, Neisseria meningitidis
MTLAEFWPLCLRRLHDMLPQGQFAQWIAPLTVGEEGGVWVVYGKNQFACNMLKSQFAGKIEAVREELAAGRSAFVFKPGEGVRYEMAAVEGAVEPAEPSLHAGSEEMPVQEVLLDELPSEEPVKPAASKTAADILAERMKNLPHEPRHTAEPASRPESEVLAKARTDAQRDAEEARYEQTNLSPDYTFDTLVEGKGNRLAAAAAQAIAESPGQSYNPFFLYGSTGLGKTHLVQAVGNELLKNRPDAKVRYMHSDDYIRSFMKAVRNNTYDVFKQQYKQYDLLIIDDIQFIKGKDRTMEEFFYLYNHFHNEKKQLILTCDVLPAKIEGMDDRLKSRFSWGLTLELEPPELEMRIAILQKKAEAAGISIEDEAALFIANLIRSNVRELEGAFNRVGASSRFMNRPVIDIDLARTALQDIIAEKHKVITADIIIDAVAKYYRIKISDVLGKKRTRNIARPRQVAMSLTKELTTLSLPSIGDSFGGRDHTTVMHGIRAVAKLREEDPELAQDYEKLLILIQN

SEQ ID NO: 8504 - protein, 220 aa, Neisseria meningitidis; identical to SEQ ID NO: 2583

SEQ ID NO: 8505 - protein, 485 aa, Neisseria meningitidis
MSRHPAPTGEKTFFGHPFQLSTLFHIELWERFSFYGMQGILLIYLYYTADKGGLGIDKTLAGGIVGAYSGSVYLSTILGAWFADRVWGAEKTLFLSGIVVMLGHIVLAAAPGLYGLLIGLIFIALGSGGVKSTASSMVGALYEQDEMRPLRDAGFSIFYIAINIGGFLGPLLTGLLQENIGFHYGFGAAAVGMAFGLWRYSLGRKNLPHPTVPHPLSKGQGKTAAAVGITLIAALATAIKTGLVNLDNFSGILLSTVILAVIAYFARLLTNPRVSSDNKRHIIAYIPLFLTICMFWAVWFQIYTVATVYFDETVNRTIGSFTVPVAWKDSMQSLWVILFSGLMAAMWTKMGRKQPKTPLKFAMAVFVTGASFLGFIPFISAGTPMPIAVFALIVLAITIGELMISPIALSISTKIAPPLFKTQMVALNFLAFSLGFTLGGVLFEKCYQAGDEIGFYRLLFYIGAATGFLLLLLVPKLNKMLEGTD

SEQ ID NO: 8506 - protein, 354 aa, Neisseria meningitidis
MTLLKNDTFLRALLKQPVEYTPIWMMRQAGRYLPEYKATRAKAGSFLDLCKNTELATEVTIQPLERFDLDAAILFSDILTVPDAMGLGLYFAEGEGPKFKRALQHEADIAKLHVPDMEKLQYVFDAVTSIRKALDGRVPLIGFSGSPFTLACYMVEGGGSKEFRTIKTMMYSRPDLLHKILDTNAQAVTAYLNAQIDAGAQAVQIFDTWGGVLSDAAFKEFSLKYIRQIVAGLKRESEGRRVPVIVFAKGGGLWLESMAEIGADALGLDWTCNIGEARRRVGKQVALQGNFDPFALFGTPESIRTEAARILADYGQGSGHVFNLGHGINQHADPEHAKILVDTVHELSRHYHGG

SEQ ID NO: 8507 - protein, 248 aa, Neisseria meningitidis
MNVLISNDDGYLSEGIAVLARVTAEFANVRVVAPERDRSGVSNSLTLERPLQLKQAQNGFYYVNGTPTDCIHIGQSVFSDFQADFVFSGINRGANMGDDTLYSGTVAAATEAYLMGIPAVAFSLNDASGRYWATAEKALWTLLAHFFKNPPQSPILWNINIPAVEPEDVRGIKIARLGRRHHGQNVIPARNPRGEQIYWIGPVGRVSDKEEGTDFGECGAGFITVTPLQIDLTAYPDMAETAAFWHAD

SEQ ID NO: 8508 - protein, 397 aa, Neisseria meningitidis; identical to SEQ ID NO: 2969

SEQ ID NO: 8509 - protein, 52 aa, Neisseria meningitidis
MKPPLPICTLSALAACTLSGQGGTQVYGEIKARDLCVTAPILLSAFCLACSR

SEQ ID NO: 8510 - protein, 305 aa, Neisseria meningitidis
MVLDGFAAHFDAYLENIVREGKSEHTVAAYRRDLEELFALLAQMPSEDAGGVPQDLSRRDFTAALRRLSQRGLNARTLARKLSSWRQYCVWLVERGLLHTDPTADIKPPKQPERVPKALPQEWLNRMLDLPVDGGDPLAVRDHALFELMYGSGLRVSEIHGLNADDVYLDEAWVHVTGKGRKQRQVPLTGKSVEALKNYLPLRQTASDGKALFTGRNGTRLSQRQIQKRLAQWAAQNGDGRHVSPHMMRHSYAGHLLQASRDIRAVQELLGHSSLSTTQIYTKLDFDHIARLYDEAHPRAKRQDE

SEQ ID NO: 8511 - protein, 251 aa, Neisseria meningitidis; identical to SEQ ID NO: 6395

SEQ ID NO: 8512 - protein, 213 aa, Neisseria meningitidis
MLKPETIHISGPAGILETIHIPSEQVPARGVAVINHPNPLQGGTNTNKVIQTAAKALSKLGFHCYLPNLRGVGGSGGTHDYGRGETQDCLAVIDYARAQHPEAPEFALSGFSFGGYVATFAAQARIPDLLLLIGAAVCHYTNRPEPSAVPYVAKTLMIHGAEDEVVEIEKALKWAEPQDLPVITIAGSTHFFHGKLIVLRDTILRFAPVCLNG

SEQ ID NO: 8513 - protein, 187 aa, Neisseria meningitidis
MKLIILDRDGVINQDRDDFVKSVDEWIPVEGSMDAVAFLTQAGYTVAVATNQSGIGRKYFTVQNLTEMHAKMHRLVRQAGGEINGIWFCPHTDADNCNCRKPKPGMIEDIIGRFNAQASETWLVGDSLRDLQAIDAVGGKPALVLTGKGKKTLSQHGHELPEHTQVFDTLLDFSQYIMQENTAPQAD

SEQ ID NO: 8514 - protein, 156 aa, Neisseria meningitidis; identical to SEQ ID NO: 681

SEQ ID NO: 8515 - protein, 81 aa, Neisseria meningitidis; identical to SEQ ID NO: 2079

SEQ ID NO: 8516 - protein, 164 aa, Neisseria meningitidis; identical to SEQ ID NO: 7401

SEQ ID NO: 8517 - protein, 341 aa, Neisseria meningitidis; identical to SEQ ID NO: 3579

SEQ ID NO: 8518 - protein, 284 aa, Neisseria meningitidis; identical to SEQ ID NO: 1957

SEQ ID NO: 8519 - protein, 216 aa, Neisseria meningitidis; identical to SEQ ID NO: 2708

SEQ ID NO: 8520 - protein, 158 aa, Neisseria meningitidis; identical to SEQ ID NO: 5652

SEQ ID NO: 8521 - protein, 207 aa, Neisseria meningitidis; identical to SEQ ID NO: 1132

SEQ ID NO: 8522 - protein, 206 aa, Neisseria meningitidis
MLKQAVTGMTKQERITTQAYNEMTKSVAGSNSIVLNDVQGDTTINNHHTHTHNHSDADGKALSMRLTPRPLLSDRQAAAFARTGKLTGSFDLFASVVAPSQYTFAVAMPDTSMSPVIEKGDLLVVEPRMRPADEDIVLIELSDKRLVVAHLVIDIAGRMLIYQTGRPSEALDLPEGSVILGVVLEVKKRFMSAAQARRRVDSDYRP

SEQ ID NO: 8523 - protein, 591 aa, Neisseria meningitidis; identical to SEQ ID NO: 3154

SEQ ID NO: 8524 - protein, 144 aa, Neisseria meningitidis
  misc_feature 140, 141, 142: 'Xaa' is any amino acid
MKELDKIDFRILKILQQNARIPMTELAEKVGLSTTPVTERVRRLEREHYISGYHAHLNPHLLGKPLLVFVELKLQSKSGNIFEDFKKEVLKIPQIMECHLVSGEYDYLIKVRLPDMSAYRDMLGNILLQLPAASESRSYXXXHT

SEQ ID NO: 8525 - protein, 263 aa, Neisseria meningitidis
MITVNTLQKMKAAGEKIAMLTAYESSFAALMDDAGVEMLLVGDSLGMAVQGRKSTLPVSLRDMCYHTECVARGAKNAMIVSDLPFGAYQQSKEQAFAAAAELMAAGAHMVKLEGGVWMAETTEFLQMRGIPVCAHIGLTPQSVFAFGGYKVQGRGGKAQALLNDAKAHDEAGAAVVLMECVPAQLAKKVTETVSCPTIGIGAGVDCDGQVLVMHDMLGIFPGKTAKFVKNFMHGQSSIQAAVRAYVAEVKAKTFPAAEHIFAD

SEQ ID NO: 8526 - protein, 103 aa, Neisseria meningitidis; identical to SEQ ID NO: 3104

SEQ ID NO: 8527 - protein, 405 aa, Neisseria meningitidis
MKTVVWIVILFAAAVGLALALGIYTGDVYIVLGQTMLRINLHAFVLGLLIAVVVWYFLFKFVIGILNIPEKMQRFSLARKGRKAALYLNKAGLAYFEGRFEKAELEASRVLGNKEAGDNRTLALMLGAHAAGQMGNTELRDRYLAEIAKLPEKQQLSRYLLLAESALNRRDYETVEANLHAAAKMNAGLTRLVRLQLRYAFERGDALEVLAKTEKLSKAGALGESETKQYQNWAYRRQLADAADAAALKTCLKRIPDSLKNGELSVSVAEKYERLGLYADAVKWVKQHYPHNRRPELLEAFVESVRFLGERDQQKAIDFADAWLKEQPDNALLLMYLGRLAYGRKLWGKAKGYLEASIALKPSISARLVLAKVFDETGEPQKAEAQRNLVLASVAEENRPSAETC

SEQ ID NO: 8528 - protein, 292 aa, Neisseria meningitidis; identical to SEQ ID NO: 1803

SEQ ID NO: 8529 - protein, 206 aa, Neisseria meningitidis
MAQFFAIHPDNPQERLIKQAVEIVNKGGVVVYPTDSCYALGCKLGDKAAMERILSIRKIDLKHHLTLMCADLSELGTYAKIDNVQFRQLKAATPGPYTFILQATKEVPARTLHPKRKTIGLRIPDNAIAQALLGELGEPLLSCTLMLPEDGEPLTDPYEIRERLEHAVDLVIDGGWCGTEPTTVIDMTDGTELVRQGCGDTAVFGL

SEQ ID NO: 8530 - protein, 140 aa, Neisseria meningitidis
MKKMFLSAVLLLSAATRTVWADTVFSCKTDNNKYIEVQKINRNLYEYSFGSAAKKEIAIRNSKADLLGRSDRWQGMGSGRWATMKFQNGEFMYTVDAGFDSVTHAVGSGVLVERRGKEIARFDCTSKTAQANFDDDDFAW

SEQ ID NO: 8531 - protein, 171 aa, Neisseria meningitidis; identical to SEQ ID NO: 2512

SEQ ID NO: 8532 - protein, 234 aa, Neisseria meningitidis; identical to SEQ ID NO: 2554

SEQ ID NO: 8533 - protein, 235 aa, Neisseria meningitidis
LVKTADGYKAIAHIQAGDRVFAKDEASGKTGYKPVTARYGNPYRETVYIEISDGIGNNQTLISNKIHPFYSQGKWIQAGRLKKGDTLLSESGAKQTVQNITLKQQPLKAYNLTVADWHTYFVKGDKAETEGVWVHNECPYGEKYRTEVGSYTNTHESGRTYSGKGTRQRSQISGAREARVNNDPHIATDFTPAKNNREAFKDESRRIDAHGGSKSTNNYNRIESPGKKYRKQDGD

SEQ ID NO: 8534 - protein, 248 aa, Neisseria meningitidis
MFQTTFLLDSSSLACVPHLTCRFNVGYGLLKIKLLRNLANMEKIEKFKSELLDDIFQYIQCISIFVYKKKIYYLIDYKENFELNAKISFDIYLREGIITKEQYNYDYKNYRNGIWQLTKDNFESYLQSDSVIVLKKDELKELMFQGFTSAEAVRLYSVVENKLSYNDPISDSGRQSDFLKINQISSRLPLFYVNFDTEVYLHMDWDRCHEDYVYDGWFSKAMDFGYLIPDEFCYWKIEGRDYWKFGQL

SEQ ID NO: 8535 - protein, 404 aa, Neisseria meningitidis
MTVKTPVYLDYAATTPVDKRVAEKMIPYLTETFGNPASNSHAFGWEAEEAVEKARADIAALINADPKEIVFTSGATESDNLAIKGAANFYKTKGKHLITVKTEHKAVLDTMRELERQGFEVTYLGVQENGLIDLEELKAAIRDDTILISVMWANNEIGVVQDIPAIGEICRERKIVFHVDAAQACGKVPVDVEAAKIDLLSMSAHKVYGPKGIGALYVRRKPRVRLEAQMHGGGHERGFRSGTLPTHQIVGMGEAFRIAKEELEQDMAHYRKLRDIFLKGIEGIEEVYINGDLEHRAPNNLNVSFNFVEGESLIMAVKELAVSSGSACTSASLEPSYVLRALGRNDELAHSSLRITFGRMTTEEEVQFAAELIKSKIGKLRELSPLWEMFKDGIDLNSIEWAAH

SEQ ID NO: 8536 - protein, 389 aa, Neisseria meningitidis; identical to SEQ ID NO: 1971

SEQ ID NO: 8537 - protein, 121 aa, Neisseria meningitidis; identical to SEQ ID NO: 847

SEQ ID NO: 8538 - protein, 297 aa, Neisseria meningitidis
MVTFSKIRPLLAIAAAALLAACGTAGNNAARKPVQTAKPAAVVGLALGGGASKGFAHVGIIKVLKENGIPVKVVTGTSAGSIVGSLFASGMSPDRLELEAEILGKTDLVDLTLSTSGFIKGEKLQNYINRKVGGRQIQQFPIKFAAVATDFETGKAVAFNQGNAGQAVRASAAIPNVFQPVIIGRHTYVDGGLSQPVPVSAARRQGANFVIAVDISARPGKNISQGFFSYLDQTLNVMSVSALQNELGQADVVIKPQVLDLGAVGGFDQKKRAIQLGEEAARAALPEIKRKLAAYRY

SEQ ID NO: 8539 - protein, 326 aa, Neisseria meningitidis
VQPGLWASDGIFSEWRHSCRRRGSRMGKGGDIVVGNGKKYAAPLLVLGCVVFGLGSLIVRSVPVGSYAIAFWRLLISVFVFWFLARFFRQKFPKNRKTVRYALTAGVFLAFDLALWHESIHAVGPGISTLLNSLQIFFLSAIGVFFFGERLSGLKKAGLISAVAGVAMIAGAEFGYNGNAVWGFVSGLVSGLMLALSMVFVRKTHEIETVALFPSMMILSLGGAVSLVVPALLMDGGALYPTTWKDAGLVLVYGVVMQCFAWAMVAYAIPLLSLSLTGLLLLSEPVAALFIDYFGLGKPIEGVQWAGVALTLSAIYLGSLKQQSEP

SEQ ID NO: 8540 - protein, 66 aa, Neisseria meningitidis
MASDLLSKQTSDKILGYQTEHRRVRYDINNNIYVLANPKTFKIKTMFKPNLGKKYYDGEFKKDMGN

SEQ ID NO: 8541 - protein, 141 aa, Neisseria meningitidis; identical to SEQ ID NO: 3635

SEQ ID NO: 8542 - protein, 231 aa, Neisseria meningitidis; identical to SEQ ID NO: 2473

SEQ ID NO: 8543 - protein, 484 aa, Neisseria meningitidis
MSIEHTPPTHDGETGQNHAERPSADFDRVHSLCEILEPAFEQIENGTPLEDAPLRDKLTELTVLLSELHPADVAAVLESLPPRERNIVWILVKSEDDGEVLLEVSDAVRETLIESMDKDELLAAVDDLDADELAELADDLPHQVVYEALQTRDEEERAQVKAAMSYEDNQVGAIMDFELVSIRADVACEVVLRYLRRFDSLPDHTDKIFVVDENDVLQGVLPIRKLLVADPEDLVENVMAKDVVRFRAEDDVEEAAQAFERYDLVTAPVVDENKKLIGRVTVDEMVDVIREESEADMLNMAGLQEEEDLFAPVLDSVKNRWMWLAVNLCTAFLASRVIGAFEGSIEKIVALAALMPIVAGIGGNSGNQTITMIVRAMAMGQLTGMQAGRLLKKEVGVALVNGIIWGTVMGAVSWLLYGSLGIGLVMIAAMTLNLLLAATVGVLIPVVMEKFGRDPALGSSVLITAVTDSGGFLIFLGLATLFLL

SEQ ID NO: 8544 - protein, 260 aa, Neisseria meningitidis
MKTKLIKILTPFTVLPLLACGQTPVSNANAEPAVKAESAGKSVAASLKARLEKTYSAQDLKVLSVSETPVKGIYEVVVSGRQIIYTDAEGGYMFVGELINIDTRKNLTEERAADLNKINFASLPLDKAIKEVRGNGKLKVAVFSDPDCPFCKRLEHEFEKMTDVTVYSFMMPIAGLHPDAARKAQILWCQPDRAKAWTDWMRKGKFPVGGSICDNPVAETTSLGEQFGFNGTPTLVFPNGRSQSGYSPMPQLEEIIRKNQ

SEQ ID NO: 8545 - protein, 136 aa, Neisseria meningitidis
MPVYFRTPSRKRLHKMNRRQHKKLHLGEFQTLIFGVQGSLHQAEDDAEAFDRFMDELIAYLAANGLEMAGGGDCGDFSCLFQKSGSRGLGETEKKAIISWLAGREDVATLHATPLVDGFYGDDGWENYSETYKQAD

SEQ ID NO: 8546 - protein, 395 aa, Neisseria meningitidis
MTEDERFAWLQLAFTPYIGAESFLLLLHHFGSAQNALSAPAEQVAALIRHKQALEAWRNAEKRALARQAAEAALEWEMRDGCRLMLLQDEDFPEMLAQGLTAPPVLFLRGNVRLLHKPSAAIVGSRYATPQAMRIAKDFGRALGGKGIPVVSGMASGIDTAAHQGALQAEGGTIAVWGTGIDRIYPPANKNLAYEIAEKGLIVSEFPIGTRPYAGNFPRRNRLIAALSQVTLVVEAALESGSLITAGLAAEMGREVMAVPGSIDNPHSKGCHKLIKDGAKLTECLDDILNECPGLLQNTGASSYSINKDTPDTGRRAVQTAYAPPPAAKMPSEGAAGGTAVGGILDKMGFDPIHPDVLAGQLAMPAADLYAALLELELDGSVAAMPGGRYQRIRT

SEQ ID NO: 8547 - protein, 69 aa, Neisseria meningitidis; identical to SEQ ID NO: 5143

SEQ ID NO: 8548 - protein, 206 aa, Neisseria meningitidis
MLTPKSCDLFNIPFFQFAQLKKYRPESIPQIKADYKENWQIWQQLIQQVAAELGAPFAPPHIERWCNGWQVRAHFFAYFKYAQYKNSAAILSILLNRRRLSVSLDWHCYKADVSPITLPDYNRWLDNFDTEKYASFDMWHGAESEYDDYRTVAQQNESDRRLQNDEDFFCIGKHIERDDLGRQDVAKWIAETVEDLLPLYEACHGK

SEQ ID NO: 8549 - protein, 100 aa, Neisseria meningitidis; identical to SEQ ID NO: 1023

SEQ ID NO: 8550 - protein, 248 aa, Neisseria meningitidis; identical to SEQ ID NO: 4029

SEQ ID NO: 8551 - protein, 392 aa, Neisseria meningitidis; identical to SEQ ID NO: 276

SEQ ID NO: 8552 - protein, 139 aa, Neisseria meningitidis; identical to SEQ ID NO: 2531

SEQ ID NO: 8553 - protein, 76 aa, Neisseria meningitidis; identical to SEQ ID NO: 841

SEQ ID NO: 8554 - protein, 265 aa, Neisseria meningitidis
MLKQRVITAMWLLPLMLGMLFYAPQWLWAAFCGLIALIALWEYARMSGLCKIKTNHYLAATLVFGVVAYAGGWMLPNLVWYVVLAFWLAIMPLWLRFKWRLNGGWQVYAVGWLLVMPFWFALVSLRPHPDDALPLLAVMGLVWVADVCAYFSGKAFGKHKIAPAISPGKSWEGAIGGAVCVAVYMTAVRSAGWLAFDTGWFDTVLIGLVLTVVSVCGDLLESWLKRAAGIKDSSKLLPGHGGVFDRTDSLIAVISVYAAMMSVLN

SEQ ID NO: 8555 - protein, 342 aa, Neisseria meningitidis
MSDTPATPATPATRDFGLIDGRAVTGYVLSNRRGTRVCVLDLGGIVQEFSVLADGVRENLVVSFDDAASYADNPFQINKQIGRVAGRIRGAAFDINGRTYRVEANEGRNALHGGSHGLAVTRFNAVAADGRSVVLRSRLQQSADGYPNDLDLDISYRLDEDNRLTVSYRATALGDTVFDPTLHIYWRLDAGLHDAVLHIPQGGHIPADAEKLPVSTVSDDLEVFDFSRPKPLDAAVAALRRETGRAGFDDAYRVPSDIGRPAAVLQAGRRRRISIYSDRNGLVIFTAAPQDFARHDAGVYDALATEAQTLPDSLNWPEFGNIRLNKGDTREATIAYGIESLS

SEQ ID NO: 8556 - protein, 369 aa, Neisseria meningitidis
MKYKRIVFKVGTSSITHSDGSLSRGKIQTITRQLAALHHAGHELVLVSSGAVAAGFGALGFKKRPVKIADKQASAAVGQGLLMEEYTANLSSDGIVSAQILLSRADFADKRRYQNAGGALSVLLQRRAVPIINENDTVSVEELKIGDNDTLSAQVAAMIQADLLVLLTDIDGLYTGNPNSNPDAVRLDKIEHINHEIIEMAGGSGSANGTGGMLTKIKAATIAAESGVPVYICSSLKPDALAEAAEHQADGSFFVPRAKGLRTQKQWLAFYSESRGSVYVDEGAEHALSEQGKSLLMSGIAGIEGHFSRMDTVTVYSKATKQPLGKGRVLFGSAAAEDLLKSRKAKGVFIHRDDWISITPEIRLLLTEF

SEQ ID NO: 8557 - protein, 325 aa, Neisseria meningitidis
MIYPWHNEQWRQIAEHWERRPNAWLFAGKKGIGKTEFARFAAQALLCENPSPDHRACGACASCHFFEQGSHPDFYEITPLSDESENGRKLLQIKIDAVREIIDNVYLTSVRGGLRVVLIHPAESMNIQAANSLLKVLEEPPPQVVFLLVSHAADKVLPTIKSRCRKMVLPAPSHEEALAYLRERGVAEPEERLAFHSGAPLFDEADGVRALRIKLLDILAEPRLLKILDYAALFDKEKLPLAVFVGWMQKWLVDLGLCLQHMKPVYYPAYEDRLLQTVSGFRPRNVFAAEDMLKQLAPYGFHTLNVKMQIEHLLINYLELKKENG

SEQ ID NO: 8558 - protein, 159 aa, Neisseria meningitidis; identical to SEQ ID NO: 3392

SEQ ID NO: 8559 - protein, 339 aa, Neisseria meningitidis
MNTMLMSGAAAALLAGIILYFKSDKKRQENGEWSSGLEYAYILTAVGVFAALSLFMSFTAVFLIFVVLCGTAWGVYKYRLKTHPEISESSHFGDYFGSFFPTVLVLFLIRSFIAEPFQIPSSSMRPGLIKGDFILVGKFSYGLRVPVLNNIFIPTGKIERGDVVVFNYPLQPEMTYIKRIVGIPGDVVEYRNKVLTVNGKPASDIPDGTYRYPDDTDPSEIHNTDMFHSGLDGKSFNILKKEGQPAVSLPVLGKYTSDIMSENGYSIEQSGLEHCQYADDGSGFVCKVPEGRYFAMGDNRDNSADSRYWGFVDDKLVVGKAMFILMNFGDFGRAGTAIR

SEQ ID NO: 8560 - protein, 522 aa, Neisseria meningitidis
MKHRTFFSLCAKFGCLLALGACSPKIVDAGAATVPHTLSTLKTADNRPASVYLKKDKPTLIKFWASWCPLCLSELGQTEKWAQDAKFSSANLITVASPGFLHEKKDGDFQKWYAGLNYPKLPVVTDNGGTIAQSLNISVYPSWALIGKDGDVQRIVKGSINEAQALALIRDPNADLGSLKHSFYKPDTQKKDSKIMNTRTIYLAGGCFWGLEAYFQRIDGVVDAVSGYANGNTKNPSYEDVSYRHTGHAETVKVTYDADKLSLDDILQYFFRVVDPTSLNKQGNDTGTQYRSGVYYTDPAEKAVIAAALKREQQKYQLPLVVENEPLKNFYDAEEYHQDYLIKNPNGYCHIDIRKADEPLPGKTKAAPQGKGFDAATYKKPSDAELKRTLTEEQYQVTQNSATEYAFSHEYDHLFKPGIYVDVVSGEPLFSSADKYDSGCGWPSFTRPIDAKSVTEHDDFSYNMRRTEVRSHAADSHLGHVFPDGPRDKGGLRYCINGASLKFIPLEQMDAAGYGALKSKVK

SEQ ID NO: 8561 - protein, 355 aa, Neisseria meningitidis
MRKILVTGGAGFIGSAVVRHIIRNTQDSVVNLDKLTYAGNLESLEPVSHHPRYAFEQVDICDRAALDRVFAQHQPDAVMHLAAESHVDRSIDGPAAFIETNIVGTYTLLEAARAYWHDMPSEKKAAFRFHHISTDEVYGDLSGTDDLFTETTPYAPSSPYSASKASSDHLVRAWQRTYGLPTIVTNCSNNYGPYHFPEKLIPLMILNALDGKPLPVYGDGMQIRDWLFVEDHARALYQVVTEGVVGETYNIGGHNEKANIEVVKTICALLEELAPEKPAGVARYEDLITFVQDRPGHDVRYAVDAAKIRRDLGWLPLETFESGLRKTVQWYLDNKTWWQNVLNGSYRLERLGTGK

SEQ ID NO: 8562 - protein, 138 aa, Neisseria meningitidis
MAKLTEQDILNWNGPEDDYMNDDHLAFFRELLVKMQDELIENASATTGHLQEHESAPDPADRATQEEEYALELRTRDRERKLLSKIQATIRNIDEGDYGFCADTGEPIGLKRLLARPTATLSVESQERRERMKKQFAD

SEQ ID NO: 8563 - protein, 107 aa, Neisseria meningitidis; identical to SEQ ID NO: 2314

SEQ ID NO: 8564 - protein, 312 aa, Neisseria meningitidis
MLELNGLCKRFGNKTVADNICLTVGRGKILAVLGRSGCGKSTLLNMIAGIVRPDGGEIWLNGENITRMPPEKRRISLMFQDYALFPHMSALENAAFGLKMQKMPKAEAERLAMAALAEVGLENEAHRKPEKLSGGEKQRLALARALVVRPSLLLLDESFSSLDTHLRDRLRRMTAERIRKGGIPAVLVTHSPEEACTAADEIAVMHEGKILQCGTPETLVQTPAGVQVARLMGLPNTDDDRHIPQHAVRFDQDGMECRVLSRTCLPESFSLSVLHPEHGILWLNLDMPHAGEISGNDTVRIHIEDREIVRFR

SEQ ID NO: 8565 - protein, 240 aa, Neisseria meningitidis; identical to SEQ ID NO: 3202

SEQ ID NO: 8566 - protein, 268 aa, Neisseria meningitidis
MPTVFIFLTAVYAGLGAFAWHCQQQGRGRDYPWKTELPVLGAALTVHGAALLMPVIQDKIIIMGFGYSGSLIVWMMLFIYFAGSFFYPLRGVQLLLYPCAALMLLSGLVFPGKFSGYEITDLPFMLHIGTSLLAYGLFGIATLLSVLTLLLNRSLHRRSFSKLAGFLPSLLSLEKLMFQAMWAGFILLTYSVVSGTFFAEAVFGKPMTFTHKTVFGILSWLIYGGLLLKHSMTAWRGKKAAVWTIIGFVSLMIAYMGSKFVLEIILKR

SEQ ID NO: 8567 - protein, 456 aa, Neisseria meningitidis
MLDNLTGRFSNVFKNIRGQAKLTEDNIKEALREVRLALLEADVALPVVKEFVNNVKEKALGQEVAGSLTPDQAFIGVVNKALTELMGRENKTLDLSVAPPAVVLMAGLQGAGKTTTAGKLARLLKNDQKKKVLVVSADVYRPAAIEQLRLLAEQVGVDFFPSDTNQKPVEIATAAVDYAKKHFYDVLMVDTAGRLAIDEEMMNEIKALHAAVNPVETLFVIDAMLGQDAVNTAQAFNEALPLTGVVLTKMDGDSRGGAALSVRHVTGKPIKFIGVGEKINGLEPFHPDRLASRILGMGDVLTLIEDVQKGIDEEAAAKMAKKLQKGKGFDLNDFKEQIQQMRNMGGLENLMSKMPGELGQISKQIPEGTAEKAMGKVEAIINSMTPKERANPALLKASRKRRIAMGAGTTVQEVNKLLKQFEQMQQMMKMFSGNGLGKLMRMAKGMKGMKGMFPGL

SEQ ID NO: 8568 - protein, 248 aa, Neisseria meningitidis; identical to SEQ ID NO: 3755

SEQ ID NO: 8569 - protein, 582 aa, Neisseria meningitidis
MIHYKITPSPLDHEWHILLTFTQDDDLPIEISLPNWVPGSYLIRDFSRHITSIHASCNGTSMPLEQIAKNRWHAAAVRGEWQIRYTVYAFDLSVRGSFLTTERGFFDGSCLFLKVEGTETLPHRLELTGIPSEWRIATTLPETGRFVFQAASYAELIDRPVEMGLIEFLDFEAAGIPHTIALSGIYPDFDRNRLVSDIKKICETELAVFSSPAPFQKYLFLLHVGDHIYGGLEHTDSTALLADRHSLPPYGMTDADDTYTTLLGLFSHEYFHAWNVKSIKPAAFVPYDLDKENYTEQLWAFEGITSYYDDLFLARSRTISPESYLNLLAQGITRVQQTRGRLRQTLAESSFTAWNKFYKPDENSPNAIVSYYQKGALAALCLDLIIRNRSNGRHSLDTLMDKLYREWRDTHSGIPEKHWQIRCQEITGLDLEDFFQKALYSTEDLPLAECLATAGVGLTFLPLPRQHGGGYAEHICPVPPAGDFGARFKQNTDHIVLTHVFNSGSAESAALCPQDKIIALDGYACTDFTAQWARYHVNAKINIHFFRAGILRQTVLTVQAAAADTAILHITDRNLLDNWLFG

SEQ ID NO: 8570 - protein, 176 aa, Neisseria meningitidis
MNAIRTFQNRTPEIHESCMIDEACVVIGEVSLAEDVSVWPCAVLRGDVNSITVGARSNIQDGSVLHVSHKTAAKPEGSPLVIGEDVTVGHKVMLHGCRIGNRVLVGMGTTVLDDAVIEDEVMIGAGSLVPPRKRLAGGYLYVGSPVRQVRVLTDEEKAFLKYSAAHYVKLSKQYGM

SEQ ID NO: 8571 - protein, 264 aa, Neisseria meningitidis
VLHRLQKVVRHIAQTEIMPRFLNTPSHRKEDGSMLSEADIAAQTAFAAALPLLIDCPMLGEEMSRQEQSALWAEYSGEKGLWIVDPIDGTNNFVNGLPHFAVSVAFVRNGRAELGVIYNPVSGECFYAERGQGAFLNGTRLPLRLVDKKLNEAIAGVEIKYLRSGKLSSRMSTLAPFGTVRSMGSSTLDWCYLACGRYDVYVHGGQKLWDYAAGALIFEEAGGRLTTLEGDGFWSGEHVFKRSVVAALEPKLFERWVGWIRENQ

SEQ ID NO: 8572 - protein, 238 aa, Neisseria meningitidis; identical to SEQ ID NO: 945

SEQ ID NO: 8573 - protein, 120 aa, Neisseria meningitidis; identical to SEQ ID NO: 2661

SEQ ID NO: 8574 - protein, 558 aa, Neisseria meningitidis
MSFKTDAEIAQSSTMRPIGEIAAKLGLNADNIEPYGHYKAKINPAEAFKLPQKQGRLILVTAINPTPAGEGKTTVTIGLADALRHIGKDAVIALREPSLGPVFGVKGGAAGGGYAQVLPMEDINLHFTGDFHAIGAANNLLAAMLDNHIYQGNELDIDPKRVLWRRVVDMNDRQLRNIIDGMGKPVDGVMRPDGFDITVASEVMAVFCLAKDISDLKERLGNILVAYAKDGSPVYAKDLKAHGAMAVLLKDAIKPNLVQTIEGTPAFVHGGPFANIAHGCNSVTATRLAKHLADYAVTEAGFGADLGAEKFCDIKCRLADLKPDAAVVVATVRALKYNGGVERANLGEENLEALAKGLPNLLKHISNLKNVFGLPVVVALNRFVSDSDAELAMIEKACAEHGVEVSLTEVWGKGGVGGADLARKVVNAIENQPNNFNFSYDVELSIKDKIRAIAQKVYGAEDVDFSAEASAEIASLEKLGLDKMPICMAKTQYSLSDNAKLLGCPEGFRITVRGITVSSGAGFIVALCGNMMKMPGLPKVPAAEKIDVDAEGVIHGLF

SEQ ID NO: 8575 - protein, 144 aa, Neisseria meningitidis; identical to SEQ ID NO: 3188

SEQ ID NO: 8576 - protein, 398 aa, Neisseria meningitidis; identical to SEQ ID NO: 3512

SEQ ID NO: 8577 - protein, 367 aa, Neisseria meningitidis
MMETQLYIGIMSGTSMDGADAVLIRMDGGKWLGAEGHAFTPYPDRLRRQLLDLQDTGADELHRSRILSQELSRLYAQTAAELLCSQNLAPSDITALGCHGQTVRHAPEHGYSIQLADLPLLAERTRIFTVGDFRSRDLAAGGQGAPLVPAFHEALFRDNRETRAVLNIGGIANISVLPPDAPAFGFDTGPGNMLMDAWTQAHWQLPYDKNGAKAAQGNILPQLLDRLLAHPYFARPHPKSTGRELFALNWLETYLDGGENRYDVLRTLSRFTAQTVFDAVSHAAADTRQMYICGGGIRNPVLMADLAECFGTRVSLHSTAELNLDPQWVEAAAFAWLAACWINRIPGSPHKATGASKPCILGAGYYY

SEQ ID NO: 8578 - protein, 196 aa, Neisseria meningitidis; identical to SEQ ID NO: 2946

SEQ ID NO: 8579 - protein, 334 aa, Neisseria meningitidis
MSYGMQSAGIQVLAGIDYEPSCKETYEANINAKFIQADVFELQPETLEKELGLKKNDDDLILIGCSPCQYWSVIQTDKRKSEKSKSLLLEFQRFVEYFNPGYVVVENVPGILSRMKESRLDNFIKLLEEKGFTVHFGIHNTADYGIPQSRKRFTLIANRITKEKLEPVKYSGKRLTVRDVLGMENGFPKIIAGHQDETDFMHSCAGLSDINLKRLALIPKNGGNRLAFAHIPELQLECFIGKDNSFKDTFGRLWWDKPAPTITTKFFSISNGRFAHPEEDRALSLREGATLQSFPRNYVFKAGSRDKIARLIGNAVPPMYAEKIGRAIVDNIEC

SEQ ID NO: 8580 - protein, 186 aa, Neisseria meningitidis; identical to SEQ ID NO: 2604

SEQ ID NO: 8581 - protein, 41 aa, Neisseria meningitidis; identical to SEQ ID NO: 2201

SEQ ID NO: 8582 - protein, 273 aa, Neisseria meningitidis
MMRIFSTGGKMDTQAVITHIARWLDEYAARANAKGFVVGVSGGIDSAVVSALAARTGRPTLLLDMPIRQHPDQLERARLHIRNLQRQYANVSAQTVDLTDTFQTFEQTVGIHQTAFDNQPLSLANARSRLRMLTLYYYGQIHGLLVTGTGNKIEDFGVGFFTKYGDGGVDISPIADLTKTQVYRLAEALGVDEAIQKAPPTDGLWDTERTDEEQMGASYPELEWAMGVYGTRKPEDFEGRQREVLEIYTRLHRAMQHKINPIPVCRIPPELLG

SEQ ID NO: 8583 - protein, 558 aa, Neisseria meningitidis; identical to SEQ ID NO: 2720

SEQ ID NO: 8584 - protein, 214 aa, Neisseria meningitidis; identical to SEQ ID NO: 1408

SEQ ID NO: 8585 - protein, 1003 aa, Neisseria meningitidis; identical to SEQ ID NO: 1932

SEQ ID NO: 8586 - protein, 100 aa, Neisseria meningitidis; identical to SEQ ID NO: 1675

SEQ ID NO: 8587 - protein, 279 aa, Neisseria meningitidis
MKQLRDNKAQGSALFTLVSGIVIVIAVLYFLIKLAGSGSFGDVDATTEAATQTRIQPVGQLTMGDGIPVGERQGEQIFGKICIQCHAADSNVPNAPKLEHNGDWAPRIAQGFDTLFQHALNGFNAMPAKGGAADLTDQELKRAITYMANKSGGSFPNPDEAAPADNAASGTASAPADGAAPAEAKAEDKGAAAPAVGVDGKKVFEATCQVCHGGSIPGIPGIGKKDDWAPRIKKGKETLHKHALEGFNAMPAKGGNAGLSDDEVKAAVDYMANQSGAKF

SEQ ID NO: 8588 - protein, 340 aa, Neisseria meningitidis; identical to SEQ ID NO: 2046

SEQ ID NO: 8589 - protein, 867 aa, Neisseria meningitidis
MSKTVRYLKDYQTPAYRILETDLHFDIAEPQTVVKSRLTVEPQRVGEPLVLDGSTKLLSVKINGVAADYVLEGETLTIADVPSERFTVEVETEILPAENKSLMGLYASGGNLFTQCEPEGFRKITFYIDRPDVMSKFTTTIVADKKRYPVLLSNGNKIDGGECSDGRHWVKWEDPFAKPSYLFALVAGDLAVTEDCFTTMGGRNVKIEFYTAEADKPKVGFAVESLKNAMKWDETRFGLEYDLDIFMVVAVGDFNMGAMENKGLNIFNTKFVLADSRTATDTDFEGIESVVGHEYFHNWTGNRVTCRDWFQLSLKEGLTVFRDQEFSGDRASRAVRRIENIRLLRQHQFPEDAGPTAHPVRPASYEEMNNFYTMTVYEKGAEVVRMYHTLLGEEGFQKGMKLYFQRHDGQAVTCDDFRAAMADANGINLDQFALWYSQAGTPVLEAESRLKNNIFELTIKQTVPPTPDMADKQPMMIPVKIGLLNRNGEAAAFDYQGKRATEAVLLLTEAEQIFLLEGVTEAVVPSLLRGFSAPVHLNYPYSDDDLLLLLAHDSDAFTRWEAAQTLYRRAVAANLAALSDGIELPKHEKLLAAVEKVISDDLLDNAFKALLLGVPSEAELWDGAENIDPLRYHQAREALLDTLAVRFLPKWHELNRQAAKQENQSYEYSPEAAGWRTLRNVCRAFVLRADPAHIETVAEKYGEMAQNMTHEWGILSAVNGNESDTRNRLLAQFADKFSDDALVMDKYFALIGSSRRSDTLQQVQTALQHPKFSLENPNKARSLIGSFSRNVPHFHAEDGSGYRFIADKVIEIDRFNPQVAARLVQAFNLCNKLEPHRKNLVKQALQRIRAQEGLSKDVGEIVGKILD

SEQ ID NO: 8590 - protein, 1421 aa, Neisseria meningitidis
MGGKSGGGQRTPYEAPNSLSSAQSLRIIDAVSEGVVSGFANGDDAPFKSVYFDDTPVQNSDGSYNFNGVTGYFQRGEQDQSYVPGFDASERTVAVSAAVKQNQPMVRAVTDELVSRLRITVAVERNAQVEDNGDTVPADTLMRVELINSNGVQASNQVRFNEKSSGTYYQDVEFDVVPQVPFNIRVFRISPDSKTDKVSNNTYFSSYVEIVDAKLSYPHTAFAALSIDSAQFGNQIPRRNYLMKGRLVKVPSNYNPETRQYTGGTWDGSFKTAWTNNPAWVFYDVLTQPRFSTLARRLNVADIDKWSLYQIGKYCDEPVDDGFGGKEPRFVCNAYITDLMQAGEFLNNLASVFTGLPVWNGQQVSVVMDADADPVAQYTNANVKDGLFNYAGAALKSIHTAVHVQYIDKYDGYRAKTEYVADNEAIARYGLNIKQITAFGCDSRGQAARFGAWTLQTELRQQNAVTFEIGREGLKHLPYDIVQIMDNQYAGAELSGRVAAISGNVLTLDRPVSDAVGALVFYSEGGSLKSAKITAAAGNKVTLEREVPLQAGDTWVLSGKVKPRLYRAIGIKENTDAGTYTVTALLHDPKKYAAVDSFAHFDHEITTLHNTAPVLTDAAVNTDGGTVVVTWDNLAANGQVLTYDIKIYRNNSLYRHIPDAQTAEIRLENLPNGNYRAEIRGRNARGVLSAPLVKAWSIDYTVTGLRTTPKTLSVTVDWVLPQTVVSDLVFELWYSKTNNLQTATKLASLAYPQNSYTLTGVGVADVYYFWVRIRDIAGNTGEFTAAVQGRADNNPAPIVQQIQGAIGKSALSRELIDTLNRDMAAAAGLKVSAEAAERAKALQEEARARTAAIQAESSARTAELARKSSEIGTRIAATEAVNEQQAQQIQTVTSAQGNTAAGLEAEKKARTDGDRAEAQARETLAVRLGNAESGISALRETVTRQDAARSSEINTLTAKLENVEVGGRNYALSTGTAGKVLTASENNQTKTVTIDVSSALDLKQGDSLIISCDIELVNATSPHGKPYPRIGAEFSVIYADNSVGYFAAWYGEAVSGTTKTLKQRIVAKHTVAKEVKALRSFIVQARYQTSESIKVSNVKLERGTVATDWSPAPEDSNADTSALTTLSAKVQQASSAVAEIGGKIQSLYTLKTEAIAGGRRAVAGVAVGADGKTGSGEILLMADKVAYVDPKDKTVTPAFVTVIENGKAKQALNGDLFATGSILAKHIAANQTIEAPTLNGATVNAGLIKGGTIRGARIEAVDLEAANIIGDVVAVRTFELKQSPLGYQELICQIPDSRKTRRTVIVPPVFAVAENGAVVSLQLHMDGVIQREVTIQSPEKRIARNEKFSVWVPGPPPLYIRTPQEVPLSFSVPFHLPKTGSISFQKGIDGAAHSLHILCRISGNFDYSPLGDLSGIVCLIV

SEQ ID NO: 8591 - protein, 118 aa, Neisseria meningitidis; identical to SEQ ID NO: 680

SEQ ID NO: 8592 - protein, 78 aa, Neisseria meningitidis; identical to SEQ ID NO: 1622

SEQ ID NO: 8593 - protein, 392 aa, Neisseria meningitidis
MTGRTGGNGSTQAQPERVMLVGVMLDKDGTGSSATRLNGFQTALAEAVELVKAAGGDSVRVETAKRDRPHTALFVGTGKAAELSEAVAADGIDLVVFNHELTPTQERNLEKELKCRVLDRVGLILAIFARRARTQEGRLQVELAQLSHLAGRLIRGYGHLQSQRGGIGMKGPGETKLETDRRLIAHRINALKKQLVNLKKQRALRRKPRESGTIKTFALVGYTNVGKSSLFNRLTKSGIYAKDQLFATLDTTARRLYISPECSIILTDTVGFVSDLPHKLISAFSATLEETAQADVLLHVVDAAAPNSGQQIEDVENVLQEIHAGDIPCIKVYNKTDLLPSEEQNTGIWRDAAGKIATVRISVAENTGIDALREAIAEYCATAPNTDETEMP

SEQ ID NO: 8594 - protein, 256 aa, Neisseria meningitidis; identical to SEQ ID NO: 3040

SEQ ID NO: 8595 - protein, 233 aa, Neisseria meningitidis
MFRRHRHLKNMQIKKIMKWLPVALSLLGALGYTGYGSEAVRTAVAVLDVLGAAGDAGSDAPARRRASAKSGHRYTGTVSKVYDGDTLHVIDVNGAKHKIRMAYIDAPEMKQAYGTRSRDNLRAAAEGRKVSVRVFDTDRYQREVAQVSVGKTDLNLMQVQDGAAWHYKSYAKEQQDKADFADYADAQIQAERERKGLWKAKNPQAPWAYRRAGRSGRGNKDWMDAVGEWLGIW

SEQ ID NO: 8596 - protein, 53 aa, Neisseria meningitidis; identical to SEQ ID NO: 7231

SEQ ID NO: 8597 - protein, 170 aa, Neisseria meningitidis; identical to SEQ ID NO: 1571

SEQ ID NO: 8598 - protein, 223 aa, Neisseria meningitidis
MTFSAILFYILAAIVLYGALRTVTAKNPVHAALHLVLTFCVSAMLWMLMQAEFLGVTLVVVYVGAVMVLFLFVVMMLNIDIEEMRAGFWRHAPVAGVVGTLLAVALILILVNPKTDLAAFGLMKDIPADYNNIRDLGSRIYTDYLLPFELAAVLLLLGMVAAIALVHRKTVNPKRMDPADQVKVRADQGRMRLVKMEAVKPQTESAEESEVSDDLKPKEEGKA

SEQ ID NO: 8599 - protein, 103 aa, Neisseria meningitidis; identical to SEQ ID NO: 3283

SEQ ID NO: 8600 - protein, 391 aa, Neisseria meningitidis
MLNTFLSPWPCFTQEEADAVSKVLLSNKVNYWTGNECREFEKEFAAFAGTRYAVALANGTLALDVALKAIGIGAGNDVIVTSRTFLASASCIVNAGANPVFADVDLNSQNISAETIKAALTSNTKAIIVVHLAGMPAEMDGIMDLAKEHDLWVIEDCAQAHGAKYKGKSVGSIGHVGAWSFCQDKIMTTGGEGGMVTTNDKTLWEKMWSYKDHGKSYDAVYHREHAPGFRWLHESFGTNWRMMEMQAAIGRIQLKRLPEWTACRQAHAAKLAESLGKFKSIRLVEVADYIGHAQYKFYAFVKPEHLKDGWTRDRIVSELNARKVPCYQGSCSEVYLEKSFDDTPWRPKERLKNAVELGDTSLMFLVHPTLTDDEIAFCKEHIEAVLAEATR

SEQ ID NO: 8601 - protein, 76 aa, Neisseria meningitidis; identical to SEQ ID NO: 3053

SEQ ID NO: 8602 - protein, 336 aa, Neisseria meningitidis; identical to SEQ ID NO: 3061

SEQ ID NO: 8603 - protein, 187 aa, Neisseria meningitidis
MKKIIFAALAAAAVGTASAATYKVDEYHANARFAIDHFNTSTNVGGFYGLTGSVEFDQAKRDGKIDITIPVANLQSGSQHFTDHLKSADIFDAAQYPDIRFVSTKFNFNGKKLVSVDGNLTMHGKTAPVKLKAEKFNCYQRPMEKTEVCGGDFSTTIDRTKWGVDYLVNVGMTKSVRIDIQIEAAKQ

SEQ ID NO: 8604 - protein, 766 aa, Neisseria meningitidis
MHRPTAKQILHEVFGYPEFRGRQEAVINTLAGGGSLTVLMPTGGGKSLCYQIPALMREGVAVVVSPLIALMNDQVASLHVAGIEAAAVNSGTSADEAREIADKLAQGRLKLLYVAPERLVTDRFLRFLDQQTVSLFAIDEAHCVSQWGHDFRPEYQQLGMLAERYPNVPRIALTATADAATRADIKHYLHLDDAPEFISSFDRPNIYYQVIEKNNGKKQLLEFIRKEMAGQSGIVYCLSRKKVEDVAQFLRENGLNAIPYHAGLSMDVREENQRRFTHEDNIIVVATVAFGMGIDKPDVRFVAHLDMPQSVEHFYQESGRAGRDGLPAASWLCYGLNDWVLLRERIAEGNSDEVQKQIEMQKLDAMLSVCETAACRRVLLLKHFGEESEPCGHCDNCLHPPVRFDGTVLVQKLLSCVYRAGQRFAAGYITNLLRGKSDDWIRGNRHEQLSTFGIGAELSDKEWRSVIRQCISLGYLTVNIARYQALQLTEAAKKVLKGETEVMLRPLKRGKPAARTLKDNWLRTEREERLWQALRVWRMKQAEAEGIPAYMIFGDKTLRDLVEKMPQNLNGLHDIYGLGEAKTERFGHGILEVCRNAAGFSRDAVIRPQTEREQQLRQKLEAWRYEQARAENCALHAVLSDESLADMLADTPETETDLEGVHGLGSVRAAKYGRDILAVCRPFSDGIDETAKHKRRLMRALIQWCNETAKHEQSEPYRILSKAALRAIAAKQPEGLAELAAVYGVGEEKAARYGAAVLAVLERNAV

SEQ ID NO: 8605 - protein, 295 aa, Neisseria meningitidis
MYTGRFAPSPTGLLHIGSLLTAAASYADARSNGGKWLVRMEDLDPPREMPGAASHILHTLEAFGFEWDGEVAYQSRRYALYEETLCRLKTAGLVYPCHCSRKDWQAAAVHGADGFVYNGRCRNPQQRPAPQGKQPAWRIRVPDRDIGFSDGIVGGYAQNLARDIGDFVLLRADGYWAYQLAVVADDAEQGVTHIVRGQDLLVSTPRQIYLQQCLDVPTPQYAHLPLLTNAQGQKWSKQTLAPALDLNRREQLLRQVFRYLNLPEAPEADRPAELLDWAVAHWDMDKVPKHAITTP

SEQ ID NO: 8606 - protein, 430 aa, Neisseria meningitidis
MQFSAFGEKFTQHSGILQLMDDLGDALKSDKPVNMLGGGNPARIPEIDQAFADIFSKLAAEHAVENIGNYSNPQGDAVLIDALTAFLNREYSWNLTADNIALTNGSQNAFFYLFNLFGGKFKLSDGTSAEKAILLPLAPEYIGYADVHVEGQHFVSVKPKIENVEHEGEAGFFKYRVDFDALENLPELKEGKIGAICCSRPTNPTGNVLTDSEMARLDALAREHGIPLIIDNAYGMPFPNIIYSDVTLNWHENIILCFSLSKVGLPGVRTGIIVAAPEVVKAVSSLNAIVNLAPTRFGAAIAAPLLESGEMKRLADQVIRPFYRNQAQTAVSLLKRELGAYPMKIHKPEGAIFLWLWFENLPVSSQTLYEMLKAEGTLIIPGEHFFVGIDTQDYPHAGECIRMSIAQDAQTLEKGIAAIGKTVRKLYDNV

SEQ ID NO: 8607 - protein, 650 aa, Neisseria meningitidis; identical to SEQ ID NO: 2346

SEQ ID NO: 8608 - protein, 363 aa, Neisseria meningitidis; identical to SEQ ID NO: 2781

SEQ ID NO: 8609 - protein, 287 aa, Neisseria meningitidis; identical to SEQ ID NO: 3310

SEQ ID NO: 8610 - protein, 236 aa, Neisseria meningitidis
MLFEGLPCLAVWCKNRLSAVLPVGGLNVSENLLEIETHPFDSVLPPKAAVMMMGTFPPKEDKRAMQFHYPNFQNDMWRVYGLVFFGDADYFKVPSNGEAAHSEKAFDAEKIKAFLHERGIASCPTVLKAVRQHGNASDKFLKVVETVDLAAVLAKIPECRHICTTGGKATEILLDIQGGGIKMPKTGETVPFPFAGRDLTLTRLPSTSRAYPLSLAKKAAAYRAFFEMAGLCEKQL

SEQ ID NO: 8611 - protein, 461 aa, Neisseria meningitidis; identical to SEQ ID NO: 264

SEQ ID NO: 8612 - protein, 356 aa, Neisseria meningitidis
MYRRKGRGIKPWMGAGAAFAALVWLVFALGDTLTPFAVAAVLAYVLDPLVEWLQKKGLNRASASMSVMVFSLILLLALLLIIVPMLVGQFNNLASRLPQLIGFMQNTLLPWLKNTIGGYVEIDQASIIAWLQAHTGELSNALKAWFPVLMRQGGNIVSSIGNLLLLPLLLYYFLLDWQRWSCGIAKLVPRRFAGAYTRITGNLNEVLGEFLRGQLLVMLIMGLVYGLGLVLVGLDSGFAIGMVAGILVFVPYLGAFTGLLLATVAALLQFGSWNGILAVWAVFAVGQFLESFFITPKIVGDRIGLSPFWVIFSLMAFGQLMGFVGMLAGLPLAAVTLVLLREGVQKYFAGSFYRGR

SEQ ID NO: 8613 - protein, 335 aa, Neisseria meningitidis
MSTFFRQTAQAMIAKHIDRFPLLKLDQVIDWQPIEHYLNRQKTRYLRDHRGRPAYPLLSMFKAVLLGQWHSLSDPELEHSLITRIDFNLFCRFDELSIPDYSTLCRYRNWLAQDDTLSELLKLINRQLTEKGLKIEKASAAVVDATIIQTAGSKQRQAIEVDEEGQISGQTTPSKDSDARWIKKNGLYKLGYKQHTRTDAEGYIEKLHITPANAHECKHLSPLLEGLPEGTTVYADKGYDSAENRQHLEEHQLLDGIMRKACRNRPLSEVQTKRNRYLSKTRYVVEQSFGTLHRKFRYARAAYFGLIKVSAQSHLKAMCLNLLKAANRLSAPAAA

SEQ ID NO: 8614 - protein, 402 aa, Neisseria meningitidis
MTGIIHSLLDTDLYKFTMLQVVLHQFPQTHSLYEFRCRNASTVYPLADIKEDLEVELDALCQLRFTHDELDYLRSLRFIKSDFVDYLELFQLQRRFVEIGTDDKDRLNIRIEGPMIQAMFFEIFILAIVNELYFRRLETPAVIEEGERRLQAKAARLKEIAAAQNPDEPPFLISDFGTRRRYKLAWQEHVIRTLLEAAPSIVRGTSNVFLAKKLGITPIGTMAHEFLQAFQALDVRLRNFQKAALESWVHEYRGDLGVALTDVVGMDAFLRDFDLYFAKLFDGLRHDSGDPYVWGDKAYAHYQKLKIDSRTKMLTFSDGLDIERSWALHQYFKDRFKTGFGIGTNLTNDMGHTPLNIVLKLVECNGQSVAKLSDSPGKTMTNNSTFLAYLRQVFDVPEPETP

SEQ ID NO: 8615 - protein, 344 aa, Neisseria meningitidis; identical to SEQ ID NO: 2104

SEQ ID NO: 8616 - protein, 279 aa, Neisseria meningitidis; identical to SEQ ID NO: 3315

SEQ ID NO: 8617 - protein, 188 aa, Neisseria meningitidis
MSLYALLLIALGMSMDAFAVALAKGAAVRMPPRKIAATALVFGTVEALTPLAGWVGGFYAKPFISEWDHWAAFVLLGGLGLKMMREGLSGKAEDVRESKRESLWMTVLTAFGTSIDSMIVGVGLAFMEVNIAFAAAVIGMATTVMVTVGLTAGRALGVLFGKRAEFAGGLVLIAIGTWTLLSHLGLIG

SEQ ID NO: 8618 - protein, 225 aa, Neisseria meningitidis
MQADFNRPVLAVDTGTSYLSLALRADGETCLFHQEVGSRQSALILPEIRTLFRNAGITAADLGAIVYAKGPGAFTGLRIGIGVAQGLATPFDTPLIGVPSLDAAASLPPPQSCILAAADARMGEVFYAWFDTLNRRRLSDYQVGRAADIALPEGYVFSDGIGNAFALENRPPFSGKPDMPTAADFLNLAADGGFPAVAAAHAELLYVRDKIALTAKEQAERRARP

SEQ ID NO: 8619 - protein, 223 aa, Neisseria meningitidis
MTTQDELKRIAAEKAVEFVPENEYIGIGTGSTINFFIEALGKSGKKIKGAVSTSKKSSELLAQYDIPVVSLNEVSGLAVYIDGADEVNHALQMIKGGGGAHLNEKIVASASEKFICIADESKYVSRLGKFPLPVEVVESARSLVSRKLLAMGGQPELRIGYTTFYGNQIVDVHGLNIDKPLTMEDEINKITGVLENGIFARDAADVLILGTEEGAKVIYPCQG

SEQ ID NO: 8620 - protein, 344 aa, Neisseria meningitidis; identical to SEQ ID NO: 8135

SEQ ID NO: 8621 - protein, 508 aa, Neisseria meningitidis
MNPMYITFAIYLVAVLLIGLAAYFSTRNFDDYILGGRSLGPFVTAMSAGASDMSGWLLMGLPGAIYLSGLNEAWIAIGLLVGAYFNWLLVAGRLRVHTEYANNALTLPDYFFHRFGAGGHLMKVVSALIILFFFTIYCASGIVAGATLFQSLFEGMTYNQAMWLGAGATIAYTFLGGFLAVSWTDTLQASLMIFALILTPVMVYLGLGGAEQMSAAIQSVAAGTGKEYGSLFAGTTVIGIISTAAWGLGYFGQPHILARFMAAESAKSLVSARRIGMTWMALCLAGAVAVGYFGIAYFGANPDKVSSMSGNHERIFIALSTLLFNPWIAGIILSAILAAVMSTLSCQLLVCSSAITEDFYKGFLRKNAQQSELVWVGRLMVLAIAVISILIASDPNSKVLGLVSYAWAGFGAAFGPIVILSVLWKRITAYGALSGMVAGALTVVVWAEWVKKPAQAAGESGLLTMYEIVPGFIVCLIVAVLVSLFNKEPSRETQERFEKADADYRAAR

SEQ ID NO: 8622 - protein, 1201 aa, Neisseria meningitidis
MFHFAFPAQTALRQAITDAYRRNEIEAVQDMLQRAQMSDEERNAASELARRLVTQVRAGRTKAGGVDALMHEFSLSSEEGIALMCLAEALLRIPDNATRDRLIADKISDGNWKSHLNNSPSLFVNAAAWGLLITGKLTATNDKQMSSALSRLISKGGAPLIRQGVNYAMRLLGKQFVTGQTIEEALQNGKEREKMGYRFSFDMLGEAAYTQADADRYYRDYVEAIHAIGKDAAGQGVYEGNGISVKLSAIHPRYSRAQHCRVMGELLPRLKELFLLGKKYDIGINIDAEEANRLELSLDLMEALVSDPDLAGYKGIGFVVQAYQKRCPFVIDYLIDLARRNNQKLMIRLVKGAYWDSEIKWAQVDGLNGYPTYTRKVHTDISYLACARKLLSAQDAVFPQFATHNAYTLGAIYQMGKGKDFEHQCLHGMGETLYDQVVGPQNLGRRVRVYAPVGTHETLLAYLVRRLLENGANSSFVNQIVDENISIDTLIRSPFDTIAEQGIHLHNALPLPRDLYGKCRLNSQGVDLSNENVLQQLQEQMNKAAAQDFHAASIVNGKARDVGEAQPIKNPADHDDIVGTVSFADAALAQEAVGAAVAAFPEWSATPAAERAACLRRFADLLEQHTPALMMLAVREAGKTLNNAIAEVREAVDFCRYYANEAEHTLPQDAKAVGAIVAISPWNFPLAIFTGEVVSALAAGNTVIAKPAEQTSLIAGYAVSLMHEAGIPTSALQLVLGAGDVGTALTNDARIGGVIFTGSTEVARLINKALAKRGDNPVLIAETGGQNAMIVDSTALAEQVCADVLNSAFDSAGQRCSALRILCVQEDVADRMLDMIKGAMDELVVGKPIQLTTDVGPVIDAEAQQNLLNHINKMKGVAKSYHEVKTAADVDSKKSTFVRPILFELNNLNELQREVFGPVLHVVRYRADELDNVIDQINSKGYALTHGVHSRIEGTVRHIRSRIEAGNVYVNRNIVGAVVGVQPFGGHGLSGTGPKAGGSFYLQKLTRAGEWVAPTLSQIGQADEAALKRLEALVHKLPFNAEEKKAAAAALGHARIRTLRRAETVLTGPTGERNSISWHAPKRVWIHGGNTVQAFAALTELAASGVQAVVEPDSPLASYTADLEGLLLVNDKPETAGISHVAALSPLDSARKQELAAHDGALIRILPSENGLDILQVFEEISCSVNTTAAGGNASLMAVAD

SEQ ID NO: 8623 - protein, 1095 aa, Neisseria meningitidis
MQSWGIPLAIAGDIIAATAIATGDTGTISTEEFYNFDNWKGFGYELFEDWSRWVYDWLPDGWNLWKELDRNRSGQYHIYDPLALDLDGDGIETVAAKGFSGSLFDHNGNGIRTATGWVSADDGLLVRDLNGNGIIDNGAELFGDNTKLADGSFAKHGYAALAELDSNGDNIINAADAAFQSLRVWQDLNQDGISQANELRTLEELGIQSLDLAYKDVNKNLGNGNTLAQQGSYTKTNGTTAKMGDLLLAADNLHSRFKDKVELTAEQAKAANLAGIGRLRDLREAAALSGDLANMLKAYSAAETKEAQLALLDNLIHKWAETDSNWGKKSPMRLSTDWTQTANGGVALTPSQVTRLKQNALVSLSDKAKAAIDAARDRIAVLDAYTGQDSSTLYYMSEEDALNIVKVTNDTYDHLAKNIYQNLLFQTRLQPYLNQISFKMENDTFTLDFSGLVQAFNHVKETNPQKAFVDLAEMLAYGELRSWYEGRRLMADYVEEAKKAGKFEDYQKVLGQETVALLAKTSGTQADDILQNVGFGHNKNVSLYGNDGNDTLIGGAGNDYLEGGSGSDTYVFGKGFGQDTVYNYDYATGRKDIIRFTDGITADMLTFTREGNHLLIKAKDGSGQVTVQSYFQNDGSGAYRIDEIHFDNGKVLDVATVKELVQQSTDGSDRLYAYQSGSTLNGGLGDDYLYGADGDDLLNGDAGNDSIYSGNGNDTLNGGEGNDALYGYNGNDVLNGGEGNDHLNGEDGNDTLIGGAGNDYLEGGSGSDTYVFGKGFGQDTVYNYDYATGRKDIIRFTDGITADMLTFTREGNHLLIKAKDGSGQVTVQSYFQNDGSGAYRIDEIHFDNGKVLDVATVKKLVQQSTDGSDRLYAYQSGSTLNGGLGDDYLYGADGDDLLNGDAGNDSIYSGNGNDTLDGGEGNDALYGYNGNDVLNGGEGNDHLNGEDGNDTLIGGAGNDYLEGGSGSDTYVFGKGFGQDTVYNYHVDKNSDTMHFKGFKAADVHFIRSGSDLVLSASEQDNVRISGFFYGENHRVDTFVFDDAAISNPDFAKYINAGNNLVQSMSVFGSNTAATGGNVDANIQSVQQPLLVTPSA

SEQ ID NO: 8624 - protein, 377 aa, Neisseria meningitidis
MKRILCITGTRADFGKLKPLLAYIENHPDLELHLIVTGMHMMKTYGRTCKEVTRENYQHTYLFSNQIQGEPMGAVLGNTITFISRLSDEIEPDMVMIHGDRLEALAGATVGALSSRLVCHIEGGELSGTVDDSIRHSISKLSHIHLVANEQAVTRLVQMGEKRKHIHIIGSPDLDVMASSTLPSLEEVKEYYGLPYENYGISMFHPVTTEAHLMPQYAAQYFKALELSGQNIISIYPNNDTGTESILQELLKCQSEKFIAFPSIRFEYFLVLLKHAKFMVGNSSAGIREAPLYGVPSIDVGTRQSNRHMGKSIIHTDYETKNIFDAIQQACSLGKFEADDTFNGGDTRTSTERFAEVINNPETWNVSAQKRFIDLNL

SEQ ID NO: 8625 - protein, 628 aa, Neisseria meningitidis
MPSEAVFQMIDMNTENRSPEQFDIPLFLKNLPKLPGVYRFFDEGGKVLYVGKAVNLKRRVSGYFQKNDHSPRIALMVKQVRHIETTITRSESEALILENNFIKALSPKYNILFRDDKSYPYLMLSGHQYPQMAYYRGTLKKPNQYFGPYPNSNAVRDSIQVLQKVFMLRTCEDSVFEHRDRPCLLYQIKRCTAPCVGHISEEDYRDSVRQAATFLNGKTDELTRTLQHKMQTAAANLQFEEAARYRDQIQALGIMQSNQFIDSKNPNNPNDIDLLALAVSDGIVCVHWVSIRGGRHVGDKSFFPDTKNDPDPNGQDYAEAFVAQHYLGKSKPDIIISNFSVPDALKEALEGEHGKQMQFVTKTIGERKVWLKMAEQNAQMAIAQRRLQQSSQQHRIDELAKILGMDSDGLNRLECFDISHTQGEATIASCVVYDEQNIQPSQYRRYNITTAKPGDDYAAMREVLTRRYGKMQEAEANGETVKWPDAVLIDGGKGQIGVAVSVWEELGLHIPLVGIAKGPERKAGMEELILPFTGEVFRLPPHSPALHLLQTVRDESHRFAITGHRKKRDKARVTSSLSDIPGVGSKRRQALLTRFGGLRGVIAASREDLEKVEGISKALAETIYNHLH

SEQ ID NO: 8626 - protein, 812 aa, Neisseria meningitidis
MTEKSHKKTAKGRAGSPSPTSARNKKADNGARGNKVSERLKAVKELQKTETKKARPEHVVNLIGDALWLMGLAATLYLAISLISFDMGDPSWSHSSPVVEDVANWGGLFGAYVADVGYYLFGWSFWWWIAAACVMLYKNFRLHAKQTENEAYNHKIAAAALFVLTVFSPVLEYFVLGGKYADSLPVGAGGMVGIRVGAVFAWLLGKSGSLLIILVVLLLSLSLLVQISWLEFLNGAGRAVQNRLSALSGKVMALGKRRPNSKTDGVDTQNTRRMVKEAKNITAKPVALPEGSSSNRKSVAVSVAPSPKIQVSLFEDDEPRQAGEYHKPTLNLLRIPDSEPVSINPAELERTAELIESKLAEFGIGVQVVSATSGPVITRYEIEPAQGVKGSQIVALSKDLARSMSLQSVRIVETIAGKNTMGIELPNDKRQDVMLSEILSSPVFAEAKSKLTVALGKDIAGTPVVGDLAKMPHLLVAGMTGSGKSVGVNGMIMSMLFKATPDEVRFIMIDPKMLELSIYDGIPHLLCPVVTDMREAGQALNWCVAEMEKRYRLLSHAGVRNLEGFNQKVEAAKAAGKPLLNPFSLNPDSPEPLEKLPMIVVVIDELADLMMTERKAVEQQIARLAQKARAAGIHMIVATQRPSVDVVTGLIKANIPTRMAFTVQSKIDSRTILDQMGADELLKYGDSLFLQPGSAEPTRLQGAFVSDDEVHQVVNYVKSQAPADYIEGLLSGEAALETANIVNPNADSDELFDQAVAYVLESKKTSISSLQRQLRIGYNRAANLMEALENAGVVSPTDLNGSRKILAHKDHL

SEQ ID NO: 8627 - protein, 309 aa, Neisseria meningitidis
MDSIIELRHLKTLLALEETGSVSLAAKRVFLTQSALSHQIRMLENHYGAPLFERKSTPLRFTPVGERLLRLAHDLLPQVTDAERDLARIIEGEAGELRIAVECHTCFDWLMPAMGEFRPIWPQIELDIVSGFQADPIGLLLQHRADLAIVSEAEKQNGISFQPLFAYEMVGICAPDHPLAAKNVWTAEDFIGETLITYPVPDEMLDLPKKILIPKNINPPRRHSELTIAIIQLVASRRGIAALPYWTVMPYLEKGYVVHRQITADGLQSKLYAAIRTEDTDKSYLNNFCQIIRERGFADLPGLSELEPV

SEQ ID NO: 8628 - protein, 321 aa, Neisseria meningitidis; identical to SEQ ID NO: 6649

SEQ ID NO: 8629 - protein, 306 aa, Neisseria meningitidis; identical to SEQ ID NO: 4339

SEQ ID NO: 8630 - protein, 81 aa, Neisseria meningitidis
  misc_feature 75, 76: 'Xaa' is any amino acid
MLIAARAIQGAGAVSAAVTALLADLTRDGVRTRAMAMIGLSIGLTFSVSLVVAPVIADAVGVRGLFLLTGILTVXXTHLIN

SEQ ID NO: 8631 - protein, 114 aa, Neisseria meningitidis; identical to SEQ ID NO: 2177

SEQ ID NO: 8632 - protein, 90 aa, Neisseria meningitidis
MNKRMKMCPACQQGYLYHSKPKYLHDEIILCDECDAVWLKGMNIFYGEYEKDFYSYVPFMESQGITSECIWEGDLFDHPYYEDENSNDMD

SEQ ID NO: 8633 - protein, 426 aa, Neisseria meningitidis; identical to SEQ ID NO: 3050

SEQ ID NO: 8634 - protein, 521 aa, Neisseria meningitidis; identical to SEQ ID NO: 1978

SEQ ID NO: 8635 - protein, 375 aa, Neisseria meningitidis
MSNWKPDIPYNDLPPLPPKQDIESKTILKRCITARASLARLKQAAELIPNQAMLINTLPVMEARASSEIENIVTTTDKLFQSLQMDTERQDPATKEALQYRTALFAGYESLTSRPLCTQTAIMVCNAIKHPYEMAIRKTGGTALKGGNSGNVVYTPPEGEETIRGKLANWERFIHESGDLDPLIIMAAAHYQFEAIHPFTDGNGRTGRILNSLLLIEKGLLDLPILYLSRYIIENRADYYRLLLGVTERQDWESWIIYILDGVADTADWTVAKIDAIRRLFEQTRQHIRTHAQGIYTHELVNLLFEQPYTRIANLEAAGIAKRQTASKYLKELSDIGVLQEIAIGRDKLFIHPRLMELLRGEGNSFTSFQSLVKA

SEQ ID NO: 8636 - protein, 135 aa, Neisseria meningitidis; identical to SEQ ID NO: 803

SEQ ID NO: 8637 - protein, 291 aa, Neisseria meningitidis
MNLYDLLLAPFAEFDFMRYALVSVFCLSLSAAPVGVFLVMRRMSLIGDALSHAVLPGAAVGYMFAGLSLPAMGLGGVAAGMLMALLAGLVSRFTTLKEDANFAAFYLSSLAIGVVLVSKNGSSVDLLHLLFGSVLAVDIPALQLIAAVSSLTLITLAVIYRPLVLESIDPLFLKSVGGKGGLWHVLFLVLVVMNLVSGFQALGTLMSVGLMMLPAITARLWAKHMGALILLSVLTALLCGLSGLLISYHIEIPSGPAIILCCSVLYLFSVILGKEGGILTKWLKNHRHHTT

SEQ ID NO: 8638 - protein, 96 aa, Neisseria meningitidis; identical to SEQ ID NO: 4744

SEQ ID NO: 8639 - protein, 322 aa, Neisseria meningitidis
MKILLVRLSSMGDLIHTLPAIEDLARQCPDVELHWLCEAGFTDIARLHPFVKKIHVMKWRQWRKHLFQAETWREMGHLKQTLRQEAFNFVLDSQGLIKSACFAKMAKSPIYGLDKNSAREGLAALAYAKTYAVPKGKNAVWRNRELFAQVFGYAMPETQVFGLTVPEVGRLKNLAQPYYAALHATSRDSKLWPMENWRSLLQKLNEEQQCNIYLPWGNEDEKTRAKQIADGLPFAIVCDKINLLQAAYLLKYAVGIVGVDTGLLHLANALEKPVVGIYTDTDPIKTGVQVSPIAKNLGNIGQIPTADLVYQTLMDCVAADKG

SEQ ID NO: 8640 - protein, 233 aa, Neisseria meningitidis
MSLKTVAVIGAMEQEIELLREMMENVKAVSFGKFTAYEGELAGKRMVLALSGIGKVNAAVATAWIIREFAADCVINTGSAGGLGKGLKVGDVVIGTETAHHDVDVTAFGYVWGQVPQLPAVFVSDDLLVGKAKRAARTFEGAAVEQGLIVSGDRFVHSSEGVAEIRKHFPEVKAVEMEAAAIAQTCHQLETPFVIIRAVSDSADEKADISFDEFLKTAAASSAKMVAEIVKSL

SEQ ID NO: 8641 - protein, 344 aa, Neisseria meningitidis
MPNCFKFHTVIERHWQKPYPVLSFLLKPLSGLFAKIAAKRRTDFLSGKRQSEKLPVPVVVVGNIHAGGTGKTPIVAALVSGLQEKGVKVGIISRGYGRKSKAVHVLNAESRAEDAGDEPLLLFRKTGAPTAVGSSRAEAGRALLAAHPDIGLIVADDGLQHYALRRDVEIAVFPSADTGRTDLDLLPNGSLREPLLRLDSVDAVVVSGGKADALFRPSENMFHSRIEAGRIYRLNNPSEILDTGRLKNQTVVAVAGIAKPARFFDSLRNMGITVKRTVALPDHADISAADLPDADAVIITEKDAVKFSDGICTDNVWVLPVCAIIEPDLAAFVLERLEDVPKAV

SEQ ID NO: 8642 - protein, 210 aa, Neisseria meningitidis; identical to SEQ ID NO: 48

SEQ ID NO: 8643 - protein, 278 aa, Neisseria meningitidis
MIDLHCHSIVSDGMLSPAEVVRLAHQNGCTLLALTDHDHTGGIAEARAEADRLGLRLINGVEISVTWRGRTIHVVGLDFDEQDENLQNLLAQVRQGRLKRLEAIAAKLEKRGISGAYDGALALAANKEMVSRTHVAEFLIRVGHVKNKQQAFTKYLGDGKSCAVRHEWATLEDCVSAVNGAGGLAVIAHPMRYDLSATAKRNLFEEFKKLGGAGIEVHSGNCCKNDRLNYALLAERFGLLASAGSDFHRLNDFSGGILGACPELPENCKPVWTHFSRH

SEQ ID NO: 8644 - protein, 166 aa, Neisseria meningitidis
MSNYRRDFTRGAHYFFTLALQDRTKDYLIRHIDRLRLAYRETKTRYPFETAAICILPDHLHFIMRLPEGDHDYPIRIAYLKTRFSQLIPKECRAPNGSKTKKREAGIWQRRFWEHLIRDEQDLNNHRDYIYFNPVKHGYAASVKEWRYSSFFKDVEKGIYPLDWGG

SEQ ID NO: 8645 - protein, 91 aa, Neisseria meningitidis; identical to SEQ ID NO: 4054

SEQ ID NO: 8646 - protein, 51 aa, Neisseria meningitidis; identical to SEQ ID NO: 1536

SEQ ID NO: 8647 - protein, 68 aa, Neisseria meningitidis; identical to SEQ ID NO: 3041

SEQ ID NO: 8648 - protein, 39 aa, Neisseria meningitidis
LLFRNFSHNYLPLPSNALLVTCFVSKMPSESRISFQTAF

SEQ ID NO: 8649 - protein, 90 aa, Neisseria meningitidis; identical to SEQ ID NO: 1115

SEQ ID NO: 8650 - protein, 215 aa, Neisseria meningitidis
MKGVYFVSGIDTDIGKTVATGMLAKQLLQQGKSVITQKPVQTGCQDIAEDIAVHRKIMGIPMQEADKRRLTMPEIFSYPASPHLAARLDGRALDLDKIRTATQELAAQYEIVLVEGAGGLMVPLTEKLLTIDYIQQQAYPVILVTSGRLGSINHTLLSFAALKQYGIRLHSLVFNHIHDSRDAHIAQYSLSYLKCRLKADFSEAEWMELAKTDAV

SEQ ID NO: 8651 - protein, 112 aa, Neisseria meningitidis
MNTRIIVSAAFVALALAGCGSINNVTVSDQKLQERAAFALGVSPNAVKISNRSNEGIRINFTATVGKRVSQCYVTSVISTIGVTTSDAICLGGGTHKGKSQCNALLKAAGRC

SEQ ID NO: 8652 - protein, 193 aa, Neisseria meningitidis
MRNEEKHALRRELRGRRSQMGWDVRAAATVKINRLLKRYIKHGRKIGVYWPMGKELRLDGFVRAAQKRGAKLYLPYIEPRSRRMWFTPYPESGMERERIRGRARLNVPQFAGRKIRVHGLSVLLVPLVGIDREGYRLGQAGGYYDATLAAMKYRLQAKTVGVGFACQLVDRLSVEAHDLPLDGFVSEAGILCF

SEQ ID NO: 8653 - protein, 253 aa, Neisseria meningitidis; identical to SEQ ID NO: 265

SEQ ID NO: 8654 - protein, 373 aa, Neisseria meningitidis; identical to SEQ ID NO: 306

SEQ ID NO: 8655 - protein, 81 aa, Neisseria meningitidis
MLKSIEFNSHIRNRLAAYLKGRGLDFQTAMREEKGNKEIAAIVHSGLPTLVRKLYSEQKMQKFFWEKRDLIADYISRRMQG

SEQ ID NO: 8656 - protein, 735 aa, Neisseria meningitidis
MFPDQSAPNLLQGLNPEQLSAVTWPPQSALVLAGAGSGKTRVLTTRIAWLLQTGQASVHSIMAVTFTNKAAKEMQTRLGAMIPVDVRAMWLGTFHGLCHRFLRLHHRDAGLPSSFQILDGGDQLSLIKRLLKSLNIAEEIIAPRSLQGFINAQKESGLRASVLSAPDPHTSRMIECYAEYDKICQREGVVDFAELMLRSYEMLQSNEILRQHYQNRFNHILVDEFQDTNKLQYAWLKLMAGGNAAVFAVGDDDQSIYRFRGANVGNMTALMEEFHIDAPVKLEQNYRSVGNILAAANAVIENNDERLGKNLRTDAEAGDKIRYYSAFTDLEEARFILDETKALEREGWDLDEIAVLYRSNAQSRVIEQSLFRSGIPYKIYGGLRFYERQEIKHALAYLRLAVNPDDDNALLRVINFPPRGIGARTVENLQTASNEQGITLWQAACNAGAKAAKIAAFVRLIEALRNQVGQLPLSEIIVGILKDSGLTEHYRTQKGDNQDRLDNLDELVNAAIEFKPEDSNFEILPENISDDPAFPILAFLSNAALESGENQAGAGEKAVQLMTVHAAKGLEFNAVFLTGMEEGRFPSEMSLAERGGLEEERRLMYVAITRARKRLYITMAQQRMLHGQTQFGIVSRFVEEIPPEVLHYLSIKKTAYDSYGNTRQTATFKDKIIDDYKQPQTYAGFRIGQNVRHAKFGTGVIIDAADKGESARLTINFGKQGVKELDTKFAKLEEM

SEQ ID NO: 8657 - protein, 140 aa, Neisseria meningitidis
MNLEQLGRRDALLSGLLKQAGQWRRLDAAVKKLLPANLHPHFQTACIEDGRLVLLAANNMAASRLKMIAPSVLPQLAGLDASIRSVSVRLAPKPEKPPKTNTLHLSKAALESFGSAAVKLEKRHPELAEALANLVRRHGA

SEQ ID NO: 8658 - protein, 207 aa, Neisseria meningitidis
MVIAAIMAMIALPNMSQWIASRRIASHAERIANLLRFSRGEAVRLNLPVYICPVQVKKDGAPNNRCDFSKKGRGMLAFGDKNGNKAYDGDAADVFLRSVVLNDTDDSRINYAFNHIAFGSSQPTADRVVWTFNQNGTFGYTKDQHLTSKSSFFYSDGYIQIVLTDARAVLDADKKFRSAVVLIDSSGRVEVCPRGDRRTRRTMCQYK

SEQ ID NO: 8659 - protein, 445 aa, Neisseria meningitidis; identical to SEQ ID NO: 2190

SEQ ID NO: 8660 - protein, 187 aa, Neisseria meningitidis; identical to SEQ ID NO: 2456

SEQ ID NO: 8661 - protein, 414 aa, Neisseria meningitidis
MEQQQRYISVLDIGTSKVLALIGEVQDDDKINIVGLGQAPSRGLRAGMVTNIDATVQAIRQAVNDAELMADTKITHVTTGIAGNHIRSLNSQGVVKIKDGEVTQADIDRAIETAKAINIPPDQKILDAVVQDYIIDTQLGVREPIGMSGVRLDTRVHIITGASTAVQNVQKCIERCGLKSDQIMLQPLASGQAVLTEDEKDLGVCVIDIGGGTTDIAVYMNGAIRHTSVIPAGGNLITKDLSKSLRTPLDAAEYIKIHYGVTSCDTEGLGEMIEVPGVGDRTSRQVSSKVLAAIISARIQEIFGVVLGELQKSGFPKEVLNAGIVLTGGVSMMTGIVEFAEKIFDLPVRTGAPQEMGGLSDRVRTPRFSTAIGLLHAACKLEGNLPQPENGAVQEREGGGGLLARLKRWIENSF

SEQ ID NO: 8662 - protein, 78 aa, Neisseria meningitidis; identical to SEQ ID NO: 1246

SEQ ID NO: 8663 - protein, 255 aa, Neisseria meningitidis
MALAKRIIPCLDVKDGRVVKGVNFIGLRDAGDPVEAAKRYNGEGADELTFLDITASSDNRDTILHIIEEVAGQVFIPLTVGGGVRTVADIRRLLNAGADKVSINTAAVTRPDLIDEAAGFFGSQAIVAAVDAKAVNSENTRWEIFTHGGRNPTGLDAVEWAIEMQKRGAGEILLTGMDRDGTKQGFNLPLTRAVAEAVDIPVIASGGVGNVRHLIEGITEGKADAVLAAGIFHFGEIAIREAKRAMREAGIEVRL

SEQ ID NO: 8664 - protein, 65 aa, Neisseria meningitidis; identical to SEQ ID NO: 127

SEQ ID NO: 8665 - protein, 449 aa, Neisseria meningitidis; identical to SEQ ID NO: 481

SEQ ID NO: 8666 - protein, 426 aa, Neisseria meningitidis
MENSLKEAALKFHELPVPGKISVTPTKSLATDKDLALAYSPGVAAPCMEIHADPQNAYKYTAKGNLVAVISNGTAVLGLGDIGALAGKPVMEGKGVLFKKFAGVDVFDIEIDEKDPQKLVDIIAALEPTFGGINLEDIKAPECFYIERELRKRCKIPVFHDDQHGTAIITAAAVLNALRFTGRKIEEATLVCSGAGAAAIACLNQLLDLGLKRENVTVCDSKGVIYKTREDKDRMDESKQFYAIEDNGQRVLADAVKGKDIFLGLSGANLLTPEMLNTMNEKPIVFAMANPNPEILPPLAKETRPDVVIGTGRSDFPNQVNNVLCFPFIFRGALDVGATTINEEMKRACVYALADLAMEEVTEEVVAAYGKKFEFGAEYLIPTPFDSRLLPRVATAAAKAAMESGVATRPIADLEAYAAKLSEWKL

SEQ ID NO: 8667 - protein, 797 aa, Neisseria meningitidis
MKLKQIASALMVLGISPLALADFTIQDIRVEGLQRTEPSTVFNYLPVKVGDTYNDTHGSAIIKSLYATGFFDDVRVETADGQLLLTVIERPTIGSLNITGAKMLQNDAIKKNLESFGLAQSQYFNQATLNQAVAGLKEEYLGRGKLNIQITPKVTKLARNRVDIDITIDEGKSAKITDIEFEGNQVYSDRKLMRQMSLTEGGIWTWLTRSNQFNEQKFAQDMEKVTDFYQNNGYFDFRILDTDIQTNEDKTKQTIKITVHEGGRFRWGKVSIEGDTNEVPKAELEKLLTMKPGKWYERQQMTAVLGEIQNRMGSAGYAYSEISVQPLPNAETKTVDFVLHIEPGRKIYVNEIHITGNNKTRDEVVRRELRQMESAPYDTSKLQRSKERVELLGYFDNVQFDAVPLAGTPDKVDLNMSLTERSTGSLDLSAGWVQDTGLVMSAGVSQDNLFGTGKSAALRASRSKTTLNGSLSFTDPYFTADGVSLGYDVYGKAFDPRKASTSIKQYKTTTAGAGIRMSVPVTEYDRVNFGLVAEHLTVNTYNKAPKHYADFIKKYGKTDGTDGSFKGWLYKGTVGWGRNKTDSALWPTRGYLTGVNAEIALPGSKLQYYSATHNQTWFFPLSKTFTLMLGGEIGYANGYGKTKEIPFFENFYGGGLGSVRGYESGTLGPKVYDEYGEKISYGGNKKANVSAELLFPMPGAKDVRTVRLSLFADAGSVWDGKTYDDNSSSATGGRVQNIYGAGNTHKSTFTNELRYSAGGAVTWLSPLGPMKFSYAYPLKKKPEDEIQRFQFQLGTTF

SEQ ID NO: 8668 - protein, 358 aa, Neisseria meningitidis
MKPSILEKLQQLGDRLEEVTHLLGQPEATSDMDNYRKLTREHAELTPVVEVFQNYRLAQSDLADAEEMLSDPEMKDFAAEEIEAAKAKIGELDTELQKLLLPKDADDDKNIFIEIRAGTGGDEAALFAGDLLRMYSRYAERNRWQVEIVSANESELGGYKEVIARIVGLGAYSRLKFESGGHRVQRVPATESQGRIHTSACTVAVMPEADELEDIELNPADLRIDTFRASGAGGQHINKTDSAVRITHLPTGMVVECQDGRSQHANKAQAMKVLAARLNDAQKREAQAKEAAERKSLIGSGDRSERIRTYNYPQGRVTDHRINLTLHKLDFVMDGDLAEITDALIAEHQAELLAAMGD

SEQ ID NO: 8669 - protein, 531 aa, Neisseria meningitidis
MSQEILDQVRRRRTFAIISHPDAGKTTLTEKLLLFSGAIQSAGTVKGKKTGKFATSDWMDIEKQRGISVASSVMQFDYKDHTVNLLDTPGHQDFSEDTYRVLTAVDSALMVIDAAKGVEAQTIKLLNVCRLRDTPIVTFMNKYDREVRDSLELLDEVENILQIRCAPVTWPIGMGKNFKGVYHILNDEIYLFEAGGERLPHEFDIIKGIDNPELEQRFPLEIQQLRDEIELVQAASNEFNLDEFLAGELTPVFFGSAINNFGIQEILNSLIDWAPAPKPRDATVRMVEPDEAKFSGFIFKIQANMDPKHRDRIAFLRVCSGKFERGMKMKHLRINREIAASSVVTFMSHDRELVEEAYAGDIIGIPNHGNIQIGDSFSEGEQLAFTGIPFFAPELFRSVRIKNPLKIKQLQKGLQQLGEEGAVQVFKPMSGADLILGAVGVLQFEVVTSRLANEYGVEAVFDSASIWSARWVSCDDKKKLAEFEKANAGNLAIDAGGNLAYLAPNRVNLGLTQERWPDIVFHETREHSVKL

SEQ ID NO: 8670 - protein, 208 aa, Neisseria meningitidis; identical to SEQ ID NO: 1448

SEQ ID NO: 8671 - protein, 68 aa, Neisseria meningitidis; identical to SEQ ID NO: 3446

SEQ ID NO: 8672 - protein, 248 aa, Neisseria meningitidis; identical to SEQ ID NO: 639

SEQ ID NO: 8673 - protein, 110 aa, Neisseria meningitidis; identical to SEQ ID NO: 7667

SEQ ID NO: 8674 - protein, 377 aa, Neisseria meningitidis
MKIVFITTVASSIYGFRAPVIKKLIGKNHQVYAFVSEFSDNELDIIREMGVTPVTYRSNRSGLNPFSDIKSTFLIFKELKKISPDLVFPYFAKPVIFGTFAAKLAGVPRIVGMLEGLGFAFTPQPEGIPLKTKIIKGILIALYRIALPMLESLIVLNPDDKDELTDKYGIKIKNIHILGGIGLDSRQYPYSEADIPDEKEPVKFLFIGRFLKEKGIDDFIRAAEQVKDKYPDTVFTALGAIDKSRGGGGGDLERLAARDIIRFPGFVNNVSEVIKEHHIFVLPSYYREGVPRSTQEAMAVGRAVITTDVPGCRETVADKVNGFLIEPWNPRILAEKMIYFIENREAVRLMGNASYAIAKDKFDAEKVDLKLLDILKA

SEQ ID NO: 8675 - protein, 339 aa, Neisseria meningitidis
MKKILVTGGTGFIGSHTVVSLLKSGHQVVILDNLCNSSINILPRLKTITGQEIPFYQGDIRDREILRRIFAENRIDSVIHFAGLKAVGESVAEPMKYYDNNVSGSLVLAEEMARAGVFSIVFSSSATVYGDPGKVPYTEDMPLGDTTSPYGTSKSMVERILTDIQKADPRWSVILLRYFNPIGAHESGLIGEQPNGIPNNLLPYICQVASGRLPQLSVFGGDYPTPDGTGMRDYIHVMDLAEGHVAAMQAKSNVAGTHLLNLGSGRASSVLEIIRAFEAASGLTIPYEVKPRRAGDLACFYADPSYAKAQIGWQTQRDLTQMMEDSWRWVSNNPNGYDD

SEQ ID NO: 8676 - protein, 484 aa, Neisseria meningitidis
MTTQTIKFHMKPETFKQNAAISLQDKPLRKSLRTAMDMLMTKRKAVLTDEEELQSLRDLCEHVRQRSLSKLPALLEQLEENLTKLGVKVHWAETPTEACQIIHDIITAKNGKLMVKGKSMVSEEIELNHYLEAKGIKAVESDLGEFIVQMAGEKPTHIVMPAIHKTKEQVSELFHQNLGTPLTDDVDQLTGFARKALRDIYSTADVGLSGVNFAVAETGTLCLVENEGNGRLSTTVPPVHIAITGIEKVVAKLSDIPPLYSLLPRSAIGQNITTYFNMITGPRRSEELDGPQEMHLVLLDNGRSQAYAEDQMRRTLQCIRCGACMNHCPVYTRIGGAAYGTTYPGPIGEIISPHLLGLDATRDLPTACTMCGACVEVCPVRIPITEQMQRLRVEAQRSPTETVPHPILGQGASHTFGEQMAWRTFNGIFSGSKTYRAFGWAATKFRNLTPRKQLGWTQNRVPMKPAKKTLHELMAEKMRQKEQA

SEQ ID NO: 8677 - protein, 275 aa, Neisseria meningitidis; identical to SEQ ID NO: 2739

SEQ ID NO: 8678 - protein, 924 aa, Neisseria meningitidis; identical to SEQ ID NO: 2343

SEQ ID NO: 8679 - protein, 79 aa, Neisseria meningitidis; identical to SEQ ID NO: 831

SEQ ID NO: 8680 - protein, 111 aa, Neisseria meningitidis
MTVDKEQVEKMIYSENKQSVIDGMLGMTFSSEEDEIPWISEKLTELSKHKDLDIARLSLTCFGHLARMHENIGDCDKVIALLLSKQGDPDFQGFAEDALDEISLFIFKKRP

SEQ ID NO: 8681 - protein, 503 aa, Neisseria meningitidis
MSEQNHPQTEPQLDENQIIALRREKLHNIRQQRNAYPNDFKRDSFAADLHAQYGEIGKEELDPQGIPVKVAGRMMLKRQMGKASFATIQDVSGQIQLYLNNKGVSQEVLDDFNHWDLGDIVGAEGTLFKTNHGELTVRVSDIRLLSKSLRPLPDKHKGLSDQETKYRQRYVDLIANEESRNTFIKRSQIIQSVRNFMVGEHYLEVETPMMHPIPGGATAKPFVTHHNALDIPLYLRIAPELYLKRLVVGGLERVFEINRSFRNEGMSVRHNPEFTMIEFYEAFSDYERMMQMAEDIIRNASRTVNGTANITYNGKEVDLESPFERLTILEAIKKYNPHYTDEQLNDAEWLKKEIVKHGESLPPSPGIGSLQLALFEGCAEGKLWNPTFIIDYPVEVSPLARASDTKQGLTERFELFVVGRELANGYSELNDPEDQAERFKAQVAQKDAGDDEAMHYDADYIRAMEFGLPPTGGCGIGIDRLVMLLTDSQTIRDVILFPQMRPE

SEQ ID NO: 8682 - protein, 350 aa, Neisseria meningitidis
MWKEILLNYGIFLLELLTVFGAIALIVLAIVQSKKQSESGSVVLTDFSENYKKQRQSFEAFFLSGEEAKHQEKEEKKKEKAEAKAEKKRLKEGGEKSSETQKSRLFVLDFDGDLYAHAVESLRHEITAVLLIAKPEDEVLLRLESPGGVVHGYGLAASQLRRLRERNIPLTVAVDKVAASGGYMMACVADKIVSAPFAIVGSVGVVAEVPNIHRLLKKHDIDVDVMTAGEFKRTVTFMGENTEKGKQKFRQELEETHQLFKQFVSENRPQLDIEEVATGEHWFGRQALALNLIDEISTSDDLLLKAFENKQVIEVKYQEKQSLIQRIGLQAEASVEKLFAKLVNRRADVM

SEQ ID NO: 8683 - protein, 135 aa, Neisseria meningitidis; identical to SEQ ID NO: 2191

SEQ ID NO: 8684 - protein, 737 aa, Neisseria meningitidis
MTAISPIQDTQSATLQELREWFDSYCAALPDNDKKLVLAARSLAEAHYPADAVTPYGEPLSDHFLGAAQMVDELDLLPDAVAATLLADIGRYVPDWNLLVSERCNSTVAELVKGVDEVQKLTHFARVDSLATPEERAQQAETMRKMLLAMVTDIRVVLIKLAMRTRTLQFLSNVPDNPEKRAVAKETLDIFAPLANRLGVWQLKWQLEDLGFRHQEPEKYREIALLLDEKRTERLEYIENFLNILRTELKKYNIHFEVAGRPKHIYSIYKKMVKKKLSFDGLFDIRAVRILVDTVPECYTTLGIVHSLWQPIPGEFDDYIANPKGNGYKSLHTVIVGPEDKGVEVQIRTFDMHQFNEFGVAAHWRYKEGGKGDSAYEQKIAWLRQLLDWRENMAESGKEDLAAAFKTELFNDTIYVLTPHGKVLSLPTGATPIDFAYALHSSIGDRCRGAKVEGQIVPLSTPLENGQRVEIITAKEGHPSVNWLYEGWVKSNKAIGKIRAYIRQQNADTVREEGRVQLDKQLAKLTPKPNLQELAENLGYKKPEDLYTAVGQGEISNRAIQKACGTLNEPPPVPVSETTIVKQSKIKKGGKNGVLIDGEDGLMTTLAKCCKPAPPDDIVGFVTRDRGISVHRKTCPSFRHLAEHAPEKVLDASWAALQEGQVFAVDIEIRAQDRSGLLRDVSDALARHKLNVTAVQTQSRDLEASMRFTLEVKQVNDLPRVLASLGDVKGVLSVTRL

SEQ ID NO: 8685 - protein, 268 aa, Neisseria meningitidis
MWHWDIILILLAVGSAAGFIAGLFGVGGGTLIVPVVLWVLDLQGLAQHPYAQHLAVGTSFAVMVFTAFSSMLGQHKKRAVDWKTVFAMMPGMIFGVFTGALSAKYIPAFGLQIFFILFLTAVAFKTLHTGRQTASRPLPKLPGLTAVSTLFGTMSSWVGIGGGSLSVPFLIHCGFPAHKAIGTSSGLAWPIALSGAISYLLNGLNIAGLPEGSLGFLYLPAVAVLSAATIAFAPLGVKTAHKLSSAKLKKSFGIMLLLIAGKMLYNLL

SEQ ID NO: 8686 - protein, 132 aa, Neisseria meningitidis; identical to SEQ ID NO: 1178

SEQ ID NO: 8687 - protein, 113 aa, Neisseria meningitidis; identical to SEQ ID NO: 3580

SEQ ID NO: 8688 - protein, 261 aa, Neisseria meningitidis; identical to SEQ ID NO: 3244

SEQ ID NO: 8689 - protein, 566 aa, Neisseria meningitidis
MSVKIQTRSINTDVFNHLLTAGADPLIARLCASRGVQSPAELDDKLAALLPYQTLTNCEAAAGRLADAVGRKEKILIVADYDADGATACAVGLDGLAAMGAKVDFLVPNRFEHGYGLTPELAEIAAAQGVDLLITVDNGIASIAGVARAQALGLDVIVTDHHLPADTVPDCIIVNPNQKGCGFQSKSLAGVGVIFYVLTALRAELRRRNYFSDGLKEPNLGDLLDLVALGTVADVVPLDHNNRILVSQGLKRMRSGKMRPGIRALFEVARRDWRKAQPFDMGFALGPRINAAGRLDDMSVGIACLLARDDSEAQELAAQLNNLNIERREIEQSMLQDALNAFPETLPSGQTTLVAYRDDFHQGVVGIVASRLKDRFYRPTIVFAPADNGEVRGSGRSIPNLHLRDALDLVSKRHPDLILKFGGHAMAAGLSILEHNIPAFQTTFEEAVREMVCEDDLSQTFITDGSLPACDITLEQAQNLARHVWGQGFAPPSFTDEFHVVRQQPLGAEGKHKKVWLQKDDCEFEAMFWRCSEDIPEYIRTVYRPVANEWRNNLELQLYIDYWEAV

SEQ ID NO: 8690 - protein, 259 aa, Neisseria meningitidis
MKLVRPQKISDQVLSVLEGRIVEGVYAEGGKIPPERVLAEEFGVSRPSVRSALNVLVARQVLEARQGDGYYVSVKPQQDFLQSWQELLGKHSNWEQDVFDFSCHIEGCMAALAAERRTDADLKRIGFWLEKFEEACESGNLEHQSEADVSFHQTIADAAHNLLFSHLSGGLLKMLYRQTRSSLIYLNQEEDPRPKLMAQHRVLYEAISNRRPGEASEAAKAHLNYVASSIMKDREYQSRNRHADTLAQNDLKRVQDWEV

SEQ ID NO: 8691 - protein, 76 aa, Neisseria meningitidis; identical to SEQ ID NO: 374

SEQ ID NO: 8692 - protein, 244 aa, Neisseria meningitidis; identical to SEQ ID NO: 1321

SEQ ID NO: 8693 - protein, 240 aa, Neisseria meningitidis
MTKQLKLSALFVALLASGTAVAGEASVQGYTVSGQSNEIVRNNYGECWKNAYFDKASQGRVECGDAVAAPEPEPEPEPAPVVVVEQAPQYVDETISLSAKTLFGFDKDSLRAEAQDNLKVLAQRLGQTNIQSVRVEGHTDFMGSDKYNQALSERRAYVVANNLVSNGVPVSRISAVGLGESQAQMTQVCEAEVAKLGAKVSKAKKREALIACIEPDRRVDVKIRSIVTRQVVPAHNHHQH

SEQ ID NO: 8694 - protein, 287 aa, Neisseria meningitidis
MKTFFKTLSAAALALILAACGGQKDSAPAASASAAADNGAEKKEIVFGTTVGDFGDMVKEQIQPELEKKGYTVKLVEFTDYVRPNLALAEGELDINVFQHKPYLDDFKKEHNLDITEVFQVPTAPLGLYPGKLKSLEEVKDGSTVSAPNDPSNFARALVMLDELGWIKLKDGINPLTASKADIAENLKNIKIVELEAAQLPRSRADVDFAVVNGNYAISSGMKLTEALFQEPSFAYVNWSAVKTADKDSQWLKDVTEAYNSDAFKAYAHKRFEGYKSPAAWNEGAAK

SEQ ID NO: 8695 - protein, 343 aa, Neisseria meningitidis; identical to SEQ ID NO: 6390

SEQ ID NO: 8696 - protein, 376 aa, Neisseria meningitidis
LDISIRQERKKTLIFSFFSGAGFLDLGFELSGFDIAFVNEVHPPFLEAYKYSRSRMDIPKPKYGYFKGSIDECLYAEKAKDLAGWVKKEKQNGIIVGFIGGPPCPDFSIAGKNKGKDGENGKLSQSYVDLICKNQPDFFVFENVKGLYRTAKHREFFNALKRQLSDFGYVCTEKLINAIEYGVPQDRERIILVGFLSQHVDALQKFDWDAHISFPDALEKDWPTTEEVGRVVSQPANIYPELTVQYWFNRNGVDTHPNASKHFQPRAGLEKFQTISEGDDKKKSYKRLHRWRYSPTAAYGNNEVHIHPYLPRRISAAEALAIQSLPKEFELPDNMTLSNMFKTIGNGVPFLAAKGIAMTLKSYLENHYERTKTDGC

SEQ ID NO: 8697 - protein, 259 aa, Neisseria meningitidis; identical to SEQ ID NO: 2935

SEQ ID NO: 8698 - protein, 383 aa, Neisseria meningitidis; identical to SEQ ID NO: 3357

SEQ ID NO: 8699 - protein, 65 aa, Neisseria meningitidis; identical to SEQ ID NO: 926

SEQ ID NO: 8700 - protein, 457 aa, Neisseria meningitidis; identical to SEQ ID NO: 2036

SEQ ID NO: 8701 - protein, 46 aa, Neisseria meningitidis
MKIFYGQYGKDFYDYHEFMKDKGIEEINMWEGELFDHPYYEDEKFK

SEQ ID NO: 8702 - protein, 919 aa, Neisseria meningitidis
MKRMLFNATQAEELRVAIVDGQNLLDLDIETLGKEQRKGNIYKGIITRIEPSLEACFVDYGTDRHGFLPFKEVSRSYFRDYEGGRARIQDVLKEGMEVIVQVEKDERGNKGAALTTFISLAGRYLVLMPNNPRGGGVSRRIEGEERQELKAAMAELDIPNGMSIIARTAGIGRSAEELEWDLNYLKQLWQAIEEAGKAHHDPYLLFMESSLLIRAIRDYFRPDIGEILVDNQEVHDQVAEFMSYVMPGNVGRLKLYQDHTPLFSRFQIEHQIESAFSRSVSLPSGGAIVIDHTEALVSIDVNSARATRGSDIEDTAFKTNMEAAEEVARQMRLRDLGGLVVIDFIDMENPKHQRDVENVLRDALKKDRARVQMGKLSRFGLLELSRQRLKPALGESSHVACPRCAGTGVIRGIESTALHVLRMVQEEAMKDNTGEVHAQVPVDVATFLLNEKRAELFAMEERLDVNVVLIPNIHLENPHYEINRIRIDDVEEDGEPSYKRVAEPEEDESAKPFGSEKAKASRPEPAVKGVRHTQPAPTVAPEKKASWWDSFKAWLKRIFGGSETQAAPAAETSEKRSTANRSGSRANNRRQNPRRSKREGSKVEVREVAGKTAGQEARADKAETRNNGNRRRNERGDRAAGRADEAEIQDRNIQPAATVADAAPSETEVQTGKRRRNGSRSERGQTAPETATVAETTVQTAENTPSEPHTAEDKGSKPKSERNRRERDSRDAKERRERNNQRDRRQNGKKRNIPSAAKIEQYLNIHDTADKVRSAAAHVFGETDANAPITVSIADPVAERDLPTASPAVSNGDAPVYDAAEKIRRATAAILPEGATPKAEAQEMPSETATFTAAAEQARETAQTGGLVLIETDPAALKAWAAQPEVQAGRGLRRSEQPKPSEVATVPAEEMIQVETRQG

SEQ ID NO: 8703 - protein, 192 aa, Neisseria meningitidis; identical to SEQ ID NO: 746

SEQ ID NO: 8704 - protein, 153 aa, Neisseria meningitidis
MKPQKSLRARAMDILSRQEVSRIGLKRKLAPHAESEEELENVLNEFAERNWQSDLRYAEAYIRSKSRKHGSLRLKQALAQQGIDEETSRNLLPDRSSEKQAAIDVLRKKFKHPAADLKEKQKQARFLAYRGFDADTVQTALKHAWDENWEDGC

SEQ ID NO: 8705 - protein, 308 aa, Neisseria meningitidis; identical to SEQ ID NO: 1981

SEQ ID NO: 8706 - protein, 288 aa, Neisseria meningitidis
MMKTLLPFFGVVRVSGEDRQTFLHGQLSNDINNLQTGQACYATYNTPKGRVIANMIVVNRGDDLLLIMAQDLLEATVKRLRMFVLRAKAVFEILEDYAVGAELAASAEPLAAQEPCLAFTAECGSDGICSVVLPHRGILHIAPETALPPYDAAAENAWRLHEILSGYPWICAATKETAVAQMLNQHIIGGVHFKKGCYPGQEIIARAQYRGQVKRGLAVLSGNSAVEAGTLLTADGEETGIVLDSVKDSESFTALAVIKFSAAQKELTVPNGGIFKAVHPFFKTENAE

SEQ ID NO: 8707 - protein, 169 aa, Neisseria meningitidis; identical to SEQ ID NO: 718

SEQ ID NO: 8708 - protein, 149 aa, Neisseria meningitidis; identical to SEQ ID NO: 3543

SEQ ID NO: 8709 - protein, 354 aa, Neisseria meningitidis; identical to SEQ ID NO: 2527

SEQ ID NO: 8710 - protein, 412 aa, Neisseria meningitidis
MAFYAFKAMRAAALAAAVALVLSSCGKGGDAAQGGQPAGREAPAPVVGVVTVHPQTVALTVELPGRLESLRTADVRAQVGGIIQKRLFQEGSYVRAGQPLYQIDSSTYEANLESARAQLATAQATLAKADADLARYKPLVAAEAVSRQEYDAAVTAKRSAEAGVKAAQAAIKSAGINLNRSRITAPISGFIGQSKVSEGTLLNAGDTTVLATIRQTNPMYVNVTQSASEVMKLRRQIAEGKLLAADGVIAVGIKFDDGTVYPEKGRLLFADPAVNESTGQITLRAAVPNDQNILMPGLYVRVLMDQVAVDNAFIVPQQAVTRGAKDTVMIVNAQGGMEPREVTVAQQQGTNWIVTSGLKDGDKVVVEGISIAGITGAKKVTPKEWAPSENQAAAPQSGVQTASEAKTASEAE

SEQ ID NO: 8711 - protein, 307 aa, Neisseria meningitidis; identical to SEQ ID NO: 2891

SEQ ID NO: 8712 - protein, 417 aa, Neisseria meningitidis; identical to SEQ ID NO: 2411

SEQ ID NO: 8713 - protein, 120 aa, Neisseria meningitidis; identical to SEQ ID NO: 2829

SEQ ID NO: 8714 - protein, 128 aa, Neisseria meningitidis
VRKILLDTHALLWWLLDDKKLGTSARKLIENPRNAIFVSAASIWEISIKQNKGLLKLPEEFFDVLQEEDFEMLPIGLFHAKQAGSLPEIHKDPFDRMLIAQTQAEGFELMTVDEYIPQYGIRVVNASS

SEQ ID NO: 8715 - protein, 124 aa, Neisseria meningitidis; identical to SEQ ID NO: 2713

SEQ ID NO: 8716 - protein, 100 aa, Neisseria meningitidis; identical to SEQ ID NO: 3521

SEQ ID NO: 8717 - protein, 114 aa, Neisseria meningitidis
LIGSRSSKGTTIYADKGYDSAENRQHLKEHQLLDGIMRKACRNRPLSEAQTKRNRYLSKPRYVVEQSFGTLHRKFRYARAAYFGLLKVSAQSHLKAMCLNLLKAANRLSAPAAA

SEQ ID NO: 8718 - protein, 163 aa, Neisseria meningitidis
MNSLFVDNTVFITRLKAGHIGRLVQALFEEWHGFEPWSSVDKIHAYYGRCLKDDELPLAFAAVDDSGILLGSATVKRHDMESFPQYEYWLGDVFVLPEYRGKGIGRRLVAHCIGAARSLGIKFLYLYTPDVQIFYESFGWAVVGRHFHNGEWVTVMRLDMDKV

SEQ ID NO: 8719 - protein, 171 aa, Neisseria meningitidis; identical to SEQ ID NO: 3235

SEQ ID NO: 8720 - protein, 139 aa, Neisseria meningitidis
MAQLPLYRTAEIGNFTVGTPKVLESFSKHIPYGVVFEDDGDTGYFYAASQDGILDALHIYNVEDVSDKHIPNHVLILWDDACTIAALCVNDYIHAVYDFVEQAGYCRNGFPEAGGEWVKVENRVLDDELLDKILSREPT

SEQ ID NO: 8721 - protein, 217 aa, Neisseria meningitidis
MKITHCKLKKKVQKELLHFFVLEVTARSAADILGIHPNSAALFYRKIRTVINHHLVLAADEVFEGPVEPDESDFGGRRKGRRGRGAAGKVVVFGILKRNGRVYTVVVDNAKSETLLPVIKKKIMPDSIVYTDSLSSCDKLDVSGFIHYRINHSKEFADRQNHINGIENFWNQAKRVLRKYNGIDRKSFPLFLKECEFRFNFGTPSRQLKILQDWCGI

SEQ ID NO: 8722 - protein, 371 aa, Neisseria meningitidis
MRLFKSLKNPKKTDAKLPKKSSGLNNRAAIGIDIDQHSIKMVQLSGRSLNQIQLEKYVIAKLPKNIIQGNKVQNYDQLVTYLQQAYAKLGTSCKNIIASVPQNLATIEQLTYTDKDAELDLQGFVESSISEVSSISLEEANYDYQVLSQSAAGEAVLAVASRKDEIEPLIDAFNAAGMKLSALDVDIFGQYNAYALWINHFAPELAAEKVAIFGVYAAQTYALVIQDGKILYKQETSVSEEQLNQLIQRTYQVTEEKAEEIINSPQKPSDYQESVANYFNQQITQEIQRVLQFYYTTQTADDMTDIKHILLTGEAAHQEGIAQTVASQTNADVQCVHPARYFADNLKTDKQQFELDAPTLTRAFGLAVRGL

SEQ ID NO: 8723 - protein, 328 aa, Neisseria meningitidis
MQYRIRRENEAPEAKNAGETLWERDMMREVLLSAYQDRRRERMWKNIWRAVSTLILVALIAGIFQKDEAALQLAGNTPHTAVVNLYGEIGNGVEDQVKKLKDGMEAAYKNPQAKAIVIRANSPGGSPVVSNTAFEEIRRLKAQHPDIPVYLVAEDMCASGCYYIAAAADKIYADSSSIVGSIGVIGSSFDATELMEKIGVKRRVKIAGSNKGMGDPFSPETPEQSKIWEEMLTGIHGEFIKAVKTGRGGRLKFRQYPDVFSGRVYTGADALKVGLVDGLGNIYSVARDVVKAPDVVDYTPKDDFGRILGRRFGAELKAGVREALQAVR

SEQ ID NO: 8724 - protein, 133 aa, Neisseria meningitidis; identical to SEQ ID NO: 2156

SEQ ID NO: 8725 - protein, 808 aa, Neisseria meningitidis; identical to SEQ ID NO: 2836

SEQ ID NO: 8726 - protein, 469 aa, Neisseria meningitidis
MNFPKTAASLLLLLASLAAHALDTGRIPQNEIAVYVQELDSGKVIIDHRSDVPVNPASTMKLVTAFAAFKTFGSNYRWATEFKSNGTVNDGTLDGNLYWAGSGDPVFNQENLLAVQRQLREQGIRNITGHLMLDHSLWGEVGSPDDFEADSGSPFMTPPNPTMLSAGMVMVRAERNAADSTDILTDPPLPHIFAQNNLKITASQAACPSIKKLMRASFSDNTLKLRGNIPESCLGKPVGVRMFALDELIRQSFTNHWLLGGGRISDGIGISDTPEGAQTLAVAHSKPMKEILTDMNKRSDNLIARSVFLKLGGDGKLPAVSEQAASAVRRELAVSGIDIADLVLENGSGLSRKERVTARMMAQMLETAYFSPFAQDFIDTLPIAGTDGTLRNRFKQSGGLLRLKTGTLNNVRALAGYWLGDKPMAVVVIINSGRAVSLLPDLDNFVAKNIISGGDGWLDAKLMCKERRA

SEQ ID NO: 8727 - protein, 78 aa, Neisseria meningitidis
LPYYLYCLRLRRLVLIFVNSLYFCHADISRDDKTGAKKPDWKIRIGLFCDVLFDLRTNCRPERPRPVWQVGFSNPTAI

SEQ ID NO: 8728 - protein, 343 aa, Neisseria meningitidis; identical to SEQ ID NO: 614

SEQ ID NO: 8729 - protein, 189 aa, Neisseria meningitidis
  misc_feature 185, 186, 187: 'Xaa' is any amino acid
VLHRLQKVVRHIAQTEIMPRFLNTPSHRKEDGSMLSEADIAAQTAFAAALPLLIDCPMLGEEMSRQEQSALWAEYSGEKGLWIVDPIDGTNNFVNGLPHFAVSVAFVRNGRAELGVIYNPVSGECFYAERGQGAFLNGTRLPLRLVDKKLNEAIAGVEIKYLRSGKLSSRMSTLAPFGTVRSMGXXXHT

SEQ ID NO: 8730 - protein, 154 aa, Neisseria meningitidis; identical to SEQ ID NO: 1226

SEQ ID NO: 8731 - protein, 693 aa, Neisseria meningitidis
MIYGSMPSEKLTIFQTAFVMQVNIQIPCMLYRRGSVKPPLFEAPRLLPSFTDPVVPKLSAPGGYIVDIPKGNLKTEIEKLSKQPEYAYLKQLQTAKNVDWKQVQLAYDKWDYKQEGLTGAGAAIVVIIVTALTYGYGAAAAGSVTAAGSSTAAAATTTAAATTTVSTAAAMQTAALASLYSQAAVAIINNKGDVGKALKDLGTSDTVKQIVTSALTAGALNQMGADIAQLNSKVRTELFSSTGNQTIANLGGRLATNLSNAGISAGINTAVNGGSLKDNLGNAALGALVNSFQGEAASKIKTTFSDDYVAKQFAHALAGCVSGLVQGKCKDGAIGAAVGEIVAESILGGRNPATLSDAEKHKVISYSKIIAGSVAALNGGDVNTAANAAEVAVVNNALNFDSTPTNAKKHQPQKPDKTALEKIIQSIMPAHAAGAMTNPQDKDAAIWISNIRNGITGPIVITSYGVYAAGWTAPLIGTAGKAAISTCMANPSGCTVMVTQAAEAGAGIATGAVTVGNAWEAPVGALSKAKAAKQAAPKETINNLANLAKAEQQILFRIAQRDTQLDAWKTGFNNRVRKGAGLLDASNIPITINGKTIKPVQAISLKGAPVYSGVSEQEIFALYRQMTGQNPNFRVLPDGRLANGIISTGEWAGTKIALRNFSKTENSTQARWTLDLQNPPSFIKGTKLELKFQ

SEQ ID NO: 8732 - protein, 335 aa, Neisseria meningitidis
MSTFFQQTAQAMIAKHIDRFPLLKLDQVIDWQPIEQYLNRQKTRYLRDHRGRPACPLLSMFKAVLLGQWHSLSDPELEHSLITRIDFNLFCRFDELIIPDYSTLCRYRNWLAQDDTLSELLKLINCQLTEKGLKIEKASAAVVDATIIQTAGSKQRQAIEVDEEGQVSGQTTPSKDSDARWIKKNGLYKLGYKQHTRTDAEGYIEKLHITPANAHECKHLSPLLEGLPKGTTVYADKGYDSAENRQHLEEHQLQDGIMRKACRNRPLTETQTKRNRYLSKTRYVVEQSFGTLHRKFRYARSTYFGLIKVSAQSHLKAMCLNLLKAANRLSAPAAA

SEQ ID NO: 8733 - protein, 249 aa, Neisseria meningitidis
MKALVAVRRVVDYNVKVRVKADGSDVDIGNVKMSMNPFDEIAVEEAVRLKEAGKVSEIVAVSLGEKKCEETLRTALAMGADRAIHVETDTKLESLAVAKLLKAVADKENPQIFFLGKQAIDDDANQVAQMLAALLNAAQGTFASKVHIECGEVQIVREIDGGEETIALKLPAVISADLRLNEPRFVKLPNIMAAKKKPLEKLTPDDLVADISPRLKTVKFAEPKARQAGVKVASVAELVEKLKNEAKVI

SEQ ID NO: 8734 - protein, 334 aa, Neisseria meningitidis; identical to SEQ ID NO: 1997

SEQ ID NO: 8735 - protein, 559 aa, Neisseria meningitidis
MENFAQLLEESFTLQEMNPGEVITAEVVAIDQNFVTVNAGLKSESLIDVAEFKNAQGEIEVKVGDFVTVTIESVENGFGETKLSREKAKRAADWIALEEAMENGDILSGIINGKVKGGLTVMISSIRAFLPGSLVDVRPVKDTSHFEGKEIEFKVIKLDKKRNNVVVSRRAVLEATLGEERKALLENLQEGSVIKGIVKNITDYGAFVDLGGIDGLLHITDLAWRRVKHPSEVLEVGQEVEAKVLKFDQEKQRVSLGMKQLGEDPWSGLTRRYPQGTRLFGKVSNLTDYGAFVEIEQGIEGLVHVSEMDWTNKNVHPSKVVQLGDEVEVMILEIDEGRRRISLGMKQCQANPWEEFAANHNKGDKISGAVKSITDFGVFVGLPGGIDGLVHLSDLSWTESGEEAVRKYKKGEEVEAVVLAIDVEKERISLGIKQLEGDPFGNFISVNDKGSLVKGSVKSVDAKGAVIALSDEVEGYLPASEFAADRVEDLTTKLKEGDEVEAVIVTVDRKNRSIKLSVKAKDAKESREALNSVNAAANANAGTTSLGDLLKAKLSGEQE

SEQ ID NO: 8736 - protein, 40 aa, Neisseria meningitidis; identical to SEQ ID NO: 1884

SEQ ID NO: 8737 - protein, 64 aa, Neisseria meningitidis; identical to SEQ ID NO: 3483

SEQ ID NO: 8738 - protein, 311 aa, Neisseria meningitidis
MSVLIIVEHDNKQLNPTTLHAVTAAAKLGKIDLLVAGSGASAVVEFAKQVAGVEKVLVADAAHYAEGLAEELAPLVVKLAVDYCYVAATATTFGKNLLPRVAALLDVPQISDLTEIVDNTTFVRPIYAGNAFETVQADSEKLVLTFRATVFDAVAAQGGNAEVINVEATPAQNLSRFVNRQLSHSDRPELTQAKVIVSGGRALGSAEKFNEVLTPLADVLGAAIGASRAAVDAEYAPNDAQVGQTGKVVAPQLYFAIGISGAIQHVAGMQDSKVIVAINKDADAPIFNVADYGLVGDLFEIVPQLTEVLKN

SEQ ID NO: 8739 - protein, 288 aa, Neisseria meningitidis; identical to SEQ ID NO: 1688

SEQ ID NO: 8740 - protein, 207 aa, Neisseria meningitidis; identical to SEQ ID NO: 4832

SEQ ID NO: 8741 - protein, 151 aa, Neisseria meningitidis; identical to SEQ ID NO: 4206

SEQ ID NO: 8742 - protein, 206 aa, Neisseria meningitidis
MTKLYAEIAKMETQDDDTVKVWGYASSEEIDSDGEVIAAAAMKAAIPDYMKFGAGREMHGSNAAGTAIEINVEDDGITFFGAHIIDPVVVSKVKTGVYKGFSIGGSVTARDDLNKSQITGLKLTEISLVERPANPDAVSTCFKADKGAETVNNDTEHNATYFSHFPSKQKSTDGGRCPFLYRFPYFLSAGRAGFAGPFGAGAPTEA

SEQ ID NO: 8743 - protein, 163 aa, Neisseria meningitidis; identical to SEQ ID NO: 2144

SEQ ID NO: 8744 - protein, 254 aa, Neisseria meningitidis
MCSCLVVKNTVIGSGRTKIAVPLVARDAAELSAVLEQIKNMPFDIAEFRADFLECAGSIGEILHHTQTVRDALPDKPLLFTFRRHGEGGSFPCSDDYYFKLLDALIESRLPDIIDIELFSGETAVRRAVANAQKNGIAALLCNHEFHRTPPQEEIVCRLKQMEDCGADICKIAVMPQSAEDVLTLLSATLKAKELAAKPIVTMSMGQTGAVSRLAGQVFGSSITFGSGTQNSAPGQIGVSALRATLDCLENGAD

SEQ ID NO: 8745 - protein, 99 aa, Neisseria meningitidis; identical to SEQ ID NO: 7449

SEQ ID NO: 8746 - protein, 557 aa, Neisseria meningitidis
MLLTLSLRDFVIVENLNLDFQSGFTVLTGETGAGKSITLDAIGLLLGDKADYSQVRSGAKEAQLSALFDISHLPVLKAELYEQGLLNDGEEELSIRRIIDAKGKSRSFINNQAATLAQLKSVGSQLIDIHGQNAHHSLNQEAAQRELLDAFAGSREQAETVRQLYQNWANAKKALQEAQEHADAVIIERERLEWQFNELNQLDIKQGEWEALSQSHDSLAHSAELLQAAEEVGSKIDGDNGIQRHIYQCQKLLANLQNIEPRFAESLNMLASIEAELGEISANMRDVAGRSDINPNELAAQEQRMGELMGMARKYRIEPEELPAKLAEIEERLQSLQAAADLDALEHNVAHNFAEYQEAAHILSAMRHQAAERLSGETTEHMQHLAMKGARFDIALLPSSPTSHGLEQVQFQVAANKGNPPRPLNKVASGGELARISLALQVVASQYTQVPTLIFDEVDTGIGGGVAEMVGKALRALGRKHQVLAVTHLPQVASCGENHWRVRKHSEGEQTVSEISILDEIQRVEEVARMLGGEVITDTTRQHAAELLQLASKNSLF

SEQ ID NO: 8747 - protein, 266 aa, Neisseria meningitidis
MSPSPFIEMKDVAFAYGDRPILKNINFSIPQGNFAAVMGGSGSGKTTLMRLITGQIRPQSGQVLIEGRDLAGFSADELYEHRRRMGVLFQHGALFTDLSVFDNIAFPMRELTRLPEAVIRDLVLLKLNAVGLRGVENLMPSELSGGMSRRVALARTIALDPEIMLYDEPFTGLDPISLGVIAHLISRVNKALRSTSIMVTHDIEKSLEIVDQVIFLAHGEIMFSGSPQEMRELDSPWVRQFVGGLADGPVAYRYPAQTSLQQDLLG

SEQ ID NO: 8748 - protein, 115 aa, Neisseria meningitidis; identical to SEQ ID NO: 3528

SEQ ID NO: 8749 - protein, 74 aa, Neisseria meningitidis; identical to SEQ ID NO: 2464

SEQ ID NO: 8750 - protein, 172 aa, Neisseria meningitidis
MRLFPIAAALSLAACGTVQSTQYFVLPDSRYIRPATQGGETAVEVRLAEPLKRGGLVYQTDPYRLNTAQNHVWADTLDDMLEAALSNAFNRLDSTRIFIPASRSGSTEKWTVYIDAFQGSYTGKTLISGYAVLPDGTNRPFHIETEQQGDGYAAMTAALEQGLKQAAQQMVE

SEQ ID NO: 8751 - protein, 245 aa, Neisseria meningitidis; identical to SEQ ID NO: 3451

SEQ ID NO: 8752 - protein, 240 aa, Neisseria meningitidis
MKPAYFISDLHLSEKHPELTALLLRFLRSSAAGQARAVYILGDLFDFWVGDDEVSELNTSVAREIRKLSDKGVAVFFVRGNRDFLIGQDFCRQAGMTLLPDYSVLDLFGCKTLICHGDTLCTDDRAYQRFRKIVHRKRLQKLFLMLPLKWRTRLATKIRRVSKMEKQVKPADIMDVNAAFTARQVRAFGAERLIHGHTHREHIHHENGFTRIVLGDWHNDYASILRVDGDGAVFVPLEKY

SEQ ID NO: 8753 - protein, 243 aa, Neisseria meningitidis
VSREINAGGHHFLYGGISGGGVHYWDNKDFSEQCLHLSLGYKNRSVTRSFGIVPFVGQNLLGGSRYNFVGGFNADFSQHLSERWRLTLNAGNMWKHYQEDRTAARYDSHMPLAGATLMYSAPKDWLLYGGADWSHDLTKEAEQASVRKGLRIGAVKTFDGGLGLRANLRYTRRTFDAPGTIVYRFPRKDHEYQANLSFWHDKISWKGFTPQLNFRYLKIDSNMKSFYTRKNTQIFMSVEKDFK

SEQ ID NO: 8754 - protein, 330 aa, Neisseria meningitidis
MENVNRIVAEGIAAVEAAQDFNALEQIKARYLGKTGELTGLLKTLGQMSPEERKTIGAHINECKNRFQTAFNAKRDALNEAKLQARLAAEALDITLPGRAQEGGSLHPVTLTLQRVVELFHGMGFEVADGPEIEDDFHNFQALNIPANHPARAMQDTFYVENGDVLRTHTSPIQIRYMLDKKEPPIRIIAPGRVYRVDSDATHSPMFHQAEGLWVEEGVTFADLKAVFTDFIRRFFERDDLQVRFRPSFFPFTEPSGEIDIMGENGKWLEVGGCGMVHPNVLRNVNIDPEKYTGFAFGIGLDRFAMLRYNVNDLRLFFDNDLNFLKQFAK

SEQ ID NO: 8755 - protein, 273 aa, Neisseria meningitidis
MDFLIVLKALMMGLVEGFTEFLPISSTGHLIVFGNLIDFHSNHKVFEITIQLGAVLAVVFEYRQRFSNVLHGVGKDRKANRFVLNLAIAFIPAAVMGLLFGKQIKEYLFNPLSVAVMLVLGGFFILWVEKRQSRAEPKIVDVDALRPIDALMIGVAQVFALVPGTSRSGSTIMGGMLWGIERKTATEFSFFLAVPMMVAATAYDVLKHYRFFTLHDVGLILIGFVAAFVSGLVAVKALLRFVSKKNYIPFAYYRIVFGIAIIILWLSGWISWE

SEQ ID NO: 8756 - protein, 174 aa, Neisseria meningitidis
MQTRILSAVLLAFSTAAFAGGAFTLQFDNPSEDGGFTQNQLLSAPYGFGCSGGNAPPALSWKNPPAGTKSFVLTVYDKDAPTGLGWMHWVVADIPADVRRRNAASLQLSRCANIADDQSAAISAVISLRICRIRLTPSYTAKPMPSCCNHANTPQSAASATLCGTFSSASTAAA

SEQ ID NO: 8757 - protein, 331 aa, Neisseria meningitidis; identical to SEQ ID NO: 2336

SEQ ID NO: 8758 - protein, 71 aa, Neisseria meningitidis; identical to SEQ ID NO: 2248

SEQ ID NO: 8759 - protein, 129 aa, Neisseria meningitidis
MSTHEKLLTADNPVLHQRAKAMRQEMSEAEAKLWQHLRAGRLNGYKFRRQQPMGNYIVDFMCVTPKLIVEADGGQHTEQAAYDHARTAYLNSLGFTVLRFWNHEILQQTNDVLTEILLVLQELEKQAAR

SEQ ID NO: 8760 - protein, 433 aa, Neisseria meningitidis
MPSETARPLYADTCAAHTLVWFRQNLRIRDNAALCAAVAEGLPVIGIWIDDAETDNPRRAAFYRQSAAELAQGLAGRGIPLYTAASPAELVRLAVRLNIRAVIADESHTFADKLADNALWHELDKHGIALTFVNDRAVFGKTDLIPDGGTAHTDFDRYREVWLDRFSKQPPAGPDLFAAYRQPFPENLSAPPPAALSDGIFLPQNSGETAAWRQWRRFLEQADSYSVLKDFPSRKHTSLMGAYLSAGCISPRLLARESLERRLNAWADNIIRRDFFLQLALQHTDDDPSDGNPEHTLRLTLWQQGQTGIPIIDAAMRCLHKTGSLHPALRRLSADFFCHVLNLPRREGEIWFARQLTDFDAAINQGNWRLAASRHTCPDIAAAAHKTDPDGTFVRRHIPELAHLSADTVHTPWRFACSVDTHGYPAYPVAGIP

SEQ ID NO: 8761 - protein, 944 aa, Neisseria meningitidis
MNRRHTFPLTLTALAIATAFPAYAAQAGVAAPDAAQTQSLKEVTVRAAKVGRRSKEATGLGKIVKTSETLNKEQVLGIRDLTRYDPGVAVVEQGNGASGGYSIRGVDKNRVAVSVDGVAQIQAFTVQGSLSGYGGRGGSGAINEIEYENISTVEIDKGAGSSDHGSGALGGAVAFRTKEAADLISDGKSWGIQAKTAYGSKNRQFMKSLGAGFSKDGWEGLLIRTERQGRETRPHGDIADGVAYGINRLDAFRQTHDIQSKDKTGQFFLVEGENTLKPVAKLAGYGIYLNRQLNRWVKERIEQNKPLSAEEEAMVREAQARHENLSAQSYTGGGRILPDPMDYRSGSWLAKLGYRFGGRHYVGGVFEDTKQRYDIRDMTEKQYYGTDEAEKFRDKSGVYDGDDFRDGLYFVPNIEEWKGDTNLVKGIGLKYSRTKFIDEHHRRRRMGLLYRYENEAYSDNWADKAVLSFDKQGVATDNNTLKLNCAVYPAVDKSCRASADKPYSYDSSDRFHYREQHNVLNASFEKSLKNKWTKHHLTLGFGYDASNAISRPEQLSHNAARISESTGFDDNNQDKYRLGKPEVVEGSVCGYIETLRSRKCVPRKINGSNIHISLNDRFSIGKYFDFSLGGRYDRKNFTTSEELVRSGRYVDRSWNSGIVFKPNRHFSLSYRASSGFRTPSFQELFGIDIYHDYPKGWQRPALKSEKAANREIGLQWKGDFGFLEISSFRNRYTDMIAVADHKTKLPNQAGQLTEIDIRDYYNAQNMSLQGVNILGKIDWNGVYGKLPEGLYTTLAYNRIKPKSVSNRPDLSLRSYALDAVQPSRYVLGFGYDQPEGKWGANIMLTYSKGKNPDELAYLAGDQKRYSTKRASSSWSTADVSAYLNLKKRLTLRAAIYNIGNYRYVTWESLRQTAESTANRHGGDSNYGRYAAPGRNFSLALEMKF

SEQ ID NO: 8762 - protein, 231 aa, Neisseria meningitidis
MSELILKCEGVGKRYRDGGLDVRVLHGLDLEIRAGESTGIIGSSGSGKSTLLHILGGLDMPSEGRVLLMGEDLRTLSQRQLGILRNRHLGFVYQFHHLLPEFSALENVMMPLLIGKKKREEAAETAMAMLEKVGLKHRSTHRAGELSGGERQRAAIARALVTQPKCLLADEPTGNLDRANARNVLDMMLELKTELGTGLVVVTHDDELAGRFERVMVMKDGSLHPKQGANA

SEQ ID NO: 8763 - protein, 284 aa, Neisseria meningitidis; identical to SEQ ID NO: 2008

SEQ ID NO: 8764 - protein, 703 aa, Neisseria meningitidis
MKISFHLALLPTLIIASFPVAAADTQDNGEHYTATLPTVSVVGQSDTSVLKGYINYDEAAVTRNGQLIKETPQTIDTLNIQKNKNYGTNDLSSILEGNAGIDAAYDMRGESIFLRGFQADASDIYRDGVRESGQVRRSTANIERVEILKGPSSVLYGRTNGGGVINMVSKYANFKQSRNIGAVYGSWANRSLNMDINEVLNKNVAIRLTGEVGRANSFRSGIDSKNVMVSPSITVKLDNGLKWTGQYTYDNVERTPDRSPTKSVYDRFGLPYRMGFAHRNDFVKDKLQVWRSDLEYAFNDKWRAQWQLAHRTAAQDFDHFYAGSENGNLIKRNYAWQQTDNKTLSSNFTLNGDYTIGRFENHLTVGMDYSREHRNPTLGYSRAFTASIDPYDRASWPASGRLQPILTQNRHKADSYGIFVQNIFSATPDLKFVLGGRYDKYTFNSENKLTGSSRQYSGHSFSPNIGAVWNINPVHTLYASYNKGFAPYGGRGGYLSINTSSSAVFNADPEYTRQYETGVKSSWLDDRLSTTLSAYQIERFNIRYRPDEQNDPYTWAVGGKHRSRGVELSAIGQIIPKKLYLRGSLGVMQAKVVEDKENPDRVGIHLNNTSNVTGNLFFRYTPTENLYGEIGVTGTGKRYGYNSRNKEVTTLPGFARVDAMLGWNHKNVNITFAAANLLNQKYWRSDAMPGAPRTYTARVNYSF

SEQ ID NO: 8765 - protein, 351 aa, Neisseria meningitidis; identical to SEQ ID NO: 2371

SEQ ID NO: 8766 - protein, 81 aa, Neisseria meningitidis
LKDSTGQMRLATKDLAEAIKRGEVRSSAFTTKQLKAIEKGESKIPDYTWHHHQDTGRMQLINEDLHHDTGHIGWRAMSKGK

SEQ ID NO: 8767 - protein, 262 aa, Neisseria meningitidis; identical to SEQ ID NO: 6514

SEQ ID NO: 8768 - protein, 290 aa, Neisseria meningitidis
MPILNHIALIGVGLIGGSFVLDLKRQGLVRTVTGIDTDRDNLERALERGVIDRASVAIDADSIGGADLVLIATPVATVPAILTALRPVLPEHTWISDVGSTKSSVIEAFRRCLPDRLHHCIAAHPIAGSDRSGAQAAQFGLFRHRKLIITPHGGEHSDGIALVEELWHAVGAEIYTMDAQRHDAVFAAVSHMPHLTAFAYVHQILDHPDGQEYLKFAATGFRDFTRIASGHPAVWADICLANKDSLLQLVQGLGKQLDVLANILTTDDREALYRYFEEAKTTRDRWLDGN

SEQ ID NO: 8769 - protein, 322 aa, Neisseria meningitidis; identical to SEQ ID NO: 7028

SEQ ID NO: 8770 - protein, 143 aa, Neisseria meningitidis; identical to SEQ ID NO: 28

SEQ ID NO: 8771 - protein, 243 aa, Neisseria meningitidis; identical to SEQ ID NO: 2896

SEQ ID NO: 8772 - protein, 304 aa, Neisseria meningitidis
MKHLKLTLIAALLTTAATAAPLPVVTSFSILGDVAKQIGGERVSIQSLVGANQDTHAYHMTSGDIKKIRSAKLILLNGLGLEAADIQRAVKQSKVSYAEATKGIQPLKAEEEGGHHHDHDHDHEGHHHDHGEFDPHVWNDPVLMSAYAQNVAEALIKADPEGKVYYQQRLGNYQMQLKKLHSDAQAAFNAVPAAKRKVLTGHDAFSYMGKRYHIEFIAPQGVSSEAEPSAKQVAAIIRQIKREGIKAVFTENIKDTRMVDRIAKETGVNVSGKLYSDALGNAPADTYIGMYRHNIKALTNAMKQ

SEQ ID NO: 8773 - protein, 160 aa, Neisseria meningitidis; identical to SEQ ID NO: 2526

SEQ ID NO: 8774 - protein, 163 aa, Neisseria meningitidis; identical to SEQ ID NO: 2563

SEQ ID NO: 8775 - protein, 191 aa, Neisseria meningitidis; identical to SEQ ID NO: 1730

SEQ ID NO: 8776 - protein, 191 aa, Neisseria meningitidis; identical to SEQ ID NO: 119

SEQ ID NO: 8777 - protein, 491 aa, Neisseria meningitidis; identical to SEQ ID NO: 2986

SEQ ID NO: 8778 - protein, 709 aa, Neisseria meningitidis
MAYQVLARKWRPKTFSDLVGQEHVVKALQNALDEGRLHHAYLLTGTRGVGKTTIARILAKSLNCENAQHGEPCGVCESCTQIDAGRYVDLLEIDAASNTGIDNIREVLENAQYAPTAGKYKVYIIDEVHMLSKSAFNAMLKTLEEPPEHVKFILATTDPHKVPVTVLSRCLQFVLHNMTSQQVADHLAHVLDSEKIAYEPPALQLLGRAAAGSMRDALSLLDQAIAMGSGSVAEQDVRQMIGAVDKQYLYELLTGIINQDGAALTAKAQEMAACAVGFDNALGELAILLQHLALIQAVPSALAHDDPDSDILHRLAQTISGEQIQLYYQIAVHGKRDLSLAPDEYAGFMMTLLRMLAFAPLAAASCDTNAVIENTELKSPSAQTAEKETAVKKPQPRPEAETAQTPVQTASAAAMPSEGKTAGPVSNQENNDVPPWEDAPDEAQAAAGTAQTSAKSIQTASEAETPPENQVSKNKAADNVTDAPLSEVPSENPIQATPNDEAVETETFAHEAPAEPFYGYGFPDNDCPVEDGAEIPPPDWEHAAPADTAGGGADEEAEAGGIGGNNTPSAPPPEFSTENWAAIVRHFARKLGAAQMPAQHSAWTEYHPDTGLMVLAMTAEARATADKKRLDKIRDTLAQAYGLQLTLQTQDWRDEAGRETPAMQDKRVQAEDRQKAQALLEADPAAQKILQAFGAQWQPESLELAANRP

SEQ ID NO: 8779 - protein, 252 aa, Neisseria meningitidis; identical to SEQ ID NO: 4740

SEQ ID NO: 8780 - protein, 61 aa, Neisseria meningitidis; identical to SEQ ID NO: 1836

SEQ ID NO: 8781 - protein, 302 aa, Neisseria meningitidis; identical to SEQ ID NO: 1790

SEQ ID NO: 8782 - protein, 703 aa, Neisseria meningitidis
LLPLLLASCIGGNFGVQPVVESTPTAYPVTFKSKDVPTSPPAKPSIETTPVNQPAVGAAMRLPRRNIATFDKNGNEIPDSKQAEEYLPLKEEDILFLDGTPQEQADKLKKKINERYPDVKVITSTNEDAKYNYRFVRAGYVFTRGGGYDNEKEKTPDGKEFVNRFSYDGFVYYSGEHPSQSLPRTETVQYSGNWQFVTDAKRWRTQNDGGGINLGFSHFYGNDIGATSYAARDVDDREKHPAKYTVDFGNKTLTGELIKNQYVKPNEQQKPLIIYNITAKLDGNRFTGSASVNPKLKTNYSDKEYLFFHADADQRLEGGFFGDNGEELAGRFISNDNSVFGVFAGKQKTDASNASDTKPALSSGKHTKILDSLKISVDEASDNNARPFAISPMPDFGHPDKLLVEGREIPLVNKEQTIELADGRKMIVRACCDFLTYVKLGRIKTERPASKPKAEDKGEDEEGAGVDNGEEGEDEAVEDEGSEEDEVSEGDNGENEEEIAEEETEEEVEEPEEEVEEPEEELPAEEGNGGSGSILPTPEASKGRDIDLFLKGIRTAEADIPKNGTAHYTGTWEARIGVSDSGTSIQKDSYANQGAKAEFTVDFEAKTVSGMLTEKNDTTPAFYIEKGVIDGNGFHALAHTRENGIDLSGQGSTNPKNFKADNLLVTGGFYGPQAAELGGNIIDSDRKFGAVFGAKKDDKEATR

SEQ ID NO: 8783 - protein, 83 aa, Neisseria meningitidis; identical to SEQ ID NO: 925

SEQ ID NO: 8784 - protein, 363 aa, Neisseria meningitidis
MSLKCGIVGLPNVGKSTLFNALTQSGIEAANYPFCTIEPNVGIVEVPDPRMAELAKIVNPQKMQPAIVEFVDIAGLVAGASKGEGLGNQFLANIRETDAIVNVVRCFDDDNIVHVAGRVDPIADIETIGTELALADLASVEKAIVREEKRARSGDKDAQKLVDLCKKLLPHLDEGKPVRSFGLDAEERAMLKPLFLLTAKPAMYVGNVAEDGFENNPHLERLKELAAKENAPVVAVCAAMESEIAELEDDEKAEFLAEMGLEEPGLNRLIRAGYDLLGLQTYFTAGVKEVRAWTIHKGDTAPQAAGVIHTDFERGFIRAQVISYDDFVSLGGEAKAKEAGKMRVEGKEYVVQDGDVMHFLFNV

SEQ ID NO: 8785 - protein, 244 aa, Neisseria meningitidis
MTTRQIILDTETTGLYADGGDRLVEFAGLEMVNRQMTDKNLHLYVHPERDMPEEAARVHGLTIQVLEGKNAPPFAEVGRQIADFLRGAELIIHNAKFDVGFLNMEFRRMGLPTVEELGCTVTDTLAMAREMFPGQKASLDALCNRFSVDRSKRVLHGALIDCELLGEVYLAMTRRQFDLMGAAAEEKMETKPVVHTETKRSGKLKVIRADENELAEHGQYLDGLGEACIWRKEAVPSENGGTDA

SEQ ID NO: 8786 - protein, 257 aa, Neisseria meningitidis; identical to SEQ ID NO: 4650

SEQ ID NO: 8787 - protein, 277 aa, Neisseria meningitidis; identical to SEQ ID NO: 2920

SEQ ID NO: 8788 - protein, 126 aa, Neisseria meningitidis
MNIRFFALTVPVLSLAACAVPETYDGGGRGHMPPVQNQARPADFRAFSCENGLSVRVRRLDGGRIALRLDGRRAVLSSDVAASGERYTAEHGLFGNGTEWHQKGGEAFFGFTDAYGNSVETSCRAR

SEQ ID NO: 8789 - protein, 104 aa, Neisseria meningitidis; identical to SEQ ID NO: 2048

SEQ ID NO: 8790 - protein, 316 aa, Neisseria meningitidis; identical to SEQ ID NO: 6852

SEQ ID NO: 8791 - protein, 230 aa, Neisseria meningitidis; identical to SEQ ID NO: 675

SEQ ID NO: 8792 - protein, 70 aa, Neisseria meningitidis; identical to SEQ ID NO: 5197

SEQ ID NO: 8793 - protein, 453 aa, Neisseria meningitidis
MLKKVLIANRGEIALRVLRACREMGIATVAVHSEADKDSLHVKLADESVCIGPAASAQSYLNVPAIIAAAEVSCADAVHPGYGFLAENADFAEQVEQSGFTFIGPKPDTIRLMGDKVSAKHAMIEAGVPCVPGSDGALPDDGEEILKIADKVGYPVIIKASGGGGGRGMRVVEKKEDLLQSVEMTKAEAGAAFGNPMVYMERYLQRPRHVEIQVIADEHGNAVYLAERDCSLQRRHQKVIEEAPAPFITEKERAKIGNACADACKRIGYRGAGTFEFLYEDGEFFFIEMNTRVQVEHPVTELITGVDIVQEQLRIASGLPLQYKQKDIKIEGHAFECRINAEDPYNFIPSPGPIESCHLPGGFGIRVDSHIYQGYRIPPYYDSLIGKICVHGKTREQAMAKMRVALAELAVTGIKTNTPLHRDLFNDPGFQKGGVSIHYLEHWLEDRKAKQDK

SEQ ID NO: 8794 - protein, 701 aa, Neisseria meningitidis; identical to SEQ ID NO: 1407

SEQ ID NO: 8795 - protein, 285 aa, Neisseria meningitidis; identical to SEQ ID NO: 6917

SEQ ID NO: 8796 - protein, 218 aa, Neisseria meningitidis; identical to SEQ ID NO: 3206

SEQ ID NO: 8797 - protein, 188 aa, Neisseria meningitidis; identical to SEQ ID NO: 6079

SEQ ID NO: 8798 - protein, 336 aa, Neisseria meningitidis
MSKKRVLTGVTTTGIPHLGNYVGAIRPAVRAAQNPDTESFLFLADYHGIIKCHEPEMIHQSTQAVAATWLACGLDPERTTFYRQSDIPEVMELNWILTCITAKGLMNRAHAYKAAVQANSENNQEDPDFGVEMGLFSYPILMTADILMFNANEVPVGRDQIQHVEMARDIAGRFNHRFRELFTLPEVKIDENVELLVGLDGRKMSKSYGNTIPLWENDKKTQKSVNKIITNMKEPGEPKQPDESPLFEIYKAFSTPSETVEFTKMLADGLAWGEAKKLLAAKINAELAEPRERYNELTADPSQIEEILQAGAQKARKEARELLDKVRDAVGIRPLK

SEQ ID NO: 8799 - protein, 134 aa, Neisseria meningitidis; identical to SEQ ID NO: 4298

SEQ ID NO: 8800 - protein, 179 aa, Neisseria meningitidis; identical to SEQ ID NO: 8483

SEQ ID NO: 8801 - protein, 415 aa, Neisseria meningitidis; identical to SEQ ID NO: 2921

SEQ ID NO: 8802 - protein, 296 aa, Neisseria meningitidis
MLSYCGVLSEEKFSRYYRYGVQNNKILQYIANRERNALNFIQAFSEKLLKDSGIYPKFADFFAQPNKNTFESMKTAFTDLVIQNTPKNTEVEVRRIFTKIINPLAYKHNTFGTRKGSISNTPITLDELYYNRLNWRDKGKEKSLTRKEAQTLFADSANAANLNYLVNKATKFVKTLHKTSEVQRFDPTEANQAHHIFMASEFPDLASLPENLICLTPNQHFNLAHPSNKTTVIDKHYQRICLMAKLDSIEQDNRANTGNYDYHEFIHVLNTGFNTDQFDVSMSYETLKHRILMFDF

SEQ ID NO: 8803 - protein, 661 aa, Neisseria meningitidis; identical to SEQ ID NO: 1085

SEQ ID NO: 8804 - protein, 376 aa, Neisseria meningitidis
MIKISTRFDAGSVVVKDLTDPSNIRLALRPDNASDFAQWFYFRLQGAAYQNCIMHFDNAAEAAYPKGWEGYQACASYDRRNWFRVPTSYENGVLTVNHTPLSNSVYYAYFEPYSEEQHLNLLGDAQGSGLCRIDDLGSTVQGRDINLLTIGNQVESDLKIWITARQHPGETMAEWFVEGLLGRLLDHQDATARTLLDRATFYIVPNMNPDGSALGNLRTNAAGVNLNREWENPTVEKSPEVFFVRERMLETGVDLFLDIHGDEGLPFVFVAGTEGVPNYNPRISALETQFKTALLNASPDFQDEYGYEKDAPGQANVTLATNWVGNRFNCLAYTLEMPFKDNANLPDDDFGWNGQRSLRLGEAVLSAILNVAGDLR

SEQ ID NO: 8805 - protein, 157 aa, Neisseria meningitidis
MKKLLAAVMMAGLAGAVSAAGVHVEDGWARTTVEGMKIGGAFMKIHNDEAKQDFLLGGSSPVADRVEVHTHINDNGVMRMREVKGGVPLEAKSVTELKPGSYHVMFMGLKKQLKEGDKIPVTLKFKNAKAQTVQLEVKIAPMSAMDHGHHHGEAHQH

SEQ ID NO: 8806 - protein, 310 aa, Neisseria meningitidis
MKQNRTFTFPDFRTVYSYAPLYRLQHLKYTLRKFFGKKEIYAFEQFVNASPIRQGLFLHCPQNAYPLLREFVDRRFNCKRRLDAMTADFLMAEKLFGTDILHQMEDYRFHLVLAHLSDGISLWLNRNDNCVEEGAWSLSLRDEAGNRLYMATFAFVGTHLLTASVQGPAGEEAKDTVRRITKQLHGLRPQQLMVTALQYFAAVLGLDGAMGIAQKHQVKLRWKLKKRVKMNYDAFWQEYGASLERDGYWHLPQTPARKDLTDIESKKRSMYRKRYEMLDNMVAEMKDGLKTEARGISDGIQTEKPLRRTA

SEQ ID NO: 8807 - protein, 199 aa, Neisseria meningitidis; identical to SEQ ID NO: 360

SEQ ID NO: 8808 - protein, 170 aa, Neisseria meningitidis; identical to SEQ ID NO: 2052

SEQ ID NO: 8809 - protein, 729 aa, Neisseria meningitidis
MIYHRIAVNVPLSDGLLTYSHSEPLPQGTRVLVPFCNKTVVGIVWETDIAPDMDAARILGVQTTFSDEPPLPESWRDLLAFTSRYYHYPTGQAVFAALPQGLKETRAVEMPQPPLFYALNEAGRAQTPPPARFNKKAALWDALLSGEMTMAALKQVNAQAVKLIENWAEQGWIETTEAAKPVLRSYHGQASHSEFVLNANQQKASDAIQTALGRFRPFLLYGITGSGKTEVYFDAMAKVLAQGRQVLFLLPEINLTPQLLKRVGNRFADVPTAVLHSQMAAGRRTQDYLRAMLGQAKLVIGTRLAVFTPLPDVGLIVVDEEHDGSFKQDNELRYHARDLAVWRAKQSGCPIILGSATPSLESWHKAQSGAYRLLQLTERAHTAAQLPQVDILNVGRLKLDNGFSPQALQLLKQNFEAGGMSLVYLNRRGFAPALFCSDCGHTFGCPNCSAKMVLHQRARQLRCHHCDHREPVPFKCPDCGNQDLTAVGHGTQRVEETLRAFLPKAAVVRVDRDSTAHKNDWADLYRRIADNEIDILVGTQMLAKGHDFARLNLVIVLNADGSLYSADFRAPERLFAELMQVSGRAGRADKPGKVLIQTQLPEHPVFAAVKAQDYAVFAENELNERQMFAMPPFGFQTAVRADAPRVADAMEFLNAAKETLAPLLPESVSQFGAAPMLMVRLAERERAQIFLESTSRQDLHRAVSLWVQVLQQNRDGKIRWSVDVDPQEA

SEQ ID NO: 8810 - protein, 312 aa, Neisseria meningitidis
MRRKMLNVPKGNYDGMKGFTIIEFLVAGMLSMIVLMAVGSSYFTSRKLNDAANERLSEQQDLRNAATLIVRDARMAGSFGCFNMSEHPAIDVISDTTQQNSPFSLKRNGIDKLIPIAESSNINYQNFFQFGSALIFQYGIDDVNASTATTVVSSCAVISKPGKQIPTLEDAKKELKIPQDKEQNGNIARQRHVVNAYAVGRIAGEEGLFRFQLDDKGKWGNPQLLVKKVRRMKVRYIYVFGCPEDDDAGKEETFKYTDKFDSSTNAVTPAGVEVLLSSGTDTKIAASSDNYIYAYRIDATIRGGNVCANRTL

SEQ ID NO: 8811 - protein, 66 aa, Neisseria meningitidis; identical to SEQ ID NO: 3365

SEQ ID NO: 8812 - protein, 287 aa, Neisseria meningitidis; identical to SEQ ID NO: 2812

SEQ ID NO: 8813 - protein, 170 aa, Neisseria meningitidis
VISAFQTAGTAMTDNLIQIATPILTVIGVFVAAYGIMRNTENAKKRATIDMIMAERNNAALQEAITIVNGLAKTDGCILATYTSDTPDKKKDREAILTVLNQREFVCAGVLGGALHEKMYKDFEYSMLLRDWDNLSSFIFEIRRIRSAPTAFQEFEAVARKWKKKPLKTK

SEQ ID NO: 8814 - protein, 414 aa, Neisseria meningitidis
VIASLTGAAVGGTPVDAQTGGAVGQNAVENNLYLTSEALKKDKQTARKIYSVIKEQVKHECSSTGRITECRQNIGRIIEFTQDKRFDSRFKDLKKESLYYLNKHPDLVASYLKAEYEKLDREDKSILHRYISPGAEIVSGSLGVVLSGVAGGGSCAETFGLGCAAALVGVTSSYDHVITGTKNFGKKASEQRPTIAVQALKQLGLSEQAAEYVQFSIDLFSVGKSGGGIPKAKPVFDAKPRWEVDRKLNKLTTREQVEKNVQETRRRSQSSQFKAHAQREWENKTGLDFNHFIGGDINKKGTVTGGHSLTRGDVRVIQQTSAPDKHGVYQATVEIKKPDGSWEVKTKKGGKVMTKHTMFPKDWDEARIRAEVTSAWEKRKELEGQKWRGTSKSGVEIEGFTEPNRTAYPLYNSK

SEQ ID NO: 8815 - protein, 367 aa, Neisseria meningitidis
MSDYTQQLQDKKDHLKTLFAGLDVPEWEVYESPDKHYRMRAEFRIWHEGGEMFYAMFEKGQKAGGASLIRCDRFEAASEAVNRLMPELIAVAAQSAELRNRWYAVEFLSTLSGEMLVTMIYHKRLDNEWMQAAQALQQQLDISVIGRSRGQKIVLKQDYVTETLKVGNRDFRYRQIEGSFTQPNAAVCQKMLEWACGAAEGLDGDLLELYCGNGNFTLPLSEKFERVLATEISKTSVSAAQWNIEANRIGNIKIARLSAEEFTEAYTGKREFKRLKDGGIALTDYAFSTIFVDPPRAGIDEETLKLVSQFDNIIYISCNPETLRTNLDTLAETHTVERAALFDQFPFTHHIESGVLLKKKILGKSKR

SEQ ID NO: 8816 - protein, 112 aa, Neisseria meningitidis; identical to SEQ ID NO: 3481

SEQ ID NO: 8817 - protein, 355 aa, Neisseria meningitidis; identical to SEQ ID NO: 1236

SEQ ID NO: 8818 - protein, 233 aa, Neisseria meningitidis
MTEPAAEGGKAAKALKKYLITGILVWLPIAVTVWVVSYIVSASDQLVNLLPKQWRPQYVLGFNIPGLGVIVAIAVLFVTGLFAANVLGRQILAAWDSLLGRIPVVKSIYSSVKKVSESLLSDSSRSFKTPVLVPFPQSGIWTIAFVSGQVSNAVKAALPKDGDYLSVYVPTTPNPTGGYYIMVKKSDVRELDMSVDEALKYVISLGMVIPDDLPVKTLAGPMPSEKADLPEQQ

SEQ ID NO: 8819 - protein, 70 aa, Neisseria meningitidis; identical to SEQ ID NO: 2310

SEQ ID NO: 8820 - protein, 273 aa, Neisseria meningitidis
MAVLITGASAGFGEAMCRAFVGAGYRVIGAARRADRLQALADELGALFYPLEMDVSRRESVENALNGIPDEFSDIDCLINNAGLALGLDTADKADFEDWETMIQTNVLGLTFLTRKILPNMVARGGGYVMNLGSIAGNYAYAGSNVYGATKAFVRQFSLNLRAELADKNIRVTNIEPGLCGNTEFSNVRFKGDDEKAAGVYEGVEFIRPEDIAETALWLYRRPAHMNVNTIEIMPVAQTFAGMKVIKKAVPEVREDFEKQSMSLFSRIRSWFK

SEQ ID NO: 8821 - protein, 1392 aa, Neisseria meningitidis
MSYSFTEKKRIRKSFAKRENVLEVPFLLATQIDSYAKFLQLENAFDKRTDDGLQAAFNSIFPIVSHNGYARLEFVHYTLGEPLFDIPECQLRGITYAAPLRARIRLVILDKEASKPTVKEVRENEVYMGEIPLMTPSGSFVINGTERVIVSQLHRSPGVFFEHDKGKTHSSGKLLFSARIIPYRGSWLDFEFDPKDLLYFRIDRRRKMPVTILLKALGYNNEQILDIFYDKETFYLSSNGVQTDLVAGRLKGETAKVDILDKEGNVLVAKGKRITAKNIRDITNAGLTRLDVEPESLLGKALAADLIDSETGEVLASANDEITEELLAKFDINGVKEITTLYINELDQGAYISNTLRTDETAGRQAARVAIYRMMRPGEPPTEEAVEQLFNRLFFSEDSYDLSRVGRMKFNTRTYEQKLSEAQQNSWYGRLLNETFAGAAEKGGYVLSVEDIVASIATLVELRNGHGEVDDIDHLGNRRVRSVGELTENQFRSGLARVERAVKERLNQAESENLMPHDLINAKPVSAAIKEFFGSSQLSQFMDQTNPLSEVTHKRRVSALGPGGLTRERAGFEVRDVHPTHYGRVCPIETPEGPNIGLINSLSVYARTNDYGFLETPYRRVIDGKVTEEIDYLSAIEEGRYVIAQANADLDSDGNLIGDLVTCREKGETIMATPDRVQYMDVATGQVVSVAASLIPFLEHDDANRALMGANMQRQAVPCLRPEKPMVGTGIERSVAVDSATAIVARRGGVVEYVDANRVVIRVHDDEATAGEVGVDIYNLVKFTRSNQSTNINQRPAVKAGDVLQRGDLVADGASTDLGELALGQNMTIAFMPWNGYNYEDSILISEKVAADDRYTSIHIEELNVVARDTKLGAEDITRDIPNLSERMQNRLDESGIVYIGAEVEAGDVLVGKVTPKGETQLTPEEKLLRAIFGEKASDVKDTSLRMPTGMSGTVIDVQVFTREGIQRDKRAQSIIDSELKRYRLDLNDQLRIFDNDAFDRIERMIVGQKANGGPMKLAKGSEITTEYLAGLPSRHDWFDIRLTDEDLAKQLELIKVSLQQKREEADELYEIKKKKLTQGDELQPGVQKMVKVFIAIKRRLQAGDKMAGRHGNKGVVSRILPVEDMPYMADGRPVDIVLNPLGVPSRMNIGQILEVHLGWAAKGIGERIDRMLKEQRKAGELREFLNRLYNGSGKKEDLDSLTDEEIIELASNLRKGASFASPVFDGAKESEIREMLNLAYPSEDPEVEKLGFNDSKTQITLYDGRSGEAFDRKVTVGVMHYLKLHHLVDEKMHARSTGPYSLVTQQPLGGKAQFGGQRFGEMEVWALEAYGAAYTLQEMLTVKSDDVNGRTKMYENIVKGEHKIDAGMPESFNVLVKEIRSLGLDIDLERY

SEQ ID NO: 8822 - protein, 604 aa, Neisseria meningitidis
MSEHDMQNTNPPLPPLPPEITQLLSGLDAAQWAWLSGYAWAKAGNGASAGLPALQTALPAAEPFSVTVLSASQTGNAKSVADKASDSLEAAGIQVRRAELKDYKAKNIADERRLLLVTSTQGEGEPPEEAVVLHKLLNGKKAPKLDKLQFAVLGLGDSSYPNFCRAGKDFDRRFEELGAKRLLERVDADLDFAAAADGWTGRIVARLKEEAAKNRATPAPQTTPPAGLQTAPDGRYCKADPFPAALLANQKITARQSDKDVRHIEIDLSGSDLHYLPGDALGVWFDNDPALVREILDLLGIDPATEIQAGGKTLPVASALLSHFELTQNTPAFVKGYAPFADDDELDRIAADNAVLQGFVQSTPIADVLHRFPAKLTAEQFAGLLRPLAPRLYSISSSQAEVGDEVHLTVGAVRFEHEGRARAGGASGFLADRLEEDGTVRVFVERNDGFRLPEDSRKPIVMIGSGTGVAPFRAFVQQRAAENAEGKNWLIFGNPHFARDFLYQTEWQQFAKDGFLHRYDFAWSRDQEEKIYVQDKIREQAEGLWQWLQEGAHIYVCGDAAKMAKDVEAALLDVIIGAGHLDEEGAEEYLDMLREEKRYQRDVY

SEQ ID NO: 8823 - protein, 107 aa, Neisseria meningitidis; identical to SEQ ID NO: 1970

SEQ ID NO: 8824 - protein, 68 aa, Neisseria meningitidis; identical to SEQ ID NO: 2429

SEQ ID NO: 8825 - protein, 197 aa, Neisseria meningitidis; identical to SEQ ID NO: 1551

SEQ ID NO: 8826 - protein, 321 aa, Neisseria meningitidis
VKPRFYWAACAVLLTACSPEPAAEKTVSAASASAATLTVPTARGDAVVPKNPERVAVYDWAALDTLTELGVNVGATTAPVRVDYLQPAFDKAATVGTLFEPDYEALHRYNPQLVITGGPGAEAYEQLAKNATTIDLTVDNGNIRTSGEKQMETLARIFGKEARAAELKAQIDALFAQTREAAKGKGRGLVLSVTGNKVSAFGTRSRLASWIHGDIGLPPVDESLRNEGHGQPVSFEYIKEKNPDWIFIIDRTAAIGQEGPAAVEVLDNALVRGTNAWKRKQIIVMPAANYIVAGGSRQLIQAAEQLKEAFEKAEPVAAGKE

SEQ ID NO: 8827 - protein, 226 aa, Neisseria meningitidis
MTYTITPIGTARSPYKQKFGIARQPGLVSAAEVCIELNPEFTADSVRGLEDFDYVWISFIFHGVLDEGWAQMVRPPRLGGKQKMGVFATRSPHRPNHLGLSLLKLNRIETGKPVRLYCSGADLLDGTPIVDIKPYIPFVESKPDAASGFVSGKPVELEVVWQENIGAENLSANTKNLISQSIAQDPRPAYQNIPERIYVMNIADYEIRFQIEENRATVIDLSPTPL

SEQ ID NO: 8828 - protein, 83 aa, Neisseria meningitidis; identical to SEQ ID NO: 5347

SEQ ID NO: 8829 - protein, 545 aa, Neisseria meningitidis; identical to SEQ ID NO: 3410

SEQ ID NO: 8830 - protein, 458 aa, Neisseria meningitidis
MKHIHIIGIGGTFMGGIAAIAKEAGFEVSGCDAKMYPPMSTQLEALGIGVYEGFDTAQLDEFKADVYVIGNVAKRGMDVVEAILNRGLPYISGPQWLAENVLHHHWVLGVAGTHGKTTTASMLAWVLEYAGLAPGFLIGGVPENFGVSARLPQTPRQDPNSQSPFFVIEADEYDTAFFDKRSKFVHYRPRTAVLNNLEFDHADIFADLGAIQTQFHYLVRTVPSEGLIVCNGRQQSLQDTLDKGCWTPVEKFGTEHGWQAGEANADGSFDVLLDGKTAGRVKWDLMGRHNRMNALAVIAAARHAGVGIQTACEALGAFKNVKRRMEIKGTANGITVYDDFAHHPTAIETTIQGLRQRIGGARILAVLEPRSNTMKLGTMKSALPVSLKEADQVFCYAGGVDWNVAEALAPLGGRLHVGKDFDAFVAEIVKNAEAGDHILVMSNGGFGGIHGKLLDALR

SEQ ID NO: 8831 - protein, 433 aa, Neisseria meningitidis
MTESVRLPVARLKPSTVALPGSKSISNRTLLLAALSDNACEIHSLLKSDDTDRMLEALDKLGVQIEYLAEDRLKVHGTGGRFPNRTADLFLGNAGTAFRPLTAALAVLGGDYHLHGVPRMHERPIGDLADALRIAGADVEYLGKEHYPPLHIGKRQDNGERVIPIKGNVSSQFLTALLMALPLTGQAFEIRMVGELISKPYIDITLKLMAQFGVQVANENYRVFKIPADAHYHAPEHLHVEGDASSASYFLAAGLIAATPVRVTGIGANSIQGDVAFARELEKIGADVVWGENFVEVSRPKERAVQSFDLDANHIPDAAMTLAIVALATGQTCTLRNIGSWRVKETDRIAAMANELRKLGAKVVEEAEAIHITPPKTLTPDAVIDTYDDHRMAMCFSLVSLLGVPVVINDPKCTHKTFPTYFDVFSSLTETTE

SEQ ID NO: 8832 - protein, 370 aa, Neisseria meningitidis; identical to SEQ ID NO: 3173

SEQ ID NO: 8833 - protein, 75 aa, Neisseria meningitidis
MFKSIKTNVRKAGAVLALATLSAPTWADGIEGVANGIVTEINKVVPVVSSVGVALLSVYVLVKAFRLVSGFVAGR

SEQ ID NO: 8834 - protein, 331 aa, Neisseria meningitidis; identical to SEQ ID NO: 1014

SEQ ID NO: 8835 - protein, 633 aa, Neisseria meningitidis
MTTPKKTAKTSGNEARELADLSEDIGIRFKYPNSERVYLQGSRDDIRVPLREIRQDDTYTAQGAEANPPIPVYDTSGVYGDPAAHIDLKQGLPHIRTAWLNERGDTEILPKLSSEYGIERAHDPKTAHLRFNQITRPRRAKSGGNVTQLHYARRGIITPEMEFVAIRERLKLDELSQKSEYAKLLKQHAGQSFGANIPTHPDQITPEFVRREIAAGRAIIPANINHPELEPMIIGRNFRVKINGNLGNSAVTSSLTEEVEKMVWSLRWGADTIMDLSTGAHIHETREWIIRNAPVPIGTVPIYQALEKTGGIAEDLTWDLFRDTLIEQAEQGVDYFTIHAGVLLRYVPMTADRLTGIVSRGGSIMAKWCLAHHRENFLYTHFDEICEIMKAYDVSFSLGDGLRPGCIADANDESQFAELHTLGELTSKAWKHDVQVMIEGPGHVPLQRVKENMTEELQHCFEAPFYTLGPLVTDIAPGYDHITSGIGAANIGWYGTAMLCYVTPKEHLGLPDKEDVRTGIITYKLAAHAADLAKGWPGAQLRDNALSKARFEFRWRDQFRLSLDPERAESFHDETLPAEGAKIAHFCSMCGPKFCSMKITQEVRDYADKQKAQRQGMEEKAVEFVKKGAKIYS

SEQ ID NO: 8836 - protein, 718 aa, Neisseria meningitidis
MSVFRINMTAATVLAALSSSVFAAQTADLETVHIKGQRSYNAIATEKNGDYSSFAATVGTKIPASLREIPQSVSIITNQQVKDRNVDTFDQLARKTPGLRVLSNDDGRSSVYARGYEYSEYNIDGLPAQMQSINGTLPNLFAFDRVEVMRGPSGLFDSSGEMGGIVNLVCKRPAKAFQGHAAAGFGTHKQYKAEADVSGSLNSDGSVRGRVMAQTVGASPRPAEKNNRHETFYAAADWDINPDTVLGAGYLYQQRHLAPYNGLPADANNKLPSLPQHVFVGADWNKFKMNSHDVFADLKHYFGNGGYGKVGMRYSDRDADSNYAFAGSKLGMKTLAGRPGCNTADDKACAVGLGTEIKQKALAFDASYSRPFRLGNTANEFVIGADYNRFRSTNEQGRTTLYARGGLALNEFRSIPQVDLIANARKGVRGYSHTVATENLDEFGIYGKSTFHPADGLSLIGGGRLGHYKIELGEGKTLHKASKTKFTGYAGAVYDLNDNNSLYLSLSQLYTPQTNLDADGKLLKPRQGNQFEVGYKGSYMDDRLNARVSFYRMKDKNAAAPLNPNNKKTRYAALGKRVMEGVETEISGAVTPKWQIHAGYSYLHSQIKTASNSRDDGIFLLMPKHSANLWTTYQVTPELTIGGGVNAMSGITSSAGMHAGGYATFDAMAAYRFTPKLKLQINADNIFNRHYYARVGGANTFNIPGSERSLTANLRYSF

SEQ ID NO: 8837 - protein, 136 aa, Neisseria meningitidis; identical to SEQ ID NO: 1274

SEQ ID NO: 8838 - protein, 597 aa, Neisseria meningitidis
MKNIRNFSIIAHIDHGKSTLADRFIQYCGGLDLREMSTQVLDSMDIEKERGITIKAQTAALNYKARDGQVYQLNLIDTPGHVDFSYEVSRSLSACEGALLVVDASQGVEAQTVANCYTAIDLGVEVVPVLNKIDLPAADPERVEQEIEDIIGIDAVGAVQCSAKSGIGVEDVLEEIVAKIPAPTGDENAPLQAVIVDSWFDNYVGVVMLIRVKNGTIKLKDKVRFMSTKAETQVEQLGVFTPKSVQKQELKAGEVGFLITGVKELGQAKVGDTVTLVANPATEPLPGFQEVQSQVFAGLYPVESHDYEALRDALEKLQLNDASLKFEPEVSQALGFGFRCGFLGLLHLEIVQERLEREFDMDLITTAPTVVYEVVLKSGEKIEVENPSKLPDIGSIETILEPIITATILVPQEYVGNVMTLCNQKRGVQVNMQYMGRQVMLTYDLPMNEVVMDFFDKLKSTSRGYASLDYHFKEFQPSDLIKLDIMVNGEKVDALSLIVHRQSAVHRGRELASKMRELIPRQMFDIAVQAAIGSQIIARENVKALRKNVLAKCYGGDITRKKKLLEKQKAGKRRMKQVGNVEIPQSAFLAILQVSDK

SEQ ID NO: 8839 - protein, 192 aa, Neisseria meningitidis; identical to SEQ ID NO: 2909

SEQ ID NO: 8840 - protein, 468 aa, Neisseria meningitidis
MEKNTLSARAPSPWLPLLLAIAIFMQMLDATILNTALPEIAADLNESPLNMQLAVISYTLTVALLIPLSGYLADRFGTKKVFFGSIAVFMLGSALCAASGSLFELTLSRVVQGIGGSMLVPIPRLTILRVYDKSKLLNAINYAVMPALIGPVLGPLAGGYLVEYASWHWIFLLNLPIGLLGFILGRNIMPDIKGSNISLDFKGYLIFSAAACLLLLSAESLSHALPPYFALLPLCGGLLFARRYFRHMKTASKPIYSADLFLIRTFRLGLAGNLFSRLGISSIPFLMPLMFQVAFGFGASLSGWLVAPVALSSLLVKPLIAPLMKRFGYRTVLLWNTKLLAAFIMLLALPDGNSPLWIWIFLSLAIGACNSLQFSAMNTLTLADLRPQQTGSGNSLMAVNQQLAISMGIVVGALILKNWTFLIPASSGLHSAFRMTLLSIGGITLASSLVFKRLHVSDGANLTRNTPS

SEQ ID NO: 8841 - protein, 431 aa, Neisseria meningitidis; identical to SEQ ID NO: 3103

SEQ ID NO: 8842 - protein, 424 aa, Neisseria meningitidis
MKTLQDWLSHLETAHSGGLIDMGLERVGEVKKRMKLTPQCPVVVVAGTNGKGSVCAYLTQIYKQAGFKVGTLTSPHLLRYNERIAVNAEPVSDDTIIASFERIEAARGEISLTYFEFNALAAVDIFMREQVDVMILEVGLGGRLDAVNAFDGDCAVVTSVDLDHQAFLGDTVEQVGFEKAGVFRSGKPAICGQNPAPASLVAHAEAIGAKLLMVQRDFEFHALENIQWNYRFHPQHSDDPTRNRNALPFPALRGAYQLSNAACTLTVLECLNDKLPVDIGAIKRGLLLVENPGRFQVLPGRPLTVLDVGHNPHAARALRRSLINLAFAQKRTAVFSMLSDKDIDGVLEIVKDQFDEWYIAPLDVPRGMTLESLQNKLHEHGIENIQTFAAVREAYRAAASKAGENDRIVVFGSFHTVADVMSVL

SEQ ID NO: 8843 - protein, 347 aa, Neisseria meningitidis
MIPATYTLSQITARLGGEWRGEDISVTAVRPLADAQAEHISFLANPKYKAEVHDSSAGAVIVSAKAADGFEGRNLIVADDPYLYFAKVARLFSPVVKARGGIHPTAVVEPGATVPASCEIGANAYIGANTVLGEGCRILANAVVQHDCKLGDEVVMHPNAVVYYGCTLGRRVEIHSGAVIGADGFGLAFAGDSWFKIPQTGAVTLGDDVEIGSNTNIDRGAMSDTTVGNGTKIDNQVQIGHNCKIGSHTVIAAKTGISGSVTIGSYCIIGGGVGTVGHIEIADKTTIGGGTSVTHSITESGKHLAGIFPMSTHKEWARNAVYIHRLSEMNKRLKTLEQQLSDGKDTQ

SEQ ID NO: 8844 - protein, 115 aa, Neisseria meningitidis; identical to SEQ ID NO: 1985

SEQ ID NO: 8845 - protein, 286 aa, Neisseria meningitidis; identical to SEQ ID NO: 5322

SEQ ID NO: 8846 - protein, 116 aa, Neisseria meningitidis; identical to SEQ ID NO: 4624

SEQ ID NO: 8847 - protein, 213 aa, Neisseria meningitidis; identical to SEQ ID NO: 6185

SEQ ID NO: 8848 - protein, 96 aa, Neisseria meningitidis; identical to SEQ ID NO: 2105

SEQ ID NO: 8849 - protein, 82 aa, Neisseria meningitidis; identical to SEQ ID NO: 2740

SEQ ID NO: 8850 - protein, 522 aa, Neisseria meningitidis; identical to SEQ ID NO: 2643

SEQ ID NO: 8851 - protein, 280 aa, Neisseria meningitidis; identical to SEQ ID NO: 3261

SEQ ID NO: 8852 - protein, 501 aa, Neisseria meningitidis
MCCSLSFAEPARIDDRIIKFRPSKSKFFESPGYRKINNEFSKFTEAANVEHIPTGAKARINAKITASVSRAAVLSGVGKLVRQGAKFSTRAVPYVGTALLAHDVYETFKEDIQARGYQYDTETDKFVKGYEYSNCLWYEDERRINRTYGCYGVDSSIMRLMSDYSRFPEVKELMESQMERLARPYWEKLRNRPDMYYFKNYNFKRCYFGLNGGDCLVAKGDDGRTFISFSLQGNSKYKEEMDAKKLEEILSLKVDANPDKYIKATGYPGYSEKVEVAPGTKVNMGPVTDRNGNPVQVVATFGRDSQGNTTVDVQVIPRPDLTPGSAEAPNAQPLPEVSPAENPANNPAPNENPGTRPNPEPDPDLNPDANPDTDGQPGTSPDSPAVPDRPNGRDGKDGGLLCKFFPDILACDRLPEPNPAEDLNLPSETVNVEFKKSGIFQDSAQCPAPVTFTITVLDSSKQFAFSFENACTIAERLRYMLLALAWAVAAFFCIRTVSREV

SEQ ID NO: 8853 - protein, 398 aa, Neisseria meningitidis; identical to SEQ ID NO: 3453

SEQ ID NO: 8854 - protein, 102 aa, Neisseria meningitidis; identical to SEQ ID NO: 427

SEQ ID NO: 8855 - protein, 316 aa, Neisseria meningitidis; identical to SEQ ID NO: 5301

SEQ ID NO: 8856 - protein, 404 aa, Neisseria meningitidis
MEWEFNSYYTLIAATLVLLVGKFLVQKIKFLRDFNIPEPVAGGLVAAIILFALHEAYGVSFKFEKPLQNAFMLIFFTSIGLSADFSRLKAGGLPLVVFTAIVGGFILVQNFVGVGLATALGLDPLIGLITGSVSLTGGHGTSGAWGPNFETQYGLVGATGLGIASATFGLVFGGLIGGPVARRLINKMGRKPVENKKQDQDDNADDVFEQAKRTRLITAESAVETLAMFAACLAFAEIMDGFDKEYLFDLPKFVWCLFGGVVIRNILTAAFKVNMFDRAIDVFGNASLSLFLAMALLNLKLWELTGLAGPVTVILAVQTVVMVLYATFVTYIFMGRDYDAAVLAAGHCGFGLGATPTAVANMQSVTHTFGASHKAFLIVPMVGAFFVDLINAAILTGFVNFFKG

SEQ ID NO: 8857 - protein, 242 aa, Neisseria meningitidis; identical to SEQ ID NO: 2996

SEQ ID NO: 8858 - protein, 108 aa, Neisseria meningitidis
LGEKIKDGKNQKTVLSREEEQKICNTFTHKQAVEDFSVVIGYDEIKAKNHSLSAGQYFEVKIDYVDISADEFAQKMAGFSADLDKLFAESAELEKEIKDRLAMLKFNS

SEQ ID NO: 8859 - protein, 116 aa, Neisseria meningitidis
  misc_feature 112, 113, 114: 'Xaa' is any amino acid
MTPIISSPINVSIISPLFYFKQKTDRAGKTAHRRGISLAFYFFILKQVNRSFPPIYACRHSCIRPSFHGGNRYGTTGKPVSGRRGGIHPGAPIQTKPPLSLRSAGRAVHAGXXXHT

SEQ ID NO: 8860 - protein, 140 aa, Neisseria meningitidis
MKITKIFTFDSSHMLDGHDGKCQNLHGHTYKLEITVSDGIIKGGAKDGMVMDFTDLKAIVKQHITDPFDHAFIYHGGNSRESQIAALLEGWNMKTLRLPCRTTAENMAVEMYDRLKNAGLNVCRVKLWETPTSCAEYEGE

SEQ ID NO: 8861 - protein, 161 aa, Neisseria meningitidis; identical to SEQ ID NO: 3482

SEQ ID NO: 8862 - protein, 205 aa, Neisseria meningitidis
MTFPPLKSPLKFYAVVPTADWVGRMVKAGADTVQLRCKTLHGDELKREIARCVAACQGSRTQLFINDHWREAIEAGAYGVHLGQEDMDTADLAAIAAAGLRLGLSTHSVAELDRALSVHPSYVASGAIFPTTTKQMPTAPQGLDKLCEYVKQAGGTPVVAIGGIDLNNARAVLATGVSSLAAVRAVTEAENPEAVVKAFQALWDG

SEQ ID NO: 8863 - protein, 129 aa, Neisseria meningitidis; identical to SEQ ID NO: 2271

SEQ ID NO: 8864 - protein, 527 aa, Neisseria meningitidis
MPNKKKKAAFARAATENGVPDVSNIKNSYDDLMYESKAFSQTAINALEARARMMGLQPAPAANAKVLELGCSMGGNIITQALYYPDAEFVGIDLSGRQVAQGNAIIEKMGLKNVRLEEKDILTVDESFGKFDYIIVHGIWSWVPDAVKDKIFSICRNNLTKHGIAYISYNVYPGWKRQEQLREIMYFAGRDVLEEPLEARTRKGLDALKALAEILENDKGLGGGGKLPAIQKILNHNTYYVAHEYMEIFNDPIYVNGFIEWANRHRLAYIGDTDLHASFVSWMAEHTRERILALAGGDYIAKEFYSDILSDRQFRRSLLCREEVGDTVRRDESVAVEVIESLNFRPARGETINFDENDTLLSGIRDVMKTGEAFKTEDVAENLARRFPGLTFDRMKINSQLLLQTILGRFSVSSDNAGKQFFEDHKTYVPARFTDYVAAFVEHGAEAFVQPANRYNESTPSFGYGHLYIMRQLSRPTSKQALIETVAENLNIVSTTPDGLTFHPPAEVYVEEILADLADRHFLVSAD

SEQ ID NO: 8865 - protein, 363 aa, Neisseria meningitidis
MSHISPIPEILADIKAGKMVIITDAEDRENEGDLLMAAQFVTPEAINFMIKHARGLVCLPMDGEMVEKLGLPMMTQKNGAQYGTNFTVSIEAAHGITTGISAADRALTIQTAVSPTAKPADIVQPGHIFPLRAQKGGVLVRAGHTEAGVDLAQMNGLIPAAVICEIINDDGTMARMPELMKFAEEHNLKIGTIADLIEYRSRTESLLEDMGNAPVQTPWGEFQQHVYVDKLSGETHLALVKGTPAADTETLVRVHEPFSVMDFIQANPRHSWSLPKALERVQQAESGVVILLHRTEDGASLLDRTLPKGANQAYKWDSKSYGIGAQILVGLNVKKLRVLGQPSSFTGLTGFGLEVVGFEEAEK

SEQ ID NO: 8866 - protein, 868 aa, Neisseria meningitidis
MAANQRYRKPLPGTDLEYYDARAACEDIKPGSYDKLPYTSRILAENLVNRADKVDLPTLQSWLGQLIEGKQEIDFPWYPARVVCHDILGQTALVDLAGLRDAIAEKGGDPAKVNPVVQTQLIVDHSLAVECGGYDPDAFRKNREIEDRRNEDRFHFINWTKTAFENVDVIPAGNGIMHQINLEKMSPVVQVKNGVAFPDTCVGTDSHTPHVDALGVISVGVGGLEAETVMLGRASMMRLPDIVGVELNGKRQAGITATDIVLALTEFLRKERVVGAFVEFFGEGARSLSIGDRATISNMTPEFGATAAMFAIDEQTIDYLKLTGRDDAQVKLVETYAKTAGLWADALKTAVYPRVLKFDLSSVTRNMAGPSNPHARFATADLASKGLAKPYEEPSDGQMPDGAVIIAAITSCTNTSNPRNVVAAALLARNANRFGLKRKPWVKTSFAPGSKVAEIYLKEAGLLPEMEKLGFGIVAFACTTCNGMSGALDPKIQKEIIDRDLYATAVLSGNRNFDGRVHPYAKQAFLASPPLVVAYALAGSIRFDIENDVLGVADGKEIRLKDIWPADEEIDAVVAEYVKPQQFRDVYVPMFDTGTAQKAPSPLYDWRPMSTYIRRPPYWEGALAGERTLSGMRPLAILPDNITTDHLSPSNAILASSAAGEYLAKMGLPEEDFNSYATHRGDHLTAQRATFANPKLFNEMVRNEDGSVRQGSLARVEPEGQTMRMWEAIETYMNRKQPLIIIAGADYGQGSSRDWAAKGVRLAGVEAIVAEGFERIHRTNLIGMGVLPLQFKPGTNRHTLQLDGTETYDVVGERKPRCDLTLVIHRKNGETVEVPVTCRLDTAEEVLVYEAGGVLQRFAQDFLEGNAA

SEQ ID NO: 8867 - protein, 268 aa, Neisseria meningitidis
MSTFFRQTAQAMIAKHIDRFPLLKLDQVIDWQPIEQYLNRQKTRYLRDHRGRPAYPLLSMFKAVLLGQWHSLSDPELEHSLITRIDFNLFCRFDELSIPDYSTLCRYRNWLAQDDTLSELLELINRQLTEKGLKIEKASAAVVDATIIQTAGSTQRQAIEVDEEGQINGQTTPSKDKDARWIKKNGLYKLGYKQHTRTDAEGYIEKLHITPANAHECKHLSPLLEGIAESTTVYADKGYDSAENRQHLKEHQLLDGIMRGQPISDCSK

SEQ ID NO: 8868 - protein, 64 aa, Neisseria meningitidis; identical to SEQ ID NO: 2003

SEQ ID NO: 8869 - protein, 179 aa, Neisseria meningitidis; identical to SEQ ID NO: 2726

SEQ ID NO: 8870 - protein, 113 aa, Neisseria meningitidis; identical to SEQ ID NO: 118

SEQ ID NO: 8871 - protein, 125 aa, Neisseria meningitidis; identical to SEQ ID NO: 1050

SEQ ID NO: 8872 - protein, 268 aa, Neisseria meningitidis
MKKTLTLLAVSALFATSAHAHRVWVETAHTHGGEYLKADLGYGEFPELEPIAKDRLHIFSKPMQLVTEKGKENMIQRGTYNYQYRSNRPVKDGSYLVIAEYQPTFWSKNKAGWKQAGIKEMPDASYCEQTRMFGKNIVNVGHESADTAIITKPVGQNLEIVPLDNPANIHVGERFKVRVLFRGEPLPNATVTATFDGFDTSDRSKTHKTEAQAFSDSTDDKGEVDIIPLRQGFWKANVEHKADFPDQSVCQKQANYSTLTFQIGHSHH

SEQ ID NO: 8873 - protein, 79 aa, Neisseria meningitidis; identical to SEQ ID NO: 1083

SEQ ID NO: 8874 - protein, 657 aa, Neisseria meningitidis
MHPIETPDKTFHDGDGVSELGTILPAWWLNQVQSELLAVLTAAGIQPDKSQPNQLLAALNRLAVVTTGNQEIGGQKTFTAQTQFQSGIHLSANQTNWNGGHKAYIGADADNAHIVFGDDTLRLHGANNRISYNNHDIFHKANKPRFAEDIEGKPNTLSGYGIGNFKVETFRGDLNTLKTDGIYSLSTAVGSSNLPVENTACHIQVIAGTKHGWCRQLGYPAYTSDVYERHQTSSANDNWSAWKKLNSDGIPVGAIVSFPKAVRNPAGYLKANGTTFAQNTFPDLYRALGNSNRLPDLSRTDIGMTAWFPSDQIPTDWLAFDDIRTRVTETAYPELYRLLTGKYGSIQNVPQAEDRFIRNAGNSLAVGTKQEDEIKRHVHKVFSHWTNHTDTAAVGYEDHNERQRSALVSTWTDGDLNDNGFLTPRPDSKMATGGDENRPKALVLKLCIKAADTLGEAVFWIKSHGETINAGALDAGTLAQNLQDKADRAHTHTAAQIQGLDEKISTAVAAQFTRQTIGGVDIVRFPDGTMIQTGSYRFTRSGGPIENEVVFPVAFADGNVKCFVSERHSGRVTGDRRQHNWLFIRAKNHAAAIITNWYEGSCDWMAIGKAASGNAASSPIGPEIPETNEEPQRESGRTSTGPRNRRRRDGLLEALQD

SEQ ID NO: 8875 - protein, 92 aa, Neisseria meningitidis; identical to SEQ ID NO: 752

SEQ ID NO: 8876 - protein, 358 aa, Neisseria meningitidis; identical to SEQ ID NO: 96

SEQ ID NO: 8877 - protein, 255 aa, Neisseria meningitidis; identical to SEQ ID NO: 3724

SEQ ID NO: 8878 - protein, 144 aa, Neisseria meningitidis
VAKKIIGYIKLQIPAGKANPSPPVGPALGQRGLNIMEFCKAFNAATQGMEPGLPIPVVITAFADKSFTFVMKTPPASILLKKAAGLQKGSSNPLTNKVGKLTRAQLEEIAKTKEPDLTAADLDAAVRTIAGSARSMGLDVEGVV

SEQ ID NO: 8879 - protein, 206 aa, Neisseria meningitidis
MKPHNLFQFLAVCSLTVSVASAQAGAVDALKQFNNDADGISGSFTQTVQSKKKTQTAHGTFKILRPGLFKWEYTSPYKQTIVGDGQTVWLYDVDLAQVTKSSQDQAIGGSPAAILSNKTALESSYTLKEDGSSNGIDYVLATPKRNNAGYQYIRIGFKGGNLAAMQLKDSFGNQTSISFGGLNTNPQLSRGAFKFTPPKGVDVLSN

SEQ ID NO: 8880 - protein, 59 aa, Neisseria meningitidis; identical to SEQ ID NO: 642

SEQ ID NO: 8881 - protein, 163 aa, Neisseria meningitidis; identical to SEQ ID NO: 684

SEQ ID NO: 8882 - protein, 332 aa, Neisseria meningitidis
VAAHIGRIDTDAPLKPLYVIHGEEELLRIEALDALRAAAKKQGYLNREVYTADNAFDWNELLQTAGSAGLFADLKLLELHIPNGKPSKTGGEALQDFAARLPEDTVTLVLLPKLEKTQLQSKWFAALAAKGEVWEAKPVGAAALPQWIRGRLDKIGLGIGADALALFAERVEGNLLAARQEIDKLALLYPKGHTVNIDEAQTAVANVARFDAFQLAGAWMKGDVLRVCRLLDGLREEGEEPVLLLWAVAEDVRTLIRLAAALKQGQSIQSVRNSLRLWGDKQTLAPLAVKRISVVRLLDALKTCAQIDRIIKGAEEGDAWTVFKRLVVSLAE

SEQ ID NO: 8883 - protein, 157 aa, Neisseria meningitidis
MKKQITSAVMMLSMIAPAMANGLDNQAFEKYVFHTQADAPMQLAELSQKEMKETEGAFLPIVAGALMGGAISAWANHGISKIKTGQFASTRSTLAATAGGMIGGGYSSAMLRGAGITTSVFARSAWKGGNAIPNAVIRANGAALNQSSSAAMGKHRR

SEQ ID NO: 8884 - protein, 214 aa, Neisseria meningitidis; identical to SEQ ID NO: 3176

SEQ ID NO: 8885 - protein, 122 aa, Neisseria meningitidis; identical to SEQ ID NO: 2347

SEQ ID NO: 8886 - protein, 791 aa, Neisseria meningitidis
MNKNIKSLNLREKDPFLSREKQRYEHPLPSREWIIELLERKGVPSKIESLARELSITEDEYVFFERRLKAMARDGQVLINRRGAVCAADKLDLVKCRVEAHKDGFGFAVPLMPTGEGDFVLYERQMRGVMHGDIVTVRPVGIDRRGRCEGTVLDIVERAQSKVVGRFYMDRGVAILEPEDKRLNQSIVLEPDGVARFKPESGQVIVGEIEVYPEQNRPAVAKIIEVLGDYADSGMEIEIAVRKHHLPHQFSEACAKAVKKIPDHVRKSDLKGRVDLRDLPLVTIDGETARDFDDAVFAEKIGRNYRLVVAIADVSHYVRPDDAIDTDAQERSTSVYFPRRVIPMLPENLSNGICSLNPNVERLCMVCDMVITYAGNIKEYRFYPAVMRSHARLTYNQVWKWLSGGIGHPFKAQIDTLYKLFKILQKKRFERGAVEFDSIETQMLFDDNGKIEKIVPVVRNDAHKLIEECMLAANVCAADFLLKNKHTALFRNHLGPTPEKLAALREQLGLLGLQLGGGDNPSPKDYAALAGQFKGRPDAELLQVMMLRSMQQAVYEPHCDGHFGLAYEAYAHFTSPIRRYPDLTVHRAIKAVLNQQTYTPKKSWQALGVHTSFCERRADDASRDVENWLKTYYMRDKVGEVFEGKISGMTSFGIFVTLDGIHIDGLVHISDLGEDYFNFRPEIMAIEGERSGIRFNMGDRVAVRVARADLDDGKIDFVLIAEGSGRGRKAKSSASVKPAGTAGKGKPKTAAEKKTARGGKVRGRGASAAAESGKKAKKPVPIKVKKRKGKS

SEQ ID NO: 8887 - protein, 191 aa, Neisseria meningitidis
VDVQVIPRPDLTPGSAEAPNAQPLPEVSPAENPANNPAPNENPGTRPNPEPDPDLNPDANPDTDGQPGTSPDSPAVPDRPNGRDGKDGGLLCKFFPDILACDRLPEPNPAEDLNLPSETVNVEFKKSGIFQDSAQCPAPVTFTITVLDSSKQFAFSFENACTIAERLRYMLLALAWAVAAFFCIRTVSREV

SEQ ID NO: 8888 - protein, 675 aa, Neisseria meningitidis; identical to SEQ ID NO: 3019

SEQ ID NO: 8889 - protein, 327 aa, Neisseria meningitidis; identical to SEQ ID NO: 2154

SEQ ID NO: 8890 - protein, 178 aa, Neisseria meningitidis
VDLREVKLGGETIYEGGFVSISKDKVRLPNGNEGQRIVIRHPGAACVLAVTDEGKVVLVRQWRYAANQATLELPAGKLDVAGEDMAACALRELAEETPYVADSVRLLYSFYTAVGFCNEKMYLFEAEGVRLGSTLANDEDEITETVLMSKEEVRQALANDEIKDGKTLIGLQYWLMKD

SEQ ID NO: 8891 - protein, 553 aa, Neisseria meningitidis
MTESITRDSMQYDVVIVGAGPSGLSAAIKLKQLAEQNGREISVCVVEKGSEAGAHSLAGAVIDPIALNELIPDWKEKGAPLTRTVTQDKVLFLTEKKAFNLPITPNFDNHGNYIVSLGEVVRWLAEQAENLGVEIYPGFAAAEVLYHKDGSVKGIATGNMGVGKNGEPTDSFQPGMELWARQTLFAEGCRGSLSKQIIERFKLDQNSQPQTYGLGIKEVWEVPSEQHQPGLVVHSAGWPLDSKTYGGAFVYHFDDNKVAVGFVVGLDYQNPYLSPFEEFQRFKTHPEIRKTFEGGRRIAYGARSLIEGGFQSLPKLSFKGGVLVGDAAGFLNMPRIKGIHTAMKSAMLAAEAVFPLLENLEEVENFDSGKEAADYQQRFEQSWLYQELYAARNVRPSFKWGVYLGSIYTGIDQMIFRGKAPWTLKHHGKDNEQLKKAAACKPIDYPKPDGVLTFDRLSSVFLANLAHEENQPDHLVLNNPQTMIDVNYKEYASPETRYCPAGVYEIVEENGSPRLQINAANCVHCKTCDIKDPTQNITWICPESASGPNYGGM

SEQ ID NO: 8892 - protein, 312 aa, Neisseria meningitidis
MSIHTLKRLPSSLLLGLCLSLPSAHLFADNDILGQFLEQNMLTSSDPIEIFAESTIHPTNTQAITGGLILSSQSALVVNNKTGQILYQKNADRIMPIASISKLMSAMVVLDANLDMNETVTITPDEIDRIKGTGSRLAIGTALTRKELLHLSLMSSENRATHALGRTYPGGMGAFVAAMNRKAQSLGMYGSRFYEPTGLNFQNVSTAKDLSLMVNAAAQYPQIRTNSTSNYASVQTKNGQQNYKNSNALVREGMWNIELQKTGYIREAGRSMVVKANIQNQPVTIVLLNSPTSATRVNDARKIESWMLQQRS

SEQ ID NO: 8893 - protein, 280 aa, Neisseria meningitidis; identical to SEQ ID NO: 986

SEQ ID NO: 8894 - protein, 168 aa, Neisseria meningitidis
LFNMNVKVHKDTHHFGIHNLNNTDVHLTAEDSDNVIEIKGELADLMPTGNVESTSFLRGIETAFKSNTVLTGNNNKISIATEGKGLGLGVNGLQSNSPYSGRTTGIFINNQSSDLTQPSLDGISTIKLKAVKGNNEVDLNVKNHASVKGIIASHSAKATLEAEGDNIV

SEQ ID NO: 8895 - protein, 89 aa, Neisseria meningitidis; identical to SEQ ID NO: 4489

SEQ ID NO: 8896 - protein, 181 aa, Neisseria meningitidis
MKKQITAAVMMLSMIAPAMANSMDNQIFENQVFHTRADAPMQLAELSQKEMKETERAFLPLAILGGAAIGMWTQHGFSYATTGRPASVRDVAIAGGLGAIPGGVGAAGKVVSFAKYGREIKIGNNMRIAPFGNRTGHPIGKFPHYHRRVTDNTGKTLPGQGIGRHRPWESKSTDRSWKNRF

SEQ ID NO: 8897 - protein, 769 aa, Neisseria meningitidis
MNTKLTKIISGLFVATAAFQTASAGNITDIKVSSLPNKQKIVKVSFDKEIVNPTGFVTSSPARIALDFEQTGISMDQQVLEYADPLLSKISAAQNSSRARLVLNLNKPGQYNTEVRGNKVWIFINESDDTVSAPARPAVKAAPAAPAKQQAAAPSTKSAVSVSKPFTPAKQQAAAPFTESVVSVSAPFSPAKQQAAASAKQQTAAPAKQQAAAPAKQQAAAPAKQTNIDFRKDGKNAGIIELAALGFAGQPDISQQHDHIIVTLKNHTLPTTLQRSLDVADFKTPVQKVTLKRLNNDTQLIITTAGNWELVNKSAAPGYFTFQVLPKKQNLESGGVNNAPKTFTGRKISLDFQDVEIRTILQILAKESGMNIVASDSVNGKMTLSLKDVPWDQALDLVMQARNLDMRQQGNIVNIAPRDELLAKDKAFLQAEKDIADLGALYSQNFQLKYKNVEEFRSILRLDNADTTGNRNTLVSGRGSVLIDPATNTLIVTDTRSVIEKFRKLIDELDVPAQQVMIEARIVEAADGFSRDLGVKFGATGKKKLKNDTSAFGWGVNSGFGGDDKWGAETKINLPITAAANSISLVRAISSGALNLELSASESLSKTKTLANPRVLTQNRKEAKIESGYEIPFTVTSIANGGSSTNTELKKAVLGLTVTPNITPDGQIIMTVKINKDSPAQCASGNQTILCISTKNLNTQAMVENGGTLIVGGIYEEDNGNTLTKVPLLGDIPVIGNLFKTRGKKTDRRELLIFITPRIMGTAGNSLRY

SEQ ID NO: 8898 - protein, 192 aa, Neisseria meningitidis; identical to SEQ ID NO: 5124

SEQ ID NO: 8899 - protein, 464 aa, Neisseria meningitidis
MNKQPLSLAVVGHTNTGKTSLLRTLLRDSGFGEVRNAPSTTRHVEEAAISDGADTLVFLYDTPGLEDAGGVLEWLENHTDNRSDGIERLQQFLGSHGAHHDFNQEAKVLRQVLQSDMAMYVIDAREPVLDKYRDELTILSWCAKPVMPVFNFTGGQLPESWTTMLARRNLHVFAGFDTVAFDFEGELRLWENLATMLPERSTLDRLTAMRRREWQRLDGEARREIADFLLDAAAFRQEVDENEDTATVLQTMQAEIRQLERQMQQRLFALYRFYHSEIDGGDWMPQAFRQDPFDSELLKQYGIRTGTGAATGALIGLGLDIATLGGSLGLGTAIGGFLGGILPNTRTISDKLAGRQTLHTDPETLTLLAARALDLLHVLQTRGHAAQSDIELHSRKAPWDAARLPPELNKARSHWKWSSLNTHRPETSRAERAGYVEKLQIRLSGKYSELNLNQDKAASRRQYK

SEQ ID NO: 8900 - protein, 720 aa, Neisseria meningitidis
MNAPFFRLSLLSLTLAAGFAHAAENNANVALDTVTVKGDRQGSKIRTNIVTLQQKDESTATDMRELLKEEPSIDFGGGNGTSQFLTLRGMGQNSVDIKVDNAYSDSQILYHQGRFIVDPALVKVVSVQKGAGSASAGIGATNGAIIAKTVDAQDLLKGLDKNWGVRLNSGFASNEGVSYGASVFGKEGNFDGLFSYNRNDEKDYEAGKGFRNDNGGKTVPYSALDKRSYLAKIGTSFGDDDHRIVLSHMKDQHRGIRTVREEFAVSEKNSRITIKRQAPAYRETTQSNTNLAYTGKDLGFVEKLDANAYVLEKKRYSADDKDNGYAGNVKGPNHTRITTRGMNFNFDSRLAEQTLLKYGINYRHQEIKPQAFLNSQFSIPKTEKKDGKDVAKSSEQQTKDRKDETIVHSYKLSNPTKTDTGAYIEAIHEIDGFTLTGGLRYDRFKVKTHDGKTVSSSNLNPSFGVIWQPHEHWSFSASHNYASRSPRLYDALQTHGKRGIISIADGTKAERARNTEIGFNYNDGTFAANGSYFWQTIKDALANPQNRHDSVAVREAVNAGYIKNHGYELGASYRTGGLTAKVGVSHSKPRFYDTHPKKLLSANPEFGAQVGRTWTASLAYRFQNPNLEIGWRGRYVQKATGSILAAGQKNRDKQLENVVRKGFGVNDVFANWKPLGKDTLNVNLSVNNVFNTFYYPHSQRWTNTLPGVGRDVRLGVNYKF

SEQ ID NO: 8901 - protein, 201 aa, Neisseria meningitidis; identical to SEQ ID NO: 3643

SEQ ID NO: 8902 - protein, 671 aa, Neisseria meningitidis
MMKLNPQQLEAVRYLGGPLLVLAGAGSGKTGVITQKIKYLIVNVGYLPHTVAAITFTNKAAAEMQERVAKMLHKSQTRGLTICTFHSLGMKILREEANHIGYKKNFSILDSTDSAKIIGELLGGTGKEAVFKAQHQISLWKNDLKTPEDVVQTASNIWEQQTARVYASYQETLQSYQAVDFDDLIRLPAVLLQQNSEVRNKWQRRLRYLLVDECQDTNTCQFTLMKLLTGAEGMFTAVGDDDQSIYAWRGANMENLRKMQENYPQMKVIKLEQNYRSTARILKIANKVIENNPKLFTKKLWSKLGEGEPVKVVACQNEQHEADWVVSQIVKQKLIGGDKTQYADFAVLYRGKHQARIFEEALRGARIPYRLSGGQSFFDKAEIKDVLSYVRLLANPNDDPAFLRAVTTPKRGIGDVTLGKLNTYAHEHECSLYEAAQNEEALATLNNTNRQHLQAFMDMFGSYRAKAETGEAGEFINSLLEEIDYENHLMQNEEGKAGEIKWRNVSDLVSWFARKGGEDGKNIIELAQTVALMTLLEGKDEEETDAVSLSTLHAAKGLEYPYVFLVGCEEGVLPHNDSIEEGNVEEERRLMYVGITRAKRQLTLTHCVKRKKQGTWQFPEPSRFIDEMPQEDLKILGRKGGEPIVSKEEGRRNLADIIGRLDSMKKGNPSD

SEQ ID NO: 8903 - protein, 307 aa, Neisseria meningitidis
MTKTEPNNVQLDWLESESIHIIREVAAECENPALLFSGGKDSVVLLALACKAFRLGSRPVKLPFPLVHIDTGHNYPEVIAFRDAQAAKLNARLIVGRVEDSIAKGTVVLRKETDSRNAAQAVTLLETIEANGFDALMGGARRDEEKARAKERIFSFRDEFGQWDPKAQRPELWSLYNTRLHKGENMRVFPISNWTELDIWQYIARENLELPPIYYSHRREVVRRRGLLVPVTPLTPKMPSETSEILDVRFRTVGDISCTCPVESTASTPAEIIRETAVADISERSATRLDDQASEAAMEKRKKEGYF

SEQ ID NO: 8904 - protein, 515 aa, Neisseria meningitidis; identical to SEQ ID NO: 654

SEQ ID NO: 8905 - protein, 230 aa, Neisseria meningitidis
MTAFVHTLSDGMELTVEIKRRAKKNLIIRPAGTHTVRISVPPCFSVSALNRWLYENEAVLRQTLAKTPPPQTAENRLPESILFHGRQLALTAHQDTQILLMPSEIRVPEGAPEKQLALLRDFLERQAHSYLIPRLERHARTTQLFPASSSLTSAKTFWGVCRKTTGIRFNWRLVGAPEYVADYVCIHELCHLAHADHSRAFWALTRRFAPYTPEAKQWLKIHGRELFALG

SEQ ID NO: 8906 - protein, 407 aa, Neisseria meningitidis
MSAQSQNNHTSPLVVLTTLFFMMGFITCMNDILIPHLKEIFDLSYVQAMLIQFCFFTAYAVMSIPMGAFVGKVGYKNGVIGGFLLTAVGCLLFYPAAGSHSYAVFLGALFILASGVTLLQVAGNPYVTLLAKPGKESATLTLVQAFNALGTTIAPQIGAFLILADATQTVSKAEQISSVQIPYLGLAGLLIILAVFVKMIRLPDARKIAAEESAHNHDGKTGVWQYKHLVFGTAGIFCYVGAEVSIGSLMVNVLGYLKGLDHASAAHYLSFYWGGAMVGRFLGSAVMAKFAPNRYLAFNASAAVVLLAIAMATGSGNADVAMWSLLAIGFFNSIMFPTIFSLATKGLGKFTNAASGVLCTAIVGGAVVPVVQGWVADTYTLMSSFVVSVICYLYIVFFAVYGYRADK

SEQ ID NO: 8907 - protein, 380 aa, Neisseria meningitidis; identical to SEQ ID NO: 2984

SEQ ID NO: 8908 - protein, 122 aa, Neisseria meningitidis
LVVYFYPKDSTLGCTTEGLDFNARLEQFEALGYTVVGISRDGVKAHQNFCAKQGFRFELLSDKDETVCRLFDVIKLKKLYGKESLGIERSTFVLNKDGEIAHEWRKVKVAGHAQEVLETLSR

SEQ ID NO: 8909 - protein, 498 aa, Neisseria meningitidis
MSLALVYSRALSGMNAPLVEVEAHLANGLPHFNIVGLPDTEVKESRDRVRAAIIQSGFEFPAKKITVNLAPADLPKESGRFDLPIAIGILAASGQVAPEKLAEYEFAGELALSGLLRPVRGALAMAWQGMQAKRAFVLPEENAGQAAVMRGITVYGARSLGEVAAHLNGIEPLAQTECQVPQMPFEHGGQPDLCDVKGQHTARLALEIAAAGGHSLLMMGPPGTGKSMLSQRLPGILPPLTEDELVEVWALRSLLPNHQQQLDSNRPFRSPHHSASAAAMVGGGSDPRPGEISLAHHGVLFLDELPEFDRKVLEVLREPLENGEIHISRAARQAVYPAKFQLVAAMNPCPCGYLGHPVKPCRCTPESVARYRSKISGPLLDRIDLTIEVPSLSAAELMQQEAGESSASVLERVIAARDKQYARQGKVNAALSVSELDSQACIQKEAQEALGGLLEKLSLSARSFHRIMRVARTLADLAGDEEVGRSHVMKAIGFRRAL

SEQ ID NO: 8910 - protein, 221 aa, Neisseria meningitidis
MTVLDREQVLSAFKNRKSCRHYDAARKISAEDFQFILELGRLSPSSVGSEPWQFVVVQNPEIRQAIKPFSWGMADALDTASHLVVFLAKKNARFDSPFMLESLKRRGVTEPDAMAKSLARYQAFQADDIKILDDSRALFDWCCRQTYIALGNMMTGAAMAGIDSCPVEGFNYADMERVLSGQFGLFDAAEWGVSVAATFGYRVQEIATKARRPLEETVIWA

SEQ ID NO: 8911 - protein, 603 aa, Neisseria meningitidis
MKQIRNIAIIAHVDHGKTTLVDQLLRQSGTFRANQQVDERVMDSNDLEKERGITILAKNTAIDYEGYHINIVDTPGHADFGGEVERVLGMVDCVVLLVDAQEGPMPQTRFVTKKALALGLKPIVVINKIDKPSARPSWVIDQTFELFDNLGATDEQLDFPIVYASGLSGFAKLEETDESNDMRPLFDTILKYTPAPSGSADETLQLQISQLDYDNYTGRLGIGRILNGRIKPGQVVAVMNHEQQIAQGRINQLLGFKGLERVPLEEAEAGDIVIISGIEDIGIGVTITDKENPKGLPMLSVDEPTLTMDFMVNTSPLAGTEGKFVTSRQIRDRLQKELLTNVALRVEDTADADVFRVSGRGELHLTILLENMRREGYELAVGKPRVVYRDIDGQKCEPYENLTVDVPDDNQGAVMEELGRRRGELTNMESDGNGRTRLEYHIPARGLIGFQGEFMTLTRGVGLMSHVFDDYAPVKPDMPGRHNGVLVSQEQGEAVAYALWNLEDRGRMFVSPNDKIYEGMIIGIHSRDNDLVVNPLKGKKLTNVRASGTDEAVRLTTPIKLTLEGAVEFIDDDELVEITPQSIRLRKRYLSELERRRHFKKLD

SEQ ID NO: 8912 - protein, 725 aa, Neisseria meningitidis; identical to SEQ ID NO: 2772

SEQ ID NO: 8913 - protein, 151 aa, Neisseria meningitidis; identical to SEQ ID NO: 658

SEQ ID NO: 8914 - protein, 268 aa, Neisseria meningitidis
MQNHVISLASAAERRAHIADTFGRHGIPFQFFDALMPSERLEQAMAELVPGLSAHPYLSSVEKACFMSHVVLWKQALDEGVPYVAVFEDDVLLGEGAEKFLDEDAWLQERFDKDSAFIVRLETMFMHVLTSPSGVADYCGRAFPLLESEHWGTAGYIISRKAMRFFLDRFAVLPSERLKAVDWMLFSSFLDKGGMTVCQLTPALCIQSETLPSQLKNGRQESYRNRRSPKVLLKRALGKIGREIERARERKRQKKLEKHLGRHVVPFE

SEQ ID NO: 8915 - protein, 1067 aa, Neisseria meningitidis
MAKFFIDRPIFAWVISIFIIAAGIFGIKSLPVSQYPSVAAPTITLHATYPGASAQVMEDSVLSVIERNMNGVEGLDYMSTSADSSGSGSVSLTFTPDTDENLAQVEVQNKLSEVLSTLPATVQQYGVTVSKARSNFLMIVMLSSDVQSTEEMNDYAQRNIVPELQRIEGVGQVRLFGAQRAMRIWVDPKKLQNYNLSFADIGSALSAQNVQISAGSIGSLPAVRGQTVTATVTAQGQLGTAEEFGNVILRANTDGSNVYLKDVARVGLGMEDYSSSTRLNGVNTTGMAVMLSNSGNAMATAKAVKERMATLEKYFPQGMSWKTPYDTSKFVEISIEKVIHTLIEAMVLVFVVMYLFLQNIRYTLIPTIVVPISLLGGFAFISYMGMSINVLTMFAMVLVIGIVVDDAIVVVENVERIMAGEGLPPKEATKKAMGQISGAVIGITAVLISVFVPLAMFSGATGNIYKQFALTMASSIAFSAFLALTLTPALCATMLKTIPKGHHEEKKGFFGWFNKKFNSWTHGYEGRVAKVLRKTFRMMVVYIGLAVVGVFLFMRLPTSFLPTEDQGFVMVSVQLPAGATQERTNATLAQVTQLAKSIPEIENIITVSGFSFSGSGQNMAMGFAILKDWNERTAPGSDAVAIAGKLTGMMMGTLKDGFGIAVVPPPILELGNGSGLSINLQDRNNTGHTALLAKRNELIQKMRASGLFDPSTVRAGGLEDSPQLKIDINRAAAAAQGISFADIRTALASALSSSYVSDFPNQGRLQRVMVQADEDARMQPADILNLTVPNKSGVAVPLSTIATVSWENGTEQSVRFNGYPSMKLSASPATGVSTGQAMAAVQKMVDELGGGYSFEWGGQSREEAKGGSQTLILYGLAVAAVFLVLAALYESWSIPLAVILVIPLGLIGAAAGVTGRNLFEGLLGSVPSFANDIYFQVGFVTVMGLSAKNAILIIEFAKDLQAQGKSAVEAALEAARLRFRPIIMTSFAFILGVVPLYIAGGASSASQRAIGTTVFWGMLIGTLLSVFLVPLFYVVVRKFFKETAHEHEMAVKHAAEAGITGSDDSQH

SEQ ID NO: 8916 - protein, 426 aa, Neisseria meningitidis
LKDCFPQGLNGKKTAVALSGGLDSVVLLHLLVRAGKRAGFVPEALHIHHGLSPRADDWADFCQNYCDMLGVGLETVKVCVEKNGLGIEAAARQKRYAAFAEKGFDILALAHHRDDQIETFMLAVARGGGLRALAAMPAVRPFGEKGIIWRPLLPFSRQDIWDYAQKHGLPNIEDESNTDTAYLRNRFRHRILPELSAQIPHFGRHVLNNVRALQEDLALLDEVVVQDCRWVCGAGYFDTARWLTFSPRRKTHILRHFLKENGIPVPNQNALADIARVLTEAKTGRWNLQGFELHHYAGRLFVFRQEKTDKLRFLKDRQISGNLREILTGQGFVLKRHPFGLPEHLLEQDGILRTVAVSDTLAVGGIHKDVKKILQGKRVLPVLRPIWPLVADSGNRPLALANCCADFQYSVSDGILPVHPDFPILF

SEQ ID NO: 8917 - protein, 390 aa, Neisseria meningitidis; identical to SEQ ID NO: 8480

SEQ ID NO: 8918 - protein, 89 aa, Neisseria meningitidis; identical to SEQ ID NO: 6952

SEQ ID NO: 8919 - protein, 352 aa, Neisseria meningitidis; identical to SEQ ID NO: 1104

SEQ ID NO: 8920 - protein, 305 aa, Neisseria meningitidis
MSIIHYASLHIESARTALKELLRQPFGTLLTLLMLAVAMTLPLFMYLGIQSGQSVLGKLNESPQITVYMETAAAQSDSDTVRSLLARDKRIANVRFIGKEDGLAELQSNLDQNLVSMLDGNPLPDAFIVTPDPATTPAQMQAIYRDITKLPMVESASMDTEWVQTLYQINEFIRKILWFLSLTLGMAFVLVAHNTIRLQILSRKEEIEITKLLGAPASFIRRPFLYQAMWQSILSAAVSLGLCGWLLSTVRPLVDAIFKPYGLNIGWRFFYPEEIALVFGFVIALGVFGAWLATTQHLLGFKAKK

SEQ ID NO: 8921 - protein, 318 aa, Neisseria meningitidis; identical to SEQ ID NO: 2723

SEQ ID NO: 8922 - protein, 260 aa, Neisseria meningitidis; identical to SEQ ID NO: 2560

SEQ ID NO: 8923 - protein, 462 aa, Neisseria meningitidis
MSIKFADLNLDKNILSAVSSEGYESPTPIQAQAIPFALEGRDIMASAQTGSGKTAAFLLPTLQRLTKRSEKPGKGPRALVLTPTRELAAQVEKNALAYAKNMRWFRTVSIVGGASFGYQTRALSKPVDLIVATPGRLMDLMQSGKVDFERLEVLILDEADRMLDMGFIDDIETIVEATPTDRQTLLFSATWDGAVGKLARKLTKDPEIIEVERVDDQGKIEEQLLYCDDMRHKNRLLDHILRDANIDQCVIFTSTKAMTEVIADELYEKGFAANCLHGDMPQGWRNRTLMDLRKGRCKILVATDVAARGIDVPTITHVINYDLPKQAEDYVHRIGRTGRAGRTGIAITFAEVNEYVKVHKIEKYINRKLPELTIEGMEPTRKRKSAGGKPKGKGGWGDRKSGGRRGDHKPGKEGFGGKTRGEGFKKEGFKKDGFKKTGEGFKGKRKAGDSFAGRGERRYKDR

SEQ ID NO: 8924 - protein, 704 aa, Neisseria meningitidis
MFLFSDGLQSINNNNRRKRIVKNAYIPSRGIRKIPHLFTLLPEFHICKDGKGAEAVIGWGLRPTTHKARAFAAEHQLPFIALEDGFLRSLGLGVAGYPPYSIVYDDIGIYYDTTRPSRLEQLILAADTMPSETLAQAQQAMDFILQHHLSKYNHAPELSDDHPLRSPSKPETVLIIDQTFGDMAIQYGGADASTFELMFQTALNENPQADIWVKTHPDVLCGKKQGYLTQLAQQHRVNLLAEDINPISLLQNIDKVYCVTSQMGFEALLCGKPLTTFGLPWYAGWGVSDDRHPKIDSLVQTQRRAPRNLLQLFAAAYLQYSRYLNPNTGEAGSLFDVIDYLATVKRKNDKLRGELYCVGMSLWKRAVAKPFFNVPSCRLKFISSTQKLAGVKLSDDARILAWGNGKEAIVRFAEQHHIPLLRMEDGFIRSVGLGSNLVPPLSLVTDDMSIYFNAEAPSRLEHILQNQNFDDQDFQTALKLQKMLTENHISKYNVGNSDFTAPSTDKTVILVPGQVEDDASIRYGSPQIYHNLDLLRTVRERHPDAYIIYKPHPDVVSGNRIGHISPEDAARYADQTAEQADILTCLQYADEIHTMTSLTGFEALLRGKKVSCYGLPFYAGWGLTQDLLPIPRRSRRLELWQLIAGTLIHYPDYIHPETHQAINAETAAQILIRQKNMQKNNNGLHRGCFAKKLGKIKQLYRSFK

SEQ ID NO: 8925 - protein, 421 aa, Neisseria meningitidis
MSKKQPAQPTRRTLFKTAIAAGAVGAIGGYLGGKKQGETAERTAESQHSPQAYPCYGEHQAGIVTPQQAFSIMCAFDVTAQSAKQLENLFRTLTARIEFLTQGGEYQDGDDKLPPAGSGILGKAFNPDGLTVTVGVGSSLFDGRFGLKDKKPIHLQEMRDFSNDKLQKSWCDGDLSLQICAFTPETCQAALRDIIKHTVQTAVIRWSIDGWQPKSEPGAMAARNLLGFRDGTGNPKVSDPKTADEVLWTGVAANSLDEPEWAKNGSYQAVRLIRHFVEFWDRTPLQEQTDIFGRRKYSGAPMDGKKEADQPDFAKDPEGNTTPKDSHIRLANPRDPEFLKKHRLFRRAYSYSRGLASSGQLDVGLVFVCYQANLADGFIFVQNLLNGEPLEEYISPFGGGYFFVLPGVEKGGFLGQGLLGV

SEQ ID NO: 8926 - protein, 281 aa, Neisseria meningitidis
MNKFSQSGKGLSGFFFGLILATVIIAGILFYLNQSGQNAFKIPASSKQPAETEILKPKNQPKEDIQPEPADQNALSEPDAATEAEQSDAEKAADKADEVEEKAGEPEREKSDGQAVRKKVLTEEREQTVREKAQKKDAETVKKQAVKPSKETEKKAPKEEKKAEKEKVAPKPTPEQILNSGSIEKARSAAAKEVQKMKTSDKAEATHYLQMGAYADRRSAEGQRAKLAILGISSKVVGYQAGHKTLYRVQSGNMSADAVKKMQDELKKHEVASLIRSIESK

SEQ ID NO: 8927 - protein, 546 aa, Neisseria meningitidis
MTDNSPPPNGHAQAHVRKNNTFLSAVWLVPLIALIAGGWLWIKEIRNRGPVVTLLMDSAEGIEVNNTVIKVLSIDVGRVTRIKLRDDQKGVEVTAQLNADVSGLIRSDTQFWVVKPRIDQSGVTGLGTLLSGSYIAFTPGKSDEAKDVFQVQDIPPVTAIGQSGLRLNLIGKNDRILNVNSPVLYENFMVGQVESAHFDPSDQSVHYTIFIQSPNDKLIHSASRFWLESGINIETTGSGITLNSAPLPALLSGAISFDSPKTKNSKNVKSEDSFTLYDSRSEVANLPDDRSLYYTAFFKQSVRGLTVGSPVEYKGLNVGVVSDVPYFDRNDSLHLFENGWIPVRIRIEPSRLEINADEQSKEHWKQQFQTALNKGLTATISSNNLLTGSKMIELNDQPSSSPKLRPHTVYAGDTVIATQGGGLDDLQVKLADLLDKFGKLPLDKTVSGLNASLAELKSTLKSINTLSNNPQTQNIPNELNQTLKELRTTLQGVSPQSPIYGDVQNTLQSLDKTLKDVQPVINTLKEKPNALIFNSSSKDPIPKGSR

SEQ ID NO: 8928 - protein, 463 aa, Neisseria meningitidis; identical to SEQ ID NO: 736

SEQ ID NO: 8929 - protein, 169 aa, Neisseria meningitidis; identical to SEQ ID NO: 111

SEQ ID NO: 8930 - protein, 177 aa, Neisseria meningitidis; identical to SEQ ID NO: 1513

SEQ ID NO: 8931 - protein, 366 aa, Neisseria meningitidis
MITLKTTPFHQAHQDAGAKPVDFAGWELPIHYGSQIAEHEAVRTDAGMFDVSHMLVTDVAGANAKAFFRKLIANDVAKLAFVGKALYSALLNDNGGVIDDLIVYRTNEAETQYRIVSNGATREKDTAQFHKVGQEFGVSFNPRYDLGMLAVQGPKAIEKLLTVKPEWADVVHNLKPFQGADLGNDWFVARTGYTGEDGVEVILPGTEAVAFFKALQAAGVQPCGLGARDTLRMEAGMNLYGNDMDDDTSPLEAGMGWTVDLKDESRDFVGKAALLALKEKGVAVKQVGLLLGKGGILRAHMEVLTDKGKGETTSGVFSPSLKQSIAIARVPKDFDGDTAKVLIRGKEADVRVLKLPFVRNGQKQFD

SEQ ID NO: 8932 - protein, 202 aa, Neisseria meningitidis
LNTLYLGSNSPRRMEILTQLGYQVVKLPANIDETVRQNEDPARYVQRMAEEKNRTALTLFCETNGTMPDFPLITADTCVVSDGIILGKPRSQAEAIEFLNRLSGKQHTVLTAVCIHYRGKTSSRVQTNRVVFKPLSSEEISAYVQSGEPMDKAGAYAVQGIGGIFIQSIEGSFSGIMGLPVYETVSMLQDLGYRSPLSALKP

SEQ ID NO: 8933 - protein, 218 aa, Neisseria meningitidis
MKNKTKVWDFPTRLFHWLLAASLPFMWYSAKTGGDMLQWHTRVGLLILFLLIFRLCWGIWGSDTARFSHFVRGWSGIRDYLKNGIPEHIQPGHNPLGALMVVALLAAVSFQVGTGLFAADENTFSTNGYLNHLVSEHTGSLMRKIHLNFFKLLAVFSAIHIAAVAAYRLFKKKNLVFPMITGFKYIEGKTSIHFAGKAALAAALSVVALVAAAILLLS

SEQ ID NO: 8934 - protein, 187 aa, Neisseria meningitidis; identical to SEQ ID NO: 2230

SEQ ID NO: 8935 - protein, 354 aa, Neisseria meningitidis
MALVSMRQLLDHAAENSYGLPAFNVNNLEQMRAIMEAADQVGAPVIVQASAGARKYAGAPFLRHLILAAVEEFPHIPVVMHQDHGASPDVCQRSIQLGFSSVMMDGSLMEDGKTPSSYEYNVNATRTVVNFSHACGVSVEGEIGVLGNLETGEAGEEDGVGAVGKLSHDQMLTSVEDAVRFVKDTGVDALAIAVGTSHGAYKFTRPPTGDVLRIDRIKEIHQALPNTHIVMHGSSSVPQEWLKVINEYGGNIGETYGVPVEEIVEGIKHGVRKVNIDTDLRLASTGAVRRYLAENPSDFDPRKYLSKTIEAMKQICLDRYLAFGCEGQAGKIKPVSLEKMASCYAKGELNQIVK

SEQ ID NO: 8936 - protein, 67 aa, Neisseria meningitidis; identical to SEQ ID NO: 3513

SEQ ID NO: 8937 - protein, 116 aa, Neisseria meningitidis; identical to SEQ ID NO: 840

SEQ ID NO: 8938 - protein, 56 aa, Neisseria meningitidis
MAQYMCGPCGWIYDEEHGDPEHGIPPGTKFEDIPDDWKCPECGVGKEDFYLLDFVI

SEQ ID NO: 8939 - protein, 109 aa, Neisseria meningitidis
MSLPPCPQCASEYTYEDGGQYICPECAHEWNETESAADLAAQVLDANGAALQNGDTVILIKDLKVKGSSMVIKQGTKVKGIRLQEGDHNIGCKIDGSAMNLKSEFVKKA

SEQ ID NO: 8940 - protein, 176 aa, Neisseria meningitidis
MKFVSDLLSVILFFATYTVTKNMIAATAVALVAGVVQAAFLYWKYKKLDTMQWVGLVLIVVFGGATIVLGDSRFIMWKPSVLFWLGALFLWGSHLAGKNGLKASIGREIQLSDAVWAKLTYMWVGFLIFMGIANWFVFTRFEAQWVNYKMFGSTALMLVFFIIQGIYLSTCLKKED

SEQ ID NO: 8941 - protein, 346 aa, Neisseria meningitidis
MQPIRYRTDLTPYNTFGLRAQARAFIALEHADGLRDIVRLPEFNRDTVLWLGGGSNILLMEDYAGLVVHMENKGIREIARSDGMVLIEAQAGEIWHDFVLHAVALGLNGLENLSLIPGTVGASPVQNIGAYGVEAKDVIHSVRCFDLDTETFVTLSNADCRFAYRESLFKQEGKGRYVIVSVVFALKTHFVPNLGYGDLAAAVAELSAGRVPTAKDVSDAVCAIRNSKLPNPNVLGNVGSFFKNPVVSAEKAATLLQRHPDMPRYPQPDGSVKLAAGWLIDQCRLKGFQIGGAAVHDRQALVLVNKNNASANDVRQLAQHIKFTVFARFQVELHAEPNWLPASFSL

SEQ ID NO: 8942 - protein, 138 aa, Neisseria meningitidis; identical to SEQ ID NO: 774

SEQ ID NO: 8943 - protein, 380 aa, Neisseria meningitidis
MNVFKQQLEQLGAQNQYRSIPDLIHQGRYITRENRKMLNMSSNDYLGLASDENLRRSFLQQYGGNFPSFTSSSSRLLTGNFPIYTDLEQLVAQRFQRESALLFNSGYHANLGILPALTTTKSLILADKFVHASMIDGIRLSRCAFFRYRHNDYEHLKNLLEKNVGKFDRTFIVTESVFSMDGDVADLKQLVQLKKQFPNTYLYVDEAHAIGVYGQNGLGIAERDNLIAEIDLLVGTFGKALASVGAYAVCNQVLKECLINQMRPLIFSTALPPFNVAWTYFIFERLPQFSKERSHLEQLSAFLRREVAHRTQIMPSQTCIVPYILGGNEATLAKAEYLQRQGYYCLPIRPPTVPKGTSRIRLSLTADMTMDEVRQFAVCL

SEQ ID NO: 8944 - protein, 436 aa, Neisseria meningitidis; identical to SEQ ID NO: 6841

SEQ ID NO: 8945 - protein, 88 aa, Neisseria meningitidis; identical to SEQ ID NO: 2853

SEQ ID NO: 8946 - protein, 126 aa, Neisseria meningitidis; identical to SEQ ID NO: 3371

SEQ ID NO: 8947 - protein, 544 aa, Neisseria meningitidis; identical to SEQ ID NO: 2758

SEQ ID NO: 8948 - protein, 147 aa, Neisseria meningitidis; identical to SEQ ID NO: 1095

SEQ ID NO: 8949 - protein, 470 aa, Neisseria meningitidis
LLFEFKENKMIVASRWPLLEKVFLRFGMPVAVVDLESTGGNLYEDRVTEVALVKFEQGRVVRHEWLVNPQKPIPQFVVGLTGISDGMVADAPVFAEIAGELFSVLKGCVLVAHNSRFDYTFLKHEFHRVGIGFSSPVLCSVQLSRCLYPQFYKHSLDSIIERLGIVVEDRHRAMADVSALCDYLEYSLSEHGVEAWIRQCFRLMNPKPLPAALPERLREQLYGLPDGMGVLACFDGGGKVNYIGTFERVYSEVSALLDSGKAPFDWCNTEEVRFFPALGSLHAYKIKAELVGRYHSGCYVSAKNLLKTFTTVRFEKGSDGMLNAKTAALKNGVTDNPPTGLFANKKAARRALSSWAETYGLCPAAAGILSDGYTEDEPCPVYVSDRCDKACVRSDEQVLAFAHKLPVLDWGKMHEVEITETDPLTGEKVVLHGMGGALEMDDGLWYFDKDLPDAFKAKFKTDRKNIKEIG

SEQ ID NO: 8950 - protein, 97 aa, Neisseria meningitidis; identical to SEQ ID NO: 2609

SEQ ID NO: 8951 - protein, 238 aa, Neisseria meningitidis
MKTKLPLFIIWLSVSAACSSPVSRNIQDMRLEPQAEAGSSDAIPYPVPTLQDRLDYLEGTLVRLSNEVETLNGKVKALEHAKTHPSSRAYVQKLDDRKLKEHYLNTEGGSASAHTVETAQNLYNQALKHYKSGRFSAAASLLKGADGGDGGSIAQRSMYLLLQSRARMGNCESVIEIGGRYANRFKDSPTAPEAMFKIGECQYRLQQKDIARATWRSLIQAYPSSPAAKRAAAAVRKR

SEQ ID NO: 8952 - protein, 500 aa, Neisseria meningitidis
MQVNIQIPYILPRCVRAEDTPYACYLKQLQVTKDVNWNQVQLAYDKWDYKQEGLTGAGAAIIALAVTVVTAGAGAGAALGLNGAAAAATDAAFASLASQASVSLINNKGDVGKTLKELGRSRTVKKLVVAAAIAGVSNKIGASSLATWSETPWVNNLNVNLANAGSAALINTAVNGGSLKDNLEANILAALVNTAHGEAASKIKQLDQHYIAHKIAHAIAGCAAAAANKGKCQDGAIGAVVGEIVGEALVKNTDFSGMTASEIEKAKANITAYAKLVAGATVGVTGGNVDVAANASETAVKNNALDIIWDIGNLVWDGGKWIYAKSIGDKQMAREAAIDFGVDAAAAAVPFVPAGATKISRGGAYVLKAGDEAVDTAKAIQEIQKQTGIKLTYDKVNKVWTTPAGLDYGLDAKHGNRIKHVLAHTIPNPNKPVHSVFNVSRKEVLPLVDEAWRMKGNPLPNDSSVYLVDMKKPIGTKGETKVRIVVQKGTNKIISAYPQK

SEQ ID NO: 8953 - protein, 64 aa, Neisseria meningitidis; identical to SEQ ID NO: 3555

SEQ ID NO: 8954 - protein, 124 aa, Neisseria meningitidis
MQYLIVKYSHQIFVTITILVFNIRVFLLWKNPKKPLVGFWKALPHLNDTMLLFTGLWLMKITHFSPFNAPWLGTKILLLLAYIALGMMMMRARPRSTKFYTVYLLAMCCVACIVYLAKTKVLPF

SEQ ID NO: 8955 - protein, 222 aa, Neisseria meningitidis
MKNLAIFDLDNTLINTDSDHAWPQYLIKKGLVDAAETEAQNEKFYRDYQNGCLDIDAFLKFHLAPLARYSKEELAEFHREFMAEYIIPHISPMQRMLVQSHQMAGDETLVISSTNEFIITPVCHLFGITNIIGTQLESGSDGRYTGNYIGTPSLKEGKITRLNQWLAERGETLESYGKTYFYSDSKNDLPLLRLVDEPVAVNPDAELEKEAKEKGWPVLNFK

SEQ ID NO: 8956 - protein, 229 aa, Neisseria meningitidis
MKRKNIALIPAAGIGARFGADKPKQYVEIGSKTVLEHTLGIFERHEGVDLTVVVVSPEDTFADKVQTAFPQVRVWKNGGQTRAETVRNGVAKLLETGLAAETDNILVHDAARCCLPSEALTRLIEQAGNAAEGGILAIPVADTLKRADGGNISATVERTSLWQAQTPQLFRAGLLHRALAAENLDGITDEASAVEKLGVRPLLIQGDVRNLKLTQPQDAYIVRLLLDAV

SEQ ID NO: 8957 - protein, 465 aa, Neisseria meningitidis; identical to SEQ ID NO: 1096

SEQ ID NO: 8958 - protein, 900 aa, Neisseria meningitidis
MQLHILNNPKDAALAADAEFLKQSLFNLLHEEASPLVVETVKLLSTSDDSAALIEKVLPQLDEQQTHDLTLACGLFAQILNIAEDVHHERRRQIHEEAGRGGAEGSLTETVRRLKAGKADGKSVQRQLDNTSVTAVLTAHPTEVQRQTVLSFNRRIRALLPQRERCTNADALARLRREIDTILLGLWQTSETRRHKLSVNDEINNGVSIFPMSFFEALPKLYRNMEHDFQMVYPDVCVPNILKIGGWIGGDRDGNPFVSAETLRFAFRRHADAVFRFYRGELDKLYRELPLSIRRVKVNDDVMALAALSPDEEIARTEEPYRRAIAYIMARAMGKARALGLGMGCKFGFLEPYASAQEFLDDLKKLQRSLIDNGSRLLAEGRLADLIRSVSVFGFHMMPLDLRQHAGKHADVVAELFQHAGLEDYNSLNEEQKQAALLRELSHQRPLYSPFITYSDHTRHELAIFNEARKIKDEFGEDAVTQSIISNCEQPSDLLALALLLKESGLLAVENGKPRSRINIVPLFETIEALENACPVMETMFRLDWYDALLESCGNIQEIMLGYSDSNKDGGYVTSSWCLYQAELGLVELFKKYDVRMRLFHGRGGSVGRGGGPSYQAILAQPAGSVAGQIRITEQGEVITAKYADPGNAQRNLETLVAATLEASILPDKKDPDAKLMQALSDVSFKYYRELITHPDFIDYFLQTSPIQEIATLNLGSRPASRKTLARIQDLRAIPWVFSWMQNRLMLPAWYGFGSAVETLCEDKPETLAALREHAQSNPFFQAMLSNMEQVMAKTDITLAENYAGLSESPEKAAVIFGMIKEEYQRSRKALLDLLQTEELLRDNRSLARSLALRIPYLNALNGLQVAMLKRLRKEPDNPHALLMVHLTINGVAQGLRNTG

SEQ ID NO: 8959 - protein, 190 aa, Neisseria meningitidis
VASCRLPTEWGVFTMHGFEEANGQEHVALTVGNFSDGNPVLTRIHSECLTGDALFSRKCDCGPQLEAAMRAVQTEGRGIIVYLRQEGRGIGLINKIRAYHLQDQGMDTVEANLALGLPVDARDFRLAQSIYEYLGIRSVKLLTNNPEKIQTLKDAGINVVERIPLHVGENLENKRYLQTKADKLGHLMSE

SEQ ID NO: 8960 - protein, 189 aa, Neisseria meningitidis
MAAGKHTKHSNRVRIIGGQCRGRKLSFTSADGLRPTPDSVREKLFNWLGQDLTGKTVLDLFGGSGALGIEAASRNAKRVLISDNNRQTVQTLQKNSRELGLGQVQIVCSDGIAYLKTVSEQFDVVFLDPPFAWQDWQILFDALKPCLNPRAFVYLEAGTLPDIPDWLTEYREGKSGQSTFELRVFQVAE

SEQ ID NO: 8961 - protein, 216 aa, Neisseria meningitidis
MPSENTKGTTMTTHHVELRNVTKRFGAQKAVNQVDLVLKAGESVGLAGYNGAGKSTIMKLILGLITPTEGEVMLLGERTGSKAGARLRSQIGYLPETVALHPSLTGIETLDFYAKLKKQPLTQNRGLLERVGISQAAHRRVGTYSKGMRQRLALAQALLGEPKVLLFDEPTTGLDPASRQMFYEVVRELNGRGATVLLSTHALAELDGHADRIIVD

SEQ ID NO: 8962 - protein, 300 aa, Neisseria meningitidis; identical to SEQ ID NO: 2507

SEQ ID NO: 8963 - protein, 106 aa, Neisseria meningitidis
MNFQDYLATFSSIDHLGGLDVQDADGKTVHHIPAVQGKLGSLKLYNALAERFDGKLDKEAAEQGLIWFAEHVADARAHPGKHPNIDLLEKVVQSGETLLLKPLAAQ

SEQ ID NO: 8964 - protein, 208 aa, Neisseria meningitidis
MKNIVILISGRGSNMQAIVNAAIPNVRIAAVLSNSETAAGLQWAAERGIPTDSLHHKNFESRLAFDTAMMEKIDAYQPDLVVLAGFMRILTPEFCAHYEGRLMNIHPSILPSFTGLHTHERALEAGCRVAGCTIHFVTAELDCGPIVSQGVVPILDGDTADDVAARVLAVEHKLYPKAVADFAAGRLIIEGNRVRNSENADAARFLTA

SEQ ID NO: 8965 - protein, 428 aa, Neisseria meningitidis; identical to SEQ ID NO: 3581

SEQ ID NO: 8966 - protein, 90 aa, Neisseria meningitidis; identical to SEQ ID NO: 311

SEQ ID NO: 8967 - protein, 155 aa, Neisseria meningitidis
MQVFLTIPGYDVEAEIEKFVWMDAVIWQMPSWWMHEPWTVKKYIDEVLTAGHGKLYQSDGRHSVNPTEGYGTGGLLQGKKHMLSLTWNAPIEAFTRESDFFEGKGVDVLYMHFHKANEFLGMTRLPTFLCNDVVKNPQVEKYLADYQAHLEKVFG

SEQ ID NO: 8968 - protein, 658 aa, Neisseria meningitidis
MSRIAALPDHLVNQIAAGEVVERPANALKEIVENSIDAGATAIDVELAGGGIRLIRVSDNGGGIHPDDIELALHRHATSKIKTLNDLEHVASMGFRGEGLASIASVSRLTLTSRQEDSSHATQVKAEDGKLSSPTAAAHPVGTTIEAAELFFNTPARRKFLKSEATEYAHCATMLERLALAHPHIAFSLKRDGKQVFKLPAQSLHERIAAIVGDDFQTASLEIDSDNGALRLYGAIAKPTFAKGKTDKQYCFVNHRFVRDKVMLHAVKQAYRDVLHNALTPAFVLFLDLPPEAVDVNVHPTKTEIRFRDSQQVHQLVFHTLNKALADTRADLTESVSNAGEVLHDITGVTPAPMPSENNSENLFDRASNYPTGNKSDTHNAFGSSGKTAPMPYQSAYAPQQRSLSLRESRAAMNTYAELYKKTDDIDLELSRFEQARFGNMPSETPAPQTDTPLSDGIPSPSELPPLGFAIAQLLGIYILAQAEDSLLLIDMHAAAERVNYEKMKRQRQENGNLQSQRLLIPVTFAASHEECAALADHAEALAGFGLELSDMGGNTLAVRAAPAMLGKSDVVSLARDVLNEFAQVGSSQTIEEHENHILATMSCHGSIRAGRRLTLPEMNALLRDMENTPRSNQCNHGRPTWVKLTLKELDALFLRGQ

SEQ ID NO: 8969 - protein, 430 aa, Neisseria meningitidis
MAVFPLSAKHRKYALRALAVSIILVSAAYIASTERTERVRPQRVEQKLPPLSWGGSGVQTAYWVQEAVQPGDSLADVLARSGMARDEIARITEKYGGEADLRHLRADQSVHVLVGGDGGAREVQFFTDEDGERNLVALEKKGGIWRRSASEADMKVLPTLRSVVVKTSARGSLARAEVPVEIRESLSGIFAGRFSLDGLKEGDAVRLIYDSLYFHGQQVAAGDILAAEVVKGGTRHQAFYYRSDKEGGGGGNYYDEDGRVLQEKGGFNIEPLVYTRISSPFGYRMHPILHTWRLHTGIDYAAPQGTPVRASADGVITFKGRKGGYGNAVMIRHANGVETLYAHLSAFSQAQGNVRGGEVIGFVGSTGRSTGPHLHYEARINGQPVNPVSVALPTPELTQADKAAFAAQKQKADALLARLRGIPVTVSQSD

SEQ ID NO: 8970 - protein, 157 aa, Neisseria meningitidis
MQVTKNFSLRELTRSETARRAGVPNEPSPADMDNIYYTAQQLEKIREYVGRPIIVTSCFRSERVNKLVGGSPTSAHRHGLAADCDASGMTSPAFAKLLIKMRDEGALKFDQLILEFPERGDGAWVHIGFRRNSPQRNQILTATKKNGKTVYLPGLHP

SEQ ID NO: 8971 - protein, 296 aa, Neisseria meningitidis; identical to SEQ ID NO: 72

SEQ ID NO: 8972 - protein, 232 aa, Neisseria meningitidis; identical to SEQ ID NO: 1935

SEQ ID NO: 8973 - protein, 249 aa, Neisseria meningitidis; identical to SEQ ID NO: 131

SEQ ID NO: 8974 - protein, 153 aa, Neisseria meningitidis
  misc_feature 2, 3: 'Xaa' is any amino acid
VXXGLYKLGYKQHTRTDAEGYIEKLHITPANAHECKHLSPLLEGLPEGTTVYADKGYDSAENRQHLEEHQLLDGIMRKACRNRPLSEVQTKRNRYLSKTRYVVEQSFGTLHRKFRYARSTYFGLIKVSAQSHLKAMCLNLLKAANRLSAPAAA

SEQ ID NO: 8975 - protein, 658 aa, Neisseria meningitidis
MNEFSLAPIVVVLLVSVITVILCRKFNIPSMLGYLLVGFLAGPGMLSLIPKSHATDYLGEIGIVFLMFSIGLEFSLPKLRAMRRLVFGLGGLQVGVTMLSVMGILMLTGVPFNWAFAVSGALAMSSTAIVSRILSEKTELGQPHGQMAMGVLLMQDIAVVPLMILIPALAGGGDGNIWAALGLAFAKMLLTLGLLFFVGSKIMSRWFRMVAKRKSSELFMINVLLVTLGVAYLTELEGLSMALGAFVAGMLLSETEYRFQVEDDIRPFRDILLGFFFITVGMKLDIQALIGGWRQVLMLLAMLLVLKALVVFAIAFKMKHSVGDSLKTALYLAQGGEFGFVMLAIAGQLDMVSPEWEQAATAAVLLSMIIAPFLLGGSDALVGRLVKSSWDMKSLDLHSMLVETMSKSDHVLIVGFGRGGQTVGRVLAQEDIPYFALDLDIARVQVARSAGEPVSFGDAKRREVLEAAGLGRAKMVVLTLNNMHETQHVLDNVLSMYPNMPVYVRATNDDYVKTFTDIGAEEAVSDTKETGLVLAGYAMLGNGASYRHVYQTMANIRHSRYAALEGLFVGSDDEAGFGENGETVRHAFPLAAEAYAVGKTVGTLPMAAYGIKLLFVRRRTGRIENPDASFTLEGGDVLVVAGKKEEIISFENWSLQGI

SEQ ID NO: 8976 - protein, 119 aa, Neisseria meningitidis; identical to SEQ ID NO: 2176

SEQ ID NO: 8977 - protein, 442 aa, Neisseria meningitidis; identical to SEQ ID NO: 4352

SEQ ID NO: 8978 - protein, 220 aa, Neisseria meningitidis
MIHAVLFDLDGTLADTALDLGGALNTLLARHGLPAKSMDEIRTQASHGAAGLIKLGAGITPDHPDYARWRTEYLEEYDRRYAQDTELFDGVNELIAELNQRGIKWGIITNKPMRFTDKLVPKLGFIIPPAVVVSGDTCGEPKPSIKPMLYACGQIHADPQHTLYVGDAERDIQAGRNAGMKTVLAEWGYIAPEDDTGSWQADFHIRTPLDLLECLDKIQP

SEQ ID NO: 8979 - protein, 166 aa, Neisseria meningitidis
MADLQKTFQTSFRDAMASCAAGVHVITTDGAAGRYGITMTAVTPVTDEPPTVMLCINRKARIIPILSENGSLCINTLADEHQDVAEHFAGLTGLSPEERFAYHIWHRGKTGQLEIEGALAHLHGHIVGKHEIGTHFVFYVRLDEIKNCGCKRPALLYFRRQFRFLD

SEQ ID NO: 8980 - protein, 127 aa, Neisseria meningitidis; identical to SEQ ID NO: 430

SEQ ID NO: 8981 - protein, 181 aa, Neisseria meningitidis
MGKTVTLTSGHSNTDPGAVNGSDREADLAQDMCNIVAAILRDDYGLTVKTDGTGKGNMPLREAVKLIRGSDVAIEFHTNAAVSKAATGIEALSTVKNKRWCQVLSKAVAKKTGWKLRGEDGFKPDNAGQHSRLAYAQAGGIVFEPFFISNDTDLALFKTTKWGICRAIADAIAMELGAARV

SEQ ID NO: 8982 - protein, 209 aa, Neisseria meningitidis; identical to SEQ ID NO: 1305

SEQ ID NO: 8983 - protein, 269 aa, Neisseria meningitidis; identical to SEQ ID NO: 2402

SEQ ID NO: 8984 - protein, 314 aa, Neisseria meningitidis; identical to SEQ ID NO: 3488

SEQ ID NO: 8985 - protein, 636 aa, Neisseria meningitidis
MNILSVENASFAIGHVALLDKTSFQLDSGEKVGLIGRNGAGKSSFLKILAGVQKLDDGQIIIQNNLKIVYVPQESFFDKDATVFDTVAEGLGEIRDLLRRYHRVGHELENGSGEALLKELNELQLEIEAKDGWKLDAAVKQTLGELGLPENEKIGNLSGGQKKRVALAQAWVQKPDVLLLDEPTNHLDIDAIIWLENLLKAFEGSLVVITHDRRFLDNIATRIVELDRGILRSYPGSFSKYSEKKVQELAVEAEHNRLFDKFHAQEEAWIRKGIEARRTRNEGRVRRLEELRRQRAERRNVQGQVNFKLDSGEKSGKIIAELEHASFAYGDKVIMDKFSAILQRGDKIGLIGPNGIGKTTFLKLILGELNPTYGRIRIGSKQEVAYFDQFRSTLNENDTVFYTLGQGNDYVEVGGKKKHIMSYLEDFLFHPARAQSPVSSLSGGERNRLLLAKLFTRPANILILDEPTNDLDIDTQELLEDLLRDYQGTVFLVSHDRMFLDNVITQSIIFEGNGRLKEYIGGYQDYIDAKSREAKIQTESAPKTADAEPVKEKPKANRTVKLSYKEQRELDALPDEIAALEAEQAEINAQLSDPEIFKDYEKAGALQSRAEEIEMLLLEKLERWELLETKQNGNAV

SEQ ID NO: 8986 - protein, 275 aa, Neisseria meningitidis
MMLKKFVLGGIAALVLAACGGSESGSGASSAPAQSAVSGSLIERINNKGTVTVGTEGTYAPFTYHDKDGKLTGYDVEVTRAVAEKLGVKVEFKETQWDSMMAGLKAGRFDVVANQVGLTSPERQATFDKSDPYSWSGAVLVARNDSNIKSIDDIKGVKTAQSLTSNYGEKAKAAGADLVAVDGLAQSLTLIEQKRADATLNDELAVLDYLKKNPNAGVKIVWSAPADEKVGSGLIVNKGNDEAVAKFSTAINELKADGTLKKLGEQFFGKDISVQ

SEQ ID NO: 8987 - protein, 93 aa, Neisseria meningitidis; identical to SEQ ID NO: 2977

SEQ ID NO: 8988 - protein, 1204 aa, Neisseria meningitidis
MSAPIQAFDPLTVPIAGTNLIEASAGTGKTYGIAALFTRLIVLEQKNVERVLVVTFTKAATAELKTRLRARLDDVLQVLESKEIAKLGDDTLSDGIAAYCAEHHKGDTFLPALLKQALQKEGRTRLIVRLKAAIGQFDNAAIYTIHGFCQRILRDYAFLCQAPFDVELTEEDGDRLLVPAQDFWRERVSNDPVLAALAFKRKAVPQTVLAQIRAYLSRPYLNFRRPQTDLPQARDAALASWQNICGNLAELKETFWRIHPLLNGNSYRKNSFAELFDALEQKALSPDLPFLEAKLHERLLKLASDKLEAGLKKGKTPDAAVFAELQKLADFRRDLDALEEAEEATIIRLQLDLIGYLNRSLAEMKKSRRERGFDDLLLDVHTALTDNPHAETLARAVAENWETALIDEFQDTDPLQYEIFQKIFIAQNRPLFLVGDPKQAIYSFRGADIYAYLQAAEDARHRYTLATNYRSHAALIGSIGALFRLKERPFVLENIGYSEVGAARAESRLSPERPAVQVRWLHENDNEKANKDVLRRRAADYCADEIAHALNEAAECRLNFKGCPLQSGDIAVLVRTHNEAVMVSAALKKRQVQSVLLSRESVFASPEAAALSALIGFWLEPRRAGTLRFVLTSGIFGYDAQQLHDFNQNESEILHWAESARTALDNWNQYGIFAAMQQFSQTHGIETRLLSRNNGRSLTNYFQLLELLAAEDAQNRNPAALHKWLRDQISLAGNNSGDNRAIRLESDEDLVKIVTMHASKGLQYPLVYCPFAWDAQDTGPSDWQILHQSANRTELLAKAQLSEDEQKQYADEEMAERLRLLYVALTRAEEQLNIYAAYSSDTADNPLAYLIEGLPQDSRETVRQTYDREKDGIAMLKRNWRRLTDNAPAGTDFAFTEDAPPPAAYRGNAGQTAEFAANSIPERRFRFVRHTSFTALSRHTQTPDGGEEDACPSLDAAETSVPAMPSETPTASDGISIHDFPKGTQAGLCLHEILEDFKFGQAAAGQETLIADKLKKYGFEEIWLPAVAEMAEACRKTPLTGAYCLSDIPPECRCPEMGFTLHTEDFGLKRLRDWFARDDIRLPEVCRAAAETLDFHTVNGFLNGFIDMVCQDPDGNICVIDYKSNHLGADASAYTQQAMDEAVAHHHYYLQALIYAVAAARYFKLRGQPPAAVSVRYLFLRGLDGKGGGVWRWDIDAAALEQIK

SEQ ID NO: 8989 - protein, 380 aa, Neisseria meningitidis; identical to SEQ ID NO: 314

SEQ ID NO: 8990 - protein, 262 aa, Neisseria meningitidis; identical to SEQ ID NO: 256

SEQ ID NO: 8991 - protein, 670 aa, Neisseria meningitidis; identical to SEQ ID NO: 2902

SEQ ID NO: 8992 - protein, 68 aa, Neisseria meningitidis; identical to SEQ ID NO: 4044

SEQ ID NO: 8993 - protein, 197 aa, Neisseria meningitidis; identical to SEQ ID NO: 2603

SEQ ID NO: 8994 - protein, 379 aa, Neisseria meningitidis
MKKTLVAAAILSLALTACGGGSDTAAQAPSAKPEAEQSGKLNIYNWSDYVDPETVAAFEKETGIKTRSDYYDSNETLEAKVLTGKSGYDLTAPSIANVGRQIKAGAYQKIDKAQIPHYSNIDKDLLKMMEAVDPGNEYAVPYFWGINTLAINTRQVQKALGTDKLPENEWDLVFKPEYTAKLKSCGISYFDSAIEQIPLALHYLGKDPNSENPEDIKAAVDMMKAVRGDVKRFSSSGYIDDMAAGNLCAAIGYGGDLNIAKTRAEEAANGVEIKVLTPKTGVGVWVDSFMIPRDAQNVANAHRYIDYTLRPEVAAKNGSFVTYAPASRPARELMDEKYTSDASIFPNKELMEKSFIVSPKSAESAKLGVKLWQGLKAGK

SEQ ID NO: 8995 - protein, 183 aa, Neisseria meningitidis
MPSERRPFQTAFLSNRKTVGKLAERVQSRYDGLHKFKHVCSAAMALIKEPLDKAKQRNEELEAAEEAAAQEALGREQEVDRVSEWEERYKLSRSEFEQFWKGLPQTVQNKLQASQKTWKSGMDKICANNAKAEGETPNGIKFSELACKTAETEARLEELHNRKKALIDEMAREADKKELPKRL

SEQ ID NO: 8996 - protein, 384 aa, Neisseria meningitidis; identical to SEQ ID NO: 4652

SEQ ID NO: 8997 - protein, 318 aa, Neisseria meningitidis
MILTPPDTPFFLRNGNADTIAAKFLQRPAPAYRRELLPDSTGKTKVAYDFSDGISPDAPLVVLFHGLEGSSGSHYAVELMLAVRDRGWNGAVVHFRSCGGIANTAPVFYHLGDTAEIAFTLDTLAARYREIYAVGVSLGGNALAKYLGERGENALPQAAAVISAPVDAEAAGRRFDSGITRLLYTRYFLRTLIPKARSLHGFQTAFAAGCKTLGEFDDRFTAPLHGFADRHDYYRQTSCKPLLKHVAKPLLLLNAANDPFLPPEALPTPDEVSEAVTLFQPAHGGHAGFVGSTGGRLHLQWLPQTVLSYFDSFRTNRR

SEQ ID NO: 8998 - protein, 199 aa, Neisseria meningitidis; identical to SEQ ID NO: 2856

SEQ ID NO: 8999 - protein, 165 aa, Neisseria meningitidis
MTALTLPEDIRQQEPSALLYPLVSAYLEHTAQTGDESLSCLSDDQHTLTAFCYLDSQVEEGGFVQLIASGYGEYIFRNPLADSLRRWKIKAVPKVLDKAKALYEQHGKTIETLADGGADIESLRKQFPDFEEWDGAYYEAAEQDLPLLAEHIQSNWETFAHIGQA

SEQ ID NO: 9000 - protein, 220 aa, Neisseria meningitidis; identical to SEQ ID NO: 5269

SEQ ID NO: 9001 - protein, 553 aa, Neisseria meningitidis
MLTYTPPDARPPAKTHEKPWLLLLMAFAWLWPGVFSHDLWNPAEPAVYTAVEALAGSPTPLVAHLFGQTDFGIPPVYLWVAAAFKHLLSPWAADPYDAARFAGVFFAVVGLTSCGFAGFNFLGRHHGRSVVLILIGCIGLIPVAHFLNPTAAAFAAAGLVLHGYSLARRRVIAASFLLGTGWTLMSLAAAYPAAFALMLPLPVLMFFRPWQSRRLMLTAVASLAFALPLMTVYPLLLAKTQPALFAQWLDDHVFGTFGGVRHVQTAFSLFYYLKNLLWFALPALPLAVWTVCRTRLFSTDWGILGVVWMLAVLVLLAVNPQRFQDNLVWLLPPLALFGAAQLDSLRRGAAAFVNWFGIMAFGLFAVFLWTGFFAMNYGWPAKLAERAAYFSPYYVPDIDPIPMAVAVLFTPLWLWAITRKNIRGRQAVTNWAAGVTLTWALLMTLFLPWLDAAKSHAPVVRSMEASLSPELKRELSDGIECIDIGGGDLHTRIVWTQYGTLPHRVGDVQCRYRIVRLPQNADASQGWQTVWQGARPRNKDSKFALIRKIGENI

SEQ ID NO: 9002 - protein, 134 aa, Neisseria meningitidis; identical to SEQ ID NO: 2143

SEQ ID NO: 9003 - protein, 157 aa, Neisseria meningitidis; identical to SEQ ID NO: 7285

SEQ ID NO: 9004 - protein, 160 aa, Neisseria meningitidis; identical to SEQ ID NO: 1762

SEQ ID NO: 9005 - protein, 137 aa, Neisseria meningitidis
MMPAYAYAALAFSAFTSATLLPGTSEAAFALFVRRFPEHAYGALLCAGLANGLGSMVSYWMGRLLPSRKMPSEKTLNLMRRFGIWLLPFAWLPVVGDALPLAAGWLRLNPWTSGLMLVIGKTARYAFILWGMQYYAA

SEQ ID NO: 9006 - protein, 328 aa, Neisseria meningitidis; identical to SEQ ID NO: 372

SEQ ID NO: 9007 - protein, 148 aa, Neisseria meningitidis; identical to SEQ ID NO: 3068

SEQ ID NO: 9008 - protein, 331 aa, Neisseria meningitidis
MLKKMLKWTAVFLTVSAAVFAALLFVPKDNGRAYRIKIAKNQGISSVGRKLAEDRIVFSRHVLTAAAYALGVHNRLHTGTYRLPSEVSAWDILQKMRGGRPDSVTVQIIEGSRFSHMRKIIDATPDIEHDTKGWSNEKLMAEVAPDAFSGNPEGQFFPDSYEIDAGGSDLQIYQTAYKAMQRRLNEAWESRQDGLPYKNPYEMLIMASLVEKETGHEADRDHVASVFVNRLKIGMRLQTDPSVIYGMGAAYKGKIRKADLRRDTPYNTYTRGGLPPTPIALPGKAALDAAAHPSGEKYLYFVSKMDGTGLSQFSHDLIEHNAAVRKYILKK

SEQ ID NO: 9009 - protein, 93 aa, Neisseria meningitidis
MKKSLFAAALLSLVLAACGGEKAAEAPATEAPAAEAPAAEAAATEAPAAEAPTAEAAATEAPAAEAPAAEAAATEAPAAEAPAAEAPAAEAAK

SEQ ID NO: 9010 - protein, 330 aa, Neisseria meningitidis
MKQKIFVLYTGGTIGMTQSSEGLRPDTALVGQALAPFSNGMDFDWHVCGTLIDSSAVQLQNWCAWLDIIATALPQYDGVLVLHGTDTLAYTANLFALALQGLDKPIVLTGSQWPYNAVGSDAPRNLATAVAAFPLGLKQTLIAFDGKLYPAVGSSKVSTETAAGFDNPHFGALAEWDETQGWHNVRIPNQDTADVSDGLKIRYPDPQAKIAVRTLIPGFAVQELADGLGQLPAHALILQSYGHGNTPADEGFIRAVQDFTQQGRLLLNISQVRQGRTAAVYAQGNAFRNSGIINGGKCNLETATALMTLAVSEGWGADEVKHELQRLGLV

SEQ ID NO: 9011 - protein, 463 aa, Neisseria meningitidis
MFPDFSQTLSKDRHFLQSAFKNPNKYGGLSKVEEKYRKSHEIFLKRLAALPKPEFDNTLPVHEKLDEIKKTVAEHQVTIICGETGSGKTTQLPKICLELGRGVAGLIGHTQPRRLAARSVAERIAEELKSEIGSAVGYKVRFTDHTSRDACVKLMTDGILLAETQTDRYLAAYDTIIIDEAHERSLNIDFLLGYLKQLLPRRPDLKVIITSATIDAERFSRHFNGAPVLEVSGRTYPVEILYRPLTGKDEDDAEVELTDAIVDAADELARHGEGDILVFLPGEREIRETAEALRKSTLRRNDEILPLFARLSHAEQHKIFHPSGAKRRIVLATNVAETSLTVPGIKYVIDTGLARVKRYSARAKVEQLHVEKISQAAARQRSGRCGRVSAGVCIRLFSEEDFNSRPEFTDPEIVRSNLAAVILRMASLNLGDVAAFPFLEMPDSRYINDGFQVLLELGAVEAV

SEQ ID NO: 9012 - protein, 183 aa, Neisseria meningitidis
MKVLNGWSDRKMWRVLSALPIGVVFFDLIYGFVLNVLQGLDLQRAVPDLEGVLAVTPDIAFNSLQIVANGGMAAVVCFGLAVVFLLNRSVRRRQVLEIGVFQMLGLVAVLAFSAPSVWEWANALPLLLKGADVVNTGNARYVLTALCMPFPAVSCVIGLVGRFRLQTASGRAAKSGGAGKADG

SEQ ID NO: 9013 - protein, 617 aa, Neisseria meningitidis
MNRYPLWKYLLIVFTIAVAAVYSLPNLFGETPAVQVSTNRQAIIINEQTQSKVDAALQNAGIQTDGMFVVDNSLKVRFKDTETQLKARDVIENTLGEGYITALNLLADSPEWMAKIKANPMFLGLDLRGGVHFTMQVDMKAAMQKTFERYSGDIRRELRREKIRSGTVRQAGNSLTVPLQDAGDVQKALPQLRKLFPEATLNSDGSNIVLTLSEEAVNKVRSDAVKQNITTLHNRVNELGVAEPVIQQSGADRIVVQLPGVQDTAKAKDIIGRTATLELRMVEDDPAKLREALEGNVPSGYELLSSGGDRPETLLISKQVELTGDNINDAQPSFDQMGAPAVSLSLDSAGGSIFGELTAANVGKRMAMVLIDQGKSEVVTAPVIRTAITGGRVEISGSMTTAEANDTSLLLRAGSLAAPMQIVEERTIGPSLGKENIEKGFHSTLWGFAIVAAFMVVYYRLMGFFSTIALSANILFLIGILSAMQATLTLPGMAALALTLGMAIDSNVLINERIREELRVGVPPQQAINLGFQHAWATIVDSNLTSLIAGIALLVFGSGPVRGFAVVHCLGILTSMYSSVVVFRALVNLWYGRRRKLQNISIGAVWKPEAETAAGKE

SEQ ID NO: 9014 - protein, 96 aa, Neisseria meningitidis; identical to SEQ ID NO: 5466

SEQ ID NO: 9015 - protein, 356 aa, Neisseria meningitidis
MNLISRYIIRQMAVMAVYALLAFLALYSFFEILYETGNLGKGSYGIWEMLGYTALKMPARAYELMPLAVLIGGLVSLSQLAAGSELTVIKASGMSTKKLLLILSQFGFIFAIATVALGEWVAPTLSQKAENIKAAAINGKISTGNTGIWLKEKNSIINVREMLPDHTLLGIKIWARNDKNELAEAVEADSAVLNSDGSWQLKNIRRSTLGEDKVEVSIAAEENWPISVKRNLMDVLLVKPDQMSVGELTTYIRHLQNNSQNTRIYAIAWWRKLVYPAAAWVMALVAFAFTPQTTRHGNMGLKLFGGICLGLLFHLTGRFFGFTSQLYGIPPFLAGALPTIAFALLAVWLIRKQEKR

SEQ ID NO: 9016 - protein, 344 aa, Neisseria meningitidis; identical to SEQ ID NO: 8135

SEQ ID NO: 9017 - protein, 148 aa, Neisseria meningitidis; identical to SEQ ID NO: 2500

SEQ ID NO: 9018 - protein, 421 aa, Neisseria meningitidis
MFSFFRRKKKQETPALEEAQIQETAAKAESETDQVIENIKEEVESLTESVKEQVESAVETVSGAVEQVKETVAEMLSEAEEAAEKAAEQVEAAKEAIAETVGEAVGQVQEAVATTEEHKLGWAARLKQGLTKSRDKMAKSLAGVFGGGQIDEDLYEELETVLITSDMGMEATEYLMKDVRDRVSLKGLKDGNELRGALKEALYDLIKPLEKPLVLPETKEPFVIMLAGINGAGKTTSIGKLAKYFQAQGKSVLLAAGDTFRAAAREQLQAWGERNNVTVISQTTGDSAAVCFDAVQAAKARGIDIVLADTAGRLPTQLHLMEEIKKVKRVLQKAMPDAPHEIIVVLDANIGQNAVNQVKAFDDALGLTGLIVTKLDGTAKGGILAALASDRPVPVRYIGVGEGIDDLRPFDARAFVDALLD

SEQ ID NO: 9019 - protein, 227 aa, Neisseria meningitidis; identical to SEQ ID NO: 2059

SEQ ID NO: 9020 - protein, 302 aa, Neisseria meningitidis
MNQTAINRADVRTRFIFDDMPVRGLHVRLENEWQHIVKQKNYPAAIRRALGELLAAGVLLSGNLKNEGTLIVQVQGQGRLKMLVAEATSDRTVRATARWDEAAEIGEDESLVDLLGEGGVFVLTLQPKDGEPWQGVVPLEGDGIAQMLMNYMKRSEQLDTHIVLSASDEAAGGLLVQRLPEEVLDEEAWEHVSTLARTLTAGELAELDAQHVLYRLFHETPPRVFEPETFEFSCTCSRGKVSDMLLMLGGEEVGGVVVEQGSIEVDCDFCHSKYVFDETDVNALFGEDVVGVAKGLPRHIVQ

SEQ ID NO: 9021 - protein, 709 aa, Neisseria meningitidis
MNNPLVNQAAMVLPVFLLSACLGGGGSFDLDSVDTEAPRPAPKYQDVSSEKPQAQKDQGGYGFAMRLKRRNRHPQAKEDKVELNPNDWEETGLPSKPQNLPERQQSVIDKVKTDDGSNIYTSPYLTQSNHQNGSTNSGANQPKNEVKDYKNFKYVYSGWFYKHAESEREFSKIKFKSGDDGYIFYHGKDPSRQLPTSEKVIYKGVWHFVTDTEKGQKFNDILETSKGQGDRYSGFSGDDGETTSNRTDSNLNDKHEGYGFTSNLEVDFGSKKLTGKLIRNNRVTNATTNDKYTTQYYSLDAQITGNRFNGKAIATDKPDTGGTKLHPFVSDSSSLSGGFFGPKGEELGFRFLSDDKKVAVVGSAKTKDKTENGAVASGGTDAAASNGAAGTSSENSKLTTVLDAVELKLGDKEVQKLDNFSNAAQLVVDGIMIPLLPEASESGNNQANQGTNGGTAFTRKFDHTPESDKKDAQAGTQTNGAQTASNTAGDTNGKTKTYEVEVCCSNLNYLKYGMLTRKNSKSAMQAGESSSQADAKTEQVEQSMFLQGERTDEKEIPSEQNIVYRGSWYGYIANDKSTSWSGNASNATSGNRAEFTVNFADKKITGTLTADNRQEATFTIDGNIKDNGFEGTAKTAESGFDLDQSNTTRTPKAYITDAKVQGGFYGPKAEELGGWFAYPGDKQTKNATNASGNSSATVVFGAKRQQPVR

SEQ ID NO: 9022 - protein, 256 aa, Neisseria meningitidis
MRLTDTHCHLADSVLRGNLAQVLAEARQAGVWRFIVPATRPQDWQSVAELSEMPSEHGQIRIALGIHPWFSDGIAERDCVRLETMLARYPQAWVGEIGLDFYDKTQTPPQRERQIQVFVRQLAIAQTLRRRVIIHNLKATADIAAAVKQTGFAQGGIVHAFSGSAEEARVLTKLGFKIGIGSLLLNPNARKVRDTLKALNDGDFVLETDSPFMLKKEINTPANILRIAEIAAQIRGTGAAEIAAITERNADSLLRP

SEQ ID NO: 9023 - protein, 129 aa, Neisseria meningitidis; identical to SEQ ID NO: 322

SEQ ID NO: 9024 - protein, 572 aa, Neisseria meningitidis
MNLHQTVEHEAAAAFAAAGIADSPVVLQPTKNAEHGDFQINGVMGAAKKAKQNPRELAQKVADALAGNAVIESAEVAGPGFINLRLRPEFLAQNIQTALNDARFGIAKTDRPQTVVIDYSSPNLAKEMHVGHLRSSIIGDSISRVLAFMGNTVIRQNHVGDWGTQFGMLVAYLVEQQKDNAAFELADLEQFYRAAKARFDEDPAFADTAREYVVKLQGGDETVLALWKQFVDISLSHAQAVYDTLGLKLRPEDVAGESKYNDDLQAVVDDLVQKGLAVEDDGAKVVFLDEFKNKEGEPAAFIVQKQGGGFLYASTDLACLRYRFGTLHADRLLYVVDHRQALHFEQLFTTSHKAGYLPENVGAAFVGFGTMMGKDGKPFKTRSGDTVKLVDLLTEAVERATALVKEKNPELGADEAAKIGKTVGIGAVKYADLSKNRTSDYVFDWDAMLSFEGNTAPYLQYAYTRVQSVFRKASEWDATAPTVLTEPLEKQLAAELLKFEDVLQSVADTAYPHYLAAYLYQIATLFSRFYEACPILKAEGASRNSRLQLAKLTGDTLKQGLELLGIDVLDVM

SEQ ID NO: 9025 - protein, 192 aa, Neisseria meningitidis
MKTFALILADGQASRMGGEDKGLALLGGKALIDHVIDRVRPQVSHIAISTNRNLEEYARRSPHIFPDARQWQHFGPLSALCTAANDLQLATADWLLVVPCDMPYLPGDLVARFETVSKRTPLCNAYYVETPITMHYNIMYIRPQILQSAIPYLFSGMKTLRSWLQQQRARPVRFEFDGHFADLNTQIDLQEG

SEQ ID NO: 9026 - protein, 105 aa, Neisseria meningitidis; identical to SEQ ID NO: 3278

SEQ ID NO: 9027 - protein, 301 aa, Neisseria meningitidis; identical to SEQ ID NO: 2409

SEQ ID NO: 9028 - protein, 427 aa, Neisseria meningitidis
MTVSKSGFIGQIFSRNMLVCIFTGFTSGLPLYFLINLIPAWLRSEQVDLKSIGLMALIGLPFTWKFLWSPLMDAVRLPVLGRRRGWMLLTQAGLLAALAAYAFLNPRNHLPLIAGLSVLVAFFSASQDIVLDAFRREILSDEELGLGNSVHVNAYRVAALIPGSLSLVLADRMPWSEVFVITSLFMLPGLLMTLFLAREPVLPPAVPKTLKQTVVEPFKEFFTRKGIASAVCVLLFIFLYKLGDSMATALATPFYLDMGFSKTDIGLIAKNAGLWPAVAAGILGGVWMLKIGVNKALWLFGAVQAVTVLGFVWLAGFGPFDTVGTGERLMLAAVIGAEAVGVGLGTAAFVSYMARETNPAFTATQLALFTSLSAVPRTVINSFAGYLIEWLGYVPFFQLCFALALPGMLLLLKVAPWNGEKTQDAGR

SEQ ID NO: 9029 - protein, 403 aa, Neisseria meningitidis
MNQLKLAVSGAQILFVAFGAMVLVPLLTGLNPALALLGAGLGTLLFQITTKRKVPIFLGSSFAFIAPIIYSVGEWGLPSTMFGLFTAGFMYFVFAALIRWRGLAAVHKLLPPVVIGPVIMVIGLSVAVAASSMAMGQADGKQVIDYTDSLILSGFTFAVTAIVSVFGSRMMKLIPILIGVASGYVLALLMGLVDTASIAHAPWFAVPHFETPQVNWQAALFMLPVAVAPAIEHIGGIMAIGNVTGKDYTKDPGLDKTLAGDGLGVCVAGLIGGPPVTTYGEVTGAVMITKNSNPVIMTWAAVFAVCMAFFGKFNAFLASIPMPVMGGIMLLLFGTIASLGVKTLIDAKVDLMLPKNLVIVSSVLTTGIGGMTLKLGSFSFAGVGLCAVLAIMLNSLLPDPKES

SEQ ID NO: 9030 - protein, 171 aa, Neisseria meningitidis; identical to SEQ ID NO: 6461

SEQ ID NO: 9031 - protein, 231 aa, Neisseria meningitidis; identical to SEQ ID NO: 1993

SEQ ID NO: 9032 - protein, 291 aa, Neisseria meningitidis; identical to SEQ ID NO: 2244

SEQ ID NO: 9033 - protein, 388 aa, Neisseria meningitidis
MRKFNLTALSVMLALGLTACQPPEAEKAAPAASGEAQTANEGGAVSIAVNDNACEPMELTVPSGQVVFNIKNNSGRKLEWEILKGVMVVDERENIAPGLSDKMTVTLLPGEYEMTCGLLTNPRGKLVVTDSGFKDTANEADLEKLSQPLADYKAYVQGEVKELVAKTKTFTEAVKAGDIEKAKSLFADTRVHYERIEPIAELFSELDPVIDAREDDFKDGAKDAGFTGFHRIEYALWVEKDVSGVKEIAAKLMTDVEALQKEIDALAFPPGKVVGGASELIEEVAGSKISGEEDRYSHTDLSDFQANVDGSKKIVDLFRPLIEAKNKALLEKTDTNFKQVNEILAKYRTKDGFETYDKLGEADRKALQASINALAEDLAQLRGILGLK

SEQ ID NO: 9034 - protein, 159 aa, Neisseria meningitidis
MPESIFKQISLDILKLHRDSVYSLLATSGCNCQVHEAAYVNIDGKYYIALSCEPEVGEVKTGILLIEDESRNLRLSWVGSARELDCKDNAYKRALSALSRKLGRCKDKLHTAVQPFLLELVPEKGRFSVGDEEVWISRNDLVRALYPVGYSMRQAVFQI

SEQ ID NO: 9035 - protein, 270 aa, Neisseria meningitidis
MDKIRVAAVQMVSGVSPETNVAAMKRLVARAAEQGVDWVLLPEYWVLMGANDTDKLALAEPLGGGRFQTALSETAKECGVVLFGGTVPLQSPEAGKVMNTLLVYGRDGKRTGLYHKMHLFGFSGLGERYAEADTISAGREVPHLSAEGVSVAAGICYDVRFPEFFRRQLPFDVLMLPAAFTHTTGKAHWELLLRARAVENQCYVVAAAQGGLHENGRRTFGHSMIVDPWGDVLDVLPEGEGIVTADIDANRLNSVRNRLPALKYRVLDAV

SEQ ID NO: 9036 - protein, 259 aa, Neisseria meningitidis
MSATIPPKIIRYDSNPTDVYFFGTCVLDLFMPEAGMDAITLIEQQGIRVHFPMAQSCCGQPAYSSGHPTEAFDVARAQLDLFPEEWPIVVPSGSCGGMMKHHWPTLFKGSEYEERAVDCAGRIIEFTHFLLAIGFKPEDKGEPLKVAVHTSCAARREMNVHLSGWQLIDGMENVERIVHDHESECCGFGGTFSVKQADISGAMVTDKVAALKETGATEIISADCGCMMNIGGKIAKDEPNMPRPKHIASFLLERTGGKA

SEQ ID NO: 9037 - protein, 81 aa, Neisseria meningitidis; identical to SEQ ID NO: 1361

SEQ ID NO: 9038 - protein, 284 aa, Neisseria meningitidis
  misc_feature 278, 279: 'Xaa' is any amino acid
MSREMLQLAEALASEKNVDAEVVFQALEFALSTAAKKKADREHMDVRVQINRDTGEYQTFRRWLIVADEDYTYPDVEKTIEEIQEEIPGTTIQIGEYYEEQLPNEGFGRQAAQTAKQIILQRIRDAEREQNLNEFLAVKEDIVSGTVKRVERHGIIVEVVAGKLDALIPRDQMIPRENFRSGDRIRALFLRVEEIGNTGRKQVILSRTSGDFLVKLYANEVPEIADGMLEIRAVARDPGQRAKVAVKANDQRIDPQGTCIGVRGSRVNAVSNELSGEXXTHLIN

SEQ ID NO: 9039 - protein, 92 aa, Neisseria meningitidis; identical to SEQ ID NO: 32

SEQ ID NO: 9040 - protein, 93 aa, Neisseria meningitidis; identical to SEQ ID NO: 3468

SEQ ID NO: 9041 - protein, 384 aa, Neisseria meningitidis
MVDKKSPLIAVSVGEASGDLLGAHLIRAIRKRCPQARFVGIGGELMKAEGFESLYDQERLAVRGFAEVVRRLPEILRIRRGLVRDLLSLKPDVFVGIDAPDFNLGVAERLKRSGIPTVHYVSPSVWAWRRERVGKIVHQVNRVLCLFPMEPQLYLDAGGRAEFVGHPMAQLMPLEDDRETARKTLGVDAGIPVFALLPGSRVSEIDYMAPVFFQTALLLLERYPAARFLLPAATEATKRRLAEVLQRPEFAGLPLTVIDRQSETVCRAADAVLVTSGTATLEVALCKRPMVISYKISPLTYAYVKRKIKVPHVGLPNILLGKEAVPELLQSEAKPEKLAAALADWYEHPDKVAALQQDFRALHLLLKKDTADLAARAVLEEAGC

SEQ ID NO: 9042 - protein, 173 aa, Neisseria meningitidis
MSCFSIKRMSAFRARITVFFTAFVFLTAALPAYAERLPDFLAKIQPSEIFPGADRYGKPEGKPMVARVYKGDEQLGLVYITTDAVNTRGYSNKPIDTLMALANDGTIAGAKLVDHHEPIMLIGIPHLPAPMRAIRSNWLPAYIKPNFISTNRLRLKGLLTVLQPSKETGADVR

SEQ ID NO: 9043 - protein, 158 aa, Neisseria meningitidis
MEHLFGKWLPDLPAAVSDGIDLPMSRLLKARSLTAALRALPHTFSVELLKLGELETECGGRLVREVLLKLDRIPVVEARSECRIGSAFWQNILDCGTRPLGERLFQADLEGARSAFEFAVSGEGCGRYFAARRSRFSRHGEEMLLTEYFLPELKRFIG

SEQ ID NO: 9044 - protein, 375 aa, Neisseria meningitidis
MKHLLIDFENVQPQNLDKLPTENTHIWLFIGVLHKMLPISLVQSLLRFGERVHLVQLQKTGKNALDFYLSYYLGQITATDPNAQIGILSRDGGYDVLVEHILKNHQAKGIVRLANIDEVQHQKITTEPPSALLENTPQPETTLKPQQPLTSYFQAALTALRRPDAFRPCRLHNLRQNLRKHILSDLFKEKTDEECEITTANVINKLKAQNFISIDEQETVSYHLSDNDLLQRIQRHILSQRPKTYADFQAVVQNRADALHLTVGTNDIQSFARHLRDQNLIRQNNGKIEYAPFTEPKPQPTPKQPKKTAWEPDEIIWKKVIAALSLKNRPNKTKTLRNTIQALTKSNAQETDKLLQHLQDTQVLRIDGTKIVYIK

SEQ ID NO: 9045 - protein, 352 aa, Neisseria meningitidis; identical to SEQ ID NO: 1807

SEQ ID NO: 9046 - protein, 203 aa, Neisseria meningitidis; identical to SEQ ID NO: 2845

SEQ ID NO: 9047 - protein, 223 aa, Neisseria meningitidis; identical to SEQ ID NO: 1391

SEQ ID NO: 9048 - protein, 395 aa, Neisseria meningitidis; identical to SEQ ID NO: 2182

SEQ ID NO: 9049 - protein, 429 aa, Neisseria meningitidis; identical to SEQ ID NO: 2821

SEQ ID NO: 9050 - protein, 950 aa, Neisseria meningitidis
MKLSELFNPDEFAARHLSFGDEAALLAAVGEKSMDDFVGNTVPQSIRMPSELDLPDALTEADALAKLKGIASKNVINKSYIGLGYYPTRVPNVTLRNVLENPGWYTAYTPYQAEIAQGRLEALLNFQQVCIDLTGFPVAGASLLDEATAAAEAMAMAHRVGKVKSERFFVDARVYPQTLDVMKTRAKYFGFELVVGDFAQAEEGEYFGALFQYVGKDGDVQDLQDVIGRLKAKGTIVAVAADIMSLVLLKSPAELGADIALGNTQRFGVPMGFGGPHAAYFAFKDEFKRSAPGRIIGVSKDASGKPALRMALSTREQHIRREKATSNICTAQALLANLAGMYAVYHGPEGVKRIANRIHALASAFADALVSDGLNVVHKVFFDTVTVDFGSKEQADQVFAAALESGYNLRRVSDTQVAAAFHETSTREDLVDLYRAFTGKDTFAFADDVKGRLNAELLRQDDILQHPVFNRYHTEHEMLRYLKKLEDRDLAMNRSMISLGSCTMKLNATAEMLPITWAEFSDIHPYAPETQTAGYRELLTDMENSLKAITGFDAISLQPNSGAQGEYTGMLSIRRYQEANGEGHRNICLIPKSAHGTNPATAAMLGLKVVVVDTDEHGNVNIDDLKAKAEQHRDTLSAIMITYPSTHGVYEEGIRDICRIIHENGGQVYMDGANLNAQIGIMQPAEVGADVLHMNLHKTFCIPHGGGGPGMGPIGLKAHLAPFAPGHVVTDMHNASADQTAVAAAAFGSASILPITWMYLTMMGKQGMEQATRWALLNANYVAKRLSEDYPILYTGKNGRVAHECIVDLRPLKAESGITETDIAKRLMDYGFHAPTVSFPVAGTLMIEPTESESKAELDRFIAALKQIKQEVLKVERGEWPKEDNPLVNAPHTASDVTGEWTHPYSREEAVFPLPFVREHKFWPSVNRVDDVYGDRNLVCSCPPMENYED

SEQ ID NO: 9051 - protein, 304 aa, Neisseria meningitidis; identical to SEQ ID NO: 3139

SEQ ID NO: 9052 - protein, 120 aa, Neisseria meningitidis
MKLPRNRFSLLSALWFAGGIYSLLFKAADTAPPPFPHFDKAAHLALFFAQIWLLTKAFKTGKLPIPYRSLMVFALCFALFSECAQAWFTATRTGSLGDVLADLTGALLALFAARSADRPD

SEQ ID NO: 9053 - protein, 42 aa, Neisseria meningitidis
MNEQDLDLDNLDNLLDDFDGVTVEGGVDSENDDGCEGGACKI

SEQ ID NO: 9054 - protein, 318 aa, Neisseria meningitidis; identical to SEQ ID NO: 3091

SEQ ID NO: 9055 - protein, 447 aa, Neisseria meningitidis; identical to SEQ ID NO: 2839

SEQ ID NO: 9056 - protein, 644 aa, Neisseria meningitidis
MSLIECKNINRYFGSGENRVHILKDISLSIEKGDFVAIIGQSGSGKSTLMNILGCLDTAGSGSYRIDGIETAKMQPDELAALRRERFGFIFQRYNLLSSLTARDNVALPAVYMGAGGKERSARAEKLLQDLGLASKEGNKPGELSGGQQQRVSIARALMNGGEIIFADEPTGALDTASGKNVMEIIHKLHKAGHTVIMVTHDPGIAANANRVIEIRDGEIISDTSKNPEIPASNVGRIREKASWSFYYDQFVEAFRMSVQAVLAHKMRSLLTMLGIIIGIASVVSVVALGNGSQKKILEDISSIGTNTISIFPGRGFGDRRSGRIKTLTIDDAKIIAKQSYVASATPMTSSGGTLTYRNTDLTASLYGVGEQYFDVRGLKLETGRLFDENDVKEDAQVVVIDQNVKDKLFADSDPLGKTILFRKRPLTVIGVMKKDENAFGNSDVLMLWSPYTTVMHQITGESHTNSITVKIKDNANTQVAEKGLADLLKARHGTEDFFMNNSDSIRQIVESTTGTMKLLISSIALISLVVGGIGVMNIMLVSVTERTKEIGIRMAIGARRGNILQQFLIEAVLICVIGGLVGVGLSAAVSLVFNHFVTDFPMDISAMSVIGAVACSTGIGIAFGFMPANKAAKLNPIDALAQD

SEQ ID NO: 9057 - protein, 394 aa, Neisseria meningitidis
MTPQVLTILGSTGSIGESTLDVVSRHPEKFRVFALAGHKQVEKLAVQCRTFRPEYAVVADAEHAARLEALLKGDGTATQVLHGAQALVDVASADEVSGVMCAIVGAVGLPSALAAAQKGKTIYLANKETLVVSGALFMETARANGAAVLPVDSEHNAVFQVLPRDYAGRLNEHGIASIILTASGGPFLTADLNTFDSITPAQAVKHPNWSMGRKISVDSASMMNKGLELIEAHWLFNCPPEKLEVVIHPQSVIHSMVRYRDGSVLAQLGNPDMRTPIAYCLGLPERIDSGVGDLDFDALSALTFQKPDFDRFPCLKLAYEAMNAGGAAPCVLNAANEAAVAAFLDGQIKFTDIAKTVAHCLSQDFSDGIGDIGGLLAQDARTRAQARAFIGTLR

SEQ ID NO: 9058 - protein, 550 aa, Neisseria meningitidis
MVAYVFLFLFVTAALVLIIRSHYRWTYFFASALFVFLAGGMLMLTAQWQRALNFASVWFVVLILFHRLKIHYYKQPLLISDFLLIADWRNWETLFHYKEAVIGMAGLLALAAYAVFGWSGADALGLPWRWAGTVLFAAAFVSMRHFSKHPGAVKTWLDSLPDDGRDVFLNLPMSCRAVFFQVPVFEGDGEAFAKQMPSETQPYGMSDEKPDIVVTLMESTLDPHCFDFAAAKIPDLKMFGRQEDTVFSSPLRVHTFGGATWKSEFAFLAGVPSTDFGALASGVFYSVVPHLQTGFVRNLREHGYFCVALSPFTKGNYNAKAAYDHFGFNLMFQPQDLGYPAPMGKNLWHISSEEMMQYARMILEKRHPDLENVRQPMFVYVLTMKEHGPYRTDTDNVFDLDVPDLNAKTVSALNDYIGRIADLDKAVESFDRYLHERGKPFVFGYFGDHQVPFEGVSVRKKWDYAQPDYVTQFAVRSNIAGGFVQRQDFLDLAFAGGVLMEAAGLEAKDGFMRANMAMRGLCGGGLEDCPNRKLVGDYRNYLYDVLKIAS

SEQ ID NO: 9059 - protein, 1032 aa, Neisseria meningitidis
MNKTLKRQVFRHTALYAAILMFSHTGGGGAQAETHNYAIVMNEQNQLKVKQKGSYSTLREKDRERKFIYNKSRQGGGSVFFDNTDTLVSRQSGTAVFGTATYLPPYGKVSGFDANALKERNNAVDWIHTTRAGLAGYAYTNVVCRSHQCPQLVYKTRFSFDNPDLAKRGGGLDRHTEPSRDNSLIYKLKDHPWLGVSFNLGSENTVKNSQSSSRLISSFSEDNNNQTIVSTTENHPISLGDRQREHTAVAYYLNAKLHLLDKKGIKDITGKTVRLGVLKPSIDVKTQRTGLGGLLGFHAKWDIKDTGQIPVELGLPQIKAGRCINKPNPNPKAQALSPALTAPALWFGPVQNGKVQMYSASVSTYPDSSSSQIFLQNLSRKDDTSKPGRYSLKPLSTSEIKSKEPTFTGRQTVIRLDGGVQQIKLQGNEVTSFNVNNGNNTFGIVKDLGVDPDASEWKKVLLPWTVRASNDDNQFKTINQQLNQQKIQYSQRYRIRDNGNRDLGDIVNSPIVAVGEYLATSANDGMVHIFKQSGGDKRSYNLKLSYIPGTMPRQYFDNDTSALKDSTLAKELRTFAEKGYVGDRYGVDGGFVLRKVERNGKDHVFMFGAMGFGGRGAYALDLSKIDSGNGNLADVSLFDVKHDKNDNNRVELGYTVGTPQIGKTHDGKYAAFLASGYATKTIDDQQNKTALYVYDLESSGTLIKKIDVPGGKGGLSSPTLVDKDLDGIVDIAYAGDRGGNMYRFDLSSDNPSSWTVRTIFSGNKPITSAPAISQLKDKRVVIFGTGSDLSEDDVDKTDEQYIYGIFDDDTATTGPVNFSGTGGGLLEQVLTEENKTLFLTDYKRSDGSGSKGWVVKLKDGQRVTVKPTVVLRTAFVTIRKYKDNGCGAETAILGINTADGGKLTKKSARPIVPADNTAVAQYSGHKQTTKGKSIPIGCMEKDNGIVCPNGYVYDKPVNVRYLDEKKTDGFSTTADGDAGGSGTFKEGKKPARNNRCFSGKGVRTLLMNDLDSLDITGPTCGMKRISWREVFY

SEQ ID NO: 9060 - protein, 98 aa, Neisseria meningitidis
MFRILLLLFPCAILAACTRNIPANPAVSNCAHLQNRTILYFDAHGKPADGAVKGGFYKIIEIQGANRILIQDFNSTGNALGGSYVPDCRKSSLFPKNI

SEQ ID NO: 9061 - protein, 642 aa, Neisseria meningitidis; identical to SEQ ID NO: 269

SEQ ID NO: 9062 - protein, 210 aa, Neisseria meningitidis; identical to SEQ ID NO: 3436

SEQ ID NO: 9063 - protein, 241 aa, Neisseria meningitidis
MDFLSRWRRIADAPTIRRCVLCHGSSGVSDGICAGCRDDLAAYRTDAANSCPLCFRHIQGGAVCGGCQKKPPAFDRMWASLHYEPPVSNMIHALKHLADLSMVQPLADLMMQNPPDRLADECFDFVLPVPLSRERLLQRGFNQSESIVGLLAQRYGWQILPRHTVFRHHRPPQSTLKGSERRRNIKNAFEIRTPIPENCNILLIDDVFTTGATLDELAKTLKKSGANRICCWTLARTPMKK

SEQ ID NO: 9064 - protein, 210 aa, Neisseria meningitidis; identical to SEQ ID NO: 3262

SEQ ID NO: 9065 - protein, 508 aa, Neisseria meningitidis
MNTPLPYSNYLIRILTASVYDVAVETPLEPARSLSVRLKNNILLKREDLQPVFSFKIRGAYNKMSKLPKDALACGVIAASAGNHAQGVALSAQRLGCRAVIVMPETTPKIKVDAVKSRGGEVVLRGVSYNDAYDYAMELAEKEGLTYIAPFDDPDVIAGQGTVGMEIVSQHPDPIRAVFVPIGGGGLAAGVAAFIKQVRPEIKVIGVQTNDSCCMKQSVEAGEIVHLKDVGLFSDGTAVKVVGNETFRLCKELLDEIITVDTDAVCGAVKDIFDDTRSITEPAGALALAGLKAYIAREGAENQTLIAVTSGANMNFHRLRHVSERSELGEGNEGIFAVTIPEERGSFLKFVNILGNRNITEFNYRYGDDEKAHIFVGLQAAGPQDLAVIGSRLDEAGLPNVDLTDDEIAKIHIRYMVGGRTDKVENERLVSFEFPERPGALARFLNHMQGGWNITLFHYRNHGADYGRILVGIDVPPHDAAAFDGFLESLGYSYHEETQNAAYKLFLA

SEQ ID NO: 9066 - protein, 618 aa, Neisseria meningitidis
MLNKIFSWFESRIDPYPEAAPKTPEKGLWRFVWSSMAGVRKWIAALAALTAGIGIMEALVFQFMGKIVEWLGKYAPAELFAEKGWELAAMAAMMVFSVAWAFAASNVRLQTLQGVFPMRLRWNFHRLMLNQSLGFYQDEFAGRVSAKVMQTALALRDAVMTVADMVVYVSVYFITSGVILASLDSWLLLPFIGWIVGFASVMRLLIPKLGQTAAWQADARSLMTGRITDAYSNIATVKLFSHGAREAAYAKQSMEEFMVTVRAQMRLATLLHSCSFIVNTSLTLSTAALGIWLWHNGQVGVGAVATATAMALRVNGLSQYIMWESAQLFENIGTVGDGMATLSKPHTILDKPNALPLKVSQGAIKFEHIDFCYEAGKPLLNGFNLTIRPGEKVGLIGRSGAGKSTIVNLLLRFYEPQSGTVSIDGQDISGITQESLRAQIGLVTQDTSLLHRSVRDNIIYGRPDATDAEMVSAAERAEAAGFIPDLSDAKGRRGYDAHVGERGVKLSGGQRQRIAIARVMLKDAPILLLDEATSALDSEVEAAIQESLDKMMDGKTVIAIAHRLSTIAAMDRLVVLDKGRIIEEGTHAELLEKRGLYAKLWAHQSGGFLNEHVEWQHD

SEQ ID NO: 9067 - protein, 335 aa, Neisseria meningitidis
MSTFFQQTAQAMIAKHIDRFPLLKLDQVIDWQPIEQYLNRQKTRYLRDHRGRPAYPLLSMFKAVLLGQWHSLSDPELEHSLITRIDFNLFCRFDELSIPDYSTLCRYRNRLAQDDTLSELLELINRQLTEKGLKVEKASAAVVDATIIQTAGSKQRQAIEVDEEGQVGGQTTPSKDSDARWIKKNGLYKLGYKQHTRTDAEGYIEKLHITPANAHECKHLPPLLEGIAEGTTVYADKGYDSAENRQHLEEHQLQDGIMRKACRNRPLSETQTKRNRYLSKTRYVVEQSFGTLHRKFRYARSTYFGLIKVSAQSHLKAMCLNLLKAANRLSAPAAA

SEQ ID NO: 9068 - protein, 628 aa, Neisseria meningitidis
MIYPKTYDVIVVGGGHAGTEAALAAARMGAQTLLLTHNIETLGQMSCNPSIGGIGKGHLVRELDALGGAMALATDKSGIQFRRLNASKGAAVRATRAQADRILYKAAIREMLENQENLDLFQQAVEDVTLDGERISGVITAMGVEFKARAVVLTAGTFLSGKIHIGLENYEGGRAGDPAAKSLGGRLRELKLPQGRLKTGTPPRIDGRTIDFSQLTEQPGDTPVPVMSVRGNAEMHPRQVSCWITHTNTQTHDIIRSGFDRSPMFTGKIEGVGPRYCPSIEDKINRFADKDSHQIFLEPEGLTTYEYYPNGISTSLPFDIQIALVRSMKGLENAHILRPGYAIEYDYFDPRNLKASLETKTIEGLFFAGQINGTTGYEEAAAQGLLAGANAVQYVRGQDPLLLRREQAYLGVLVDDLITKGVNEPYRMFTSRAEYRLQLREDNADMRLTEDGYKIGLVGEAQWRMFNEKREAVEREIQRLKTTWYTPQKLAEDEQIRVFGQKLSREANLHDLLRRPNLDYAALMTLEGAMPSENLSAEVIEQVEIQVKYQGYIDRQNEEIDSRRDIETLKLPDGIDYGKVKGLSAEVQQKLNQHKPETVGQASRISGVTPAAVALLMVHLKRGFKDAK

SEQ ID NO: 9069 - protein, 416 aa, Neisseria meningitidis
  misc_feature 2, 3: 'Xaa' is any amino acid
VXXPGTTIQIGEYYEEQLPNEGFGRQAAQTAKQIILQRIRDAEREQNLNEFLAVKEDIVSGTVKRVERHGIIVEVVAGKLDALIPRDQMIPRENFRSGDRIRALFLRVEEIGNTGRKQVILSRTSGDFLVKLYANEVPEIADGMLEIRAVARDPGQRAKVAVKANDQRIDPQGTCIGVRGSRVNAVSNELSGERIDVVLWSPEPAQFVMSALSPAEVSRIVIDEDKHAVDVIVDENQLALAIGRGGQNVRLASDLTGWQLNIMTSAEADERNAAEDAAIRRLFMDHLNVDEETADVLVQEGFATLEEVAYVPAAELLAIEGFDEEIVDMLRNRARDAILTMAIAAEEKLGEVSDDMRNLEGIDADMLRSLAEAGITTRDDLAELAVDELIEITGVNEETAKAVILTAREHWFTEDK

SEQ ID NO: 9070 - protein, 201 aa, Neisseria meningitidis; identical to SEQ ID NO: 291

SEQ ID NO: 9071 - protein, 279 aa, Neisseria meningitidis
MLVAFLIMLREGIEAALIVGIVAGFLKQSGHSKLMPKVWFGVVLASLMCLGLGYGIHSATGEIPQKQQEFVVGIIGLVAVAMLTYMILWMKKAARSMKRQLQDSVQAALNRGSGQGWALVGMAFLAVAREGLESVFFLLAVFKQSPTWQMPAGAVAGVLAAAVIGALIYQGGMRLNLAKFFRWTGAFLIAVAAGLLAGSLRALHEAGIWNALQDIVFDSSKYLHEDSPLGVLLGGFFGYTDHPTQGEALVWLLYLIPVITWFLCGSRPSETLTRKEELK

SEQ ID NO: 9072 - protein, 65 aa, Neisseria meningitidis; identical to SEQ ID NO: 127

SEQ ID NO: 9073 - protein, 593 aa, Neisseria meningitidis
MPYFALFDDAVSGRAKRYQNHVESRFFRPEELDALDGALQSGWQKGLHAVLFADYGFGLPLTGVESERGGNLALHWFADCADTDAASWLARHSDGLPAGISTPQSSVSEADYLDHIRQIHEAIRRGDTYQINYTTRLHLQAYGNPVKLYQRLRQPVPYAVLSHLPDAQGQSAWTLCFSPELFLKIGSDGTISTEPMKGTAPILGDGQDERRAAELQADPKNRAENVMIVDLLRNDLGKIAQTGTVCVPEPFKVSRFGSVWQMTSTIQAQALPHTSFADILRAAFPCGSITGAPKKMSMQIIESLEAEARGLYTGSIGYLNPCSGGLGFEGTFNVVIRTLSLTPLSDGIYQGVYGVGSGIVIDSDPAAEYRECGWKARFLNELRPDFGIFETLRVENGRCALLDRHLCRLKTSAQALNLPLPDGCENQIKQYIARLPDGAFRIKALLASDGISLSRAVLNRLTDKQRVIISPTILPAQNYLRRFKTTCRTVFDQAWQTAETQGAFDSLFFNSDGILLEGGRSNVFVKYQGQWLTPSLDLDILNGIMRQAVLDEPQKYLQTNQVIETHITQKTLQEAEEIRLSNALRGVFAAALA

SEQ ID NO: 9074 - protein, 241 aa, Neisseria meningitidis; identical to SEQ ID NO: 2918

SEQ ID NO: 9075 - protein, 362 aa, Neisseria meningitidis
MSQTIDELLLPHRNAIDTIDAEILRLLNERAQHAHAIGELKGTGAVYRPEREVAVLRRIQDLNKGPLPDESVARLFREVMSECLAVERPLTIAYLGPQGTFTQQAAIKHFGHAAHTMACPTIDNCFKQVETRQADYLVAPVENSTEGSVGRTLDLLAVTALQACGEVVLRIHHNLLRKNNGSTEGIAKVFSHAQALAQCNDWLGRHLPNAERIAVSSNAEAARLVAESDDGTVAAIAGRTAAEIYGLDMVAECIEDEPNNTTRFLVMGHHETGASGSDKTSLAVSAPNRAGAVASLLQPLTESGISMTKFESRPSKSVLWEYLFFIDIEGHRRDAQIQTALERLGERASFVKVIGSYPTAVL

SEQ ID NO: 9076 - protein, 1047 aa, Neisseria meningitidis
MNKTWKRQVFRHTALYTAILMFSHTGGGGAQAQENPYAIVMNSQKLPEVKWGNSYKKGELRPEDRDRKFTFTSTYGIKRNTNITFNNTDYLVSEKNGTAVFGAATYLPPYGKVSGFDTDRLTKRGNAVDWINTTHPGLIGYSYQGITCSSSSCPEFGYKTQFTFGNSGLAKKTNSSKLDIYEDKSRDNSPIYKLQDYPWLGVSFNLSSDSYVKQKRHNSLVSSFSEDVTQSNGTQSPYKDRNLVYRTDDYHNKGNYSHQDAHHAIAFYLNAKLHLLDKKQIKNIAQGSELNLGMLKTHIELPKNFNQRSLVGSVVSWTVKDEGKVSVKLKLPEVKAGRCINKDNPNPKSKAPSPALTAPALWFGPVQNGKAQMYSASVSTYPDSSSSRIFLQNLERKTDPGRPGRHSLETLTENDIKSRQPNFTGRQTIIRLDSGVQQIKLDQNNTEVVNFNGNSNNATFGIVSEYGLTPDANEWKKVLLPWTVRAFNDDGRFNTVNKEENNGKPKYSQKYRSRDNGKHERNLGDIVNSPIVAVGEYLATSANDGMVHIFKQSGGDKRSYNLKLSYIPGTMPRKDIQNTESTLAKELRAFAEKSYVGDRYGVDGGFVLRKVERNGKDHVFMFGAMGFGGRGAYALDLSKIDSGNGNLADVSLFDVKHDKNDNNRVELGYTVGTPQIGKTHDGKYAAFLASGYATKTIDDQQNKTALYVYDLESSGTLIKKIDVPGGKGGLSSPTLVDKDLDGIVDIAYAGDRGGNMYRFDLSSDNPSSWTVRTIFSGNKPITSAPAISQLKDKRVVIFGTGSDLSEDDVDKTDEQYIYGIFDDDTATTGPVNFSGTGGGLLEQVLTEENKTLFLTDYKRSDGSGSKGWVVKLKDGQRVTVKPTVVLRTAFVTIRKYKDNGCGAETAILGINTADGGKLTKKSARPIVPADNTAVAQYSGHKQTTKGKSIPIGCMEKDNGIVCPNGYVYDKPVNVRYLDEKKTDGFSTTADGDAGGSGIDPDGKRSGKNNRCFSQKGVRTLLMNDLDSLDITGPTCGMKRISWREVFY

SEQ ID NO: 9077 - protein, 96 aa, Neisseria meningitidis; identical to SEQ ID NO: 2317

SEQ ID NO: 9078 - protein, 384 aa, Neisseria meningitidis
MKFIDEAKIEVAAGKGGNGATSFRREKFVPRGGPDGGDGGKGGSVWAEADENTNTLVEYRFVKRYQAKNGEKGHGSDRYGAGADDIVLKMPVGTLIRDLDTDEIVADLTYHGQRVCLAKGGKGGLGNIHFKSSVNRAPKQSTPGEEGEARSLQLELKVLADVGLLGMPNAGKSTLITAVSAARPKIANYPFTTLHPNLGVVRIDENHSFVMADIPGLIEGAAEGAGLGHRFLKHLSRTGLLLHVVDLAPFDETVNPAEEALAIINELRKYDEELYGKPRWLVLNKLDMLDEEEAQTRTAAFLEAVGWDYPKPDDRFQFDMETPRLFQISALTHQGTQELVHQINQYLTEKKRIEAEKAEAEKAAANVEIIEQQPKTDTGVFKPE

SEQ ID NO: 9079 - protein, 376 aa, Neisseria meningitidis; identical to SEQ ID NO: 2312

SEQ ID NO: 9080 - protein, 176 aa, Neisseria meningitidis; identical to SEQ ID NO: 3131

SEQ ID NO: 9081 - protein, 265 aa, Neisseria meningitidis; identical to SEQ ID NO: 6655

SEQ ID NO: 9082 - protein, 394 aa, Neisseria meningitidis
MGKHILLGVTGSIAAYKSCELVRLLKKQGHSVTVVMSRSATEFVSPLTFQALSGNPVLTDTHGGNGSNGMEHINLTRNADVFLIAPASMNTVAKICNGVADNLLTSLAAARKCPLAIAPAMNVEMWLNPANQRNIAQLVSDGITVYMPGLGEQACGENGMGRMPEPAELLDLLPDLWTPKILRGKKILITAGATFEAIDPVRGITNTSSGKMGVALARACRAAGAEVSLIHGQLQTALPFGISDTVQAVSAEDMHRAVHRLIEKQDAFISVAAVSDYKVKNRSTQKFKKDKNAKPLSIELDENPDILASIASLPNPPFCIGFAAETENVMAYAREKRIKKKIPVIVANDVSIAMGKPTNRITIIGDDGELSFPETSKDEAAMQIVERLAVYLNK

SEQ ID NO: 9083 - protein, 185 aa, Neisseria meningitidis; identical to SEQ ID NO: 5793

SEQ ID NO: 9084 - protein, 321 aa, Neisseria meningitidis; identical to SEQ ID NO: 2168

SEQ ID NO: 9085 - protein, 136 aa, Neisseria meningitidis
LHKTNGSIHYIKFKNNDDGLKQFRLWIKGNRIRKAYIGMEATRIYYEKAADMLSSYYTVYVINPLKSRLREKQFNRTKPTSRFNLIADYIKRHQDTLIPYQIPKNKALQKLINLKINYSNIRSKLKTVFIALKKTS

SEQ ID NO: 9086 - protein, 201 aa, Neisseria meningitidis
MTRQSLQQAAESRRSIYSLNKNLPVGKDEIVQIVEHAVLHTPSSFNSQSARVVVLFGEEHDKVWQFVEDALCAVVPADSFEPTAQKLNLFKAGAATILFYEDQNVVKGLQEQFPAYAANFPVWADQANAMVQYAVWTTLAAVGVGANLQHYNPLPDAAIAKAWNIPENWLLRAQMVIGGIEGAAGEKTFEPVAERLKVFGA

SEQ ID NO: 9087 - protein, 146 aa, Neisseria meningitidis
VRAFQTALRPSRILNILTVSLHSASLAVCLTWFYGRMMWFGLAALVASYAYSLRITNLKHRHAITAITIDRDGQAEIVSGKDKTAATLAGSSMVTPYALFLQWDTGGKTVSQCIIPDMTDKESYRRLKVWVLWRQPKKTAETDTPS

SEQ ID NO: 9088 - protein, 436 aa, Neisseria meningitidis; identical to SEQ ID NO: 1523

SEQ ID NO: 9089 - protein, 757 aa, Neisseria meningitidis
MNITQILSQELSATTAQINAAIELLDDGATVPFIARYRKEATGGLDDTQLRRLAERLQYLRELEERKAVVLKSIEEQGKLSDGLRAQIEAADNKTALEDLYLPYKPKRRTKAQIAREHGLQPLADVLLAEQSQDVEAAAQGYLNENVPDAKAALDGARAILMEQFAEDAELIGTLRDKLWNEAEIHAQVVGGKETEGEKFSDYFDHREPIRAMPSHRALAVLRGRNEGVLNIALKYQPDDTPITQQSEYEQIIARRFKVSDGHKWLRDTVRLTWRAKIFLSLELEALNRLKEAADTDAITVFARNLKDLLLAAPAGRLTTLGLDPGYRNGVKCAVVDDTGKLLDTVIVYLHQENNMLATLSRLIKQHGVKLIAIGNGTASRETDKIAGELVREMSKMGLHKIVVSEAGASIYSASELAAREFPDLDVSLRGAVSIARRLQDPLAELVKIDPKSIGVGQYQHDVNQSQLAKSLDAVVEDCVNAVGVDVNTASAPLLARISGLNQTLAQNIVAYRDENGAFDSRKKLLKVPRLGEKTFEQAAGFLRINGGKEPLDASAVHPEAYPVVAKMLAQQGISAAELIGNRERVKQIKASDFTDERFGLPTILDILSELEKPGRDPRGEFQTASFAEGIHEISDLQVGMILEGVVSNVANFGAFVDIGVHQDGLVHISALSNKFVQDPREVVKAGDVVKVKVLEVDAARKRIALTMRLDDEPGGAKHKMPSENRSRERTAGRKPQRNDRAPANSAMADAFAKLKR

SEQ ID NO: 9090 - protein, 473 aa, Neisseria meningitidis
MKIIQIQNNHNVNDDRPEFDRALIASLPASGPRYTSYPTADRFHDGFREGEYIKALHLRGMGALNKPLSLYIHIPFCNTICYYCGCNKIITKDKSRADAYIEYLEKEMELLAPHLNGRHQLAQLHFGGGTPTFLSDEQIERVFRMIRKHFELIPTGEYSIEIDPRKVSRDTVLMLGRLGFNRMSIGIQDFDPKVQAAVNRIQSYEETKEVIDAAREAGFKSVSVDLIYGLPHQTSESIKTTIDTVLSLDPDRLALYHYAHLPHVFKPQRRIDTASVPDSEEKLDMLQYCVQTLTERGYVFIGMDHFAKPDDELSIALKEGFLQRNFQGYSTYADCDLVAIGVSSIGKIGSTYSQNERDIDAYYAAIDEGRLPIMRGYQLNQDDILRRNIIQDLMCRFALDYRIYESMFGIPFDRYFKDELADLEKLAGLGLVRLNSHGLTVTPKGRFLIRNIAMVFDYHLRHKETKAKYSQTV

SEQ ID NO: 9091 - protein, 592 aa, Neisseria meningitidis
MTVLKLSHWRVLAELADGLPQHVSQLARMADMKPQQLNGFWQQMPAHIRGLLRQHDGYWRLVRPLAVFDAEGLRELGERSGFQTALKHECASSNDEILELARIAPDKAHKTICVTHLQSKGRGRQGRKWSHRLGECLMFSFGWVFDRPQYELGSLSPVAAVACRRALSRLGLDVQIKWPNDLVVGRDKLGGILIETVRTGGKTVAVVGIGINFVLPKEVENAASVQSLFQTASRRGNADAAVLLETLLAELDAVLLQYARDGFAPFVAEYQAANRDHGKAVLLLRDGETVFEGTVKGVDGQGVLHLETAEGKQTVVSGEISLRSDDRPVSVPKRRDSERFLLLDGGNSRLKWAWVENGTFATVGSAPYRDLSPLGAEWAEKVDGNVRIVGCAVCGEFKKAQVQEQLARKIEWLPSSAQALGIRNHYRHPEEHGSDRWFNALGSRRFSRNACVVVSCGTAVTVDALTDDGHYLGGTIMPGFHLMKESLAVRTANLNRHAGKRYPFPTTTGNAVASGMMDAVCGSVMMMHGRLKEKTGAGKPVDVIITGGGAAKVAEALPPAFLAENTVRVADNLVIHGLLNLIAAEGGESEHT

SEQ ID NO: 9092 - protein, 317 aa, Neisseria meningitidis
MNQKKVVVLDADTLPGRTFHFDFPHELAVYGTTDAAETAGRVRDAHIIITNKVMISADIIAHAPQLELIAVSATGVNNVDIGAAKAAGVAVCNVRAYGNESVAEHAFMLMIALMRNLPAYQRDVAAGLWEKSPFFCHYGAPIRDLNGKTLAVFGRGNIGRTLAGYAQAFGMGVVFAEHKHAPDVREGYVSFEDAVQTADVLSLHCPLNAQTENMIGENELRQMKPGAVLINCGRGGLVDENALLAALKYGQIGGAGVDVLTEEPPRGGNPLLNARLPNLIVTPHTAWASREALDRLFDILLANIHAFVKGEAQNRVV

SEQ ID NO: 9093 - protein, 458 aa, Neisseria meningitidis
VRGYLTSQAIIQPQNMDSGILKLRVSAGEIGDIRYEEKRDGKSAEGSISTFNNKFPLYRNKILNLRDVEQGLENLRRLSSVKTDIQIIPSEEEGKSDLQIKWQQNKPIRFSIGIDDAGGKTTGKYQGNVALSFDNPLGLSDLFYVSYGRGLAHKTDLTDATGTETASGSRSYSVHYSVPVKKWLFSFNHNGHRYHEATEGYSVNYDYNGKQYQSSLAAERMLWRNRLHKTSVGMKLWTRQTYKYIDDAEIEVQRRRSAGWEAELRHRAYLNRWQLDGKLSYKRGTGMRQSMPAPEENGGDILPGTSRMKIITAGLDAAAPFILGKQQFFYATAIQAQWNKTPLVAQDKLSIGSRYTVRGFDGEQSLFGERGFYWQNTLTWYFHPNHQFYLGADYGRVSGESAQYVSGTQLMGAVVGFRGGHKVGGMFAYDLFAGKPLHKPKGFQTTNTVYGFNLNYSF

SEQ ID NO: 9094 - protein, 113 aa, Neisseria meningitidis; identical to SEQ ID NO: 995

SEQ ID NO: 9095 - protein, 127 aa, Neisseria meningitidis; identical to SEQ ID NO: 2146

SEQ ID NO: 9096 - protein, 165 aa, Neisseria meningitidis; identical to SEQ ID NO: 2055

SEQ ID NO: 9097 - protein, 128 aa, Neisseria meningitidis; identical to SEQ ID NO: 3576

SEQ ID NO: 9098 - protein, 596 aa, Neisseria meningitidis
MRYKPLLLALMLVFSTPAVAAHDAAHNRSAEVKKQTKNKKEQPEAAEGKKEKGKNGAVKDKKTGGKEAAKEGKESKKTAKNRKEAEKEATSRQSARKGREGDKKSKAEHKKAHGKPVSGSKEKNAKTQPENKQGKKEAKGQGNPRKGGKAEKDTVSANKKVRSDKNGKAVKQDKKYREEKNAKTDSDELKAAVAAVTNDVENKKALLKQSEGMLLHVSNSLKQLQEERIRQERIRQARGNLASVNRKQREAWDKFQKLNTELNRLKTEVAATKAQISRFVSGNYKNSQPNAVALFLKNAEPGQKNRFLRYTRYVNASNREVVKDLEKQQKALAVQEQKINNELARLKKIQANVQSLLKKQGVTDAAEQTESRRQNAKIAKDARKLLEQKGNEQQLNKLLSNLEKKKAEHRIQDAEAKRKLAEARLAAAEKARKEAAQQKAEARRAEMSNLTAEDRNIQAPSVMGIGSADGFSRMQGRLKKPVDGVPTGLFGQNRSGGDVWKGVFYSTAPATVESIAPGTVSYADELDGYGKVVVVDHGENYISIYAGLSEISVGKGYMVAAGSKIGSSGSLPDGEEGLYLQIRYQGQVLNPSSWIR

SEQ ID NO: 9099 - protein, 357 aa, Neisseria meningitidis; identical to SEQ ID NO: 3038

SEQ ID NO: 9100 - protein, 620 aa, Neisseria meningitidis
MALLQISEPGMSASPHRHRLAAGIDLGTTNSLVATVRSGSAACLPDAEGRVTLPSVVRYLENGGIEVGKTALSAQKTDPLNTVSSAKRLIGRTLADLHQNTHYLPYRFGDNQRVIELHTRQGVKTPVEVSAEILKTLKSRAEETLGGDLVGVVITVPAYFDDAQRQATKDAARLAGLNVLRLLNEPTAAAIAYGLDNASEGTFVVYDLGGGTFDVSVLQLTKGLFEVKATGGNSALGGDDFDHRLFCRLLEQNGLSQLNEQDSQLLLSLVRAAKEQLTTQTEARIQATLSDGMAIDTSISRAEFHNLTQHLVMKTLEPVTQALKDAGVGKNEVKGVIMVGGSTRMLHVQQAVATFFGQTPLNNLNPDEVVALGAAIQANVLAGNKTDGEWLLLDVTPLSLGLETYGGLAEKIIPRNSTIPTARAQDFTTFKDGQTAMTIHVVQGERELVSDCRSLAKFTLRGIPPMAAGAARIRVTFQIDADGLLSVSAQEQSTGVQAQIEVKPSYGLDDGAITRMLKDSMDNAAEDMAARARAEAVVEAESLTDAVNAALELDSDLLDAKELQQIRQGIADLQGRLKDGKAEDIRSAVAKLSRSTDNFAAKRMNRNIQRALTGQSVDNI

SEQ ID NO: 9101 - protein, 203 aa, Neisseria meningitidis; identical to SEQ ID NO: 3558

SEQ ID NO: 9102 - protein, 207 aa, Neisseria meningitidis
  misc_feature 202, 203: 'Xaa' is any amino acid
MNIIGLDISKDTIDATLHKTNGSIHYIKFKNNDDGLKQFRLWIKGNRIRKAYIGMEATGIYYEKAADMLSSYYTVYVINPLKIKDYGKSRFNRTKTDKADSNLIADYIKRHQDTLIPYQIPKNKALQKLINLKNQLQQHQKQIKNRLHSTEEDFIRNIHQDLIDTIQDKMEQVKIAISEQIKKQTDNNHYRNLQTIPSIGKXXHTLN

SEQ ID NO: 9103 - protein, 283 aa, Neisseria meningitidis
MIIHPQFDPVLISIGPLAVRWYALSYILGFILFTFLGRRRIAQGLSVFTKESLDDFLTWGILGVILGGRLGYVLFYKFSDYLAHPLDIFKVWEGGMSFHGGFLGVVIAIWLFGRKHGIGFLKLMDTVAPLVPLGLASGRIGNFINGELWGRVTDINAFWAMGFPQARYEDAEAAAHNPLWAEWLQQYGMLPRHPSQLYQFALEGICLFAVVWLFSKKQRPTGQVASLFLGGYGIFRFIAEFARQPDDYLGLLTLGLSMGQWLSVPMIVLGIVGFVRFGMKKQH

SEQ ID NO: 9104 - protein, 188 aa, Neisseria meningitidis
MLLQNILPFAHCLLRKALPEGGNALDGTAGNGHDTLFLAQTAGIRGKVWAFDIQPQALSRTRCRLKEARYENVQLILDGHENLKQYVSEPLNAAIFNFGWLPGGDKSLTTHTETSIPALCATLSLLKEGGMLIAVLYPGHENGKQEAEAIEQWAKNLPQEQFAVLSYGFTNRKNNPPYLLAFEKLRQK

SEQ ID NO: 9105 - protein, 320 aa, Neisseria meningitidis; identical to SEQ ID NO: 913

SEQ ID NO: 9106 - protein, 135 aa, Neisseria meningitidis
MTVWFVAAVAVLIIELLTGTVYLLVVSAALAGSGIAYGLTGSTPAAVLTAALLSALGIWFVHAKTAVGKVETDSYQDLDAGQYVEILRHTGGNRYEVFYRGTHWQAQNTGQEELEPGTRALIVRKEGNLLIIANP

SEQ ID NO: 9107 - protein, 197 aa, Neisseria meningitidis
MADGMGNLIGWEKTGLVVGKQWITAKDDKVSDVCNANGEMGVIGLYEPFSHGALTIPGHPNCRCEVVSVSGGELGEFAEKKELRKAAMQYARDNFIGKSYVNENSGHELKVTWQGVKHAASKANQAELSIMTKLDDLLRYAKYEGSYSDRKGHPNIIAAHKYRAVAKVGNKSLNIGVIVREFPDDHKHYDHFILKDE

SEQ ID NO: 9108 - protein, 99 aa, Neisseria meningitidis
MGYRVGMQCFSKKEQAEDYSVSKIVPVISPDGKLYAPYKSGGNWYFEGYRIDLSFPQCSQESQFAQGAMLASSFLILFVIVWAFKTVGNMIKGSFANDG

SEQ ID NO: 9109 - protein, 388 aa, Neisseria meningitidis
MNLHEYQAKELLASYGLPVQGGILAHNGEEAAAAYDKLGGKFAVVKAQVHAGGRGKAGGVKVVKSREEAKEVAESLIGTNLVTYQTDANGQPVNSVLVCEDMYPVQTELYLGAVVDRSTRRVTFMASTEGGVEIEKVAAETPEKIFKVTVDPLVGLQPCQAREVAFQLGLKDKQINEFVKLMTGAYKAFVENDFALFEVNPLAVRENGALACVDGKIGIDSNALYRLPKIAELRDKSQENERELKASEFDLNYVALEGNIGCMVNGAGLAMATMDIIKLKGGQPANFLDVGGGATKDRVVEAFKLILEDKSVQGVLINIFGGIVRCDMIAEAIVAAVKEINVDVPVVVRLEGNNAELGAKILNESGLKLTSADGLNDAAEKIVAAVNA

SEQ ID NO: 9110 - protein, 413 aa, Neisseria meningitidis
MPTKTPSLFGCAMIIAGTVIGAGMLANPTATSGVWFTGSLAVLLYTWFSMLSSGLMILEVNTHYPHGASFDTMVKDLLGRGWNIINGIAVAFVLYLLTYAYIFVGGDLTAKGIGNALGGNVSLTVGQLVFFGILAFCVWASARLVDRFTSVLIGGMVLTFIWATGGLIADAKMPVLFDTQAPAGTGYWIYAATALPVCLASFGFHGNVSSLLKYFKGDAPKVAKSIWMGTLIALVIYVLWQTAIQGNLPRNEFAPVIAAEGQVSVLIETLSKFAQTGNMDKILSLFSYMAIATSFLGVTLGLFDYIADIFKWNDSVSGRTKTAALTFLPPLISCLLFPTGFVTAIGYVGLAATVWTGIIPAMLLYRSRKKFGAGKTYKVYGGLWLMVWVFLFGIVNIAAQVLSQMELVPVFKG

SEQ ID NO: 9111 - protein, 306 aa, Neisseria meningitidis
MRIRLGRHNAPDFPHGAAVTIGNFDGVHLGHKHILQKLRLEADTRGLPVVTVVFEPQPKEFFALRTGRMPPCRISPLRTKLELLEGTGCVDAVWVLRFDQNFSEISAQGFIDRLLRQTLNTRYLLVGDDFRFGAGREGCFELLAQQPDMQTERTPSVIVEDIRTSSTAVRQALSDGNLAYAKKLLGHDYVLSGRVVHGRKLGRTLNAPTANIRLPRHRYALGGVFVVEADGAFGTRRGVASFGFNPTVDSDCFQKLEVHLFDFQGDLYGQRLNVRFLHKLRDEEKFDGMEELKRQIEADMEAAKCW

SEQ ID NO: 9112 - protein, 128 aa, Neisseria meningitidis
MSSNIPAELKYVASHEWLRLEEDGIITVGITHHAQELLGDIVFVELPEVGANLAAEEQAGVVESVKAASDVYAPIAGEVVAVNEDLPSAPETANSDPYGAGWFFKLKPANVADYDVLLTAEQYAGEVD

SEQ ID NO: 9113 - protein, 154 aa, Neisseria meningitidis
MKCPFCAHPDTRVADSRLMEERNAVRRRRHCPSCGKRFGTLETAELKMPAVIGPDKKRSPFNAQRLRNDLTAAARKSALTPEQIDETVRLTKHRLYTSGQRDIPSAALADMVLKELLEHNTEAAVRFAALHKRFDNPADFASWLAQAVKTDRKA

SEQ ID NO: 9114 - protein, 205 aa, Neisseria meningitidis
MNMKNNDCFRLKDSQSGMALIEVLVAMLVLTIGILALLSVQLRTVASVREAETQTIVSQITQNLMEGMLMNPTIDSDSNKKNYNLYMGNHTLSAVDGDFAIDAIKTKAQLAEEQLKRFSYELKNALPDAAAIHYAVCKDSLGAAPTLSAGSTFSQNCDGSANGDTLIKVLWVNDSAGDSDIARTNLETNGDNIVYTYQARVGGRE

SEQ ID NO: 9115 - protein, 388 aa, Neisseria meningitidis
  misc_feature 2, 3, 4: 'Xaa' is any amino acid
VXXXPHVNVGTIGHVDHGKTTLTAALTTILAKKFGGAAKAYDQIDNAPEEKARGITINTSHVEYETETRHYAHVDCPGHADYVKNMITGAAQMDGAILVCSAADGPMPQTREHILLARQVGVPYIIVFMNKCDMVDDAELLELVEMEIRDLLSSYDFPGDDCPIVQGSALKALEGDAAYEEKIFELAAALDSYIPTPERAVDKPFLLPIEDVFSISGRGTVVTGRVERGIIHVGDEIEIVGLKETQKTTCTGVEMFRKLLDEGQAGDNVGVLLRGTKREDVERGQVLAKPGTITPHTKFKAEVYVLSKEEGGRHTPFFANYRPQFYFRTTDVTGAVTLEEGVEMVMPGENVTITVELIAPIAMEEGLRFAIREGGRTVGAGVVSSVIA

SEQ ID NO: 9116 - protein, 447 aa, Neisseria meningitidis; identical to SEQ ID NO: 2570

SEQ ID NO: 9117 - protein, 322 aa, Neisseria meningitidis
MKLTLAIPSLNLDKDETRIPLCLPAFNKILQYGSLHRQSCTASAFYARYLWCGRLAERAAQSLNMPSETVALATPVWQKMGMHQANVLTAEYLDVGTDEAERLCRDLSAFYGDIPWRFVPVLPELWLVSLPRAYRWGAKPVLDLGGLLGADDQPDGEDALEWLRVQTEIQMWLAAHPVNHNRKKRGLPELNGLWLWDSLHGSSQGGTLFADTVWSRFYPDRRALPDNFRAYEETAAHLPDTHHILFMDDLRLTALTGDRERYASVLQQWEEHWFAPIYEAVRTGKIKRLDITTDGQHGGTLTFKPADRWKFWRGAKTFDGIW

SEQ ID NO: 9118 - protein, 199 aa, Neisseria meningitidis
MSEKPEKIVLASGNAGKLKEFGNLFEPYGITVLPQSEFSIPECPEPYSTFVENALAKARHAAGHSGLPALADDSGICAAALNGAPGIHSARYAGSNPKSDTANNLKLAAELAGKADKSCCYVCVLVFVRHKDDPRPIIAEGVWHGQWNGVPAGENGFGYDPYFYLPGHGKTAAELDSEVKNRESHRAQALAELLRKLAL

SEQ ID NO: 9119 - protein, 193 aa, Neisseria meningitidis; identical to SEQ ID NO: 1600

SEQ ID NO: 9120 - protein, 228 aa, Neisseria meningitidis
MAGLTFEQTVSNIIGMKGEIVRALGETFVMVGLSTTFAVVFGTLLGVLLFVTSSRQLHYNKPVNFLLDNLVNLMRAFPFVILMIAMIPATRAIVGSTIGPVAASLVLSVSGLFYFARLVEQNLREVPKGVIEAAAAMGAPPVAIVRKVLLNEARTGMVSSITVLAIGLLSYSAAAGMIGGGGLGDLAIRYGYYRYQTEVIVFIVALLVLLVILIQSTGNALARKLDKR

SEQ ID NO: 9121 - protein, 67 aa, Neisseria meningitidis; identical to SEQ ID NO: 86

SEQ ID NO: 9122 - protein, 164 aa, Neisseria meningitidis; identical to SEQ ID NO: 7379

SEQ ID NO: 9123 - protein, 69 aa, Neisseria meningitidis
MAESRQTRLQVKCPTCQTAVVWEPENAFRPFCSQRCKLIDLGGWADGKYTVSGQTESLPEISEPDMAYR

SEQ ID NO: 9124 - protein, 90 aa, Neisseria meningitidis; identical to SEQ ID NO: 2539

SEQ ID NO: 9125 - protein, 672 aa, Neisseria meningitidis
MNKSLSGSVEEYRELTLRGMILGALITVIFTASNVYLGLKVGLTFASSIPAAVISMAVLKFFKGSNILENNMVQTQASAAGTLSTIIFVLPGLLMAGYWSGFPFWQTTLLCIAGGILGVIFTIPLRYAMVVKSDLPYPEGVAAAEILKVGGHEEGDNRQGGSGIKELAAGGALAGLMSFCAGGLRVIADSASYWFKSGTAIFQLPMGFSLALLGAGYLVGLTGGIAILLGISIAWGIAVPYFSSHIPQPSDMEMAAFAMKLWKEKVRFIGAGTIGIAAVWTLLMLLKPMVEGMKMSFKSFGGGAPAAERAEQDLSPKAMIFWVLAMMFVLGVSFYHFIGDSHITGGMAWLLVVVCTLLASVIGFLVAAACGYMAGLVGSSSSPISGVGIVSVVVISLVLLLVGESGGLLADEANRKFLLALTLFCGSAVICVASISNDNLQDLKTGYLLKATPWRQQVALIIGCIVGALVISPVLELLYEAYGFTGAMPREGMDAAQALAAPQATLMTTIASGIFAHNLEWVYIFTGIAIGAVLIAADLVLKKSSGGKLALPVLAVGMGIYLPPSVNMPIVAGAVLAAVLKHIIGKKAENREGRLKNAERIGTLFSAGLIVGESLIGVIMAFIIAFSVTNGGSDAPLALNLQNWDAAASWLGLAFFVTGMIIFARRVLKAGR

SEQ ID NO: 9126 - protein, 195 aa, Neisseria meningitidis
LNIKLKTLLLPFATLALCTNAFAAPPSDASLARWLDTQNFDRDIEKNMIEGFNAGFKPYADKALAEMPEAKKDQAAKAFNRYRENVLKDLITPEVKQAVRNTLLKNAREIYTQEEIDGMIAFYGSPVGQSVVAKNPRLIKKSMSEIAVSWTALSGKIARHHLPAFTEELRRIICGGKNPDAGCKQAGQVGKRHQK

SEQ ID NO: 9127 - protein, 103 aa, Neisseria meningitidis; identical to SEQ ID NO: 2548

SEQ ID NO: 9128 - protein, 189 aa, Neisseria meningitidis
MVRRLIIGISGASGFQYGVKALELLRAQDIETHLVVSKGAEMARASETAYARDEVYALADFVHPIGNIGACIASGTFKTDGMLVAPCSMRTLASVAHGFGDNLLTRAADVVLKERRRLVLMVRETPLNLAHLDNMKRVTEMGGVVFPPVPAMYRKPQTADDIVAHSVAHALSLFGIDTPDSTEWQGMAD

SEQ ID NO: 9129 - protein, 41 aa, Neisseria meningitidis; identical to SEQ ID NO: 3182

SEQ ID NO: 9130 - protein, 230 aa, Neisseria meningitidis; identical to SEQ ID NO: 3035

SEQ ID NO: 9131 - protein, 312 aa, Neisseria meningitidis
MSYTQLTQGERYHIQYLSRHCTVTEIAKQLNRHKSTISREIRRHRTQGQQYSAEKAQRQSRTIKQRKRQPYKLDSQLIQHIDTLIRRKLSPEQVCAYLCKHHRITLHHSTIYRYLRQDKSNGSTLWQHLRICSKPYRKRYGSTWTRGKVPNRVGIENRPAIVDQKSRIGDWEADTIVGKGQKSALLTLVERVTRYTIICKLDSLKAEDTARAAVRALKAHKDRVHTITMDNGKEFYQHTKITKALKAETYFCRPYHSWEKGLNENTNGLIRQYFPKQTDFRNISDREIRRVQDELNHRPRKTLGYETPSVLF

SEQ ID NO: 9132 - protein, 350 aa, Neisseria meningitidis; identical to SEQ ID NO: 2257

SEQ ID NO: 9133 - protein, 156 aa, Neisseria meningitidis; identical to SEQ ID NO: 2613

SEQ ID NO: 9134 - protein, 275 aa, Neisseria meningitidis
MDGEGMSVGHYENFPVGSLILPRRLRKPVHAVYAFARTADDMADEGSMPSEARLAGLEGLQRELDVLASGGRSAHPLIARLDAEAVVPFGLDLQPFYDLLSAFSQDVVKTRYAHFGELADYCRRSANPVGRIMLALYGKTDAVCVAQSDGICTALQLVNFWQDVAVDWQKGRVYIPQDDLLKFGVSEGQIAEGRADAAFQRLMAYECRRAFRMLKAGSPLARELKGRIGLELRMIVLGAQLILQKLDACRYDVFAQRPVLDKKDWLIMLKRALWK

SEQ ID NO: 9135 - protein, 292 aa, Neisseria meningitidis
LNRHKSTISREIRRHRTQGQQYSAEKAQRQSRTIKQRKRQPYKLDSQLIQHIDTLIRRKLSPEQVCAYLCKHHQITLHHSTIYRYLRQDKSNGSTLWQHLRICSKPYRKRYGSTWTRGKVPNRVGIENRPAIVDQKSRIGDWEADTIVGKGQKSALLTLVERVTRYTIICKLDSLKAEDTARAAVRALKAHKDRVHTITMDNGKEFYQHTKITKALKAETYFCRPYHSWEKGLNENTNGLIRQYFPKQTDFRNISDREIRRVQDELNHRPRKTLGYETPSVLFLNLFQPLIH

SEQ ID NO: 9136 - protein, 357 aa, Neisseria meningitidis
MKYKALSLLPLAAALAACAGGGVAEPHVPVSIPTATPLTGEVKLSSDNSKIENINTANTETHPPRRTRRSLYASPQNTSSGISIQQREVEKIYFGVKSPEKSFIFQTPGGAQYALSSYADPIVPSYSSPDFKIPDRHAGQRLADGSRIFICCSDSGATSYAEITKQDYMKFGAWIGPNGEIDLFAGGFPIGKTPPPAFSWGSPTTETALSKGKITYQVWGIRVRNGQFVTSSYTPPKGSSWSGYQNTPVLSFITANFNSNKLAGEIRGNSDYGPDVEIKEAQIDGLSFSGDATSGGKTGKLEGKFFGKFNGYRDTETSIGGKITFDGDRSLDTVFGGVSYKKELENNTDTSTTHLTK

SEQ ID NO: 9137 - protein, 753 aa, Neisseria meningitidis
MLQIEIDGKQVSVEQGATVIEAAHKLGTYIPHFCYHKKLSIAANCRMCLVNVEKAPKPLPACATPVTDGMIVRTHSAKAREAQEGVMEFLLINHPLDCPTCDQGGECQLQDLAVGYGKTTSRYTEEKRSVVGKDMGPLVSAEEMSRCIHCTRCVRFTEEIAGLQEIAMVNRGEHSEIMPFIGKTVETELSGNVIDLCPVGALTSKPFRFNARTWELNRRKSVSAHDALGSNLIIQTKDHTVRRVLPLENEAINECWLSDRDRFAYEGLYHESRLKNPKIKQGGEWMDVDWKTALEYVRSAIECIAKDGNQNQVGIWANPMNTVEELYLAKKLANGLGVKNFATRLRQQDKRLSDDLKGAQWLGQSIESLADNDAVLVVGANLRKEQPLLTARLRRAAKDRMALSVLAGSKEELFMPLLSQEAAHPDEWAGRLKKLSGNAEHAVTASLKNAEKAAVILGAEVQNHPDYAAIYAAAQELADATGAVLGILPQAANSVGADVLGVNSGESVAEMANAPKQAVLLLNVEPEIDTADGAKAVAALKQAKSVMAFTPFVSETLLDVCDVLLPIAPFTETSGSFINMEGRLQSFHGVVQGFGDSRPLWKVLRVLGNLFDLQGFEYHDTAAILKDALDAESLPSKLDNRVSSTQKDFQTASSRLVRVGGVGIYHTDAIVRRSAPLQATVHAAVPAARVNPNTLARLSLQDGQIAVAKQNGASVSVAVKADAGLPENVVHLPLHTENAALGALMDTIELAGA

SEQ ID NO: 9138 - protein, 411 aa, Neisseria meningitidis; identical to SEQ ID NO: 3347

SEQ ID NO: 9139 - protein, 242 aa, Neisseria meningitidis; identical to SEQ ID NO: 107

SEQ ID NO: 9140 - protein, 200 aa, Neisseria meningitidis; identical to SEQ ID NO: 2775

SEQ ID NO: 9141 - protein, 133 aa, Neisseria meningitidis; identical to SEQ ID NO: 2967

SEQ ID NO: 9142 - protein, 143 aa, Neisseria meningitidis
MDIQTILEKTLPGLGYELVDFELTAQGTLRVFIDKEGGITVEDCATVSNHLSRVFMVEDIDYKNLEISSPGLDRPLKKAADFVRFAGQNAKIKTRLPIDGQKNFIGKIEGCENDTVTVSFDGKTVQIELGNIDKARLRPEFKF

SEQ ID NO: 9143 - protein, 165 aa, Neisseria meningitidis; identical to SEQ ID NO: 3578

SEQ ID NO: 9144 - protein, 83 aa, Neisseria meningitidis
LLDGIMRKACRNRRLWEVQTKRNRYLSKTRYVVEQSFGTMPRKFRYARSTYFGLIKVSAQSHVKEMCLNLLKAANRLSAPAAA

SEQ ID NO: 9145 - protein, 859 aa, Neisseria meningitidis
MRYDKLTAKFQQALAEAQSLALAADGSYLEAGFVLKALLDDQNSGAAALLAHSGVNVPQVKQRLQQHLNSLPKVSGQGGDILPSRELQAVLNLMDKAATKRGDAYIASELFLLALVQQNDAAGKILKEAGATEQNINAAIDAVRGGQNVNDANAEDQRDALKKYTLDLTQRARDGKLDPVIGRDDEIRRAIQVLQRRTKNNPVLIGEPGVGKTAIVEGLAQRIVNGEVPESLRNKRLLVLDLAALIAGAKYRGEFEERLKGVLNDLAKDDGNTLIFIDEIHTLVGAGKTDGAMDAGNMLKPALARGELHCIGATTLDEYRQYIEKDAALERRFQKVLVGEPSVENTIAILRGLQERYEIHHGIDITDPAIVAAAELSDRYITDRFLPDKAIDLIDEAASRVKMEKETKPEAMDKIDRRLIQLRMEKAHVEKEKDDASKKRLELIDEEINGLQKEYADLDEIWKAEKAISDGAANIKKQIDEVKIKIEQAKRQGDLALASKLMYEDLEHLEKQRAAAERADTDSTKPANKLLRNNVGAEEIAEVVSRMTGIPVSKMMEGERDKLLKMEEVLHRRVVGQDEAVRAVSDAIRRSRSGLADPNKPYGSFLFLGPTGVGKTELCKALAGFLFDSEDHLIRIDMSEYMEKHAVARLIGAPPGYVGYEEGGYLTEQVRRKPYSVILLDEVEKAHPDVFNILLQVLDDGRLTDGQGRTVDFKNTVIVMTSNIGSQHIQQMGIQDYEAVKEVVMEDVKEHFRPEMINRIDEVVVFHGLDQDNIRNIAKIQLKGLEKRLEKQNLRLTVSDAALDIIAKAGFDPIYGARPLKRAIQSEIENPLAKALLAGNYAPESEIRVEADGDRLKFA

SEQ ID NO: 9146 - protein, 299 aa, Neisseria meningitidis; identical to SEQ ID NO: 167

SEQ ID NO: 9147 - protein, 451 aa, Neisseria meningitidis; identical to SEQ ID NO: 2532

SEQ ID NO: 9148 - protein, 213 aa, Neisseria meningitidis; identical to SEQ ID NO: 2169

SEQ ID NO: 9149 - protein, 469 aa, Neisseria meningitidis
MKYISTRGETAHKPFSEVLLMGLAPDGGLMLPEHYPQIGREALDKWRGLAYPELAFEIMRLFVTDIPEDDLRDILNRTYTEAAFGTKEITPVRTLSDGIKIQALSNGPTLAFKDMAMQFLGNAFEYVLNKEGKKLNILGATSGDTGSAAEYALRGKKGVNVFMLSPDGKMSAFQRAQMYSLQDGNIHNIAVKGMFDDCQDIVKAVQNDAAFKEKYHIGTVNSINWGRIVAQVVYYFAGYFKATQSNDEQVSFCVPSGNFGNVCAGHIAKQMGLPIRRLIVATNENDVLDEFFKTGAYRPRNSAHTYVTSSPSMDISKASNFERFVFDLMDRDPQEINTLWTEVAAGKGFDLQFALDKVGGKYGFTSSKSTHADRLATIKQVYEQDQELIDPHTADGVKVAREVREEGETVVCLETALAAKFDATIREAVGDAAIPRPAALEGLENLPQRVQTVPNSADAVKGIIEQTLA

SEQ ID NO: 9150 - protein, 106 aa, Neisseria meningitidis; identical to SEQ ID NO: 2449

SEQ ID NO: 9151 - protein, 237 aa, Neisseria meningitidis; identical to SEQ ID NO: 2588

SEQ ID NO: 9152 - protein, 207 aa, Neisseria meningitidis; identical to SEQ ID NO: 243

SEQ ID NO: 9153 - protein, 107 aa, Neisseria meningitidis; identical to SEQ ID NO: 178

SEQ ID NO: 9154 - protein, 140 aa, Neisseria meningitidis; identical to SEQ ID NO: 2533

SEQ ID NO: 9155 - protein, 371 aa, Neisseria meningitidis; identical to SEQ ID NO: 3159

SEQ ID NO: 9156 - protein, 841 aa, Neisseria meningitidis
LKNNRQIKLIAASVAVAASFQAHAGLGGLNIQSNLDEPFSGSITVTGEEAKALLGGGSVTVSEKGLTAKVHKLGDKAVIAVSSEQAVRDPVLVFRIGAGAQVREYTAILDPVGYSPKTKSALSDGKTHRKTAPTAESQENQNAKALRKTDKKDSANAAVKPAYNGKTHTVRKGETVKQIAAAIRPKHLTLEQVADALLKANPNVSAHGRLRAGSVLHIPNLNRIKAEQPKPQTAKPKAETASMPSEPSKQATVEKPVEKPEAKVAAPEAKAEKPAVRPEPVPAANTAASETAAESAPQEAAASAIDTPTDETGNAVSEPVEQVSAEEETESGLFDGLFGGSYTLLLAGGGAALIALLLLLRLAQSKRARRTEESVPEEEPDLDDAADDGIEITFAEVETPATPEPAPKNDVNDTLALDGESEEELSAKQTFDVETDTPSNRIDLDFDSLAAAQNGILSGALTQDEETQKRADADWNAIESTDSVYEPETFNPYNPVEIVIDTPEPESVAQTAENKPETVDTDFSDNLPSNNHIGTEETASAKPASPSGLAGFLKASSPETILEKTVAEVQTPEELHDFLKVYETDAVAETAPETPDFNAAADDLSALLQPAEAPSVEENVTETVAETPDFNATADDLSALLQPSEVPAVEENAAEIVADDLSALLQPAEAPAVEENVTKTVAEIPDFNATADDLSALLQPSEVPAVEENAAETVADDLSALLQPAEAPAVEENAAEITLETPDSNTSEADALPDFLKDGEEETVDWSIYLSEENIPNNADTSFPSESVGSDAPSEAKYDLAEMYLEIGDRDAAAETVQKLLEEAEGDVLKRAQALAQELGI

SEQ ID NO: 9157 - protein, 636 aa, Neisseria meningitidis
MTLETLIALPRNIKKICFLIHDFLMIFIAFWFTQSLKADYSDEWFDFANWQSFLLTALLTITLFIRMGLYRAVTRFVSFRILSTALAGSIVSAVLFFLNTLIFEERLRLALPIVYFLLLFVSVTGSRMVLRGLLSEHPKKQMIPVIIYGAGRSGRQLLEVVKQMREYSAAAFVDDDPKLWHTVICGLAVYRPDDISALIERYGVEKILLAIPSATQEQRRRIINKLEAYPCEVLTIPGMKDLMDGKISIGTLKKISVSDLLGRDSVAPDNRLMSADIEGKTVMVTGAGGSIGSELCRQIIRRRPEKLLLFELSEFALYAIEKELRETCIQKRLNTEILPFLGSVQNRTLLEHVMTAFSVATVYHAAAYKHVPMVEFNTVEGIRNNIFGTLECALAATASGVETFVLISTDKAVRPTNTMGAGKRMAELCLQALAAEPGQKTRFSMVRFGNVLGSSGSVVPLFEKQIAEGGPLTLTHPEITRYFMTIPEAAQLVIQAGAMGTGGDVFVLDMGESVKIIDLARQMITLSGLKPNTPEQPDGDIEILITGLRPGEKLYEELLIGDNVRKTAHPRIMTADEAMLPWHELSVLLDRIRAACDRYDQQAIRTLLINAPTGFTPSDGICDLLWVRETHRKNAV

SEQ ID NO: 9158 - protein, 130 aa, Neisseria meningitidis; identical to SEQ ID NO: 425

SEQ ID NO: 9159 - protein, 245 aa, Neisseria meningitidis; identical to SEQ ID NO: 4857

SEQ ID NO: 9160 - protein, 419 aa, Neisseria meningitidis; identical to SEQ ID NO: 1950

SEQ ID NO: 9161 - protein, 948 aa, Neisseria meningitidis; identical to SEQ ID NO: 2444

SEQ ID NO: 9162 - protein, 512 aa, Neisseria meningitidis
MNMLGALAKVGSLTMVSRVLGFVRDTVIARAFGAGMATDAFFVAFKLPNLLRRVFAEGAFAQAFVPILAEYKETRSKEATEAFIRHVAGMLSFVLVIVTALGILAAPWVIYVSAPGFAKDADKFQLSIDLLRITFPYILLISLSSFVGSVLNSYHKFSIPAFTPTFLNVSFIVFALFFVPYFDPPVTALAWAVFVGGILQLGFQLPWLAKLGFLKLPKLNFKDAAVNRVMKQMAPAILGVSVAQISLVINTIFASYLQSGSVSWMYYADRMMELPSGVLGAALGTILLPTLSKHSANQDTEQFSALLDWGLRLCMLLTLPAAVGLAVLSFPLVATLFMYREFTLFDAQMTQHALIAYSFGLIGLIMIKVLASGFYARQNIKTPVKIAIFTLICTQLMNLAFIGPLKHVGLSLAIGLGACINAGLLFYLLRRHGIYQPGKGWAAFLAKMLLSLAVMGGGLWAAQACLPFEWVRAGGMRKAGQLCILIAVGGGLYFASLAALGFRPRHFKRVES

SEQ ID NO: 9163 - protein, 43 aa, Neisseria meningitidis
LLPTRSVSSLLLGEYLEFEENGTKIAAEIDSAWHFWARLVGFQ

SEQ ID NO: 9164 - protein, 456 aa, Neisseria meningitidis
MINPIASLSPLDGRYAQSVEALRPIFSEYGLMKARVKVELNWLKALAAEPKIVEVPPFSAGTLAEIDTVIENFSLEDAAAVKAIEATTNHDVKAIEYWLKKRFAEVPEVAAVSEFIHFACTSEDINNLSHALMLQEAREAVLLPKLAEIIEKLTAMAHDLAAVPMMSRTHGQPATPTTLGKETANVVYRLQRQFKILQAQEFLGKINGAVGNYNAHMAAYPDVDWETHCHNFVEIGLGLTFNPYTIQIEPHDYMAEFFQTLSRINTILIDFNRDVWGYISLGYFKQKVKAGEVGSSTMPHKVNPIDFENSEGNLGMANAVLGFLAEKLPVSRWQRDLTDSTVLRNMGVGVGYAVLGFAAHLRGLNKLEPNPAALAADLDATWELLAEPIQTVMRRYGVANPYEKLKDLTRGKGGITPEVLKVFIGSLEIPAEAKAKLLELTPALYVGKAEALAKRI

SEQ ID NO: 9165 - protein, 201 aa, Neisseria meningitidis
MKKIGLFGGTFDPIHNGHLHIARAFADEIGLDAVVFLPTGGPYHKDAASASAADRLAMVELATAEDARFAVSDCDIVREGATYTFDTVQIFRQQFPSAQLWWLMGSDSLMKLHTWKKWQMLVRETNIAVAMRQGDSLHQTPRELHAWLGKSLQDGSVRILSAPMHNVSSTEIRRNLASQGVSDGIPPAAARYIREHGLYEK

SEQ ID NO: 9166 - protein, 145 aa, Neisseria meningitidis; identical to SEQ ID NO: 1767

SEQ ID NO: 9167 - protein, 240 aa, Neisseria meningitidis
MNPRIKAMSGVMLQALSAAQQDVLVDLWQVDLRPLGGRVFYFCNQVNERGTAVVWQGQAYEPYPIKADGFESTSQGAGNRPTLTVSNLLGLITGAADQFGQLVGVLVVRRQTYAKFLDAVNFQSGRNPTADPMQEVVGKYLVERMTALNAETATFELAAPSESDGSVIPARIMLANTCCWQYRGEGCGYTGRAVADRFDMPTDDASKDVCSKTLTGCRARFGATAVLPFGGFPSSDKVTT

SEQ ID NO: 9168 - protein, 449 aa, Neisseria meningitidis
MKLPVMSPEHSAQLQAFEAKILSNHAKIEAWFRTQWSVHRPPFYGSVDIRNAGYKISSIDMNLFPGGFNNLNPNFIPLAAVAAQDAVQRACETAKSVLIIPENHTRNTFYLQNIYALGEILRSAGYEVRLGSLNPEVTEPTEFETALGDKILLEPLLRTRDRVHLADGFSPCVVLLNNDLSAGIPDILKGISQTVLPPLHGGWTTRRKTNHFGAYNQVAAEFAKLIGIDEWQINPYFEKIGGLDFQGREGEDALAEAVERVLAKIQAKYDESGITDKPFVIVKADAGTYGMGVMSVKSADEVRGLNRKNRNKMAKVKEGLEVSEVIVQEGIYTYETLNSAVCEPVVYMMDRFVIGGFFRVHEGRGADENLNAGGMVFVPLSNSIPTGNGDNSQEAPEACKRVFEQWDSLGMPRSEKDCDVDNEHNRLYVYGVMARLSLLAASIELEETA

SEQ ID NO: 9169 - protein, 321 aa, Neisseria meningitidis
MLRLTALTLCTVLALGACSPKDSDSAPQAKEQAVSAAQSEGASVTVKTARGDVQIPQNPERIAVYDLGMLDTLSKLGVKTGLSVDKNRLPYLEEYFKTTKPAGTLFEPDYETLNAYKPQLIIIGSRAAKAFDKLNEIAPTIEMTADTANLKESAKERIDALAQIFGKKAEADKLKAEIDASFEAAKTAAQGKGKGLVILVNGGKMSAFGPSSRLGGWLHKDIGLPAVDEAIKEGSHGQPISFEYLKEKNPDWLFVLDRSAAIGEEGQAAKDVLNNPLVAETTAWKKGQVVYLVPETYLAAGGAQELLNASKQVADAFNAAK

SEQ ID NO: 9170 - protein, 96 aa, Neisseria meningitidis; identical to SEQ ID NO: 2317

SEQ ID NO: 9171 - protein, 371 aa, Neisseria meningitidis; identical to SEQ ID NO: 2339

SEQ ID NO: 9172 - protein, 463 aa, Neisseria meningitidis
MQVFLDNPKAFFETVSGWVWGPVMLMLLVGTGILLTVLLKGLQFTMLGYALKQAFVPPKKHKSGEGHEGDISHFAALMTALSATIGTGNIAGVATAVVTGGPGAVFWMWMTAIFGMATKYGEGVLAVKYRVNNSKGEMSGGPMYYIEKGLGKNWKWMALAFALFGTFASFGIGSSVQSNSVAQAVQTSFGIEPAYTGITLTVLTAVVVLGGIKGIAKAASFIVPAMAVFYVLGGLSIIAINSDALMPAVKLIFSDAFSAQAVAGGAIGTVIRYGVARGVFSNEAGMGSAPIAAAAAKTDHPVRQALVSMTGTFLDTIVVCSITGIVLVMGLLGAGGEFVKPEVSGAALTTVTFQKMLPGIGGWIVTIGLIFFAYSTILGWCYYGEKCAVYVFGEKFAGLYRVGYVSSVMLGTVLSLDLVWLASDTFNGLMALPNLIALLLMAKVIVNETRDFKQKITNGELPH

SEQ ID NO: 9173 - protein, 43 aa, Neisseria meningitidis; identical to SEQ ID NO: 3165

SEQ ID NO: 9174 - protein, 258 aa, Neisseria meningitidis
MNFIRSVGAKTLGLIQSLGSITLFLLNILAKSGTAFVRPRLSVRQVYFAGVLSVLIVAVSGLFVGMVLGLQGYTQLSKFKSADILGYMVAASLLRELGPVLAAILFASSAGGAMTSEIGLMKTTEQLEAMNVMAVNPVARVVAPRFWAGVFSMPLLASIFNVAGIFGAYLVGVSWLGLDSGIFWSQMQNNITIHYDVINGLIKSAAFGVAVTLIAVHQGFHCVPTSEGILRASTRTVVSSALTILAVDFILTAWMFTD

SEQ ID NO: 9175 - protein, 279 aa, Neisseria meningitidis
MQNHVISLASAAERRAHIADTFGRHGIPFQFFDALMPSERLEQAMAELVPGLSAHPYLSGVEKACFMSHAVLWKQALDEGLPYIAVFEDDVLLGEGAEKFLAEDAWLQERFDPDSAFIVRLETMFMHVLTSPSGVADYCGRAFPLLESEHWGTAGYIISRKAMRFFLDRFAVLPSEGLHPVDLMMFSDFFDREGVPVCQLNPALCAQELHYAKFHDQNSALGSLIEHDRLLNRKQQWRDSPANTFERRLIRALTKISREREKRRQRREQLIGKIIVPFQ

SEQ ID NO: 9176 - protein, 298 aa, Neisseria meningitidis
MESENIISAADKARILAEALPYIRRFSGSVAVIKYGGNAMTEPALKEGFARDVVLLKLVGIHPVIVHGGGPQINAMLEKVGKKGEFVQGMRVTDKEAMDIVEMVLGGHVNKEIVSMINTYGGHAVGVSGRDDHFIKAKKLLIDTPEQNGVDIGQVGTVESIDTGLVKGLIERGCIPVVAPVGVGEKGEAFNINADLVAGKLAEELNAEKLLMMTNIAGVMDKTGNLLTKLTPKRIDELIADGTLYGGMLPKIASAVEAAVNGVKATHIIDGRVPNALLLEIFTDAGIGSMILGGGEDA

SEQ ID NO: 9177 - protein, 351 aa, Neisseria meningitidis
MELKIDIATNNFKHGGGTERYTLDLVKGLNRQNITPAVYATKFDHGIPEYAMIEPHLVDQHRTLKKLRSFLFSSRLAQTRKNSAAKLIACHHADYADLLICGGTHLGYLHHMAQKPNLLDRLAIRRNRSNYATAKLIMAHSHMMRRELVGLYGVPPERIQVAPPPADTERFFPQPGETADLRAKYGFADHETVFLFPSTGHTRKGLELLADFFEHTGLPVKLAVVGSPLPRPMKNVVGLGFCTDMPELYRAADFTIMASLYEPFGLVGVESVLCGTRVVLSENMACTEVMNEEAGFFFSRQNPETLAQAVAQAVSLKKQGGHRLSDPMRALNYNPSLSHHIDRLTDILASV

SEQ ID NO: 9178 - protein, 293 aa, Neisseria meningitidis
MPSENTLFPLPDTLLRPMVEQALSEDLGRRGDITSAAVIAPDKTAKLFLVSREDGVIAGMDLARLAFQTMDPSVRFQAEIRDGQVVRAGQTLAAVEGNARALLAAERTALNYLTHLSGISTATARAVAEVAKYGTDIVCSRKTIPLLRVLQKYAVRAGGGVNHRMGLDDAVLIKDNHLAYCDSIAQAVRQAKQAVGPLTCVEIEVDTLAQLDEAIAAGAERILLDNMDDETLKEAANRCHTQTAHPHTVYCEASGGIGFDRLKRVAQTGVDGIALGYLTHSSRSLDIGLDFLA

SEQ ID NO: 9179 - protein, 464 aa, Neisseria meningitidis
MTVKTRFAPSPTGYLHIGGVRTALFSWAFARHHKGEFLLRIEDTDLARSTAESVNIILDGMKWVGLNYDNADNVVYQTRRFDRYKEVIAELLEKGHAYYCYCSKEELEAMREKAEKEGTATYDRRWRPEAGKTLPEIPAGVQPVVRFKTPLDGVTKWADLVKGEISIPNEALDDLIIARADGTPTYNFCVVVDDYDMGVTHVIRGDDHVNNTPKQINILKAIGANLPEYGHLPMILNEQGKKISKRSGDTVAITDFGAMGILPEAMLNYLARLGWAHGDDEFFTMEQFIEWFDLKDVSPSPSRMDLKKLYWINGEHIKITTNEKLAEMVKPRLALRDIHETSKPALEDVLALVKDRAQDLNALADECLYFYKKQVPAEADVAKHWDDEASARMLRFAERLEGLEDWNTEAIHDLFKPFCDEEGIKMGKLGMPLRLAVCGTAKTPSVDAVLALIGKEEVLKRIRA

SEQ ID NO: 9180 - protein, 305 aa, Neisseria meningitidis; identical to SEQ ID NO: 1198

SEQ ID NO: 9181 - protein, 418 aa, Neisseria meningitidis
MKVLVLGAGVAGVSSAWYLAEAGHEVTVIDRAKGVAMETSFANAGQLSYGYTTPWAAPGIPTKALKWLFKSHPPLLFRPDGSLYQIEWLWRMLQNCTAAHYQTNKERMVRISEYSREMFRRFEAQTGMNFEERKKGTLQIFRQTKEVEAAEQDIAVLERYGVPYRRLKPEECAEFEPALARVTAKIAGGLHLPADATGDCHLFTENLYKLCQEKGVQFHFNQTISRIDHNGLRIKAVETETGRFEADAVVCALGCFSRTVLAQLDLDLPIYPVKGYSLTLPVTNSDGAPVSTVLDESYKVAITRFDNRIRVGGMAELSGYEIKLPEKRRETLALVVNDLFPEGGDLSQALFWSGLRPMTPDSTPLIGRTRFENLFLNTGHGTLGWTMSLGSAKLTADIVSGKDTEIRSDDLSLSRYQA

SEQ ID NO: 9182 - protein, 594 aa, Neisseria meningitidis
MELMTVLLPLAALVSGVLFTWLLMKGRFQGEFADLNAQLAEKAARCDFVEQAHAEIASELAVLDGKYRHLQDENYALGNRFSAAEKQIAHLQEKEAESVRLKQSYIELQEKAQGLAVENERLATQLGQERKAFADQYALERQIRQRIETDLEESRQTVRDVQNDLADVGNRFAAAEKQIAHLQEKEAEAERLRQSHTELQEKAQGLAVENERLATQIEQERLASEEKLSLLGEARKSLSDQFQNLANTILEEKSRRFTEQNREQLHQVLNPLNERIHGFGELVKQTYDKESRERLTLENELKRLQGLNAQLHSEAKALTNALTGTQNKVQGNWGEMILETVLENSGLQKGREYVVQAASVRKEEDGGTRRLQPDVLVNLPDNKQIVIDSKVSLTAYVRYTQAADADTAARELAAHVASIRAHMKGLSLKDYTDLEGVNTLDFVFMFIPVEPAYLLALQHDAGLFQECFDKRIMLVGPSTLLATLRTVANIWRNEQQNQNALAIADEGGKLYDKFVGFVQTLESVGKGIDQAQSSFQTAFKQLAEGRGNLVGRAEKLRLLGVKAGKQLQRDLVERSNETTALSESLEYAAEDEAV

SEQ ID NO: 9183 - protein, 80 aa, Neisseria meningitidis; identical to SEQ ID NO: 3196

SEQ ID NO: 9184 - protein, 155 aa, Neisseria meningitidis; identical to SEQ ID NO: 1336

SEQ ID NO: 9185 - protein, 370 aa, Neisseria meningitidis
MTAKEELFAWLRHMNQNKGSDLFVTTHFPPAMKLDGKITRITDEPLTAEKCMEIAFSIMSAKQAEEFSSTNECNFAISLPDTSRFRVNAMIQRGATALVFRAITSKIPKFESLNLPPVLKDVALKKRGLVIFVGGTGSGKSTSLASLIDYRNENSFGHIITIEDPIEFVHEHKNCIITQREVGVDTENWMAALKNTLRQAPDVILIGEIRDRETMDYAIAFAETGHLCMATLHANSTNQALDRIINFFPEERREQLLTDLSLNLQAFISQRLVPRDGGKGRVAAVEVLLNSPLISELIHNGNIHEIKEVMKKSTTLGMQTFDQHLYQLYEKGDISLQDALKNADSAHDLRLAVQLRSRRAQSSGPDLELL

SEQ ID NO: 9186 - protein, 404 aa, Neisseria meningitidis
MSEAEYFSHFISNGNGKLLEIPQRRGRQDGVFIDWLSFTLHEDSLLKVSGCPLVSDAEYMFVLSKKLEEILGFGITSRCKSKGNKFYDSMFRLGSEEVDYGEVHYGGQRNTVLIELKGVGCNIANPGWELRLKQFLEDSLRPRITRVDLALDFFDGEYTPEQALLDHDNGFFDNSNQRPKSETIGTAWRNEDGSGKTFYVGRKKNSRFVRVYEKGRQLGDKESKWVRFEIQFNYGDIEIPLDILINQGSYFCGAFPICRKFKNMPVPERFDQRKKTLNLTFEHKLHYAKNAVGKLVNFMIEMGFDNSEIVESLKADSGFPKGLEPEKYALEMLRDGLKHGFIHEQPDIDLEIELDELGVIAFKNSDKFDREKRLFSPDYDAEKERKYQDYLDEVYHQNVNYDYF

SEQ ID NO: 9187 - protein, 257 aa, Neisseria meningitidis; identical to SEQ ID NO: 780

SEQ ID NO: 9188 - protein, 163 aa, Neisseria meningitidis; identical to SEQ ID NO: 6300

SEQ ID NO: 9189 - protein, 313 aa, Neisseria meningitidis
MKTLLLLIPLVLTACGTLTGIPAHGGGKRFAVEQELVAASSRAAVKEMDLSALKGRKAALYVSVMGDQGSGNISGGRYSIDALIRGGYQNNPESATQYSYPAYDTTATTKSDALSSVTTSTSLLNAPAAALTRNSGRKGERSAGLSVNGTGDYRNETLLANPRDVSFLTNLIQTVFYLRGIEVVPPEYADTDVFVTVDVFGTVRSRTELHLYNAETLKAQTKLEYFAVDRDSRKLLIAPKTAAYESQYQEQYALWMGPYSVGKTVKASDRLMVDFSDITPYGDTTAQNRPDFKQNNGKNPDVGNEVIRRRKGG

SEQ ID NO: 9190 - protein, 270 aa, Neisseria meningitidis; identical to SEQ ID NO: 2943

SEQ ID NO: 9191 - protein, 70 aa, Neisseria meningitidis; identical to SEQ ID NO: 3527

SEQ ID NO: 9192 - protein, 66 aa, Neisseria meningitidis; identical to SEQ ID NO: 1185

SEQ ID NO: 9193 - protein, 485 aa, Neisseria meningitidis; identical to SEQ ID NO: 2552

SEQ ID NO: 9194 - protein, 123 aa, Neisseria meningitidis; identical to SEQ ID NO: 2701

SEQ ID NO: 9195 - protein, 169 aa, Neisseria meningitidis; identical to SEQ ID NO: 4575

SEQ ID NO: 9196 - protein, 356 aa, Neisseria meningitidis; identical to SEQ ID NO: 2047

SEQ ID NO: 9197 - protein, 156 aa, Neisseria meningitidis; identical to SEQ ID NO: 955

SEQ ID NO: 9198 - protein, 123 aa, Neisseria meningitidis
MSKDKNQITVGINREIIDTETDSSAEFHVIRHVSLDYATGFNVVLLDSYVRKSTFERRGRSVGSMQLNIPGVPPRGTDVLDWAYQAVVAAVEGGAVDAYGQPISANSLTGAELVYADLPEAAI

SEQ ID NO: 9199 - protein, 92 aa, Neisseria meningitidis; identical to SEQ ID NO: 2199

SEQ ID NO: 9200 - protein, 283 aa, Neisseria meningitidis
MHILLTALLKCLSLLPLSCLHTLGNRLGHLAFYLLKEDRARIVANMRQAGMNPDPKTVKAVFAETAKGGLELAPAFFRKPEDIETMFKAVHGWEHVQQALDKHEGLLFITPHIGSYDLGGRYISQQLPFPLTAMYKPPKIKAIDKIMQAGRVRGKGKTAPTSIQGVKQIIKALRSGEATIVLPDHVPSPQEGGEGVWVDFFGKPAYTMTLAAKLAHVKGVKTLFFCCERLPGGQGFDLHIRPVQGELNGDKAHDAAVFNRNAEYWIRRFPTQYLFMYNRYKMP

SEQ ID NO: 9201 - protein, 95 aa, Neisseria meningitidis; identical to SEQ ID NO: 3586

SEQ ID NO: 9202 - protein, 149 aa, Neisseria meningitidis; identical to SEQ ID NO: 5576

SEQ ID NO: 9203 - protein, 63 aa, Neisseria meningitidis; identical to SEQ ID NO: 5865

SEQ ID NO: 9204 - protein, 232 aa, Neisseria meningitidis
MKSKHLALGVAALFALAACDSKVQTSVPADSAPAASAAAAPAGLVEGQNYTVLANPIPQQQAGKVEVLEFFGYFCPHCAHLEPVLSKHAKSFKDDMYLRTEHVVWQKEMLTLARLAAAVDMAAADSKDVANSHIFDAMVNQKIKLQEPEVLKKWLGEQTAFDGKKVLAAYESPESQARADKMQELTETFQIDGTPTVIVGGKYKVEFADWESGMNTIDLLADKVREEQKAAQ

SEQ ID NO: 9205 - protein, 374 aa, Neisseria meningitidis
MQNTSFDNESDYSDDSDFASASETENRIGLTVPLELAGGRLDAVLAKLLPDYSRSRLTLWIKEGAVIVNDKPSQPKDKMIGGEQIRVTVRPSEENLAFVPEPMALDIVYEDDTVIVVNKPAGLVVHPAAGNWRGTLLNGLLAHCPELSQVPRAGIVHRLDKETSGLMVVAKTLPAQNSLVRQLQERTVKRIYRAVANGIVPFDGKIETQIGRDPHNRLKMAVVKFGGKPAVTHVKVLERYLTHSYIECSLETGRTHQIRVHMREANHPLAGDPVYGNPRHPCSDPVKEAVKSLGARQALHAYRLSFTHPESGETVSFEAPIPDDIYHLLSVLRLEAGLDSSLSNEEEWQDKFGADDDDDWNEDDYDVEVVYVRE

SEQ ID NO: 9206 - protein, 171 aa, Neisseria meningitidis
LVTREVCEPRSWTVKTRIIQANAFRRHLNAMPSEHAAYADLMASSAKRLLCAKAILFSSAVRTGAAVGNIFFDGFADGGDFGDGAQYGFATFNAVDAASDSAGGIAGAAVLEIVEDEDFEGDLGSWADSVKMVRSSDGITVVPMPSETAAVQAFVPDGKIGYNIGHQCPTY

SEQ ID NO: 9207 - protein, 276 aa, Neisseria meningitidis; identical to SEQ ID NO: 3411

SEQ ID NO: 9208 - protein, 41 aa, Neisseria meningitidis
LKEDFINNERYEKTELYSQKDKVILFPKFGEYDLVLNPDII

SEQ ID NO: 9209 - protein, 140 aa, Neisseria meningitidis; identical to SEQ ID NO: 5192

SEQ ID NO: 9210 - protein, 252 aa, Neisseria meningitidis; identical to SEQ ID NO: 2885

SEQ ID NO: 9211 - protein, 166 aa, Neisseria meningitidis; identical to SEQ ID NO: 987

SEQ ID NO: 9212 - protein, 157 aa, Neisseria meningitidis
LRTRPNAENRDNAKNYVKIETKHQGNGSFHAASSLGLSAIYDFKLNDKFKPYIGARVAYGHVKHQVHSVETKTTTVTSKPTATSPQGGPIIQTDPSKPPYHESHSISSLGLGVIAGVGFDITPKLTLDTGYRYHNWGRLENTRFKTHEVSLGMRYRF

SEQ ID NO: 9213 - protein, 125 aa, Neisseria meningitidis; identical to SEQ ID NO: 3172

SEQ ID NO: 9214 - protein, 589 aa, Neisseria meningitidis
MTVQTKTKGLAWQEKPLSDNERLKTESNFLRGTILDDLKDPLTGGFKGDNFQLIRFHGMYEQDDRDIRAERAEAKLEPLKFMLLRCRLPGGIIKPSQWIELDKFARENSHYRSIRLTNRQTFQFHGVPKAKLQTMHRLLHKLGLDSIATAADMNRNVLCTSNPIESELHRQAYEYAKKISEHLLPRTRGYLDVWVDGKKVQSSDDFLQEDEPILGKTYLPRKFKTAVVIPPLNDVDCYGNDLDFVAVSDGNGQLAGFNVLAGGGLSMEHGNTKTYPNISLELGFVPPEHALKAAEAVVTTQRDFGNRSDRKNARTRYTIQNMGLDNFRAEVERRMGMPFEPIRPFKFTGRGDRIGWVKGIDGNWHLTLFIESGRLVDEGGKQLLTGVLEIAKIHKGDFRITANQNLIVANVAEADKAKIEELARTYGLIRNDVSKLRENAMSCVSFPTCPLAMAEAERVLPDFIGELDKIMAKHGTSDDYIVTRITGCPNGCGRAMLAEIGLVGKAVGRYNLHIGGDREGVRIPRLYKENITLPEILSELDDLIGKWAAGRDTDEGFGDFAIRTGIVKPVLDAPVDFWDASKAVPIARA

SEQ ID NO: 9215 - protein, 144 aa, Neisseria meningitidis; identical to SEQ ID NO: 4528

SEQ ID NO: 9216 - protein, 251 aa, Neisseria meningitidis
MGRLLLGSIRMSIIVENLTVSYRRRPAVHHVDITFEEHSMWAVFGPNGAGKSTFLKSLMGLQPIDTGSIRLDGLTRQNIAYLPQQSDIDRSQPMTVFDLAAMGLWYEIGFFRGINAVQKQRVHESLERVGMRQFAGRQIAHLSNGQFQRVLFARMLVQNAKFLLLDEPFNAVDARTTYELLDVLQKCHCGGHAIIAVLHDYEQVRAYFPNTLLLAREKIAAGATETILTEPYLAQANAKMQQQESPEWCAS

SEQ ID NO: 9217 - protein, 512 aa, Neisseria meningitidis; identical to SEQ ID NO: 3339

SEQ ID NO: 9218 - protein, 230 aa, Neisseria meningitidis; identical to SEQ ID NO: 1058

SEQ ID NO: 9219 - protein, 228 aa, Neisseria meningitidis; identical to SEQ ID NO: 2819

SEQ ID NO: 9220 - protein, 758 aa, Neisseria meningitidis; identical to SEQ ID NO: 2629

SEQ ID NO: 9221 - protein, 89 aa, Neisseria meningitidis; identical to SEQ ID NO: 2412

SEQ ID NO: 9222 - protein, 178 aa, Neisseria meningitidis; identical to SEQ ID NO: 2084

SEQ ID NO: 9223 - protein, 283 aa, Neisseria meningitidis
MNTLKFTKMHGLGNDFMVIDAVSQDFTPEDAPIAAWADRFRGVGFDQLLVVGRSETEGVDFRYRIFNADGSEVGQCGNGARCFARFVADKGLTDKKEICVETANGVIFPKLSDNGMVTVNMGKPRFMPSEIPFVPELGEGDDACIYGVHLESGIQPVSCVNMGNPHAVIVVDDVECAPVRETGSLIEPHRQFPERVNVGFMQIVSRTAIRLRVFERGVGETQACGTGACAAVVAGIRLGLLDEGKTVEVILPGGTLYIEWACGGDVMMTGPAEAVFEGELAYS

SEQ ID NO: 9224 - protein, 241 aa, Neisseria meningitidis
  misc_feature 237, 238, 239: 'Xaa' is any amino acid
MADNYVIWFENLRMTDVERVGGKNASLGEMISQLTEKGVRVPGGFATTADAYRAFLAHNGLSERISAALAKLDVEDVAELARVGKEIRQWILDTPFPEQLDAEIEAAWNKMVADAGGADISVAVRSSATAEDLPDASFAGQQETFLNINGLENVKEAMHHVFASLYNDRAISYRVHKGFEHDIVALSAGVQRMVRSDSGASGVMFTLDTESGYDQVVFVTSSYGLGENVVQGAVNPXXXHT

SEQ ID NO: 9225 - protein, 116 aa, Neisseria meningitidis
  misc_feature 2, 3, 4: 'Xaa' is any amino acid
VXXXLNDKFKPYIGARVAYGHVRHSIDSTKKTTEVVTSTHGGADTKPTIYNGESTQNAYHESHSIRRLGLGVVAGVGFDITPKLTLDTGYRYHNWGRLENTRFKTHEVSLGMRYHF

SEQ ID NO: 9226 - protein, 505 aa, Neisseria meningitidis; identical to SEQ ID NO: 2005

SEQ ID NO: 9227 - protein, 125 aa, Neisseria meningitidis; identical to SEQ ID NO: 535

SEQ ID NO: 9228 - protein, 765 aa, Neisseria meningitidis; identical to SEQ ID NO: 2833

SEQ ID NO: 9229 - protein, 458 aa, Neisseria meningitidis
MHDKTWSGRFNEPVSELVKQYTASIGFDRRLAEWDIQGSLAHAQMLKETGVLDEGDLADIRRGMAEILEEIRSGKIEWSSDLEDVHMNIERRLTDKIGDAGKRLHTGRSRNDQVATDIRLWLRDQITVIRSLIQSLQTALLDLAEQNAETVMPGFTHLQVAQPVSFGHHMLAYVEMLGRDNERMADCRCRVNRMPLGAAALAGTTYPIQREITAELLGFEQICQNSLDAVSDRDFAIEFTAAASLVMVHLSRLSEELILWMSPRFGFIDIADRFCTGSSIMPQKKNPDVPELVRGKSGRVIGHLIGLITLMKSQPLAYNKDNQEDKEPLFDTADTLIDTLRIYADMMRGVTVKPDNMRAAVMQGFATATDLADYLVKKGMPFRDAHEVVAQAVRHADEAGVDLSELPLEVLQGFSDLIADDVYGVLTPEGSLNARNHLGGTAPEQVRFQVKRWREMLA

SEQ ID NO: 9230 - protein, 301 aa, Neisseria meningitidis; identical to SEQ ID NO: 1112

SEQ ID NO: 9231 - protein, 1144 aa, Neisseria meningitidis
MTEPTYIPLRLHTEFSITDGMVRIKKLIAKAQEYGLPALGISDLMNEFGLVKFYKACRSAGIKPVGAADVWIGNPDAPDKPFRAMLIIRNDAGYLRLSELLTAAYVGKDRNVHHAELNPEWLENGDNSGLICLSGAHYGEVGVNLLNGNEDAARAAALKYAAWFPDAFYLELQRLPERPEWEACVSGSVKLVEELGLPVVATHPTQFMSRDDFNAHEARVCIAGGWVLTDKKRPRDFTPSQFFIPPETMAERFADLPEALENTVEIAKRCNLHITLGKNFLPLFPTPDGLSLDDYLIKLSNEGLQERMVQLYPDEAERAEKMPEYQERLDFELNIIIQMKFPGYFLIVQDFINWAKTHGCPVGPGRGSGAGSLVAYSLKITDLDPLKYALLFERFLNPERVSMPDFDVDFCQANRGRVIEYVREKYGAEAVSQIVTFGTMSSKAVIRDVGRVLELPFMLCDKLSKLIPLEANKPLGLDDAMKAEPQIQELIEAEEADELITLAKKLEDLTRGLGMHAGGVLIAPGKISDYSPVYQADESASPVSMYDKGDVEDVGLVKFDFLGLRNLTIIEMAQNNIKNTTGDIIDVGKIPLDDQVAYQIFRDANTTAVFQFESTGMKKMLKTAHTTKFEELIAFVSLYRPGPMDNIPDFVARMKGQEFQYIHPLLEGILAPTYGIMVYQEQVMQAAQIIGGYSLGGADLLRRAMGKKKPEEMVKHREIFAEGAAKQGISREKSDEIFNYMEKFAGYGFNKSHAAAYALISYQTAWLKAHYPAEFMAATMSSELDNTDQLKHFYDDCRANGIEFLPPDINESDYRFTPYPNMKIRYALGAIKGTGEAAVESITAARQSGGKFTGLLDFCERVGKEHMNRRTLEALIRGGAFDSIEPNRAMLLANIDLAMDNADQKAANANQGGLFDMMEDAIEPVRLIDAPMWSESEKLAEEKTVIGFYLSGHPFGPYAQEVRQIAPQKLSKLKPQDSVRLAGFVTAVRTMMGKRGKIAFVSLEDLSGQVEIMVGGQTLENCADCLKADQVLIIESKVSRDDYGGGDGLRILANQVMTLQTARERYARSLSLALAPHHDIGGLVQLLAAHQLPDTPRIPLQLSYANEKASGRLQVPPKWTVTPSSALFGELETLLGSRSVRVNW

SEQ ID NO: 9232 - protein, 167 aa, Neisseria meningitidis; identical to SEQ ID NO: 2861

SEQ ID NO: 9233 - protein, 258 aa, Neisseria meningitidis
MTLIHPTAVIDPKAELDSSVKVGAYTVIGPNVQIGANTEIGPHAVINGHTSIGENNRIFQFASLGEIPQDKKYRDEPTKLIIGNGNTIREFTTFNLGTVTGIGETRIGDDNWIMAYCHLAHDCVVGNHTIFANNASLAGHVTIGDYVVLGGYTLVFQFCRIGDYAMTAFAAGVHKDVPPYFMASGYRAEPAGLNSEGMRRNGFTAEQISAVKDVYKTLYHRGIPFEEAKADILRHAETQAELAVFRDFFAQSARGIIR

SEQ ID NO: 9234 - protein, 283 aa, Neisseria meningitidis
MTLLGIKLKQTQQLNQRLQQSLRVLQMSGIELEREVENWLSDNPLLERKDTDEFSDAEFSHYTAPARQIGGDEGEDMLSNIAGEQDFKQYLHAQVCEHPLSDQESACVHILIDFLDEQGYLTDSIEDILDHTPLEWMLDEAMLKQALTALQKFDPAGVAAADLNESLILQIERSGECAAKPAALHIVRNALDSIDGNRSQTLARIKKHLPQTDSGTLEAALDLIASLNPFPAAGFASSTPTPYSDEALANLLAFRGMEVSRRTIAKYRESLEIPAAHKRKTAE

SEQ ID NO: 9235 - protein, 435 aa, Neisseria meningitidis
MKPVNIGLLGLGTVGGGTAAVLRDNAEEISRRLGREVRISAVCDLSEEKARQICPSAAFVKDPFELVARKDVDVVVELFGGTGIAKDAVLKAIENGKHIVTANKKLLAEYGNEIFPLAEEKNVMVQFEAAVAGGIPIIKALREGLAANRIKSIAGIINGTSNFILSEMREKGSAFADVLKEAQALGYAEADPTFDIEGHDAGHKITIMSALAFGTPMNFSACYLEGISKLDSRDIKYAEELGYRIKLLGITRKTGKGIELRVHPTLIPESRLLANVNGVMNAVRVNADMVGETLYYGAGAGALPTASAVVADIIDIARLVEADTAHRVPHLAFQPAQVQAQTILPMDEITSSYYLRVQAKDEPGTLGQIAALLAQENVSIEALIQKGVIDQTTAEIVILTHSTVEKHIKSAIAAIEALDCVEKPITMIRMESLHD

SEQ ID NO: 9236 - protein, 318 aa, Neisseria meningitidis; identical to SEQ ID NO: 3073

SEQ ID NO: 9237 - protein, 102 aa, Neisseria meningitidis; identical to SEQ ID NO: 1826

SEQ ID NO: 9238 - protein, 92 aa, Neisseria meningitidis
MNMENYFSNLNLDIRTHKLGTFTDQKVTPDVLCAVAECIIEYIENIGEIFSINDIRYSDYAEYIATAVFKKPSIENAGSEYNKFFSQRRIRI

SEQ ID NO: 9239 - protein, 281 aa, Neisseria meningitidis
MNIADGRQAFPAPAKLNLDLRITGKREDGYHNIESIFCLIDLQDTVYLKPRDDGKIILHNPVGGIPQEADLSYRAASLLQKYARNPAGVEIWLDKKIPTGAGLGGGSSDAATVLLVLNRWWQCGLTQRQLIDSGAALGADVPFFIFGKNAFARGIGDRLDEMDIPKQWYVIVKPPVHVSTAKIFTHEGLTRNSASSIMPTFQNLQPFRNDMQAVVFKEYPEVWKAYSELSRYGFALMTGSGACVFTACQDRNSAYNIYRQVSDLYEAYLAEGLSKHPWLSV

SEQ ID NO: 9240 - protein, 242 aa, Neisseria meningitidis
LNIKYSGIENRFETAILKKNGVRSGFVSFAPNLAAVKLNDYAKVRKRITKTKQKADIVIVMFHGGGKGNRRNTCRSIPKSSMGKTGATSSSLHGLPSIPARMSYSGRGRTLHAPSNFTATASSLTAAATLPPTAQSTPPASAALRRFSKLSPTNRVNLFPELSSLLPKPTIKSPKSTLKNRYRADYLSEPQRLPQRERAGCLARRQHHAPVKRYWKYRPNKCRLKAFFRVSDGIFAIVNNPL

SEQ ID NO: 9241 - protein, 244 aa, Neisseria meningitidis
VNEKTDQKAVSAQQAKEQTSFNNPEPMTGFEHTVTFDFQGTKMVIPYGYLARYTQDNATKWLSDMPGQDAYSINLIEISVYYKKTDQGWVLEPYNQQNKAHFIQFLRDGLDSVDDIVIRKDACSLSTTMGERLLTYGVKKMPSAYPEYEAYEDKRHIPENPYFHEFYYIKKGENPAIITHWNNRVNQAEEDNYSTSVGSCINGFTVQYYPFIREKQQLTQQELVGYHQQVEQLVQSFVNNSSKK

SEQ ID NO: 9242 - protein, 397 aa, Neisseria meningitidis; identical to SEQ ID NO: 103

SEQ ID NO: 9243 - protein, 241 aa, Neisseria meningitidis; identical to SEQ ID NO: 7122

SEQ ID NO: 9244 - protein, 96 aa, Neisseria meningitidis; identical to SEQ ID NO: 5810

SEQ ID NO: 9245 - protein, 172 aa, Neisseria meningitidis; identical to SEQ ID NO: 601

SEQ ID NO: 9246 - protein, 462 aa, Neisseria meningitidis
MNAVVVAVIVMLVLSLSRVHVVLSLTVGAFVGGAVAGMPLQNIADAAGQVSQAGIIPVFNKGLEGGAKIALSYAMLGAFAMAITHSGLPQQLAGAVVRKLNRGGMPDSVRSGEGAVKWLLLSIILVMGMMSQNIIPIHIAFIPMIVPPLLLVFNRLKIDRRLIACVITFGLVTTYMFLPYGFGAIFLNEILLGNIHSAAPQLDVKNINVMAAMAIPALGMLAGLLLAFVHYRKPRLYQSNNADTAGNADAANRPQPSAYRSLAAAAAIAVCFAIQLMYEDSLVLGAMLGFAVFMMLGVINRDKANDVFGEGIKMMAMVGFIMIAAQGFAAVMNATGHIQPLVESSMAIFGNSKGMAALAMLVVGLLVTMGIGSSFSTLPIIAAIYVPLCVGLGFSPLATVAIVGTAGALGDAGSPASDSTLGPTMGLNADGQHDHIRDSVIPTFIHYNIPLLIAGWIAAMVL

SEQ ID NO: 9247 - protein, 269 aa, Neisseria meningitidis
MTALPRYSVFGNPVAHSKSPQIHQQFALQEGVDIEYERICADIGGFAQAVSTFFETGGCGANVTVPFKQEAFHLADEHSERALAAGAVNTLIPLKNGKLRGDNTDGIGLTNDITQVKNIAIEGKTILLLGAGGAVRGVIPVLKEHRPARIVIANRTRAKAEELAQLFGIEAVPMADVNGGFDIIINGTSGGLNGQIPDIPPDIFQNCALAYDMVYGCAAKPFLDFARQSGAKKTADGLGMLVGQAAASYALWRGFTPDIRPVIEYMKAM

SEQ ID NO: 9248 - protein, 874 aa, Neisseria meningitidis; identical to SEQ ID NO: 3254

SEQ ID NO: 9249 - protein, 107 aa, Neisseria meningitidis
VNILASDRNYELNIEIFIDNIIHFQITDESYKVKFSEYLFENKEKNDWDRNPAINYFFEIIDDSYMDWLKEESFGFFEKKYYKAYIFFFSDSVIEVISSTEPVFYSK

SEQ ID NO: 9250 - protein, 191 aa, Neisseria meningitidis
LRRWRGRKSVKKPGNMPVLDVISAGAKAALATTRNNKIGIIATNTTVNSNAYARAIHRNNPDTLVRTQAAPLLVPLVEEGWLEHEVTRLTVCEYLKPLLADGIDTLVLGCTHFPLLKPLIGREAHNVALVDSAITTAEETARVLAQEGLLNTDNNNPDYRFYVSDIPLKFRTIGERFLGRTMEQIEMVSLG

SEQ ID NO: 9251 - protein, 318 aa, Neisseria meningitidis
MKVLFIADPMASFKTYKDTTYAMMREMAKRGWRLFHTLSGELSVKNGLVVADASAFEFLGAQDDHDKNWFAAADKVQTALKAFDAVIMRTDPPFDMQYLYATQLLTLAEQQGAKVFNSGQAMRDFNEKLAILNFSRFTAPTLVTTRSADVRAFLKEHGDIIIKPLDGMGGMGIFRLTEKDPNIGSILETLMRLDSRTIMAQRYIPEIVHGDKRILIIGGEVVPYALARIPQNGETRGNLAAGGRGVAQELDGRDREIAETLAPELKRRGILLAGLDVIGSNLTEVNVTSPTGFQEIMKQKGFDVAAMFADAVAAWSVR

SEQ ID NO: 9252 - protein, 274 aa, Neisseria meningitidis
  misc_feature 268, 269: 'Xaa' is any amino acid
MAKEKFERSKPHVNVGTIGHVDHGKTTLTAALTTILAKKFGGAAKAYDQIDNAPEEKARGITINTSHVEYETETRHYAHVDCPGHADYVKNMITGAAQMDGAILVCSAADGPMPQTREHILLARQVGVPYIIVFMNKCDMVDDAELLELVEMEIRDLLSSYDFPGDDCPIVQGSALKALEGDAAYEEKIFELAAALDSYIPTPERAVDKPFLLPIEDVFSISGRGTVVTGRVERGIIHVGDEIEIVGLKETQKTTCTGVEMFRKLLDXXTHLIN

SEQ ID NO: 9253 - protein, 92 aa, Neisseria meningitidis; identical to SEQ ID NO: 419

SEQ ID NO: 9254 - protein, 347 aa, Neisseria meningitidis; identical to SEQ ID NO: 2159

SEQ ID NO: 9255 - protein, 218 aa, Neisseria meningitidis; identical to SEQ ID NO: 5422

SEQ ID NO: 9256 - protein, 227 aa, Neisseria meningitidis; identical to SEQ ID NO: 2422

SEQ ID NO: 9257 - protein, 77 aa, Neisseria meningitidis; identical to SEQ ID NO: 707

SEQ ID NO: 9258 - protein, 1389 aa, Neisseria meningitidis
MTDTAPTDTDPTENGTRKMPSEHRPTPPAKKRRPLLKLSAALLSVLILAVCFLGWLAGTEAGLRFGLYQIPSWFGVNISSQNLKGTLLDGFDGDNWSIETEGADLKISRFRFAWKPSELMRRSLHITEISAGDIAIVTKPTPPKEERPPLSLPDSIDLPAAVYLDRFETGKISMGKAFDKQTVYLERLDASYRYDRKGHRLDLKAADTPWSSSSGSASVGLKKPFALDTAIYTKGGLEGKTIHSTARLSGSLKDVRAELAIDGGNIRLSGKSVIHPFAESLDKTLEEVLVKGFNINPAAFVPSLPDAGLNFDLTAIPSFSDGIALEGSLDLENTKAGFADRNGIPVRQVLGGFVIRQDGTVHIGNTSAALLGRGGIRLSGKIDTEKDILDLNIGINSVGAEDVLQTAFKGRLDGSIGIGGTTASPKISWQLGIGTARTDGSLAIASDPANGQRKLVLDTVNIAAGQGSLTAQGYLELFKDRLLKLDIRSRAFDPSRINPQLPAGNINGSINLAGELAKEKFTGKMRFLPGTFNGVPIAGSADIVYESRHLPRAAVDLRLGRNIIKTDGGFGKKGDRLNLNITAPDLSRFGFGLAGSLNVRGHLSGDLDGGIRTFETDLSGAARNLHIGKAADIRSLDFTLKGSPDTSRPIRADIKGSRLSLSGGAAVVDTADLMLDGTGVQHRIRTHAAMTLDGKPFKFDLDASGGINRELTLWKGSIGILDIGGAFNLKLQNRMTLEAGAERVAASAANWQAMGGSLNLQHFSWDRKTGISAKGGARGLHIAELHNFFKPPFEHNLVLNGDWDVAYGRNARGYLNINRQSGDAVLPGGQALGLNAFSLKTRFQNDRIGILLDGGARFGRINADLDIGNAFGGNMANAPLGGRITASLPDLGTLKPFLPAAAQNITGSLNAAAQIGGRVGSPSVNAAVNGSSNYGKINGNITVGQSRSFDTAPLGGRLNLTVADAEVFRNFLPVGQTVKGSLNAAVTLGGSIADPHLGGSINGDKLYYRNQTQGIILDNGSLRSHIAGRKWVIDSLKFRHEGTAELSGTVGMENSGPDVDIGAVFDKYRILSRPNRRLTVSGNTRLRYSPQKGISVTGMIKTDQGLFGSQKSSMPSVGDDVVVLGEVKKEAAAPLPVNMNLTLDLNDGIRFAGYGADVTIGGKLTLTAQSGGSVRGVGTVRVIKGRYKAYGQDLDITKGTVSFVGPLNDPNLNIRAERRLSPVGAGVEILGSLNSPRITLTANEPMSEKDKLSWLILNRAGSGSSGDNAALSAAAGALLAGQINDRIGLVDDLGFTSKRSRNAQTGELNPAEQVLTVGKQLTGKLYIGYEYSISSAEQSVKLIYRLTRAIQAVARIGSRSSGGELTYTIRFDRFSGSDKKDSAGNGKGK

SEQ ID NO: 9259 - protein, 436 aa, Neisseria meningitidis
MTDLFAREPDAPLAERLRPHTLDDVVGQEHLIGEGKPLRVAVEGGKPHSMLLWGPPGVGKTTLARILAQSFNAQFLPVSAVFSGVKDIREAIDKAEIALQQGRATILFVDEVHRFNKAQQDAFLPHVESGLLTFIGATTENPSFEVNPALLSRAQVYVLQPLSSDDLKKLIAKVLALPEYQEFTIETDAQKLLVNTADGDARRLLNLLEQLLRAADTRRLKNLTAEFLADSLGAQIRRFDKGGESFYNQISALHKSVRGSHPNAALYWFCRMLDGGTDPRYLARRIVRIAWEDIGLADPRAFQIANDAAATFERLGSPEGELALAQAVLYLAAAAKSNAGYKAYKQMRRFVAENSSDEVPVHLRNAPTKLMKELGYGREYRYAHDEPNAYAAGESYMPDGLDEPDFYQPVPRGLEIKIGEKLEWLKSLDEEVLKAK

SEQ ID NO: 9260 - protein, 129 aa, Neisseria meningitidis
MKNVQKGFTLLELMIAVAILGILTLITYPSYKTYIRRIRLSEVKSTLLMNAQTMERYYRQKGTFENYDKNKLKQNKYFNVTLSKVSPDHFTLQADPNPTTNDGETCVVTLNDGGTIAASGTNQSCPGFD

SEQ ID NO: 9261 - protein, 188 aa, Neisseria meningitidis; identical to SEQ ID NO: 2794

SEQ ID NO: 9262 - protein, 298 aa, Neisseria meningitidis
LQVSEIHQIYWEESGNPDGVPVIFLHGGPGAGASPECRGFFNPDVFRIVIIDQRGCGRSRPYACAEDNTTWDLVADIEKVREMLGIGKWLVFGGSWGSTLSLAYAQTHPERVKGLVLRGIFLCRPSETAWLNEAGGVSRIYPEQWQKFVAPIAENRRNRLIEAYHGLLFHQDEEVCLSAAKAWADWESYLIRFEPEEVDEDAYASLAIARLENHYFVNGGWLQGDRAILNNIGKIRHIPTIIVQGRYDLCTPMQSAWALSKAFPEAELRVVQAGHRAFDPPLVDALVQAVEDILPHLL

SEQ ID NO: 9263 - protein, 321 aa, Neisseria meningitidis; identical to SEQ ID NO: 4435

SEQ ID NO: 9264 - protein, 359 aa, Neisseria meningitidis; identical to SEQ ID NO: 2157

SEQ ID NO: 9265 - protein, 417 aa, Neisseria meningitidis
MSEQHISTWKSKINALGPGIMMASAAVGGSHLIASTQAGALYGWQIALIIILTNLFKYPFFRFSAHYTLDTGKSLIEGYAEKSRVYLWVFLILCILSATINAGAVAIVTAAIVKMAIPSLMFDAGTVAALIMASCLIILVSGRYRALDRVSKIIIVTLSIATLAAAGIAMSRGMQMQPDFIEPTPWTLAGLGFLIALMGWMPAPIEISAINSLWVTEKQRINPSEYRDGIFDFNVGYIASAVLALVFLALGAFVQYGNGEAVQMAGGKYIGQLINMYAVTIGGWSRPLVAFIAFACMYGTTITVVDGYARAIAEPVRLLRGKDKTGNAEFFAWNIWVAGSGLAVIFWFDGVMANLLKFAMIAAFVSAPVFAWLNYRLVKGDEKHKLTSGMNALALAGLIYLTGFTVLFLLNLAGMFK

SEQ ID NO: 9266 - protein, 446 aa, Neisseria meningitidis
MLNPSRKLVELIRILDEGGFIFSGDPVQATEALRRVDGSTEEKIIRRAEMIDRNRMLRDTLERVRAGSFWLWVAAATFAFFTGFSGTYLLMDNQGLNFFLVLAGVLGMNTLMLAVWLAMLFLRVKVGRFFSSPATWFRGKDPVNQAVLRLYADEWRQPSVRWKIGATSHSLWLCTLLGMLVSVLLLLLVRQYTFNWESTLLGDSSSVRLVEMLAWLPAKLGFPVPDARAIIEGRLNGNIADARAWSGLLVGSIACYGILPRLLAWAVCKILLKTSENGLDLEKPYYQAVIRRWQNKITDADTRRETVSAVSPKIVLNDAPKWAVMLETEWQDGEWFEGRLAQEWLDKGVAANREQVAALETELKQKPAQLLIGVRAQTVPDRGVLRQIVRLSEAAQGGAVVQLLAEQGLSDDLSEKLEHWRNALAECGAAWLEPDRAAQEGRLKDQ

SEQ ID NO: 9267 - protein, 296 aa, Neisseria meningitidis
LALLAAMTWGTLPIAVRQVLKFVDAPTLVWVRFTVAAAVLFVLLALGGRLPKWRDFSWCSFRLLLLGVAGISANFVLIAQGLHYISPTTTQVLWQISPFTMIVVGVLVFKDRMTAAQKIGLVLLLAGLLMFFNDKFGELSGLGAYAKGVLLCAAGSMAWVCYAVAQKLLSAQFGPQQILLLIYAASAAVFLPFAKPAHIGSLDGTLAWVCFAYCCLNTLIGYGSFGEALKHWEASKVSAVTTLLPVFTVIFSLLGHYVMPDTFAAPDMNGLGYVGALVVVGGAVTAAVGDRLFKRR

SEQ ID NO: 9268 - protein, 505 aa, Neisseria meningitidis
MSPKKIPIWLTGLILLIALPLTLPFLYVAMRSWQVGINLAVELLFRPRMWDLLSNTLTMMAGVTLISIVLGIACALLFQRYRFFGKTFFQTAITLPLCIPAFVSCFTWISLTFRVEGFWGTVMIMSLSSFPLAYLPVEAALKRISLSYEEVSLSLGKSRLQTFFSAILPQLKPAIGSSVLLIALHMLVEFGAVSILNYPTFTTAIFQEYEMSYNNNTAALLSAVLMAVCGIVVFGESIFRGKAKIYHSGKGVARPYPVKTLKLPGQIGAIVFLSSLLTLGIIIPFGVLIHWMMVGTSGTFALVSVFDAFIRSLSVSALGAILTILCALPLVWASVRYRNFLTVWIDRLPFLLHAVPGLVIALSLVYFSINYTPAVYQTFIVVILAYFMLYLPMAQTTLRTSLEQLPKGMEQVGATLGRGHFFIFRTLVLPSILPGITAAFALVFLKLMKELTATLLLTTDDVHTLSTAVWEYTSDAQYAAATPYALMLVLFSGIPVFLLKKYAFK

SEQ ID NO: 9269 - protein, 668 aa, Neisseria meningitidis
MADMKKITPQNLRPLLSESLGHTDFVNVLNALIKFLRRGGKKCAGERFDLIIDTFKQDRELLSRFSRCFYIWLAQIHIYPALIKLGIFSRHSFAREMGIRIYERFSPSYKDFANLGEVFLYLFHSENDDKWLQTLNIRQWLVLYELIRSHAEPSKLQTAGIRLADARLRAIEMLSVWTASEAIEPDLIRIAPRLLEADSSFVALQRETAKLVEHYRNGTAPYDTAHLEVMFDQCFSQIDYLRRKGTGAGSGSSVKVAHLLERLRQTVDRLKLLTDIQTGAGNSNRLTIALMNSLIYAAVEQYSTRHLRRSSIRMLARSITENKSHHGEHYITRNRKEYFKMFYSAAGGGVIIALMALLKIRIGTLGLSPFLTSLSAGFNYGIGFMIIHMLHCTVATKQPAMTAASFAEQVDLNEGGKAVDNKLAKLLIDVCRSQSVAVFGNVSIAILLACAISFGYAHLYRQPILDAHTAAYQFKSIDIIAYPTLWYAAIAGLWLFCSGIIAGFFDNRADYLNLRQRLPFNPLLRKIMRPGPRRVLAAYIHKHYGSLVGNFIFGMLLGMTGYFGHLLGLPLDIRHVAFSSANLGYAAVSGNVGLGTFVLGIFSVLAIGLVNLCVSFSLALFVALRSRRTKIGSIRNLIKSFWNQIKSNPCILFLPPAKEQGHPPSDKP

SEQ ID NO: 9270 - protein, 168 aa, Neisseria meningitidis; identical to SEQ ID NO: 5003

SEQ ID NO: 9271 - protein, 159 aa, Neisseria meningitidis; identical to SEQ ID NO: 929

SEQ ID NO: 9272 - protein, 210 aa, Neisseria meningitidis
MTVWVGLTGGIGSGKSAAAQCFADLGVPRIDADAAAHSLTASDGIALPEIRRLFGDTVFDTQGLLRRDILRKEVFASPSRKALLESVMLPLIFSEIKKQQETFTDAAYGIVEIPLLTEKRQFIILIRRVLTISAPVEKRIGRVMARSGLTRGEVAAVISHQASESERLLLADDVLLNDGSLKSLREKTMRLHAFYSGIFASKPTQGKHNG

SEQ ID NO: 9273 - protein, 59 aa, Neisseria meningitidis; identical to SEQ ID NO: 5877

SEQ ID NO: 9274 - protein, 410 aa, Neisseria meningitidis
MAKNGGLSLFSKKEKRFIFEGRHSASDKLVNGEVSAFTEEEARKKLAKRGIRPLQITRVKTSSKRKITQEDITVFTRQLSTMIKAGLPLMQAFEIVARGHGNPSMTEMLMEIRGEVEQGSSLSRAFSNHPKYFDRFYCNLVAAGETGGVLESLLDKLAIYKEKTQAIRKKVKTALTYPVSVIAVAIGLVFVMMIFVLPAFKEVYANMGAELPALTQTVMDMSDFFVSYGWMVLIALGFAIYGFLKLKARSIKIQRRMDAILLRMPIFGDIVRKGTIARWGRTTATLIAAGVPLVDVLDSTAGAAGNLIYEEATREIRTRVIQGLSMTSGMRATELFPNMMLQMSSIGEESGSLDDMLNKAAEFYEDEVDNAVGRLSAMMEPIIIVILGLVIGTLLVAMYLPLFNLGNVVA

SEQ ID NO: 9275 - protein, 258 aa, Neisseria meningitidis
MRAVPPPHISITGLGYLGLPLAQKFYQHGSRVAAIKRSLTSDDINLPIHLDTFDLGSTDAFQTALWRHHADKPVWFFLLPPSSLTHYADTVKQWAELARACNVQHLIFTSSTSVYGDTARECDETATPDPQTESARQILAAEQHLLDSGISNIDILRLGGLYCAERHPVSRLVQKQNIPGGNRPINIVHRNIAVESLFQTAFNPGGRRLKNIIEPRHPTRREFYTEEAAKLGLPAPDFAPDDSMGKIIRTVCDNSLSL

SEQ ID NO: 9276 - protein, 349 aa, Neisseria meningitidis; identical to SEQ ID NO: 261

SEQ ID NO: 9277 - protein, 246 aa, Neisseria meningitidis
MLIVRPSGRAKDDVETCRRAEWQAEVLSPIEIETDKASLKRLPEMYARADAVFWVSPTAVETAVPYLNLSDGIKMHISVGQGSRRALERCLGRTVIAPDDGNDSEAVLRLPVWNSLPEGARVLFVRGHGGRDFLMNALQEKGFRTEVAEVYFRRHKPLNFQNFQTENIAAAYITSAELVQSLFAQVPPQFSRFFKSLLYFTHHPRIAEALKREGVCSVETVPTLEAALSHSSISVSDGMVFPGTSN

SEQ ID NO: 9278 - protein, 833 aa, Neisseria meningitidis
VLKTPPTLAAELSGKTGVSISAPYANENSRIILSAADIAAENGKIKLQSYGDQSYYAGQGELYTLERRSYKTGKWYNRKHITEVKEHKNAKPDAVNLSASQGIDIKSGGSIDAYATVFDAPKGSINIEAGRKLTLYAVEELNYDKLDSHKKRKFLGITYDKVHDTSTQQMQTALPSRVVAESANLQSGWDTKLQGTQFETTLGGAVIRAGVGDQARADAKIILEGIKSSIHTETVSSSKSALWQKQAGRGSNIETLQLPSFTGPVAPVLSAPGGYIVDIPKGNLKTQIETLTKQPEYAYLKQLQVAKNINWNQVQLAYDKWDYKQEGMTPAAAAVVVIVVTVLTYGALSAPAAAGTAGAAGAGAGGAAAGTAAGTGVAAGTAATTGVAAGTSAAAITTAAGKAALASLASQAAVSLINNKGDINHTLKELGKSSTVRQAATAAVTAGVLQGISGLNTQAAEAVSKHFHSPAAGKLTANLINSTAAASVHTAINGGSLKDNLGDAALGAIVSTVHGEVASKIKFNLSEDYIAHKIAHAIAGCAAAVANKGKCRDGAIGAAVGEMVGETLLDGRDVGKLSPQERQKVIAYSQIIAGSAVALVKGDVNTAANAATVAVENNSLLARRRVNIRWTPRQELEHEYAILEIQAITNQIRRLDPKFNGIAIMRNPREPWTRHDVQTYRQYYNQLRESRGIPVLPIYRMRINNGNEFNRIMSSKYPYNELYVANPKSVTGHFRVDSYNPATREIISRKFTQFSQIQESTGIGYIKEAVRKYSPGAVISNVPSTPASLRGRKLTGKLILEVPAQVNPIPQSVLRAAQEENVIIRDTTGRIYK

SEQ ID NO: 9279 - protein, 587 aa, Neisseria meningitidis
MGFPVRKFDAVIVGGGGAGLRAALQLSKSGLNCAVLSKVFPTRSHTVAAQGGISASLGNVQEDRWDWHMYDTVKGSDWLGDQDAIEFMCRAAPEAVIELEHMGMPFDRVESGKIYQRPFGGHTAEHGKRAVERACAVADRTGHAMLHTLYQQNVRANTQFFVEWTAQDLIRDENGDVVGVTAMEMETGEVYIFHAKAVMFATGGGGRIYASSTNAYMNTGDGLGICARAGIPLEDMEFWQFHPTGVAGAGVLITEGVRGEGGILLNADGERFMERYAPTVKDLASRDVVSRAMAMEIYEGRGCGKNKDHVLLKIDHIGAEKIMEKLPGIREISIQFAGIDPIKDPIPVVPTTHYMMGGIPTNYHGEVVVPQGDEYEVPVKGLYAAGECACASVHGANRLGTNSLLDLVVFGKAAGDSMIKFIKEQSDWKPLPANAGELTRQRIERLDSQTDGENVDALRRELQRSVQLHAGVFRTDEILSKGVREVMAIAERVKRTEIKDKSKVWNTARIEALELDNLIEVAKATLVSAEARKESRGAHASDDHPERDDENWMKHTLYHSDTNTLSYKPVHTKPLSVEYIKPAKRVY

SEQ ID NO: 9280 - protein, 123 aa, Neisseria meningitidis
MAITKEDILEAVGSLTVMELNDLVKAFEEKFGVSAAAVAVAGPAGAGAVDAEEKTEFDVVLASAGDQKVGVIKVVRAITGLGLKEAKDIVDGAPKTIKEGVSKAEAEDIQKQLEEAGAKVEIK

SEQ ID NO: 9281 - protein, 405 aa, Neisseria meningitidis; identical to SEQ ID NO: 163

SEQ ID NO: 9282 - protein, 504 aa, Neisseria meningitidis
MTTSKCPVTHLTMNNGAPVADNQNSLTAGPRGPLLAQDLWLNEKLADFVREVIPERRMHAKGSGAFGTFTVTHDITKYTRAKIFSEVGKKTEMFARFTTVAGERGAADAERDIRGFALKFYTEEGNWDVVGNNTPVFFLRDPRKFPDLNKAVKRDPRTNMRSATNNWDFWTLLPEALHQVTIVMSDRGIPAGYRHMHGFGSHTYSFWNEAGERFWVKFHFRTQQGIKNLTNEEAAKIIADDRESHQRDLYEAIERGEFPKWTMYIQVMPEADAEKVPYHPFDLTKVWPKKDYPLIEVGEFELNRNPENFFADVEQSAFAPSNLVPGIGASPDKMLQARLFNYADAQRYRLGVNFRQIPVNRPRCPVHSNQRDGQGRADGNYGSLPHYEPNSFGQWQQQPDFAEPPLKINGDAAHWDYRQDDDDYFSQPRALFNLMNDAQKQALFGNTAAAMGDAPDFIKYRHIRNCYRCDPAYGEGVAKALGLTVEDAQAARATDPALGQPGLL

SEQ ID NO: 9283 - protein, 223 aa, Neisseria meningitidis; identical to SEQ ID NO: 2385

SEQ ID NO: 9284 - protein, 160 aa, Neisseria meningitidis; identical to SEQ ID NO: 4185

SEQ ID NO: 9285 - protein, 185 aa, Neisseria meningitidis
MNIIDTAIPDVKLLEPQVFGDARGFFMETFRDEWFKTQVCERTFVQENHSKSGKGVLRGLHYQTENTQGKLVRVVVGEVFDVAVDMRKDSPTFGKWVGEILSAENKRQLWVPEGFAHGFYVLSDEAEFVYKCTDYYNPEAEHSLIWNDPTVGIDWPLQGEPNLSPKDLAGKTWAQAEKLRLTLSR

SEQ ID NO: 9286 - protein, 70 aa, Neisseria meningitidis; identical to SEQ ID NO: 232

SEQ ID NO: 9287 - protein, 120 aa, Neisseria meningitidis
MDIRYFGTTPRYSEAVGANGLIFLSGMVPENGETAAEQTADVLAQIDRWLAECGSDKAHVLDAVIYLRDMGDYAEMNGVWDAWVAAGRTPARACVEARLARPEWRVEIKITAVKKDAATE

SEQ ID NO: 9288 - protein, 203 aa, Neisseria meningitidis
MLPSKYEDNTLQIKEKSTERTAPFFVLEVTARSAADILGIHPNSAALFYRKIRTVINHHLALAADEVFEGPVEPDESDFGGRRKGRRGRGAAGKVVVFGILKRNGRVYTVVVDNAKSETLLPVIKKKIMPDSIVYTDSLSSCDKLDVSGFIHYRINHSKEFADRQNHINGIENFWNQAKRVLRKYSGLARTFPRIGSATGCAD

SEQ ID NO: 9289 - protein, 161 aa, Neisseria meningitidis
  misc_feature 155, 156: 'Xaa' is any amino acid
MVIAAIMAMIALPNMSQWIASRRIASHAERIANLLRFSRGEAVRLNLPVYICPVQVKKDGAPNNRCDFSKKGRGMLAFGDKNGNKAYDGDAADVFLRSVVLNDTDDSRINYAFNHIAFGSSQPTADRVVWTFNQNGTFGYTKDQHLTSKSSFFYXXTHLIN

SEQ ID NO: 9290 - protein, 90 aa, Neisseria meningitidis
MPIDNIPFYIFDLIDLKEGVGDIYNILDFVPNSDLSKDQDDALTGIAFLRGIDVYDPPVSKEKALKALKKHPEIYQRFQHFFPFVELPPL

SEQ ID NO: 9291 - protein, 152 aa, Neisseria meningitidis
MKTQISLAAAAITLLLSACGGSGIPSQPKGEISENRTAAFKSMMPDFSRMGKMVKGEEPYDVEKFKQAAAAFADSSKKPFTLFESDPQGNGRALPAVWSDGAKFEAEKTKFAAAVEKLNAAAQTGKLDEIKAAYGETGASCKSCHDSFRAPE

SEQ ID NO: 9292 - protein, 212 aa, Neisseria meningitidis
MSKLTPREILTAGAVVPVMAIDDLSTAIDLSHALVEGGIPTLEITLRTPVGLDAIRLIAKEVPNAIVGAGTVTNPEQLKAVEDAGAVFAISPGLHESLAKAGRNSGIPLIPGVATPGEIQLALEHGIDTLKLFPAEVVGGKAMLKALYGPYADVRFCPTGGISLATAPDYLALPNVLCVGGSWLTPKEAVKNKDWDTITRLAKEAAALKPKA

SEQ ID NO: 9293 - protein, 105 aa, Neisseria meningitidis
MKKALKWIAVFIAFSVWSFGIFLYGFNNGTEAGMQCAQIKGNGLCAMSFDGSASKIEFSDLNEKNDKQTLCFQSLWEFNDECEKKESNSIYYIDLPENNPKDIKQ

SEQ ID NO: 9294 - protein, 119 aa, Neisseria meningitidis
MLSNIIPLSIGAALGATARWLLNLAVPAAMSPATGNLFANWTGALLIGIFAETINHPQWKLLLITGFLGSLTTLSGFSLETVTLLQSNRPASALANIFLHTAGSLLLTWLGLKIGAAVK

SEQ ID NO: 9295 - protein, 91 aa, Neisseria meningitidis
MNASNWSVYLILCENSAFYCGISPNPQQRLAAHTTGKGAKYTRVFKPVAMRIVAGGMDKGTALRQEIAVKKLTAAQKRQLWEQAEKMPSET

SEQ ID NO: 9296 - protein, 122 aa, Neisseria meningitidis; identical to SEQ ID NO: 2373

SEQ ID NO: 9297 - protein, 168 aa, Neisseria meningitidis
MFEQEDEWVSKTQMKKQMNGLQDLGMELTKLSSDTLKKIGLDEDLYEAVVTYKKITSNGALKRQAQFIGRLMRDTDPAPIEAFLAKLRGDDAAHNAFLQRVERTRMELLADDGALTQFMSDFPHADAGKLRTLIRNTKKEQEQNKPPKNFRALFQELKTVMENGDAEI

SEQ ID NO: 9298 - protein, 269 aa, Neisseria meningitidis; identical to SEQ ID NO: 3572

SEQ ID NO: 9299 - protein, 125 aa, Neisseria meningitidis; identical to SEQ ID NO: 2523

SEQ ID NO: 9300 - protein, 264 aa, Neisseria meningitidis
MNTILAFDIETVPDVQGIRTLYELPSSLPDDEVVLFAQQKRRAQTGGDFMQHHLHQIVAISCCMRWGQDKVHVGTIGEMDDGEEVVIAKFFELIEKHTPQLVSWNGGGFDLPVLHYRSLIYGINAARYWDMGDGDFGDSRDFKWNNYISRYHQRHCDLMDLLALYQPRANVPLDDMAKLCGFPGKLGMDGSKVWDAFHAGRLKEIRNYCETDAVNTYLMYLRFCLVSGRFDADEYEMEIKRIRNYLSTQTEDKPHWSEFAQAWK

SEQ ID NO: 9301 - protein, 146 aa, Neisseria meningitidis
VNIRRAVYADCEELAALDAVCNPSAWTQRQFESALVSPSEQVFLAEKDGRLAAFIVWQNLPDESELHLIATAPAYRRRGVASALLEYWFANLPEGTQRLLLEVRAGNTAAQVLYAAHGFTDAGRRKNYYRTADGKTEDAVLMEKIC

SEQ ID NO: 9302 - protein, 109 aa, Neisseria meningitidis; identical to SEQ ID NO: 899

SEQ ID NO: 9303 - protein, 433 aa, Neisseria meningitidis; identical to SEQ ID NO: 2952

SEQ ID NO: 9304 - protein, 461 aa, Neisseria meningitidis; identical to SEQ ID NO: 4603

SEQ ID NO: 9305 - protein, 290 aa, Neisseria meningitidis; identical to SEQ ID NO: 1941

SEQ ID NO: 9306 - protein, 275 aa, Neisseria meningitidis
MKLDIYALLERALLSGDPDEKGRLTDEAFAAVQNADGAEANAPPADFPRAGRPDKPVLVAPSQLTPRKMNTTEGYAAMLHAIAHIEFNAVNLALDAAYRFRTLPFQFVRDWVKVAKEEVYHFRLMRDRLRAFGFDYGSFEAHNHLWDMAYKTAYDPLLRMALVPRVLEARGLDVTPGIRAKVAQRGDSETCGVLDIIYRDEVGHVAIGNHWYQHLCRERGLEPITLFRSLIARYDMFIFRGYVNIEAREKAGFSRFELDMLEDFEQGLKQNKNTV

SEQ ID NO: 9307 - protein, 236 aa, Neisseria meningitidis
MNAAIEHVQAVAFDLDGTLCDSVPDLAAAAEAMLEQLGMKPLPAKVVESYVGDGIGKLVHRVLTNDRDREADSELWEKGFVSYMKYYRDHLSVFTRPYPKTEAGLALLKSLGIPLAVVTNKNEILAVELLKQLGLADYFSLILGGDSLPEKKPSPLPLRHAAEVLGIDVANMVMVGDSRNDIIAAKAAGCLSVGVTFGYGDMTLLSQDDATRPDWIIGSLPEIYENLQPQKNKDEE

SEQ ID NO: 9308 - protein, 169 aa, Neisseria meningitidis; identical to SEQ ID NO: 219

SEQ ID NO: 9309 - protein, 315 aa, Neisseria meningitidis
MNILSKISSFIGKTFSLWAALFAAAAFFAPDTFKWAGPYIPWLLGIIMFGMGLTLKPSDFDILFKHPKAVIIGVIAQFAIMPATAWLLSKLLNLPAEIAVGVILVGCCPGGTASNVMTYLARGNVALSVAVTSVSTLISPLLTPAIFLMLAGEMLEIQAAGMLMSIVKMVLLPIVLGLIVHKVLGSKTEKLTDALPLVSVAAIVLIIGAVVGASKGKIMESGLLIFAVVALHNGIGYLLGFFAAKWTGLPYDAQKTLAIEVGMQNSGLAAALAAAHFAAAPVVAVPGALFSVWHNISGSLLATYWAAKAGKHKKP

SEQ ID NO: 9310 - protein, 154 aa, Neisseria meningitidis; identical to SEQ ID NO: 1733

SEQ ID NO: 9311 - protein, 1161 aa, Neisseria meningitidis
MRLTHIKLSGFKSFTDPTTIHVPGQLVAVIGPNGCGKSNVIDAVRWVLGEASAKQLRGESMQDVIFNGAATRRPAPRASVELVFDNSDHSLQGAWGQYAEVSIKRQLTRQGESTYFINNQTVRRRDITDLFLGTGVGARGYAVIEQGMISRIIEARPEELRAYIEEAAGVSKYKERRKETEGRLKDTREHLQRLGDLQNELARQVEKLEKQAETAERYKSLTAQLNRQQDLLDYAQWQQSLAAADKATEQHQSLQAQQDETAAQVQALNDEVHALQTAEQSQQQAVHELSNKRGVLREQIARLEEQIRHQQNLHQRIERDKQAAQAQLQRIHQEQQQIRVQLEENELYVEEKQTELAEWAMQVAEHEERLPELEETQTALNAAFQTQQDEANRIRRELALKQQQLAHAEQTVAKHEERKGRLKQENQALNLPDEAETAAAQEAAALLQSRQEHYEEQIIAAEEALHAAREAFQTASNRFQSLKQQHITLQAQQQALSQILSQQQEAADFWQATDHAAAPQLWQHITAPAEWQHALSVILAERLHARAVPQGFVPPEPLPQGQAAWLSDGLSGGIKKSLPVQALLNQIQAQPPFQTALHYWLDGVLCAPDLSYALAHQNDLGAHQIWLTPEGHQVDKVSVLLYAKPAQESLIAQKARLDGIASELENLAPELSAAEAAFKQAEAAVRSSEVQHKNLMQQQQQHTRQYSQAQQRAAELLARTNQGQIRREHIERELAQLAEEQTVLQHTSDGLSDDIVTLQEAAAELEHQQQTTAHSRQEQQGRLKQAQLALLEANRQYGLAEVAVHKLNQQKQNYRQQIAQLEQQTLDWQERQQELVLAYETEFQNDEQHIKLDELTESVHTLDEEYIAVQEKLTQIQEQGREQYARVQTLQTQLPQLQAATQTALLQQQEALINAKRYHQNLTERAADLDALEALAKESPKVLNSSIGSLSQQIEALGAVNLAALQELEEARERDGYYRSQSEDVQAAITILEEAIAQIDDKTKARFKETFDAVNGKVQTFFPTLFGGGEATLKMIGDDLLTAGVSIMARPPGKKNSTIHLLSGGEKALTAMSLVFALFSLNPAPFCLLDEVDAPLDDANTSRFCNLVKEMSAQTQFLYISHNRLTMEMAEQLVGVTMQEKGVSRVVAVDIKQALEMAEAV

SEQ ID NO: 9312 - protein, 58 aa, Neisseria meningitidis; identical to SEQ ID NO: 2174

SEQ ID NO: 9313 - protein, 87 aa, Neisseria meningitidis; identical to SEQ ID NO: 1364

SEQ ID NO: 9314 - protein, 962 aa, Neisseria meningitidis
MSNTTVEQFAAELKRPVEDLLKQLKEAGVSKTGGGDSLTLDDKQLLNAYLTKKNGSNSSTISIRRTKTEVSTVDGVKVETRKRGRTVNIPSAEELAAQVKAAQTQAAPVRPEQTAEDAAKARAEAAARAEARAKAEAEAAKLKAAKAGNKAKPAAQKPTEAKAETAPVAAETKPAEESKAEKAQADKMPSKKPAEPKEKAAKPKHERNGKGKDAKKPAKPAAPAVPQPVVSAEEQAQRDEEARRAAALRAHQEALLKEKQERQARREAMKQQAEQQAKAAQEAKTGRQRPAKPAEKPQAAAPAVENKPVNPAKAKKEDRRNRDDEGQGRNAKGKGGKGGRDRNNARNGDDERVRGGKKGKKLKLEPNQHAFQAPTEPVVHEVLVPETITVADLAHKMAVKGVEVVKALMKMGMMVTINQSIDQDTALIVVEELGHIGKPAAADDPEAFLDEGAEAVEAEALPRPPVVTVMGHVDHGKTSLLDYIRRTKVVQGEAGGITQHIGAYHVETPRGVITFLDTPGHEAFTAMRARGAKATDIVILVVAADDGVMPQTIEAIAHAKAAGVPMVVAVNKIDKEAANPERIRQELTAHEVVPDEWGGDVQFIDVSAKKGLNIDALLEAVLLEAEVLELTAPVDAPAKGIIVEARLDKGRGAVATLLVQSGTLKKGDMLLAGTAFGKIRAMVDENGKSITEAGPSIPVEILGLSDVPNAGEDAMVLADEKKAREIALFRQGKYRDVRLAKQQAAKLENMFNNMGETQAQSLSVIIKADVQGSYEALAGSLKKLSTDEVKVNVLHSGVGGITESDVNLAIASGAFIIGFNVRADASSRKLAENENVEIRYYNIIYDAIDDVKAAMSGMLSPEEKEQVTGTVEIRQVISVSKVGNIAGCMVTDGVVKRDSHVRLIRNNVVIHTGELASLKRYKDDVKEVRMGFECGLMLKGYNEIMEGDQLECFDIVEVARSL

SEQ ID NO: 9315 - protein, 163 aa, Neisseria meningitidis; identical to SEQ ID NO: 3672

SEQ ID NO: 9316 - protein, 166 aa, Neisseria meningitidis; identical to SEQ ID NO: 1240

SEQ ID NO: 9317 - protein, 66 aa, Neisseria meningitidis; identical to SEQ ID NO: 2062

SEQ ID NO: 9318 - protein, 259 aa, Neisseria meningitidis
MKEHKARKRFGQNFLQDTRIISDIVNAVRPQADDVVIEIGPGLAAITEPLAKKLNRLHVVEIDRDIVCRLKTLPFADKLVIHEGDVLQFDFNGIAGKKKIVGNLPYNISTPLLFKLAEVADDVVDMHFMLQKEVVERMVAAPKSNDYGRLGVMLQYFFDMEMLIDVPPESFDPAPKVDSAVVRMIPVKHRIGKADDFEHFAKLVKLAFHQRRKTIRNNLKELAGDDDLQAVGINPQDRAEHIAPEKYVALSNYLAGKAV

SEQ ID NO: 9319 - protein, 395 aa, Neisseria meningitidis
MNTLLNQLKPYPFARLREAMQGISAPEGLEAVPLHIGEPKHPTPKVITDALTASLHELEKYPLTAGLPELRQACANWLKRRYDGLTLNSDTEILPVLGSREALFSFVQTVLNPVSDGLKPVIVSPNPFYQIYEGATLLGGGEIHFANCPAPSFNPDWRSISEEVWKRTKLVFVCSPNNPSGSVLDLDGWKEVFDLQDKYGFIIASDECYSEIYFDGNKPLGCLQAAAQLGRSRQKLLMFTSLSKRSNVPGLRSGFVAGDAELLKNFLLYRTYHGSAMSIPVQRASIAAWNDEQHVIDNRRLYQEKFEWVIPILQQVFDVKLPDASFYIWLKVPDGDDLAFARNLWQKAAIQVLPGRFLARDTEQGNPGEGYVRIALVADVATCVKAAEDIVSLYR

SEQ ID NO: 9320 - protein, 109 aa, Neisseria meningitidis
MLSQSQWLDAVKGRLRVRSDYALSKRWAVTPSEVSQYRRNRLRFPFAVVLDIADVMDIDPIEIIAGLEYRRCREKDMERVKGAYFKAHCAHFVYPNNPGFFRRKKRFFG

SEQ ID NO: 9321 - protein, 356 aa, Neisseria meningitidis
  misc_feature 2, 3: 'Xaa' is any amino acid
VXXPYVPPVQSAPVYTPPAYVPPSAPAVSGTYVPSYAPVDINAATHTIVRGDTVYNISKRYHISQDDFRAWNGMTDNTLSIGQIVKVKPAGYAAPKAAAVKSRPAVPAAAQPPVQSAPVDINAATHTIVRGDTVYNISKRYHISQDDFRAWNGMTDNTLSIGQIVKVKPAGYAAPKTSAVESRPAVPAAVQTPVKPAAQPPVQSAPQPAAPAAENKAVPAPAPQSPAASPSGTRSVGGIVWQRPTQGKVVADFGGNNKGVDIAGNAGQPVLAAADGKVVYAGSGLRGYGNLVIIQHNSSFLTAYGHNQKLLVGEGQQVKRGQQVALMGNTDASRTQLHFEVRQNGKPVNPNSYIAF

SEQ ID NO: 9322 - protein, 720 aa, Neisseria meningitidis
MQQKIRFQIEGMTCQACASRIEKVLNKKDFVESAGVNFASEEAQVTFDDSKTSAADIAKIIEKTGYGAKEKTEDTLPQAEAEHHIGWRLWLLSAINIPFLVGMAGMMIGRHDWMIPPLWQFALASIVQLWLAIPFYKSAWASIKGGLANMDVLVTIGTVSIYLYSVYMLFFSPHAAHGMAHVYFEAGVMVIGFVSLGKFLEHRTKKSSLNSLGLLLKLTPTQVNVQRDGEWKQLPIDQVQIGDLIRANHGERIAADGVIESGSGWADESHLTGESNPEEKKAGGKVLAGALMTEGSVVYRAAQLGSQTLLGDMMNALSEAQGSKAPIARVADKAAAVFVPAVVGIALLTFIVTWLIKGDWTVALMHAVAVLVIACPCALGLATPAAIMVGMGKAVKHGIWFKDAAAMEEAAHVDAVVLDKTGTLTEGRPQVAAVYCVPDSGFDEDDLYRIAAAVEQNAAHPLARAIVSATQARGLEIPAAQNAQTVVGAGIAAEVEGAGLVKAGKAEFAELTLPEFSDGVWDIASIVAVSVDNKPIGAFALADALKADTAEAIGRLKKHNIDVYIMSGDNQGTVEYVAQQLGIAHAFGNMSPRDKAAEVQKLKAAGKTVAMVGDGINDAPALAAANVSFAMKGGADVAEHTASATLMQHSVNQLADALLVSQATLKNIKQNLFFAFFYNILGIPLAALGFLNPVIAGAAMAASSVSVLSNALRLKRVKID

SEQ ID NO: 9323 - protein, 66 aa, Neisseria meningitidis
MMLKTLTFAALHFSTAFSITYVLTGSIGVSGAVALVEPLINTVVFYSGLTKTSTALPRLSSTRTIL

SEQ ID NO: 9324 - protein, 153 aa, Neisseria meningitidis; identical to SEQ ID NO: 750

SEQ ID NO: 9325 - protein, 408 aa, Neisseria meningitidis
MMKIKALMIAAALLAAADVHAAPQKAKTASAKAAKAAKAAKAAKAAKAAKVAKVAKVAKVAKVAKVAKVAKVAKVAKVAKVAKVAKVAKVAKVAKVAKVAKVAKVAKVAKVAATAQKEAAPAQQQGGIRFSDGIAAVADNEVITRRRLAEAVSEAKANLPKDAQISESELSRQVLMQLVNQSLIVQAGKRRNIQASEAEIDAVVAKNPALKNLSPAQRRDFADNIIAEKVRQQAVMQNSRVSEAEIDAFLEQAQKQGITLPEGAPLRQYRAQHILIKADSENAAVGAESTIRKIYGEARSGTDFSSLARQYSQDASAGNGGDLGWFADGVMVPAFEEAVHALKPGQVGAPVRTQFGWHIIKLNEVRDAGTPQERIRNSVRQYIFQQKAEQATVNLLRDLHSGAYVDIR

SEQ ID NO: 9326 - protein, 394 aa, Neisseria meningitidis; identical to SEQ ID NO: 1253

SEQ ID NO: 9327 - protein, 118 aa, Neisseria meningitidis; identical to SEQ ID NO: 3785

SEQ ID NO: 9328 - protein, 659 aa, Neisseria meningitidis
MPKILQQTTLHRFFRANTHHPISPSVLQQAGDLIRWLCFSDGISDFRPCRLKPQNPIGGTVMNTVSNYLSALREAMKAQGLDALVIPSADPHLSEYLPEHWQARRELSGFTGSVGTFVVTADEAGVWVDSRYWEQAAKQLAGSGIELQKSGQVPPYNEWLAANLPENAAVGIPSDMVSLTGKRTLAQSLAAKNIRIEHPNDLLDQVWTSRPAIPAETVFIHDPAYVSETAAEKLARVRAVMAEKGADYHLVSSLDDIAWLTNLRGSDVPFNPVFVSFLLIGKDNAVLFTEQCRLNAEAAAALQTAGITVEPYAQVADKLAQIGGALLIEPNKTAVSTLVRLPESVCLIEGINPSTLFKSCKSEADIARIREAMEHDGAALCGFFAEFEDIIGNGGSLTEIDVDTMLYRHRSVRPGFVSLSFDTIAGFNANGALPHYSATPESHSTISGNGLLLIDSGAQYKGGTTDITRVVPVGTPTAEQKRDNTLVLKAHIALAEAVFPENIPSPLIDAICRKPLWQAQCDYGHGTGHGVGYFLNVHEGPQRIAFAAPATPETAMKKGMVTSIEPGLYRPGKWGIRIENLAANQAVAAPQETEFGSFLCFETLTLCPIDTRLIDTALMTDGEIDWVNRYHAEVRRRLEPLTEGAAKAWLIKRTEPLAR

SEQ ID NO: 9329 - protein, 921 aa, Neisseria meningitidis
MRSSFRLKPICFYLMGVMLYHHSYAEDAGRAGSEAQIQVLEDVHVKAKRVPKDKKVFTDARAVSTRQDIFKSSENLDNIVRSIPGAFTQQDKSSGIVSLNIRGDSGFGRVNTMVDGITQTFYSTSTDAGRAGGSSQFGASVDSNFIAGLDVVKGSFSGSAGINSLAGSANLRTLGVDDVVQGNNTYGLLLKGLTGTNSTKGNAMAAIGARKWLESGASVGVLYGHSRRSVAQNYRVGGGGQHIGNFGAEYLERRKQQYFVQTGGLKFNSNSGKWERDLQRQFWKTSYYKQYKDPQKLKKYIEDQDKDWRENLAPQYDITPIDPSSLKQQSAGNLFKLEYDGVFNKYTAQFRDLNTKIGSRKIINRNYQFNYGLSLNSYTNLNLTAAYNSGRQKYPKGSKFTGWGLLKDFETYNNAKILDLNNTATFRLPRETELQTTLGFNYFHNEYGKNRFPEELGLFFDGPDQDNGLYSYLGRFKGDKGLLPQKSTIVQPAGSQYFNTFYFDAALKKDIYRLNYSTNTVGYRFGGEYTGYYSSEGEFKRAFGENSPTYKKHCNPSCGLYEPVLKKYGKKRANNHSVSISADFGDYFMPFASYSRTHRMPNIQEMYFSQIGDSGVHTALKPERANTWQFGFNTYKKGLLKQDDTLGLKLVGYRSRIDNYIHNVYGKWWDLNGDIPSWVSSTGLAYTIQHRNFKDKVHKHGFELELNYDYGRFFTNLSYAYQKSTQPTNFSDASESPNNASKEDQLKQGYGLSRVSALPRDYGRLEVGTRWLGNKLTLGGAMRYFGKSIRATAEERYIDGTNGGNTSNFRQLGKRSIKQTETLARQPLIFDFYAAYEPKKNLIFRAEVKNLFDRRYIDPLDAGNDAATQRYYSSFDPKDKDEDVTCNADGLCNGKYGGTSKSVLTNFARGRTFLMTMSYKF

SEQ ID NO: 9330 - protein, 117 aa, Neisseria meningitidis
MPEIKIFHNPRCSKSRAALSLLEERGIAAEVVKYLDTPPDLSELKDIFNKLGLASARGMMRVKDDLYKELGLDNPDLDNDALLRAIAEHPALLERPIVLANGKAAVGRPLENIEAIL

SEQ ID NO: 9331 - protein, 249 aa, Neisseria meningitidis; identical to SEQ ID NO: 467

SEQ ID NO: 9332 - protein, 795 aa, Neisseria meningitidis
MQLLAAEGIHQHQLNVQKSTRFIGIKVGKSNYSKNELNETKLPVRVIAQTAKTRSGWDTVLEGTEFKTTLSGADIQAGVGEKARADAKIILKGIVNRIQTEEKLESNSTVWQKQAGSGSTVETLKLPSFEGPALPKLTAPGGYIADIPKGNLKTEIEKLAKQPEYAYLKQLQVAKNINWNQVQLAYDRWDYKQEGLTEAGAAIIALAVTVVTSGAGTGAVLGLNGAAAAATDAAFASLASQASVSFINNKGDVGKTLKELGRSSTVKNLVVAAATAGVADKIGASALNNVSDKQWINNLTVNLANAGSAALINTAINGGSLKDNLGDAALGAIVSTVHGEVASKIKFNLSEDYITHKIAHAIAGCAAAAANKGKCQDGAIGAAVGEIVGEALTNGKNPATLTAKEREQILAYSKLVAGTVSGVVGGDVNTAANAAKVAIENNLLSQEEYALREKLIKKAKGKGLLSLDWGSLTEQEARQFIYLIEKDRYSNQLLDRYQKNPSSLNNQEKNILAYFINQTSGGNTAWAASILKTPQSMGNLTIPSKDINNTLSKAYQTLSRYDSFDYKSAVAAQPALYLLNGPLGFSVKAATVAAGGYNIGQGAKAISNGEYLHGTVQVVNGTLMVAGSVSAQAAISAKPAPVTRYLSNDSAPALRQALTAESQRIRMKLPEEYRQIGNLAIAKIDVKGLPQRMEAFSSFQKGEHGFISLPETKIFKPISVDKYHNIASPPRGTLRNIDGEYKLLETIAQQLGNNRNVSGRIDLFTELKACQSCSNVILEFRNRYPNIQLNIFTGK

SEQ ID NO: 9333 - protein, 508 aa, Neisseria meningitidis
VKPLRRLTNLLAACAVAAAAFGQPALAADLAQDPFITDNAQRQHYEPGGKYHLFGDPRGSVSDRTGQINVIQDYTHQMGNLLIQQAAIQGNLGYTVRFSGHGHEEHAPFDNHAADSASKEQGNVDEGFTVYRLNWEGHEHHPADAYDGPKGGNYPKPTGARDEYTYHVNGTARSIKLNPTDTRSIKLNPTDTRSIRQRISDNYSNLGSNFSDRADEANRKMFEHNAKLDRWGNSMEFVNGIAAGALNPFISAGEALGIGDILYGTRYAIDKATMRNIAPLPAEGKFAAIGGLGSVAGFEKNTREAVDRWIQENPNAAETVEALVNVLPFAKVKNLTKAAKPGKAAVSGDFSAAYNTRTTRKVTTETEGLNRIRQNQKNSNIHEKNYGRDNPNHINVLSGNSIQHILYGDEAGGGHLFPGKPGKTTFPQHWSASKITHEISDIVTSPKTQWYAQTGTGGKYIAKGRPARWVSYETRDGIRIRTVYEPATGKVVTAFPDRTSNPKYNPVK

SEQ ID NO: 9334 - protein, 916 aa, Neisseria meningitidis; identical to SEQ ID NO: 3146

SEQ ID NO: 9335 - protein, 360 aa, Neisseria meningitidis
MQTANKKTILVTGGAGFIGSAVVRHIIRNTQDSVVNLDKLTYAGNLESLTDIADNPRYAFEQVDICDRAELDRVFAQHRPDAVMHLAAESHVDRSIGSAGEFIQTNIVGTFNLLEAARAYWQQMPSEQHEAFRFHHISTDEVYGDLGGTDDLFTETAPYAPSSPYSASKVSSDHLVRAWLRTYGLPTIVTNCSNNYGPYHFPEKLIPLMILNALDGKPLPVYGDGMQIRDWLFVEDHARALYQVVTEGVVGETYNIGGHNEKANIEVVKTICALLEELAPEKPAGVARYEDLITFVQDRPGHDVRYAVDAAKIRRDLGWLPLETFESGLRKTVQWYLDNKTWWQNVLNGSYRLERLGTGK

SEQ ID NO: 9336 - protein, 354 aa, Neisseria meningitidis; identical to SEQ ID NO: 3286

SEQ ID NO: 9337 - protein, 299 aa, Neisseria meningitidis; identical to SEQ ID NO: 3610

SEQ ID NO: 9338 - protein, 204 aa, Neisseria meningitidis; identical to SEQ ID NO: 3086

SEQ ID NO: 9339 - protein, 332 aa, Neisseria meningitidis
MKIAIYGTKSYDREHFTRANRHFGFELEFFDFMLDAKTAKMAEGAEAVCIFVNDDGSRPVLEKLAQIGVKTVALRCAGFNNVDLKAAEELGLKVVRVPAYSPESVAEHTVGLMLTLNRRIHKAYQRTRDANFSLEGLTGFNMYGKTAGVIGTGKIGIATMRILKGFGMNLLAHDPFCNPEAEKIGGRYVDLDELYAQSDIITLHCPATPENHYMLNEAAFDKMKDGVMIINTSRGGLIDSAAAIEALKRRKIGALGMDVYENERELFFEDKSNDVITDDVFRRLSSCHNVLFTGHQAFLTEEALGNISEVTLSNIREVGQTGDCGNAVRADG

SEQ ID NO: 9340 - protein, 152 aa, Neisseria meningitidis; identical to SEQ ID NO: 3595

SEQ ID NO: 9341 - protein, 194 aa, Neisseria meningitidis
MPKSPPPKPPPFPSSAKIEVDEEGQISGQTTPSKDSDARWIKKNGLYKLGYKQHTRTDVEGYIEKLHITPANAHECTHLSPLLEGLPKGTTVYADKGYDSAENRQHLEEHQLLDGIMRKACRNRPLTEAQTKRNRYLSKTRYVVEQSFGTLHRKFRYARAAYFGLIKVSAQSHLKAMCLNLLKAANRLSAPAAA

SEQ ID NO: 9342 - protein, 311 aa, Neisseria meningitidis
MELFKIKRDIPFMSYGKLTTFISLVTFIAAVFFLVTKGLNFSVEFTGGTVMEVQYQQGADVNKMRERLDTLKIGDVQVQALGTNKHIMIRLPNKEGVTSAQLSNQVMDLLKKDSPDVTLRQVEFIGPQVGEELVSNGLMALGFVVIGIIIYLSMRFEWRFAVSAIIANMHDIVIILGCFAFFQWEFSLTVLAGILAVLGYSVNESVVVFDRIRENFRKPAMRGHAVPEVIDNAITATMSRTIITHGSTEAMVVSMLVFGGAALHGFSMALTIGIVFGIYSSVLVASPLLLMFGLSRDNIGKEPKKKEEIVV

SEQ ID NO: 9343 - protein, 109 aa, Neisseria meningitidis
MSRCCLKRLQTASAVSAFSGGVLEVVRLCCRRLSVLFNPGVMLFVPDCPVGGAAGFFQYEMLCPFFWQGRLQTGSNLAYDVFMSAGRLNGGRNPPHSRRFLALLCSVAL

SEQ ID NO: 9344 - protein, 228 aa, Neisseria meningitidis
MYAFTAAQQQKALFWLVLFHILIIAASNYLVQFPFQIFGIHTTWGAFSFPFIFLATDLTVRIFGSHLARRIIFWVMFPALLLSYVFSVLFHNGSWTGLGALSEFNTFVGRIALASFAAYALGQILDIFVFNKLRRLKAWWIAPTASTVIGNALDTLVFFAVAFYASSDEFMAANWQGIAFVDYLFKLTVCGLFFLPAYGVILNLLTKKLTTLQTKQAQDRPAPSLQNP

SEQ ID NO: 9345 - protein, 96 aa, Neisseria meningitidis; identical to SEQ ID NO: 2317

SEQ ID NO: 9346 - protein, 259 aa, Neisseria meningitidis; identical to SEQ ID NO: 2978

SEQ ID NO: 9347 - protein, 226 aa, Neisseria meningitidis
MIFQTVWFSDVVLSVSWIVLILILAASAPSAFRSLARYRSALPLCTVIFSAAWCLNASAGGGQLAQMNYHLLAVNLVALMVGTSAAFWLAALLMLPYCLLFAGSAGAYPPNALVLILPALAVNRLSRMLVNRLPPNIFIFIFVNGFLASAAGILLTGLVLTGILDAANAFPSEILWTTALPVFILLAWAEAFLSGISTAIFVALKPHWINTFDDNRYLKSDRGIWR

SEQ ID NO: 9348 - protein, 48 aa, Neisseria meningitidis
MANSASKFCIAKGGRREVKKDESGGGYALCHLPDSRIVEEWEYFRSQH

SEQ ID NO: 9349 - protein, 217 aa, Neisseria meningitidis
MKITHCKLKKKVQKELLRFFVLEVTARSAADILGIHPNSAALFYRKIRTVINHHLALAADEVFEGPVEPDESDFGGRRKGRRGRGAAGKVVVFGILKRNGRVYTVVVDNAKSETLLPVIKKKIMPDSIVYTNSLSSCDKLDVSGFIHYRINHSKEFADRQNHINGIENFWNQAKRVLRKYNGIDRKSFPLFLKECEFRFNFGTPSQQLKILRDWCGI

SEQ ID NO: 9350 - protein, 63 aa, Neisseria meningitidis
MKMIARVTGMKRSKGITEKGQSYDSTKLFIEIQFPESQDMCGYASQEFAYGTYENYEKLLASA

SEQ ID NO: 9351 - protein, 378 aa, Neisseria meningitidis
MKNISLSPPAMLGILGGGQLGRMFTVAAKTMGYKVTVLDPDPDAPAAEFADCHLCAPFNDQAALDELAKCAAVTTEFENVNADAMRFLAKHTNVSPGSDCVAIAQNRIQEKAWIRKAGLQTAPYQAICKAEDITEESIQFLPGILKTATLGYDGKGQIRVKTLDELKAAFAEHGGVDCVLEKMVDLRSEISVIVCRLNNDNVQTFDPAENIHENGILAYSIVPARLSADVQQQARQMAQRLADELDYVGVLAVEMFVVGDTHELVVNEIAPRPHNSGHHTIDACAADQFQQQVRIMCNLPPADTKLLSSCCMANILGDVWQEDGGEPDWLPLQSHPNAHLHLYGKKTAHKGRKMGHFTVLTTDSDTAFQEAKKLHQSL

SEQ ID NO: 9352 - protein, 119 aa, Neisseria meningitidis; identical to SEQ ID NO: 3183

SEQ ID NO: 9353 - protein, 291 aa, Neisseria meningitidis
MAVGKEILTKIRSVQNTQKITKAMQMVSTSKMRKTQERMRLARPYAEKVRMVMSHLAQTNTDHGIPLLESHREIRRVGFILITSDKGLCGGLNANVLKKFLAQVQEYQNQGIEEEIVCLGSKGLMACQSIGLNVVASAVNLGDTPKMEMLLGPLTELFQRYEKHEIDRIHLVYSGFVNTMRQEPRMEVLLPIGENVIGDSAPKSPFSWEYRYEPTALAVLEYLVRRYLESVVYQALSDNMASEQAARMVAMKAATDNAGNAIKELRLVYNKSRQAAITTELSEIVAGAAAV

SEQ ID NO: 9354 - protein, 485 aa, Neisseria meningitidis; identical to SEQ ID NO: 4003

SEQ ID NO: 9355 - protein, 148 aa, Neisseria meningitidis; identical to SEQ ID NO: 4053

SEQ ID NO: 9356 - protein, 98 aa, Neisseria meningitidis; identical to SEQ ID NO: 2571

SEQ ID NO: 9357 - protein, 360 aa, Neisseria meningitidis; identical to SEQ ID NO: 2503

SEQ ID NO: 9358 - protein, 40 aa, Neisseria meningitidis; identical to SEQ ID NO: 2302

SEQ ID NO: 9359 - protein, 218 aa, Neisseria meningitidis
VNKRLFCSRNGLRYYLLGGFCLSVFPLLLVFASSVWAVYRTGGQVLPPYVRADAALVLGAAAWDKRPSPVFRERINHAIALYQSRRVGKIVFTGGRTKKGYMTEAEVGRRYALKQGVPARNILFENTSRNTYENLNNIRPVLRANGIDSVVIVSDPYHLARAAEMAEDLGVRVYMSATPTTRFDAGNKKKIFMLQEGYALSLYRLEKWGSRFLGWLSD

SEQ ID NO: 9360 - protein, 282 aa, Neisseria meningitidis; identical to SEQ ID NO: 1327

SEQ ID NO: 9361 - protein, 287 aa, Neisseria meningitidis; identical to SEQ ID NO: 1804

SEQ ID NO: 9362 - protein, 171 aa, Neisseria meningitidis; identical to SEQ ID NO: 2424

SEQ ID NO: 9363 - protein, 162 aa, Neisseria meningitidis
MTPLFRKAVWLLFAVSVCAFAGSLAAQYVLGMEPCVLCISQRLCVLATALCTAIVLMCRPRRRAGGLFGAVFISIPAVTGISVAAYQLWLQSLPPGTAPSCGAPWTFRLKGWSLFDWFEPVVRGFGNCAEPDYLLGVALPVWSAAYFLAVVLTVWWAWARAK

SEQ ID NO: 9364 - protein, 127 aa, Neisseria meningitidis
MSKIHSKETKPEILVRKFLFSQGFRYRKNDKRYAGKPDIVLPKYKTVVFIHGCFWYGHSCNKGHIPKSNTDFWLEKITKNCERDIKNETELEKIGFKVIVVWECELKNKAIGRERLNRLVREIKDAV

SEQ ID NO: 9365 - protein, 109 aa, Neisseria meningitidis; identical to SEQ ID NO: 1560

SEQ ID NO: 9366 - protein, 336 aa, Neisseria meningitidis
MSIKILIISPSWIGDCVMTQPLFRRLKELHPGCTIDVFAPKWSMAVFERMPEVNEILENPFGHGALELKRRWRVGRDLGRRGYDQVIVLPGSLKSAIIALATGIGKRTGYVGESRYFLLNDIRRLDKERLPLMVDRYTALAHPSQEDFDGHSGFPEFSIDERRREISVETFGLDIGKPVLAFCPGAEFGPAKRWPTRYFAELGKHYSAAGWQVWLFGSQKDDEIAEEINCLSDGMCVNLCGKTDLSQAMDLLSLADTVVCNDSGLMHLAAALGRKVVAVYGSSSPTHTPPLSDRAKIVSLHLECSPCFKRECPLGHTDCLNRLYPEKIVQAVEEAV

SEQ ID NO: 9367 - protein, 153 aa, Neisseria meningitidis; identical to SEQ ID NO: 5052

SEQ ID NO: 9368 - protein, 152 aa, Neisseria meningitidis
LLTKLKILLFLFLFVFVLAINLLFFFFSSDIESFGNYQFEYVYDKGWPANYILVMKDGTEGNFDKIISGLVLEYYKEDDNIYFSYIDGQGFASDSCYYKPEILYGKIILNKNHIININSMEKNNFLSEDKIMKGTRNWLADPKNKCNIQTLD

SEQ ID NO: 9369 - protein, 495 aa, Neisseria meningitidis; identical to SEQ ID NO: 2837

SEQ ID NO: 9370 - protein, 69 aa, Neisseria meningitidis; identical to SEQ ID NO: 3638

SEQ ID NO: 9371 - protein, 423 aa, Neisseria meningitidis
MPSETSSPRKENETEVHIPAAPFIVKQSGSNALATCALVLAALGLGASGFLFVQGQNVLKNQELAFNQKIDKAALGESENAALLKDNLNRQSAIQSELDRLDSGVKANGEQILMTQKSYRELTKGRADWLVDETETILNLAAQQLVLTGNIQTAVGVLEHIDSRLSRFDQAELLPLKQAISSDLAELKNRPYVDISGTALRIDRLETAVSGLPLMLDGVLKPGVQARNEAVSASWWNVWEKSLGTLKGLVEIRRLENNDAMLISPEQAYFVRENLRLRLLDARTALMQRNSEVYQSDLNNAETAVRQYFDAKSPATQSWLKELAELKALDVRMTADDGLKASLNAVRAYRDGTRMTAAENQEAEQAASEPANEKTASESAAASDVKTIEAPSLPSELKPEQPAKKQTVPEKAGRSPSAKGERA

SEQ ID NO: 9372 - protein, 158 aa, Neisseria meningitidis
MNTIAPNLDGKHLRIGIVQARFTNEIGSEMLKVCCRTLQELGVADENITVATVPGALEIPIALMNLASSEKFDALIAIGVVIRGETYHFELVSNESGAGVSRVALDYNIPIANAVLTTENDAQAIERIEEKASDAAKVAVECANLVNLLLEEQFEDEE

SEQ ID NO: 9373 - protein, 212 aa, Neisseria meningitidis; identical to SEQ ID NO: 3536

SEQ ID NO: 9374 - protein, 60 aa, Neisseria meningitidis; identical to SEQ ID NO: 2288

SEQ ID NO: 9375 - protein, 162 aa, Neisseria meningitidis
LIDLEIFAAEGQNLQGSFLLEELDERVSSHDYPADRQTKISFTLTGGRDRLQRLFLDLNVKADMPLICQRCIKPMPFMLDESSRIVLFSNEESLDESMLADEELEGILIEKELDVRTLVEDQILMSLPFSPRHEDCGDNGTLEEVNRDKPNPFAVLAGLKSN

SEQ ID NO: 9376 - protein, 258 aa, Neisseria meningitidis
MSDNALTSSRRFGGIARLYGDSALAHFSQAHVCVVGVGGVGSWAVEALARTGIGRLTLIDLDNVAESNVNRQLHALTGDFGKAKVTALRERVAQINPGCQVFEIEDFVTEDNLPEYFGKGFDFVIDAIDQVRVKAAMAAYFVERKQPFVLSGGAGGQKNPALIQTADLSRVTHDPLLANLRYTLRKRYGFSRDTKANMRVPCVYSTENIVPPQSREACSADAAPQGLSCAGYGASMLVTASFGLYCAQAAVEHIADKK

SEQ ID NO: 9377 - protein, 83 aa, Neisseria meningitidis
LYIVGHHVIFCGHGFLSASTVASYLSLLSNKLRENNPDIVQFNIEFKAVGNCDKLSLIQQHGVKSILLDASAYQLSRNRRIRI

SEQ ID NO: 9378 - protein, 84 aa, Neisseria meningitidis; identical to SEQ ID NO: 3171

SEQ ID NO: 9379 - protein, 315 aa, Neisseria meningitidis
  misc_feature 2, 3, 4: 'Xaa' is any amino acid
VXXXTLLLLIPLVLTACGTLTGIPAHGGGKRFAVEQELVAASSRAAVKEMDLSALKGRKAALYVSVMGDQGSGNISGGRYSIDALIRGGYQNNPESATQYSYPAYDTTATTKSDALSSVTTSTSLLNAPAAALTRNSGRKGERSAGLSVNGTGDYRNETLLANPRDVSFLTNLIQTVFYLRGIEVVPPEYADTDVFVTVDVFGTVRSRTELHLYNAETLKAQTKLEYFAVDRDSRKLLIAPKTAAYESQYQEQYALWMGPYSVGKTVKASDRLMVDFSDITPYGDTTAQNRPDFKQNNGKNPDVGNEVIRRRKGG

SEQ ID NO: 9380 - protein, 332 aa, Neisseria meningitidis
MSRPVPAVFGSVFHSQMPVLAYREGKWQPTEWQSSQDLSLAPGAHALHYGSECFEGLKAFRQADGKIVLFRPTANIARMRQSADILHLPRPETQAYLDALVELVKRAADEIPDAPAALYLRPTLIGTDPVIGKAGSPSETALLYILASPVGDYFKVGSPVKILVETEHIRCAPHMGRVKCGGNYASAMHWVLKAKAEYGANQVLFCPNGDVQETGASNFILINDDEIITKPLTDEFLHGVTRDSVLTVAKDLGYTVSERNFTVDELKAAVENGAEAILTGTAAVISPVTSFVIGGKEIEVKSQERGYAIRKAITDIQYGLAEDKYGWLVEVC

SEQ ID NO: 9381 - protein, 979 aa, Neisseria meningitidis
MSGFNYEKNQPHQMRAVSAVLGVFDGATPKYRTADENPELLFAAKQYANNILKVQSQNGIDGRFPDRSDDQNILDISMETGTGKTYTYTQTMFELHRWLGVFKFIVVVPTLSIKAGTQQFLQSKALAEHFEQDFGGDYEGVRLKTYVVESAKKNKGKKSNAPITIEQFVKAENKKEIHVLLINAGMVNSSSMNDTGDKALKDLFDNPVDALAAVRPFVIVDEPHKFPTRESAKTWGNIKRLKPQYILRYGATFNDEYYNLLYRLTAVDAFNDGLVKGVRVFQEEMQGGMDAAVKLVSSGGKEAKFELNEKDKKQTFKLAKGEDLAQIHPAISDLKIDKMNKTVVVLSNGLELKTGAVINPYSYSQTVQDAMMQRAVAEHFKLERALLAERAPQPKIKPLTLFFIDDIAGYRSGNELSGSLKDKFESWIRVEAARRLKTESDPFYRDYLQKTLDDVSACHGGYFSKDNTDSDDRIEQEINEILHDKEKLLSLDNPRRFIFSKWTLREGWDNPNVFQICKLRSSGSTTSKLQEVGRGLRLPVNELMARVRDVPYKLNYFVDSSEKDFVKQLVGEINDNSFQEEISKKFTEELKQKILQKYPDIKPLVLVNQLFSDGIIDDNENFAEDGYDKLKAAYPEAFPKGLDKGKVSNAKDEGKDTIIMREGKYEELKALWELIHHKAVLQYKIKDEAEFVDLFTAYLRENAAKFPQAGIRTAVNEAYINNGLMLSRRIDSFEDEDFIRFNTMTYRELLEKLAQTAKIRMQTLHQAFYRVRDELNIGDFLNMQTIAQIKNGFNRFLLHHSFHKFELDYRLVGSKIHPTKFTDKDGKPRAVKKADLGRFEDTEHRPAAGYLFDEIFYDSDIEHENVANNQIEGVTVFTKIPRNSIKIPVAGGGTYSPDFAYIVKTKSGEILNFVIEAKGTDGAEDLRKSEERKIKHAEKLFAEISKEIKVVFKTQFDGERIAELIGQNMPAGGHSENGH

SEQ ID NO: 9382 - protein, 205 aa, Neisseria meningitidis
MPYTEDMRPGDTANPYGASKAMVERMLTDIQKADPRWSVILLRYFNPIGAHESGLIGEQPNGIPNNLLPYICQVAAGKLPQLAVFGDDYPTPDGTGMRDYIHVMDLAEGHVAAMQAKSNVAGTHLLNLGSGRASSVLEIIRAFEAASGLTIPFEIKPRRAGDLACSFADPSHTKQQTGWETKRGLQQMMEDSWRWVSRNPNGYGD

SEQ ID NO: 9383 - protein, 187 aa, Neisseria meningitidis; identical to SEQ ID NO: 508

SEQ ID NO: 9384 - protein, 240 aa, Neisseria meningitidis; identical to SEQ ID NO: 3621

SEQ ID NO: 9385 - protein, 473 aa, Neisseria meningitidis; identical to SEQ ID NO: 1953

SEQ ID NO: 9386 - protein, 63 aa, Neisseria meningitidis; identical to SEQ ID NO: 980

SEQ ID NO: 9387 - protein, 518 aa, Neisseria meningitidis
MDFSWLAEPHTWIGFATLLVLEVVLGIDNLVFVAILANKVQPARRDRARIIGLGLAVVIRIIMLAFMAHIITLTEPLFQIGGLAVSGKDMIMLAGGIFLLYKATTELHERLEGHNRFTVADNQKKHAPFWGVVAQILILDAVFSIDSVITAVAMVDHIVVAMGAVVVAMAVMISASKLLTEFVDRHPTVVMLCLGFLLMIGFSLIAEAFHFHIPKGYLYAAIGFSILIELFNQISQRNSRKNDYIGSSWRKRTAENVLGMMGIRESVLADAGGESGDDAHFEENEKSMIRSVLTLAERPIMGVMIPRRDIERLDISQSREEQCAQLQNTPYSRLLVVGKAGVDEPLGYINKKDLLSQLLETGGLDIQTALRQPLVLPDSTTALGAIELFRQSSADYALVVDEFGAVLGMVTMKDLLETIAGEFPEEFEREEEPAVQGNPDESLTVEGALEYVELAPQLNLPQQEEDADFHTVAGLIMEELQTIPDVGDFADFHGWRFEVVEKEGQRIERVKITKLPEE

SEQ ID NO: 9388 - protein, 252 aa, Neisseria meningitidis
MITIRNVSFHIGTHPILDNISLDIPEGGITALIGPNGAGKSTLFSFMARLRPLESGSIAYRGKNLAGTPTAELARTLSILTQENSIMSRITVRDLLMFGRYPYHQGRPTAECRRIVNGAIEEFHLQDLSDRYLTELSGGQRQRAMIAMVFCQSTDYVLLDEPLNNLDMYHARSLMQILQKLTREHKRTTVAVLHDINQAAAYADHVVAMKNGKVALTGTPEEVFTVHNIKELFDMDVDVLDYEGKKLIVHHI

SEQ ID NO: 9389 - protein, 227 aa, Neisseria meningitidis; identical to SEQ ID NO: 2905

SEQ ID NO: 9390 - protein, 122 aa, Neisseria meningitidis
MIDGELVALIHQTVLADEAGLKGRADMACLDGALSRIANWRQYENLEDIYEIAALYAQAIAKAHAFPDGNKRTALLTMLTYLDLQGISIAADQGLDDLIVSLAAGETDFKQLAETLRRLDKE

SEQ ID NO: 9391 - protein, 77 aa, Neisseria meningitidis; identical to SEQ ID NO: 3979

SEQ ID NO: 9392 - protein, 419 aa, Neisseria meningitidis; identical to SEQ ID NO: 6995

SEQ ID NO: 9393 - protein, 61 aa, Neisseria meningitidis; identical to SEQ ID NO: 965

SEQ ID NO: 9394 - protein, 431 aa, Neisseria meningitidis
MAQKIQSVKGMNDLLPVEQKDFKLTAAFWQAFEDTVNRWTRAYGYQQIRTPIVEQTGLFVRSIGEETDVVGKEMYTFSDSNDSLSLSLRPEGTASCLRAVVEHNLLYNSPQKLWYMGPMFRRERPQKGRYRQFHQVGIEALGFEGPDIDAEIIAMSADLWEKLGIREYLTLEINSLGNREERAAHRAALVEYLTRYEDKLDEDSKRRLKTNPLRVLDTKNPDLQEICNAAPRLVDYLGEASQNHYARFKAMLDGLGIQYIENPRLVRGLDYYNQTVFEWTTDKLGAQATVCGGGRYDGLIEELGGKPAPSIGFAMGIERLLLLVSEYGSLEVNAAPDVYAMHQGERADLQVMKYAQALRAQGFNVMQHSGYQSLKAQMKKADNSGARFALIVAQDELANGTVTLKDMNGAHGQQTVAAEDLTHTLQQWKNA

SEQ ID NO: 9395 - protein, 103 aa, Neisseria meningitidis; identical to SEQ ID NO: 392

SEQ ID NO: 9396 - protein, 161 aa, Neisseria meningitidis
MSNKMEQKGFTLIEMMIVVAILGIISVIAIPSYQSYIEKGYQSQLYTEMVGINNTVKQLILKNPLDDNQTIKSKLEIFVSGYKMNPKIAKKYSVSVRFVDKEKSRAYSLVGVPKAGTGYTLSVWMNSVGDGYKCRDAASARAYSETLSADAGCEAFSNRKK

SEQ ID NO: 9397 - protein, 109 aa, Neisseria meningitidis; identical to SEQ ID NO: 4604

SEQ ID NO: 9398 - protein, 151 aa, Neisseria meningitidis; identical to SEQ ID NO: 3388

SEQ ID NO: 9399 - protein, 444 aa, Neisseria meningitidis; identical to SEQ ID NO: 2522

SEQ ID NO: 9400 - protein, 57 aa, Neisseria meningitidis; identical to SEQ ID NO: 6070

SEQ ID NO: 9401 - protein, 237 aa, Neisseria meningitidis
MMSPVLYLIPTPLGTPDTPCLLPHEQQAIVGLTDFVVEAEKTARAHLKHLGVTTPIRELNLQTLNEHTDLKTLPELLKPLQEGRSMGIVSEAGCPAVADPGANLVALAHKHGFEVRPLVGPSSLLLALMASGANGQSFAFKGYLPSEKNERIQAFRALEQRSRQCGETQIFIETPYRNDALLADAVENLHPETRLCTATDLTLPTQEIISQTIVQWRKRKEMPNLKKRPTIFVMYAG

SEQ ID NO: 9402 - protein, 487 aa, Neisseria meningitidis
MRIVEKAYTFDDVLLVPAHSTVLPRDVKLQTKLTREITLNLPLLSAAMDTVTEARLAISMAQEGGIGIIHKNMPPEMQARAVSKVKRHESGVVKDPVTVAPTTLIREVLEMRAQRKRKMSGLPVVENGKVVGIVTNRDLRFENRVDLPVSAIMTPRERLVTVPEGTSIDEARELMHTHKVERVLVLNEKDELKGLITVKDILKTTEFPNANKDSEGRLRVGAAVGTGGDTEERVKALVEAGVDVIVVDTAHGHSQGVIDRVKWVKETYPHIQVIGGNIATAKAALDLVAAGADAVKVGIGPGSICTTRIVAGVGVPQLTAIHNVAEALKGTGVPLIADGGIRFSGDIAKALAAGAYSVMLGGMFAGTEEAPGEIELYQGRSYKSYRGMGSLGAMSQGSADRYFQDKTDSTDKYVPEGIEGRVPYKGPIVNIIHQLTGGLRSSMGYLGCANIAEMHEKAEFVEITSAGMSESHVHDVQITKEAPNYHR

SEQ ID NO: 9403 - protein, 282 aa, Neisseria meningitidis; identical to SEQ ID NO: 1323

SEQ ID NO: 9404 - protein, 123 aa, Neisseria meningitidis; identical to SEQ ID NO: 130

SEQ ID NO: 9405 - protein, 352 aa, Neisseria meningitidis; identical to SEQ ID NO: 327

SEQ ID NO: 9406 - protein, 300 aa, Neisseria meningitidis
MDSLMTLLSVLVPMFAGFFIRVPKPYLPALDKVLSVLVYAVLLLIGVSLSRVEDLGSRLDDMALTVLWLFVCTVGANLLALAVLGKLFPWRIKGKGKGVSVGVSGSVGQLGCVLLGFAFGKLMRDIWMPSESAGMYCLMLLVFLIGVQLKSSGVSLRQVLVNRRGIRLSVWFMLSSLSGGLLFAASTDGVSWTKGLAMASGFGWYSLSGLVMTEAYGAVWGSIMLLNDLARELFALAFIPLLMKRFPDAAVGVGGATSMDFTLPVIQGAGGLEVVPVAVSFGVVVNIAAPFLMVVFSTLG

SEQ ID NO: 9407 - protein, 823 aa, Neisseria meningitidis
MKKTCFHCGLDVPEHLHLTVRYENEDRETCCAGCQAVAQSIIDAGLGSYYKQRTADAQKTELPPQEILDQIRLYDLPEVQSDFVETHGGTREAVLMLGGITCAACVWLIEQQLLRTDGIVRIDLNYSTHRCRVVWDDGKIRLSDILLKIRQIGYTAAPYDAQKIEAANQKERKQYIVRLAVAGLGMMQTMMFALPTYLYGGDIEPDFLQILHWGGFLMVLPVVFYCAVPFYQGALRDLKNLRAGMDTPIAVAIIMTFIAGVYSLATNAGQGMYFESIAMLLFFLLGGRFMEHIARRKAGDAAERLVKLIPAFCHRMPGYPAVQDVREAAVVKLQAGDVVLVKPGETIPVDGTVLEGSSAVNESMLTGESLPVAKMPSEKVTAGTLNTQSPLIIRTDRTGGGTRLSHIVRLLDRALAQKPRTAELAEQYASSFIFGELLLAVPVFIGWTLYADAHTALWITVALLVITCPCALSLATPTALAASTGTLAREGILIGGKQAIETLAQTTDIIFDKTGTLTQGKPAVRRISLLRGTDEAFVLAVAQALEQQSEHPLARAILNCRISDGSVPDIAIKQRLNRIGEGVGAQLTVNGETQVWALGRASYVAEISGKEPQTEGGGSAVYLGSQSGFQAVFYLTDPLKDSAAEAVRQLAGKNLTLHILSGDRETAVAETARALGVAHYRAQAMPEDKLEYVKALQKEGKKVLMIGDGINDAPVLAQADVSAAAAGGTDIARDGADIVLLNEDLRTVAHLLDQARRTRHIIRQNLIWAGAYNIIAVPLAVLGYVQPWIAALGMSFSSLAVLGNALRLHKRGKMQSEKMPSEQ

SEQ ID NO: 9408 - protein, 309 aa, Neisseria meningitidis
MIHVSAVQAPAHIQDTGRYGHRRYGIGHAGAMDTVALAAGNILLGNDEGTAAIEIALGGIMLVFERDTPFCLTGAVYQAELDGEPVYSYWRYTARKGQTLKMVRAVQGMYGYVCVAGGFDVPEVMGSRSTDLKAGFGGHQGRMLQKGDYLPIGKGAQELSKVGIAPIPFTDTVHLVPSSEYAAFSEKGRLNLERETWTLQSDSNRMGYRFDGQPLTLSQPLEMLSHAVQAGTVQVPPGGKPIILLADAQTTGGYPKIATVAAADLGRLAQVRFGSKVKFKIIGLKEATALRRKNQAYLNQIRRITHEAG

SEQ ID NO: 9409 - protein, 621 aa, Neisseria meningitidis; identical to SEQ ID NO: 3145

SEQ ID NO: 9410 - protein, 575 aa, Neisseria meningitidis
MQLSGAQIIVQSLKAEGVEYVFGYPGGAVIEIYDALFQLNKFKHILTRHEQAAVHAADAYARVSGKVGVALVTSGPGVTNALTGIATAYTDSIPMVVISGQVGNSLIGTDAFQEVDTVGITRPCVKHNFLVTDINELAETIKKAFQIAASGRPGPVVVDVPKDVTQAMAKFSYPQEDIFIRSYQPVVQGHIGQIKKAVQMLASAKRPVVYFGGGVVLGNASEELTRFVRMTGAPCTGTLMGLGAYPSGDRQFLGMLGMHGTYEANLAMQNADVVLAVGARFDDRVVSVPSKFFEKAKKVIHIDVDPSSIAKRVKVDIPIVGDVKNVLSEMVALWQKQEFMPSEDALGKWWKTIEEWRSQDCLWFDNGSEIIKPQYVIQKLAEITGNSAIITSDVGQHQMFAAQYYPFERPRQWLNSGGLGTMGVGLPYAIGAKLAAPDQDVFCITGDGSIQMNIQELSTCFQYRIPVNVITLNNGYLGMVRQWQEIYYGGRESETYFDSLPDFVKLAEAYGHIGIRVDKKSDVEGALLEALNQKDRLVFIDFLTDQKQNVMPMVGNGKGLDEMVLPPHMRADEKA

SEQ ID NO: 9411 - protein, 414 aa, Neisseria meningitidis
MSNENRTCSFCGKSKSHVKHLIEGENAFICDECVSNCIEILHEDGNDGTPSESAGGEPEESGKLPTPAEIVANLNDHVIGQEQAKKALAVSVYNHYKRLRHPKAGANVELSKSNILLIGPTGSGKTLLAQSLARKLDVPFVMADATTLTEAGYVGEDVEQIITKLLGKCDFDVEKAQRGIVYIDEIDKISRKGDNPSITRDVSGEGVQQALLKLIEGTVASVPPQGGRKHPNQEFINVDTTNILFICGGAFAGLEKVIRQRTEKGGIGFGASVHSKDENADITKLFGIVEPEDLIKFGLIPELIGRLPVIATLEELDEDALINILTEPKNALVKQYQALFGMENVELEFEEGALRSIARQAMERKTGARGLRSIVERCLLDTMYRLPDLKGLKKVVVGKAVIEEGREPELVFEP

SEQ ID NO: 9412 - protein, 483 aa, Neisseria meningitidis
VNYFPIFANLAGRPVLVVGGGAVAARKISLLLKAGAEVRVAAKHLNAELSALAAENKILWLAEEFRAEHIRTVFLIIAASSDQALNRRVFHLAESCQKPVNVVDDRDHCSFIFPSVIDRNPVQIAVSSSGSAPVLARLLRERLEALLPPSLGDMAEISGRWRDAVKGKLKSVTERRRFWEKQFNGRFAALVKNRQNTLAERELAKQLEQNYQGGFVSLVGAGPGDAGLLTLKGLQEIQQADVVLYDALVSDGILSLVRRDAERIFVGKRARGGRTPQEDTNALMVRLAREGRRVVRLKGGDPFVFGRGGEELETLARHQIPFSVVPGITAAVGATAYAGIPLTHRDYAQSAVFVTGHRKADAPDIEWQTLARSRQTLVIYMGALKAALIAERLQQHGRSPDTPAAVISQGTLPAQKTATGTLANLAELAETAPNPALIVIGEVVGLHEKLAWFGENAKKESNPAEHAYFALDGLGTGQEQQAA

SEQ ID NO: 9413 - protein, 242 aa, Neisseria meningitidis; identical to SEQ ID NO: 201

SEQ ID NO: 9414 - protein, 193 aa, Neisseria meningitidis; identical to SEQ ID NO: 1378

SEQ ID NO: 9415 - protein, 389 aa, Neisseria meningitidis
MRKKLTALVLSALPLAAVADVSLYGEIKAGVEGRNIQLQLTEPLQNIQQPQVTKRKSRIRTKISDFGSFIGFKGSEDLGEGLKAVWQLEQDVSVAGGGASQWGNRESFIGLAGEFGTLRAGRVANQFDDASQAIDPWDSNNDVASQLGIFKRHDDMSVSVRYDSPEFSGFSGSVQFVPAQNSKSAYTPAHFVQNKQNQQNQPPTLVPAVVGKPGSDVYYAGLNYKNGGFAGNYAFKYAKHANVGRDAFELFLLGSGSDEAKGTDPLKNHQVHRLTGGYEEGGLNLALAAQLDLSENADKTKNSTTEIAATASYRFGNAVPRISYAHGFDFIERGKKGENTSYDQIIAGVDYDFSKRTSAIVSGAWLKRNTGIGNYTQINAASVGLRHKF

SEQ ID NO: 9416 - protein, 401 aa, Neisseria meningitidis; identical to SEQ ID NO: 2387

SEQ ID NO: 9417 - protein, 684 aa, Neisseria meningitidis
MTRKILVTSALPYANGSIHLGHMVEHIQTDVWVRFQKLRGHECYYCCADDTHGTPVMLAAQKQGIAPEDMIAKVREEHLADFTDFGIGYDNYYSTHSPENKQFSQDIYRALKANGKIESRVIEQLFDPEKQMFLPDRFVKGECPKCHAQDQYGDNCEVCGTTYSPTELINPYSAVSGAKPELRESEHFFFKLGECADFLKAWTSGNNPHDGKPHLQAEALNKMKEWLGEGEETTLSDWDISRDAPYFGFEIPDAPGKYFYVWLDAPVGYMASFKNLCDRIGVDFDEYFKADSQTEMYHFIGKDILYFHALFWPAMLHFSGHRAPTGVYAHGFLTVDGQKMSKSRGTFITAKSYLEQGLNPEWMRYYIAAKLNSKIEDIDLNLQDFISRVNSDLVGKYVNIAARASGFIAKRFESRLKDVADSALLAKLTAQSEAIAECYESREYAKALRDIMALADIVNEYVDANKPWELAKQEGQDARLHEVCSELINAFTMLTAYLAPVLPQTAANAARFLNLDAITWANTRVTLGEHAINKYEHLMQRVEQKQVDDLIEANKQSIQTTPAPVEDSKYEKVAEQAGFDDFMKIDMRVAKVLNCEAVEGSTKLLKFDLDFGFEKRIIFSGIAAFYPNPAELNGRMVIAVANFAPRKMAKFGVSEGMILSAATADGKLKLLDVDAGAQPGDKVG

SEQ ID NO: 9418 - protein, 206 aa, Neisseria meningitidis
MKPQFITLDGIDGAGKSTNLAVIKAWFERRGLPVLFTREPGGTPVGETLREILLNPETKAGLRAETLMMFAARMQHIEDVILPALSDGIHVVSDRFTDATFAYQGGGRGMPSEDIEILEHWVQGGLRPDLTLLLDVPLEVSMARIGQTREKDRFEQEQADFFMRVRSVYLNRAAACPERYAVIDSNLGLDEVRNSIEKVLDGHFGC

SEQ ID NO: 9419 - protein, 548 aa, Neisseria meningitidis
MKHFHDLPAWPKLWNHFDDSKTLHMREMFEQDPQRAERYWLQVGGLTLDYSKNRINDETMSLLFELAREAGVPERMRQMFHGEKINTTENRAVLHVALRNRTNSPIVVDGEDVMPKVNRVLQRMGEFAHEVRSGSWLGYTNQVITDVVNIGIGGSDLGPLMMCTALKPFGHPRLNMHFVSNVDGSQLRDVLSKVHPETTLFIIASKTFTTQETLTNALTAREWFLNHAGDESAVAKHFVAVSTNQKAVAEFGIDTANMFEFWDWVGGRYSLWSAIGLPIMLYLGEENFIEMLNGAHLMDQHFINTPLERNLPAILALIGIWYINYYGGGSHVIAPYDQHLHRLPKFIQQLDMESNGKQVTLDGKAVGHETSPIIWGETGINGQHAFFQLLHQGTHITPIDLIASLEKRSNLPGHHEILLANVFAQAEAFMRGKTPDEVRAELKAQGMDEARIEELVPHKTFSGNRPTNLILMDKVNPRNMGSLIAMYEHKTFVQGIIWGINSFDQWGVELGKQLAKTILGELTGETGPQKHDSSTERLIRLYLQTNRK

SEQ ID NO: 9420 - protein, 275 aa, Neisseria meningitidis; identical to SEQ ID NO: 67

SEQ ID NO: 9421 - protein, 542 aa, Neisseria meningitidis; identical to SEQ ID NO: 2483

SEQ ID NO: 9422 - protein, 344 aa, Neisseria meningitidis
MSLPAMDAGIYLEETAPRALIEHNNILDNSVGVYLHGSADAMVRENKIVGDATLRVNERGNGVTVWNAPGAQVVGNDISKGRDGIFSNTSTHNTYKNNRFSDLRFAVHYMYTNDSEISGNISVGNNMGYVLMFSERLKVFDNIAVGSRDQGIMLNYVNYSDIHDNIINKAGKCVFAYNANYDKLSANHFENCQIGIHFTAAIEGTSLHDNSFINNESQVKYVSTRFLDWSEGGHGNYWSDNSAFDLNGDGFGDSAYRPNGIIDQIIWRAPVLRLLMNSLAISIVKWAQAQFPAVLPGGVVDSKPLMKPYVPKIQTRYQAMKDELLKEAETRQSEWGRAENGSLN

SEQ ID NO: 9423 - protein, 914 aa, Neisseria meningitidis
MQQQHLFRFNILCLSLMTALPAYAENVQAGQAQEKQLDTIQVKAKKQKTRRDNEVTGLGKLVKSSDTLSKEQVLNIRDLTRYDPGIAVVEQGRGASSGYSIRGMDKNRVSLTVDGVSQIQSYTAQAALGGTRTAGSSGAINEIEYENVKAVEISKGSNSVEQGSGALAGSVAFQTKTADDVIGEGRQWGIQSKTAYSGKNRGLTQSIALAGRIGGAEALLIHTGRRAGEIRAHEDAGRGVQSFNRLVPVEDTNQYAHFVVEEECPNGYAACKDKPKKDVVGKDERQTVSTRDYTGPNRFLADPLSYESRSWLFRPGFRFENKRHYIGGILEHTQQTFDTRDMTVPAFLTKAVFDANSKQAGSLPGNGKYVGNHKYGGLFTNGENGALVGAEYGTGVFYDETHTKSRYGLEYVYTNADKDTWADYARLSYDRQGIGLDNHFQQTHCSADGSDKYCRPSADKPFSYYKSDRVIYGESHRLLQAAFKKSFDTAKIRHNLSVNLGFDRFGSNLRHQDYYHQSANRAYSSKTPPKNGNKNISPNGSKEKPYWVSIGGGNVVTEQICRLGNNTYTDCTPRSINGKSYYAAVRDNVRLGRWADVGAGLRYDYRSTHSDDGSVSTGTHRTLSWNAGIVLKPADWLDLTYRTSTGFRLPSFAEMYGWRAGVQSKAVKIDPEKSFNKEAGIVFKGDFGNLEASWFNNAYRDLIVRGYEAQIKNGKEEAKGDPAYLNAQSARITGINILGKIDWNGVWDKLPEGWYSTFAYNRVHVRDIKKRADRTDIQSHLFDAIQPSRYVVGLGYDQPEGKWGVNGMLTYSKAKEITELLGSRALLNGNSRNTKATARRTRPWYIVDVSGYYTIKKHFTLRAGVYNLLNYRYVTWENVRQTVGGAVNQHKNVGVYNRYAAPGRNYTFSLEMKF

SEQ ID NO: 9424 - protein, 190 aa, Neisseria meningitidis; identical to SEQ ID NO: 5382

SEQ ID NO: 9425 - protein, 89 aa, Neisseria meningitidis
MPSETFPFQTAWFYSNLNRADWNQKHTFAIPAQALPLYAPNPNPPHSRRHCLSDSRTKPRIRLHGSGHISNTGIVLRKTVKSASASQYI

SEQ ID NO: 9426 - protein, 255 aa, Neisseria meningitidis; identical to SEQ ID NO: 3233

SEQ ID NO: 9427 - protein, 319 aa, Neisseria meningitidis; identical to SEQ ID NO: 3269

SEQ ID NO: 9428 - protein, 752 aa, Neisseria meningitidis; identical to SEQ ID NO: 2486

SEQ ID NO: 9429 - protein, 203 aa, Neisseria meningitidis; identical to SEQ ID NO: 352

SEQ ID NO: 9430 - protein, 151 aa, Neisseria meningitidis
MVDAVVKTPEFLPFTSVGIFRFGADITQYKNILETFMYEPPDEFGTEYYESPDSNLLISVEKNKIISIFCYQELYFMGVNIIGLNFEDFKQLFHHPKSYGVDKYYLSNESYPTYVYEFDEIGVQAWEAKGKIVTIIAGGKDNYSTEPYYDE

SEQ ID NO: 9431 - protein, 528 aa, Neisseria meningitidis; identical to SEQ ID NO: 4033

SEQ ID NO: 9432 - protein, 183 aa, Neisseria meningitidis; identical to SEQ ID NO: 1173

SEQ ID NO: 9433 - protein, 658 aa, Neisseria meningitidis
MSKLKTIALTASGLSVCPGFLYAQNTSSHQIGLAIMRLNSSILDLPPTKQYFQSGSLWSELRQGFRMGEVNPELVRRHESKFIASHSYFNRVINRSRPYMYHIANEVKKRNMPAEAALLPFIESAFVTKAKSHVGASGLWQFMPATGRHYGLEKTPVYDGRHDVYAATDAALNYLQYLYGLFGDWPLAFAAYNWGEGNVGRAINRARAQGLEPTYENLRMPNETRNYVPKLLAVRNIIATPQSFGMNISDIDNKPYFQAVEPDRPLDNEAIARLAGITQSELLALNPAFNVPAFIPKSKRKLLLPVASVQTFQSNYLNAAPDSLFSWEVYTPAAKTSLSDISTATGMSIADIKRLNNLNGNLVNAGRSILVAKNGKTLQTASESVVSIDIDNTPDTYRSNMPAGTVNVGIARIRPAAAQTADITVAPLPQKTVRTEPDPLVRIAEPALATAAAQPQTEKQTAMPSETQTATLAQIIPQNDMQAADELMQLVARNNLRRQAEETISAVIGTPDTVAEHNISSSPQHTVAADGKRRARLETRVAKAADGEAEISPLHASIHRVVEGDTLFNIAKRYNVSVADLIVANNIKGNTIQKGQVLRLAQAAPAQTRIEKVSYTARKGDTFKSIAARFNIHIDDIRRLNPNLNTINPGQRVKLIGS

SEQ ID NO: 9434 - protein, 387 aa, Neisseria meningitidis
VHINFSMEYKEFNENYLYKKPFIFKKALDVSSISWKEINELYQRADPTDWQFKFRKGEIIPKEAYVESFNDVGRIRHRFNKTAVYQYLQDGATMVYNRIDNEPFVDSIAKQIAQFAQAQTVVSGYLAFGSSPSYRNHWDTRDVFAVQLIGKKHWTVSAPNFDMPLYMQQAKDMPHITPPTTVDMEVILEAGDILYIPRGWWHNPMPMNCETFHLAIGTFPPNGYNYMEWLMKKIPDIQSIRQNFIDWEHDQKNIDNAAQAVTEMMKNQENYQAFIQDFLGNQRVNTAFNMQIFGNLDNDRLPENSTIKLNSLDNRTIKQGYIIANGIKTNLDNDSQTILQWIADKHSVKLTQLYEFCQNQNINLEKVEKLVFDLTMIDVLECLTDER

SEQ ID NO: 9435 - protein, 97 aa, Neisseria meningitidis; identical to SEQ ID NO: 1875

SEQ ID NO: 9436 - protein, 602 aa, Neisseria meningitidis
MKRQSDELAEKMPKTLPQVRPGTAMSAQALAEAAKLLNEKQRSVADARCAVVAAVLGIKYQYDCSAKAAVAQFLGLLAEGKLDAVTLGNLEKANDRSRSAKVGERTLDGWISAYLKAENATERLVALAPKTTKAVKPIESYGWLPMFMQFHNIPSAPKLAHSYRRFVQWAEAENMPVNDVPNLSMVRRVWDKLPLIMQERGRKTGAAYKSLLPYVKRDWGALKPNDVWIGDGHSFKAKVAHPVHGRPFKPEVTVIIDGCTRFVVGFSVSLAESCVAVSDALRIGVKHFGLPIIYYSDNGGGQTGKTIDHEITGITSRLGIRHETGIAGNPQGRGIIERWWKDNLIEMARQYETFAGAGMDSSTKNLMYRKMESAFNALEKGKDLTEEQQKYLKKLPGWSRFIADVVKCIDEYNNRPHGELPRHPDGGHYSPKAYREMRLEQDGIAPDMLSAQELATMFMPQEVRKVQRGWLDLFNNSYFSVELAEYHKDEVRVSYDLSDASAVNVFDMDGKFITKAQANGNTREAFPTARIDQLAEKRRKGKIKRAENAIKLANAEVNPALEQAAVWDELGHLGGNVIEAEYAVLPKTGTDDGIFLFEADRS

SEQ ID NO: 9437 - protein, 92 aa, Neisseria meningitidis; identical to SEQ ID NO: 8116

SEQ ID NO: 9438 - protein, 329 aa, Neisseria meningitidis; identical to SEQ ID NO: 247

SEQ ID NO: 9439 - protein, 150 aa, Neisseria meningitidis
MNIEVEMKVLDERMADVVPVYATKGSAGLDLRACLDEEVVLQPGETFLVPTGLAIYLANPAYAAVLLPRSGLGHKHGIVLGNLVGLIDSDYQGELKVSLWNRSSEPFTVKPFERIAQMVVVPIVQARFKRVEEFVGSSRGEGGFGSTGLH

SEQ ID NO: 9440 - protein, 324 aa, Neisseria meningitidis
MLENLPYFQRHLPEDLAKVNEVINRAVQSDVALISQIGTYIISAGGKRLRPIMTILAGKAVGYDDGKLYSLAAMVEFIHTSTLLHDDVVDESDLRRGRATANNLFGNAAAVLVGDFLYTRAFQLMVDSDSMRVLEVMADATNIIAEGEVMQLMNIGNTDITEEQYIQVIQYKTAKLFEAAAQVGAILGKASPEHERALKDYGMYVGTAFQIIDDVLDYSGETEETGKNVGDDLAEGKPTLPLIYLMRQGSEQVANDVRTALENADRSYFEKIHDYVVRSDALAYSIGEARKAVDCAVTALDALPDSEVKDAMIQLAKESLVRVS

SEQ ID NO: 9441 - protein, 472 aa, Neisseria meningitidis; identical to SEQ ID NO: 4196

SEQ ID NO: 9442 - protein, 392 aa, Neisseria meningitidis; identical to SEQ ID NO: 2495

SEQ ID NO: 9443 - protein, 130 aa, Neisseria meningitidis
MKERIVGQSGELFCFGQMPVWKAENLPEVLLSGYSSEEGEWVCLNVLQGDVEVRTQDGAAEVWSAESGDCVFAPQQVFSVKLKTDDAEIRLSLYCAAADYFHKKYGMSATHSAVAAARDTVPAGRALDMG

SEQ ID NO: 9444 - protein, 190 aa, Neisseria meningitidis; identical to SEQ ID NO: 917

SEQ ID NO: 9445 - protein, 231 aa, Neisseria meningitidis; identical to SEQ ID NO: 1028

SEQ ID NO: 9446 - protein, 421 aa, Neisseria meningitidis; identical to SEQ ID NO: 3252

SEQ ID NO: 9447 - protein, 467 aa, Neisseria meningitidis
MDTTLKTTLTSVAAAFALSACTMIPQYEQPKVEVAETFKNDTADSGIRAVDLGWHDYFADPRLQKLIDIALERNTSLRTAVLNSEIYRKQYMIERNNLLPTLAANANGSRQGSLSGGNVSSSYKVGLGAASYELDLFGRVRSSSEAALQGYFASTANRDAAHLSLIATVAKAYFNERYAEEAMSLAQRVLKTREETYKLSELRYKAGVISAVALRQQEALIESAKADYAHAARSREQARNALATLINQPIPEDLPAGLPLDKQFFVEKLPAGLSSEVLLDRPDIRAAEHALKQANANIGAARAAFFPSIRLTGTVGTGSAELGGLFKSGTGVWSFAPSITLPIFTWGTNKANLDVAKLRQQAQIVAYESAVQSAFQDVANALAAREQLDKAYDALSKQSRASKEALRLVGLRYKHGVSGALDLLDAERSSYSAEGAALSAQLTRAENLADLYKALGGGLKRDTQTDK

SEQ ID NO: 9448 - protein, 500 aa, Neisseria meningitidis
MAKVLIVPVSAGLDASAAAQAFAKALDAQIFQAVDATAETLLAQGKSDDWFDALVGKVAALDAANLVIEGIAPDADKIYLAGKNVELALSLDAAAVFAVRSDNADADELANRLNLAKQFFAAAPGVLEGFVVDGAAASVAEAAAEKTGLTFFGSSDALKDVSVLAGREAKRLSPAQFRYNLIDFARQADKRIVLPEGAEPRTVQAAAICHEKGIARCVLLAKREEVEAVAKERGISLPDSLEIIDPASLVEQYVGPMCELRKSKGLTPEDARKQLQDTVVLGTMMMAQNDVDGLVSGAVHTTANTIRPALQLIKTAPGASLVSSVFFMLLPNQVLVFGDCAVNPNPTAQQLADIAIQSADSAKAFGIDPKVAMISYSTVNSGSGPDVDTVIEATKLAREKRPDLAIDGPLQYDAATVPGVGKSKAPGSPVAGQATVLVFPDLNTGNCTYKAVQRSANVLSVGPLLQGLRKPVNDLSRGALVEDIVFTIALTAVQAKQMEG

SEQ ID NO: 9449 - protein, 124 aa, Neisseria meningitidis; identical to SEQ ID NO: 2472

SEQ ID NO: 9450 - protein, 1320 aa, Neisseria meningitidis
MSVVLPLRGVTALSDFRVEKLLQKAAALGLPEVKLSSEFWYFAGSEKALDAATVEKLQALLAAQSVEQTPKAREGLHLFLVTPRLGTISPWASKATNIAENCGLAGIERIERGMAVWLEGALTDEQKRQWAALLHDRMTESVLPDFQTASKLFHHLESETFSTVDVLGGGKEALVKANTEMGLALSADEIDYLVENYQALQRNPSDVELMMFAQANSEHCRHKIFNADFILNGEKQPKSLFGMIRDTHNAHPEGTVVAYKDNSSVIEGAKIERFYPNAAENQGYRFHEEDTHIIMKVETHNHPTAIAPFAGAATGAGGEIRDEGATGKGSRPKAGLTGFTVSNLNIPDLKQPWEQDYGKPEHISSPLDIMIEGPIGGAAFNNEFGRPNLLGYFRTFEEKFDGQVRGYHKPIMIAGGLGSIQAQQTHKDEIPEGALLIQLGGPGMLIGLGGGAASSMDTGTNDASLDFNSVQRGNPEIERRAQEVIDRCWQLGGKNPIISIHDVGAGGLSNAFPELVNDAGRGAVFKLREVPLEEHGLTPLQIWCNESQERYVLSILEKDLDTFRAICERERCPFAVVGTATDDGHLKVRDDLFANNPVDLPLNVLLGKPPKTTRTDKTVTPSKKPFHADDIDITEAAYRVLRLPAVAAKNFLITIGDRSVGGMTHRDQMVGKYQTPVADCAVTMMGFNTYRGEAMSMGEKPTVALFDAPASGRMCVGEAITNIAAVNIGDIGNIKLSANWMAACGNEGEDEKLYRTVEAVSKACQALDLSIPVGKDSLSMKTVWQDGEEKKSVVSPLSLIISAFAPVQDVRKTVTPELKNVEDSVLLFVDLGFGKARMGGSAFGQVYNNMSGNAPDLDDTGRLKAFYNVIQQLVAEDKLLAYHDRSDGGLFAVLVEMAFAGRCGLDIDLNLLLAQTFITNHTALSQSLRTEEVKALAEWQETIARTLFNEELGAVIQVRKQDVADIINLFYQQQLHHNVFEIGTLTDENTLIIRDGQTHLISDNLIKLQQTWQETSHQIQRLRDNPACADSEFALIGDNDRSALFANLKFDVNEDIAAPFINSGAKPKIAILREQGVNGQIEMAAAFTRAGFDAYDVHMSDLMAGRFRLADFKMLAACGGFSYGDVLGAGEGWAKSILFHPALRDQFAAFFADPDTLTLGVCNGCQMVSNLAEIIPGAEAWPKFKRNLSEQFEARLSMVHVPKSASLILNEMQGSSLPVVVSHGEGRADFALHGGNISADLGIALQYVDGQNQVTQTYPLNPNGSPQGIAGVTNADGRVTIMMPHPERVYRAAQMSWKPEGWTELSGWYRLFAGARKALG

SEQ ID NO: 9451 - protein, 117 aa, Neisseria meningitidis; identical to SEQ ID NO: 3386

SEQ ID NO: 9452 - protein, 420 aa, Neisseria meningitidis; identical to SEQ ID NO: 2546

SEQ ID NO: 9453 - protein, 469 aa, Neisseria meningitidis
MTSTFPRRLARKIRQTRRLSRKSIAFLFLLAGSALVALTALFFAHLADFALELNAKLVQQYPWFAWVALPLGLPLIAWLTRKFAPFTAGSGIPQVIASLSLPYGAQKTRLIRLGQTLLKIPLTFLGMLFGVSIGREGPSVQVGAAVMGAWGAWCKKHGLAFKGMQENDLMAAGAAGGLAAAFNAPLAGVIFAIEELGRGIMLRWERQILLGVLASGFIQVAIQGNNPYFSGFNGGVLEHIFLWVALSGLVCGAAGGLFGRLLYRGAAAFAPRKIRGFIRNRPLLLAALMGLLLALLGTFYQGKTYGTGYHEAAQALHGIYEAPFGLAAAKWLATVFSYWAGVPGGIFTPSLTIGAVLGEHIAAIADISQGANIIVLICMAAFLAGATQSPITSAVVVMEMTGGQSLLFWMLIACIFASQVSRQFSPRPFYHASGMRFRQRVLQETAAQTGNAPARPQTANSKTGMPSEN

SEQ ID NO: 9454 - protein, 178 aa, Neisseria meningitidis; identical to SEQ ID NO: 1654

SEQ ID NO: 9455 - protein, 942 aa, Neisseria meningitidis
MMDEKLNFSYLFGSNAPYIEELYEAFLENPDAVDEKWKQYFTDLSKQPGTVAVDVAHTPIRESFVTLAKKKIASAVAGGADEAMLKKQVSVLRLISAYRIQGVGAAQLDPLKRIPPRDIEALDPKFHGLSDADMALQFNMGEGDFANRGKLPLSQIISNLKQTYCGHIALEYIYIPNTEERRWVRNYFESVLSTPHYNADQKRRILKEMTAAETLERYLHTKYVGQKRFGVEGGESAIAGLNYLIQNAGKDGVEEVIIGMAHRGRLNVLVNILGKKPGDLFAEFEGRAEIKLPSGDVKYHMGFSSDIATPHGPMHVSLAFNPSHLEIVNPVVEGSARAKQKRLGENGRDKVLPVLIHGDSAFIGLGVNQATFNLSKTRGYTTGGTVHIVINNQIGFTTSDIRDTRSTVHCTDIAKMVSAPVIHVNGDDPERVCFAIQAALDYRKKFHKDIVIDVVCYRKWGHNEGDDPTLTQPMMYKKVSQHPGARALYTEQLIAEGVVTQAEADGYIQAYRDALDKGEHVEQTTLSNFQRTQIDWSKYQGKDWREHIETDLPAADIERLTEKFTAVPEGFALHPTAKRVIEARKAMASGKQAIDWGMAETLAYASLVTKGHGVRISGEDSGRGTFSHRHAVLHDQKREKWDDGTYVPLRHMGEGMGEFLVIDSILNEEAVMAFEYGFACSAPDKLTIWEAQFGDFANGAQVTIDQFLSSGETKWGRLCGLTTILPHGYDGQGPEHSSARVERWLQLCSENNMQVIMPSEASQMFHLLQRQVLGSYRKPLVIFMSKRLLRFKGAMSPLENFTEGSTFRPVIGDTAERASNDSVKRVALCAGQVYYDLEAGRAERKLEDDVAIVRVEQLYPFPYDEVKAELAKYPNAKSVVWAQEEPKNQGAFYQIRHRIEDVISEEQKLSYAGRPSSASPAVGYSSKHIAQLKQLVEDALAL

SEQ ID NO: 9456 - protein, 56 aa, Neisseria meningitidis; identical to SEQ ID NO: 5635

SEQ ID NO: 9457 - protein, 459 aa, Neisseria meningitidis
MAKTLKTLYQCTECGGTSPKWQGKCPHCGEWNTLQESLAAPEPKNARFQSWAADTSTVQSLSAVTATEVPRNPTGMGELDRVLGGGLVDGAVILLGGDPGIGKSTLLLQTIAKMAQSRKVLYVSGEESAQQVALRAQRLELPTEGVNLLAEIRMEAIQTALKQHQPEVVVIDSIQTMYSDQITSAPGSVSQVRECAAQLTRMAKQMGIAMILVGHVTKDGAIAGPRVLEHMVDTVLYFEGDQHSNYRMIRAIKNRFGAANELGVFAMTENGLKGVSNPSAIFLASYRDDTPGSCVLVTQEGSRPLLVEIQALVDDAHGFTPKRLTVGLEQNRLAMLLAVLNRHGGIACFDQDVFLNAVGGVKIGEPAADLAVILAMLSSFRNRPMPEKTVVFGEIGLSGEVRPVARGQERLKEAEKLGFKRAIVPKANMPRNAKEFPNLKIYGVSSLQEAIDICREDRD

SEQ ID NO: 9458 - protein, 160 aa, Neisseria meningitidis
MTNIRIGQGYDVHQLTEGRKLILGGVEIPFEKGLLGHSDADALLHAVTDALLGAAGLGDIGSHFPDTAAEFKDADSRALLRDAYRSVQAKGWHVVNVDTTVIAQKPKLAPHIPQMRANIAADLGIDISCVNIKGKTNEKLGYLGRMEGIEAQAAVLLVRI

SEQ ID NO: 9459 - protein, 346 aa, Neisseria meningitidis
MNTPIPFSERLIRWQKQHGRHHLPWQVKNPYCVWLSEIMLQQTQVATVLDYYPRFLEKFPTVQTLAAAPQDEVLSLWAGLGYYSRARNLHKAAQQVVRQFGGTFPSERKDLETLCGVGRSTAAAICAFSFNRRETILDGNVKRVLCRVFARDGNPQDKKFENSLWTLAESLLPSENADMPAYTQGLMDLGATVCKRTKPLCHQCPMADICEAKKQNRTAELPRKKTAAEVPTLPLYWLIVRNRDGAILLEKRPAKGIWGGLYCVPCFESLNGLSDFAAKFSLTMADMDEQTALTHRLTHRLLMITPFEGQMPSESPSDGIWIKPAHLKDYGLPKPLEIYLNGNRLE

SEQ ID NO: 9460 - protein, 114 aa, Neisseria meningitidis; identical to SEQ ID NO: 1818

SEQ ID NO: 9461 - protein, 180 aa, Neisseria meningitidis
  misc_feature 175, 176: 'Xaa' is any amino acid
VKPLRRLTNLLAACAVAAAAFGQPALAADLAQDPFITDNAQRQHYEPGGKYHLFGDPRGSVSDRTGQINVIQDYTHQMGNLLIQQAAIQGNLGYTVRFSGHGHEEHAPFDNHAADSASKEQGNVDEGFTVYRLNWEGHEHHPADAYDGPKGGNYPKPTGARDEYTYHVNGTARSXXHTLN

SEQ ID NO: 9462 - protein, 291 aa, Neisseria meningitidis
MAYLLISIVFSVSVSILLKMARKKKIDIAQAVAVNYVVAVILTLLVLKPDIGNIGAFLPTWPLFAALGVLLPSVFVIMGKSVEAAGIVKSDAAQRLSLFLPIVAALTLFGEKLSEGKLIGLCLAFAALFCLLWKHGGGKKSGSAWRQAALLLGVWAGYGIIDILFKQLAKSGTAFSGNLLVAFVLAGVLMFACLFAKSVRWRVESVVGGILLGGLNFMNIVTYITAHQMMKDNPTLVFAGMNIGVIVLGTLSGALFFKEKINTINTAGIVLALCSIACLFYWAEVKALFGI

SEQ ID NO: 9463 - protein, 264 aa, Neisseria meningitidis
MTLPMQETRFSILLDELAAKQKAAIAPHLLADGSKVWIRKAGRHNARWRYALLGMVARYLKLGVLKPVPSLGGEPAIATESKRLYELRAARIAVPELLAVRKNALMFGNLEGIPLDTQIRQEAEAGKADAWLAGLEAIARVHKKQQFLSQAFARNMMSDGKNISFLDFEDDPSEVLTIAQCQARDWLCYIHSTALILKNGGLLEAAAEKWGGVLSDQPAEIQKLIAATVKPILPIRRLEHPRWGRDALRLAASISLISLADMPP

SEQ ID NO: 9464 - protein, 242 aa, Neisseria meningitidis; identical to SEQ ID NO: 1952

SEQ ID NO: 9465 - protein, 179 aa, Neisseria meningitidis; identical to SEQ ID NO: 8483

SEQ ID NO: 9466 - protein, 94 aa, Neisseria meningitidis; identical to SEQ ID NO: 1124

SEQ ID NO: 9467 - protein, 151 aa, Neisseria meningitidis
MDLRKLKKLIDLVEESGIAEIEVTEGEEKVRITRTIAAAPVYAAPVPAAAPAVTPAAAPVAASAPAAAPAARDLSDAQKSPMVGTFYRAPGPNAAPFVEVGQQVKVGDTLCIIEAMKLMNEIEAEKSGTVKEILVENGTPVEFGEPLFIIG

SEQ ID NO: 9468 - protein, 184 aa, Neisseria meningitidis; identical to SEQ ID NO: 4537

SEQ ID NO: 9469 - protein, 241 aa, Neisseria meningitidis; identical to SEQ ID NO: 400

SEQ ID NO: 9470 - protein, 163 aa, Neisseria meningitidis
MIFKQDQNYWAVFYANEEALIVQTCSGLGLTAIDHLYPPHILPLDTDNETLGTTVLQALANSRTLDNEAERIDFLKQENFKPRYEDWVAKLCGNLGYKTKRALFKNMMSVDIWLHNGCLKISPSRHVKLEAWDAIDADDVILSLDNSPEEIGAGLKLALSRCR

SEQ ID NO: 9471 - protein, 433 aa, Neisseria meningitidis; identical to SEQ ID NO: 2404

SEQ ID NO: 9472 - protein, 123 aa, Neisseria meningitidis
MNKTLSILPVAILLGGCAAGGGNTFGSLDGGTGMGGSIVKMAVGSQCRAELDKRSEWRLTALAMSAEKQAEWENKICACVAQEAPERMIGNDVMQMLDPSTRNQALAALTAKTVSACFKHLYR

SEQ ID NO: 9473 - protein, 167 aa, Neisseria meningitidis; identical to SEQ ID NO: 2666

SEQ ID NO: 9474 - protein, 239 aa, Neisseria meningitidis
MKDDVLKQQAHAAIQKKLGYAFRDISLLRQALTHRSHHAKHNERFEFVGDSILNYTVARMLFDAFPKLTEGELSRLRASLVNEGVLAEMAAEMNVGDGLYLGAGELKSGGFRRPSILADAMEAMFAAVSFDADFNTAEKVVRHLFADRVRRADFQNQAKDGKTALQEALQARRFALPKYRIEEQIGHANDSMFVVSCDLGELGFVCRAKGTSRKAAEQEAAKEALKWLEEKLPLKKKKK

SEQ ID NO: 9475 - protein, 247 aa, Neisseria meningitidis; identical to SEQ ID NO: 2441

SEQ ID NO: 9476 - protein, 163 aa, Neisseria meningitidis
MAGPIFVVIASVAMFFVAQQHATDLVTDDYYKDGKHIDIQLHRDEEAVRRHIGVQVLISPDMNAAKVFVGGEFDGKQPLNLLLMHPTRKADDQTVALKPVGSAQNGRAEYEAVFKTLSPTNHWYVRVEDAAGVWRVENKWITSQGNAVDLTPMDKLFNNTESK

SEQ ID NO: 9477 - protein, 174 aa, Neisseria meningitidis
MKKALATLIALALPAAALAEGASGFYVQADAAHAKASSSLGSAKGFSPRISAGYRINDLRFAVDYTRYKNYKAPSTDFKLYSIGASAIYDFDTQSPVKPYLGARLSLNRASVDLGGSDSFSQTSIGLGVLTGVSYAVTPNVDLDAGYRYNYIGKVNTVKNVRSGELSVGVRVKF

SEQ ID NO: 9478 - protein, 209 aa, Neisseria meningitidis; identical to SEQ ID NO: 1965

SEQ ID NO: 9479 - protein, 404 aa, Neisseria meningitidis
MDKFPKSAKLDHVCYDIRGPVHKKALQLEEEGNKILKLNIGNPAPFGFEAPDEILVDVIRNLPTSQGYCDSKGLYSARKAIVHYYQTKGLRDITVDDVYIGNGVSELITMSMQALLNDGDEILIPAPDYPLWTAAATLAGGTVRHYLCDEENGWFPNLADMEAKITPKTKAIVVINPNNPTGAVYSREILLEIAELARKHGLIIFADEIYDKILYDGAVHHHIAALAPDLLTVTFNGLSKSYRVAGFRQGWMVLNGPKHHAKGYIEGLDMLSSMRLCANTPMQHAIQTALGGYQSINEFILPGGRLLEQRNRAWELVSQIPGVSCVKPMGAMYMFPKIDTEMYRIHDDMKFVYDLLVREKVLLVQGTGFNWIKPDHFRIVTLPYVHQIEEAMGRLARFLQTYRQ

SEQ ID NO: 9480 - protein, 274 aa, Neisseria meningitidis
MDGTQSKPKFFERLISRLAGEPDSAEDVLTLLRQAHEQEVFDADTLLRLEKVLDFSDLEVRDAMITRSRMNVLKENDSIERITAYVIDTAHSRFPVIGEDKDEVLGILHAKDLLKYMFNPEQFHLKSILRPAVFVPEGKSLTALLKEFREQRNHMAIVIDEYGGTSGLVTFEDIIEQIVGEIEDEFDEDDSADNIHAVSSERWRIHAATEIEDINTFFGTEYSSEEADTIGGLVIQELGHLPVRGEKVLIGGLQFTVARADNRRLHTLMATRVK

SEQ ID NO: 9481 - protein, 117 aa, Neisseria meningitidis; identical to SEQ ID NO: 3438

SEQ ID NO: 9482 - protein, 336 aa, Neisseria meningitidis
MNDNTHTLPPRRLSVAPMLDWTDRHYRYMARQITRNTWLYSEMVNAGAIVYGDKDRFLMFNEGEQPVALQLGGSDPSDLAKAAKAAEEYGYNEVNLNCGCPSPRVQKGAFGACLMNEVGLVADCLNAMQDAVGIPVTVKHRIGVDRQTEYQTVADFVGTLRDKTACKTFIVHARNAWLDGLSPKENRDVPPLKYDYVYRLKQEFPGLEIIINGGITTNEAIAGHLQHVDGVMVGREAYHNPMVMREWDRLFYGDTRSPIEYADLVQCLYTYSQAQIQAGRGTILRHIVRHSLGLMHGLKGARTWRRMLSDATLLKDNDGSLILEAWKEVERANTRE

SEQ ID NO: 9483 - protein, 612 aa, Neisseria meningitidis; identical to SEQ ID NO: 3627

SEQ ID NO: 9484 - protein, 415 aa, Neisseria meningitidis; identical to SEQ ID NO: 2944

SEQ ID NO: 9485 - protein, 280 aa, Neisseria meningitidis; identical to SEQ ID NO: 431

SEQ ID NO: 9486 - protein, 349 aa, Neisseria meningitidis; identical to SEQ ID NO: 328

SEQ ID NO: 9487 - protein, 305 aa, Neisseria meningitidis
MSVYTSVSDDEMRGFLSGYDLGEFVSLQGIAQGITNSNYFLTTTSGRYVLTVFEVLKQEELPFFLELNRHLSMKGVAVAAPVARKDGRLDSVLAGKPACLVACLKGSDTALPTAEQCFHTGAMLAKMHLVAADFPLEMENPRYDAWWTEACARLLPVLSQDDAALLCSEIDALKDNLGNHLPSGIIHADLFKDNVLLDGGQVSGFIDFYYACRGNFMYDLAIAVNDWARTADNKLDEALKKAFIGGYEGVRPLSAEEKAYFPTAQRAGCIRFWVSRLLDFHFPQAGEMTFIKDPNAFRNLLLSLD

SEQ ID NO: 9488 - protein, 158 aa, Neisseria meningitidis; identical to SEQ ID NO: 2471

SEQ ID NO: 9489 - protein, 456 aa, Neisseria meningitidis
MPQNTLNIVILAAGKGTRMYSKMPKVLHRIGGKPMLGRVIDTAAALNPQNICVVIGHGKDQVLNAVKRDVVWVEQTEQLGTGHAVKTALPHLSAEGRTLVLYGDVPLIDVKTLKTLLEAAGNEVGLLTDVPADPTGLGRIIRDGNGSVTAIVEEKDADAAQKAVKEINTGILVLPNAKLENWLNSLSSNNAQGEYYLTDLIAKAVADGIKVHPVQVHTSYLAAGVNNKLQLAELERIFQTEQAQELLKAGVTLSDPARFDLRGRLKHGQDVVIDVNCIFEGEVEIGDNVEIGANCVIKNAKIGANSKIAPFSHLEDCEVGENNRIGPYARLRPQAKLAADVHIGNFVEIKNAAIGKGTKANHLTYIGDAEVGSKTNFGAGTIIANYDGVHKHKTVIGNEVRIGSNCVLVAPVTLGNKVTTGAGSAITRNVEDGKLALARARQTVIEGWVRPEKDKQ

SEQ ID NO: 9490 - protein, 397 aa, Neisseria meningitidis
MYRHIEYYPGDPILSLVETFKNDPRPEKVNLSIGIYFDDEGKMPVLESVSRAETARAATPVPSPYLPMEGLDTYRSAVQHLLFGKDNPALAQGRIATVQTLGGSGALKVGADFLHRWFPEARAYVSDPTWDNHRGIFESAGFEVGTYPYYDPAAVGVKFDEMTAFFNTLPENSVLILHPCCHNPTGVDMSEQQWDEVLHIIKTRKLIPFMDIAYQGFGGDLDSDAYAVRKAVEMELPLFVSNSFSKNLSLYGERVGGLSVVCPNKEEADLVFGQLKFTVRRIYSSPPAHGAYIAADVMNSPELYALWQNEVYMMRDRIRAMRQKLYDVLTAQIPDRDFTYFIKQRGMFGYTGLSVEQVRRLRDEFAVYLLDSGRMCVAGLNTSNTDYVARAFAEVLK

SEQ ID NO: 9491 - protein, 284 aa, Neisseria meningitidis; identical to SEQ ID NO: 506

SEQ ID NO: 9492 - protein, 502 aa, Neisseria meningitidis; identical to SEQ ID NO: 2442

SEQ ID NO: 9493 - protein, 602 aa, Neisseria meningitidis
MRTNYCGLISEQYLDQTVTVKGWVHRRRDHGGVIFIDLRDREGIVQVVIDPDTPEAFAAADSARNEYVLSITGRVRNRPEGTTNDKMISGKIEILAKEIEVLNAAATPPFQIDDENISENVRLTNRVIDLRRPVMQRNLRLRYQVAMGVRRYLDAQGFIDIETPMLTRSTPEGARDYLVPSRVHPGEFFALPQSPQLFKQLLMVAGFDRYYQITKCFRDEDLRADRQPEFTQIDLETSFLNEDEIMDITEGMAKQVFKDALNVDLGDFPRMPYAEAMFYYGSDKPDMRINLKFTELTDLMKTEEFKVFRGAADMKGGRVVALRVPNGAKFSRKEIDEYTKFVGIYGAKGLAYIKVNDVGNLSNGEDSGLQSPIVKFLSENALKEIIERTGTQNGDIIFFGADKTKVVNEAIGALRIKVGLEHGKDNGYFTDEWKPLWVVDFPMFEYDEEADRYVAVHHPFTAPKEGHEDLMVSDPANCLARAYDMVLNGWEIGGGSIRIHRADVQEKVFAALKISPEEQQEKFGFLLDNLKFGAPPHGGLAFGLDRLVTLMTGAESIRDVIAFPKTQRAQCLLTNAPNSVDDKQLRELSLRLRQKAAETKEA

SEQ ID NO: 9494 - protein, 98 aa, Neisseria meningitidis; identical to SEQ ID NO: 2058

SEQ ID NO: 9495 - protein, 99 aa, Neisseria meningitidis; identical to SEQ ID NO: 3406

SEQ ID NO: 9496 - protein, 447 aa, Neisseria meningitidis; identical to SEQ ID NO: 2854

SEQ ID NO: 9497 - protein, 630 aa, Neisseria meningitidis; identical to SEQ ID NO: 1381

SEQ ID NO: 9498 - protein, 208 aa, Neisseria meningitidis
MYTGERFNTYSHLSGLILAAAGLALMLLKTIGHGDGYRIFSVSVYGISLLLLYLSSSLYHGIAAGKLKSILKKTDHCMIYVLIAGSYTPFALVSLRNGPGWTVFSLSWLLAAAGIAQELTIGRKSEKRLLSIAIYVVMGWMVLAVMKSLTASLPLAGLAWLAAGGMLYSVGIYWFVNDEKIRHGHGIWHLFVLGGSITQFVSVYGYVI

SEQ ID NO: 9499 - protein, 414 aa, Neisseria meningitidis
MTLFCEQVPYPRLAEAFGTPLYVYSQSALTEAFEHYQTAFAELSPLVCYAVKANGNLSIIKHFASLGSGFDIVSGGELARVLAAGGDAAKTIFSGVGKSEAEIEFALNAGVKCFNMESIPEIDRIQKVAARLGKTAPVSLRVNPDVDAKTHPYISTGLKANKFGIAYADALEAYRHAAQQPNLKIIGIDCHIGSQLTDLSPLVEACERILILVDALAAEGIVLEHLDLGGGVGIVYQDEDVPDLGAYAQAVQKLIGTRRLKLILEPGRSLVGNAGSLLTRVEFVKYGEEKNFVMVDAAMNDLMRPALYDAYHHIEAVETKDIATLTANIVGPICETGDFLGKDRTIACEEGDLLLIRSAGAYGASMASNYNARNRAAEVLVNGGGYKLIRRRETLEQQMANELACLQAEHQNAV

SEQ ID NO: 9500 - protein, 123 aa, Neisseria meningitidis; identical to SEQ ID NO: 3099

SEQ ID NO: 9501 - protein, 418 aa, Neisseria meningitidis; identical to SEQ ID NO: 1968

SEQ ID NO: 9502 - protein, 176 aa, Neisseria meningitidis; identical to SEQ ID NO: 2300

SEQ ID NO: 9503 - protein, 200 aa, Neisseria meningitidis
MFNIPAVAVSYLIGSLSFAVIVSKYYGMDDPRTYGSGNPGATNVLRSGKKKAAVLTLLGDAAKGLVAVLLARVLQEPLGLSDSAIAAVALAALVGHMWPVFFGFKGGKGVATALGVLLALSPATALVCALIWLVMAFGFKVSSLAALTATIAAPLAALFFMPHLSWIWATLLIALLVLFRHKSNISNLLKGKEGKIGEKR

SEQ ID NO: 9504 - protein, 1568 aa, Neisseria meningitidis
MKTKRFKINAISLSIFLAYALTPYSEAALVRDDVDYQIFRDFAENKGKFFVGATDLSVKNKQGQNIGNALSNVPMIDFSVADVNRRTLTVIDPQYAVSVKHVKGDEISYYGHHNGHLDVSNDENEYRSVAQNDYEPNKNWHHGNQGRLEDYNMARLNKFVTEVAPIAPTSAGGGVETYKDKNRFSEFVRVGAGTQFEYNSRYNMTELSRAYRYAIAGTPYQDVNVTSNLNQEGLIGFGDNSKHHSPEKLKEVLSQNALTNYAVLGDSGSPLFAYDKQEKRWVFLGAYDYWAGYQKNSWQEWNIYKKEFADKIKQRDNAGTIKGNGEHHWNITFGTNSKIGSTAVRLAGNEKDANNGQNVTFEDNGTLVLDQNINQGAGGLFFKGDYTVKGINNDITWLGAGIDVTDGKKVVWQVKNPNGDRLAKIGKGTLEINGTGVNQGQLKVGDGTVILNQQADADKKVQAFSQVGIVSGRGTLVLNSSNQINPDNLYFGFRGGRLDANGNDLTFEHIRNVDEGARIVNHNTSHASTITLTGKSLITNPNSLSVHSIQNDYDEDDYSYYYRPRRPIPQGKDLYYKNYRYYALKSGGSVNAPMPENGVTENNDWVFMGYTQEEAKKNAMNHKNNQRISGFSGFFGEENGKGHNGALNLNFNGKSAQNRFLLTGGTNLNGKISVTQGNVLLSGRPTPHARDFVNKSSARKDAHFSKNNEVVFEDDWINRTFKAAEIAVNQSASFSSGRNVSNITANITATDNAKVNLGYKNGDEVCVRSDYTGYVTCNTGNLSDKALNSFGATQINGNVNLNQNAALVLGKAALWGQIQGQGNSRVSLNQHSKWHLTGDSQVHNLSLADSHIHLNNASDAQSANQYHTLKINHLSGNGHFHYLTHLAENLGDKVLVKESASGHYQLHVQDKTGEPNQEGLNLFDASSVQDRSRLSVSLANNHVDLGALRYTIKTENGITRLYNPYAENRRRVKPVPSPATNTASQAQTDSAQIAKPQNIVVAPPSPQANQAEEAKRQQAKAEQVKRQQAEAERKSAELAKQKAEAEREARELATRQKAEQERSSAELARRHEKEREAAELSAKQKVEAEREAQALAVRRKAEAEEAKRQAAELARQQEEARKAAELAAKQKAETERKAAEIAEQKAEAEREAAELAKQKAEEEGRQAAQSQPKRRNRRAIPPELSSDATTRALPRIARNSNPDASDYEEIPLDALEDEDVSESVDTSDKQPQDNTELHEKVETVSLQPRAAQPRAQAAAQPQAQAAAQPQAQAVAQADAVSTNTNSALSDAMASTQSILLDTGASLTRHIAQKSRADAEKNSVWMSNIGYGRDYASAQYRRFSSKRTQTQIGIDRSLSENMQIGGVLTYSDSQHTFDQASGKNTFVQANLYGKYYLNDAWYVAGDIGAGSLRSRLQTQQKANFNRTSIQTGLTLGNTLKINQFEIVPSAGIRYSRLSSADYKLGNDSVKVSSMSVKTLTAGLDFAYRFKVGNLTVKPLLSAAYFANYGKGGVNVGGNSFAYKADNQQKYSAGAALLYRNVTLNVNGSITKGKQLEKQKSGQIKIQIRF

SEQ ID NO: 9505 - protein, 706 aa, Neisseria meningitidis
MFNKHVKTFQYGNQTVTLETGEIARQAAAAVKVSMGDTVVLVAVTTNKEVKEGQDFFPLTVDYLERTYAAGKIPGGFFKREGKQSEKEILTSRLIDRPIRPLFPEGFYHDIQIVAMVVSVDPEIDSDIPAMLGASAALVLSGVPFAGPIGAARVGYVNGVYVLNPTKAELAKSQLDLVVAGTSKAVLMVESEAKILPEDVMLGAVVYGHDQMQVAINAINEFADEVNPELWDWKAPETNEELVAKVRGIAGETIKEAFKIRQKQARSAKLDEAWNAVKEALITEETDTLAANEIKGIFKHLEADVVRSQILDGQPRIDGRDTRTVRPLNIQTSVLPRTHGSALFTRGETQALAVATLGTSRDEQIIDALSGEYTDRFMLHYNFPPYSTGEVGRMGAPKRREIGHGRLAKRALLAVLPKPEDFSYTMRVVSEITESNGSSSMASVCGGCLSLLSAGVPLKAHVAGIAMGLILEGNKFAVLTDILGDEDHLGDMDFKVAGTTEGVTALQMDIKIQGITKEIMQIALAQAKEARLHILDQMKAAVAGPQELSAHAPRLFTMKINQDKIREVIGKGGETIRSITAETGTEINIAEDGTITIAATTQEAGDAAKKRIEQITAEVEVGKVYEGTVVKILDNNVGAIVSVMPGKDGLVHISQIAHERVRNVGDYLQVGQVVNVKALEVDDRGRVRLSIKALLDAPAREENAAE

SEQ ID NO: 9506 - protein, 93 aa, Neisseria meningitidis; identical to SEQ ID NO: 2125

SEQ ID NO: 9507 - protein, 311 aa, Neisseria meningitidis
MNPKKLVIASRESLLAMWQAKHIQGRLKALYPDCEVEILGMTTRGDQILDKTLSKVGGKGLFVKELEQALYDGRADLAVHSIKDVPMDLPEGFALAAIGERANPFDAFVSNQYARLEEMPKGAVVGTSSLRREAQLRARYPHLLIKPLRGNVQTRLSKLDNGEYDAIILAAAGLQRLKLDGRIRMILSESDSLPAAGQGALGIEIAAHREDLYEVLKPLNHDTTHACVTAERALARALGGSCQVPLAAYCTEENGLLTLRGLVGHPDGSVVLQADAQAPAEYADALGRAVAKKLADDGARELIGAVLNTEN

SEQ ID NO: 9508 - protein, 200 aa, Neisseria meningitidis; identical to SEQ ID NO: 321

SEQ ID NO: 9509 - protein, 92 aa, Neisseria meningitidis; identical to SEQ ID NO: 510

SEQ ID NO: 9510 - protein, 261 aa, Neisseria meningitidis
MSRIRQAFAALDGGKALIPYITVGDPDIRTTLALMHGMVANGADILELGVPFSDPMADGPVIQRAAERALANGISLRDVLDVVRKFRETDTQTPVVLMGYLNPVHKMGYREFAQEAAMAGVDGVLTVDSPVETIDPLYRELKDNGVDCIFLIAPTTTEDRIKTIAELAGGFVYYVSLKGVTGAASLDTDEVSRKIEYLHQYIDIPIGVGFGISNAENARKIGRVADAVIVGSRIVKEIENNAGNEAAAVGALVKELKDAVR

SEQ ID NO: 9511 - protein, 502 aa, Neisseria meningitidis
MQTDCDVLIAGNGLAALTLALSLPESFRIVILCKNRLDDTASHHAQGGIAAAWSREDDIEKHVADTLEAGAGLCNEAAVRTILSQGKPAIEWLLAQGVAFDRNYDGLHLTREGGHTCRRIAHVADYTGEAVMQSLIAQIRRRPNIRVCERQMALDIQTESGAACGLTVLDCRTQETHRIRARHTVLAGGGLGQIYAATTTPPECTGDAIAMAIRAGCAVENLEFIQFHPTGLARPSENGRTFLISEAVRGEGGILTNQAGERFMPHYDRRAELAPRDIVARAIAAETAKQTQDFVSLDISHQPAAFVRQHFPSIHRHCLSQCGLDITRQAIPVRPVQHYTCGGIQTDPSGRTSLPQLYALGETACTGLHGANRLASNSLLECVVTARLAAQTIADGQAFQTVPSKRSSENTSAEADIFSDGIQNTFSRPALQAFNQRHLGILRNDTGLRRAIAQLRLWKQNQTEPHTVSEYENRNLLECSLAVAQAAYRRRQNIGAHFNSDC

SEQ ID NO: 9512 - protein, 144 aa, Neisseria meningitidis
MTEPKHEMPTEEQVAARKKAKAKIRTIRIWAWVILALLASTALLSQCAMSKPQAKQKIVESCVKNIPFAEKWQNDLRARGLDSNNTRLTVDYCKCMWEQPLDRLSEKQIRSFGKLGAQEQLDLLGGANAFEARDKQCVADLKSE

SEQ ID NO: 9513 - protein, 154 aa, Neisseria meningitidis
MQGNQAVVDYMNELLSGELAARDQYFIHSRLYSEWGYTKLFERLNHEMEEETTHAEDFIRRILMLGGTPKMARAELNIGTDVVSCLKADLQTEYEVRDALKKGIKLCEEAQDYVTRDLMVAQLKDTEEDHAHWLEQQLRLIELIGEGNYYQSQL

SEQ ID NO: 9514 - protein, 361 aa, Neisseria meningitidis; identical to SEQ ID NO: 2308

SEQ ID NO: 9515 - protein, 161 aa, Neisseria meningitidis
LLIQSALCFEAEAHEYTNIQEMEWVSLFSDPQRDDDSLITLKDEKITVKNYIVPWWKKGENFRKLELITTGKNDNGNLTVNGIYGIQSFADSQLGYTPELLVKSNNDILFKNNLQSVDVKPHSGNIHLDAKGKIQFNLNVPDVDGVQDVASGKKYRQTIVP

SEQ ID NO: 9516 - protein, 716 aa, Neisseria meningitidis; identical to SEQ ID NO: 2479

SEQ ID NO: 9517 - protein, 175 aa, Neisseria meningitidis; identical to SEQ ID NO: 5

SEQ ID NO: 9518 - protein, 141 aa, Neisseria meningitidis; identical to SEQ ID NO: 7

SEQ ID NO: 9519 - protein, 83 aa, Neisseria meningitidis
MGSIEQRLEYLEEANDVLRMQNHVLSTAFKALIRALPADTAEVALESIQLAFEDALAELSYEDSPHTDLFHDVTYAFFREKER

SEQ ID NO: 9520 - protein, 428 aa, Neisseria meningitidis
MTAQHQAPLRFITAGSVDDGKSTLIGRLLYDSKALLSDQIKTLESGKSKGLKETIDFSILTDGLEAEREQGITIDVAYRYFSTAKRKFIIADTPGHEQYTRNMVTGASTASAAVVLVDASQLDFGAQPLQLLPQTKRHSAILRQLNCPHIVVAVNKMDLLDYSEDKFNAIVEAYRRLAEQLGLKDVHFVPVSALLGDNLVYPGGNMPWYRGEPLLVILENLPGADETGRSAADFYFPVQLVVRQDADKADDFRGYQGRIERGSVAVGQTVRIEPNGLTAEVSEIITPKGEVAQAFAGEAATLRLDRDIDVSRGDLFVDKNSPLAPQKHLEATLCWFDERPLNTARKYLLKHGTQTVPAKVGEIESVLDVRTLEQEAGAESLKMNDIAKVRINLQKPVTATPYAENTAAGSFILIDEATYGTVAAGMIL

SEQ ID NO: 9521 - protein, 128 aa, Neisseria meningitidis; identical to SEQ ID NO: 605

SEQ ID NO: 9522 - protein, 119 aa, Neisseria meningitidis
  misc_feature 115, 116, 117: 'Xaa' is any amino acid
VEGYIEKLHITPANAHECKHLPPLLEGIAEGTTVYADKGYDSAENRQHLEERQLLDGIMRKACRNRPLSEAQTKRNRYLSKTRYVVEQSFGTLHRKFRYARSTYFGLIKVSAQSXXXHT

SEQ ID NO: 9523 - protein, 94 aa, Neisseria meningitidis; identical to SEQ ID NO: 1124

SEQ ID NO: 9524 - protein, 377 aa, Neisseria meningitidis; identical to SEQ ID NO: 2272

SEQ ID NO: 9525 - protein, 91 aa, Neisseria meningitidis; identical to SEQ ID NO: 5452

SEQ ID NO: 9526 - protein, 85 aa, Neisseria meningitidis; identical to SEQ ID NO: 4382

SEQ ID NO: 9527 - protein, 589 aa, Neisseria meningitidis
MNKIYRIIWNSALNAWVVVSELTRNHTKRASATVATAVLATLLSATVQANATDTDEDEELESVVRSALVLQFMIDKEGNGEIESTGDIGWSIYYDDHNTLHGATVTLKAGDNLKIKQSGKDFTYSLKKELKDLTSVETEKLSFGANGNKVNITSDTKGLNFAKETAGTNGDPTVHLNGIGSTLTDTLAGSSASHVDAGNQSTHYTRAASIKDVLNAGWNIKGVKTGSTTGQSENVDFVRTYDTVEFLSADTKTTTVNVESKDNGKRTEVKIGAKTSVIKEKDGKLVTGKGKGENGSSTDEGEGLVTAKEVIDAVNKAGWRMKTTTANGQTGQADKFETVTSGTKVTFASGNGTTATVSKDDQGNITVKYDVNVGDALNVNQLQNSGWNLDSKAVAGSSGKVISGNVSPSKGKMDETVNINAGNNIEITRNGKNIDIATSMTPQFSSVSLGAGADAPTLSVDDEGALNVGSKDANKPVRITNVAPGVKEGDVTNVAQLKGVAQNLNNRIDNVDGNARAGIAQAIATAGLAQAYLPGKSMMAIGGGTYRGEAGYAIGYSSISDTGNWVIKGTASGNSRGHFGTSASVGYQW

SEQ ID NO: 9528 - protein, 268 aa, Neisseria meningitidis
MNMKKWIAAALACSALALSACGGQGKDAAAPAANPDKVYRVASNAEFAPFESLDSKGNVEGFDVDLMNAMAKAGNFKIEFKHQPWDSLFPALNNGDADVVMSGVTITDDRKQSMDFSDPYFEITQVVLVPKGKKISSSDDLKNMNKVGVVTGYTGDFSVSKLLGNDNPKIARFENVPLIIKELENGGLDSVVSDSAVIANYVKNNPTKGMDFVTLPDFTTEHYGIAVRKGDEATVKMLNDALEKVRESGEYDKIYAKYFAKEDEQAAK

SEQ ID NO: 9529 - protein, 302 aa, Neisseria meningitidis
MIAWDMFSLKKNGSHKVGVKEALAWSGLWVAVSCLFAGWLYFELAGNLGYGAAVAKEKVLEFFTGYILEKSLAVDNIFVFLMIFGYFKVAPQFQHRVLLYGVLGALVLRTVMIFVGAALVRQFEWILYLFGAFLLYTGIHMMKPEGDEEEDLANSRLLNAVKKVVPVGTEFHGEKFFTVENGKKIATPLFLVLVMIELSDVVFAVDSIPAVFAVTTDPFIVLTSNIFAILGLRAMYFLLADVAERFIFLKYGLAFVLGFIGVKMLVMHWVHIPISVSLSVVFGALGASILTSLIYTKKQPDK

SEQ ID NO: 9530 - protein, 236 aa, Neisseria meningitidis; identical to SEQ ID NO: 2130

SEQ ID NO: 9531 - protein, 421 aa, Neisseria meningitidis
MSEALAKETLNPFEIARKQVKTACDRLKTDPAVYEILKSPTRVLEVNFPVKLDDGTVKTFTGYRSQHNNAVGPYKGGVRFHPGVNLDEVKALSIWMTIKCCVAGIPYGGGKGGVTLNPRDYSEAELERIARAYSEAISPLIGEKIDIPAPDVNTNGKIMSWMVDAYENVVKHSAPGVFTGKPVEFGGSLARTEATGYGVNLAAVQALEKLGKDVKGATYAIQGFGNVGYHTGYYAHQSGAKVVAVSTVDVAIYNENGLDMEAIIKEFQTKGFITNEAGYGKEITNAELLALEVDVLAPCALENQLTSENAGKVRATIVVEGANGPTTPEADVILRQNGVLVVPDILANCGGVVVSYFEWVQNLQGYYWEFDEVQEKETVVLRRAFRDIWNLAQEYDVDLRTASYMMSIRRVEKAMKLRGWY

SEQ ID NO: 9532 - protein, 468 aa, Neisseria meningitidis; identical to SEQ ID NO: 2141

SEQ ID NO: 9533 - protein, 98 aa, Neisseria meningitidis
MRKACRNRPLSEVQTKRNRYLSKTRYVVEQSFGTLHRKFRYARAAYFGLIKVSAQSHLKAMCLNLLKAANRLSAPAAAQKATGCLIIGYPGRIKGVFG

SEQ ID NO: 9534 - protein, 259 aa, Neisseria meningitidis; identical to SEQ ID NO: 3243

SEQ ID NO: 9535 - protein, 307 aa, Neisseria meningitidis
MKKRNNPLPLLNGVKPSYLVLPHEKQFYGLPLLHFLCIRFPFVGADDWRRRLNSGFVVGSDGAALDEHTLFEPGKVMFYYRETSRESEPRIPFEEKILHIDEHLIVVDKPHFLPVIPSGRFLRETLLTRLRLRPELQHLNVEDITPLHRLDKDTAGVMLLSHNPATRGAYQTMFQNKTVWKTYEALAPTRTDLLYPLDVVSRLVRGEKFFTTQEAEGVPNAHTTVELIENRGGFSLYRLTPHTGKKHQLRVHMMGLGMPLLNDALYPVPSEAGSEDYRKPLKLLAKKIAFADPLSGLERVFYSRFCL

SEQ ID NO: 9536 - protein, 106 aa, Neisseria meningitidis; identical to SEQ ID NO: 3331

SEQ ID NO: 9537 - protein, 307 aa, Neisseria meningitidis; identical to SEQ ID NO: 983

SEQ ID NO: 9538 - protein, 159 aa, Neisseria meningitidis
MKHILPLIAASALCISTASAHPASEPQTQNETAMTTHTLTSKYSFDETVSRLETAIKSKGMDIFAVIDHQEAAHRNGLTMQPAKVIVFGTPKAGTPLMVKDPAFALQLPLRVLVTETDGKVRAAYTDTRALIAGSRIGFDEVANTLANAEKLIQKTVGE

SEQ ID NO: 9539 - protein, 177 aa, Neisseria meningitidis; identical to SEQ ID NO: 3295

SEQ ID NO: 9540 - protein, 451 aa, Neisseria meningitidis; identical to SEQ ID NO: 2767

SEQ ID NO: 9541 - protein, 188 aa, Neisseria meningitidis
MPSEACWRFRRHILIEKMMILKTAPLKRRFAAMLYEMLLVGAATCLAALFAGIAAIFLNPVSIAVSALVTSILIMGSWWLYFRANWHGQGQTLAMRTWKIGLCDLNGIQPSLYLLRLRFIWACIFIVFIPMLAYAGLRHFLGIPPKGAAGAALIWLILPWGFALLNPDRQFLYDFLAGTRLVAVKGKP

SEQ ID NO: 9542 - protein, 81 aa, Neisseria meningitidis
MCASRDVSKSAKGWSVGIGLNVGKQLTDSVGLEFDPYYRHKTIYKPREIVLDGDKTKMGRSKSNEYGFRVAATFYSQLKSK

SEQ ID NO: 9543 - protein, 862 aa, Neisseria meningitidis
MKNQYSKSLHGVFYLAFYDKIHAFFAEQLFQLIINMNKKPTYISLFSSAGVGCYGFKTNGFECVATNELLEKRLKIQKYNQKCRFDSGYIAGDITLPETQAKLFAEIRRWNTEIDVVIATPPCQGMSVANHKKNNEMARNSLVVESIKIVREVQPKFFIFENVKAFLKTPCTDTDYQEKPIEEAIWSNLGGHYNILSNVLNFKDYGANSSRTRTLVIGVRKDIHHITPYDIFPKQTPPKTLRTLLADLPPLMQMGEISDDDIYHSYREFDRRMLPWIAQLKEGESAFQNTDSARIPHQIKNGEIIYNQNKNGDKYARWFLDREGPCIHTRNDILASQNTIHPTENRVFSVRELMRMMSIPPSFKWTAQDEKQLNALSFDEKKTFLKKEELNIRHCIGESVPTAVLANVAQNIQAALQQSELSMTEIQNLIKRENLSLADNLYRFIEQHFDAYPFSRLLQIAEYANAARSETAAYFTRIDIAFGLVNALPDFKKKKNLRILEPSVGIGNFIPLLAKKYADKEKVIFDLVDIDSNSLNLLSLLLKKLNLGSKFEFNIIHQDFLTATLPENYDLVIGNPPYGKVKASDKNLALYRKNATNKDTQNIFSFFIDKALTLSKTVALVVPKSVINAPEFQITRQQLITANINRIIDYGEKAFKGVKIETIAFIADQTDKDNQHITIESHIQETLIQNCKNYFFSDNFPYWLIYRNSEFDQIAQKLEFNVFQSFRDRQITKAHTQNSGNVRVLKSRNIGNNEIIDIEGYDSYVDSVAPFSVGKFINRKNVVMIPNLTYKPRAAFLPENSIADGSVALLTMKKHEKILTQRDLAYYATPEFEQFYRVARNYGSRSMNIDNHSVFFFGLLKD

SEQ ID NO: 9544 - protein, 127 aa, Neisseria meningitidis; identical to SEQ ID NO: 1080

SEQ ID NO: 9545 - protein, 108 aa, Neisseria meningitidis
MNIKHLLLTAAATALMGISAPALAHHDGHGDDDHGHAAHQHSKQDKIISRAQAEKAALARVGGKITDIDLEHDNGRPHYDVEIVKNGQEYKVVVDARTGRVISSRRDD

SEQ ID NO: 9546 - protein, 366 aa, Neisseria meningitidis
MTRIAILGGGLSGRLTALQLAEQGYQIALFDKGCRRGEHAAAYVAAAMLAPAAEAVEATPEVVRLGRQSIPLWRGIRCRLNTHTMMQENGSLIVWHGQDKPLSSEFVRHLKRGGVADDEIVRWRADDIAEREPQLGGRFSDGIYLPTEGQLDGRQILSALADALDELNVPCHWEHECAPEDLQAQYDWLIDCRGYGAKTAWNASAEHGSTLRGIRGEVARVYTPEITLNRPVRLLHPRYPLYIAPKENHVFVVGATQIESESQAPASVRSGLELLSALYAVHPAFGEADILEIATGLRPTLNHHNPEIRYSLARRLIEINGLFRHGFMISPAVTAAAVRLAVALVDGKDAPERDEESGLAYIRRQD

SEQ ID NO: 9547 - protein, 74 aa, Neisseria meningitidis; identical to SEQ ID NO: 1871

SEQ ID NO: 9548 - protein, 162 aa, Neisseria meningitidis; identical to SEQ ID NO: 911

SEQ ID NO: 9549 - protein, 360 aa, Neisseria meningitidis
MKKSLIALTLAALPVAAMADVTLYGTIKAGVEVSRVKDAGTYKAQGGKSKTATQIADFGSKIGFKGQEDLGNGMKAIWQLEQKASIAGTNSGWGNRQSFIGLKGGFGTVRAGNLNTVLKDSGDNVNAWESGSNTEDVLGLGTIGRVESREISVRYDSPVFAGFSGSVQYVPRDNANDVDKYKHTKSSRESYHAGLKYENAGFFGQYAGSFAKYADLNTDAERVAVNTANAHPVKDYQVHRVVAGYDANDLYVSVAGQYEAAKNNEVGSTKGKKHEQTQVAATAAYRFGNVTPRVSYAHGFKAKVNGVKDANYQYDQVIVGADYDFSKRTSALVSAGWLKQGKGAGKVEQTASMVGLRHKF

SEQ ID NO: 9550 - protein, 364 aa, Neisseria meningitidis; identical to SEQ ID NO: 1930

SEQ ID NO: 9551 - protein, 321 aa, Neisseria meningitidis; identical to SEQ ID NO: 2913

SEQ ID NO: 9552 - protein, 164 aa, Neisseria meningitidis
MENRFKKIVKDILSFAQFVSEAENKIPNQSSRYYDCWWELEILNASALEDWEISGKPEKWEKWTEKYQTEALQSVKHLFAEEVPENNIVCDISHFLHFADWAEADIPNQSRLYAEYWWEMEMFKMSVLEDWERSGKPLDWKKWQRQYRSEAFELVKKLNRSKQE

SEQ ID NO: 9553 - protein, 1829 aa, Neisseria meningitidis
MNEGEVVLTPEQIQTLRGYASRGDTYGGWRYLANLGDRYADDAAAIVGKDANLNGLNLWMKKGVENLWDDTVGKKTRLEKFDRVALQHFRQYARLINQNNGRLPNTSEIERSYYKAVTDNGVSSSAAIDLVINRSLPDMADGYWALGLGIEAERIHNEQAVNNPNGSERDNRKQLISALDKGFDGSFKEKHFTFLQSVMMDLTKLGVEYTIDGWQKIGGWGNGIINDLYKSVVKREWTGIFEIVNNNIKQGNEAFKNEINSLVHDMKAAGKEFGDDLNTQWNNLTQAAEIIYNDIVDNTSQGIEKGVKAIKELSEKMKNAASDLADGSAEKAKQVVEDLAQAAKEAYENAKSTAEKAAQAAREFFKGLPSFKDLAEKFRDLFPNPEGWIDDGHQCLAPWVKETKKRNGKYHVYDPLALDLDGDGIETIATKGFAGALFDHRNQGIRTATGWVAADDGLLVRDLNGNGIIDNGAELFGDNTKLADGSFAKHGYAALAELDSNGDNIINAADAAFQTLRVWQDLNQDGISQANELRTLEELGIQSLDLAYKDVNKNLGNGNTLAQQGSYTKTDGTTAKMGDLLLAADNLHSRFKDKVELTAEQAKAANLAGIGRLRDLREAAALSGDLANMLKAYSAAETKEAQLALLDNLIHKWAETDSNWGKKSPMRLSTDWTQTANGGVALTPSQVTRLKQNALVSLSDKAKAAIDAARDRIAVLDAYTGQDSSTLYYMSEEDALNIVKVTNDTYDHLAKNIYQNLLFQTRLQPYLNQISFKMENDTFTLDFSGLVQAFNHVKETNPQKAFVDLAEMLAYGELRSWYEGRRLMADYVEEAKKAGKFEDYQKVLGQETVALLAKTSGTQADDILQNVGFGHNKNVSLYGNDGNDTLIGGAGNDYLEGGSGSDTYVFGKGFGQDTVYNYDYATGRKDIIRFTDGITADMLTFTREGNHLLIKAKDGSGQVTVQSYFQNDGSGAYRIDEIHFDNGKVLDVATVKELVQQSTDGSDRLYAYQSGSTLNGGLGDDYLYGADGDDLLNGDAGNDSIYSGNGNDTLNGGEGNDALYGYNGNDVLNGGEGNDHLNGEDGNDTLIGGAGNDYLEGGSGSDTYVFGKGFGQDTVYNYDYATGRKDIIRFTDGITADMLTFTREGNHLLIKAKDGSGQVTVQSYFQNDGSGAYRIDEIHFDNGKVLDVATVKELVQQSTDGSDRLYAYQSGSTLNGGLGDDYLYGADGDDLLNGDAGNDSIYSGNGNDTLNGGEGNDALYGYNGNDVLNGGEGNDHLNGEDGNDTLIGGAGNDYLEGGSGSDTYVFGKGFGQDTVYNYDYATGRKDIIRFTDGITADMLTFTREGNHLLIKAKDGSGQVTVQSYFQNDGSGAYRIDEIHFDNGKVLDVATVKKLVQQSTDGSDRLYAYQSGSTLNGGLGDDYLYGADGNDLLNGDAGNDSIYSGNGNDTLNGGEGNDALYGYNGNDVLNGGEGNDHLNGEDGNDTLIGGAGNDYLEGSSGSDTYVFGEGFGQDTVYNYDYATGRKDIIRFTDGITADMLTFTREGNHLLIKAKDGSGQVTVQSYFQNDGSGAYRIDEIHFDNGKVLDVATVKKLVQQSTDGSDRLYAYQSGSTLNGGLGDDYLYGADGDDLLNGDAGNDSIYSGNGNDTLDGGEGNDALYGYNGNDVLNGGEGNDHLNGEDGNDTLIGGAGNDYLEGGSGSDTYVFGKGFGQDTVYNYHVDKNSDTMHFKGFKAADVHFIRSGSDLVLSASEQDNVRISGFFYGENHRVDTFVFDDAAISNPDFAKYINAGNNLVQSMSVFGSNTAATGGNVDANTQSVQQPLLVTPSA

SEQ ID NO: 9554 - protein, 544 aa, Neisseria meningitidis
MIKPNLRPKLGSSALIAFLSLYSSLVLNYAFFAKVVELHPFNGTGADIFLYTMPVVLFFLSNFVFHVIALPFVHKVLIPLILVISAAVSYQEIFFNIYFNKSMLNNVLQTTAAESARLITPGYVLWIVCLGVLPALAYIAVKVKYRVWYKELLTRLVLAAVSFLCALGIAMLQYQDYASFFRNNKSVTHLIVPSNFIGAGVSKYKDWKRSNIPYTQLDMAVVQNRPVGSLRRFVVLVVGETTRAANWGLNGYSRQTTPLLAARGDEIVNFPQVRSCGTSTAHSLPCMFSTFDRTDYDEIKAEHQDNLLDIVQRAGVEVTWLENDSGCKGVCGKVPNTDVTSLNLPEYCRNGECLDNILLTKFDEVLNKNDKDAVLILHTIGSHGPTYYERYTEAERKFTPTCDTNEINKCTRATLVNTYDNTVLYVDQFIDKVIRKLENRDDLESVVHYVSDHGESLGENGMYLHAAPYAIAPSGQTHIPMVMWFSKAFRQHGGIDFQCLKQKAAENEYSHDHYFSTVLGLMDISNSQTYRKEMDILAACRRPR

SEQ ID NO: 9555 - protein, 154 aa, Neisseria meningitidis
MIEMSKDYRNDLYDVYVSYPPKVDCGLIRECLRENLGEEKAEGLIESLDSKPQVLVEEKCTWEKRAELHDYFSYLGLDIITRRYMELETVVPPEEGEGEGEGGDGEIPEYLELHSEREDDISAPSQAEPPPRNIKPLVFGLLIAFLGYLLGKIF

SEQ ID NO: 9556 - protein, 753 aa, Neisseria meningitidis; identical to SEQ ID NO: 3095

SEQ ID NO: 9557 - protein, 127 aa, Neisseria meningitidis; identical to SEQ ID NO: 2779

SEQ ID NO: 9558 - protein, 107 aa, Neisseria meningitidis; identical to SEQ ID NO: 1793

SEQ ID NO: 9559 - protein, 321 aa, Neisseria meningitidis; identical to SEQ ID NO: 2168

SEQ ID NO: 9560 - protein, 213 aa, Neisseria meningitidis; identical to SEQ ID NO: 2765

SEQ ID NO: 9561 - protein, 376 aa, Neisseria meningitidis; identical to SEQ ID NO: 2865

SEQ ID NO: 9562 - protein, 222 aa, Neisseria meningitidis; identical to SEQ ID NO: 3618

SEQ ID NO: 9563 - protein, 497 aa, Neisseria meningitidis; identical to SEQ ID NO: 1619

SEQ ID NO: 9564 - protein, 126 aa, Neisseria meningitidis
VQPSQITETVVDMVDKMFDEIATCHERIRPMAVLADGIAGSIVKLAPNEIPLIFGNSSFGSYLKSKTRDEVFKVLKQSKVNNAGKVLEAFYESWLKYTAKDRRLKVCIVTAQSRWRSRFEMELLGI

SEQ ID NO: 9565 - protein, 95 aa, Neisseria meningitidis; identical to SEQ ID NO: 589

SEQ ID NO: 9566 - protein, 61 aa, Neisseria meningitidis
VDVGWASAHQSHHSTNSANLTGAGKPMPSEGGGIGGGGGLKPTLQPPPPKKKQKKTQSDKI

SEQ ID NO: 9567 - protein, 544 aa, Neisseria meningitidis; identical to SEQ ID NO: 3972

SEQ ID NO: 9568 - protein, 382 aa, Neisseria meningitidis; identical to SEQ ID NO: 2860

SEQ ID NO: 9569 - protein, 437 aa, Neisseria meningitidis; identical to SEQ ID NO: 5073

SEQ ID NO: 9570 - protein, 109 aa, Neisseria meningitidis
  misc_feature 104, 105: 'Xaa' is any amino acid
MLSQSQWLDAVKGRLRVRSDYALSKRWAVTPSEVSQYRRNRLRFPFAVVLDIADVMDIDPIEIIAGLEYRRCREKDMERVKGAYFKAHCAHFVYPNNPGFFRRXXHTLN

SEQ ID NO: 9571 - protein, 268 aa, Neisseria meningitidis
MNTIFKISALTLSAALALSACGKKEAASEPAAASAAQGDTSSIGSTMQQASYAMGVDIGRSLKQMKEQGAEIDLKVFTEAMQAVYDGKEIKMTEEQAQEVMMKFLQEQQAKAVEKHKADAKANKEKGEAFLKENAAKDGVKTTASGLQYKITKQGEGKQPSKDDIVTVEYEGRLIDGTVFDSSKANGGPVTFPLSQVIPGWTEGVQLLKEGGEATFYIPSNLAYREQGAGDKIGPNATLVFDVKLVKIGAPENAPAKQPAQVDIKKVN

SEQ ID NO: 9572 - protein, 468 aa, Neisseria meningitidis; identical to SEQ ID NO: 2817

SEQ ID NO: 9573 - protein, 226 aa, Neisseria meningitidis; identical to SEQ ID NO: 6792

SEQ ID NO: 9574 - protein, 101 aa, Neisseria meningitidis; identical to SEQ ID NO: 2399

SEQ ID NO: 9575 - protein, 56 aa, Neisseria meningitidis; identical to SEQ ID NO: 2971

SEQ ID NO: 9576 - protein, 640 aa, Neisseria meningitidis
MIEIKNLTLQRGLKVLLDKANATVNPGQRVGLIGKNGTGKSSLFALIKGKITQDGGDVSIPKNWRLASVSQETPDLDISALDYVLQGDAELQAFQTALRQAEAQNDGMKQAEYHAKLEEIDAYTAPARAAKLLNGLGFSQEEHSRPVKSFSGGWRMRLNLAQALICRADLLLLDEPTNHLDLETVLWLENHLASLPCTQIIISHDRDFLNAATTQTIELSQQKLTQYGGNYDFYQNERAQRLAQQQAAYVKQQAQIKHLQSFIDRFKAKATKAVQAQSRMKALAKLERVAPAHLDSEFSFEFYHPDHLPNPLLKLEHADLGYEGKTVLHDITLSLESGARYGLLGVNGSGKSTFIKALAGKIDLLSGSIVRSEKLNIGYFAQHQLDTIRADQNPVWHIQQLSPKVREQEIRNFLGGFNFVGDMALQKTEPFSGGEKARLALAMIIWQKPNLLLLDEPTNHLDLDMRHALTLALQSFQGALIIVSHDRSLLEATTDSFLLIDKGRLKNFDGDLNDYRQWRLAQENAAAAPAASAQSQSRKDTKRIEAQIRQEKARRGKPIQQKIDRAEKEMAQLSEIQTACEAFLAQEDAYLEANKEKLQNTLSQLAKVKTQLAQIEEVWLACQEELERIETEIEKQFAER

SEQ ID NO: 9577 - protein, 384 aa, Neisseria meningitidis; identical to SEQ ID NO: 3277

SEQ ID NO: 9578 - protein, 189 aa, Neisseria meningitidis
LYCLRLRRLVLIFVNPLYLHQFHETQVGSVKQLIAHFDRLIDELDKQIDDHTHTHFDGKAQVAEQIKGIGSITTATLMAMLPELGRLSHKRIASLAGIAPHPRESGETKFKSRCFGGRSAVLKALYMATVAATRFEPLIRDFYQRLPSEGKPYKVAVTACMRKLLTISNARMRDYFAENDTAENGIQTA

SEQ ID NO: 9579 - protein, 297 aa, Neisseria meningitidis; identical to SEQ ID NO: 560

SEQ ID NO: 9580 - protein, 218 aa, Neisseria meningitidis; identical to SEQ ID NO: 6313

SEQ ID NO: 9581 - protein, 269 aa, Neisseria meningitidis
MPDFSMSNLAVAFSITLAAGLFTVLGSGLVMFSKTPNPRVLSFGLAFAGGAMVYVSLTEIFSKSSEAFAEIYDKDHAFAAATMAFLAGMGGIALIDRLVPNPHETLDAQDPSFQESKRRHIARVGMMAAFAITAHNFPEGLATFFATLENPAVGMPLALAIAIHNIPEGISIAAPVYFATRSRKKTVWACLLSGLAEPLGAALGYLVLQPFLSPAVFGSVFGVIAGVMVFLALDELLPAAKRYSDGHETVYGLTTGMAVIAVSLVLFRF

SEQ ID NO: 9582 - protein, 365 aa, Neisseria meningitidis; identical to SEQ ID NO: 11

SEQ ID NO: 9583 - protein, 217 aa, Neisseria meningitidis
MFSVPRSFLPGVFVLAALAACKPQDNSAAQVASSSASASAAENAAKPQTRGTDMRKEDIGGDFTLTDGEGKPFSLSDLKGKVVILSFGFTHCPDVCPTELLTYSDTLKQLGGQAKDVKVVFVSIDPERDTPEIIGKYAKQFNPDFIGLTATGDQNLPVIKQQYRVVSAKVNQKDDSENYLVDHSSGAYLIDKNGEVAIFSPYGSEPETIAADVRTLL

SEQ ID NO: 9584 - protein, 103 aa, Neisseria meningitidis; identical to SEQ ID NO: 2880

SEQ ID NO: 9585 - protein, 123 aa, Neisseria meningitidis; identical to SEQ ID NO: 7208

SEQ ID NO: 9586 - protein, 228 aa, Neisseria meningitidis
MTVLQERYCEVSDRIGKLVLQAGREPHSVSLIAVSKTFPSDGIREVYAAGQRDFGENYIQEWYGKTEELADLTDIVWHVIGDVQSNKTKFVAERAHWVHTVCRLKTAVRLSGQRPSSMPPLQVCIEVNIAGEAAKHGVAPEEAVVLAVEVAKLPNIVVRGLMCVAKANSSETELKVQFQTMRKLLADLNAAGVKADVLSMGMSDDMPAAIACGATHVRIGSAIFGKRG

SEQ ID NO: 9587 - protein, 107 aa, Neisseria meningitidis; identical to SEQ ID NO: 2236

SEQ ID NO: 9588 - protein, 125 aa, Neisseria meningitidis; identical to SEQ ID NO: 592

SEQ ID NO: 9589 - protein, 240 aa, Neisseria meningitidis
MDKDLYAVLGVSPQAGADEIKRAYRKLAMKYHPDRNPGNPQAEEKFKEIQRAYDTLSDLSKRTQYDASFRGHEERGRQEEAFRREQARREQFYREQMRREQALRQAFERQASRSRHAYEPSGGGSGRNYVLAAYILFGLGAIMLFMPIVGVIFAYMPIVGVILAYMKRNSLDSIVYAAHTEYLIKTFWRTFWLYILGALTALLGIGVLIIIATNVWYFYRIIAGFIRFNGGRAVAPEKWI

SEQ ID NO: 9590 - protein, 202 aa, Neisseria meningitidis; identical to SEQ ID NO: 597

SEQ ID NO: 9591 - protein, 619 aa, Neisseria meningitidis; identical to SEQ ID NO: 1938

SEQ ID NO: 9592 - protein, 228 aa, Neisseria meningitidis
MFDFGLGELVFVGIIALIVLGPERLPEAARTAGRLIGRLQRFVGSVKQEFDTQIELEELRKAKQEFEAAAAQVRDSLKETGTDMQNSLHDISDGLKPWEKLPEQRTPADFGVDENGNPFPDAANTLSDGISDVMPSERSDTSAEILGDSGQTGSTAEPAETDQDRAWREYLTASAAAPVVQTVEVSYIDTAVETPVPHTTSLRKQAISRKRGLRPKHRAKPKLRVRKS

SEQ ID NO: 9593 - protein, 488 aa, Neisseria meningitidis; identical to SEQ ID NO: 3695

SEQ ID NO: 9594 - protein, 229 aa, Neisseria meningitidis
MSVGLLRILVQNQVVTVEQAEHYCNESQAGKEVLPMLFSDGVISPKSLAALIARVFSYSILDLRHYPRHRVLMGVLTEEQMVEFHCVPVFRRGDKVFFAVSDPTQMPQIQKTVSAAGIEVELVIVEDDQLAGLLDWVGSRSTSLLQELGEGQEEEESHTLYIDNEEAEDGPVPRFIHKTLSDALRSGASDIHFEFYEHNARIRFRVDGQLREVVQPPIAVRGQLASRIK

SEQ ID NO: 9595 - protein, 206 aa, Neisseria meningitidis
MAVRSKSSKAWLHEHVNDHYVHMAQKDGYRARAAYKLLEINEKDKLIKPGTVLADLGSAPGSWSQVAAKLTGTSGAVFALDILPMEAIGGVSFIQGDFRENDVLAQFEGLLNNRPLDLVICDMAPNMSGNAVSDQARSFYLCELALDFASQHLKTGGSFLVKVFQGAGYQEYMAAMREIFGTVQTRKPEASRNRSSEIYLLGKNKR

SEQ ID NO: 9596 - protein, 230 aa, Neisseria meningitidis; identical to SEQ ID NO: 3169

SEQ ID NO: 9597 - protein, 111 aa, Neisseria meningitidis; identical to SEQ ID NO: 7069

SEQ ID NO: 9598 - protein, 73 aa, Neisseria meningitidis
MNFLLSKLLLGLIRFYQYCISPLIPPRCRYTPTCSQYAVEAVKKYGAFKGGRLAIKRIARCHPLGGHGHDPVP

SEQ ID NO: 9599 - protein, 533 aa, Neisseria meningitidis; identical to SEQ ID NO: 3462

SEQ ID NO: 9600 - protein, 144 aa, Neisseria meningitidis
MPACFCPHCKTRLWVKETQLNVAQGFVVCQKCEGLFKAKDHLASTKEPIFNDLPEAVSDVKLVHRIGTRAIGKKQISRDEIAGILNGGTTQPDIPPATAATPAAAPQVTVPPAAPARQEGFNWTIATLFALIVLIMQLSYLVIL

SEQ ID NO: 9601 - protein, 348 aa, Neisseria meningitidis
MPSEAFRRHRAYRENKLQPLVSVLICAYNVEKYFAQSLAAVVNQTWRNLDILIVDDGSTDGTLAIAQRFQEQDGRIRILAQPRNSGLIPSLNIGLDELAKSGMGEYIARTDADDIAAPDWIEKIVGEMEKDRSIIAMGAWLEVLSEEKDGNRLARHHEHGKIWKKPTRHEDIATVFPFGNPIHNNTMIMRRSVIDGGLRYNTERDWAEDYQFWYDVSKLGRLAYYPEALVKYRLHANQVSSKYSVRQHEIAQGIQKTARNDFLQSMGFKTRFDSLEYRQIKAVAYELLEKHLPEEDFERARRFLYQCFKRTDTPPAGAWLDFAADGRMRRLFTLRQYFGILRRLLKNR

SEQ ID NO: 9602 - protein, 2026 aa, Neisseria meningitidis
MNKGLHRIIFSKKHSTMVAVAETANSQGKGKQAGSSVSVSLKTSGDLCGKLKTTLKTLVCSLVSLSMVLPAHAQITTDKSAPKNQQVVILKTNTGAPLVNIQTPNGRGLSHNRYTQFDVDAKGAVLNNDRNNNPFLAKGSAQLILNEVRGAASKLNGIVTVGGQKADVIIANPNGITVNGGGFKNVGRGILTTGAPQIGKDGALTGFDVRQGTLTVGAAGWNDKGGADYTGVLARAVALQGKLQGKNLAVSTGPQKVDYASGEISAGTAAGTKPTIALDTTALGGMYADSITLIANEKGVGVKNAGTLEAAKQLIVTSSGRIENSGRIATTADGTEASPTYLSIETTEKGAAGTFISNGGRIESKGLLVIETGEDISLRNGAVVQNNGSRPATTVLNAGHNLVIESKTNVNNAKGSANLSAGGRTTINDATIQAGSSVYSSTKGDTELGENTRIIAENVTVLSNGSIGSAAVIEAKDTAHIESGKPLSLETSTVASNIRLNNGNIKGGKQVVLMADGDIQAKASNLNASGHLYIHAGKDLDLNADKDLSTQSISLRADNTALISSNGNTLTAEKNLDIQAGSLSVRQSNLQSSGGNVQMSATKGNISLNQSWINASQNIDTAALQGNIISDGLTAVAEVGRVSLLANGNVDFNGLNTLIAEGDINAGSVGKGRLKMDNTDIYASAGDVKLVAGGQLDLGNGTVNGGHISLDSNKGSMVVQDVHLNARASLKVDADQTLTINNSKLNSGHNTQINTNHGHMTLNQLDAHSRRHMSISAQGKGKGKDSGQILQNDQQNSKSTLAADGVLSLNSSALQVLDNTTLRGGAINIKAGGGIIKRGYIDWETQDTATMRSAELKPLSGMMSIESGGDNPLTVEPGNRIVSAGDLAVNHNGTFQISARAGNNGNPSAQTASVSAKGNIGIVAGEVDIDAANIAAGKDLALVATKGNISLNSIRNTFSNYQLKTDKHNITQQLTDVEQELSKLTSDPKYRKAQDLPQMLRRKYKRRDKVFGDSEARLRGLRAEINAADEAWAELQSPVKALLERKQLLQQALLTVSQPGSGHENQGSTLSGQNIKLLAAGGIRIQGSKVAATQQANIQAAGFLPAPAAEELQEGRLQSAIDISGVFDTFEYGQQGSDKYGYAIFSRPSEISGKTGVTLSAPNANENSRISLSAANIEAENGKIKLQSYGDQSYYAGQGELYTLERRSYKTGKWYNRKHITEVKEHKNAKPDAVNLSASQGIDIKSGGNIDAYATAFDAPKGSINIEAGRKLTLYAVEELNYDKLDSQKRRRFLGISYSKAHDTTTQVMKTALPSRVVAESANLQSGWDTKLQGTQFETTLGGATIRAGVGEQARADAKIILEGIKSSIHTETVSSSKSTLWQKQAGRGSNIETLQLPSFTGPVAPVLSAPGGYIVDIPKGNLKTEIEKLSKQPEYAYLKQLQTAKNVDWKQVQLAYDKWDYKQEGLTGAGAAIVVIIVTALTYGYGAAAAGSVTAAGSSTAAAATTTAAATTTVSTAAAMQTAALASLYSQAAVAIINNKGDVGKALKDLGTSDTVKQIVTSALTAGALNQMGADIAQLNSKVRTELFSSTGNQTIANLGGRLATNLSNAGISAGINTAVNGGSLKDNLGNAALGALVNSFQGEAASKIKTTFSDDYVAKQFAHALAGCVSGLVQGKCKDGAIGAAVGEIVAESILGGRNPATLSDAEKHKVISYSKIIAGSVAALNGGDVNTAANAAEVAVVNNALNFDSTPTNAKKHQPQKPDKTALEKIIQSIMPAHAAGAMTNPQDKDAAIWISNIRNGITGPIVITSYGVYAAGWTAPLIGTAGKAAISTCMANPSGCTVMVTQAAEAGAGIATGAVTVGNAWEAPVGALSKAKAAKQAIPTQTVKELDGLLQESKNIGAVNTRINIANSTTRYTPMRQTGQPVSAGFEHVLEGHFHRPIANNRSVFTISPNELKVILQSNKVVSSPVSMTPDGQYMRTVDVGKVIGTTSIKEGGQPTTTIKVFTDKSGNLITTYPVKGN

SEQ ID NO: 9603 - protein, 459 aa, Neisseria meningitidis
MLLDLNRFSFSVFLKEVRLLTALALPMLLAQVAQVGIGFIDTVMAGGAGKEDLAAVALGSSAFATVYITFMGIMAALNPMIAQLYGAGKTDEVGETGRQGIWFGLFLGVFGTVLMWAAITPFRNWLTLSDYVEGTMAQYMLFTSLAMPAAMVHRALHAYASSLNRPRLIMLVSFAAFVLNVPLNYIFVYGKFGMPALGGAGCGLATMAVLWFSALALWIYIAKENFFRPFGLTAKFGKPDWAVFKQIWKIGAPIGLSYFLEASAFSFIVFLIAPFGEDYVAAQQVGISLSGILYMIPQSVGSAGTVRIGFSLGRREFSRARYISGVSLVLGWMLAVITVLSLVLFRSPLVSMYNNDPAVLSIAATVLLFAGLFQPADFTQCIASYALRGYKVTKVPMFIHAAAFWGCGLLPGYLLAYRFDMGIYGFWTALIASLTIAAIALVWCLELCSREMVRSHKAV

SEQ ID NO: 9604 - protein, 264 aa, Neisseria meningitidis
MKAYLDLMRHVLDNGTDKSDRTGTGTRSVFGYQMRFDLGKGFPLLTTKKLHLRSIIHELLWFLKGDTNIKYLKDNNVSIWDEWADENGDLGPVYGYQWRNWPAPDGRHIDQIANVVEQIKKNPDSRRLIVSAWNPALVDEMALPPCHALFQFYVADGKLSCQLYQRSADIFLGVPFNIASYALLTMMMAQVCGLEAGEFVHTFGDAHLYRNHFEQAALQLEREPRALPVMKINPEVKDLFSFKFEDFELEGYDPHPHIKAAVSV

SEQ ID NO: 9605 - protein, 147 aa, Neisseria meningitidis; identical to SEQ ID NO: 2466

SEQ ID NO: 9606 - protein, 199 aa, Neisseria meningitidis
MRKQNTLTGIPTSDGQRGFALFIVLMVMIVVAFLVVTAAQSYNTEQRISANESDRKLALSLAEAALREGELQVLDLEYDTDSKVTFSENCEKGLCTAVNMRTNTNNGNEEAFDNIVVQGKPTVEAVKRSCPAKSTGLCIDNKGMEYKKGTRSVSKMPRYIIEYLGVKNGENVYRVTAKAWGKNANTVVVLQSYVSNNDE

SEQ ID NO: 9607 - protein, 94 aa, Neisseria meningitidis
MKKLLLAAVVSLSAATAFASDSAERQIYSDPNFEQNRVKAVKMLEQRGYQVHDVDADDHWGKPVLEVEAYKDGREYDIVLSYPDLKIIKEQLDR

SEQ ID NO: 9608 - protein, 179 aa, Neisseria meningitidis; identical to SEQ ID NO: 8483

SEQ ID NO: 9609 - protein, 390 aa, Neisseria meningitidis; identical to SEQ ID NO: 8480

SEQ ID NO: 9610 - protein, 88 aa, Neisseria meningitidis; identical to SEQ ID NO: 1100

SEQ ID NO: 9611 - protein, 194 aa, Neisseria meningitidis; identical to SEQ ID NO: 6623

SEQ ID NO: 9612 - protein, 517 aa, Neisseria meningitidis
MTQANRVIIFDTTLRDGEQSPGAAMTKEEKIRVARQLEKLGVDIIEAGFAAASPGDFEAVNAIAKTITKSTVCSLSRAIERDIRQAGEAVAPAPKKRIHTFIATSPIHMEYKLKMKPKQVIEAAVKAVKIAREYTDDVEFSCEDALRSEIDFLAEICGAVIEAGATTINIPDTVGYSIPYKTEEFFRELIVKTPNGGKVVWSAHCHNDLGLAVANSLAALKGGARQVECTVNGLGERAGNASVEEIVMALKVRHDLFGLETGIDTTQIVPSSKLVSTITGYPVQPNKAIVGANAFLHESGIHQDGVLKHRETYEIMSAESVGWATNRLSLGKLSGRNAFKTKLADLGIELESEEALNAAFARFKELADKKREIFDEDLHALVSDEMGSMNAESYKFISQKISTETGEEPRADIVFSIKGEEKRASATGSGPVDAIFKAIESVAQSGATLQIYSVNAVTQGTESQGETSVRLARGNRVVNGQGADTDVLVATAKAYLSALSKLEFSAAKPKAQGSGTI

SEQ ID NO: 9613 - protein, 188 aa, Neisseria meningitidis; identical to SEQ ID NO: 477

SEQ ID NO: 9614 - protein, 321 aa, Neisseria meningitidis; identical to SEQ ID NO: 2168

SEQ ID NO: 9615 - protein, 465 aa, Neisseria meningitidis
MTVRIEHDLLGDREIPAEVYWGIHTLRAIENFKISTQKISDVPQFVRSMVMVKKATAQANGELGAVKPEIAAAIEKACDEVLLNNRCLDQFPSDVYQGGAGTSVNMNTNEVIANLALEALGYEKGRYDIVNPMDHVNASQSTNDAYPTGFRLAVYYSIGELLDKLTVLKNAFTAKAEEFKDVLKMGRTQLQDAVPMTAGQEFQSFQVLLEEEILNLDRTRQLLLEVNLGATAIGTGVNTPKGYAELVVKKLSEVSGLPCKLTENLIEATSDCGAYVMVHGALKRTAVKLSKICNDLRLLSSGPRAGLKEINLPELQAGSSIMPAKVNPVIPEVVNQVCFKVIGNDTTITFAAEAGQLQLNVMEPVIAQCMFETISLLGNAAVNLSDKCVKGITVNREICERYVFNSIGLVTYLNPYIGHHNGDLVGKICAQTGKGVREVVLERGLLSEEELNRILSPENLMNPHL

SEQ ID NO: 9616 - protein, 334 aa, Neisseria meningitidis
MSTFFQQTAQAMIAKHIDRFPLLKLDQVIDWQPIEQYLNRQKTRYLRDHRGRPAYPLLSMFKAILPGQWHSLSDPELEHSLITRIDFNLFCRFDELSIPDYSTLCRYRNWLAQDDTLSELLELINRQLTEKGLKIEKASAVVGATIIQTAGSKQRQAIEVDEEGQVSGQTTPSKDSDARWIKKNGLYKLGYKQHTRTDAEGYIEKLHITPANAHECKHLPPLLEGIAEGTTVYADKGYDSAENRQHLEERQLLDGIMRKACRNRPLSEAQTKRNRYLSKTRYVVEQSFGTLHRKFRYARSTYFGLIKVSAQSHLKAMCLNLLKAANRLSAPAAA

SEQ ID NO: 9617 - protein, 434 aa, Neisseria meningitidis
MKPFAENIPHSLRGNCRDEALPPHTVDCPECGCRADVPRLDRGEAAFCPRCGYKLFRVGRHPFSAPPAYAAASLILMAFAYGMTYIEVGIPGAASVLSLPEMMRLMVFQDYGFLAEVMFVLTFGAPVLFLLLCLYVYAALIRKRVYPALRLATRVMVRLRQAMMVDVFFVSTLVAYIKLSSVAEVRFGSAFYLMFALSVMLIRTSVSVPQHWVYFQIGRLTGDNAVQTASEGKTCCSRCLYFRDSAESPCGVCGAELYRRRPKSLSISSAFLTAAVILYFPANILPIMISSNPAATEVNTILNGIAYMWDEGDRLIAAVIFSASILVPVLKIAAMSVLIASARFALPTGAKKLSHLYRITEAVGRWSMIDIFVIIILMCSFHTYAARVIPGSAAVYFCLVVILTMLSAYYFDPRLLWDKRASDGIAFNETEKHD

SEQ ID NO: 9618 - protein, 104 aa, Neisseria meningitidis
MFDGEVEADESYFGGQRKGKRGRGAAGKVAVFGLLKRNGKVYTVTVPNTQTATLFPIIREQVKPDSIFCSYDVLDVREFSHFSFAETSFSYQSQHTFCRTTKPY

SEQ ID NO: 9619 - protein, 659 aa, Neisseria meningitidis
MSQLANAIRFLSADAVQKANSGHPGAPMGMAEMAETLWTKFLNHNPANPKFYNRDRFVLSNGHASMLLYSLLHLTGYNLSIEDLKNFRQLHSKTPGHPEYGYTDGVETTTGPLGQGIANAVGMALAEKILAAEFNKDGLNIVDHYTYVFMGDGCLMEGVSHEACSLAGTLGLGKLIVLYDDNNISIDGKVDGWFTENIPQRFESYGWHVVPNVNGHDTAAIQAAIEAARAETGKPSIICCKTLIGKGSANKEGSHKTHGAPLGADEIEATRKHLGWTYPAFEIPQEIYDAWNAKEKGAKLEAEWDKLFAQYQAKYPAEAAEFVRRMDKKLPENFDGYVQTALKEVCAKAETVATRKASQNSIEILAKELPELVGGSADLTPSNLTDWSNSVSVTRDKGGNYIHYGVREFGMGAIINGLVLHGGVKPFGATFLMFSEYERNALRMAALMKINPVFVFTHDSIGLGEDGPTHQPIEQTATLRLIPNMDVWRPCDTAESLVAWAEAVKAADHPSCLIFSRQNLKFQARSEQQLNDIKRGGYVISEAQGNAQAVIIATGSEVELALEAQKALAAQNIAVRVVSMPSTNVFDRQDTAYQAAVLPEGLPRIAVEAGHADGWYKYVGLNGAVVGINRFGESAPADLLFKEFGFTVDNVVDTVKSVL

SEQ ID NO: 9620 - protein, 321 aa, Neisseria meningitidis; identical to SEQ ID NO: 2168

SEQ ID NO: 9621 - protein, 248 aa, Neisseria meningitidis
VQPETSAQYQHRFAQAIRGGEAADGLPQDRLNVYIRLIRNNIHSFIDRCYTETRQYFDSEEWSRLKEGFVRDAHAQTPYFQEIPGEFLQYCQSLPLLDGILALMDFEYTQLLAEVAQIPDIPDIHYSNDSKYTPSPAAFIRQYRYDVTDDLHEAETALLIWRNAEDDVMYQTLDGFDMMLLEIMGSSALSFDTLAQTLVEFMPEDDNWKNILLGKWSGWTEQRIIIPSLSAISENMEGNSPGQNHLSA

SEQ ID NO: 9622 - protein, 245 aa, Neisseria meningitidis
MGGQKTHFGFSTVNEDEKAGKVAEVFHSVAKNYDIMNDVMSAGLHRVWKHFTINTAHLKKGDKVLDIAGGTGDLSRGWAKRVGKEGEVWLTDINSSMLTVGRDRLLNEGMILPVSLADAEKLPFPDNYFNLVSVAFGLRNMTHKDAALKEMYRVLKPGGTLLVLEFSKIYKPLEGAYDFYSFKLLPVMGKLIAKDADSYQYLAESIRMHPDQETLKQMMLDAGFDSVDYHNMSAGIVALHKGVKF

SEQ ID NO: 9623 - protein, 420 aa, Neisseria meningitidis
MSNTQKQLALAKAAKKSVNTADTEEKNRALLAMADSLEAAAADILAANRQDLEAAAGKIPESMTDRLLLDGKRICAMADGIRAVAALPDPVGEILETSTLPNGLEIVKKRVAMGVIGIIYESRPNVTSDAAALALKSGSAVVLRSGKDAFQSARAIVAALKTGLAQTRIDPDALQLIEDTGREGSYEMMRAKDYLDLLIPRGGAGLIRAVVENAVVPVIETGTGIVHIYVDKDADLEKAIRIVRNAKTSRPSVCNSMEVLLVHEDIAADFLPKLERLLVRDRIEAGLPPVRFRLDPQAARHIGGEAAGADDFDTEFLDYILAVKTVASVEEAVGHIEAHGTHHSDGIVTENRHAADYFTTHIDSAAVYVNASTRFTDGGEFGLGCEMGISTQKLHARGPMGLKELTSYKYIVQGTGQVRE

SEQ ID NO: 9624 - protein, 307 aa, Neisseria meningitidis
MPSEHPFSDGISTPNPKETMNDTAQITASYGRRYIVRTPDGTTYEASTRKKRVDFACGDRVRISPVNAEQVVIEDFLPRQSLLYRQDAWKTKLIAANVTQLLIVTAAVPSPSVRLLQRALLAAEAAGIRAVIVLNKADLPETALWREKLKFYETLGYPVIETRALENAGSLRPALQGHSNILLGQSGMGKSTLTNALLGSQTARTGDISAALDSGKHTTTHARLYDLNGETQLIDSPGLQEFGLHHLQAADLPRYFPDFRHLVGQCRFHNCTHRAEPGCAFKAAAETGAASPERLAFLQGITDELPG

SEQ ID NO: 9625 - protein, 195 aa, Neisseria meningitidis; identical to SEQ ID NO: 1987

SEQ ID NO: 9626 - protein, 394 aa, Neisseria meningitidis; identical to SEQ ID NO: 277

SEQ ID NO: 9627 - protein, 470 aa, Neisseria meningitidis; identical to SEQ ID NO: 2364

SEQ ID NO: 9628 - protein, 431 aa, Neisseria meningitidis
LAGVGKLARLGAKFSTRAVPYVGTALLAHDVYETFKEDIQARGYQYDPETDKFVKGYEYSNCLWYEDERRINRTYGCYGVDSSIMRLMSDYSRFPEVKELMESQMYRLARPFWNWHKEELNKLSSLDWNNFVLNRCTFDWNGGDCVVNKGDDYRNGANFSLIRNSKYKEEMDAKKLEEILSLKVDANPDKYIKATGYPGYSEKVEVAPGTKVNMGPVTDRNGNPVQVVATFGRDSQGNTTVDVQVIPRPDLTPGSAEAPNAQPLPEVSPAENPANNPAPNENPGTRPNPEPDPDLNPDANPDTDGQPGTSPDSPAVPDRPNGRDGKDGGLLCKFFPDILACDRLPEPNPAEDLNLPSETVNVEFKKSGIFQDSAQCPAPVTFTITVLDSSKQFAFSFENACTIAERLRYMLLALAWAVAAFFCIRTVSREV

SEQ ID NO: 9629 - protein, 65 aa, Neisseria meningitidis; identical to SEQ ID NO: 127

SEQ ID NO: 9630 - protein, 476 aa, Neisseria meningitidis
MTWETVIGLEIHVQLNTKSKIFSGASTAFGAEPNAHASVVECALPGVLPVMNREVVEKAIKLGLALDAKINRKNVFDRKNYFYPDLPKGYQISQLDLPIVEHGKLEIVVGDDVKTINVTRAHMEEDAGKSVHEGLNGATGIDLNRAGTPLLEVVSEPELRSAAEAVAYAKALHSLVTWLDICDGNMAEGSFRVDANVSVRPKGQAEFGTRREIKNLNSFRFLEQAINYEAEAQIEILEDGSKVQQATMLFDPEKGETRVMRLKEDAQDYRYFPDPDLLPVIISDAQMQKAKAEMPELPKEMAARFVADYGVSEYDARLLTASRAQAAYFEEAAKASGQGKPTANWMNGELAAALNKAGLELADSPITAPRLAALVGKIADGTLSSKLAKKAFEAMWAEPESTIAEIIEKHGLQQMTDTGAVEAMVDEVLANNAKAVEQFKSGNEKALNAIVGQVMKASKGKANPAQVQELIKAKLA

SEQ ID NO: 9631 - protein, 46 aa, Neisseria meningitidis
MSTFFQQTAQAMIAKHIDRFPLLKLDQVIDWQPIEQYLNRQRTHLP

SEQ ID NO: 9632 - protein, 100 aa, Neisseria meningitidis; identical to SEQ ID NO: 3450

SEQ ID NO: 9633 - protein, 417 aa, Neisseria meningitidis; identical to SEQ ID NO: 3141

SEQ ID NO: 9634 - protein, 253 aa, Neisseria meningitidis; identical to SEQ ID NO: 3373

SEQ ID NO: 9635 - protein, 131 aa, Neisseria meningitidis
MKRQQDKKMLFEENPIDEHFAEYDRRTGEIRLSGRHFNKPVLLHRDSAGLSKWQSLSELTPDNLLSDVKADDYPEILIIGTGAAQEFIHPKIMADFSRIGIGVECMNTDSAFRTLVFLHSEGRRAWAWLQP

SEQ ID NO: 9636 - protein, 317 aa, Neisseria meningitidis
MTHTVHLHLEETDNLALQRLCGSFDNNLDLLAKALDIHISRRFEHFTFNGAFAHAGKRALLKLLETAQTRDLNDGDIRLAAVEAQTEDAGHQEKNHDHAYYFRTKRGSIGGRTPRQNGYIRALLNHDIVFGLGPAGTGKTYLAVAAAVDAMEKHQVERIILVRPAVEAGEKLGFLPGDLTQKVDPYLRPLYDALYDLMGFDRVSKLIEKGLIEIAPLAYMRGRTLNGAYIILDEAQNTTPEQMKMFLTRIGFGAKAVITGDTSQIDLPKNIKSGLKDAREKLHNVEGLYFHTFTGEDVVRHPLVQKIVEAYESAEHD

SEQ ID NO: 9637 - protein, 198 aa, Neisseria meningitidis; identical to SEQ ID NO: 7255

SEQ ID NO: 9638 - protein, 321 aa, Neisseria meningitidis; identical to SEQ ID NO: 6649

SEQ ID NO: 9639 - protein, 469 aa, Neisseria meningitidis
MDTQIKTEADNQSNRRYLTVWRWHFYAGLLVMPFLTLLAVTGLGMLLFANITGKEGERIHVVPQATVQPLSVQAEAARSAVNPETSSVVQYIAPRADDMVAVFRVNNEGKATMVAVDPYTAKVVSTMPRNQGWYYAMDEIHSDMMLGSTGDYLLETAASLTIIMIISGLYLWWVKRRGIKAMLLPPKGRARSWWRNLHGAFGTWVSLILLLFCLSGIAWAGIWGGKFVQAWSQFPAGKWGVEPNPVSVVPTHGEVLNDGKVKEVPWVLELTPMPVSGTTVGKDGINPDEPMTLETVDRFAREIGFKGRYQLNLPKGEDGVWTLSQDSMSYDMISPFADRTVHIDQYSGKILADIRFDDYNPFGKFMAASIALHMGTLGWWSVLANVLFCLAVIFIGISGCVMWWKRRPTGAVGIVPPAQKVKLPVWWMMALPLLAIALLFPTALLAIAVIWLLDTLLLSRIPVLRRWFK

SEQ ID NO: 9640 - protein, 195 aa, Neisseria meningitidis; identical to SEQ ID NO: 2216

SEQ ID NO: 9641 - protein, 263 aa, Neisseria meningitidis
MARHPYRRLRPAKSSFPEVGISEEGNIRSLHLGSDTIQSSMNLDHPSELVLSYSRAMMGWLLFTDALPQHITQIGLGGGSFARWIDTYLPDTRQTAVDINPQVIAIARNLFELPFEGEKFEIIEADGAEYIKVFRHNTDIILVDGFDGEQIIDALVEEPFFRDCRNALSSDSIFVTNWWSGDKRYQRFIERLLNVFEGRVLELPAESHGNVAVMAFQSSPKEQNIDKLKKRADKLSNTYGLDFHRMLAGLKASNPNNGKHFHL

SEQ ID NO: 9642 - protein, 71 aa, Neisseria meningitidis; identical to SEQ ID NO: 3375

SEQ ID NO: 9643 - protein, 133 aa, Neisseria meningitidis
MVAPVYAQGQPDAVNAYIQKKKVIVNTSKAELCFADDRQCHPVLIGVATPKGTFGLTLNSTDKPGYGGEVIGFKQEGDFLFALHRVWNQIPSERRNERIASPSVSDRIMTNGCINVSDAVYEKLRHYFVLEVI

SEQ ID NO: 9644 - protein, 453 aa, Neisseria meningitidis
MLKKWLNKMLPSGRSSKKAESKTVIPAERHNIRAEMLSFAAENVIRRLKGAGFQAYVVGGAVRDLLLGIEPKDFDVATDATPEQVHKLFRRSRIIGRRFQIVHVMNGAEIIEVTTFRGGAKVHQNAHGRIMKDNTYGSIEEDAMRRDFTCNALYYDPEKEEILDFHNGIADVAARRLVMIGDAAERYQEDPVRILRAIRLSGKLGFELSEETTAPIAESICRLKHEPVARLFDEIMKLLFSGHARECLKRLNGFDIPDDIHPLLNALRVSDGIAGKMTVLALKNTDERLRADKSVSVGFVLAALMWPELERHWKSNLQQGLKPAPALSDAINTMRETVERGWGVPQRFSATMREIWMFQPQFENRKGARPHKLFAQARFRAAYDFLLLRAETGNADRALAEWWTAFQTASQEQRTEMTKNEAAARHEKNEGQAKKRRRRRRKPKPKVEGTDWE

SEQ ID NO: 9645 - protein, 138 aa, Neisseria meningitidis
MKTSTVVFGGFFMADNGERIQIPVLENPDIREINHFFSVSNFEKKTGVLVFRIIPEPEFGNTELTVYFEKGYYLPMIQTILEGGDIEVKNLKTENYSGNTMEIWGDSYPIEHISKNISTIQNIISEFMIQKQTPAPII

SEQ ID NO: 9646 - protein, 191 aa, Neisseria meningitidis
MLLLSAFVLAACNAQNRQSGVRHQDFARVAVDLFRSACVLTQGSFESVSKFAAVGHFVPVGKEDLSHLPPTVAEPDVQALWTLERDGGIYYLSLTRDSCSVKAERADSAALLEHFDGLVRQPPKNANIELRAEQSVQASFEIRQVSYAWREAGSSEETVLTAQTADSPDLPVQAVLNLTHRSHNGKPLILP

SEQ ID NO: 9647 - protein, 242 aa, Neisseria meningitidis
MLLGVNIDHIATVRNARGTTYPSPVEAALVAETHGADLITMHLREDRRHIKDADVFAVKNAIRTRLNLEMALTEEMLENALKVMPEDVCIVPEKRQEITTEGGLDVLAQQEKIAGFTKILTDAGIRVSLFIDADDRQIQAAYDVGAPVVELHTGAYADARSHAEQLKQFERLQNGAHFAGDLGLVVNAGHGLTIHNVTPIAQILAIRELNIGHSLIAQALFLGLPEAVRQMKEAMFRARLLP

SEQ ID NO: 9648 - protein, 372 aa, Neisseria meningitidis; identical to SEQ ID NO: 3260

SEQ ID NO: 9649 - protein, 520 aa, Neisseria meningitidis; identical to SEQ ID NO: 2831

SEQ ID NO: 9650 - protein, 513 aa, Neisseria meningitidis; identical to SEQ ID NO: 3645

SEQ ID NO: 9651 - protein, 328 aa, Neisseria meningitidis
VSGAESYRHITVLLNEAVDALAVREDGVYVDGTFGRGGHSRLILSRLGDAGRLIVFDKDPQAIAVAEELARSDKRVGVVHGGFASFQAALDGLGIGKVDGALFDLGISSPQIDDGSRGFSFRFDAPLDMRMDTTRGMSAAEWIAVASEQDLHEVIKNYGEERFSRQIARAIVAQRAESPIDTTRKLAQIVAQNVRTRERGQDPATRTFQAVRIFINRELEEVGAVLPQVMCRLKEGGRLAVIAFHSLEDRIVKQFVKKYSQHAPLPRWAAVREADLPELPLKIVGRALKPGEAEIAANPRARSAVLRVAERTAGPIPEQSQRKTSEWQ

SEQ ID NO: 9652 - protein, 122 aa, Neisseria meningitidis; identical to SEQ ID NO: 66

SEQ ID NO: 9653 - protein, 573 aa, Neisseria meningitidis
MPSEAICSKKTMLNKDQFADNHFIRTFIEEDLKSGKHETIQTRFPPEPNGYLHIGHAKSICLNFGLAYIYDGLCNLRFDDTNPEKENDEYVNAIKEDVEWLGFHWAGEPRFASNYFDQLYDYAVGLVKDGKAYVDDLTPEEMREYRGTLTEAGKNSPYRDRSIEENLDLFTRMKNGEFPDGSKTLRLKIDMASGNINMRDPVIYRIRRAHHHNTGDKWCIYPMYDYTHCISDAIEGITHSLCTLEFEAHRPLYDWVLDNIPAPHATRPRQYEFSRLELLYTITSKRKLNQLVVEKHVSGWDDPRMPTISGMRRRGYTPEGLRLFAKRAGISKSENIVDMSVLEGAIREELENSAPRLMAVLNPLKVTLTNFETGRTQSRRAAFHPNHEEMGEREVPISQTIYIEADDFAENPPKGFKRLIPGGEVRLRHGYVIKCDEVVKDEAGNVVELKCSIDHDTLGKNPEGRKVKGVIHWVSAEHAAEIKVRLYDRLFTVERPDAVRGEDGEYLPFTDFLNPESVKEITAYAEPAAKDLPAESRWQFERIGYFVTDRKDHGKDTSVFNRTVTLKDSWQPK

SEQ ID NO: 9654 - protein, 180 aa, Neisseria meningitidis
VQSWKARRDFNIVKQDLDFSCGAASVATLLNNFYGQTLTEEEVLKKLDKEQMRASFEDMRRIMPDLGFEAKGYALSFEQLAQLKIPVIVYLKYRKDDHFSVLRGIDGNTVLLADPSLGHVSMSRAQFLDAWQTREGNLAGKILAVVPKKAETISNKLFFTHHPKRQTEFAVRQIRQARAE

SEQ ID NO: 9655 - protein, 78 aa, Neisseria meningitidis; identical to SEQ ID NO: 3909

SEQ ID NO: 9656 - protein, 264 aa, Neisseria meningitidis
MMSEHRVNHEPVFLLASSPWRESSLRVEAFSRRYGRVALLARSARKRQSELRGVLVPFVPVSASWYGSQELKTLHRAEWIGGWPQPQGRALFSGLYVNELMLKLTVREDPLPELYDALAEVMEAVCCKAAYIDDLRRFEWRLLNLLGVAPDLHADGTGGDILADKTYRLMPEEAVMPVCEDADALSHEAGAIVEGQSLIDLREGSFRTAESLQQALKITRLFIRHLLPEGLKSRQVLEQIRQFDRKETARETVPTSDGTASNAV

SEQ ID NO: 9657 - protein, 166 aa, Neisseria meningitidis
LPQCRLKPFRRHRPAKCSNNMPKATFYTHVAQVPIFTCRLIARAIRDGGRILVWSDSFGRLQELDKMLWQYEAESFIPHEIWEMEEAMPSETSVLLACGGNPPRIPEGMTVLNLSDGFWNTAPVLPARVLEIVGNSLEDLADARERFTAYRRSGFAIEHHGMEGKA

SEQ ID NO: 9658 - protein, 138 aa, Neisseria meningitidis; identical to SEQ ID NO: 489

SEQ ID NO: 9659 - protein, 390 aa, Neisseria meningitidis
MATHGDEVKIQNRQEADSAKAKRKRRLTALTLLFALAAAAAGSAFFLWWQHEEETEDAYVAGRVVQVTPQKGGTVRKVLHDDTDAVKKGDVLAVLDDDNDVLAYERAKNELIQAVRQNRRQNAATSQAGAQVALRRADLARAQDDLRRRSALAESGAVSAEELAHARAAVSQAQAAVKAALAEESSARAALGGQVSLREQPAVQTAIGRLKDAWLNLQRTQIRAPADGQVAKRSVQVGQQVAAGAPLMAVVPLSDVWVDANFKETQLRHMKIGQPAELVSDLYGKQIVYRGRVAGFSAGTGSAFSLIPAQNATGNWIKVVQRVPVRIVLNREDVDRHPLRIGLSMTVKVDTSAAGAPVSKTPGAALPEMESTDWSEVDRTVDEILGQSAP

SEQ ID NO: 9660 - protein, 94 aa, Neisseria meningitidis
MAFHHGRRCRITPLPETESLQESKKMNINELGARIDRPTIRELIAYATCRNRPISNSTLLRMEKDGRIPCRLKTPLTSSVWDTREVLEALGLQQ

SEQ ID NO: 9661 - protein, 280 aa, Neisseria meningitidis; identical to SEQ ID NO: 3736

SEQ ID NO: 9662 - protein, 123 aa, Neisseria meningitidis; identical to SEQ ID NO: 5008

SEQ ID NO: 9663 - protein, 182 aa, Neisseria meningitidis; identical to SEQ ID NO: 125

SEQ ID NO: 9664 - protein, 96 aa, Neisseria meningitidis; identical to SEQ ID NO: 3731

SEQ ID NO: 9665 - protein, 301 aa, Neisseria meningitidis; identical to SEQ ID NO: 3729

SEQ ID NO: 9666 - protein, 292 aa, Neisseria meningitidis; identical to SEQ ID NO: 3715

SEQ ID NO: 9667 - protein, 369 aa, Neisseria meningitidis
MFSDTDISMMETALRLAALGRFSTSPNPRVGCVIAHGSQIVGQGFHVKAGEPHAEVHALRQAGEMAQGATAFVTLEPCSHYGRTPPCAEALLRSGVTRVVAAMRDPNPLVAGKGLALLEAAGIKTECGLLEHQARELNRGFLSRIERRRPFVRLKCAVSLDGKTALSDGSSFWITGEDARADVQVLRAESCAVLTGIGTVLADNPRLNVRAFPTLRQPARIVLDSRLRLPLDSHLLTDGQSPTYIATLERDEDKLRPYREHAHIRILMPSETAGGKIDLNHLMRLLADEGFGEIMVEAGSELTSAFLAEDLADEIVLYRSPKILGSGKDLLSLPENRAALSAPPLWTPVSSEILGHDIKTVFRKNDNAF

SEQ ID NO: 9668 - protein, 129 aa, Neisseria meningitidis
MLYKCKIKKLDNTIEEAVLIEINGYELHCFISYCPFKIFENQFYEVELSYEIFNDYILDKSTSNIGFRKIDDSFKYEITAELKNNHLTLQNIQFEEDEYLINYSYLDNCLVTLTADRISVSFIREIQAA

SEQ ID NO: 9669 - protein, 280 aa, Neisseria meningitidis
MCQLLGMNCNTPTDIMFSFEGFRRRGGITDHHADGFGIGFFEGKGVRLFHDDKPSANSPVADLVRAYQIKSENVIAHIRKASQGQTSLANTHPFMREMWGGYWLFAHNGHLIDFFPEQGEFFHPVGTTDSERAFCHILNRLRTRFAARPDDDTLFDAIAGLTHEIRKFGLFNFMLSDGIALFAHASTLLHYIVRQAPFGKARLLDDDVMVDFAEVTTPSDRVAVIATLPLTRDESWSQLAVDELVMFREGNIVRHDRPENPVYMSAEEGLEIARAAGVSV

SEQ ID NO: 9670 - protein, 107 aa, Neisseria meningitidis
MMTESEFIRASEALFEHIEDQIDENGWDFDCRFAGNVLTIEAGDGTQIIVNRHTPNQELWIAAKSGGYHFAEQNGKWLATRDSRDFYDVLNEALSAASGEAVEIEEL

SEQ ID NO: 9671 - protein, 173 aa, Neisseria meningitidis; identical to SEQ ID NO: 3735

SEQ ID NO: 9672 - protein, 255 aa, Neisseria meningitidis
MRPYATTIYQLFILFIGSVFTMTSCEPVNEQTSFNNLEPMTGFEHTVTFDFQGIKMVIPYGYLARYTQDNATKWLSDTPGQDAYSINLIEISVYYKKTDQGWVLEPYNQQNKAHFIQFLRDGLDSVDDIVIRKDACSLSTTMGERLLTYGVKKMPSAYPEYEAYEDKRHIPENPYFHEFYYIKKGENPAIITHRNYHRYGENDYSTSVGSCINGFTVRYYPFIREKQQLTQQELVGYHQQVEQLVQSFVNNSSKK

SEQ ID NO: 9673 - protein, 269 aa, Neisseria meningitidis
MTRIGDFAAKSMIEIRSKRMITLPSLNNLPSKWDEIRHCLETRVFECGVMPHPNLTECEAGQFDRDFWDNTGCAPEEYVRIRRAIRLLEVRYPDSLNELVCAAIATPLGEMLAVFGNKGLCLLEFVGQKHLEQEIAAVQKALRGRFVFREDERTQLLRQELDLYFKGRLKTFATPLEQIGTEFQKQAWDALLAIPYGETRSYKEQAQRLGNPKAVRAVAAANGQNKVSILIPCHRVIGSDGKLTGYAGGLNRKQFLLALERGEVQTALF

SEQ ID NO: 9674 - protein, 262 aa, Neisseria meningitidis; identical to SEQ ID NO: 7522

SEQ ID NO: 9675 - protein, 177 aa, Neisseria meningitidis; identical to SEQ ID NO: 3663

SEQ ID NO: 9676 - protein, 242 aa, Neisseria meningitidis
MAFASLFTLPDDITAVLDDVALMTKAAAKKTAGVVGDDLAPNANRVTGVSAERELPIVWSMAKGSFSNKPVLVPAALLLSAFLPQLITPLLTAGGIYLCFEGVEKLLHKFLHRHDAHARNGGNRHRHDCFGVRNRCRHRQTRRLRHAADAPPTNLFAQFGANADCLYALLYARFERGRHACHVSYRRRTGRPQPRPSARFPARATLGRWLGGVLRQPRCRAAFRFDCLRPRLAADESFRQAL

SEQ ID NO: 9677 - protein, 105 aa, Neisseria meningitidis; identical to SEQ ID NO: 3758

SEQ ID NO: 9678 - protein, 169 aa, Neisseria meningitidis; identical to SEQ ID NO: 3746

SEQ ID NO: 9679 - protein, 242 aa, Neisseria meningitidis
MARTAITDNIWEQLQTTMKAHGCHQWKNDRTVMEAILWKLRTGAPWRDIPIELGSWKTAYNRFNRWSKKGLWQNFFLIYEKKLTKNGYSSTEVMYGVINMQVELGVVSIEQLDKAVAETRQKYTYVWTRMEIRSILKSLGVTCTTVKLQTTKSYKKPSILSLTKGMTRKKSEIKRNTVKLLYQSVKMPRNLTLILIATFINYATSRMHLHDSSFVVLLLAMRNLVILNRCFTWLALLFMLSI

SEQ ID NO: 9680 - protein, 42 aa, Neisseria meningitidis; identical to SEQ ID NO: 6907

SEQ ID NO: 9681 - protein, 163 aa, Neisseria meningitidis; identical to SEQ ID NO: 3739

SEQ ID NO: 9682 - protein, 291 aa, Neisseria meningitidis
LAADRTVPEPSKNPLPSRPPRPSRLPAVVHVQSRPARTMAQPFRSRTRTQPHHPHRFQPVLSFRTEHPRLQHLMPLPLAGARQHPVRIAGTDPTTDRKKPKNRESIRRRHRHHYSDRRQQTASGYRSRRRKSQRPNHTERRCPPDKEKRPLQTQLQTTYPYRGRLYRETAHHSRQYPVQPPVAFVGGHCRRYDRLCRQRLRQGKPATPERTSVAGRHYAQSPAPSADGSANQTPIFVENPLCGRTKLRYAAPIPLRPGSLFRADSECAKPSEGDVFKPVESSQAKCACCRL

SEQ ID NO: 9683 - protein, 105 aa, Neisseria meningitidis; identical to SEQ ID NO: 87

SEQ ID NO: 9684 - protein, 146 aa, Neisseria meningitidis; identical to SEQ ID NO: 2658

SEQ ID NO: 9685 - protein, 150 aa, Neisseria meningitidis; identical to SEQ ID NO: 3757

SEQ ID NO: 9686 - protein, 133 aa, Neisseria meningitidis
MRAIKHLAMALLLMFTVAGCQLAGWYKCSSLSGWCKPRKPAAIDFWDIVGESPPSLEDYEIPLSDGNRSVRVNEYESAQQSYFYRKIGKFEACGLDWRRRDGKPLIETFKQEGFDCLKKQGLRRNGLSERVRW

SEQ ID NO: 9687 - protein, 436 aa, Neisseria meningitidis
MNTPHPRPKIAVIGAGWAGLSAAVTLARHADVTLFEAGRQAGGRARALAGNTDGFGFLDNGQHILLGAYRGVLRLMKTIGSDPRAAFLRVPLHWHMHGGLQFRTLPLPAPLHILGGVLLARRVPSAFKAKLLADMSDLQKSARLGQPDTTVAQWLKQRNVPCAAVMQFWQPLVWGALNTPLETASLRVLCNVLSDGVLTKKSGSDYLLPKQDLGAIVAEPALAELQRLGADIRLETRVCRLNTLPDGKVLVNGEAFDAAVPATAPYHAAALLPEGTPEHVQTAYQNLRYHAITTVYLRYAEPVRLPAPLTGLADGTVQWLLCRGRLGLPENEVSAVISVSDRVGAFANRAWADKAHADLKRILPHLGEPEAVRVITEKRATTAADAPPPDLSWLHRHRIFPAGDYLHPDYPATLEAAVQSGFASAEACLQSLSDAV

SEQ ID NO: 9688 - protein, 122 aa, Neisseria meningitidis; identical to SEQ ID NO: 848

SEQ ID NO: 9689 - protein, 101 aa, Neisseria meningitidis; identical to SEQ ID NO: 705

SEQ ID NO: 9690 - protein, 45 aa, Neisseria meningitidis; identical to SEQ ID NO: 3752

SEQ ID NO: 9691 - protein, 816 aa, Neisseria meningitidis
MTQKEKHFEEYAALATLPLRDVVVYPHMVLPLFVGRPKSIAALENAITREEPVFLLAQTDAALEEPVAADLYQTGTVAQVLQVLKLPDGTVKVLVEGLYRGRVLTIEDTGGLFVSHIEAVVEEDTGGNTDLEAVRRTLLAQFEQYAKLNKKIPAEIIGSINGIAENSRLTDTVAAHLQLKLAQRQQILEIPEIGKRMEFLLAQLESELDIMQAEKRIRGRVKRQMEKSQREYYLNEQIKAIHKELGEEDENGELDALEAGIKKAGMSKEAEEKCLSELKKLKMMPPMSAESTVVRNYIDTLLELPWKKKSRVSKDIAKAGLVLDTDHYGLEKVKERILEYLAVQKRMDKLKGPILCLVGPPGVGKTSLGESIAKATGRKYVRMALGGVRDESEIRGHRRTYIGSMPGKILQNMAKAGVKNPLFLLDEIDKLGSDFRGDPASALLEVLDPEQNNKFADHYAEVDYDLSDVMFIATSNSLNIPTPLLDRMEIIRLSGYTEDEKINIAMQYLVPKQMKRNGVKEGELAIEESAVRDIIRYYTREAGVRSLDREIAKICRKVVMQITLDEDSKTKKTGKAKPRAVKVNEKNLHDYLGVRRFDYGVAESENRIGQVTGLAWTEVGGELLTVEAAALPGKGVIQCTGQLGDVMKESVSAAWSVVRSRAESVGLAPDFYEKKDIHIHVPEGATPKDGPSAGIAMTLAAVSAFTKIPVRADVAMTGEITLRGEVLPIGGLKEKLLAALRGGIKHVLIPKDNLKDLEEIPENVKTGLTIHPVKWIDEVLALGLESQPEPWAEPSGAEAAAESASKPKPRSRATKH

SEQ ID NO: 9692 - protein, 120 aa, Neisseria meningitidis; identical to SEQ ID NO: 1496

SEQ ID NO: 9693 - protein, 374 aa, Neisseria meningitidis; identical to SEQ ID NO: 3748

SEQ ID NO: 9694 - protein, 216 aa, Neisseria meningitidis
MPVTRPAKINTYTRIIDASLALFNEEGERNISTNHIAAHLGISPGNLYYHFRNKDEIIVQLFKRYSEALLEYLNEAVLPSDVEDSINYMAGIYDVMWEYRFLFSDVNTLLARSAELLGEHNTFTQAKVSPLLVNLLTQLNGLNIIQADQTAMNDLAVNMWMITKYWFDFDSSLRGRTKLTEDSKARGIRRTLSLLRPYLLPEHREKYDRKIGNGNP

SEQ ID NO: 9695 - protein, 153 aa, Neisseria meningitidis
MNIIMDSTRKFGILWEENSECNGFIYGKIQIIIGENIYPKICPYGYFTLNAVFNSLKSSFEEKYYAGGNNGLDFGEQLFDIDKYNSLELCNIFSIDTTYMSGGSNCEIDCLVLEMGYSGEEERLFYSFDNGKNFKEIRYKKGTVESVIFQLNL

SEQ ID NO: 9696 - protein, 62 aa, Neisseria meningitidis
LPKFGECPLPSPPPRGREVSADFAVAGGLRKNARNINSGNFSGSLYRKADVTNAASVFSDDL

SEQ ID NO: 9697 - protein, 375 aa, Neisseria meningitidis
MYTFRPFPKLHTETHIMNIQNIRTLLDTVAVPNTARTLGGEKAVRSVEQRSDGIHIALHFGFPVAHIAAAVADSVQEILMPETGGAHIHLSIDTEIGTHKVQPGVTTIKGVKNIIAVASGKGGVGKSTTTANLAAAMARMGARVGVLDADLYGPSQPTMLGVDDRKPDQKNQKLIPVESSDGIQVMSIGFLVDTDQAVVWRGPMVSQALQQLMFQSEWDEVDYLFIDLPPGTGDIQLTLSQRIPVTGSVIVTTPQDIALIDARKAVDMFRKVNIPILGVLENMSVHICSNCGHSEALFGTDGGKDLAARLNVPLLGQLPLSLPVREAMDGGATAQLFDEHPAIARIYTDAAFQIALGIADKGKDFSSRFPKIVVE

SEQ ID NO: 9698 - protein, 431 aa, Neisseria meningitidis
VIAMIYIVLFLAAVLAVVAYNMYQENQYRKKVRDQFGHSDKDALLNSKTSHVRDGKPSGGSVMMPKPQPAVKKTAKPQDPAMRNLQEQDAVYIAKQKQAKVSPFKTEIETALEESGIIGNSAHTVSEPQTGHSAPKPADAPAKPAPVPQTPAKPLITLKELSKVELPWFDVRFDFISYIALTEAKELHALPRLSNRCRYQIVGCTMDDHFQIAEPIPGIRYQAFIVGIQAVSRNGLASQEELSAFNRQVDAFAQSMGGQTLHTDLAAFIEVASALDAFCARVDQTIAIHLVSPTSISGVELRSAVTGVGFVLEDDGAFHYTDTSGSTMFSICSLNNEPFTNALLDNQSYKGFSMLLDIPHSPAGEKTFDDLFMDLAVRLSGQLNLNLVNDKMEEVSTQWLKDVRTYVLARQSEMLKVGIEPGGKTALRLFS

SEQ ID NO: 9699 - protein, 467 aa, Neisseria meningitidis; identical to SEQ ID NO: 3712

SEQ ID NO: 9700 - protein, 452 aa, Neisseria meningitidis
MKPLDLNFICQALKLPMPSESKPVSRIVTDSRDIRAGDVFFALAGGRFDAHDFVEDVLAAGAAAVVVSREDCAAMDGALKVDDTLAALQTLAKAWRENVNPFVFGITGSGGKTTVKEMLAAVLRRRFGDDAVLATAGNFNNHIGLPLTLLKLNEKHRYAVIEMGMNHFGELAVLTQIAKPNAALVNNAMRAHVGCGFDGVGDIAKAKSEIYQGLCSDGIALIPQEDANMAVFKTATLNLNTRTFGIDSGDVHAENIVLKPLSCEFDLVCGDERAAVVLPVPGRHNVHNAAAAAALALAAGLSLNDVAEGLKGFSNIKGRLNVKSGIKGATLIDDTYNANPDSMKAAIDVLARMPAPRIFVMGDMGELGEDEAAAMHAEVGAYACDQGIEAAYFVGDNSVEAAEKFGADGLWFAAKDPLIQVLRHDLPERATVLVKGSRFMQMEEVVEALEDK

SEQ ID NO: 9701 - protein, 201 aa, Neisseria meningitidis; identical to SEQ ID NO: 3703

SEQ ID NO: 9702 - protein, 61 aa, Neisseria meningitidis; identical to SEQ ID NO: 1125

SEQ ID NO: 9703 - protein, 252 aa, Neisseria meningitidis
MNPKISSDHTEDAVRLSKRMAQLGLCSRREADGYIEQGWVTVNGKTAVLGQKVSPADRIELNKKAHEQQAARITILLNKPVGYVSAQAEKGYKSAAELITPENRWEGDTGRIRFDPKHKIGLAPAGRLDIDSVGLLVLTQDGRIAKQLIGENSGSEKEYLVRVRGKLDEKGLALLNHGLSLDGEKLRPAQVEWQNEDQLRFVLKQGKKRQIRRMCELVGLRVVGLKRIRMGKVKLGRLPPGKWRYLAPGESF

SEQ ID NO: 9704 - protein, 93 aa, Neisseria meningitidis; identical to SEQ ID NO: 3660

SEQ ID NO: 9705 - protein, 122 aa, Neisseria meningitidis; identical to SEQ ID NO: 3754

SEQ ID NO: 9706 - protein, 360 aa, Neisseria meningitidis
MPSEAASDGILPLYPTRTIFQKPIMLPFFPEPSLSYTQQNRTAVLLLNLGTPDAPTAQAVRPYLKSFLTDRRVVELPKWLWYPILHGLVLTLRPKKSAHAYEKIWFKEGSPLEVYTARQAAALAKRMPDLIVRHAMTYGNPSVADVLSELKAQGAGRLLVIPMYPQYAASSSGAAVDKVCEQLLLQRNQMSVRTVSRFYDDTGYIDAMKNHILRYWAEHGRGKKLMLSFHGVPQKHHDLGDPYPDECRHTAKLLAEALELTEDQYVVSFQSQFGRAKWVTPSTQDLFGKLPKQGVTELDVFCPGFLADCLETMEEIALMGREQFYEAGGKSYRYIPCLNDNPDWIDALVALAEENLGGWR

SEQ ID NO: 9707 - protein, 488 aa, Neisseria meningitidis
MVIFYFCGKTFMPARNRWMLLLPLLASAAYAEETPREPDLRSRPEFRLHEAEVKPIDREKVPGQVREKGKVLQIDGETLLKSPELLSRAMYSAVVSNNIAGIRVILPIYLQQAQQDKMLALYAQGILAQADGRVKEAISHYRELIAAQPDAPAVRMRLAAALFDNRQNEAAADQFDRLKAENLPPQLMEQVELYRKALRERDAWKVNGGFSVTREHNINQAPKRQQYGKWTFPKQVDGTAVNYRLGAEKKWSLKNGWYTTAGGDVSGRVYPGNKKFNDMTAGVSGGIGFADRRKDAGLAVFHERRTYGNDAYSYTNGARLYFNRWQTPKWQTLSSAEWGRLKNTRRARSDNTHLQISNSLVFYRNARQYWMGGLDFYRERNPADRGDNFNRYGLRFAWGQEWGGSGLSSLLRLGAAKRHYEKPGFFSGFKGERRRDKELNTSLSLWHRALHFKGITPRLTLSHRETRSNDVFNEYEKNRAFVEFNKTF

SEQ ID NO: 9708 - protein, 655 aa, Neisseria meningitidis
VGNTFKSILVWVALGIGLMAAFNALDGKKEDNGQIEYSQFIQQVNNGEVSGVNIEGSVVSGYLIKGERTDKSTFFTNAPLDDNLIKTLLDKNVRVKVTPEEKPSALAALFYSLLPVLLLIGAWFYFMRMQTGGGGKGGAFSFGKSRARLLDKDANKVTFADVAGCDEAKEEVQEIVDYLKAPNRYQSLGGRVPRGILLAGSPGTGKTLLAKAIAGEAGVPFFSISGSDFVEMFVGVGASRVRDMFEQAKKNAPCIIFIDEIDAVGRQRGAGLGGGNDEREQTLNQLLVEMDGFESNQTVIVIAATNRPDVLDPALQRPGRFDRQVVVPLPDIRGREQILNVHSKKVPLDESVDLLSLARGTPGFSGADLANLVNEAALFAGRRNKVKVDQSDFEDAKDKIYMGPERRSMVMHEDEKRATAYHESGHAIVAESLPFTDPVHKVTIMPRGRALGLTWQLPERDRISMYKDQMLSQLSILFGGRIAEDIFVGRISTGASNDFERATQMAREMVTRYGMSDKMGVMVYAENEGEVFLGRSVTRSQNISEKTQQDIDAEIRRILDEQYQIAYKILDENRDKMETMCKALMEWETIDRDQVLEIMAGKQPSPPKDYSHNLRENADAAEDNAPHAPTREETEAPAPADTASTESEQQPENKA

SEQ ID NO: 9709 - protein, 642 aa, Neisseria meningitidis
MAKVIGIDLGTTNSCLAISENGQTKVIENAEGARTTPSVIAYLDGGEILVGAPAKRQAVTNAKNTIYAAKRLIGHKFEDKEVQRDIESMPFEIIKANNGDAWVKAQGKELSPPQISAEVLRKMKEAAEAYLGEKVTEAVITVPAYFNDSQRQATKDAGRIAGLDVKRIINEPTAAALAFGMDKGDNKDRKVAVYDLGGGTFDISIIEIANLDGDKQFEVLATNGDTFLGGEDFDQRLIDHIIAEFKKEQGIDLKQDVMALQRLKEAAEKAKIELSSGQQTEINLPYITMDATGPKHLAMKITRAKFESLVEDLIARSIEPCRTALKDAGLSTSDIDDVILVGGQSRMPKVQEAVRDFFGKEPRKDVNPDEAVAVGAAIQGEVLSGGRSDVLLLDVTPLSLGIETMGGVMTKLIQKNTTIPTKASQVFSTAEDNQSAVTIHVLQGERERASANKSLGQFNLGDIAPAPRGMPQIEVTFDIDANGILHVSAKDKGTGKAANITIQGSSGLSEEEIERMVKDAEANAEEDKKLTELVASRNQAEALIHSVKKSLADYGDKLDAAEKEKIEAALKEAEEAVKGDDKAAIDAKTEALGAASQKLGEMVYAQAQAEAQAGESEQANASAKKDDDVVDADFEEVKDDKK

SEQ ID NO: 9710 - protein, 231 aa, Neisseria meningitidis; identical to SEQ ID NO: 3708

SEQ ID NO: 9711 - protein, 145 aa, Neisseria meningitidis; identical to SEQ ID NO: 4760

SEQ ID NO: 9712 - protein, 358 aa, Neisseria meningitidis
MQEWFQNLFAATLGLGDLGITVGLVVSVIVKIVIILIPLILTVAYLTYFERKVIGFMQLRVGPNVTGPWGLIQPFADVFKLLFKEVTRPKLSNKALFYIGPIMSLAPSFAAWAVIPFNEEWVLTNINIGLLYILMITSLSVYGVIIAGWASNSKYSFLGAMRASAQSISYEIAMSAALVCVVMVSGSMNFSDIVAAQAKGIAGGSVFSWNWLPLFPIFIVYLISAVAETNRAPFDVAEGESEIVAGHHVEYSGFAFALFFLAEYIFMILIAALTSLMFLGGWLSPFPQSWGFIGTPSAFWMFVKMAAVLYWYLWIRATFPRYRYDQIMRLGWKVLIPIGFAYIVILGVWMISPLNLWK

SEQ ID NO: 9713 - protein, 57 aa, Neisseria meningitidis; identical to SEQ ID NO: 735

SEQ ID NO: 9714 - protein, 181 aa, Neisseria meningitidis; identical to SEQ ID NO: 3765

SEQ ID NO: 9715 - protein, 144 aa, Neisseria meningitidis; identical to SEQ ID NO: 6

SEQ ID NO: 9716 - protein, 750 aa, Neisseria meningitidis; identical to SEQ ID NO: 3733

SEQ ID NO: 9717 - protein, 98 aa, Neisseria meningitidis; identical to SEQ ID NO: 1735

SEQ ID NO: 9718 - protein, 328 aa, Neisseria meningitidis
LAADRAVPEPSKKPLPRPPRPSRLPAVVHVQSRSARTMAQPLRSRTRTQPHYPHRLQPVLPFRTEHPRLQHLMPLPQLAGARRHPVRTVGTDLPTDRKRLKNRESIRRRHRHHYSDRRQRTASGHRSRRGTSQRSNHTEGQKCPLDKEKQPLQTRLQTTYPYRCGRLYRETVHHSHQCPVHTPVAVVGRTAQRYDRLCRQRLRQQGKPATSERTSVAERHYAQSLPQPSADGNANQTPIFIEDPLWIKFKSGQGDEAADSTNSTARRGNAVLVISTICGRTELRYAAPIPLCAGSLFRADSECAKPPEGDVFEPVESGQQAKCARCRL

SEQ ID NO: 9719 - protein, 163 aa, Neisseria meningitidis; identical to SEQ ID NO: 3764

SEQ ID NO: 9720 - protein, 182 aa, Neisseria meningitidis; identical to SEQ ID NO: 3766

SEQ ID NO: 9721 - protein, 66 aa, Neisseria meningitidis; identical to SEQ ID NO: 587

SEQ ID NO: 9722 - protein, 281 aa, Neisseria meningitidis; identical to SEQ ID NO: 3753

SEQ ID NO: 9723 - protein, 305 aa, Neisseria meningitidis; identical to SEQ ID NO: 3696

SEQ ID NO: 9724 - protein, 423 aa, Neisseria meningitidis; identical to SEQ ID NO: 3498

SEQ ID NO: 9725 - protein, 94 aa, Neisseria meningitidis; identical to SEQ ID NO: 387

SEQ ID NO: 9726 - protein, 131 aa, Neisseria meningitidis; identical to SEQ ID NO: 1281

SEQ ID NO: 9727 - protein, 178 aa, Neisseria meningitidis; identical to SEQ ID NO: 5654

SEQ ID NO: 9728 - protein, 140 aa, Neisseria meningitidis; identical to SEQ ID NO: 3245

SEQ ID NO: 9729 - protein, 37 aa, Neisseria meningitidis; identical to SEQ ID NO: 6771

SEQ ID NO: 9730 - protein, 166 aa, Neisseria meningitidis; identical to SEQ ID NO: 1704

SEQ ID NO: 9731 - protein, 47 aa, Neisseria meningitidis; identical to SEQ ID NO: 3740

SEQ ID NO: 9732 - protein, 119 aa, Neisseria meningitidis; identical to SEQ ID NO: 1252

SEQ ID NO: 9733 - protein, 96 aa, Neisseria meningitidis; identical to SEQ ID NO: 3692

SEQ ID NO: 9734 - protein, 72 aa, Neisseria meningitidis; identical to SEQ ID NO: 113

SEQ ID NO: 9735 - protein, 114 aa, Neisseria meningitidis; identical to SEQ ID NO: 53

SEQ ID NO: 9736 - protein, 384 aa, Neisseria meningitidis; identical to SEQ ID NO: 3776

SEQ ID NO: 9737 - protein, 183 aa, Neisseria meningitidis; identical to SEQ ID NO: 3701

SEQ ID NO: 9738 - protein, 237 aa, Neisseria meningitidis; identical to SEQ ID NO: 1707

SEQ ID NO: 9739 - protein, 622 aa, Neisseria meningitidis
MQAVRYRPEIDGLRAVAVLSVIIFHLNNRWLPGGFLGVDIFFVISGFLITGIILSEIQNGSFSFRDFYTRRIKRIYPAFIAAVSLASVIASQIFLYEDFNQMRKTVELSAVFLSNIYLGFQQGYFDLSADENPVLHIWSLAVEEQYYLLYPLLLIFCCKKTKSLRVLRNISIILFLILTATSFLPSRFYTDILNQPNTYYLSTLRFPELLAGSLLAVYGQTQNGRRQTASGKRQLLSLLCFGALLACLFVIDKHNPFIPGMTLLLPCLLTALLIRSMQYGTLPTRILSASPIVFVGKISYSLYLYHWIFIAFAHYITGDKQLGLPAVSAVAALTAGFSLLSYYLIEQPLRKRKMTFKKAFFCLYLAPSLILVGYNLYARGILKQEHLRPLPGAPLAAENHFPETVLTLGDSHAGHLRGFLDYVGSREGWKAKILSLDSECLVWVDTTLADNPLCRKYRDEVEKAEAVFIAQFYDLRMGGQPVPRFEAQSFLIPGFQARFRETVKRIAAVKPVYVFANNTSISRSPLREEKLKRFAANQYLRPIQAMGDIGKSNQAVFDLVKDIPNVHWVDAQKYLPKNTVEIHRRYLYGDQDHLTYFGSYYMGREFHKHERLLKSSRGGALQ

SEQ ID NO: 9740 - protein, 186 aa, Neisseria meningitidis
LLPSHRSPDSATHDRIRKMTMNAMPQTAAQNETLHTCSIIVDDAQDFSPMLLDAGRDDTLISESMIPQIRTVAALIAAERHDFSRSSPAEFTDAADFFAARILVLGVRRFHLDVSLLQILKTANSRARRFAEKHRLFFTPAQAELSLNKHKNRRLLTVETEHEVENKGNPVANSLAFVRKLHTLPL

SEQ ID NO: 9741 - protein, 506 aa, Neisseria meningitidis; identical to SEQ ID NO: 2869

SEQ ID NO: 9742 - protein, 478 aa, Neisseria meningitidis
LENSLIIGLALAVLLMLLVMRAKQGKKTPKRKSQGVGNTQGQTPGSNDSDWVDQIGQSVSDGTQPDWSWNESAETASAAVSAQEVDPLTEYQVYKQFGYQGKAAESLAAYLDGIPDGEAKPENLIRELLDINLEVGDVDVLADNLQKYGKLIPSELLAKYIEQALQRDSNHLRIRVLAEEGLGWGTQEIEKRAEGGSATAASASPPPDAGGKAYEAEEIKRIPIVRGKKDVSGISQEEIGAIAGLVRADQGAKILKDKVSYETASKQYDRAIQTSEKPANLIIDALKLDYQHADIDRFAGHLWKLYQTLGNYGRQVKERMLGWGYSLGYHEVFDDLEKGPNDRQIKDIGMGHGYLPKNIQKFKSQHRDLVLQDSSLINTGSSPADDAVKEVESLLMYGQIEAAMDVLEQAVLKYPDESQLYITLIDIYERTEDWDRLGQFLRVLRERADRLPEEVVMLMSRLLQRMNQNIKKIKRYGK

SEQ ID NO: 9743 - protein, 77 aa, Neisseria meningitidis; identical to SEQ ID NO: 760

SEQ ID NO: 9744 - protein, 342 aa, Neisseria meningitidis; identical to SEQ ID NO: 3698

SEQ ID NO: 9745 - protein, 221 aa, Neisseria meningitidis
MMMHASVQSRFAPILYVLIFFAGFLTAQIWFNQKAYTEELPPLLSALSAVALVWLAWAFVSARSKAKAEKFYREKMIQNESIHPVLHASLQHLEHKPQMLALLVKNHGKGMAEQVRFKAEVLPDDEDARTIAAELAKMDMFALGTDAVASGETYGRVFADIFELSAALEGRAFKGMLKLTAEYKNIFGDACRSETALDLGALNQALQEISKTSEKSKRIFY

SEQ ID NO: 9746 - protein, 99 aa, Neisseria meningitidis; identical to SEQ ID NO: 3688

SEQ ID NO: 9747 - protein, 130 aa, Neisseria meningitidis; identical to SEQ ID NO: 1661

SEQ ID NO: 9748 - protein, 98 aa, Neisseria meningitidis; identical to SEQ ID NO: 3727

SEQ ID NO: 9749 - protein, 293 aa, Neisseria meningitidis
MCIEMKFIFFVLYVLQFLPFALLHKLADLTGLLAYLLVKPRRRIGEINLAKCFPEWDGKKRETVLKQHFKHMAKLMLEYGLYWYAPAGRLKSLVRYRNKHYLDDALAAGEKVIILYPHFTAFEMAVYALNQDVPLISMYSHQKNKILDAQILKGRNRYDNVFLIGRTEGLRALVKQFRKSSAPFLYLPDQDFGRNDSVFVDFFGIQTATITGLSRIAALANAKVIPAIPVREADNTVTLHFYPAWESFPSEDAQADAQRMNRFIEERVREHPEQYFWLHKRFKTRPEGSPDFY

SEQ ID NO: 9750 - protein, 193 aa, Neisseria meningitidis; identical to SEQ ID NO: 640

SEQ ID NO: 9751 - protein, 221 aa, Neisseria meningitidis
MDSWFEDTAMGRYVAKLEQDFFGRYLDSYRFSGMCAVQVGGPWLSLSEDVVCVPRDMSMSAENMALADVSADMLLFPHTLEGGVPSQILSEAHRILKPSGRLMLTGFNPYSLWGFSRWFDGERLPEKRFCLPLPELKRQLADVGFDIEFGKFMVYLPPVSSLGQIRFWRFMEKAGDRWWPQCAAVYGLVLVKRAAGVTPLPAWDGYLGGKALAAGAARIAD

SEQ ID NO: 9752 - protein, 68 aa, Neisseria meningitidis; identical to SEQ ID NO: 531

SEQ ID NO: 9753 - protein, 1391 aa, Neisseria meningitidis; identical to SEQ ID NO: 3726

SEQ ID NO: 9754 - protein, 117 aa, Neisseria meningitidis
MDKHTTRLRRARKTRARIADLKMVRLCVFRSNNHIYAQVISAEGDKVLAQASTLEAEVRGSLKFGSNVEAAAIVGKRIAEKAKAAGVEKVAFDRSGFQYHGRVKALAEAARENGLSF

SEQ ID NO: 9755 - protein, 187 aa, Neisseria meningitidis
MPWNLPIFLTWLRVLLIPVMTALFYLPFPWFAEETINLTAAVIFAVAALTDWFDGFLARLWKQTSDFGAFLDPVADKLMVAVSLLLLVKLDRTYVLFAMIIIGREITISALREWMAQMGKRNSVAVATVGKFKTAAQMLAIFLLLLNIPDFYGFNLVVIGNVLMFIASLLTVWSMLYYLKMAWKEIA

SEQ ID NO: 9756 - protein, 145 aa, Neisseria meningitidis; identical to SEQ ID NO: 3684

SEQ ID NO: 9757 - protein, 469 aa, Neisseria meningitidis; identical to SEQ ID NO: 3744

SEQ ID NO: 9758 - protein, 161 aa, Neisseria meningitidis
MFVNEKYPYAALFAGLVFLTLPFALAVHDAFALAFGRTGLLVSVSDGGFGWRGGWDGVVWFVFGVFAFLNVVVSAGLTKLAYKKMMRRHSRYTLFLSGVAACAAAAVAWIFELLLGSGALGGLRGEAVLEYAFAVWLVAMLTLPKRLTRAPVQPVVFHRKK

SEQ ID NO: 9759 - protein, 304 aa, Neisseria meningitidis
MQNFGKVAVLMGGFSSEREISLDSGTAILNALKSKGIDAYAFDPKETPLSELKAQGFQTAFNILHGTYGEDGAVQGALELLGIPYTGSGVAASAIGMDKYRCKLIWQALGLPVPEFAVLHDDTDFDAVEEKLGLPMFVKPAAEGSSVGVVKVKGKGRLKSVYEELKHLQGEIIAERFIGGGEYSCPVLNGKGLPGIHIIPATEFYDYEAKYNRNDTIYQCPSEDLTEAEESLMRELAVRGAQAIGAESCVRVDFLKDTDGKLYLLEINTLPGMTSHSLVPKSAAVTGVGFADLCIEILKTAHVG

SEQ ID NO: 9760 - protein, 56 aa, Neisseria meningitidis; identical to SEQ ID NO: 3693

SEQ ID NO: 9761 - protein, 344 aa, Neisseria meningitidis
MSTSLSYRDAGVDIDAGDQLVENIKPFAKRTMRPEVLGDLGGFGALVEIGKKYKNPVLVSGTDGVGTKLKLAFDWDKHDTVGIDLVAMSVNDILVQGAEPLFFLDYFACGELDVPRATDVIKGIAQGCEESGCALIGGETAEMPGMYPVGEYDLAGFAVGVVEKENVITGRSIGAGDVVLGLASNGAHSNGYSLIRKIIERDNPDLDAEFDNGKTLREAVIAPTRLYVKPILAALEKFTIKGMAHITGGGITENVPRVLPENTVAQIDAKSWELPKLFQWLQKAGNVETQEMYRTFNCGIGMVVIVAAEDADAVQDLLGEQGETVYRLGLIRERQGDEHQTQVA

SEQ ID NO: 9762 - protein, 480 aa, Neisseria meningitidis
MKQLAMYINGRFENDFNGEWRDVLNPSTEETIAREPKGGKADVDRAVAAARAAQPAWERLPAVERGAYLRKIAQGIRERADELTDTIVAEGGKTKDLARVEVMFTADYLDYQAEWARRYEGEIIQSDRPRENILLFKRPLGVVAGILPWNFPFFLIARKMGPALVTGNTIVVKPSSVTPINCHIFAEIVDAVGLPAGVFNVVNGPGAEIGNALSAHPQVDMVSLTGSVEAGRQVMEAASANITKVSLELGGKAPAIVLKDADLDLAVKSILASRVGNTGQICNCAERVYVHSSLKDAFIEKMTAAMKGVRYGNPAEAEAGALEMGPLIEERAVKAVAEKVERAVKQGAKLVCGGKRAEGRGYFFEPTLLTDTDNSMDIMKEETFGPVLPVSTFDTLDQVIALANDCEFGLTSSVYTTNLNEAFYVTRRLQFGETYINRENFEAMQGFHAGWKKSGIGGADGKHGLEEYLQTQVVYLETDI

SEQ ID NO: 9763 - protein, 206 aa, Neisseria meningitidis; identical to SEQ ID NO: 1193

SEQ ID NO: 9764 - protein, 460 aa, Neisseria meningitidis
MANIAHDIFKAYDIRGIVGKTLTDEAAYLIGKAIATKASEKGITRIALGRDGRLSGPGLMAQIQHGFTDSSIDVLNVGMIATPMLYFAAINECGGSGVMITGSHNPPDYNGFKMMLGGDTLAGEAIQELLAIVEKDGFVAADKQGSVTEKDISGEYHNNIVGHIKLKRPMKIVIDAGNGVGGAFAGKLYKGLGNEVAELFCEVDGNFPNHHPDPSKPKNLQDLIAALKNSDAEIGLAFDGDADRLGVVTKDGNIIYPDRQLMLFAQDVLSRNPKAKVIFDVKSTRLLTPWIKEHGGEPVMEKTGHSFIKSAMKKTGALVAGEMSGHIFFKERWFGFDDGLYAGARLLEILSASDNPSEVLNNLPQSISTPELNIALPEGSNGHQVIDELAAKAEFEGATEIITIDGLRVEFPDGFGLMRASNTTPILVLRFEADTQEAIERIQNQFKAVIESNPNLIWPL

SEQ ID NO: 9765 - protein, 85 aa, Neisseria meningitidis
MVLLLIVNKYWKVNDMKNEIQKIMDKYDPWHEDDFESYEDIAKDVSLMTDKTFIEHYLLEVYSEENGHFDQENVHAMIEEIKNAI

SEQ ID NO: 9766 - protein, 92 aa, Neisseria meningitidis; identical to SEQ ID NO: 1005

SEQ ID NO: 9767 - protein, 514 aa, Neisseria meningitidis
MNMVSKLDKYWQHPALYWPLLILFAAATPFTFAPYYHFWLMPLIFGAFVRLIELRPRFAVSSAYLFGLTAYTTQFYWIHTALHDVSGLPDLYAVPLTFLLPAYLALYPALCFWLWKKFTLPRGIKIGLVLPILWTLTEFARERFLTGFGWGAIGYSQITPDSPLAGFAPLGGIHMVTLATAFLGVWLVLASDNTARSGKRLLPIILIAALLAAGYTARQTDFTRPDGSRSTVALLQGNIDQTLKWREDQVIPTIQKYYEQVGKTTADIVILPETAIPVMRQNLPENILAKFAEQAQNNGSALAVGISQYTSDGNGYENAVINLTGYQENNQDGIPYYAKNHLVPFGEYKPLPFLTTPLYKMMNMPLSDFRKGGGKQSALLMKNQKIAFNICYEDGFGDELIAAAKDATLLANASNMAWYGKSNAMYQHLQQSQARAMELGRYMVRATNTGATAIISPKGNIIAQAQPDTETVLEGHIKGYVGETPYMKTGSSWWLMGILTLAALILFIFRNKEH

SEQ ID NO: 9768 - protein, 123 aa, Neisseria meningitidis; identical to SEQ ID NO: 616

SEQ ID NO: 9769 - protein, 348 aa, Neisseria meningitidis
MKMQAVVVNKNVAGDVEIVEREVRPLEYGEALVEVEYCGVCHTDLHVAAGDYGEKPGRVLGHEGIGLVKEVADGVKNLKVGDRVSIAWLFQSCGSCEYCNTGRETLCRSVLNAGYTADGGMATHCIVSADYAVKVPEGLDPAQASSITCAGVTTYKAIKVSSVRPGQWIAIYGAGGLGNLGVQYAKKVFGAHVVAIDINDEKLAFAKESGADLVINAAKEDAAKVIQEKTGGAHVAIVTAVSAAAFNSAVNCVRAGGRVVAIGLPPESMDLSIPRLVLDGIEVVGSLVGTRKDLEEAFQFGAEGLVVPKVQLRALDEAPAIFQEMREGKITGRMVIDMKKECGCGHHH

SEQ ID NO: 9770 - protein, 174 aa, Neisseria meningitidis
MEMKQMLLAVGVVAVLAGCGKDAGGYEGYWREKSDKKEGVIAVKKEKGNYFLNKINVFTGKEESLLLSEKDGALSINTGIGEIPIKLSDDGKELYVERRQYVKTDAAMKDKIIAHQKKCGQTAQAYLDARKALPSNQTYQQRQAAIEQLKRRFEAEFDELEKEIKCNGKPTLLL

SEQ ID NO: 9771 - protein, 177 aa, Neisseria meningitidis; identical to SEQ ID NO: 5671

SEQ ID NO: 9772 - protein, 390 aa, Neisseria meningitidis; identical to SEQ ID NO: 7103

SEQ ID NO: 9773 - protein, 161 aa, Neisseria meningitidis; identical to SEQ ID NO: 1189

SEQ ID NO: 9774 - protein, 710 aa, Neisseria meningitidis
MSIVSAPLPALSALIILAHYHGIAANPADIQHEFCTSAQSDLNETQWLLAAKSLGLKAKVVRQPIKRLAMATLPALVWCDDGNHFILAKTDGEGEHAQFLIQDLVTNKSAVLSFAEFSNRYSGKLILVASRASVLGSLAKFDFTWFIPAVIKYRRLFFEVLVVSVVLQLFALITPLFFQVVMDKVLVHRGFSTLDVVSVALLVVSLFEIVLGGLRTYLFAHTTSRIDVELGARLFRHLLSLPLSYFEHRRVGDTVARVRELEQIRNFLTGQALTSVLDLAFSFIFLAVMWYYSSTLTWVVLASLPAYAFWSAFISPILRTRLNDKFARNADNQSFLVESITAVGTVKAMAVEPQMTQRWDNQLAAYVASGFRVTKLAVVGQQGVQLIQKLVTVATLWIGARLVIEGKLTVGQLIAFNMLSGQVAAPVIRLAQLWQDFQQVGISVARLGDILNAPTENASSHLALPDIRGEITFEHVDFRYKADGRLILQDLNLRIRAGEVLGIVGRSGSGKSTLTKLVQRLYVPEQGRVLVDGNDLALAAPAWLRRQVGVVLQENVLLNRSIRDNIALTDTGMPLERIIEAAKLAGAHEFIMELPEGYGTVVGEQGAGLSGGQRQRIAIARALITNPRILIFDEATSALDYESERAIMQNMQAICANRTVLIIAHRLSTVKTAHRIIAMDKGRIVEAGTQQELLAKPNGYYRYLYDLQNG

SEQ ID NO: 9775 - protein, 516 aa, Neisseria meningitidis
MKKPLISVAAALLGVALGTPYYLGVKAEESLTQQQKILQETGFLTVESHQYERGWFTSMETTVIRLKPELLNNARKYLPDNLKTVLEQPVTLVNHITHGPFAGGFGTQAHIETEFKYAPETEKVLERFFGKQAPVSLANTVYFNGSGKMEVSVPAFDYEELSGIRLHWEGLTGKTVYQKGFKSYRNSYDAPLFKIKLADKGDAAFEKAHFDSETSDGINPLALGSSNLTLEKFSLEWKEGVDYNVKLNELVNLVTDLQIGAFINPNGSIAPSKIEVGKLAFSTKTGESGSFINSEGQFRFDTLVYGNEKYGPLDIHIAAEHLDASALTVLKRKFAQISAKKMTEEQIRNDLIAAVKGEASGLFTNNPVLDIKTFRFTQPSGKIDVGGKIMFKDMKKEDLNQLGLMLKKTEADIRMSIPQKMLEDLAVSQAGNIFSVNAEDEAEGRASLDDINETLRLMVDSTVQSMAREKYLTLNGDQIDTAISLKNNQLKLNGKTLQNEPEPDFDEAGMVSEPQQ

SEQ ID NO: 9776 - protein, 489 aa, Neisseria meningitidis
LKAVILHTGGHEMNEYSQLIKHPDISLSPISDGIGVGNPATGEILAYVRKTDSDKLKNLIQKAAAAQKLWAAKTALERADILWCWYFLVKENKEALARLMTMEQGKSLTESRGEIDYAASFVRWFAEEARRIDGDVLTSVKASQKLVVLKQPVGVTAAITPWNFPSAMIARKAAPALAVGCAMIIKPASLTPLSAYALASLAYEAGVPQDLLPVVSGRASEIGREFATNPIIRKISFTGSTEVGAKIFADSAADIKKLSLELGGNAPFIVFDDADLDKAVEGALASKFRNSGQTCVCTNRVYAQSGIYDAFCRKLSEKAAALKLGNGLEDGVNQGPLIEEKAVEKVEQHIADALSKGAICLTGGKRSALGGTFFEPTVLSGITAQMAVAREETFGPLCPVFRFETEAEVIEAANNTEYGLAAYLFTADTARQWRVGEALEYGMVGINTGLISNEAAPFGGVKRSGLGREGSKYGADEYLELKYLCMDVG

SEQ ID NO: 9777 - protein, 382 aa, Neisseria meningitidis
MPTMGAEMNTRNMRYILLTGLLPMASAFGETALQCAALTDNVTRLACYDRIFAAQLPSSAGQEGQESKAVLNLTETVRSSLDKGEAVIVVEKGGDALPADSAGETADIYTPLSLMYDLDKNDLRGLLGVREHNPMYLMPLWYNNSPNYAPGSPTRGTTVQEKFGQQKRAETKLQVSFKSKIAEDLFKTRADLWFGYTQRSDWQIYNQGRKSAPFRNTDYKPEIFLTQPVKADLPFGGRLRMLGAGFVHQSNGQSRPESRSWNRIYAMAGMEWGKLTVIPRVWVRAFDQSGDKNDNPDIADYMGYGDVKLQYRLNDRQNVYSVLRYNPKTGYGAIEAAYTFPIKGKLKGVVRGFHGYGESLIDYNHKQNGIGIGLMFNDLDGI

SEQ ID NO: 9778 - protein, 113 aa, Neisseria meningitidis
MMDKNQLEQEFHKAMLNIYQEALNLPQPYKATRFLQIVNEFGGKEAADKLLSTGEKKTQTGFTELILSGGGVHALKYSMEYLVLQKPWCDLFTEEQLAVARKRLERVGFVSPK

SEQ ID NO: 9779 - protein, 144 aa, Neisseria meningitidis; identical to SEQ ID NO: 6930

SEQ ID NO: 9780 - protein, 217 aa, Neisseria meningitidis; identical to SEQ ID NO: 3771

SEQ ID NO: 9781 - protein, 481 aa, Neisseria meningitidis
MSTQTNFDLVLFGATGDLAMRKLLPCLYQAHVAGLLHPEGRILGVSRSELDTEGFLAKVETSSKIHVKENFSDEAWASFVERLAYLKVDVTQPDDFAALGDLVKARKETDNVVIYLSTAPKFFAQTCENLAKIGLNADNVRVVLEKPLGTDLASSQQINTDVARYFKEGQIYRIDHYLGKESLQNLLALRFANVMFEPLWNNKYIESVQLTIAEQLGVEERGEFYDITGALRDMVQNHLMQMLCMTAMEAPASLDADAVRDEKVKVIKSLKPLTVESVNENVVRGQYTAARGMNGYLEEINVPQDSFTETYVAIKAEIENERWKGVPFYLRTGKRMAGKVAEIVLNFKDLNSHIFEGSRTAPNRLVIELQPYESVRLYTQMKTPGAGNKVETVPLATDLGKALESRRAEAYERLLLDVINGKLALFNRRDELEAAWEYVMPILENWTNNTTPPHGYGAHSWGPEAARELLARDGHKWHEEQ

SEQ ID NO: 9782 - protein, 136 aa, Neisseria meningitidis; identical to SEQ ID NO: 3682

SEQ ID NO: 9783 - protein, 150 aa, Neisseria meningitidis
LVMYVVKSANDGGNSLFLSSSDIVNQLSKTETGKKHLKTLTGNLYPFKAPASFDKKQGVRWGNILSVNTQMIRFRSDCIYKGIEENRNKVSKEMVLALDYLVKIIKNASDIQEFSAQDDGLIIIDNVNGLHAGTDYTDKNRHYIRARITV

SEQ ID NO: 9784 - protein, 310 aa, Neisseria meningitidis
MNTGKPQKRAVNGVLLLDKPEGLSSNTALQKARRLFHAEKAGHTGVLDPLATGLLPVCFGEATKFAQYLLDADKAYTATLKLGEASSTGDAEGEIIATARADISLAEFQTACQALTGNIRQVPPMFSALKHEGKPLYEYARKGIVIERKPRDITVYAIDIAEFDAPKAVISVRCSKGTYIRTLSEDIAKHIGTFAHLTALRRTETAGFTIAQSHTLEALANLNETERDSLLLPCDVLVAHFPQTVLNDYAVHMLQCGQRPRFEEDLPSDTPVRVYTENGRFVGLAEYQKEICRLKALRLMNTAVKNTGCV

SEQ ID NO: 9785 - protein, 103 aa, Neisseria meningitidis; identical to SEQ ID NO: 3787

SEQ ID NO: 9786 - protein, 131 aa, Neisseria meningitidis; identical to SEQ ID NO: 3790

SEQ ID NO: 9787 - protein, 105 aa, Neisseria meningitidis; identical to SEQ ID NO: 3792

SEQ ID NO: 9788 - protein, 247 aa, Neisseria meningitidis
MPDAVKKVYLIHGWGANRHMFDDLMPRLPATWPVSAVDLPGHGDAPFAQPFDIEAAADAVAAQIDTPADILGWSLGGLVALYLAARHPDKVRSLCLTASFARLTAAEDYPEGLAAPALGKMVGAFRSDYAKHIKQFLQLQLLHTPDADGIIGRILPDLARCGTPSALQEALDAAERADARHLLDKIDVPVLLVFGGKDAITPPRMGEYLHRHLKGSRLVVMEKAAHAPFLSHAEAFAALYRDFVEGV

SEQ ID NO: 9789 - protein, 326 aa, Neisseria meningitidis
MAMAENGKYLDWAREVLHTEEEGLREIATELDENFVLAADALLHCKGRVVITGMGKSGHIGRKMAATMASTGTPAFFVHPAEAAHGDLGMIVDNDVVVAISNSGESDEIAAIIPALKRKDITLVCITARPDSTMARHADIHITASVSKEACPLGLAPTTSTTAVMALGDALAVVLLRARAFTPDDFALSHPAGSLGKRLLLRVADIMHKGGGLPAVRLGTPLKEAIVSMSEKGLGMLAVTDGQGRLKGVFTDGDLRRLFQECDNFTGLSIDEVMHTHPKTISAERLATEALKVMQANHVNGLLVTDADGVLIGALNMHDLLAARIV

SEQ ID NO: 9790 - protein, 442 aa, Neisseria meningitidis; identical to SEQ ID NO: 3795

SEQ ID NO: 9791 - protein, 273 aa, Neisseria meningitidis
MTFDEWLGLSKLPKNEARMLLQYASEYTRVQLLTRGGEEMPDEVRQRADRLAQRRLNGEPVAYLLGWREFYGRRFAVNPNVLIPRPETEHLVEAVLARLPENGRVWDLGTGSGAVAVTVALERPDAFVRASDISPPSLETARKNAADLGARVEFAHGSWFDTDMPSEGKWDIIVSNPPYIENGDKHLSQGDLRFEPQIALTDFSDGLSCIRTLAQGAPDRLAEGGFLLLEHGFDQGAAVRGVLAENGFSGVETLPDLAGLDRVTLGKYMKHLK

SEQ ID NO: 9792 - protein, 124 aa, Neisseria meningitidis; identical to SEQ ID NO: 3797

SEQ ID NO: 9793 - protein, 207 aa, Neisseria meningitidis
MKAAAAFAAGLDAQAVRIVIDIYGSLALTGYGHGTFDALMLGLEGSLPHDIPLAGIPERLERIRTQHILRLNGQEIRFIPDRDLNILGNQVLPKHPNSLRFTAYASDGTVLNEQVYYSVGGGFVVTEEDFDRQAETEKAVPYPYTSCAELLARCRLNRLDISEVVLANEAALAGCGEAEIRRRAAAVAEVMEGCIKRGLGADGELPG

SEQ ID NO: 9794 - protein, 99 aa, Neisseria meningitidis
MKKMFVLFCMLFSCAFSLAAVNINAASQQELEALPGIGPAKAKAIAEYRAQNGAFKSVDDLTKVKGIGPAVLAKLKDQASVGAPAPKGPAKPALPADKK

SEQ ID NO: 9795 - protein, 99 aa, Neisseria meningitidis; identical to SEQ ID NO: 1679

SEQ ID NO: 9796 - protein, 288 aa, Neisseria meningitidis; identical to SEQ ID NO: 1688

SEQ ID NO: 9797 - protein, 312 aa, Neisseria meningitidis
MHQYYDAVILSVGNGLLKRFFKQNAQLNIASRPLIITLFPGVVFGDQASILSRMGADIVLYNNKHDFRIAEEYKKQYKLSCQNILYGYPIFRHASKGRHGEKIYFIDQVKIPFKKEERIYTLKKLIALAEKYPEKEFTILLRVADKDITVHQDKHSYIELAKQFQLPSNLTIERKSTAQAFQEMGYCLSYSSTMLFEAECKGIPVGVVADLGFSKSYANQHFLGSGVLVYFDQIDFTSPKIADPDWLDCYATKKVITTDEFNKLLKQVVPLQHDYQEYLSAVNSIESTKTIFLRKFKKLIRDPKKFFMILNG

SEQ ID NO: 9798 - protein, 391 aa, Neisseria meningitidis; identical to SEQ ID NO: 2276

SEQ ID NO: 9799 - protein, 387 aa, Neisseria meningitidis
MSEQLPVAVATETKAERKKPKKKSWIKKLSPLFWVTVIIPTVISLVYFGFFASDRFTSQSSFVVRSPKSQSSLNGLGAILQGTGFARAQDDIYTVGEYMRSRSSLDELRKILPVREFYETKGDVFSRFNGFGFRGEEEAFYQYYKNQVMINFDTVSGISTLNVTSFDALESKKINEALLKQGEALINQLNDRARADTVRYAEEVVKTAAERVKEASQNLTDYRIANGVFDLKAQSEVQMGLVSKLQDELIVIQTQLDQVKAVTPENPQIPGLQAREQSLRKEIDQQLRAISGGGHSSLSNQAAEYQRVYLENQLAEQQLAAAMTSLESAKVEADRQQLYLEVISQPSLPDLAHEPKRLYNIVATLIIGLMVYGILSLLTASIREHKN

SEQ ID NO: 9800 - protein, 185 aa, Neisseria meningitidis
MMQKHKCLIDFILTVASQIAYADLPLSLEELLTDKGKFKLESSISYINTERNQSEFANPIYVQTSATKIATVMAMMITPVMAQNLDSQVFDSQNVKAIQLSQAEMKETQGEFVPIIAAAAFGGALGAWEYHGANLYNHGKLGTAQGAATAAGIGAATGVAAKQGWLLLPEADWLEIWHGDRVFMH

SEQ ID NO: 9801 - protein, 405 aa, Neisseria meningitidis
MQRRIITLLCAAGMAFSTQTLAANLEVRPNAPERYTVKQGDTLWGISGKYLYSPWQWGRLWDANRDQIHNPDLIYPDQVLVLRHVDGEPRLGLEQTDGIPVVKMSPDKEVSGYGIPAIDVNFYRIFMRHPQIVSRKETAAAPRLLSGPEGRLLYTKGTRVYTKGLKEPGRYLTYRINKNITDPDTGKFLGQEVAFSGIVRSLDYTDSVLEQRSKQAGERPKDNEYHTRTHPLITPLRTPSIQPLVVETAISEIQQGDYLMKMPEDTDRFNMMPHEPSRPVQAKIVSVFEGTRIAGQFQTITIDKGEADGLDKGTVLSLYKRKKTMQVDLSNNFKSRDTVELISTPAEEVGLAMVYRTSEHLSSAIILENISDISVGDTAANPGRDLDNIPDQGRSRVKFGFDRSE

SEQ ID NO: 9802 - protein, 308 aa, Neisseria meningitidis
MKVIFAGTPDFAAAALKAVAAAGFEIPLVLTQPDRPKGRGMQLTAPPVKQAALELGLRVAQPEKLRNNAEALQMLKEVEADVMVVAAYGLILPQEVLDTPKHGCLNIHASLLPRWRGAAPIQRAIEAGDAETGVCIMQMDIGLDTGDVVSEHRYAIQPTDTANEVHDALMEIGAAAVVADLQQLQSKGRLNAVKQPEEGVTYAQKLSKEEARIDWSESAAVIERKIRAFNPVPAAWVEYQGKPMKIRRAEVVAQQGAAGEVLSCSADGLVVACGENALKITELQPAGGRRMNIAAFAAGRHIEAGTKL

SEQ ID NO: 9803 - protein, 106 aa, Neisseria meningitidis; identical to SEQ ID NO: 3805

SEQ ID NO: 9804 - protein, 160 aa, Neisseria meningitidis; identical to SEQ ID NO: 3806

SEQ ID NO: 9805 - protein, 307 aa, Neisseria meningitidis; identical to SEQ ID NO: 3808

SEQ ID NO: 9806 - protein, 290 aa, Neisseria meningitidis
MEIWNRLDTWLGAVPIRAEAVESVAAVAALLLACALLLNIHFKRHPDFGIESKRRFLVASRNITLLLVLFSLAFIWSAQIQTLALSMFAVAAAVVVATKELIMCLSGSILRSATQQYSVGDYIEINGLRGRVVDINLLNTLMMQVGPNPLVGQLAGTTVSFPNSLLLSHPVRRDNILGDYVIHTVEIPVPIHLDSDEAVCRLKAVLEPLCAPYIPAIQRHLENVQAEKLFITPAARPRVTRVPYDDKAYRIIVRFASPVSKRLEIQQAVMDEFLRVQYRLLNYPAGSETL

SEQ ID NO: 9807 - protein, 483 aa, Neisseria meningitidis; identical to SEQ ID NO: 5802

SEQ ID NO: 9808 - protein, 674 aa, Neisseria meningitidis
MNDMTLYLIIALVPLAGSLIAGLFGNKIGRAGAHTVTILGVAVSAVLSAYVLWGFIDGSRAKFDENVYTWLTMGGLDFSVGFLVDTMTAMMMVVVTDVSLMVHIYTIGYMHDEKIGYQRFFSYISLFTFSMLMLIMSNNFIQLFFGWEAVGLVSYLLIGFYFKRPSATFANLKAFLINRVGDFGFLLGIGLVLAYFGGSLRYQDVFAYLPNVQTATIQLFPSVEWSLITVTCLLLFVGAMGKSAQFPLHVWLPDSMEGPTPISALIHAATMVTAGLFMVSRMSPIYEMSSTALSVIMVIGAITALFMGFLGVIQNDIKRVVAYSTLSQLGYMTVALGASAYSVAMFHVMTHAFFKALLFLAAGSAIIGMHHDQDMRHMGNLKKYMPITWLTMLIGNLSLIGTPFFSGFYSKDSIIEAAKYSTLPGSGFAYFAVLASVFVTAFYAFRQYFMVFHGEEKWRSLPEHHSDGHGEEHHGLGKNDNPHESPLFVTLPLILLAIPSVIIGYVAIGPMLYGDFFKDVIFVNTDAHPTMHIMKEEFHGALAMVSHSLHSPVLYLAIAGVLSAWLLYVKLPHLPAKIAQAFRPVYVLFENKYYLDALYFNVFAKGTRALGTFFWKVGDTAIIDNGIVNGSAKLVGAIAAQVRKAQTGFIYTYAAAMVFGVLVLLGMTFWGLFR

SEQ ID NO: 9809 - protein, 792 aa, Neisseria meningitidis
VLALGFCFGTHCAAADAVAAEETDNPTAGGSVRSVSEPIQPTSLSLGSTCLFCSNESGSPERTEAAVRGSGEASIPEDYTRIVADKVEGQSQVQVRAEGNVVVERNRTTLNTDWADYDQSGDTVTAGDRFALQQDGTLIRGETLTYNLEQQTGEAHNVRMETEHGGRRLQSVSRTAEMLGEGHYKLTETQFNTCSAGDAGWYVKAASVEADREKGIGVAKHAAFVFGGVPIFYTPWADFPLDGNRKSGLLVPSLSAGSDGVSLSVPYYFNLAPNLDATFAPSVIGERGAVFDGQVRYLRPDYAGQSDLTWLPHDKKSGRNNRYQAKWQHRHDISDTLQAGVDFNQVSDSGYYRDFYGNKEIAGNVNLNRRVWLDYGGRAAGGSLNAGLSVLKYQTLANQSGYKDKPYALMPRLSADWRKNTGRAQIGVSAQFTRFSHDSRQDGSRLVVYPDIKWDFSNSWGYVRPKLGLHATYYSLNRFGSQEARRVSRTLPIVNIDSGATFERNTRMFGGGVLQTLEPRLFYNYIPAKSQNDLPNFDSSESSFGYGQLFRENLYYGNDRINTANSLSAAVQSRILDGATGEERFRAGIGQKFYFKDDAVMLDGSVGKKPRNRSDWVAFASGSIGSRFILDSSIHYNQNDKRAENYAVGASYRPAQGKVLNARYKYGRNEKIYLKSDGSYFYDKLSQLDLSAQWPLTRNLSAVVRYNYGFEAKKPIEMLAGAEYKSSCGCWGAGVYAQRYVTGENTYKNAVFFSLQLKDLSSVGRNPADRMDVAVPGYIPAHSLSAGRNKRP

SEQ ID NO: 9810 - protein, 149 aa, Neisseria meningitidis; identical to SEQ ID NO: 3816

SEQ ID NO: 9811 - protein, 334 aa, Neisseria meningitidis
MSTFFQQTAQAMIAKHIDRFPLLKLDQVIDWQPIEQYLNRQRTRYLRDHRGRPAYPLLSMLKAVLLGQWHSLSDPELEHSLITRIDFNLFCRFDELSIPDYSTLCRYRNWLAQDDTLSELLKLINRQLTEKGLKIEKASAAVVDATIIQTAGSKQRQAIEVDEGQINGQTTPSKDSDARWIKKNGLYKLGYKQHTRTDAEGYIEKLHITPANAHECKHLSPLLEGLPEGTTVYADKGYDSAENRQHLEEHQLLDGIMRKACRNRPLSEVQTKRNRYLSKTRYVVEQSFGTLHRKFRYARSTYFGLIKVSAQSHLKAMCLNLLKAANRLSAPAAA

SEQ ID NO: 9812 - protein, 228 aa, Neisseria meningitidis; identical to SEQ ID NO: 380

SEQ ID NO: 9813 - protein, 316 aa, Neisseria meningitidis; identical to SEQ ID NO: 3819

SEQ ID NO: 9814 - protein, 332 aa, Neisseria meningitidis
MHTPLTYIDLFSGAGGLSLGFEQAGFQQLLSVEMESDYCQTYRTNFPHHQLLQKDLTTLTEQDLINCLNGQAVDLIIGGPPCQGFSMAGKIGRTFTDDPRNHLFKEFVRIVKIVQPYFFVMENVARLYTHNSGKTRIEIIQAFQNIGYSVECKILSAADFGVPQIRSRVIFIGRRDKGKISFPEPLQISHQTVGSAIGHFPKLAAGESNPHVANHEAMNHSAQMLEKMAFVKNGGNRNDIPEPLRPKTGDIRKYIRYNSNKPAVCITGDMRKVFHYEQNRALTVRELAALQSFPDNFIFCGSKIAQQQVGNAVPPLLAKAIAESILKMSENE

SEQ ID NO: 9815 - protein, 68 aa, Neisseria meningitidis; identical to SEQ ID NO: 3821

SEQ ID NO: 9816 - protein, 125 aa, Neisseria meningitidis
MCEFKDFRRNIPCFEEYDENSFIGKWYDDGVWDDEEYWKLENALIEVRRKYPYPMDIPRDIVIGIGTIIEFLMVPNWKLFTIKSSPWLPKSVKIDERYERFRVMLRYIFTEIDIVNVRFDYYNKK

SEQ ID NO: 9817 - protein, 125 aa, Neisseria meningitidis
MCEFKDIIRNVPYFEGYDENSFIGKWYDDGVWDDEEYWKLENDLIEVRKKYPYPMDIPRYVVIGIGTIIDFLMVPNWKLFEIKASPWLPDSVGINERYERLKTMLRYIFTEKDIVNVRFDYYNKK

SEQ ID NO: 9818 - protein, 135 aa, Neisseria meningitidis
MCEFKDFRRNIPCFKEYDENSFIGKWYDDGVWDDEEYWKLENDLIEVRKKYPYPMDIPRDIVIGIGTIIDFLMVQNWKLFEIKASPWLPKSVKINERYERFRVMLRYIFTDLDVEDWKFFYFPIQNSKGRLRRKV

SEQ ID NO: 9819 - protein, 369 aa, Neisseria meningitidis
MSLTRLILKFYALLRLFLGKNARTAWISHPACAGHEPGANHPDSPDRILCIEQALRRAGIWQHLQTIEAEEISDTRLALVHSSKYLNRLESCLPQKGKIFRLDNDTAISTGSLSAAHFAAGSAVQAVDMVMNRKAWHAFCAARPPGHHAGSGKAGGFCLLNNVAAGVMHAIAEYRLKRIAVIDFDVHYGDGTAEIFKDDPRILFFNLFETDLFPFPENNDMPDGGNMVHLPLPPGTGSRTFREAVRRQWLPRLAAFKPELVLLSAGFDAHRLDESGRLNLHEADFAWLTHKIIQTASGCPGKIVSVLEGGYTLEPLAQSAAEHIRVLAGLGKSDAATAYQKTLDPTKKRFAKPKTGQVRQPTQSDRYDI

SEQ ID NO: 9820 - protein, 213 aa, Neisseria meningitidis
MRCFMIQNVVTSIILYSGTAVDLLIILMLFFAKRKSRKDIINIYLGQFLGSVSLILLSLLFAFVLDYIPSKEILGLLGLIPIFLGIKVLLLGDSDGEAIAKEGLRKDNKNLIFLVAMITFASCGADNIGVFVPYFTTLNLANLIVALLTFLVMIYLLVFSAQKLAQVPSVGETLEKYSRWFVAVVYLGLGVYILIENNSFDMLWTVSGQEKIL

SEQ ID NO: 9821 - protein, 180 aa, Neisseria meningitidis
MRTHRKTCSAVCFAFQTASKPAVSIRHPSEDIMSLKIRLTEDMKTAMRAKDQVSLGTIRLINAAVKQFEVDERTEADDAKITAILTKMVKQRKDSAKIYTEAGRQDLVDKENAEIEVLHRYLPQMLSAGEIRTAVEAAVAETGAAGMADMGKVMGVLKTRLAGKADMGEVNKILKAVLTA

SEQ ID NO: 9822 - protein, 143 aa, Neisseria meningitidis; identical to SEQ ID NO: 362

SEQ ID NO: 9823 - protein, 151 aa, Neisseria meningitidis
MQIDNISDEQVVIVRMSCYLQNVLLSERNFEYRKIWISVIRYENSSFSIKYFTCSQTLLFLSLYPFESNLFGLVMFFNVIFILDRESIKYIDKDKLFKSGETLYSNFKSIKNQCKNYFFCGFDFDAPYFKSGVSQVADYNFVPDAFSLFFI

SEQ ID NO: 9824 - protein, 104 aa, Neisseria meningitidis; identical to SEQ ID NO: 1772

SEQ ID NO: 9825 - protein, 186 aa, Neisseria meningitidis
MNMKTLLALAVSAVCSVSVAQAHEHNTIPKGASIEVKVQQLDPVNGNKDVGTVTITESNYGLVFTPDLQGLSEGLHGFHIHENPSCEPKEKEGKLTAGLGAGGHWDPKGAKQHGYPWQDDAHLGDLPALTVLHDGTATNPVLAPRLKHLDDVRGHSIMIHTGGDNHSDHPAPLGGGGPRMACGVIK

SEQ ID NO: 9826 - protein, 399 aa, Neisseria meningitidis; identical to SEQ ID NO: 7800

SEQ ID NO: 9827 - protein, 86 aa, Neisseria meningitidis
LLLPRQHLGQNGRRLKSKHRPSCCRLRMSTGQPQCRRNRRSRLQHCRRQSRKVGKNGKTGEIKADGRKVNVRIDSTEADLLYLAGQ

SEQ ID NO: 9828 - protein, 129 aa, Neisseria meningitidis; identical to SEQ ID NO: 3833

SEQ ID NO: 9829 - protein, 181 aa, Neisseria meningitidis
MIIVEHLEHYLGEIESGIKCLDRRYHLSVSVFPSQPYKGVTTFSTLGLNRYDLNYKSRFELIFTCSEEWNKENIAAFLSGVAEYLIDNRQPILRGEIIQLPRVIIEGSKMDALYVSAPFYFDDDFQVCYGEHYNIVFPLLVPLYKQEAELVEKKGWNAFEQFLLDNEVGNLSDMNRKPFTW

SEQ ID NO: 9830 - protein, 105 aa, Neisseria meningitidis
MNILPSWLRVGMNIAMLGMIHSDIRLITVDYEERRRFLKIKNYLSREAITEDHEDMEYLITELWSMCGEYFDEADFECIYSNHSSMELNQINGAVFRRKELISQA

SEQ ID NO: 9831 - protein, 116 aa, Neisseria meningitidis; identical to SEQ ID NO: 3836

SEQ ID NO: 9832 - protein, 144 aa, Neisseria meningitidis; identical to SEQ ID NO: 4260

SEQ ID NO: 9833 - protein, 154 aa, Neisseria meningitidis; identical to SEQ ID NO: 741

SEQ ID NO: 9834 - protein, 318 aa, Neisseria meningitidis
LLIHYIDIAKRNFVIAVSSLSKTKTETNNPKGIAHTIEYLKKHKVALVVTESTGGLEIPAAKAIRRAGIAVIIANPRQTHQFAQSQPLTKTDAKDAKMPAFFAQMTAQKEDSQTMPYQPPTEAEEVLEALVNRRNQPADMRTAEKNRLHQVHETQVGSVKQLIAHFDRLIDELDKQIDDHTHTHFDGKAQVAEQIKGIGSITTATLMVMLPELGRLSHKRIAGLAGIAPHPRESGETKFKSRCFGGKSAVRKALYMATVAATRFEPLIRDFYQRLLSEGKPYKVAVTACMRKLLTISNARMRDYFAENDTAENGIRTA

SEQ ID NO: 9835 - protein, 74 aa, Neisseria meningitidis; identical to SEQ ID NO: 3842

SEQ ID NO: 9836 - protein, 144 aa, Neisseria meningitidis; identical to SEQ ID NO: 3841

SEQ ID NO: 9837 - protein, 511 aa, Neisseria meningitidis; identical to SEQ ID NO: 3843

SEQ ID NO: 9838 - protein, 87 aa, Neisseria meningitidis
MSKWRGFNRKGNTMKKNAPKSFEEALSRLESLTQSMQGEMPLEDALAAYQEGNELVRYCQTKLAQVEQKLQVLDADGLKELNLESDE

SEQ ID NO: 9839 - protein, 65 aa, Neisseria meningitidis
MPSEKIYYGVLIFLCIASMLLSPFFYAGALKPKKAALRKDGQWKLILLSNTVAAAVLAWVWWKWF

SEQ ID NO: 9840 - protein, 101 aa, Neisseria meningitidis
MRVSKIIGSMLLVTAVQTVFSANVYACRHNGKTSYSQTPGKHCTNAGLGRDLVYSSVRPAVKDRAEDAGVGDYSDTVRDEHVQNPRENTHKDASNTGAKTH

SEQ ID NO: 9841 - protein, 117 aa, Neisseria meningitidis
MKNCEFFYDPTRAIYDSGADYLTREKHRLVVIANSAWGLLLNLSCYYDEVLEKRKIPFGKQEIDDDMDKVSALKRKFKDISEIKVGDGWEYPFNYEQGMKELDEVLLKYIPFFEEER

SEQ ID NO: 9842 - protein, 71 aa, Neisseria meningitidis
LDAGEFSHFRINHSTHFAERQNHINGTENFWNQAKCHLRKFNGIPKAHFELYLKECEWRFNNSEIKVLVPF

SEQ ID NO: 9843 - protein, 142 aa, Neisseria meningitidis; identical to SEQ ID NO: 5523

SEQ ID NO: 9844 - protein, 71 aa, Neisseria meningitidis; identical to SEQ ID NO: 1785

SEQ ID NO: 9845 - protein, 130 aa, Neisseria meningitidis; identical to SEQ ID NO: 4578

SEQ ID NO: 9846 - protein, 242 aa, Neisseria meningitidis; identical to SEQ ID NO: 3849

SEQ ID NO: 9847 - protein, 112 aa, Neisseria meningitidis; identical to SEQ ID NO: 3851

SEQ ID NO: 9848 - protein, 451 aa, Neisseria meningitidis
MSDFFHSDVLSVSELNAFAKSILENHLAGLWIAGEVSNLTRAASGHYYFSLKDSRAQVRCAMFKGAAARLAKPLKEGDHIEVAGKISIYETRGEFQITVNEVRLKGLGQLYEAYERLKAQLQAEGAFAAERKKPLPARPQCIGIVTSLAAAALRDVVTTLKRRAPEIPVIVYPTPVQGTGSELQIAQAIKTASQRAECDVLIVCRGGGSIEDLWAFNEEPVVRAIEACTVPVVSGVGHETDFTLADFVADVRAPTPTGAAELVSPNRQESLHRLAQAQGRLKTVLEQRYFDASQKLDWLARQIRHPRQKLDEQRASIGKLAQTLSYSMKQNLRAHTARFERQTQALQHYRPDVSVCKNNIVRLQTALPAAFSQLLTHRRQSLTAQAALLEAVSPQHILERGFSVVKDTRGQVIRNADVLKQGQKLHITFADGETDVRVSKEQGQQDLFDCI

SEQ ID NO: 9849 - protein, 117 aa, Neisseria meningitidis; identical to SEQ ID NO: 3854

SEQ ID NO: 9850 - protein, 90 aa, Neisseria meningitidis; identical to SEQ ID NO: 7807

SEQ ID NO: 9851 - protein, 37 aa, Neisseria meningitidis; identical to SEQ ID NO: 970

SEQ ID NO: 9852 - protein, 92 aa, Neisseria meningitidis; identical to SEQ ID NO: 3856

SEQ ID NO: 9853 - protein, 413 aa, Neisseria meningitidis
LNGRNDSGTQKTLVCPGSSRRYRRFGRHCADGTDALHTAYGNGYGADGVYTSFREGVAQASGMRRVAVLTLCGAVAGSGWWLLKRFGKPQIEIKAALKQPLQGLPFLTTVFHVLLQIITVGLGSPLGREVAPREMTAAFASAGGKRLGLDEGEMRLLIACASGAGLAAVYNVPLASTLFILEAMLGVWTQQAAAAALLTSVIATAVARIGLGDVQQYHPANLAVNTSLLWFSAVIGPILGATAVYFRRSAEKFPFLKRDNPRIIPLAIALFALIGAIAVWFPEILGNGKAGNQLTFGGLTDWQHSLELTAVKWLVVLMALAAGAYGGLITPSMMLGSTISFAAAAAWNSVFPEMPSESAAVVGAAVFLGVSLNMPLTAAVFILELTYAPAALLMPLCTGMAGAVWTARKMGCK

SEQ ID NO: 9854 - protein, 214 aa, Neisseria meningitidis
MGRHFGRRRFLTVAAVAAAGAAVSFLPNPFAADDEKRNKDEKRNENVFFWKGVALGSGAELRLFGVDDRQAADLVNKVLAEVARLEKIVQPLPRQPDQPPEQGRLSDFAVGGFFGTVEPVPRYSRADGRRVRSDSAGVVETVCRLFCRPSRCGNAASSKQREGSPETGRLRQSLVRPNPFCRKGYGFVLERHRASLWINKNQYGVASPLKENDS

SEQ ID NO: 9855 - protein, 203 aa, Neisseria meningitidis
MRRTALLLLALTAGTSLAAGFNQKDTPINTRYRETPEEAAAREFKEHTAKLPPLPDTHSDGWFDIYVDENYGKQPKILLDSLQIMPAPDGSIRYILNIRSDKGYDNLTAEGIFCARFSIRFGNGKPSSYKVFGYGDTVNRRWIQPRNAEWKPIGGTLSRNDALRTVLYQAFCEGDVPADTKGLVQRLKERAGRYAPSIKPHNK

SEQ ID NO: 9856 - protein, 357 aa, Neisseria meningitidis
MKIILTTSMSGLGGTETATVRLGRLLKRRGHDIILASSDGPFVGEAQASGIRWQPVDFYRGGLAGYLKSTFAYARMLRREQPDIIDCQMARVVPACALAAKIVSPKTKIIYHSHGLDAATYPKIAKLFDKLGVYIIGNCKHEREKLIRHGFPAGRIAYAYNALPPPPEFHFRKTKKECAVLGTLSRLDTVRAVHLMLDILKKMVDRGMPVRLNVAGIGEEMDNLKAQAKRLGIEDKVTFLGGVRDLTGYFKEVDILVNTPHCVGDHGAGVGNNILEAGLYDTPVVTYNMAGISEMVITGQTGYCIPFGDDEAFIEAFDTLIKHPELRSQMGKALHKHVETLCSDDEIYRTTMAAYEM

SEQ ID NO: 9857 - protein, 421 aa, Neisseria meningitidis
MQQIKFIDLFSGMSGIRKGFEQACRKQSVACECVFTSEIKPAALEVLKQNYPDEVPYGDITKIETGDIPDFDILLAGFPCQAFSFAGKRLGFEDTRGTLFFDVARILKAKKPKGFILENVEGLVTHDRKDSTQKWRTLTVILETLEALGYYVSWKVLNAKDFGIPQNRKRIYLTGSLKSKPDLSFETSPSPKLKNILESGLPTESSPFIKKLLKKFPPSELYGKSVKDKRGGKNNIHSWDIELKGAVTEEEKQLLNILLKEQRKKRASEIGIDWMDGMPLTKAQISTFYKHPDLQNILDSLTDKGYLVLEHPKQKIGGQRIKDESLPKGYNIVSGKKSFEINKILDPNDVAPTLVAMDMEHLFVVDNGGLRTLTGKEGLRLFGYPDDYSFDIPKKDRCDLLGNTVAVPVIKAVSERLLHTL

SEQ ID NO: 9858 - protein, 1068 aa, Neisseria meningitidis
MRTTPTFPTKTFKPAAMALAVATTLSACLGGGGGGTSAPDFNAGGTGIGSNSRATTAKSAAVSYAGIKNEMCKDRSMLCAGRDDVAVTDRDAKINAPPPNLHTGDFTNPNDAYKNLINLKPAIEAGYTGRGVEVGIVDTGESVGSISFPELYGRKEHGYNENYKNYTAYMRKEAPEDGGGKDIEASFDDEAVIETEAKPTDIRHVKEIGHIDVVSHIIGGRSVDGRPAGGIAPDATLHIMNTHDGTKNEIMSAAIRNAWVKLGERGVRIVNNSFGTTSRAGTADHFQIANSEEQYRQALLAYSGGDKTDEGIRLMQQSDYGNLSYHIRNKNMLFIFSASNDAQAQPNTLTLLPFYEKDAQKGIITVAGVDRSGEKFNGSNHCGITAMWCLSASYEASVRFTRTNPIQIAGTSFSAPIVTGTAALLLQKYPWMSNDNLRTTLLTTAQDIGAVGVDSKFGWGLLDAGKAMNGPASFPFGDFTADTKGTSDIAYSFRNDISGTGGLIKKGGSQLQLHGNNTYTGKTIIEGGSLVLYGNNKSDMRVETKGALIYNGAASGGSLNSDGIVYLADTDRSGANETVHIKGDLQLGGEGTLYTRLGKLLKVDGTAMTGGKLYMSAGGKGAGYLNRTGQRVPFLSAAKIGRDYSFFTNIETDGGLLASLDSVEKTAGSEGDTLSYYVRRGNAARTASAAAHSAPAGLKHAVEQGGSNLENLMVELDASESSATPETVETAAADRTDMPGIRPYGATFRAAAAVQHANAADGVRIFNSLAATVYADSTAAHADMQGRRLKAVSDGLDHNATGLRVIAQTQQDGGTWEQGGVEGKMRGSTQTVGIAAKTGENTTAAATLGMGHSTWSENSANAKTDSISLFAGIRHDAGDIGYLKGLFSYGRYKNSISRSTGADEHAEGSVNGTLMQLGALGGVNVPFAATGDLTVEGGLRYDLLKQDAFAEKGSALGWSGNSITEGTLVGLAGLKLSQPLSDKAVLFATAGVERDLNGRDYTVTGGFTGATAATGKTGARNMPHTRLVAGLGADVEFGNGWNGLARYSYAGSKQYGNHSGRVGVGYRF

SEQ ID NO: 9859 - protein, 313 aa, Neisseria meningitidis; identical to SEQ ID NO: 3869

SEQ ID NO: 9860 - protein, 258 aa, Neisseria meningitidis
MNRPKQPFFRPEVAVARQTSLTGKVILTRPLSFSLWTTFASISALLIILFLIFGNYTRKTTAEGQILPASGVIRVYAPDTGTITAKFVEDGEKVKAGDKLFALSTSRFGAGGSVQQQLKTEAVLKKTLAEQELGRLKLIHGNETRSLKATVERLENQKLHISQQIDGQKRRIRLAEAVAKTALGRQELSGLGMVSSYLAKSNEPVYLVKIKPDKPTITAYGEEKPLQIGMTLEADILHEKRRLYEWVLELIYSMSGKL

SEQ ID NO: 9861 - protein, 321 aa, Neisseria meningitidis; identical to SEQ ID NO: 3871

SEQ ID NO: 9862 - protein, 399 aa, Neisseria meningitidis; identical to SEQ ID NO: 3872

SEQ ID NO: 9863 - protein, 289 aa, Neisseria meningitidis
MSANEYTQIGWIGLGQMGLPMVTRLLDGGIEVGVYNRSPDKTAPISAKGAKVYGNTAELVRDYPVIFLMVSDYAAVCDILNGVRDGLAGKIIVNMSTISPTENLAVKALVEAAGGQFAEAPVSGSVGPATNGTLLILFGGSEAVLNPLQKIFSLVGKKTFHFGDVGKGSGAKLVLNSLLGIFGEAYSEAMLMARQFGIDTDTIVEAIGGSAMDSPMFQTKKTLWANREFPPAFALKHASKDLNLAVKELEQAGNTLPAVETVAASYRKAVEAGYGEQDVSGVYLKLAEH

SEQ ID NO: 9864 - protein, 519 aa, Neisseria meningitidis
MKKSLFVLFLYSSLLTASEIAYRFVFGIETLPAAKMAETFALTFVIAALYLFARYKATRLLIAVFFAFSIIANNVHYAVYQSWMTGINYWLMLKEITEVGGAGASMLDKLWLPALWGMLEVMLFCSLAKFRRKTHFSADILFAFLMLMIFVRSFDTKQEHGISPKPTYSRIKANYFSFGYFVGRVLPYQLFDLSRIPAFKQPAPSKIGQGSVQNIVLIMGESESAAHLKLFGYGRETSPFLTRLSQADFKPIVKQSYSAGFMTAVSLPSFFNAIPHANGLEQISGGDTNMFRLAKEQGYETYFYSAQAENEMAILNLIGKKWIDHLIQPTQLGYGNGDNMPDEKLLPLLDKINLQQGRHFIVLHQRGSHAPYGALLQPQDKVFGEADIVDKYDNTIHKTDQMIQTVFEQLQKQPDGNWLFAYTSDHGQYVRQDIYNQGTVQPDAISCRWCCTARIRPCNRLPTRLLHLARLPSISSFQRSFTRWATICRFQVVAKARRATLRVMQAATFATARRNMFIR

SEQ ID NO: 9865 - protein, 725 aa, Neisseria meningitidis
MKADIQTELTQALLSHEKVWANEEKTILAKNILLDLVEKTDPAIIGLLLGNDELKRHFFVEVNGVLVFKLQDFRFFLDKHSVNNSYTKYANRIGLTDGNRFLKDSSDIVLDFPFKDCVLNGGQSSEEGEEIYFKHSNSQPASQPASQPASQPIYTKLTRKRQEIFFNQTLAFDEIDRLFDAKAFSKFSRHTADGKQAVGEIKRHSDGTPAENLIIKGNNLIALHSLATQFKGKVKLIYIDPPYYFVKKKQQDSFGYNTNFKLSTWLTFMKNRLSIAKELLTDDGIIVISIDDDGNAYLKILLDEIFGFENFIGNLPTIMNLKGNNDEYAFAGTHEYTLVFAKNKDKSTFYEFPIDEDNFLEKWEEDEIGFYKKGAPMRATGTEDKREDRPEMFYPFLVKNNTVSTITDEEFSQIYNKDLEVFNDDFIQKLKEKYENLGYNFILPIADKQWGRWRWGYSIKNKARLQTDIIVSQSKNGISLYKKQRPELDDLPTKKPKTIFYKPEYSSGNGTEQMKNLFGEKAFKNPKPEELIQDFITITTNESDIVLDYHLGSGTTAAVAHKMNRQYIGIEQMDYIETLAVERLKKVIDGEQGGISKAVNWQGGGEFVYAELAPFNETAKQQILACEDSDGIKTLFEGLCERYFLKYNVSVNEFSQIIQEPEFQSLALDEQKQMVLEMLDLNQMYVSLSEMDDEQFAGCLNDDDKALSREFYQSAKNQAEKKDGE

SEQ ID NO: 9866 - protein, 327 aa, Neisseria meningitidis; identical to SEQ ID NO: 294

SEQ ID NO: 9867 - protein, 507 aa, Neisseria meningitidis
MDYPPLKGAALAWITLSLGLAVFMEVLDTTIANVAVPVIAGNLGAATTQGTWVITSFAVANAVSVPLTGFLAKRIGEVKLFTAAAVGFVITSWLCGIAPNLQALVFFRILQGFIAGPLIPLSQSLLMASYPPAKRTLALALWAMTVVVAPVLGPILGGWISGNWHWGWIFFINIPIGIISAWITWKHLKYRETETVKMPTDYVGLTLMVVGIGALQMMLDRGKELDWFASGEIITLGVTALVCLSYFIVWELGEKYPIVDLSLFKDRNFTVGVIATSLGFMVYMGTLTLLPLVLQTNLGYTSTWAGLAAAPVGILPVFLSPIIGRFGNKIDMRLLVTASFLTFAFTFYWRTDFYADMDIGNVIWPQFWQGAGVAMFFLPLTTITLSHMKGGQIAAAGSLSNFLRVLMGGVGVSFVSTLWERREALHHTRFAEHITPYSATLHETAAHLSQQGISDIQTLGIINNTITQQGFIIGSNEIFMAGSLLFIIMIPVIWLAKPPFHNGGGGH

SEQ ID NO: 9868 - protein, 209 aa, Neisseria meningitidis
MSETENQALTFAKRLKADTTAVHDSVDNLVMSVQPFVSKENYIKFLKLQSVFHKAVDHIYKDAELNKAIPELEYMARYDAVTQDLKDLGEEPYKFDKELPYETGNKAIGWLYCAEGSNLGAAFLFKHAQKLDYNGEHGARHLAPHPDGRGKHWRAFVEHLNALGLSPEAEAEAIQGAREAFAFYKVVLRETFGLAADAEAPEGMMPHRH

SEQ ID NO: 9869 - protein, 453 aa, Neisseria meningitidis; identical to SEQ ID NO: 3877

SEQ ID NO: 9870 - protein, 1491 aa, Neisseria meningitidis
MRFTHTTPFCSVLSTLGLFAVSPAYSSIVRNDVDYQYFRDFAENKGAFAVGASNISIQDKQGKILGRVLNGIPMPDFRVSNRQTAIATLIHPQYVNSVKHNVGYGSIQFGNDTQNPEEQAYTYRLVSRNPHPDYDYHLPRLNKLVTEISPAALSSVPLLGNGQPKANAYLDTDRFPYFVRLGSGTQQVRKADGTRTRTAPAYQYLTGGTPLKVLGFQNHGLLVGGSLTDQPLNTYAIAGDSGSPLFAFDKHENRWVLAGVLSTYAGFDNFFNKYIVTQPEFIRSTIRQYETRLDVGLTTNELIWRDNGNGDSTLQGLNERITLPIANPSLAPQNDSRHMPSEDAGKTLILSSRFDNKTLMLADNINQGAGALQFDSNFTVVGKNHTWQGAGVIVADGKRVFWQVSNPKGDRLSKLGAGTLIANGQGINQGDISIGEGTVVLAQKAASDGSKQAFNQVGITSGRGTAVLADSQQIKSENLYFGFRGGRLDLNGNNLAFTHIRHADGGAQIVNHNPDQAATLTLTGNPVLSPEHVEWVQWGNRPQGNAAVYEYINPHRNRRTDYFILKPGGNPREFFPLNMENSTSWQFIGNNRQQAAKQVAQAENARPDLITFGGYLGENAQTGKAAPSYSKTNIEWVNGPNTPHKPSPYTNTPTRTGAGVPTITASKKAATPAPTSHGMPTAPKTGNFSDMTGEAAIEKNRHIANAAVYGRPEYRYNGALNLHYRPKRTDSTLLLNGGMNLNGEVLIEGGNMIVSGRPVPHAYDHQAKREPVLENEWTDGSFKAARFTLRNHARLTAGRNTAHLDGDITAYNLSGIDLGFIQGKTPECYRSYHSGSTHCTPNAVLKAENYRALPVTQVRGDITLNDRSELRLGKAHLYGSIRAGKDTAVRMEADSNWTLSQSSHTGALTLDGAQITLNPDFANNTHNNRFNTLTVNGTLDGFGTFRFLTGIVRKQNAPPLKLEGDSRGAFQIHVKNTGQEPQTTESLALVSLNPKHSHQARFTLQNGYADLGAYRYILRKNNNGYSLYNPLKEAELQIEATRAEHERNQQAYNQLQATDISRQVQHDSDATRQALQAWQNSQTELARIDSQVQYLSAQLKQTDPLTGILTRAQNLCAAQGYSVDICRQVAKAADTNDLTLFETELDTYIERVEMAESELDKARQGGDAQAVETARHAYLNALNRLSRQIHSLKTGVAGIRMPNLAELISRSANTAVSEQAAYNTGRQQAGRRIDRHLTDPQQQNIWLETGTQQTDYHSGTHRPYQQTTNYAHIGIQTGITDRLSVGTILTDERTNNRFDEGVSARNRSNGAHLFVKGENGALFAAADLGYSNSRTRFTDYDGAAVRRHAWDAGINTGIKIDTGINLRPYAGIRINRSNGNRYVLDGAEINSPAQIQTTWHAGIRLDKTVELGQAKLTPAFSSDYYHTRQNSGSALSVNDRTLLQQAAHGTLHTLQIDAGYKGWNAKLHAAYGKDSNTARHKQAGIKIGYNW

SEQ ID NO: 9871 - protein, 625 aa, Neisseria meningitidis
MSQALPYRPDIDTLRAAAVLSVIVFHIEKNWLPGGFLGVDIFFVISGFLMTMILHREMWGGGRFSLKAFYIRRIKRILPAFFAVLAATLIGGFFLFTKDDFFLLWKSALTALGFASNLYFARGKDYFDPAQEEKPLLHIWSLSVEEQFYFVFPILLLLVARKSPRVQFGFLAALCALSLAASFMPSAFDKYYLPHLRACEMLVGSLTAVWMRYRQQRNLAVGRCCAAAGALFSACILSACLFAYSKQTAYFPGPAALIPCLAVAALIYFNHYEHPLKKFFQWKITVAAGLISYSLYLWHWPILAFMRYIGPDNLPPYSTAAAIVLILLLSLISYHGIEKPFKKWKGSFAQSVLWIYALPMLILGAGSFFAMRLPFMAQYDRLGLTRSNTSCHNNTGKQCLWGDTEKQPELLVLGDSHADHYKTFFDAVGKKEKWSATMVSADACAYVEGYASRVFQNWAACRAVYRYAEEHLPLYSKVVLAMRWGSQMPENSRSLAYDAGFFQKFDRMLHKLSSEKQAVYLMADNLASSYNVQRAYILSSRIPGYRQTLRPDDESTLKANARIRELAAKYPNVYIIDAAAYIPANFQIGGLPVYSDKDHINPYGGTELAKRFSEKQRFLDTRHNH

SEQ ID NO: 9872 - protein, 466 aa, Neisseria meningitidis
MNNPDLPYRQTLECLSQKQYNFTEVRRLLTEAALAGHPAAAFELAKHLMDADSPYQDREQGMEMLRIAAEQGHPYARYNLAYIQELEGAPPTLISLYRPPAEAGVPEAQVRLMYLLYASRHFEEALEWAKTSAKNNNPHGQYLLAQYCRYGTPPDFETAHLLYRKAAAQGLPEAHWQLGLQYRFGQGTKVDTAQAVNHLRAAAQQGYIPAYTPLAELILPTAPDEAVYRFQQAAQENDPDSHAALADIYLQGKYQERNHKLALHHAEAAAAERHPEGLRILGDICRYGLGIAPDTEKARHYYRQAAEAGSLSAYQKLISDSALNHPDQYGGIKDSAIRRQRAEQLYQKAQALHYGLQCAPEYAAALKLYTEAAELGHSKAQTNLGSMYYFGQGIAADYGKARKWFEQAAAQKDSMAFYNLACIHYSGHGVGPDKEKACRYLQEAINNGYGQKSVLQELLQQWQNAV

SEQ ID NO: 9873 - protein, 346 aa, Neisseria meningitidis
MKAMVYHGANDIRFEEKPRPQIIDPTDAVVKIVKTTICGTDLGIWKGKKPEVADGRILGHEGIGIVEEVGDAVKNIKVGDKVIISCVSKCCTCDNCKIQLYSHCRNGGWILGYMIDGTQAEYVRTPYADNSLVPLPDNVNEEVALLLSDALPTAHEIGVQYGDVKPGDTVFIAGAAPVGMSALLTAQLYSPAAIIVCDMDENRLKLAKELGATHTISPASGDVSKQVFAIVGEDGVDCAIEAVGIPATWNMCQDIVKPGGHIAVVGVHGQSVDFKLEKLWIKKLAITTGLVNANTTEMLMKAISSSSVDYTKMLTHRFKFSELEKAYDVFKHAAENQAMKVVLEAD

SEQ ID NO: 9874 - protein, 170 aa, Neisseria meningitidis
MGSKFFFLLLRFAGSVLPPSHMRGIGIVGRRVRGFLARRISPHIGRGVNIERGAYVFPDTVLGDGSGIGANCEICRGPVVGKNVMMEPECLFYSNNHKFDRKKRFEGYTEIRPITLEDDVWPGRRVIVMAGVTVGRGSVVGAGAVVTKDIPPYSLAAGNPAVVKKNLPEG

SEQ ID NO: 9875 - protein, 358 aa, Neisseria meningitidis
MKHFQSKVLTAAILASFCSGALAASNSRPHAREVATAALVGAYNNAQEINGFKVGDTIYDINGSGEITPKEATQEDVDNDDFKGLGLKEVVAQHDQSLADLTGIVEENSEALVKTAKVVNDISADVIDNTAAIGENKAAIAKKADQTALDAVSEKVTANETAIATKADKTELDKVSGKVTANETAIATKADKTELDKVSGKVTANETAIATKANSADVYTKAEVYTKQESDNRFVKIGDRIGNLNTTADGLDTRLKTAEKTITEHGTRLDGLDKTVSNLRKETRQGLAEQAALSGLFQPYNVGRFNVTAAVGGYKSESAVAIGTGFRFTENFAAKAGVAVGTSSGSSAAYHVGVNYEW

SEQ ID NO: 9876 - protein, 89 aa, Neisseria meningitidis; identical to SEQ ID NO: 1885

SEQ ID NO: 9877 - protein, 141 aa, Neisseria meningitidis; identical to SEQ ID NO: 7863

SEQ ID NO: 9878 - protein, 114 aa, Neisseria meningitidis
MNKQYPKINYIGNKEKIASWICDQLPSDVDTVADVFSGGCSFAYEAKKRGYRVITNDILAINYQIALALIENNHETLNDDDGAMIFSGSPHAGFMSQRYAEKFYFHDEYQQLDL

SEQ ID NO: 9879 - protein, 122 aa, Neisseria meningitidis; identical to SEQ ID NO: 5231

SEQ ID NO: 9880 - protein, 106 aa, Neisseria meningitidis; identical to SEQ ID NO: 3892

SEQ ID NO: 9881 - protein, 189 aa, Neisseria meningitidis
VNYKIYDGAKIIKKENLSIGDYSQIDDFVFFNCGEKSILGSFVHISSFTSIIGGGEFYMDHFSGLSAGCRIITGSDDFMGGGLTNPTVPSKYTNVKKSSVRIGKHAILGTNVTVLPGVTIGDGVAVGAGAIVRKNLEPWTIYVGVDCKPLKRRSQDKILELEKHLVAEFNLDLCPIIPSPNLPKPKETR

SEQ ID NO: 9882 - protein, 58 aa, Neisseria meningitidis; identical to SEQ ID NO: 1171

SEQ ID NO: 9883 - protein, 97 aa, Neisseria meningitidis; identical to SEQ ID NO: 3898

SEQ ID NO: 9884 - protein, 123 aa, Neisseria meningitidis
VAGMTKFQTASPACFDMAAPPPRQKKTIRNASDRSGLFSGESAASEHTAHAHIDLPSLAHRVHRRPLRLKIKLPSVVGITTQKNELLDIPMFFICFYIVMRSDKRPPDICLDGIVLLNFYKYV

SEQ ID NO: 9885 - protein, 75 aa, Neisseria meningitidis; identical to SEQ ID NO: 3903

SEQ ID NO: 9886 - protein, 75 aa, Neisseria meningitidis; identical to SEQ ID NO: 1870

SEQ ID NO: 9887 - protein, 72 aa, Neisseria meningitidis; identical to SEQ ID NO: 1579

SEQ ID NO: 9888 - protein, 66 aa, Neisseria meningitidis
VDTVGSLAIGYATGGNAGAFTDANADWNNRQLHSSEYKLAEQYADIVASRLNISKETCTAIYLGIN

SEQ ID NO: 9889 - protein, 76 aa, Neisseria meningitidis
LEICGIRRKRKPVMYLTVVFFTSVRLLTSKRRAKKGFGSTFYRIFFICLFGIGIFLYQRGAACGGIMRRADVFCQL

SEQ ID NO: 9890 - protein, 160 aa, Neisseria meningitidis; identical to SEQ ID NO: 3906

SEQ ID NO: 9891 - protein, 139 aa, Neisseria meningitidis; identical to SEQ ID NO: 1180

SEQ ID NO: 9892 - protein, 80 aa, Neisseria meningitidis; identical to SEQ ID NO: 1154

SEQ ID NO: 9893 - protein, 103 aa, Neisseria meningitidis
MFNQNQTVTYPATFLGAKKFKGEIDGSNIDTCSVLVATPLPAQSGNAVGFTAAQMKFGDSKNFSRLENLKYPCEVMVMVEMTSTGKGMVPSLIDFQVAEKPKG

SEQ ID NO: 9894 - protein, 68 aa, Neisseria meningitidis; identical to SEQ ID NO: 3910

SEQ ID NO: 9895 - protein, 68 aa, Neisseria meningitidis; identical to SEQ ID NO: 3911

SEQ ID NO: 9896 - protein, 64 aa, Neisseria meningitidis
VKHKLSSWWKTIKLTANLMAGVPDYENYVAQQRKHNPNAPVMTKLQFQDYCRKRRCGANGGRCC

SEQ ID NO: 9897 - protein, 147 aa, Neisseria meningitidis; identical to SEQ ID NO: 1529

SEQ ID NO: 9898 - protein, 65 aa, Neisseria meningitidis; identical to SEQ ID NO: 3913

SEQ ID NO: 9899 - protein, 131 aa, Neisseria meningitidis; identical to SEQ ID NO: 3914

SEQ ID NO: 9900 - protein, 61 aa, Neisseria meningitidis
VKKGVHSATQNYRRSGAMPSERIFRSVLRLVGVSSETVKRKFAGVELSYAGKAAGESLYCL

SEQ ID NO: 9901 - protein, 100 aa, Neisseria meningitidis; identical to SEQ ID NO: 1890

SEQ ID NO: 9902 - protein, 73 aa, Neisseria meningitidis; identical to SEQ ID NO: 3916

SEQ ID NO: 9903 - protein, 72 aa, Neisseria meningitidis; identical to SEQ ID NO: 202

SEQ ID NO: 9904 - protein, 61 aa, Neisseria meningitidis
VPEQARARPIQTAMTLCRRFGAGWRHTRRLPRFISHRPSETRNPPGPTCGMKRLSWREVFY

SEQ ID NO: 9905 - protein, 74 aa, Neisseria meningitidis; identical to SEQ ID NO: 3918

SEQ ID NO: 9906 - protein, 707 aa, Neisseria meningitidis; identical to SEQ ID NO: 3919

SEQ ID NO: 9907 - protein, 71 aa, Neisseria meningitidis; identical to SEQ ID NO: 3920

SEQ ID NO: 9908 - protein, 138 aa, Neisseria meningitidis
LTEEMMKKQRHILCVGCLYIILKVNVFPNTGWMEASKGMQGMSFSTFGYADAPGYTFSRIGHTLIFLLGKTTGTRTTVSDSSHNDKLRLFLRILQVLAKVSVATRMSYFFRRISVRYHSVSGFPVLKNSSEKRKRGYS

SEQ ID NO: 9909 - protein, 410 aa, Neisseria meningitidis
MPSAHYPEMSEKLMAVLMAMLVTLMPFSIDAYLPAIPEMAQSLNADVHRIEQSLSLFMFGTAFGQVVGGSVSDIKGRKPVALTGLTVYCLAVAAIVFASSAEQLLNLRVVQAFGAGMTVVIVGAMVRDYYSGRKAAQMFALIGIILMVVPLVASMVGALLQGLGGWQAIFVFLAAYSLVLLGLVQHFLPKPAVGGKIGRDVFGLVAGRFKRVLKTRAAMGYLFFQAFSFGSMFAFLTESSFVYQQLYRVTPHQYAWAFALNIITMMFFNRITAWRLKIGVHPQSILLWGIVVQFAANLSQLAAVLFFGLPPFWLLVACVMFSVGTQGLVGANTQACFMSYFKEEGGSANAVLGVFQSLIGAGVGMAATFLHDGSATVMAATMTASTSCGIALLWLCSHRAWKENGQSEYL

SEQ ID NO: 9910 - protein, 133 aa, Neisseria meningitidis
LFVCFEKCLFPDFAIPIRFCAVRCVLARTCSKSDVVPVFEALIRDADFQYIFLSYNNEGLMSVGQVREIFECFGKYNLVQTEYRRFKADKTENRNHKANSIFEYLHILEKTFYSGLTKTSTALPRLSSKRTIL

SEQ ID NO: 9911 - protein, 137 aa, Neisseria meningitidis; identical to SEQ ID NO: 3923

SEQ ID NO: 9912 - protein, 86 aa, Neisseria meningitidis; identical to SEQ ID NO: 1906

SEQ ID NO: 9913 - protein, 71 aa, Neisseria meningitidis
MKTLLLTFGIFLTVIIGMAVGYIFSKRTIKGSCGGITALGMKKMCDCDTPCDTLQKKLDEEKQAGGIRVDR

SEQ ID NO: 9914 - protein, 335 aa, Neisseria meningitidis
MSTFFQQTAQAMIAKHINRFPLLKLDQVIDWQPIEQYLNRQRTRYLRDHRGRPAYPLLSMFKAVLLGQWHSLSDPELEHSLITRIDFNLFCRFDELSIPDYSTLCRYRNWLAQDNTLSELLELINRQLTEKGLKIEKASAAVVDATIIQTAGSKQRQTIEVDEEGQVSGQTTPSKDSDARWIKKNGLYKLGYKQHTRTDGEGYIEKLHITPANAHECKHLSPLLEGIAEGTTVYADKGYDSAENRQHLEEHQLLDGIMRKACRNRPLSEVQTKRNRYLSKTRYVVEQSFGTLHRKFRYARAAYFGLIKVSAQSHLKAMCLNLLKAANRLSAPAAA

SEQ ID NO: 9915 - protein, 337 aa, Neisseria meningitidis
MIFSIIVPIYNVEKYLRCCVDSVLAENFADYEMILVDDGSPDGCGKICDEYAGKYPHIKVIHQENGGLSDARNAGIRAAKGDYLIFLDSDDYWADTNRSKNGGGGILFDLQQLADKKVDLILHPSSFNYRDIPKGADFSDNDFVRHFETLVEGRYYIANAWTKIVRREIIIKNNLFFPKGYIHEDFPYSLQLARFIKTFAFYDNPFYQYRVLGGSISHNIKYKNFSDVLTHLDRGVDFLVENKNSPIYGGLQKFVFDNIGYLRSILVRLYFSKNIILIYRKYFSFKEKCRKIFGAKAIRPVFIGKTAFIIGLPILRLLVPPMLYPAIKAVYQKFFSE

SEQ ID NO: 9916 - protein, 132 aa, Neisseria meningitidis; identical to SEQ ID NO: 3931

SEQ ID NO: 9917 - protein, 360 aa, Neisseria meningitidis
MDLSIVVPIYNVESYLEACLSSIEPILSNENVELILVNDGSKDGSEDICYKYIDKTTNNKQQTTNNKQQTTNNKQQTTNNKQQTTNNKQQTTRYRTPNIKYIYQDNQGTAEARNTGIKNSNGKYIVFIDSDDFINCQVLLDFLSKDDIDMPDVVFLNAVKYDKGSVSHFGEDYQPEKILNQSKVEVLKGLCRFRKFPGSACNKIIKRELIIKEKLFFEKEVYAEDIEWSMRLFNAATTFSYLDGCYYYYRQGRKDSKTGTVSEKSIKSLLYILEKNAEMEFNRDISSYLYSFLSYEYLVLLFIMTSKNIECDADIKRRAYHLRFMLLKSNKLIYKLIFPIITLFGVDITGRILKAIRGNI

SEQ ID NO: 9918 - protein, 385 aa, Neisseria meningitidis
MKRQALAAMIASLFALAACGGEPAAQAPAASAEAASSAAQTAAETPTGELPVIDAVTTHAPEVPPAIDRDYPAKVRVKMETVEKLTMEDGVEYRYWTFDGDVPGRMIRVREGDTVEVEFSNNPSSTVPHNVDFHAATGQGGGAAATFTAPGRTSTFSFKALQPGLYIYHCAVAPVGMHIANGMYGLILVEPKEGLPKVDKEFYIVQGDFYTKGKKGAQGLQPFDMDKAVAEQPEYVVFNGHVGSIAGDNALKAKAGETVRMYVGNGGPNLVSSFHVIGEIFDKVYVEGGKLINENVQSTIVPAGGSAIVEFKVDIPGSYTLVDHSIFRAFNKGALGQLKVEGAENPEIMTQKLSDTAYAGNGAAPAASAPAASAPAASASEKSVY

SEQ ID NO: 9919 - protein, 615 aa, Neisseria meningitidis
MHDTRTMMIKPTALLLPALFFFPHAYAPAADLSENKAAGFALFKNKSPDTESVKLKPKFPVRIDTQDSEIKDMVEEHLPLITQQQEEVLDKEQTGFLAEEAPDNVKTMLRSKGYFSSKVSLTEKGGAYTVHITPGPRTKITNVGVTILGDILSDGNLAEYYRNALENWQQPVGSDFDQDSWENSKTSVLGAVTRKAYPLAKLGNTRAAVNPDTATADLNVVVDSGRPIAFGDFEITGTQRYPEQIVSGLARFQPGTPYDLDLLLDFQQALEQNGHYSGASVQADFDRLQGDRVPVKVSVTEVKRHKLETGIRLDSEYGLGGKIAYDYYNLFNKGYIGSVVWDMDKYETTLAAGISQPRNYRGNYWTSNVSYNRSTTQNLEKRAFSGGIWYVRDRAGIDARLGAEFLAEGRKIPGSDVDLGNSHATMLTASWKRQLLNNVLHPENGHYLDGKIGTTLGTFLSSTALIRTSARAGYFFTPENKKLGTFIIRGQAGYTVARDNADVPSGLMFRSGGASSVRGYELDSIGLAGPNGSVLPERALLTGSLEYQLPFTRTLSGAVFHDMGDAAANFKRMELKHGSGLGVRWFSPLAPFSFDIAYGHSDKKIRWHISLGTRF

SEQ ID NO: 9920 - protein, 271 aa, Neisseria meningitidis; identical to SEQ ID NO: 3948

SEQ ID NO: 9921 - protein, 266 aa, Neisseria meningitidis; identical to SEQ ID NO: 3949

SEQ ID NO: 9922 - protein, 118 aa, Neisseria meningitidis
MTDRPSLLWIKPGQAEIMEYCEPEEASDPYATYRRANLMARLPLFVVILVLLNIVPLPAHPLAWLVPAGFMVLVGGFPLSLPLVALLVLTCCILAHCPPLSRLLCYPCPNHPMSKNSA

SEQ ID NO: 9923 - protein, 64 aa, Neisseria meningitidis; identical to SEQ ID NO: 3951

SEQ ID NO: 9924 - protein, 525 aa, Neisseria meningitidis
MNKFFKRLFDIIASASGLIILSPVFLILVYLIRKNLGSPVFFIQERPGKDGRPFKMIKFRSMRDAIDKDGNPLPDSERLTPFGKKLRAASLDELPELWNVLKGDMSLVGPRPLLMQYLPLYDNFQNRRHEMKPGVTGWAQVNGRNAISWDEKFAHDVWYIDNFSFWLDIKILFLTVKKVFVKEGISAEGEATMPYFTGNKTDEKNNILILSAGRRVELVQDFQTEAARFSDGISVFATDLNPRMSSACHVSDGSFEVPPISADSYIDSIFNLAVRENIGLIIPTIDTELQKLADERERFEAASVHIVVSDSDFIAQCRDKRKTATLFARYGIRSPEIYDRKKLVFPCFAKPYDGSRAIGAKRIDTPADLTPEVLADTKLMFCQFIDIENKFSEFTVDMYYDRQCRLKCAIPRKRLEVRSGEISKGVTCKNSLYQTLLEKMSVLQGARGCITAQFFYNEETGEFYGVEINPRFGGGFPLTYAAGGNYPSRLMREYLGDEEIPFSDDWENNLIMLRYDAKVLVHEND

SEQ ID NO: 9925 - protein, 141 aa, Neisseria meningitidis; identical to SEQ ID NO: 3955

SEQ ID NO: 9926 - protein, 91 aa, Neisseria meningitidis; identical to SEQ ID NO: 3956

SEQ ID NO: 9927 - protein, 343 aa, Neisseria meningitidis
MGRVSYLCVDAAEQALTDAGLLGDESITDGRMGVACGSSSGSTKDIGDVGELLLTGMSRNFSANTYVRMMPHTAAANIGIFFGLKGRIIPTSSACSSGSQGIGYAYEAIKYGLTDMMLAGGGEEFFPSEVYVFDSLYAASRRNGEPEKTPRPYDANRDGLVIGEGAGIFVLEELEHAKRRGAKIYAELVGYGANSDAYHISTPRPDAGAILAFQTALQHAGLAPEDIGWINLHGTGTHHNDNMESRAVAAVFGNNTPCTSTKPQTGHTLGAADAIEAAFAWGIANRQSNPEGKLPPRLWDGQNDPNLPAINLTGSGSRWETEKRIAASSSFAFGGSNCVLIIG

SEQ ID NO: 9928 - protein, 650 aa, Neisseria meningitidis
MLPTQPNPTQPNPTQPNPTQPAPDLIDTAGVNTEAIYTSDGITANSTQLEQLKKLFPACFDADGNFLIDRLQAEIAPQTDIGREFYEMNWLGKSYARLLRNLPPETLISEDKTHNAKPENAGSQNLLIRGDNLEVLKHLKNAYTNSVKMIYIDPPYNTGSDGFVYQDDRKFTPAELACLANIDEDEAARILDFTDKGSNSHSAWLTFMYPRLYIARELLKDDGVIFISIDDNEAAQLKLLCDEVFGEGNFIKDLIVNTSEGGGNAKYVVNGHETVLVYAKDITHFDNLKRPKDIRGKKIVINDELYWIQEDAVREQFGKYGNLHYEDIIEIKGIEFKNKIDKDIENNEYILIPKSYGKTIIGKLRKVSDDFSKFHSILNIGNISKNLTKDGIRELEELFETGKGYSPFETPKPLDLLKRLVLSATFKGNQTDLILDFFAGSGTTAHAVMQLNAEGQNGNRRYICVQLPEKTAEKSEARKAGYPTIFDITKARIEKAAAKIRVEHPDYTGDSGFKIFQTADNFRQHPDKDFSPEQPDLPLNDELSEEQLQTLLTTWTLYDGAALTTPVEPVRLGAYTAYLCEKRLYLMNAGFTSADLLAFIRKLDDDAAFNPNRVIVFGSNMASAMQHELDQAVRGYANKKEIELNVVIRV

SEQ ID NO: 9929 - protein, 677 aa, Neisseria meningitidis
MKLEASKHKQKFKKSFIISLFFSILYTSPLLAVDYVYDNSKLTNEQIDRLKKLRDKSSEYWKQETYLLKPTNGSSQNSLKVPALYSKTHQFKNINNSKKISFYDKEYTEDYLVGFARGFGVEKRNGEEEKTLQQYFKDCVNTGNSNNDKCEQPSFENSGPRLIKSDIFALAPQIKNSHINSEILSVGNYIEWLRPTLNKLPSWQEHLYSGLDPFHYIEVTDNSHVIGQTISLDEFRLENSLWEPRWDSDVGELKTTNADIRFNTKSESLLVKEDYAGGARFRFAYDLKDKVSETPVLTFEKNITGTSDIIFENPIDDLKSLDGHQIIKVNGTADKHAFRLSGKHQKGIYTLSLQQRPEGFFTKVQERDDISIYAQQAQAANTLFALRLNDKNSDIFDRTLPRKGLWLRVIDGHSNQWVQGKTAPVEGYRKGVQLGGEVFTWQNESNQLSVGLMSGQAEQRSTFRNPDTDNLTTGNVKGFGAGIYATWHQLQDKQTGAYADSWVQYQRFRHRINTEDATERFTSKGITASIEAGYNALLAEHFTKKGNSLRVYLQPQAQLTYLGVNGKFSDSENAHVNLLGSRQLQTRVGVQAKAQFSLYKNIAIEPFAAVNALYHNKPFGVEIDGERRVINNKTAIESQLGVAVKIKSHLTLQASFNRQTSKYHQAKQGALNLQWTF

SEQ ID NO: 9930 - protein, 693 aa, Neisseria meningitidis
MTLKASKQASKQASKQASKQASKQASGRVNLLTLSVLSLFCTPYVGSDAYDPVKEAEIKNKFILEAAEDRNSHVWRGPCSISFDCFGMFRAQLGSNTRSTKIGDDADFSFSDKPKPGTSHYFSSGKTDQNSSEYGYDEINIQGKNYNSGILAVDNMPVVKKYITDTYGDNLKDAVKKQLQDLYKTRPEAWEENKKRTEEAYIEQLGPKFSILKQKNPDLINKLVEDSVLTPHSNTSQTSLNNIFNKKLHVKIENKSHVAGQVLELTKMTLKDSLWEPRRHSDIHTLETSDNARIRLNTKDEKLTVHKDYAGGADFLFGYDVRESDEPALTFEDKVSGQSGVVLERRPENLKTLDGRKLIAAKTADSGSFAFKQNYRQGLYELLLKQCEGGFCLGVQRLAIPEAEAVLYAQQAYAANTLFGLRAADRGDDVYAADPSRQNIRGGAAADGRRKGVQIGGEVFVRQNEGSRLAIGVMGGRVGQHASVNSKGGAAGSDLHGYGGGVYAAWHQLRDKQTGAYLDGWLQYQRFKHRINDENRAERYKTKGWTASVEGGYNTLVAEGVVGKGNNVRFYLQPQAQFTYLGVNGGFTDSEGTGVGLLGSGQWQSRAGIRAKNRFALRNGVNLQPFAAFNVLHRSKSFGVEMDGEKQTLAGRTALEGRFGIEAGWKGHMSARIGYGKRTDGDKEAALSLKWLF

SEQ ID NO: 9931 - protein, 149 aa, Neisseria meningitidis; identical to SEQ ID NO: 2330

SEQ ID NO: 9932 - protein, 66 aa, Neisseria meningitidis
LRHLSEKTETALPSFPRRRESSLVGTETYRENGFLRFYVLDSHFRGNDGILGFCFWFSVFEGMMKI

SEQ ID NO: 9933 - protein, 91 aa, Neisseria meningitidis
LSVRKLIGKTVSLDFTFWIPTFVGMTASVCRLQHGFFRFYVLDSRLRGNDESIHTETCTTSFLRTYIPSFPQKQKTKNRNRSAVIPAQAGI

SEQ ID NO: 9934 - protein, 67 aa, Neisseria meningitidis
MYSGLTKIKTRRRTRLPPEKRKKCRPKTFRTAFSREPSFPQGHKTKTENQKQKPKIRHSHESGNLVR

SEQ ID NO: 9935 - protein, 482 aa, Neisseria meningitidis
MKGDIGVIGLAVMGQNLILNMNDCGFKVVAYNRTIGKVDEFLNGAAKGTGIIGAYSLQDLVDKLEKPRKIMMMVRAGSVVDDFIEQLLPLLEKGDIIIDGGNANYPDTTRRTHYLAEKGILFVGMGVSGGEEGARHGPSIMPGGDERAWEAVKPIFQAIAAKTPQGEPCCDWVGRDGAGHFVKMVHNGIEYGDMQLICEAYQFMKDGLGLSYDEMHRVFAEWNKTELDSYLIEITAAILGYKDEGGEPLVEKILDTAGQKGTGKWTGINALDLGIPLTLISEAVFARCVSSFKEQRVQTGKLFARTVTPVEGGKQEWVEALRQALLASKIISYAQGFMLIREAGESYGWDLDYGNTALLWREGCIIRSAFLSNIRDAYENNPDLVFLGADPYFKNILENCLPAWRKVVAKAVECGIPMPCMASAITFLDGYTTERLPANLLQAQRDYFGAHTYERTDKPRGEFFHTNWTGKGGDTASTTYDI

SEQ ID NO: 9936 - protein, 38 aa, Neisseria meningitidis
MIFKIKKSYPQKISPINIIIVFLFNFYILFISLQGNAR

SEQ ID NO: 9937 - protein, 403 aa, Neisseria meningitidis
LDKRSGSAPAYRAHRGERFGKPYPNPVTGAVWIHAVSVGETRAAQPLIRELRQRFPDAPLLMTQMTPTGRETAQVLFPDAQCRYLPYDKKTWVRQFLREHRPMFGVLMETEIWPNLMKECRRAGVPLFLANARLSEKSLNGYLKVRSLIRPAVASLTGCLVQTEADAARLAKLGAASVQVCGNTKYDLMPSEQMKTLAGQFEKRIGDRPVAVCGSTRVYRGEDEAEKLLAAWQQYRGDALLVVVPRHPEHFQTAFETAKRFGFKVQRRSDGLPVEPDTQVWIGDSMGELYAYYLCADVAFVGGSLVDSGCQNIIEPLSCGVPTIFGFSTYNFSEACRHALASGAAVQVESADAWREAVEKTLSYEGGGMQMQARVDGFIAQHRGAGARIAEAVREAVCGHRGR

SEQ ID NO: 9938 - protein, 62 aa, Neisseria meningitidis
MTAERFLFFPINAAISNPVIPTFVGMTECRFVGMTRYRFPLRIPIRKFIYTQAIQSYLTEIL

SEQ ID NO: 9939 - protein, 50 aa, Neisseria meningitidis
  misc_feature 46, 47, 48: 'Xaa' is any amino acid
LITDAPFPAARKVSDGRGCGYLPALSPCHSFTPSLADSADLGDTMXXXHT

SEQ ID NO: 9940 - protein, 255 aa, Neisseria meningitidis
  misc_feature 249, 250: 'Xaa' is any amino acid
MTEYPGIGSPLFYGVFFAAVLVMIALDMFSLKKNGSHKVGVKEALAWSGLWVAVSCLFAGWLYFELAGNLGYGAAVAKEKVLEFFTGYILEKSLAVDNIFVFLMIFGYFKVAPQFQHRVLLYGVLGALVLRTVMIFVGAALVRQFEWILYLFGAFLLYTGIHMMKPEGDEEEDLANSRLLNAVKKVVPVGTEFHGEKFFTVENGKKIATPLFLVLVMIELSDVVFAVDSIPAVFAVTTDPFIVLTSNIXXTHLIN

SEQ ID NO: 9941 - protein, 307 aa, Neisseria meningitidis
MLQRTLAKSISVTGVGLHSGERVALTLHPAPENSGISFRRTDLDGEMGEQIKLTPYLINDTRLSSTIVTDKGVRVGTIEHIMSALSAYGIDNALIELNAPEIPIMDGSSLPFIYLLQDAGVVDQKAQKRFLKILKPVEIKEAGKWVRFTPYDGFKVTLTIEFDHPAFNRSSPTFEIDFAGKSYIDEIARARTFGFMHEVEMMRAHNLGLGGNLNNAIVIDDTDVLNPEGLRYPDEFVRHKILDAIGDLYIVGHPIVGAFEGYKSGHAINNALLRAVLADETAYDRVEFADSDDLPDAFHELNIRNCG

SEQ ID NO: 9942 - protein, 167 aa, Neisseria meningitidis
  misc_feature 164, 165: 'Xaa' is any amino acid
LLDFLSKDDIDMPDVVFLNAVKYDKGSVSHFGEDYQPEKILNQSKVEVLKGLCRFRKFPGSACNKIIKRELIIKEKLFFEKEVYAEDIEWSMRLFNAATTFSYLDGCYYYYRQGRKDSKTGTVSEKSIKSLLYILEKNAEMEFNRDISSYLYSFLSYEYLVLLXXHT

SEQ ID NO: 9943 - protein, 41 aa, Neisseria meningitidis
LWITLSVFSGKFLKLKFSSFLQKQKTKIRNLKFVIPTKVGI

SEQ ID NO: 9944 - protein, 117 aa, Neisseria meningitidis
MDLSIVVPIYNVESYLEACLSSIEPILSNENVELILVNDGSKDGSEDICYKYIDKTTNNKQQTTNNKQQTTNNKQQTTNNKQQTTNNKQQTTPDTEHQTSNIYIRITKGRQKLGIPE

SEQ ID NO: 9945 - protein, 52 aa, Neisseria meningitidis; identical to SEQ ID NO: 952

SEQ ID NO: 9946 - protein, 380 aa, Neisseria meningitidis; identical to SEQ ID NO: 2973

SEQ ID NO: 9947 - protein, 597 aa, Neisseria meningitidis; identical to SEQ ID NO: 8838

SEQ ID NO: 9948 - protein, 546 aa, Neisseria meningitidis
LSLPYKRWHYFNLIKNSLQKGCLKQQQTLTATTLKRNTIMTVIKQEDFIQSICDAFQFISYYHPKDYIDALYKAWQKEENPAAKDAMTQILVNSRMCAENNRPICQDTGIATVFLKVGMDVQWDADMSVEEMVNEGVRRAYTWEGNTLRASVLADPAGKRQNTKDNTPAVIHMSIVPGGKVEVTCAAKGGGSENKSKLAMLNPSDNIVDWVLKSIPTMGAGWCPPGILGIGIGGTPEKAVLMAKESLMSHIDIQELQEKAASGAELSTTEALRLELFEKVNALGIGAQGLGGLTTVLDVKILDYPTHAASKPIAMIPNCAATRHVEFELDGSGPVELTPPRVEDWPDLTYSPDNGKRVDVDKLTKEEVASWKTGDVLLLNGKILTGRDAAHKRLVDMLNKGEELPVDFTNRLIYYVGPVDPVGDEVVGPAGPTTATRMDKFTRQMLEQTGLLGMIGKSERGVATCEAIADNKAVYLMAVGGAAYLVAKAIKSSKVLAFPELGMEAIYEFEVKDMPVTVAVDSKGESIHATAPRKWQAKIGIIPVES

SEQ ID NO: 9949 - protein, 72 aa, Neisseria meningitidis
MLKTLTFAALHFSTAFSITYVLTGSIGISGAVALVEPLINTVVFYFHEKAWNLYEKNKTVQQTQPFQLHRCS

SEQ ID NO: 9950 - protein, 514 aa, Neisseria meningitidis; identical to SEQ ID NO: 9767

SEQ ID NO: 9951 - protein, 337 aa, Neisseria meningitidis; identical to SEQ ID NO: 1101

SEQ ID NO: 9952 - protein, 66 aa, Neisseria meningitidis; identical to SEQ ID NO: 3905

SEQ ID NO: 9953 - protein, 118 aa, Neisseria meningitidis; identical to SEQ ID NO: 680

SEQ ID NO: 9954 - protein, 644 aa, Neisseria meningitidis
MSLIECKNINRYFGSGENRVHILKDISLSIEKGDFVAIIGQSGSGKSTLMNILGCLDTAGSGSYRIDGIETAKMQPDELAALRRERFGFIFQRYNLLSSLTARDNVALPAVYMGAGGKERSARAEKLLQDLGLASKEGNKPGELSGGQQQRVSIARALMNGGEIIFADEPTGALDTASGKNVMEIIHKLHKAGHTVIMVTHDPGIAANANRVIEIRDGEIISDTSKNPEIPASNVGRIREKASWSFYYDQFVEAFRMSVQAVLAHKMRSLLTMLGIIIGIASVVSVVALGNGSQKKILEDISSIGTNTISIFPGRGFGDRRSGRIKTLTIDDAKIIAKQSYVASATPMTSSGGTLTYRNTDLTASLYGVGEQYFDVRGLKLETGRLFDENDVKEDAQVVVIDQNVKDKLFADSDPLGKTILFRKRPLTVIGVMKKDENAFGNSDVLMLWSPYTTVMHQITGESHTNSITVKIKDNANTQVAEKGLTDLLKARHGTEDFFMNNSDSIRQIVESTTGTMKLLISSIALISLVVGGIGVMNIMLVSVTERTKEIGIRMAIGARRGNILQQFLIEAVLICVIGGLVGVGLSAAVSLVFNHFVTDFPMDISAMSVIGAVACSTGIGIAFGFMPANKAAKLNPIDALAQD

SEQ ID NO: 9955 - protein, 376 aa, Neisseria meningitidis; identical to SEQ ID NO: 2865

SEQ ID NO: 9956 - protein, 251 aa, Neisseria meningitidis; identical to SEQ ID NO: 9216

SEQ ID NO: 9957 - protein, 51 aa, Neisseria meningitidis
LKENFAQNGQTLAQWARENGFKPRDVYLVVGGQRKGNYGKGHEIAKKLGLK

SEQ ID NO: 9958 - protein, 122 aa, Neisseria meningitidis; identical to SEQ ID NO: 66

SEQ ID NO: 9959 - protein, 433 aa, Neisseria meningitidis; identical to SEQ ID NO: 2404

SEQ ID NO: 9960 - protein, 402 aa, Neisseria meningitidis; identical to SEQ ID NO: 2438

SEQ ID NO: 9961 - protein, 192 aa, Neisseria meningitidis; identical to SEQ ID NO: 9025

SEQ ID NO: 9962 - protein, 595 aa, Neisseria meningitidis; identical to SEQ ID NO: 8320

SEQ ID NO: 9963 - protein, 208 aa, Neisseria meningitidis
MTQERLPEFFDRAPTLTVQDPLAAFLGAAQDGILTYRYADAVRLCGHSCPTVAGAYLMVIKGLKALYGEELPERGGIEAAMQGARDEGTVGVTASVVQLLTGAAPETGFGGIGMQGRFARRNLLSFGAGEINGTLTLRRKDNGKTVAVSINAALKPFAPEMRELMPKAVGGSASTEELERFGQLWQARVKAFLTESADDPQFVIVREV

SEQ ID NO: 9964 - protein, 480 aa, Neisseria meningitidis
MKQLAMYINGRFENDFNGEWRDVLNPSTEETIAREPKGGKADVDRAVAAARAAQPAWERLPAVERGAYLRKIAQGIRERADELTDTIVAEGGKTKDLARVEVMFTADYLDYQAEWARRYEGEIIQSDRPRENILLFKRPLGVVAGILPWNFPFFLIARKMGPALVTGNTIVVKPSSVTPINCHIFAEIVDAVGLPAGVFNVVNGPGAEIGNALSAHPQVDMVSLTGSVEAGRQVMEAASANITKVSLELGGKAPAIVLKDADLDLAVKSILASRVGNTGQICNCAERVYVHSSLKDAFIEKMTAAMKGVRYGNPAEAEAGALEMGPLIEERAVKAVAEKVERAVKQGAKLVCGGKRAEGRGYFFEPTLLTDTDNSMDIMKEETFGPVLPVSAFDTLDQVIALANDCEFGLTSSVYTTNLNEAFYVTRRLQFGETYINRENFEAMQGFHAGWKKSGIGGADGKHGLEEYLQTQVVYLETDI

SEQ ID NO: 9965 - protein, 307 aa, Neisseria meningitidis; identical to SEQ ID NO: 983

SEQ ID NO: 9966 - protein, 476 aa, Neisseria meningitidis; identical to SEQ ID NO: 9630

SEQ ID NO: 9967 - protein, 497 aa, Neisseria meningitidis
MFKRSVIAMACIVALSACGGGGGGSPDVKSADTLSKPAAPVVTEDVGEEVLPKEKKDEEAVSGAPQADTQDATAGKGGQDMAAVSAENTGNGGAATTDNPENKDEGPQNDMPQNAADTDSSTPNHTPAPNMPTRDMGNQAPDAGESAQPANQPDMANAADGMQGDDPSAGENAGNTADQAANQAENNQVGGSQNPASSTNPNATNGGSDFGRINVANGIKLDSGSENVTLTHCKDKVCDRDFLDEEAPPKSEFEKLSDEEKINKYKKDEQRENFVGLVADRVEKNGTNKYVIIYKDKSASSSSARFRRSARSRRSLPAEMPLIPVNQADTLIVDGEAVSLTGHSGNIFAPEGNYRYLTYGAEKLSGGSYALSVQGEPAKGEMLAGTAVYNGEVLHFHMENGRPSPSGGRFAAKVDFGSKSVDGIIDSGDDLHMGTQKFKAVIDGNGFKGTWTENGGGDVSGRFYGPAGEEVAGKYSYRPTDAEKGGFGVFAGKKEQD

SEQ ID NO: 9968 - protein, 207 aa, Neisseria meningitidis; identical to SEQ ID NO: 243

SEQ ID NO: 9969 - protein, 287 aa, Neisseria meningitidis; identical to SEQ ID NO: 2947

SEQ ID NO: 9970 - protein, 95 aa, Neisseria meningitidis
LALYKYQPSSKYFGQSMALIAQKEFEEFVNNVKEYDILESFSYFLNKRVAHNIWKIYFSDESVIFIRKSEENGKTVHEFVYQEYTDSSDFNSMFE

SEQ ID NO: 9971 - protein, 436 aa, Neisseria meningitidis; identical to SEQ ID NO: 6841

SEQ ID NO: 9972 - protein, 146 aa, Neisseria meningitidis; identical to SEQ ID NO: 9087

SEQ ID NO: 9973 - protein, 405 aa, Neisseria meningitidis; identical to SEQ ID NO: 157

SEQ ID NO: 9974 - protein, 431 aa, Neisseria meningitidis; identical to SEQ ID NO: 8313

SEQ ID NO: 9975 - protein, 418 aa, Neisseria meningitidis
LGYCQGIESELPLIGFIYIVLKIFGIGIMATHGDEVKIQNRQEADSAKAKRKRCLTALTLLFALAAAAAGSAFFLWWQHEEETEDAYVAGRVVQVTPQKGGTVRKVLHDDTDAVKKGDVLAVLDDDNDVLAYERAKNELIQAVRQNRRQNAATSQAGAQVALRRADLARAQDDLRRRSALAESGAVSAEELAHARAAVSQAQAAVKAALAEESSARAALGGQVSLREQPAVQTAIGRLKDAWLNLQRTQIRAPADGQVAKRSVQVGQQVAAGAPLMAVVPLSDVWVDANFKETQLRHMKIGQPAELVSDLYGKQIVYRGRVAGFSAGTGSAFSLIPAQNATGNWIKVVQRVPVRIVLNREDVDRHPLRIGLSMTVKVDTSAAGAPVSKTPGAALPEMESTDWSEVDRTVDEILGQSAP

SEQ ID NO: 9976 - protein, 519 aa, Neisseria meningitidis
LASVNVPGKFDRVEVYDDGRYLGIRGSDDKRRRVWEGVFDKESGRYLNSEAQDLTVRHVSTGASSTGKVSAVVSSSVSRAGVLAGVGKLARLGAKFSTRAVPYVGTALLAHDVYETFKEDIQAQGYQYDPETDKFVKGYEYSNCLWYEDERRINRTYGCYGVDSSIMRLMSDYSRFPEVKELMESQMYRLARPFWNWHKEELNKLSSLDWNNFVLNRCTFDWNGGDCVVNKGDDYRNGANFSLSRNPKYKEEMDAKKLEEILSLKVDANPDKYIKATGYPGYSEKVEVAPGTKVNMGPVTDRNGNPVQVVATFGRDSQGNTTVDVQVIPRPDLTPGSAEAPNAQPLPEVSPAENPANNPAPNENPGTRPNPEPDPDLNPDANPDTDGQPGTRPDSPAVPDRPNGRHRKERKEGEDGGLLCKFFPDILACDRLPEPNPAEDLNLPSETVNVEFQKSGIFQDSAQCPAPVTFTVTVLDSSRQFAFSFENACTIAERLRYMLLALAWAVAAFFCIRTVSREV

SEQ ID NO: 9977 - protein, 255 aa, Neisseria meningitidis; identical to SEQ ID NO: 9672

SEQ ID NO: 9978 - protein, 193 aa, Neisseria meningitidis; identical to SEQ ID NO: 1600

SEQ ID NO: 9979 - protein, 103 aa, Neisseria meningitidis; identical to SEQ ID NO: 2233

SEQ ID NO: 9980 - protein, 279 aa, Neisseria meningitidis; identical to SEQ ID NO: 343

SEQ ID NO: 9981 - protein, 408 aa, Neisseria meningitidis
MPSETFRSKKMSQKLILVLNCGSSSLKGAVLDNGSGEVLLSCLAEKLNLPDAYITFKVNGEKHKVDLSAHPNHTGAVEALMEELKAHGLDSRIGAIGHRVVSGGELYSESILVDDEVIAGIEKCIPLAPLHNPAHLLGLRAAQSIFKDLPNVVVFDTSFHQTMPEVAYKYAVPQELYEKYGLRRYGAHGTSYRFVADETARFLGKDKKDLRMVIAHLGNGASITAVANGESRDTSMGLTPLEGLVMGTRSGDIDPSVFGFLAENANMTIAQITEMLNKKSGLLGISGLSNDCRTIEEEAAKGHKGAKLALDMFIYRLAKYIGSMAVAAGGLDALVFTGGIGENSDIIRERVIGYLGFLGLNIDQEANLKARFGNAGVITTADSKAVAVVIPTNEELMIAHDTARLSGL

SEQ ID NO: 9982 - protein, 280 aa, Neisseria meningitidis
LIQFRLSNTRNHLYMKTKLIKILTPFTVLPLLACGQTPVSNANAEPAVKAEPAVKAKSAGKSVAASLKARLEKTYSAQDLKVLSVNETPIKGIYEVVVSGKQIIYTDAKGDYMLVGDLINVNTRQSLTEERAADLNKIDFASLPLDKAIKEVRGNGKLKVAVFSDPDCPFCKRLEHEFEKMTDVTVYSFMMPIAGLHPDAARKAQILWCQPDRAKAWTDWMRKGKFPVGGSICDNPVAETTSLGEQFGFNGTPTLVFPNGRSQSGYSPMPQLEEIIRKNQ

SEQ ID NO: 9983 - protein, 109 aa, Neisseria meningitidis
LQALANSRTFVYDSSEDQDFFDTEKFRQRYEDWVAKLCGNLGYKTRRALFKNMMSGDIWLHNGCLKISPSRHVKLEAWDAIDADDVILSLDNSPEEIGAGLKLALSRCR

SEQ ID NO: 9984 - protein, 181 aa, Neisseria meningitidis; identical to SEQ ID NO: 8981

SEQ ID NO: 9985 - protein, 494 aa, Neisseria meningitidis; identical to SEQ ID NO: 8319

SEQ ID NO: 9986 - protein, 78 aa, Neisseria meningitidis
MMEATVYLEDNEYIALCDLLKLAGLAESGGQAKAFIAEGLVLRNGETETRKTAKIRGGEVIEFDGARLEIADGYDPEE

SEQ ID NO: 9987 - protein, 900 aa, Neisseria meningitidis
MQLHILNNPKDAALAADAEFLKQSLFNLLHEEASPLVVETVKLLSTSDDSAALIEKVLPQLDEQQTHDLTLACGLFAQILNIAEDVHHERRRQIHEEAGRGGAEGSLTETVRRLKAGKADGKSVQRQLDNTSVTAVLTAHPTEVQRQTVLSFNRRIRALLPQRERCTNADALARLRREIDTILLGLWQTSETRRHKLSVNDEINNGVSIFPMSFFEALPKLYRNMEHDFQMVYPDVCVPNILKIGGWIGGDRDGNPFVSAETLRFAFRRHADAVFRFYRGELDKLYRELPLSIRRVKVNDDVMALAALSPDEELARTEEPYRRAIAYIMARAMGKARALGLGMGCKFGFLEPYASAQEFLDDLKKLQRSLIDNGSRLLAEGRLADLIRSVSVFGFHMMPLDLRQHAGKHADVVAELFQHAGLEDYNSLNEEQKQAVLLRELSHQRPLYSPFITYSDHTRHELAIFNEARKIKDEFGEDAVTQSIISNCEQPSDLLALALLLKESGLLAVENGKPHSRINIVPLFETIEALENACPVMETMFRLDWYDALLESRGNIQEIMLGYSDSNKDGGYVTSSWCLYQAELGLVELFKKYDVRMRLFHGRGGSVGRGGGPSYQAILAQPAGSVAGQIRITEQGEVITAKYADPGNAQRNLETLVAATLEASILPDKKDPDAKLMQALSDVSFKYYRELITHPDFIDYFLQTSPIQEIATLNLGSRPASRKTLARIQDLRAIPWVFSWMQNRLMLPAWYGFGSAVETLCEGNPDTLTALREHAQSNPFFQAMLSNMEQVMAKTDITLAENYAGLSESPDKAKIIFGMIKEEYRRSRKALLDLLQTEELLRDNRSLARSLALRIPYLNALNGLQVAMLKRLRKEPDNPHALLMVHLTINGVAQGLRNTG

SEQ ID NO: 9988 - protein, 284 aa, Neisseria meningitidis
MPPIPAPSAPSEHTVAWVFGQPVTDLPQDLFIPPDALKVVLGSFQGPLDLLLYLIRKQNIDVLDIPMVKITEQYLHYIAQIEAYQFDLAAEYLLMAAMLIEIKSRLLLPRTETVEDEEADPRAELVRRLLAYEQMKLAAQGLDALPRAGRDFAWAYLPLEIAVEAKLPEVYITDLTQAWLGILSRAKHTRSHEVIKETISVRAQMTAILRRLNGHGICRFHDLFNPEQGAAYVVVNFIALLELAKEGLVGIVQEVGFGEIRISLNHEGAHSDGISGTRGGRDVF

SEQ ID NO: 9989 - protein, 207 aa, Neisseria meningitidis
MNRRTFLLGAGALLLTACGRKSARTHAKIPEGSTVLALGDSLTFGYGANPGESYPAQLQKLTGWNIVNGGVSGDTSAQALSRLPALLARKPKLVIVGIGGNDFLRKVPKEQTRANIAKIIETVQKENIPAVLVGVPHITLGALFGHLSDHPLYEDLSEEYGIPLFGGAWAEILGDNNLKSDQIHANGKGYRKFAEDLNQFLRKQGFR

SEQ ID NO: 9990 - protein, 74 aa, Neisseria meningitidis
MKKITPKSFEEALSRLESLTQSMQGEMPLEDALAAYQEGNELVRYCQTKLAQVEQKLQVLDADGPKELNLESDE

SEQ ID NO: 9991 - protein, 339 aa, Neisseria meningitidis
MKKILVTGGTGFIGSHTVVSLLKSGHQVVILDNLCNSSINILPRLKTITGQEIPFYQGDIRDREILRRIFAENRIDSVIHFAGLKAVGESVAEPMKYYDNNVSGSLVLAEEMARAGVFKIVFSSSATVYGDPGKVPYTEDMQPGDTTSPYGTSKSMVERILTDIQKADPRWSVILLRYFNPIGAHESGLIGEQPNGIPNNLLPYICQVAAGKLPQLAVFGGDYPTPDGTGMRDYIHVMDLAEGHVAAMQAKSNVAGTHLLNLGSGRASSVLEIIRAFEAASGLTIPYEVKPRRAGDLACFYADPSYAKAQIGWQTQRDLTQMMEDSWRWVSNNPNGYDD

SEQ ID NO: 9992 - protein, 431 aa, Neisseria meningitidis; identical to SEQ ID NO: 8095

SEQ ID NO: 9993 - protein, 144 aa, Neisseria meningitidis; identical to SEQ ID NO: 4528

SEQ ID NO: 9994 - protein, 96 aa, Neisseria meningitidis; identical to SEQ ID NO: 3731

SEQ ID NO: 9995 - protein, 348 aa, Neisseria meningitidis
MPSEAFRRHRAYRENKLQPLVSVLICAYNVEKYFAQSLAAVVNQTWRNLEILIVDDGSTDGTLAIAKDFQKRDSRIKILAQAQNSGLIPSLNIGLDELAKSGMGEYIARTDADDIAAPDWIEKIVGEMEKDRSIIAMGAWLEVLSEEKDGNRLARHHEHGKIWKKPIRHEDIADFFPFGNPIHNNTMIMRRSVIDGGLRYNTERDWAEDYQFWYDVSKLGRLAYYPEALVKYRLHANQVSSKYSIRQHEIAQGIQKTARNDFLQSMGFKTRFDSLEYRQIKAVAYELLEKHLPEEDFERARRFLYQCFKRTDTPPAGVWLDFAADGRMRRLFTLRQYFGILHRLLKNR

SEQ ID NO: 9996 - protein, 90 aa, Neisseria meningitidis; identical to SEQ ID NO: 8632

SEQ ID NO: 9997 - protein, 103 aa, Neisseria meningitidis; identical to SEQ ID NO: 3787

SEQ ID NO: 9998 - protein, 420 aa, Neisseria meningitidis; identical to SEQ ID NO: 2546

SEQ ID NO: 9999 - protein, 106 aa, Neisseria meningitidis; identical to SEQ ID NO: 5396

SEQ ID NO: 10000 - protein, 451 aa, Neisseria meningitidis; identical to SEQ ID NO: 9848

SEQ ID NO: 10001 - protein, 129 aa, Neisseria meningitidis; identical to SEQ ID NO: 322

SEQ ID NO: 10002 - protein, 134 aa, Neisseria meningitidis; identical to SEQ ID NO: 2143

SEQ ID NO: 10003 - protein, 887 aa, Neisseria meningitidis; identical to SEQ ID NO: 8051

SEQ ID NO: 10004 - protein, 92 aa, Neisseria meningitidis; identical to SEQ ID NO: 32

SEQ ID NO: 10005 - protein, 199 aa, Neisseria meningitidis; identical to SEQ ID NO: 2043

SEQ ID NO: 10006 - protein, 98 aa, Neisseria meningitidis; identical to SEQ ID NO: 1735

SEQ ID NO: 10007 - protein, 502 aa, Neisseria meningitidis; identical to SEQ ID NO: 2442

SEQ ID NO: 10008 - protein, 470 aa, Neisseria meningitidis; identical to SEQ ID NO: 8949

SEQ ID NO: 10009 - protein, 525 aa, Neisseria meningitidis; identical to SEQ ID NO: 8126

SEQ ID NO: 10010 - protein, 221 aa, Neisseria meningitidis; identical to SEQ ID NO: 6360

SEQ ID NO: 10011 - protein, 566 aa, Neisseria meningitidis
MSVKIQTRSINTDVFNHLLTAGADPLIARLCASRGVQSPAELDDKLAALLPYQTLTNCEAAAGRLADAVGRKEKILIVADYDADGATACAVGLDGLAAMGAKVDFLVPNRFEHGYGLTPELAEIAAAQGVDLLITVDNGIASIAGVARAQALGLDVIVTDHHLPADTVPDCIIVNPNQKGCGFQSKSLAGVGVIFYVLTALRAELRRRNYFSDGLKEPNLGDLLDLVALGTVADVVPLDHNNRILVSQGLKRMRSGKMRPGIRALFEVARRDWRKAQPFDMGFALGPRINAAGRLDDMSVGIACLLARDDSEAQELAAQLNNLNIERREIEQSMLQDALNAFPETLPSGQTTLVAYRDDFHQGVVGIVASRLKDRFYRPTIVFAPADNGEVRGSGRSIPNLHLRDALDLVSKRHPDLILKFGGHAMAAGLSILEHNIPAFQTAFEEAVREMVCEDDLSQTFITDGSLKACDITLEQAQNLARHVWGQGFAPPSFTDEFHVVRQQPLGAEGKHKKAWLQKDGCEFEAMFWRCSEDIPEYIRTVYRPVANEWRNNLELQLYIDYWEAV

SEQ ID NO: 10012 - protein, 136 aa, Neisseria meningitidis; identical to SEQ ID NO: 2700

SEQ ID NO: 10013 - protein, 313 aa, Neisseria meningitidis; identical to SEQ ID NO: 3869

SEQ ID NO: 10014 - protein, 81 aa, Neisseria meningitidis; identical to SEQ ID NO: 1361

SEQ ID NO: 10015 - protein, 101 aa, Neisseria meningitidis
MSRKAETPLIFKPRSLTMNKLFITALSALALSACAGTWEGAKQDTARNLDKTQAAAERAAEQTGNAVEKGWDKTKEAVKKGGNAVGRGISHLGGKIENATE

SEQ ID NO: 10016 - protein, 103 aa, Neisseria meningitidis; identical to SEQ ID NO: 2233

SEQ ID NO: 10017 - protein, 332 aa, Neisseria meningitidis; identical to SEQ ID NO: 8245

SEQ ID NO: 10018 - protein, 742 aa, Neisseria meningitidis; identical to SEQ ID NO: 1054

SEQ ID NO: 10019 - protein, 321 aa, Neisseria meningitidis; identical to SEQ ID NO: 4435

SEQ ID NO: 10020 - protein, 319 aa, Neisseria meningitidis; identical to SEQ ID NO: 8328

SEQ ID NO: 10021 - protein, 100 aa, Neisseria meningitidis
MGFRVGMNCFDTRLQADDYLLSSLPPTVTQDGKIIRPERVGEKWVLNGKPVMLSYPKCSNFEQIKQGSYVGSTVLILFVVIYGFRLLINFLKDIGKVGTD

SEQ ID NO: 10022 - protein, 289 aa, Neisseria meningitidis; identical to SEQ ID NO: 8166

SEQ ID NO: 10023 - protein, 107 aa, Neisseria meningitidis; identical to SEQ ID NO: 9670

SEQ ID NO: 10024 - protein, 139 aa, Neisseria meningitidis
MSVLLKNTKILINISSISFILLNAYIVYSKVRFNLSTIPFANHVSILIVSLFTISTLFLIYKMVIFARRMTKNTNKIEYIKIFSFYVVAVLYCLLINLFKQENFYFNINIYSIIIVIITFCLAHFFFVIKSYFGVNKNV

SEQ ID NO: 10025 - protein, 86 aa, Neisseria meningitidis; identical to SEQ ID NO: 3484

SEQ ID NO: 10026 - protein, 323 aa, Neisseria meningitidis
MIAKHIDRFPLLKLDRVIDWQPIEQYLNRQKTRYLRDHRGRPAYPLLSMFKAVLLGQWHSLSDPELEHSLITRIDFNLFCRFDELSIPDYSTLCRYRNWLAQDDTLSELLKLINRQLTEKGLKIEKASAAVVDATIIQTAGSKQRQAIEVDEGQINGQTTPSKDSDARWIKKNGLYKLGYKQHTRTDAEGYIEKLHITPANAHECKHLSPLLEGLPEGTTVYADKGYDSAENRQHLEEHQLLDGIMRKACRNRPLSEVQTKRNRYLSKTRYVVEQSFGTLHRKFRYARSTYFGLIKVSAQSHLKAMCLNLLKAANRLSAPAAA

SEQ ID NO: 10027 - protein, 1161 aa, Neisseria meningitidis; identical to SEQ ID NO: 9311

SEQ ID NO: 10028 - protein, 118 aa, Neisseria meningitidis; identical to SEQ ID NO: 7534

SEQ ID NO: 10029 - protein, 222 aa, Neisseria meningitidis
LVKTADGYKAIAHIQAGDRVLSKDEASGETGYKPVTARYGNPYRETVYIEVSDGIGNSQTLVSNKIHPFYSQGKWIQAGRLKKGDTLLSESGAKQTVQNITLKQQPLKAYNLTVADWHTYFVKGNQAETEGVWVHNSCPPKRAPEYHAGTVSESNFLNAAEKWLGENYKSYPNGRYVSQDGMRQVRYGYHETNSSTHHGHFESYDKPNGRVIENSAVTIIRD

SEQ ID NO: 10030 - protein, 243 aa, Neisseria meningitidis; identical to SEQ ID NO: 8753

SEQ ID NO: 10031 - protein, 245 aa, Neisseria meningitidis; identical to SEQ ID NO: 3451

SEQ ID NO: 10032 - protein, 271 aa, Neisseria meningitidis
GEATPYWFKFNPRYYEQCKNISQTAATFNLSRNTLYLWIRLKKQTGSLKHQVTGLNAVKSDRQKPAQYIGQHQDAYLHEIAKHFDCTAATICYALKQMGITRKKRPPLTKNKTRPKRIIHSRPNFPTTNVFIWMKQDLTATCSVPMPAAKGKKRRVEKDTNAYLWCPHKSATGLLRWFIKIRPESFLKRGFSNAYCPHLKNRLFIMRDFTVWVSYGKWRKNWDIRYCLLHLIHLSSTRLRKCGRILSSICEPFCLITPDLTMHYCPILILI

SEQ ID NO: 10033 - protein, 206 aa, Neisseria meningitidis; identical to SEQ ID NO: 1193

SEQ ID NO: 10034 - protein, 57 aa, Neisseria meningitidis; identical to SEQ ID NO: 735

SEQ ID NO: 10035 - protein, 165 aa, Neisseria meningitidis; identical to SEQ ID NO: 3578

SEQ ID NO: 10036 - protein, 90 aa, Neisseria meningitidis; identical to SEQ ID NO: 8272

SEQ ID NO: 10037 - protein, 704 aa, Neisseria meningitidis
MFLFSDGLQSINNNNRRKRIVKNAYIPSRGIRKIPHLFTLLPEFHICKDGKGAEAVIGWGLRPTTHKARAFAAEHQLPFIALEDGFLRSLGLGVAGYPPYSIVYDDIGIYYDTTRPSRLEQLILAADTMPSETLAQAQQTMDFILQHHLSKYNHAPELSDDHPLRSPSKPETVLIIDQTFGDMAIQYGGADASTFELMFQTALNENPQADIWVKTHPDVLCGKKQGYLTQLAQQHRVHLLAEDINPISLLQNVDKVYCVTSQMGFEALLCGKPLTTFGLPWYAGWGVSDDRHPEINRLVQTQRRATRNLLQLFAAAYLQYSRYLNPNTGEAGSLFDVIDYLATVKRKNDKLRGELYCVGMSLWKRAVAKPFFNVPSCRLKFISSTQKLARVKLSDDARILAWGNGKEAIVRFAEQHHIPLLRMEDGFIRSVGLGSNLVPPLSLVTDDMSIYFNAETPSRLEYILQNQNFDDQDFQTALKLQKMLTENHISKYNVGNSDFSAPSTDKTVILVPGQVEDDASIRYGSPQIYRNLDLLRTVRERHPDAYIIYKPHPDVVSGNRIGHISPEDAARYADQTAEQADILTCLQYADEIHTMTSLTGFEALLRGKKVSCYGLPFYAGWGLTQDLLPIPRRSRRLELWQLIAGTLIHYPDYIHPETHQAINAETAAQILIRQKNMQKNNNGLHRGYFAKKLGKIKQLYRSFK

SEQ ID NO: 10038 - protein, 330 aa, Neisseria meningitidis
MKQKIFVLYTGGTIGMTQSSEGLRPDTALVGQALAPFSNGMDFDWHVCGTLIDSSAVQLQNWCAWLDIIAAALPQYDGVLVLHGTDTLAYTANLFALALQGLDKPIVLTGSQWPYNAVGSDAPRNLATAVAAFPLGLKQTLIAFDGKLYPAVGSSKVSTETAAGFDNPHFGALAEWDETQGWHNVRIPNQDAADVSDGLKIRYPDPQAKIAVRTLIPGFAVQELADGLGQLPAQALILQSYGHGNTPADEGFIRAVQDFTQQGKLLLNISQVRQGRTAAVYAQGNAFRNSGIINGGKCNLETATALMTLAVSEGWGADEVKHELQRLGLV

SEQ ID NO: 10039 - protein, 153 aa, Neisseria meningitidis
LKRGNIYTLPPEMKTNIKGAFMSDCCNRIQPVLLSVLRIVTAYLFLLHGTSKIFAFPIEMGSGSPGGLLLLAGILEIVGGILLVLGLFARPAAFVLSGQMAVAYFMAHASGNALFPIANGGESAVLFCFVFLYIAAAGGGAWSLDRLFFKRKA

SEQ ID NO: 10040 - protein, 41 aa, Neisseria meningitidis
LFMSDKPILLSPAAKKEALARAVKEIRAKYGDKAIVKGCVK

SEQ ID NO: 10041 - protein, 66 aa, Neisseria meningitidis; identical to SEQ ID NO: 3561

SEQ ID NO: 10042 - protein, 187 aa, Neisseria meningitidis; identical to SEQ ID NO: 2230

SEQ ID NO: 10043 - protein, 392 aa, Neisseria meningitidis; identical to SEQ ID NO: 276

SEQ ID NO: 10044 - protein, 216 aa, Neisseria meningitidis
MISVEHVSKRYLTRQGWRTVLHDISFKMEKGEKIGILGRNGAGKSTLIRLISGVEPPTTGEIKRTMSISWPLAFSGAFQGSLTGMDNLRFICRIYNVDIDYVKNFTEEFSELGQYLYEPVKRYSSGMKARLAFALSLAVEFDCYLIDEVIAVGDSRFADKCKYELFEKRKDRSIILVSHSHSAMKQYCDNAMVLEKGHMYQFEDMDKAYEYYNSLP

SEQ ID NO: 10045 - protein, 110 aa, Neisseria meningitidis; identical to SEQ ID NO: 7667

SEQ ID NO: 10046 - protein, 94 aa, Neisseria meningitidis; identical to SEQ ID NO: 1124

SEQ ID NO: 10047 - protein, 948 aa, Neisseria meningitidis; identical to SEQ ID NO: 2444

SEQ ID NO: 10048 - protein, 131 aa, Neisseria meningitidis; identical to SEQ ID NO: 4698

SEQ ID NO: 10049 - protein, 126 aa, Neisseria meningitidis
MNIRFFALTVPVLSLAACAVPEAYDDGRRGYMPPVQNQAGPNDFRAFSCENGLSVRVRRLDGGKIALRLDGRRAVLSSDVAASGERYTAEHGLFGNGTEWHQKGGEAFFGFTDAYGNSVETSCRAR

SEQ ID NO: 10050 - protein, 289 aa, Neisseria meningitidis
MKRIFLSALPAILPLSTYADLPLTIEDIMTDKGKWKLETSLTYLNSENSRAALAAPVYIQTGATSFIPIPTEIQENGSNTDMLAGTLGLRYGLTGNTDIYGSGSYLWHEERKLDGNGKTRNKRMSDVSLGISHTFLKDDKNPALISFLESTVYEKSRNKASSGKSWLIGATTYKAIDPIVLSLTAAYRINGSKTLSDGIRYKSGNYLLLNPNISFAANDRISLTGGIQWLGKQPDRIDGKKESARNTSTYAHFGAGFGFTKTTALNASARFNVSGQSSSELKLGVQHTF

SEQ ID NO: 10051 - protein, 269 aa, Neisseria meningitidis; identical to SEQ ID NO: 2402

SEQ ID NO: 10052 - protein, 219 aa, Neisseria meningitidis; identical to SEQ ID NO: 2874

SEQ ID NO: 10053 - protein, 123 aa, Neisseria meningitidis; identical to SEQ ID NO: 1296

SEQ ID NO: 10054 - protein, 288 aa, Neisseria meningitidis; identical to SEQ ID NO: 2832

SEQ ID NO: 10055 - protein, 374 aa, Neisseria meningitidis; identical to SEQ ID NO: 8348

SEQ ID NO: 10056 - protein, 389 aa, Neisseria meningitidis; identical to SEQ ID NO: 8081

SEQ ID NO: 10057 - protein, 188 aa, Neisseria meningitidis
MSAFLPIINRLILQSPDSRSELAAFAGKTLTLNIAGLKLAGRITEDGLLSAGNGFADTEITFRNSAVQKILQGGEPGAGDIGLEGDLILGIAVLSLLGSLRSRASDELARIFGTQADIGSRAADIGHGIKQIGRNIAEQIGGFSRESESANIGNEALADCLDEISRLRDGVVRLNERLDRLERDIWID

SEQ ID NO: 10058 - protein, 105 aa, Neisseria meningitidis
MKKNIFHNVSLYEIIFSDNGNTLTLSFTDTIEGNYFGYIKCSNILNFKLDTNNFVDYEDKEDSLFPLFIPEIELYKYQFYSEIIIDVGIIIKISAETINFEPLGK

SEQ ID NO: 10059 - protein, 852 aa, Neisseria meningitidis
MPANLSSALETFKQQRDAAEAHYLKTNRVSVFFREYTAAVETLLAALWVEHFQNSALCLMAVGGFGRGELYPCSDVDLAVVSPAPLSDGIQEQIARFVQTLWDCKLMPSVKSGGIDELCESVRNDITGDTAFLEARFLFGNRQTADELAEKMNAQRNVAAFIEAKLVEMEHRHAKSQGSGAVLEPNIKSCPGGLRDIHTLLWIAKAQGLATNLPALVKQGILTRTEAGMLSHGYRRLAHIRIHLHLNAKRAEDRLLFDLQPQVAESMGYQGLNLRRQSEELMRVFYRAIKTVKQLSGILTPMLQSRVSSTPLRVTLRIDDDYIQVNNQIAARHTDIFFRRPEHIFKIVEIMQQRNDITALEPQTLRAWWGATRKINRSFYQNSENRHRFAGFFRNGNGLTQTLRFLNLYGVLGRYLPAWEKIVGLLQHDLFHIYPVDDHILTVVRNVRRLALDMHSHELPYASALMQSFERQDILYLAAFFHDIAKGRGGDHAIQGIADARQFAADHFLTEEESDLLAWLVENHLLMSTVAQKEDIQDPSVLDAFCKRVQTHERLSALYLLTISDIRGTNPKLWNAWRASLLESLFHAAGRYLAGNGGNPHALFGRRQQEAADLLTRAAVPEKQQKKLWNALGSAYFARHQSREILWHAANLVHDFETPIVRSRILPQSDSFQVMVFMPNGPRLFARLCRIFSRHGFDILAARAFITEHDYILDTFIVQIPSQHAPEDYPDIQSALEAELNSFIHGHTVAEISSHSRRISRRSRYMPIAPSITITPEEDYPDWYSVEITAVNRPFLLADMAEIFFAHNVSLRYAKISTLDERAEDSFTVFSPDLKNPKIQSSLKQALLEQLA

SEQ ID NO: 10060 - protein, 107 aa, Neisseria meningitidis; identical to SEQ ID NO: 2106

SEQ ID NO: 10061 - protein, 637 aa, Neisseria meningitidis
MNPSPLLDLIDSPQDLRRLDKKQLPRLAGELRAFLLESVGQTGGHFASNLGAVELTIALHYVYDTPEDKLVWDVGHQSYPHKILTGRKNQMHTMRQYGGLAGFPKRSESEYDAFGVGHSSTSIGAALGMAVADKQLGNNRRSVAIIGDGAMTAGQAFEALNCAGDMDVDLLVVLNDNEMSISPNVGALPKYLASNVVRDMHGLLSTVKAQTGKVLDKIPGAMEFAQKVEHKIKTLAEEAEHAKQSLSLFENFGFRYTGPVDGHNVENLVDVLKDLRSRKGPQLLHVITKKGNGYKLAENDPVKYHAVAKLPKEGAAQMPSEKEPKPVAKPTYTQVFGKWLCDRAAADERLIAITPAMREGSGLVEFEQRFPDRYFDVGIAEQHAVTFAGGLACEGMKPVVAIYSTFLQRAYDQLVHDIALQNLPVLFAVDRAGIVGADGPTHAGLYDLSFLRCIPNMIVAAPSDENECRLLLSTCYQADAPAAVRYPRGTGTGAPVSDGMETVEIGKGIIRREGGKTAFIAFGSMVAPALAVAGKLNATVADMRFVKPIDEELIVRLARSHDRIVTLEENAEQGGAGGAVLEVLAKHGICKPVLLLGVADTVTGHGDPKKLLDDLGLSAEAVERRVRAWLSDRDAAN

SEQ ID NO: 10062 - protein, 334 aa, Neisseria meningitidis; identical to SEQ ID NO: 8283

SEQ ID NO: 10063 - protein, 100 aa, Neisseria meningitidis; identical to SEQ ID NO: 1675

SEQ ID NO: 10064 - protein, 94 aa, Neisseria meningitidis; identical to SEQ ID NO: 9607

SEQ ID NO: 10065 - protein, 146 aa, Neisseria meningitidis; identical to SEQ ID NO: 2999

SEQ ID NO: 10066 - protein, 96 aa, Neisseria meningitidis
LFSKGKLKMQVLKKVDWKMFVARSFWQCVPVGLTAGVWCFVAGMALHSCAKEPEPVAKEPTKVEAMERQADLEVKVWEGQYESMSVEEKMKGIVYE

SEQ ID NO: 10067 - protein, 253 aa, Neisseria meningitidis
MTEFVVLIPARLDSSRLPGKALADIHGKPMVVRVAEQAAKSKAARVVVATDHPDIQTACQAHGIEVVMTSNRHESGTTRLAEASAALKLPPHLVVVNVQGDEPLIAPELIDRTAEVLVENNVQMATAAHELHDFDELMNPNAVKVVLDKNRNAIYFSRAPIPYPRDAMRAGKREMPSETAVLRHIGIYAYRAGFLQRYAEMSVSPLETIESLEQLRVLWHGYPIAVETAKEAPAAGVDTQEDLDRVRAVFQTV

SEQ ID NO: 10068 - protein, 253 aa, Neisseria meningitidis; identical to SEQ ID NO: 8360

SEQ ID NO: 10069 - protein, 97 aa, Neisseria meningitidis; identical to SEQ ID NO: 8257

SEQ ID NO: 10070 - protein, 76 aa, Neisseria meningitidis; identical to SEQ ID NO: 8288

SEQ ID NO: 10071 - protein, 124 aa, Neisseria meningitidis
MQYLFVKYSHQIFVTITILVFNIRFFLLWKNPEKPLAGFWKALPHLNDTMLLFTGLWLMKITHFSPFNAPWLGTKILLLLAYIALGMMMMRARPRSTKFYTVYLLAMCCVACIVYLAKTKVLPF

SEQ ID NO: 10072 - protein, 287 aa, Neisseria meningitidis
VENVETHSQNHRKRLIGTFFLVGLENLLMLVYPVFGSWAINAVIAGQAWQALLYALVVLLMWLVGAARRIADTRTFTRIYTEIAVPVVLEQRQRQVPHSAVTARVALSREFVSFFEEHLPIAATSVVSIFGACIMLLVLEFWVGVSAVGILALFLWLLPRFAAISENLYFRLKNSLERDNHFIRKGDERQLDRHYGLLARLRVLISNREAFGYLCVGTAMGILFGFAFVMMTLKGYSSAGHVYSVGTYLWMFAMSLDDVPRLVEQYSNLKDIGQRIEWSKRNIKAGT

SEQ ID NO: 10073 - protein, 56 aa, Neisseria meningitidis; identical to SEQ ID NO: 326

SEQ ID NO: 10074 - protein, 394 aa, Neisseria meningitidis; identical to SEQ ID NO: 277

SEQ ID NO: 10075 - protein, 228 aa, Neisseria meningitidis
KYSCYISAQQTLQGINNLGNLSPETQLAAASLLQDSAFAVKDGINSARQWADAHPNITATAQTALAVAEAATTVWGGKKVELNPTKWDWVKNTGYKKPAARHMQTVDGEMAGGNRPPKSITSNSKADASTQPSLQAQLIGEQISSGHAYNKHVIRQQEFTDLNINSPADFARHIENIVSHPTNMKELPRGRTAYWDDKTGTIVIRDKNSDDGGTAFRPTSGKKYYDDL

SEQ ID NO: 10076 - protein, 473 aa, Neisseria meningitidis; identical to SEQ ID NO: 9090

SEQ ID NO: 10077 - protein, 693 aa, Neisseria meningitidis
MKSLKTFLIWGIVVLVGLASFTTLALSRGEQVSAVWMVTAAISVYCIAYRFYSLYIANRVMRLDPNRLTPAERHNDGLDYVPTHKGVLFGHHFAAIAGAGPLVGPVLAAQMGYLPGTLWIIFGVVFAGAVQDMMVLFVSMRRDGKSLGDIVKQELGTVPGVIASIGILMIMVIIMAVLALIVVKALVHSPWGTFTIAATMPIALFMGIYTRYIRPGKIGEISIVGFILLMLAVIYGEDVAKSSIGHWFDLDGIQLTWAIMIYGFVASVLPVWLLLTPRDYLSTFLKIGTIAALALGIVIVNPTLQMPAVTHFIDGSGPVFSGALFPFLFITIACGAVSGFHALISSGTTPKMLENETHVRMIGYGGMLMESFVAIMALAAAASLDPGVYFAMNSPAALIGTDANTAAEVITTKLQFPVDAATLLHTAKEVGENTILSRAGGAPTLAVGMAHIMSRLIPGEAMMAFWYHFALLFEALFILTAVDAGTRVARFMIQDLGSIFYKPFGNTDSIPANLIATFFAVALWGYFLYTGVTDPLGGINSLWPLFGIANQMLAGVALIMCAVVLIKMKRDRYVWVVLVPAVGVLFVTCYAGLQKLFHSDPRISFLAHAGKYSDALAKNEVLAPAKDIGEMAQIIFNDKINAGLTILFLSVVVIVAAYGLRTALKARKVGWPTAKEIPAVYRDSKQPEAQSEA

SEQ ID NO: 10078 - protein, 334 aa, Neisseria meningitidis
MSTFFQQTAQAMIAKHIDRFPLLKLDQVIDWQPIEQYLNRQKTRYLRDHRGRPAYPLLSMFKAILPGQWHSLSDPELEHSLITRIDFNLFCRFDELSIPDYSTLCRYRNWLAQDDTLSELLELINRQLTEKGLKIEKASAVVGATIIQTAGSKQRQAIEVDEEGQVSGQTTPSKDSDARWIKKNGLYKLGYKQHTRTDAEGYIEKLHITPANAHECKHLPPLLEGVPRGTTVYADKGYDSAENRQHLEEHQLQDGIMRKACRNRPLTEAQTKRNRYLSKTRYVVEQSFGTLHRKFRYARAAYFGLIKVSAQSHLKAMCLNLLKAANRLSAPAAA

SEQ ID NO: 10079 - protein, 291 aa, Neisseria meningitidis
MEEGLIDRLLETLWLDRRLNQNTLNGYRRDLEKIARRLSQSGRMLKDADEADLAAAVYVDGEQRSSQARALSACKRLYIWMEREGIRTDNPTRLLKPPKIDKNIPTLITEQQISRLLAAPDTDTPHGLRDKALLELMYATGLRVSEAVGLNFGNVDLDRGCITALGKGDKQRMVPMGQESAYWVGRYYTEARPALLKGRSCDALFVSQKKTGISRQLAWMIVKEYAGRAGIGHISPHSLRHAFATHLVQHGLDLRVVQDMLGHADLNTTQIYTHVANVWLQGVVKEHHSRN

SEQ ID NO: 10080 - protein, 216 aa, Neisseria meningitidis; identical to SEQ ID NO: 8316

SEQ ID NO: 10081 - protein, 269 aa, Neisseria meningitidis; identical to SEQ ID NO: 3459

SEQ ID NO: 10082 - protein, 380 aa, Neisseria meningitidis
MNVFKQQLEQLGAQNQYRSIPDLIHQGRYITRENRKMLNMSSNDYLGLASDENLRRSFLQQYGGNFPSFTSSSSRLLTGNFPIYTDLEELVAQRFQRESALLFNSGYHANLGILPALTTTKSLILADKFVHASMIDGIRLSRCAFSRYRHNDYEHLKNLLEKNVGKFDRTFIVTESVFSMDGDVADLKQLVQLKKQFPNTYLYVDEAHAIGVYGQNGLGIAERDNLIAEIDLLVGTFGKALASVGAYAVCNQVLKECLINQMRPLIFSTALPPFNVAWTYFIFERLPQFSKERSHLEQLSAFLRREVAHRTQIMPSQTCIVPYILGGNEAALAKAEYLQRQGYYCLPIRPPTVPKNTSRIRLSLTADMTTDEVRQFAVCL

SEQ ID NO: 10083 - protein, 207 aa, Neisseria meningitidis
MRKSRLSQYKQNKLIELFVTGVTARTAAELVGVNKNTAAYYFHRLRLLIYQNSPHLEMFDGEVEADESYFGGQRKGKRGRGAAGKVAVFGLLKRNGKVYTVTVPNTQTATLFPIIREQVKPDSIVYTDCYRSYDVLDVREFSHFSFAETSFSYQSQHTFCTTKPYWNELLEPGKTSFTQVRHSQSAFAVFKGVRTTFQQDKSSCSIL

SEQ ID NO: 10084 - protein, 1375 aa, Neisseria meningitidis; identical to SEQ ID NO: 8346

SEQ ID NO: 10085 - protein, 671 aa, Neisseria meningitidis
MKSYPDPYRHFENLDSAETQNFAAEANAETRARFLNNDKARALSDGILNQMQDTRQIPFCQEHRARMYHFHQDAEYPKGVYRVCTAATYRSGYPEWKILFSVADFDELLGDDVYLGGVSHLVEKPNRALLTLSKSGGDTAYTLEVDLEAGELVEGGFHFPAGKNQVSWRDENSVWVCPAWDERQLTESGYPREVWLVERGKSFEESLPVYQIDKDAMMVNAWRYLDPQGSPIDLIEASDGFYTKTYLQVSAEGEAKPLNLPNDCDVVGYLAGHLLLTLRKDWNRANQSYPSGALVAVKLNRGELGAAQLLFAPDETQALESVETTKRFVVASLLENVQGRLKAWRFADGKWQEVELPRLPSGALEMTDQPWGGDVVYLAAGDFTTPLTLFALDLNVMELTVMRRQPQQFDSDGIEVRQFWVMSSDGERIPYFHVGKNAAPDTPTLVYAYGGFGVPELPHYLGSIGKYWLEEGNAFVLANIRGGGEFGPRWHQAAQGISKHKSVDDLLAVVRDLSERGISSPQHIGLQGGSNGGLITAAAFVREPQSIGALVCEVPLTDMIRYPLLSAGSSWTDEYGNPQKYEVCKRRLGELSPYHNLSDGIDYPPALITTSLSDDRVHPAHALKFYAKLRETSPQSWLYSPDGGGHTGNGTQREAADELACVLLFLKEFLG

SEQ ID NO: 10086 - protein, 859 aa, Neisseria meningitidis
MRYDKLTAKFQQALAEAQSLALAADGSCLEAGFVLKALLDDQNSGAAALLAHAGVNVPQVKQRLQQHLNSLPKVSGQGGDILPSRELQAVLNLMDKAATKRGDAYIASELFLLALVQQNDAAGKILKEAGATEQNINAAIDAVRGGQNVNDANAEDQRDALKKYTLDLTQRARDGKLDPVIGRDDEIRRAIQVLQRRTKNNPVLIGEPGVGKTAIVEGLAQRIVNGEVPESLRNKRLLVLDLAALIAGAKYRGEFEERLKGVLNDLAKDDGNTLIFIDEIHTLVGAGKTDGAMDAGNMLKPALARGELHCIGATTLDEYRQYIEKDAALERRFQKVLVGEPSVEDTIAILRGLQERYEIHHGIDITDPAIVAAAELSDRYITDRFLPDKAIDLIDEAASRVKMEKETKPEAMDKIDRRLIQLRMEKAHVEKEKDDASKKRLELIDEEINGLQKEYADLDEIWKAEKAISDGAANIKKQIDEVKIKIEQAKRQGDLALASKLMYEDLEHLEKQRAAAERADTDSTKPANKLLRNNVGAEEIAEVVSRMTGIPVSKMMEGERDKLLKMEEVLHRRVVGQDEAVRAVSDAIRRSRSGLADPNKPYGSFLFLGPTGVGKTELCKALAGFLFDSEDHLIRIDMSEYMEKHAVARLIGAPPGYVGYEEGGYLTEQVRRKPYSVILLDEVEKAHPDVFNILLQVLDDGRLTDGQGRTVDFKNTVIVMTSNIGSQHIQQMGIQDYEAVKEVVMEDVKEHFRPEMINRIDEVVVFHGLDQANIRSIAKIQLKGLEKRLEKQNLRLTVSDAALDIIAKAGFDPIYGARPLKRAIQSEIENPLAKALLAGNYAPESEIRVEADGDRLKFA

SEQ ID NO: 10087 - protein, 192 aa, Neisseria meningitidis; identical to SEQ ID NO: 2909

SEQ ID NO: 10088 - protein, 328 aa, Neisseria meningitidis; identical to SEQ ID NO: 8723

SEQ ID NO: 10089 - protein, 69 aa, Neisseria meningitidis; identical to SEQ ID NO: 5143

SEQ ID NO: 10090 - protein, 145 aa, Neisseria meningitidis; identical to SEQ ID NO: 2247

SEQ ID NO: 10091 - protein, 451 aa, Neisseria meningitidis; identical to SEQ ID NO: 2532

SEQ ID NO: 10092 - protein, 161 aa, Neisseria meningitidis; identical to SEQ ID NO: 9515

SEQ ID NO: 10093 - protein, 144 aa, Neisseria meningitidis; identical to SEQ ID NO: 3606

SEQ ID NO: 10094 - protein, 161 aa, Neisseria meningitidis; identical to SEQ ID NO: 1189

SEQ ID NO: 10095 - protein, 128 aa, Neisseria meningitidis; identical to SEQ ID NO: 8714

SEQ ID NO: 10096 - protein, 248 aa, Neisseria meningitidis; identical to SEQ ID NO: 639

SEQ ID NO: 10097 - protein, 206 aa, Neisseria meningitidis
MKPQFITLDGIDGAGKSTNLAVIKAWFERRGLPVLFTREPGGTPVGEALREILLNPETKAGLRAETLMMFAARMQHIEDVILPALSDGIHVVSDRFTDATFAYQGGGRGMPSEDIEILEHWVQGGLRPDLTLLLDVPLEVSMARIGQTREKDRFEQEQADFFMRVRSVYLNRAAACPERYAVIDSNLGLDEVRNSIEKVLDGHFGC

SEQ ID NO: 10098 - protein, 343 aa, Neisseria meningitidis; identical to SEQ ID NO: 6390

SEQ ID NO: 10099 - protein, 397 aa, Neisseria meningitidis; identical to SEQ ID NO: 103

SEQ ID NO: 10100 - protein, 524 aa, Neisseria meningitidis; identical to SEQ ID NO: 2756

SEQ ID NO: 10101 - protein, 787 aa, Neisseria meningitidis
MQFSYSWLKTQADTELSADKLEHLLTMSGLEVEEAETAAPAFAGVVVAEVKSVEKHPDADRLNVTRVDAGTGELVQIVCGAPNVKAGIKVPCSLPGAVLPGNFKIKPTKMRGVPSNGMLCSTNELGLPDDGVNGLHILPEDAPVGINIREYLDLDDTLFTLKITPNRADCLSVKGIAREVSALTGCAFRQPEIHTAPITGSRKQPVQINAPADCGRFISRVIENVNAKAATPDWMKQRLERSGIRSISVLVDIGNYVMLEIGQPMHVFDADKLSGSLHIRRAREGETLECLNEKTVSLSENTLVVADEKGALSLAGLMGGAASAVSDGTQNIVLEAAWFAPEIIAGKSRQYGFGSDSSFRFERGVDYRLQADAIERATELVLQICGGAAGEMVEAQGELPEAKQVGLRLDRLKTVLGVDIPAEQVETILQHLGLQPEKTAEGFRVTAPSFRFDIEIEADLIEEIGRVYGYENIPDDYTSGRLKMLELPETRRSRFAVYNEMAARGYREVVSYAFVDEQWEQDFAANADPIRLQNPLAAQYAVMRSTLIGGLVEILQNNLNRKQNRVRVFEIARVFGKGSDGRFVQNERIGGLWYGAAMPEQWGGKTRNADFYDIKADVENLLKNKAVEFVKTGYPALHPGRAANIVSDGKVIGFVGELHPKWLQKYDLPQAPLVFEIDMAAVLECGKTRYRAVSKFQPVRRDLAFVMPEAMSHDDLLLVLKGAANKLVQEISVFDVYRGMGLPEGMKSVAVKVILQDMENTLTDEAVEPLIGKLIGAATAAGARLRS

SEQ ID NO: 10102 - protein, 284 aa, Neisseria meningitidis
LFSEHGGLEMKLDIYALLERALLSGDPDEKGRLTDEAFAAVQNADGAEANAPPADFPRAGRPDKPVLVAPSQLTPRKMNTTEGYAAMLHAIAHIEFNAVNLALDAAYRFRTLPFQFVRDWVKVAKEEVYHFRLMRDRLRAFGFDYGSFEAHNHLWDMAYKTAYDPLLRMALVPRVLEARGLDVTPGIRAKVAQRGDSETCGVLDIIYRDEVGHVAIGNHWYQHLCRERGLEPITLFRSLIARYDMFIFRGYVNIEAREKAGFSRFELDMLEDFEQGLKQNKNTV

SEQ ID NO: 10103 - protein, 215 aa, Neisseria meningitidis; identical to SEQ ID NO: 1509

SEQ ID NO: 10104 - protein, 209 aa, Neisseria meningitidis
LVKTADGYKAIAHIRVGESVLSKDEASGKTGYKPVTARYGNPYRETVYIKVSDGIGNSQTLVSNKIHPFYSDGKWIKAEDLKAGSRLLSESGKTQTVRNIVVKPKPLKAYNLTVADWHTYFVKGDKAETEGVWVHNACPPKRTGSSKNEKHGDGGRSQISAESRIAELKNKIIPGMSKNERLKIERTIRNITKNANRKAKGEEHGRRGR

SEQ ID NO: 10105 - protein, 178 aa, Neisseria meningitidis; identical to SEQ ID NO: 1654

SEQ ID NO: 10106 - protein, 239 aa, Neisseria meningitidis; identical to SEQ ID NO: 7937

SEQ ID NO: 10107 - protein, 575 aa, Neisseria meningitidis; identical to SEQ ID NO: 9410

SEQ ID NO: 10108 - protein, 129 aa, Neisseria meningitidis; identical to SEQ ID NO: 9260

SEQ ID NO: 10109 - protein, 190 aa, Neisseria meningitidis
MKTFNANRTASTEDELWVVEHPPVFTQGLAGKPEHLLIRDDIPIVQIDRGGQITYHGPGQLVVYTMIDFKRRKTSVRNIVSALENSIIATLAEYGIEAAADPKRPGVYVGERKIASLGLRIKGGSVYHGLALNVNMDLSPFTHINPCGYAGMEMTQIADFVQPCPTPDEVAAKLTAHLETQFTPKADNNE

SEQ ID NO: 10110 - protein, 102 aa, Neisseria meningitidis; identical to SEQ ID NO: 427

SEQ ID NO: 10111 - protein, 406 aa, Neisseria meningitidis; identical to SEQ ID NO: 7984

SEQ ID NO: 10112 - protein, 368 aa, Neisseria meningitidis
MSLYPIYNFSAGPAVLPEAVLETARQEMLDYNGTGFPVMAMSHRSEMFLSILHHAEQDLRQLLKVPDNYKILFLQGGATTQFNMAAMNLAHGFRTADAVVTGNWSRIAYEQMSRLTDTEIRLAAHGGEQFDYLDLPPVETWDVAPDSAFVHFAVNETVNGLQYREVPRLSEGMPPLVCDMSSEILSREFDVADYGLIYAGAQKNIGPAGVTVVIVREDLLERCPNDIPDVFNYRSHINRDGMYNTPSTYAIYMSGLVFRWLQAQGGVKKIEAVNRLKAQTLYETIDGSGGFYINRIRPNARSKMNVVFQTRDEELDRRFVLEAELQGLCLLKGYKSVGGMRASIYNAMPLEGVRALADFMRDFQRRYG

SEQ ID NO: 10113 - protein, 375 aa, Neisseria meningitidis
MNTSQRNRLVSRWLNSYERYRHRRLIHAVRLGGAVLFATALARLLHLQHGEWIGMTVFVVLGMLQFQGAIYSKAVERMLGTVIGLGAGLGVLWLNQHYFHGNLLFYLTVGTASALAGWAAVGKNGYVPMLAGLTMCMLIGDNGSEWFDSGLMRAMNVLIGAAIAIAAAKLLPLKSTLMWRFMLADNLTDCSKMIAEISNGRRMTRERLEQNMVKMRQINARMVKSRSHLAATSGESRISPAMMEAMQHAHRKIVNTTELLLTTAAKLQSPKLNGSEIRLLDRHFTLLQTDLQQTVALINGRHARRIRIDTAINPELEALAEHLHYQWQGFLWLSTNMRQEISALVILLQRTRRKWLDAHERQHLRQSLLETREHG

SEQ ID NO: 10114 - protein, 122 aa, Neisseria meningitidis; identical to SEQ ID NO: 3754

SEQ ID NO: 10115 - protein, 363 aa, Neisseria meningitidis
MKKRKILPLAICLAALSACTAMEARPPRVNEAQAPRADEMKKESRPAFDAAAVPVSDSGFAANANVRRFVDDEVGKGDFSRAEWQDFFDKAAYKADIVKIMHRPSTSRPWYVFRTGNSGKAKFRGARRFYAENRALIDDVAQKYGVPAELIVAVIGIETNYGKNTGSFRVADALATLGFDYPRRAGFFQKELVELLKLAKEEGGDVFAFKGSYAGAMGMPQFMPSSYRKWAVDYDGDGHRDIWGNIGDVAASVANYMKQHGWRTGGKILVSATLAPGADVQAIIGEKTALTRTVADLKAYGIIPGEELADDEKAVLFKLETAPGVFEYYLGLNNFYTVWQYNHSRMYVTAVRDIANSLGGPGL

SEQ ID NO: 10116 - protein, 130 aa, Neisseria meningitidis; identical to SEQ ID NO: 1661

SEQ ID NO: 10117 - protein, 100 aa, Neisseria meningitidis
MGYRVGINCFDTRLQADDYLLSSLPPTVTQDGKIIRPERVGDKWILNGKPVTLSYPECSNFEQIKQGSYVGSTVLILFVVIFGFRLLINFLKDMGKVGTD

SEQ ID NO: 10118 - protein, 291 aa, Neisseria meningitidis; identical to SEQ ID NO: 8367

SEQ ID NO: 10119 - protein, 160 aa, Neisseria meningitidis; identical to SEQ ID NO: 3806

SEQ ID NO: 10120 - protein, 306 aa, Neisseria meningitidis; identical to SEQ ID NO: 1708

SEQ ID NO: 10121 - protein, 661 aa, Neisseria meningitidis; identical to SEQ ID NO: 1085

SEQ ID NO: 10122 - protein, 215 aa, Neisseria meningitidis; identical to SEQ ID NO: 1514

SEQ ID NO: 10123 - protein, 233 aa, Neisseria meningitidis; identical to SEQ ID NO: 6431

SEQ ID NO: 10124 - protein, 199 aa, Neisseria meningitidis; identical to SEQ ID NO: 2856

SEQ ID NO: 10125 - protein, 314 aa, Neisseria meningitidis; identical to SEQ ID NO: 3488

SEQ ID NO: 10126 - protein, 271 aa, Neisseria meningitidis; identical to SEQ ID NO: 3288

SEQ ID NO: 10127 - protein, 741 aa, Neisseria meningitidis; identical to SEQ ID NO: 8115

SEQ ID NO: 10128 - protein, 289 aa, Neisseria meningitidis
LPQPNPQDLRHSPFLHRRAGMTRIGDFAAKSMIEIRSKRMITLPSLNNLPSKWDEIRHCLETRVFECGVMPHPNLTECEAGQFDRDFWDNIGCAPEEYVRIRRAIRLLEVRYPDSLNELVCAAIATPLGEMLAVFGNKGLCLLEFVGQKHLEQEIAAVQKALRGRFVFREDERTQLLRQELDLYFKGRLKTFATPLEQIGTEFQKQAWDALLAIPYGETRSYKEQAQRLGNPKAVRAVAAANGQNKVSILIPCHRVIGSDGKLTGYAGGLNRKQFLLALERGEVQTALF

SEQ ID NO: 10129 - protein, 133 aa, Neisseria meningitidis; identical to SEQ ID NO: 2156

SEQ ID NO: 10130 - protein, 416 aa, Neisseria meningitidis; identical to SEQ ID NO: 8411

SEQ ID NO: 10131 - protein, 99 aa, Neisseria meningitidis
VDYPDFPQEIPTPNYTDWVKIKFKQFSYLKFIYGYATKNQDKNIKNVLELGELKQDDEILDYGGALEVIGSRYDLPTGFSIDIVCREIELEFLDQESFN

SEQ ID NO: 10132 - protein, 382 aa, Neisseria meningitidis
VHINFSMEYKEFNENYLYKKPFIFKNALDVSSISWKEINELYQRADPTDWQFKFRKGEIIPKEAYVESFNDVGKIRYRFNKTAVYQYLQDGATMVYNRIDNEPFVDSIAKQIAQFAQAQTVVSGYLAFGSSSSYRNHWDTRDVFAVQLIGTKHWTLSAANFDMPLYMQQAKDIPHITPPTTVDMEVILEAGDILYIPRGWWHNPMPMNCETFHLAIGTFPPNGYNYMEWLMKKIPDIQSIRQNFIGWQHDQKNLDDAAQAITEMMNNPKNYQTFMQDFLGSQRTNTAFNMDLFGNAHNQTLPEHCFLRLNSNDYSTISQGYLIANGIKLNIDEISMEFLMILIEKHIISLTEILSLFNANKQEIVKRLIWQLCLLDVIELVR

SEQ ID NO: 10133 - protein, 417 aa, Neisseria meningitidis; identical to SEQ ID NO: 9265

SEQ ID NO: 10134 - protein, 355 aa, Neisseria meningitidis
MRKILVTGGAGFIGSAVVRHIIRNTQDSVVNLDKLTYAGNLESLTDIADNPRYAFEQVDICDRAELDRVFAQHRPDAVMHLAAESHVDRSIGSAGEFIQTNIVGTFNLLEAARAYWQQMPSEQHEAFRFHHISTDEVYGDLGGTDDLFTETAPYAPSSPYSASKASSDHLVRAWLRTYGLPTIVTNCSNNYGPYHFPEKLIPLMILNALDGKPLPVYGDGMQIRDWLFVEDHARALYQVVTEGVVGETYNIGGHNEKANIEVVKTICALLEELAPEKPAGVARYEDLITFVQDRPGHDVRYAVDAAKIRRDLGWLPLETFESGLRKTVQWYLDNKTWWQNVLNGSYRLERLGTGK

SEQ ID NO: 10135 - protein, 468 aa, Neisseria meningitidis; identical to SEQ ID NO: 2817

SEQ ID NO: 10136 - protein, 355 aa, Neisseria meningitidis
MGGKTFMLMAGGTGGHIFPALAVADSLRARGHHVIWLGSKDSMEERIVPQYGIRLETLAIKGVRGNGIKRKLMLPVTLYQTVREAQRIIRKHRVECVIGFGGFVTFPGGLAAKLLGVPIVIHEQNAVAGLSNRHLSRWAKRVLYAFPKAFSHEGGLVGNPVRADISNLPVPAERFQGREGRLKILVVGGSLGADVLNKTVPQALALLPDDARPQMYHQSGRGKLGSLQADYDALGVKAECVEFITDMVSAYRDADLVICRAGALTIAELTAAGLGALLVPYPHAVDDHQTANARFMVQAEAGLLLPQTQLTAEKLAEILGSLNREKCLKWAENARTLALPHSADDVAEAAIACAA

SEQ ID NO: 10137 - protein, 348 aa, Neisseria meningitidis; identical to SEQ ID NO: 7414

SEQ ID NO: 10138 - protein, 210 aa, Neisseria meningitidis; identical to SEQ ID NO: 48

SEQ ID NO: 10139 - protein, 117 aa, Neisseria meningitidis
MKNCKFFYDPTRAIYDSGADYLTREKHRLVVIANSAWGLLLNLSCYYDEVLEKRKIPFGKQEIDDDMDKVSAHKRKFKDISEIKVGDGWEYPFNYEQGMKELDEVLLKYIPFFEEER

SEQ ID NO: 10140 - protein, 341 aa, Neisseria meningitidis
MKYKALSLLPLVAALAACAGGGVAEPHVPVSIPTATPLPTGEVKLSDDNSKIENINTADTGSTSGISIQQRKYEVESYGIKREEKAFIFQTPGGAQYALSSYADPITVSYSSPDFKIPDRHAGQRLADGSRIFICCSESGATSYAEITKQDYMKFGAWIGPNGEIDLFAGGFPVGKTPKPKYSWGNTEPETKGKGKITYQVWGIRVRNRQFVTSSYTPPKSGSYYGTLANTPVLSFITANFNSNKLAGEIRGNSDYGPSVKIENATINSLSFSGTATSGGKTGNLEGKFFGKFNGYRDTETSIGGKITFDGDRSLDTVFGGVSYKKELENNTDTSTTHLTK

SEQ ID NO: 10141 - protein, 193 aa, Neisseria meningitidis; identical to SEQ ID NO: 640

SEQ ID NO: 10142 - protein, 169 aa, Neisseria meningitidis; identical to SEQ ID NO: 2049

SEQ ID NO: 10143 - protein, 86 aa, Neisseria meningitidis; identical to SEQ ID NO: 1906

SEQ ID NO: 10144 - protein, 345 aa, Neisseria meningitidis
LKFRFTAWSIYMSIKVAINGFGRIGRLALRQIEKAHDIEVVAVNDLTPAEMLLHLFKYDSTQGRFQGTAELKDDAIVVNGKEIKVFANPNPEELPWGELGVDVVLECTGFFTNKTKAEAHIRAGARKVVISAPSGNDVKTVVYGVNQDILDGSETVISAASCTTNCLAPMAAVLQKEFGVVEGLMTTIHAYTGDQNTLDAPHRKGDLRRARAAALNIVPNSTGAAKAIGLVIPELNGKLDGSAQRVPVATGSLTELVSVLERPVTKEEINAAMKAAASESYGYNEDQIVSSDVVGIEYGSLFDATQTRVMTVGGKQLVKTVAWYDNEMSYTCQLVRTLEYFAGKI

SEQ ID NO: 10145 - protein, 242 aa, Neisseria meningitidis; identical to SEQ ID NO: 107

SEQ ID NO: 10146 - protein, 50 aa, Neisseria meningitidis
MDAKSLDGKIKMPLYFSDGISVNKKVGIGAQNSLRLAGIGMKSLRKNDYS

SEQ ID NO: 10147 - protein, 317 aa, Neisseria meningitidis; identical to SEQ ID NO: 4876

SEQ ID NO: 10148 - protein, 98 aa, Neisseria meningitidis; identical to SEQ ID NO: 3727

SEQ ID NO: 10149 - protein, 316 aa, Neisseria meningitidis
MESKMSIHTLKRLPSSLLLGLCLSLPSAHLFADNDILGQFLEQNMLTSSDPIEIFAESTIHPTNTQAITGGLILSSQSALVVNNKTGQILYQKNADRIMPIASISKLMSAMVVLDANLDMNETVTITPDEIDRLKGTGSRLAIGTALTRKELLHLSLMSSENRATHALGRTYPGGMGAFVAAMNRKAQSLGMYGSRFYEPTGLNFQNVSTAKDLSLMVNAAAQYPQIRTNSTSNYASVQTKNGQQNYKNSNALVREGMWNIELQKTGYIREAGRSMVVKANIQNQPVTIVLLNSPTSATRVNDARKIESWMLQQRS

SEQ ID NO: 10150 - protein, 433 aa, Neisseria meningitidis; identical to SEQ ID NO: 68

SEQ ID NO: 10151 - protein, 305 aa, Neisseria meningitidis; identical to SEQ ID NO: 1198

SEQ ID NO: 10152 - protein, 286 aa, Neisseria meningitidis; identical to SEQ ID NO: 5950

SEQ ID NO: 10153 - protein, 177 aa, Neisseria meningitidis; identical to SEQ ID NO: 3663

SEQ ID NO: 10154 - protein, 252 aa, Neisseria meningitidis
MNPKTPPDHTEDAVRLSKRMAQLGLCSRREADGYIEQGWVTVNGKTAVLGQKVSPADRIELNKKAHEQQAARITILLNKPVGYVSAQAEKGYKSAAELITPENRWEGDTGRIRFDPKHKIGLAPAGRLDIDSVGLLVLTQDGRIAKQLIGENSGSEKEYLVRVRGKLDEKGLALLNHGLSLDGEKLRPAQVEWQNEDQLRFVLKQGKKRQIRRMCELVGLRVVGLKRIRMGKVKLGRLPPGKWRYLAPGESF

SEQ ID NO: 10155 - protein, 177 aa, Neisseria meningitidis; identical to SEQ ID NO: 1613

SEQ ID NO: 10156 - protein, 271 aa, Neisseria meningitidis; identical to SEQ ID NO: 1333

SEQ ID NO: 10157 - protein, 154 aa, Neisseria meningitidis; identical to SEQ ID NO: 9555

SEQ ID NO: 10158 - protein, 171 aa, Neisseria meningitidis
VLNNEPGELTNVEQGESVCVPVDDISDWMFVCNGIPYGGFTIQAMRGQMTEEERTEHDAAWGIDFGDPGQVLLVYEEKEHPENLEEHPMCRNCIDDFRQQLSQNPDFLHEQDEDGYTPLHHEAIAGNALMVQAMLEYGANPASKTSEGYTALDFARLAGWQNVADLLEPRH

SEQ ID NO: 10159 - protein, 106 aa, Neisseria meningitidis; identical to SEQ ID NO: 3805

SEQ ID NO: 10160 - protein, 225 aa, Neisseria meningitidis
MQADFNRPVLAVDTGTSYLSLALRADGETRLFHQEVGSRQSALILPEIRTLFRNAGITAADLGAIVYAKGPGAFTGLRIGIGVAQGLATPFDTPLIGIPTLDAAASLPPPQSCILAAADARMGEVFYAWFDTLNRRRLSDYQVGRAADIRLPEGCAFSDGIGSAFALEETPPFSGKPDMPTAADFLNLAAEGGFPAVAAAHAELLYVRNKIALTAKEQAERRARL

SEQ ID NO: 10161 - protein, 69 aa, Neisseria meningitidis; identical to SEQ ID NO: 3638

SEQ ID NO: 10162 - protein, 333 aa, Neisseria meningitidis; identical to SEQ ID NO: 620

SEQ ID NO: 10163 - protein, 291 aa, Neisseria meningitidis; identical to SEQ ID NO: 2469

SEQ ID NO: 10164 - protein, 241 aa, Neisseria meningitidis; identical to SEQ ID NO: 3559

SEQ ID NO: 10165 - protein, 921 aa, Neisseria meningitidis; identical to SEQ ID NO: 9329

SEQ ID NO: 10166 - protein, 175 aa, Neisseria meningitidis
MYATIGDVMHALHFSASDKAALYREVLPQIESVVADETDWVANLANTAAVLKEAFGWFWVGFYLVDTRSDELVLAPFQGPLACTRIPFGRGVCGQAWAKGGTVVVGDVDAHPDHIACSSLSRSEIVVPLFSDGRCIGVLDADSEHLAQFDETDALYLGELAKILEKRFEASRQAV

SEQ ID NO: 10167 - protein, 95 aa, Neisseria meningitidis
MTYSFRVENINDISDIPENHLEIVRAALPSNRSNALSREPDGAQAVFVYEIDGEFRAKLFDRIKDTDSYLQATEDNYSNDPRSIGVVYVLEQQQG

SEQ ID NO: 10168 - protein, 100 aa, Neisseria meningitidis
VFNEPLNVFTNPADFGETVMIGGKEVNAIFDREFITDSGFGVAVANADPQIIVTEDDLPEDVKSVVVTVRGKRYAVAETDFDGCGMVVVQLRAIHDKPTY

SEQ ID NO: 10169 - protein, 160 aa, Neisseria meningitidis; identical to SEQ ID NO: 3906

SEQ ID NO: 10170 - protein, 335 aa, Neisseria meningitidis
MSTFFQQTAQAMIAKHINRFPLLKLDQVIDWQPIEQYLNRQKTRYLRDHRGRPAYPLLSMFKAVLLGQWHSLSDPELEHSLITRIDFNLFCRFDELSIPDYSTLCRYRNWLAQDNTLSELLELINRQLTEKGLKIEKASAAVVDATIIQTAGSKQRQTIEVDEEGQVSGQTTPSKDSDARWIKKNGLYKLGYKQHTRTDGEGYIEKLHITPANAHECKHLSPLLEGIAEGTTVYADKGYDSAENRQHLEEHQLLDGIMRKACRNRPLSEVQTKRNRYLSKTRYVVEQSFGTLHRKFRYARAAYFGLIKVSAQSHLKAMCLNLLKAANRLSAPAAA

SEQ ID NO: 10171 - protein, 435 aa, Neisseria meningitidis
VVFLKISEVLVKVGDGVHTLLLDRPIVRDGRKFDAPLLWMVVLMTAFSLLMIYSASVYLASKEGGDQFFYLTRQAGFVVAGLIASGLLWFLCRMRTWRRLVPWIFALSGLLLVVVLIAGREINGATRWIPLGPLNFQPTELFKLAVILYLASLFTRREEVLRSMESLGWQSIWRGTANLIMSATNPQARRETLEMYGRFRAIILPIMLVAFGLVLIMVQPDFGSFVVITVIAVGMLFLAGLPWKYFFVLVGSVLGGMVLMITAAPYRVQRVVAFLDPWKDPQGAGYQLTHSLMAIGRGEWFGMGLGASLSKRGFLPEAHTDFIFAIIAEEFGFFGMCVLIFCYGWLVVRAFSIGKQSRDLGLTFNAYIASGIGIWIGIQSFFNIGVNIGALPTKGLTLPLMSYGGSSVFFMLISMMLLLRIDYENRRKMRGYRVE

SEQ ID NO: 10172 - protein, 201 aa, Neisseria meningitidis; identical to SEQ ID NO: 3643

SEQ ID NO: 10173 - protein, 154 aa, Neisseria meningitidis; identical to SEQ ID NO: 4442

SEQ ID NO: 10174 - protein, 467 aa, Neisseria meningitidis; identical to SEQ ID NO: 3712

SEQ ID NO: 10175 - protein, 436 aa, Neisseria meningitidis; identical to SEQ ID NO: 9259

SEQ ID NO: 10176 - protein, 433 aa, Neisseria meningitidis; identical to SEQ ID NO: 8831

SEQ ID NO: 10177 - protein, 255 aa, Neisseria meningitidis; identical to SEQ ID NO: 3233

SEQ ID NO: 10178 - protein, 230 aa, Neisseria meningitidis; identical to SEQ ID NO: 675

SEQ ID NO: 10179 - protein, 185 aa, Neisseria meningitidis; identical to SEQ ID NO: 3675

SEQ ID NO: 10180 - protein, 114 aa, Neisseria meningitidis; identical to SEQ ID NO: 53

SEQ ID NO: 10181 - protein, 497 aa, Neisseria meningitidis
MLSGLPIPKDIARPPETILVNITPQETRVAVLEENNICELHIERNSEHSLVGNIYLGVVRRVLPGMQSAFIDIDLERAAFLHIVDVLEQRRNPEETQRIEHMLFEGQSVLVQVIKDPINTKGARLSTQISLAGRFLVHLPQEDHIGVSQRIEDDAERSSLRERLDKLLPENACRGYIIRTNAENATDEQLQSDIDYLTKVWEHIQEQAKIRPPETLLYQDLPLSLRVLRDMVGCDTQKILVDSTVNHGRMTRFAEQYVHGALGRIELFKGERPLFETHNVEQEISRALQPRVNLNFGSYLIIESTEAMTTIDVNTGGFVGARNFDETIFRTNLEACHTIARELRLRNLGGIIIIDFIDMAQESHREAVLQELAKALAFDRTRVTLHGFTSLGLVELTRKRSRENLNQVLCEPCPSCQGRGRLKTPQTVCYEIQREIVREARRYDAESFRILAAPNVIDLFLDEESQSLAMLIDFIGKPISLAVETAYTQEQYDIVLM

SEQ ID NO: 10182 - protein, 315 aa, Neisseria meningitidis; identical to SEQ ID NO: 4592

SEQ ID NO: 10183 - protein, 430 aa, Neisseria meningitidis
MQFSAFGEKFTQHSGILQLMDDLGDALKSDKPVNMLGGGNPARIPEIDRAFADIFSKLAAEHAVENIGNYSNPQGDAALIDALTAFLNREYGWNLTADNIALTNGSQNAFFYLFNLFGGKFNLSDGTSAEKAILLPLAPEYIGYADVHVEGQHFVSVKPKIENVEHEGEAGFFKYRVDFDALENLPELKAGKIGAICCSRPTNPTGNVLTDSEMARLDALAREHGIPLIIDNAYGMPFPNIIYSDVTLNWHENIILCFSLSKVGLPGVRTGIIVAAPEVVKAVSSLNAIVNLAPTRFGAAIAAPLLESGEMKRLADQVIRPFYRNQAQTAVSLLKRELGAYPMKIHKPEGAIFLWLWFENLPVSSQTLYEMLKAEGTLIIPGEHFFVGIDTRDYPHAGECIRMSIAQDAQTLEKGIAAIGKTVRKLYDNV

SEQ ID NO: 10184 - protein, 375 aa, Neisseria meningitidis; identical to SEQ ID NO: 9044

SEQ ID NO: 10185 - protein, 98 aa, Neisseria meningitidis; identical to SEQ ID NO: 2571

SEQ ID NO: 10186 - protein, 99 aa, Neisseria meningitidis
MLFMALTLADVDKIARLSRLHLTAAEKEKSLQELNDIFAMVEQMQTINTDGIEPMAHPHEAALRLREDEVTETDRAAEYQAVAPEVRNRLYIVPQVIEE

SEQ ID NO: 10187 - protein, 138 aa, Neisseria meningitidis; identical to SEQ ID NO: 489

SEQ ID NO: 10188 - protein, 76 aa, Neisseria meningitidis; identical to SEQ ID NO: 374

SEQ ID NO: 10189 - protein, 167 aa, Neisseria meningitidis
LAIAAVPLRAVLNNGNIGSRTMDVKYEFTLPSSSGADFHSAEHLPLVVYFYPKDSTPGCTTEGLDFNARLEQFEALGYTVVGISRDGVKAHQNFCAKQGFRFELLSDKDETVCRLFDVIKLKKLYGKESLGIERSTFVLNKDGEIAHEWRKVKVAGHAQEVLETLSR

SEQ ID NO: 10190 - protein, 437 aa, Neisseria meningitidis
MMNTPHPRPKIAVIGAGWAGLSAAVTLARHADVTLFEAGRQAGGRARALAGNTDGFGFLDNGQHILLGAYRGVLRLMKTIGSDPRAAFLRVPLHWHMHGGLQFRTLPLPAPLHILGGVLLARRVPSAFKAKLLADMSDLQKSARLGQPDTTVAQWLKQRNVPRAAVMQFWQPLVWGALNTPLETASLRVLCNVLSDGVLTKKSGSDYLLPKQDLGAIVAEPALAELQRLGADIRLETRVCRLNTLPDGKVLVNGEAFDAAVPATAPYHAAALLPEGTPEHVQTAYQNLRYHAITTVYLRYAEPVRLPAPLTGLADGTVQWLLCRGRLGLPENEVSAVISVSDRVGAFANRAWADKAHADLKRILPHLGEPEAVRVITEKRATTAADAPPPDLSWLHRHRIFPAGDYLHPDYPATLEAAVQSGFASAEACLQSLSDAV

SEQ ID NO: 10191 - protein, 160 aa, Neisseria meningitidis; identical to SEQ ID NO: 182

SEQ ID NO: 10192 - protein, 270 aa, Neisseria meningitidis; identical to SEQ ID NO: 2943

SEQ ID NO: 10193 - protein, 158 aa, Neisseria meningitidis; identical to SEQ ID NO: 5652

SEQ ID NO: 10194 - protein, 122 aa, Neisseria meningitidis
MANGLDNQAFEDQVFHTRADAPMQLAELSQKEMKETEGAALWFAPVLAGGGRFALTGFTRHGLNQAISRGGVGVSNKAIMNTMRNPTKITSQSGGRTRFTGADGGVVLNSQGKVITTWGKPR

SEQ ID NO: 10195 - protein, 240 aa, Neisseria meningitidis; identical to SEQ ID NO: 2593

SEQ ID NO: 10196 - protein, 349 aa, Neisseria meningitidis
LILMNTPIPFSERLIRWQKQHGRHHLPWQVKNPYCVWLSEIMLQQTQVATVLDYYPRFLEKFPTVQTLAAAPQDEVLSLWAGLGYYSRARNLHKAAQQVVRQFGGTFPSERKDLETLCGVGRSTAAAICAFSFNRRETILDGNVKRVLCRVFARDGNPQDKKFENSLWTLAESLLPSENADMPAYTQGLMDLGATVCKRTKPLCHQCPMADICEAKKQNRTAELPRKKTAAEVPTLPLYWLIIRNRNGAILLEKRPAKGIWGGLYCVPCFESLNGLSDFAAKFSLTMADMDEQTALTHRLTHRLLMITPFEGQMPSESPSDGIWIKPTHLKDYGLPKPLEIYLNGNRLE

SEQ ID NO: 10197 - protein, 330 aa, Neisseria meningitidis
VYACLPLKTNTQRIIMNILSKISSFIGKTFSLWAALFAAAAFFAPDTFKWAGPYIPWLLGIIMFGMGLTLKPSDFDILFKHPKAVIIGVIAQFAIIPATAWLLSKLLNLPAEIAVGVILVGCCPGGTASNVMTYLARGNVALSVAVTSVSTLISPLLTPAIFLMLAGEMLEIQAAGMLMSIVKMVLLPIVLGLIVHKVLGSKTEKLTDALPLVSVAAIVLIIGAVVGASKGKIMESGLLIFAVVALHNGIGYLLGFFAAKWTGLPYDAQKTLAIEVGMQNSGLAAALAAAHFAAAPVVAVPGALFSVWHNISGSLLATYWAAKAGKHKKP

SEQ ID NO: 10198 - protein, 265 aa, Neisseria meningitidis
MDTAQKQRWAITLSYDGSRFYGWQKQADGVPTVQAALETALAQIAGEAVSTTVAGRTDTGVHATAQVVHFDTTAARPQQAWVRGVNAHLPEGIAVLHARQVAPEFHARFDAYGRHYRYLLESVPVRSPLLKNRAGWTHLKLDIGPMRRAAALLIGEQDFSSFRAAECQAKSPVKTIYRADLTQSSGLVRLDLHGNAFLHHMVRNIMGALVYVGSGRLSVEGFAALIQERSRLKAPPTFMPDGLYLTGVDYPEAYGIIRPQIPEWL

SEQ ID NO: 10199 - protein, 337 aa, Neisseria meningitidis
LSDRRLCPNIPILETPMLRLTALAVCTALALGACSPQNSDSAPQATEQAVSAAQTESASLTVKTARGDVQIPQNPERIAVYDLGMLDTLSKLGVKTGLSVDKNRLPYLEEYFKTTKPAGTLFEPDYETLNAYKPQLIIIGSRAAKAFDKLNEIAPTIEMTADTANLKESAKERIDALAQIFGKQAEADKLKAEIDASFEAAKTAAQGKGKGLVILVNGGKMSAFGPSSRLGGWLHKDIGVPAVDESIKEGSHGQPISFEYLKEKNPDWLFVLDRSAAIGEEGQAAKDVLNNPLVAETTAWKKGQVVYLVPETYLAAGGAQELLNASKQVADAFNAAK

SEQ ID NO: 10200 - protein, 325 aa, Neisseria meningitidis; identical to SEQ ID NO: 8068

SEQ ID NO: 10201 - protein, 213 aa, Neisseria meningitidis
MKVISVLNQKGGSGKTTVATHLARALQLAGNSILLVDSDPQGSSRDWAAVHEEQPVPVIGIDSPTIDRDLKSVVKDFVIIDGAPQTADLAISAIKASDLVLIPVQPSPYDIWATADLVNLIKQRIKLIDGNLKAAFLINRTIKGTKIGGEIRAALEEYELPVLSTVIVQRIIYPTSAITGSTVLDKEPNGEAAKEIQSLANEIINLINIDNHI

SEQ ID NO: 10202 - protein, 503 aa, Neisseria meningitidis; identical to SEQ ID NO: 8681

SEQ ID NO: 10203 - protein, 453 aa, Neisseria meningitidis; identical to SEQ ID NO: 8793

SEQ ID NO: 10204 - protein, 227 aa, Neisseria meningitidis; identical to SEQ ID NO: 2422

SEQ ID NO: 10205 - protein, 81 aa, Neisseria meningitidis
LKDSTGQMRLATKDLAEAIKRGEVRSSAFTTKQLKAIEKGKDKIPSYTWHHHQDTGRMQLVPEWEHSKTGHIGGTAMGKGK

SEQ ID NO: 10206 - protein, 384 aa, Neisseria meningitidis; identical to SEQ ID NO: 9078

SEQ ID NO: 10207 - protein, 238 aa, Neisseria meningitidis; identical to SEQ ID NO: 8951

SEQ ID NO: 10208 - protein, 171 aa, Neisseria meningitidis; identical to SEQ ID NO: 2512

SEQ ID NO: 10209 - protein, 102 aa, Neisseria meningitidis; identical to SEQ ID NO: 1826

SEQ ID NO: 10210 - protein, 795 aa, Neisseria meningitidis; identical to SEQ ID NO: 9332

SEQ ID NO: 10211 - protein, 1325 aa, Neisseria meningitidis
LRAESMSVVLPLRGVTALSDFRVEKLLQKAAALGLPEVKLSSEFWYFAGSEKALDAATVEKLQALLAAQSVEQTPKAREGLHLFLVTPRLGTISPWASKATNIAENCGLAGIERIERGMAVWLEGALTDEQKQQWAALLHDRMTESVLPDFQTASKLFHHLESETFSTVDVLGGGKEALVKANTEMGLALSADEIDYLVENYQALQRNPSDVELMMFAQANSEHCRHKIFNADFILNGEKQPKSLFGMIRDTHNAHPEGTVVAYKDNSSVIEGAKIERFYPNAAENQGYRFHEEDTHIIMKVETHNHPTAIAPFAGAATGAGGEIRDEGATGKGSRPKAGLTGFTVSNLNIPGLKQPWEQDYGKPEHISSPLDIMIEGPIGGAAFNNEFGRPNLLGYFRTFEEKFDGQVRGYHKPIMIAGGLGSIQAQQTHKDEIPEGALLIQLGGPGMLIGLGGGAASSMDTGTNDASLDFNSVQRGNPEIERRAQEVIDRCWQLGDKNPIISIHDVGAGGLSNAFPELVNDAGRGAVFELREVPLEEHGLTPLQIWCNESQERYVLSILEKDLDTFRAICERERCPFAVVGTATDDGHLKVRDDLFANNPIDLPLNVLLGKPPKTTRTDKTVTPSKKPFHADDIDITEAAYRVLHLPAVAAKNFLITIGDRSVGGMTHRDQMVGKYQTPVADCAVTMMGFNTYRGEAMSMGEKPTVALFDAPASGRMCVGEAITNIAAVNIGDIGNIKLSANWMAACGNEGEDEKLYRTVEAVSKACQALDLSIPVGKDSLSMKTVWQDGEEKKSVVSPLSLIISAFAPVQDVRKTVTPELKNVEDSVLLFVDLGFGKARMGGSAFGQVYNNMSGDAPDLDDTGRLKAFYNVIQQLVAEDKLLAYHDRSDGGLFAVLVEMAFAGRCGLDIDLNLLLAQTFITNHTALSQSLRTEEVKALAEWQETIARTLFNEELGAVIQVRKQDVADIINLFYQQQLHHNVFEIGTLTDENTLIIRDGQTHLISDNLIKLQQTWQETSHQIQRLRDNPACADSEFALIGDNDRSALFANLKFDVNEDIAAPFINSGAKPKIAILREQGVNGQIEMAAAFTRAGFDAYDVHMSDLMAGRFRLADFKMLAACGGFSYGDVLGAGEGWAKSILFHPALRDQFAAFFADPDTLTLGVCNGCQMVSNLAEIIPGAEAWPKFKRNLSEQFEARLSMVHVPKSASLILNEMQGSSLPVVVSHGEGRADFALHGGNISADLGIALQYVDGQNQVTQTYPLNPNGSPQGIAGVTNADGRVTIMMPHPERVYRAAQMSWKPEDWTELSGWYRLFAGARKALG

SEQ ID NO: 10212 - protein, 242 aa, Neisseria meningitidis; identical to SEQ ID NO: 9240

SEQ ID NO: 10213 - protein, 334 aa, Neisseria meningitidis; identical to SEQ ID NO: 1997

SEQ ID NO: 10214 - protein, 144 aa, Neisseria meningitidis; identical to SEQ ID NO: 3841

SEQ ID NO: 10215 - protein, 215 aa, Neisseria meningitidis; identical to SEQ ID NO: 4487

SEQ ID NO: 10216 - protein, 930 aa, Neisseria meningitidis; identical to SEQ ID NO: 8416

SEQ ID NO: 10217 - protein, 312 aa, Neisseria meningitidis; identical to SEQ ID NO: 2391

SEQ ID NO: 10218 - protein, 156 aa, Neisseria meningitidis; identical to SEQ ID NO: 955

SEQ ID NO: 10219 - protein, 373 aa, Neisseria meningitidis
VGIVTPQKIPFEMPLVLENGKTLPRFDLMIETYGELNAEKNNAVLICHALSGNHHVAGRHSAEDKYTGWWDNMVGPGKPIDTERFFVVGLNNLGGCDGSSGPLSINPETGREYGADFPVVTVKDWVKSQAALADYLGIGQWAAVVGGSLGGMQALQWAISYPERVRHALVIASAPKLSTQNIAFNDVARQAILTDPDFNEGHYRSHNTVPARGLRIARMMGHITYLAEDGLGKKFGRDLRSNGYQYGYGVEFEVESYLRYQGDKFVGRFDANTYLLMTKALDYFDPAADFGNSLTRAVQDVQAKFFVASFSTDWRFAPERSHELVKALIAAQKSVQYIEVKSAHGHDAFLMEDEAYMRAVAAYMNNVYKECQQ

SEQ ID NO: 10220 - protein, 328 aa, Neisseria meningitidis; identical to SEQ ID NO: 991

SEQ ID NO: 10221 - protein, 531 aa, Neisseria meningitidis; identical to SEQ ID NO: 8669

SEQ ID NO: 10222 - protein, 170 aa, Neisseria meningitidis; identical to SEQ ID NO: 1571

SEQ ID NO: 10223 - protein, 308 aa, Neisseria meningitidis
MSEMKKTKVHLISGFLGTGKTTALKSLMAQKDPNEKWVIIVNEFGEIGIDGAVLSDNGIPVAEIAGGCLCCTAGPQMGVTVQKMLRDAKPDRLMIEASGLAHAASVIDELKVKPLDSLLEIGAVFTVVNPRQFINPDYAQQALYKDQIGICDVLVASKTDLCTPEQLAEFHDKAAKLFPPKAKVVEVQNAQLDIRWLDIPVIEKSRYRLKALPDNTMGFQSQGFTFPAGRDFDGEKLTNFFNDLPKMTEGLVRAKGVFQVLGTWVWLNWVDGQWGANQVSWRRDSRFELIAKSFDADLIEQKLKDALE

SEQ ID NO: 10224 - protein, 241 aa, Neisseria meningitidis; identical to SEQ ID NO: 9063

SEQ ID NO: 10225 - protein, 206 aa, Neisseria meningitidis; identical to SEQ ID NO: 8742

SEQ ID NO: 10226 - protein, 483 aa, Neisseria meningitidis
VNYFPIFANLAGRPVLVVGGGAVAARKISLLLKAGAEVRVAAKHLNAELSALAAENKILWLAEEFRAEHIRTVFLIIAASSDQALNRRVFHLAESCQKPVNVVDDRDHCSFIFPSVIDRNPVQIAVSSSGSAPVLARLLRERLEALLPPSLGDMAEISGRWRDAVKGKLKSVTERRRFWEKQFNGRFAALVKNRQNTLAERELAKQLEQNYQGGFVSLVGAGPGDAGLLTLKGLQEIQQADVVLYDALVSDGILSLVRRDAERIFVGKRARGGRTPQEDTNALMVRLAREGRRVVRLKGGDPFVFGRGGEELETLARHQIPFSVVPGITAAVGATAYAGIPLTHRDYAQSAVFVTGHRKADAPDIEWQTLARSRQTLVIYMGALKAALIAERLQQHGRSPDTPAAVISQGTLPAQKTATGTLANLSELAETAPNPALIVIGEVVGLHEKLAWFGENAKKESNPAEHAYFALDGLGTGQEQQAA

SEQ ID NO: 10227 - protein, 301 aa, Neisseria meningitidis; identical to SEQ ID NO: 2409

SEQ ID NO: 10228 - protein, 461 aa, Neisseria meningitidis
MSSGLVTAAYIVAAILFIFSLAGLSKQETAKQGCYSGIAGMAVALFVTVFSDNTHGLGWIIIAMLIGAAIGIYKAKKVEMTEMPELIALLHSFVGLAAVLVGFNSYIEPGNVSHDMHTIHLVEVYLGIFIGAVTFTGSLVAFGKLNGKISSSPLQLPAKHKLNALALAVSFVLLLVFVGINGSGFILLIMTLIALAFGWHLVASIGGADMPVVVSMLNSYSGWAAAAAGFMLSNDLLIVTGALVGSSGAILSYIMCKAMNRSFVSVIAGGFGSDSGTLSSGSQEIGEYREVKAADIAEMLKGANNVIITPGYGMAVAQAQYPVAEITELLRKNGTEVRFGIHPVAGRLPGHMNVLLAEAKVPYDIVLEMDEINDDFPETDVVLVIGANDTVNPAAQTDPNSPIAGMPVLEVWKAKEVVVFKRSMNTGYAGVQNPLFFNENSVMCFGDAKKTVDDILSELKK

SEQ ID NO: 10229 - protein, 318 aa, Neisseria meningitidis; identical to SEQ ID NO: 3073

SEQ ID NO: 10230 - protein, 725 aa, Neisseria meningitidis
MCKPNYGGIVLLPLLLASCIGGNFGVQPVVESTPTAYPVTFKSKDVPTPPPAKPSIEITPVNRPAVGAAMRLPRRNTAFHREDGTEIPNSKQAEEKLSFQEGDVLFLYGSKGNKLQQLKSEIHKRDSDVEIRTSEKENKKYDYKFVDAGYVYVKGKDEIKWTSDYKQFSNRLGYDGFVYYSGERPSQSLPSAGTVEYSGNWQYMTDAKRHRAGKAVGIDNLGYYTFYGNDVGATSYAAKDVDEREKHPAKYTVDFGNKTLTGELIKNQYVKPSEKQKPLTIYNITADLNGNRFTGSAKVNPDLAKSHANKEHLFFHADADQRLEGGFFGDKGEELAGRFISNDNSVFGVFAGKQNSPVPSGKHTKILDSLKISVDEASGENPRPFAISPMPDFGHPDKLLVEGHEIPLVSQEKTIELADGRKMTVSACCDFLTYVKLGRIKTERPAAKPKAQDEEDSDIDNGEESEDEIGDEEEGTEDAAAGDEGSEEDEATENEDGEEDEAEEPEEESSAEGNGSSNAILPVPEASKGRDIDLFLKGIRTAETNIPQTGEARYTGTWEARIGKPIQWDNHADKEAAKAVFTVDFGKKSISGTLTEKNGVEPAFRIENGVIEGNGFHATARTRDDGIDLSGQGSTKPQIFKANDLRVEGGFYGPKAEELGGIIFNNDGKSLGITEGTENKVEADVDVDVDVDVDADADVEQLKPEVKPQFGVVFGAKKDNKEVEK

SEQ ID NO: 10231 - protein, 680 aa, Neisseria meningitidis; identical to SEQ ID NO: 8404

SEQ ID NO: 10232 - protein, 124 aa, Neisseria meningitidis
TNKLIELFVAGVTARTTAELVGVNKSTAAYYFHRLRLLIYQNSPHLEMFDGEVEADESYFAERQNHINGIENFWNRAKRHLRKFDGIPKAHFELYLKGYERRFNNSEIKVQISILKQLVKSSLS

SEQ ID NO: 10233 - protein, 919 aa, Neisseria meningitidis; identical to SEQ ID NO: 8702

SEQ ID NO: 10234 - protein, 154 aa, Neisseria meningitidis; identical to SEQ ID NO: 2010

SEQ ID NO: 10235 - protein, 103 aa, Neisseria meningitidis; identical to SEQ ID NO: 2233

SEQ ID NO: 10236 - protein, 123 aa, Neisseria meningitidis
MMNPKTLSRLSLCAAVLALTACGGNGQKSLYYYGGYPDTVYEGLKNDDTSLGKQTEKMEKYFVEAGNKKMNAAPGAHAHLGLLLSRSGDKEGAFRQFEEEKRLFPESGVFMDFLMKTGKGGKR

SEQ ID NO: 10237 - protein, 241 aa, Neisseria meningitidis; identical to SEQ ID NO: 7122

SEQ ID NO: 10238 - protein, 347 aa, Neisseria meningitidis
MQITDLLAFGAKNKASDLHLSSGISPMIRVHGDMRRINLPEMSAEEVGNMVTSVMNDHQRKIYQQNLEVDFSFELPNVARFRVNAFNTGRGPAAVFRTIPSTVLSLEELKAPSIFQKIAESPRGMVLITGPTGSGKSTTLAAMINYINETQPAHILTIEDPIEFVHQSKKSLINQRELHQHTLSFANALRSALREDPDVILVGEMRDPETIGLALTAAETGHLVFGTLHTTGAAKTVDRIVDVFPAGEKEMVRSMLSESLTAVISQNLLKTHDGNGRVASHEILIANPAVRNLIRENKITQINSVLQTGQASGMQTMDQSLQSLVRQGLIAPEVARRRAQNSESMSF

SEQ ID NO: 10239 - protein, 274 aa, Neisseria meningitidis
MDGTQSKPKFFERLIARLAREPDSAEDVLNLLRQAHEQEVFDADTLLRLEKVLDFSDLEVRDAMITRSRMNVLKENDSIERITAYVIDTAHSRFPVIGEDKDEVLGILHAKDLLKYMFNPEQFHLKSILRPAVFVPEGKSLTALLKEFREQRNHMAIVIDEYGGTSGLVTFEDIIEQIVGEIEDEFDEDDSADNIHAVSSERWRIHAATEIEDINTFFGTEYSSEEADTIGGLVIQELGHLPVRGEKVLIGGLQFTVARADNRRLHTLMATRVK

SEQ ID NO: 10240 - protein, 190 aa, Neisseria meningitidis; identical to SEQ ID NO: 2428

SEQ ID NO: 10241 - protein, 1144 aa, Neisseria meningitidis
MTEPTYIPLRLHTEFSITDGMVRIKKLIAKAQEYGLPALGISDLMNEFGLVKFYKACRSAGIKPVGAADVWIGNPDAPDKPFRAMLIIRNDAGYLRLSELLTAAYVGKDRNVHHAELNPEWLENGDNSGLICLSGAHYGEVGVNLLNGNEDAARAAALKYAAWFPDAFYLELQRLPERPEWEACVSGSVKLAEELGLPVVATHPTQFMSRDDFNAHEARVCIAGGWVLTDKKRPRDFTPSQFFIPPETMAERFADLPEALENTVEIAKRCNLHITLGKNFLPLFPTPDGLSLDDYLIKLSNEGLQERMVQLYPDEAERAEKMPEYQERLDFELNIIIQMKFPGYFLIVQDFINWAKTHGCPVGPGRGSGAGSLVAYSLKITDLDPLKYALLFERFLNPERVSMPDFDVDFCQANRGRVIEYVREKYGAEAVSQIVTFGTMSSKAVIRDVGRVLELPFMLCDKLSKLIPLEANKPLGLDDAMKAEPQIQELIEAEEADELITLAKKLEDLTRGLGMHAGGVLIAPGKISDYSPVYQADESASPVSMYDKGDVEDVGLVKFDFLGLRNLTIIEMAQNNIKNTTGDIIDVGKIPLDDQVAYQIFRDANTTAVFQFESTGMKKMLKTAHTTKFEELIAFVSLYRPGPMDNIPDFVARMKGQEFQYIHPLLEGILAPTYGIMVYQEQVMQAAQIIGGYSLGGADLLRRAMGKKKPEEMVKHREIFAEGAAKQGISREKSDEIFNYMEKFAGYGFNKSHAAAYALISYQTAWLKAHYPAEFMAATMSSELDNTDQLKHFYDDCRANGIEFLPPDINESDYRFTPYPNMKIRYALGAIKGTGEAAVESITAARQSGGKFTGLLDFCERVGKEHMNRRTLEALIRGGAFDSIEPNRAMLLANIDLAMDNADQKAANANQGGLFDMMEDAIEPVRLIDAPMWSESEKLAEEKTVIGFYLSGHPFGPYAQEVRQIAPQKLSKLKPQDSVRLAGFVTAVRTMMGKRGKIAFVSLEDLSGQVEIMVGGQTLENCADCLKADQVLIIESKVSRDDYGGGDGLRILANQVMTLQTARERYARSLSLALAPHHDIGGLVQLLAAHQLPDTPRIPLQLSYANEKASGRLQVPPKWTVTPSSALFGELETLLGSRSVRVNW

SEQ ID NO: 10242 - protein, 154 aa, Neisseria meningitidis; identical to SEQ ID NO: 1733

SEQ ID NO: 10243 - protein, 427 aa, Neisseria meningitidis; identical to SEQ ID NO: 146

SEQ ID NO: 10244 - protein, 245 aa, Neisseria meningitidis; identical to SEQ ID NO: 4611

SEQ ID NO: 10245 - protein, 321 aa, Neisseria meningitidis; identical to SEQ ID NO: 4435

SEQ ID NO: 10246 - protein, 427 aa, Neisseria meningitidis; identical to SEQ ID NO: 9028

SEQ ID NO: 10247 - protein, 161 aa, Neisseria meningitidis; identical to SEQ ID NO: 5832

SEQ ID NO: 10248 - protein, 344 aa, Neisseria meningitidis
LEDEDFIRAASMLAEEVFGFCIYKESKGSGGRFYERCWLMGSEDVLYGRVHFGGQNNTILFELTGTGCGVAKEGWESRLFAFLTNAIRPKITRVDIAKDFFNGEYSPNQAREDRNKGMFTCHHVKPKGECLGSDWEEDDEAKMTKGKTYGIGSRESSKYVRVYEKGKQLGDKTSTWTRFEIEFKAKDIVIPFEVLQNPGEYFGGAYPICERFAQKATRIHAVKEDKVISADRYLEWVKKQFGRAANGLKFIFPELDKAKLFELIEPSHHKLPKSLAPEAYDCAFLKAQAIHEQPAFKPYNDPYYMYEYYENLEKQLEQQKHVNNEESYNNFIYDKFARLPISWA

SEQ ID NO: 10249 - protein, 78 aa, Neisseria meningitidis; identical to SEQ ID NO: 3902

SEQ ID NO: 10250 - protein, 141 aa, Neisseria meningitidis
LINMKTSTVVFGGFFMADNGERIQIPVLENPDIREINHFFSVSNFEKKTGVLVFRIIPEPEFGNTELTVYFEKGYYLPMIQTILEGGDIEVKNLKTENYSGNTMEIWGDSYPIEHISKNISTIQNIISEFMIQKQTPAPII

SEQ ID NO: 10251 - protein, 506 aa, Neisseria meningitidis; identical to SEQ ID NO: 2869

SEQ ID NO: 10252 - protein, 770 aa, Neisseria meningitidis
VLGHCFSFAVSSFRILLELSARLRNFDHTGVQTASRSLNCRLNIKAGITLMQQKIRFQIEGMTCQACASRIEKVLNKKDFVESAGVNFASEEAQVVFDDSKTSVADIAKIIEKTGYGAKEKTEDTLPQAEAEHHIGWRLWLLSAINIPFLVGMAGMMIGRHDWMIPPLWQFALASIVQLWLAIPFYKSAWASIKGGLANMDVLVTIGTVSIYLYSVYMLFFSPHAAHGMAHVYFEAGVMVIGFVSLGKFLEHRTKKSSLNSLGLLLKLTPTQVNVQRDGEWKQLPIDQVQIGDLIRANHGERIAADGVIESGSGWADESHLTGESNPEEKKAGGKVLAGALMTEGSVVYRAAQLGSQTLLGDMMNALSEAQGSKAPIARVADKAAAVFVPAVVGIALLTFIVTWLIKGDWTVALMHAVAVLVIACPCALGLATPAAIMVGMGKAVKHGIWFKDAAAMEEAAHVDAVVLDKTGTLTEGRPQVAAVYCVPDSGFDKDDLYRIAAAVEQNAAHPLARAIVSATQARGLEIPAAQNAQTVVGAGIAAEVEGAGLVKAGKAEFAELTLPEFSDGVWDIASIVAVSVDNKPIGAFALADALKADTAEAIGRLKKHNIDVYIMSGDNQGTVEYVAQQLGIAHAFGNMSPRDKAAEVQKLKAAGKTVAMVGDGINDAPALAAANVSFAMKGGADVAEHTASATLMQHSVNQLADALLVSQATLKNIKQNLFFAFFYNILGIPLAALGFLNPVIAGAAMAASSVSVLSNALRLKRVKID

SEQ ID NO: 10253 - protein, 363 aa, Neisseria meningitidis; identical to SEQ ID NO: 8784

SEQ ID NO: 10254 - protein, 659 aa, Neisseria meningitidis
MPKILQQTTLHRFFRANTHHPISPSVLQQAGDLIRWLCFSDGISDFRPCRLKPQNPIGGIIMNTVSNYLSALREAMKAQGLDALVIPSADPHLSEYLPAHWQARRELSGFTGSVGTFVVTADEAGVWVDSRYWEQAAKQLAGSGIELQKSGQVPPYNEWLAANLPENAAVGIPSDMVSLTGKRTLAQSLTAKNIRIEHPNDLLDQVWTSRPAIPAETVFIHDPAYVSETAAEKLARVRAVMAEKGADYHLVSSLDDIAWLTNLRGSDVPFNPVFVSFLLIGKDNAVLFTDRCRLNAEAAAALQTAGITVEPYAQVADKLAQIGGALLIEPNKTAVSTLVRLPESVRLIEGINPSTLFKSCKSEADIARIREAMEHDGAALCGFFAEFEDIIGNGGSLTEIDVDTMLYRHRSVRPGFISLSFDTIAGFNANGALPHYSATPESHSTISGNGLLLIDSGAQYKGGTTDITRVVPVGTPTAEQKRDNTLVLKAHIALAEAVFPENIPSPLIDAICRKPLWQAQCDYGHGTGHGVGYFLNVHEGPQRIAFAAPATPETAMKKGMVTSIEPGLYRPGKWGIRIENLAANQAVAAPQETEFGSFLCFETLTLCPIDTRLMDTALMTDGEIDWVNRYHAEVRRRLEPLTEGAAKAWLIKRTEPLAR

SEQ ID NO: 10255 - protein, 377 aa, Neisseria meningitidis
VDWHERFPELEAQLGAPIENYAPPKHWTRKQLRSMGRVSYLCVDAAEQALTDAGLLGDESITDGRMGVACGSSSGSTKDIGDVGELLLTGMSRNFSANTYVRMMPHTAAANIGIFFGLKGRIIPTSSACSSGSQGIGYAYEAIKYGLTDMMLAGGGEEFFPSEVYVFDSLYAASRRNGEPEKTPRPYDANRDGLVIGEGAGIFVLEELEHAKRRGAKIYAELVGYGANSDAYHISTPRPDAGAILAFQTALQHAGLAPEDIGWINLHGTGTHHNDNMESRAVAAVFGNNTPCTSTKPQTGHTLGAADAIEAAFAWGIANRQSNPEGKLPPRLWDGQNDPNLPAINLTGSGSRWETEKRIAASSSFAFGGSNCVLIIG

SEQ ID NO: 10256 - protein, 705 aa, Neisseria meningitidis
MRRFLPIAAICAVVLLYGLTAATGSTSSLADYFWWIVAFSAMLLLVLSAVLARYVILLLKDRRDGVFGSQIAKRLSGMFTLVAVLPGVFLFGVSAQFINGTINSWFGNDTHEALERSLNLSKSALNLAADNALGNAIPVQIDLISTASLSGNMGRVLEHYANGFTQLSLYNAASGKIEKSINPHKLDQPFPDKARWEKIQQAGSVRDLESIGGVLYAQGWLSAGTHNGRDYALFFRQPVPKGVAEDAVLIEKARAKYAELSYSKKGLQTFFLATLLIASLLSIFLALVMALYFARRFVEPVLSLAEGAKAVAQGDFSQTRPVLRNDEFGRLTKLFNHMTEQLSIAKEADERNRQREEAARHYLECVLEGLTTGVVVFDEQGCLKTFNKAAEQILGMPLTPLWGSSRHGWHGVSAQQSLLAEVFAAIGAAAGTDKPVHVKYAAPDDAKILLGKATVLPEDNGNGVVMVIDDITVLIHAQKEAAWGEVAKRLAHEIRNPLTPIQLSAERLAWKLGGKLDEQDAQILTRSTDTIVKQVAALKEMVEAFRNYARSPSLKLENQDLNALIGDVLALYEAGPCRFAAELAGEPLMVAADTTAMRQVLHNIFKNAAEAAEEADVPEVRVKSEAGQDGRIVLTVCDNGKGFGKEMLHNAFEPYVTDKPAGTGLGLPVVKKIIEEHGGRISLSNQDAGGACVRIILPKTVKTYA

SEQ ID NO: 10257 - protein, 750 aa, Neisseria meningitidis; identical to SEQ ID NO: 3733

SEQ ID NO: 10258 - protein, 117 aa, Neisseria meningitidis; identical to SEQ ID NO: 9330

SEQ ID NO: 10259 - protein, 335 aa, Neisseria meningitidis
MSTFFQQTAQAMIAKHIDRFPLLKLDQVIDWQPIEQYLNRQKTRYLRDHRGRPAYPLLSMFKAVLLGQWHSLSDPELEHSLITRIDFNLFCRFDELSIPDYSTLCRYRNRLAQDDTLSELLELINRQLTEKGLKVEKASAAVVDATIIQTAGSKQRQAIEVDEEGQVGGQTTPSKDSDARWIKKNGLYKLGYKQHTRTDAEGYIEKLHITPANAHECKHLPPLLEGVPRGTTVYADKGYDSAENRQHLEEHQLQDGIMRKACRNRPLSETQTKRNRYLSKTHYVVEQSFGTLHRKFRYARAAYFGLIKVSAQSHLKAMCLNLLKAANRLSAPAAA

SEQ ID NO: 10260 - protein, 315 aa, Neisseria meningitidis; identical to SEQ ID NO: 5319

SEQ ID NO: 10261 - protein, 92 aa, Neisseria meningitidis; identical to SEQ ID NO: 2722

SEQ ID NO: 10262 - protein, 390 aa, Neisseria meningitidis
MNITIVAPYCSLPSEPHFNRFWYLAELLSQSHDVLLITSNFKHYDKSFRRPEDAEAASQGRLKVMLLEESGYSKNVSLGRVTSHHRFVKHFEKWLENCRPGEQDVVFSAYPLIATNLLLGKHKARLGYKLIVDVQDVWPESFSSVVPFLKKVPHNLLPFASRANRAYRYADALVAVSQTYLDRAKETNPNVPGEVIYIGADFPKLDAAPAKDFGDDKTRFFYLGTLSYSYDVETVCKGVRKLLDDGENVELHIMGGGPDLDRLKQYACDGIKFYGYIPYAEMMSVAKGCDISVNAIHSHAMQSVTNKLSDYMALQKPILNSQVNDEVAEVLTLLPHADYRSGDVDGFVQADKDILKRKNDPVQSEEIVRRFKRDVAYQKIVNLIERLAHE

SEQ ID NO: 10263 - protein, 154 aa, Neisseria meningitidis
LKAGSRLLSESGKTQTVRNIVVKPKPLKAYNLTVADWHTYFVKGDKAETEGVWVHNDCPYGNLSDNKSVGEGKKFTPAQKKAIIQENMNRNGGVVKSDQSGEVLVRPKKSQKGITPPSNEWQIDHVQAKSKGGSNSYKNAQVLSRRENIKKSNK

SEQ ID NO: 10264 - protein, 123 aa, Neisseria meningitidis; identical to SEQ ID NO: 130

SEQ ID NO: 10265 - protein, 197 aa, Neisseria meningitidis
MAKKPNKPFRLTPKLLIRAVLLICITAIGALAIGIVSTFNPNGDKTLQAEPQHTDSPRETEFWLPNGVVGQDAAQPEHHHAASSEPAQPDGTDESGSGLPSPAAPKKNRVKPQPADTAQTDRQPDDAGTQAENTLKETPVLPTNVPRPEPRKETPEKQAQPKETPKEKETPKENHTKPDTPKNTPPKPHKEILDNLF

SEQ ID NO: 10266 - protein, 56 aa, Neisseria meningitidis; identical to SEQ ID NO: 1209

SEQ ID NO: 10267 - protein, 131 aa, Neisseria meningitidis; identical to SEQ ID NO: 1281

SEQ ID NO: 10268 - protein, 377 aa, Neisseria meningitidis; identical to SEQ ID NO: 2272

SEQ ID NO: 10269 - protein, 67 aa, Neisseria meningitidis
MDTTLKNKAEAILGEPLLDEPIRPESWECCGSDCGEACIQTIYWADKARYDAQRRKLKEAGWSDDAV

SEQ ID NO: 10270 - protein, 286 aa, Neisseria meningitidis; identical to SEQ ID NO: 4385

SEQ ID NO: 10271 - protein, 159 aa, Neisseria meningitidis; identical to SEQ ID NO: 929

SEQ ID NO: 10272 - protein, 64 aa, Neisseria meningitidis; identical to SEQ ID NO: 7996

SEQ ID NO: 10273 - protein, 481 aa, Neisseria meningitidis; identical to SEQ ID NO: 8364

SEQ ID NO: 10274 - protein, 273 aa, Neisseria meningitidis; identical to SEQ ID NO: 8820

SEQ ID NO: 10275 - protein, 128 aa, Neisseria meningitidis; identical to SEQ ID NO: 1074

SEQ ID NO: 10276 - protein, 100 aa, Neisseria meningitidis
MDFFLPNTMHTELNNGTLHISGDITVKTLTGEAFERFQQQCRLKETIAVDFGGVKRADSACVSLLLEVLRGCKGSVRLTGIPESVRALSELYEIKDWLKS

SEQ ID NO: 10277 - protein, 499 aa, Neisseria meningitidis
VFKKYQYLALAALCAASLAGCDKAGSFFGADKKEASFVERIEHTKDDGSVSMLLPDFVQLVQSEGPAVVNIQAAPAPRTQNGSSNAETDSDPLADSDPFYEFFKRLVPNMPEIPQEEADDGGLNFGSGFIISKDGYILTNTHVVTGMGSIKVLLNDKREYTAKLIGSDVQSDVALLKIDATEELPVVKIGNPKDLKPGEWVAAIGAPFGFDNSVTAGIVSAKGRSLPNESYTPFIQTDVAINPGNSGGPLFNLKGQVVGINSQIYSRSGGFMGISFAIPIDVAMNVAEQLKNTGKVQRGQLGVIIQEVSYGLAQSFGLDKAGGALIAKILPGSPAERAGLQAGDIVLSLDGGEIRSSGDLPVMVGAITPGKEVSLGVWRKGEEITIKVKLGNAAEHIGASSKTDEAPYTEQQSGTFSVESAGITLQTHTDSSGGHLVVVRVSDAAERAGLRRGDEILAVGQVPVNDEAGFRKAMDKAGKNVPLLIMRRGNTLFIALNLQ

SEQ ID NO: 10278 - protein, 655 aa, Neisseria meningitidis
VGNTFKSILVWVALGIGLMAAFNALDGKKEDNGQIEYSQFIQQVNNGEVSGVNIEGSVVSGYLIKGERTDKSTFFTNAPLDDNLIKTLLDKNVRVKVTPEEKPSALAALFYSLLPVLLLIGAWFCFMRMQTGGGGKGGAFSFGKSRARLLDKDANKVTFADVAGCDEAKEEVQEIVDYLKAPNRYQSLGGRVPRGILLAGSPGTGKTLLAKAIAGEAGVPFFSISGSDFVEMFVGVGASRVRDMFEQAKKNAPCIIFIDEIDAVGRQRGAGLGGGNDEREQTLNQLLVEMDGFESNQTVIVIAATNRPDVLDPALQRPGRFDRQVVVPLPDIRGREQILNVHSKKVPLDESVDLLSLARGTPGFSGADLANLVNEAALFAGRRNKVKVDQSDFEDAKDKIYMGPERRSMVMHEDEKRATAYHESGHAIVAESLPFTDPVHKVTIMPRGRALGLTWQLPERDRISMYKDQMLSQLSILFGGRIAEDIFVGRISTGASNDFERATQMAREMVTRYGMSDKMGVMVYAENEGEVFLGRSVTRSQNISEKTQQDIDAEIRRILDEQYQIAYKILDENRDKMETMCKALMEWETIDRDQVLEIMAGKQPSPPKDYSHNLRENADAAEDNAPHAPTREETEAPAPADTASTESEQQPENKA

SEQ ID NO: 10279 - protein, 251 aa, Neisseria meningitidis; identical to SEQ ID NO: 2955

SEQ ID NO: 10280 - protein, 181 aa, Neisseria meningitidis
MIIVEHLEHYLGEIESGIKCLDRRYHLSVSVFPSQPYKGVTTFSTLGLNRYDLNYKSRFELIFTCSEEWNKENIAAFLSGVAEYLIDNRQPILRGEIIQLPRVIIEGSKMDALYVSAPFYFDDDFQVCYGEHYNIVFPLLVPLYKQEAELVEKKGWNAFEQFLLDNEVDNLSDMNRKPFAW

SEQ ID NO: 10281 - protein, 322 aa, Neisseria meningitidis
LVKNTDFSRMSATEIKKSKAKITAYSKLVAGTASAVVGGDVNTAANAAQIAVENNTLYPRCVGAKCDEFQKEQQKWIRENPEEYREVLLLQTGFIPIIGDIQSFVQAQTAADHLFALLGVVPGIGESIQAYKVAKAAKNLQGMKKALDKAATVATAQGYVSKTKIKIGQIELRVTAATDKQLLKAIGEGRDTTGKMTEQLFDSLAKQNGFRVLSGGKYGGNNGFDHVWQAADGSVVLIVESKQIRNGTVQLNPNGAGGYTQMSREWIKQVVKSLPDGSPAKAVVLKANQNGKLKTAIAGVDRQTGKAVILSVKVPSKTNIRR

SEQ ID NO: 10282 - protein, 77 aa, Neisseria meningitidis
MSMEIKFNTLGVILNGVNPEEKFIKIIDDQENTGGFLILLSSNDKFSSFDSYDDWVENLEILKEYLQESHWIIKWVG

SEQ ID NO: 10283 - protein, 685 aa, Neisseria meningitidis
MTRKILVTSALPYANGSIHLGHMVEHIQTDVWVRFQKLRGNECYYCCADDTHGTPVMLAAQKQGIAPEDMIAKVREEHLADFTGFNIGYDNYYSTHSPENKQFSQDIYRALKANDKIESRVIEQLFDPEKQMFLPDRFVKGECPKCHAQDQYGDNCEVCGTTYSPTELINPYSAVSGAKPELRESEHFFFKLGECADFLKAWTSGNNPHDGKPHLQPEALNKMKEWLGEGEETTLSDWDISRDAPYFGFEIPDAPGKYFYVWLDAPVGYMASFKNLCDRIGIDFDEYFKAGSQTEMYHFIGKDILYFHALFWPAMLHFSGHRAPTGVYAHGFLTVDGQKMSKSRGTFITAKSYLEQGLNPEWMRYYIAAKLNSKIEDIDLNLQDFISRVNSDLVGKYVNIAARASGFIAKRFEGKLKDVSDSALLAKLTAQSEAIAECYENREYARALRDIMALADIVNEYVDANKPWELAKQEGQDERLHEVCSELINAFTMLTAYLAPVLPQTATNAARFLNLDAITWTNTRVTLGKHAINKYKHLMQRVEQKQVDDLIEANKQSIAAAAAPAAEESKYEKVAEQASFDDFMKIDMRVAKVLNCEAVEGSTKLLKFDLDFGFEKRIIFSGIAASYPNPAELNGRMVIAVANFAPRKMAKFGVSEGMILSAATAEGKLKLLDVDAGAQPGDKVG

SEQ ID NO: 10284 - protein, 188 aa, Neisseria meningitidis; identical to SEQ ID NO: 477

SEQ ID NO: 10285 - protein, 116 aa, Neisseria meningitidis; identical to SEQ ID NO: 840

SEQ ID NO: 10286 - protein, 251 aa, Neisseria meningitidis
VLACIIRHSIRNSQQVSNMSLKTVAVIGAMEQEIELLREMMENVKAVSFGKFTAYEGELAGKRMVLALSGIGKVNAAVATAWIIREFAADCVINTGSAGGLGKGLKVGDVVIGTETAHHDVDVTAFGYVWGQVPQLPAVFVSDDLLVGKAKRAARTFEGAAVEQGLIVSGDRFVHSSEGVAEIRKHFPEVKAVEMEAAAIAQTCHQLETPFVIIRAVSDSADEKADISFDEFLKTAAASSAKMVAEIVKSL

SEQ ID NO: 10287 - protein, 558 aa, Neisseria meningitidis; identical to SEQ ID NO: 2720

SEQ ID NO: 10288 - protein, 176 aa, Neisseria meningitidis; identical to SEQ ID NO: 3131

SEQ ID NO: 10289 - protein, 112 aa, Neisseria meningitidis; identical to SEQ ID NO: 3481

SEQ ID NO: 10290 - protein, 377 aa, Neisseria meningitidis
MSTPALLVLADGSVFHGTSIGYEGSTSGEVVFNTSMTGYQEILTDPSYCKQIVTLTYPHIGNTGTNAEDEESRSVYAAGLIIRDLPLLHSNFRASESLHDYLVRNKTVAIADIDTRRLTTLLREKGAQGGAILTGADATVEKAQELIAAFGSMVGKDLAKEVSCTETYEWTEGEWELGKGFVTPDEQPYHVVAYDFGVKTNILRMLASRGCRLTVVPAQTSAQDVLALNPDGVFLSNGPGDPEPCTYAIEAVQKLMESGKPIFGICLGHQLISLAIGAKTLKMRFSHHGANHPVQDLDSGKVVITSQNHGFAVDADTLPANARITHKSLFDNTLQGIELTDKPVFCFQGHPEASPGPQDVGYLFDKFIGNMKAAKRA

SEQ ID NO: 10291 - protein, 165 aa, Neisseria meningitidis; identical to SEQ ID NO: 8999

SEQ ID NO: 10292 - protein, 462 aa, Neisseria meningitidis
MNTRTEHDTMGNVEVPSEAYWGAQTQRSRNNFKIGGETLPQPLIYALALVKKAAAATNVSLGRIKPEQADLITQAADDVLNGRLDGQFPLVVWQTGSGTQSNMNMNEVLANRANEIAGTGLAAYQPVHPNDHVNHAQSTNDAFPTAIHVAAAIEINRHLIPAVKALRDTLDKKAQAFAPIVKIGRTHLQDATPLTLGQEFSGYVSQLDHGLGRLNDALKDLYELALGGTAVGTGLNSHPEYAEKAAAKLAELSGLPFVSAPNKFEALGGRDAAVAASGALKTLAASLNKIANDIRWLASGPRCGLGEIKIPENEPGSSIMPGKVNPTQCEAMTMVCCQVFGNDVTIGMAGASGNFELNVYMPVIAYNLLQSIRLLGDACNSFNEHCAVGIEPVPEKIDYFLHHSLMLVTALNRKIGYENAAKVAKTAYKNNKSLRETAVELGLLTGEEFDELVVPADMVHPR

SEQ ID NO: 10293 - protein, 589 aa, Neisseria meningitidis; identical to SEQ ID NO: 9527

SEQ ID NO: 10294 - protein, 417 aa, Neisseria meningitidis; identical to SEQ ID NO: 2411

SEQ ID NO: 10295 - protein, 223 aa, Neisseria meningitidis
MTFSAILFYILAAIVLYGALRTVTAKNPVHAALHLVLTFCVSAMLWMLMQAEFLGVTLVVVYVGAVMVLFLFVVMMLNIDIEEMRAGFWRHAPVAGVVGTLLAVALILILVNPKTDLAAFGLMKDIPADYNNIRDLGSRIYTDYLLPFELAAVLLLLGMVAAIALVHRKTVNPKRMEPADQVKVRADQGRMRLVKMEAVKPQTESAEESEVSDDLKPKEEGKA

SEQ ID NO: 10296 - protein, 444 aa, Neisseria meningitidis; identical to SEQ ID NO: 1303

SEQ ID NO: 10297 - protein, 413 aa, Neisseria meningitidis
MIIDVKVPMLSESVSEGTLLEWKKKVGEAVARDEILIDIETDKVVLEVPSPQAGVLVEIVAQDGETVVADQVLARIDTAATAAAEAPAAATAAAEAPAAATAAAEAPAAAPAEAAPAAAPAAAQNNAAMPAAAKLAAESGVDVNALQGSGRDGRVLKEDVQNAAAKPAAAAAPAVALPAGARPEERVPMSRLRARVAERLLASQQENAILTTFNEVNMKPIMDLRAKYKEKFEKEHGVKLGFMSFFVKAAVAALKKYPVVNASVDGKDIVYHGYFDIGIAIGSPRGLVVPILRDADQMSIADIEQAIVDYAKKAKDGKIAIEDLTGGTFSITNGGTFGSMMSTPIINPPQSAILGMHATKERAVVENGQVVVRPMMYLALSYDHRIIDGREAVLTLVAIKDALEDPARLLLDL

SEQ ID NO: 10298 - protein, 116 aa, Neisseria meningitidis; identical to SEQ ID NO: 3501

SEQ ID NO: 10299 - protein, 119 aa, Neisseria meningitidis; identical to SEQ ID NO: 2176

SEQ ID NO: 10300 - protein, 220 aa, Neisseria meningitidis; identical to SEQ ID NO: 2583

SEQ ID NO: 10301 - protein, 451 aa, Neisseria meningitidis; identical to SEQ ID NO: 2767

SEQ ID NO: 10302 - protein, 272 aa, Neisseria meningitidis
MNPAPKNLLFSSLLFSSLLFSSLLFSSAAQAASEDSSRSPYYVQADLAYAAERITHDYPKPTGTDKDKISTVSDYFRNIRAHSIHPRVSVGYDFGGWRIAADYASYRKWNNNKYSVNIKKGRETQDNREELKTENQENGSFHAASSLGLSAIYDFKLNDKFDKFKPYIGARVAYGHVKHQVHSVETKTTIVTSKPTATSPQGGPIIQTDPSKPPYHESHSISSLGLGVIAGVGFDITPKLTLDTGYRYHNWGRLENTRFKTHEVSLGMRYHF

SEQ ID NO: 10303 - protein, 45 aa, Neisseria meningitidis; identical to SEQ ID NO: 645

SEQ ID NO: 10304 - protein, 371 aa, Neisseria meningitidis; identical to SEQ ID NO: 2339

SEQ ID NO: 10305 - protein, 218 aa, Neisseria meningitidis; identical to SEQ ID NO: 8119

SEQ ID NO: 10306 - protein, 214 aa, Neisseria meningitidis; identical to SEQ ID NO: 1408

SEQ ID NO: 10307 - protein, 222 aa, Neisseria meningitidis; identical to SEQ ID NO: 197

SEQ ID NO: 10308 - protein, 74 aa, Neisseria meningitidis; identical to SEQ ID NO: 5759

SEQ ID NO: 10309 - protein, 231 aa, Neisseria meningitidis; identical to SEQ ID NO: 1993

SEQ ID NO: 10310 - protein, 151 aa, Neisseria meningitidis; identical to SEQ ID NO: 3388

SEQ ID NO: 10311 - protein, 84 aa, Neisseria meningitidis; identical to SEQ ID NO: 3897

SEQ ID NO: 10312 - protein, 604 aa, Neisseria meningitidis; identical to SEQ ID NO: 8373

SEQ ID NO: 10313 - protein, 320 aa, Neisseria meningitidis; identical to SEQ ID NO: 913

SEQ ID NO: 10314 - protein, 234 aa, Neisseria meningitidis; identical to SEQ ID NO: 5705

SEQ ID NO: 10315 - protein, 172 aa, Neisseria meningitidis; identical to SEQ ID NO: 2773

SEQ ID NO: 10316 - protein, 309 aa, Neisseria meningitidis; identical to SEQ ID NO: 9408

SEQ ID NO: 10317 - protein, 125 aa, Neisseria meningitidis
VLKTKFQRVYSGRGFAPAQSQLPCVVVYVDRRRTEQETFDFPPTYRHTVRLVTLVCVQAASGADELAEEMLSLIGQLFAEHSDLGVGDLENLVPDLLNIDSDESGEAVTVYYQQGWQAIYFDTAV

SEQ ID NO: 10318 - protein, 87 aa, Neisseria meningitidis; identical to SEQ ID NO: 205

SEQ ID NO: 10319 - protein, 248 aa, Neisseria meningitidis
LEDKMLFRKTTAAVLAATLMLNGCTLMLWGMNNPVSETITRKHVDKDQIRAFGVVAEDNAQLEKGSLVMMGGKYWFVVNPEDSAKLTGILKAGLDKPFQIVEDTPSYARHQALPVKLESPGSQNFSTDGLCLRYDTDRPDDIAKLKQLEFEAVELDKQTIYTRCVSAKGKYYATPQKLNADYHFEQSVPADIYYTVTEKHTDKSKLFANILYTPPLFDTGCGGRGTGFACGGSGCGRGCRPQMNSNAV

SEQ ID NO: 10320 - protein, 416 aa, Neisseria meningitidis; identical to SEQ ID NO: 5338

SEQ ID NO: 10321 - protein, 149 aa, Neisseria meningitidis; identical to SEQ ID NO: 5614

SEQ ID NO: 10322 - protein, 392 aa, Neisseria meningitidis; identical to SEQ ID NO: 8593

SEQ ID NO: 10323 - protein, 492 aa, Neisseria meningitidis; identical to SEQ ID NO: 1749

SEQ ID NO: 10324 - protein, 160 aa, Neisseria meningitidis; identical to SEQ ID NO: 2526

SEQ ID NO: 10325 - protein, 345 aa, Neisseria meningitidis; identical to SEQ ID NO: 2886

SEQ ID NO: 10326 - protein, 494 aa, Neisseria meningitidis
MNMKYKDLRDFIAMLEQQGKLKRIAHPVSPHLEMTEIADRVLRAEGPALLFENPVKPDGTRYGYPVLANLFGTPERVAMGMGADSVSKLREIGQTLAYLKEPEPPKGIKDAFSKLPLLKDIWSMAPNVVKNAPCQEIVWEGENVDLYKLPIQHCWPEDVAPLVTWGLTVTRGPHKKRQNLGIYRQQLIGKNKLIMRWLSHRGGALDYQEFRKLNPDTPYPVAVVLGCDPATILGAVTPVPDTLSEYQFAGLLRGSRTELVKCIGNDLQVPARAEIVLEGVIHPNETALEGPYGDHTGYYNEQDHFPVFTVERITMRENPIYHSTYTGKPPDEPAVLGVALNEVFVPLLQKQFPEITDFYLPPEGCSYRMAVVSMKKQYAGHAKRVMMGCWSFLRQFMYTKFIIVVDDDVNVRDWKEVIWAVTTRMDPVRDTVLVENTPIDYLDFASPVSGLGGKMGLDATNKWPGETDREWGRVIKKDPAVTAKIDGIWEELGL

SEQ ID NO: 10327 - protein, 183 aa, Neisseria meningitidis; identical to SEQ ID NO: 1173

SEQ ID NO: 10328 - protein, 467 aa, Neisseria meningitidis; identical to SEQ ID NO: 8430

SEQ ID NO: 10329 - protein, 191 aa, Neisseria meningitidis; identical to SEQ ID NO: 1730

SEQ ID NO: 10330 - protein, 376 aa, Neisseria meningitidis; identical to SEQ ID NO: 8804

SEQ ID NO: 10331 - protein, 291 aa, Neisseria meningitidis; identical to SEQ ID NO: 9462

SEQ ID NO: 10332 - protein, 115 aa, Neisseria meningitidis; identical to SEQ ID NO: 1985

SEQ ID NO: 10333 - protein, 123 aa, Neisseria meningitidis; identical to SEQ ID NO: 7208

SEQ ID NO: 10334 - protein, 162 aa, Neisseria meningitidis
VMYVNEKYPYAALFAGLVFLTLPFALSVHDALAFAFGRAGLLVSVSDGEFGWRGGWDGTVWFVFGVFAFLNVVVSAGLTKLAYKKMMRRHSRYALFLSGVAACAAAAVAWIFELLLGSAALGGLRGEAVSEYAFAVWLVSMLTLPKRLTRAPVQPVVFHRKK

SEQ ID NO: 10335 - protein, 144 aa, Neisseria meningitidis
MPACFCPHCKTRLWVKETQLNVAQGFVVCQKCEGLFKAKDHLASTKEPIFNDLPEAVSDVKLVHRIGTRAIGKKQISRDEIAGILNGGTTLHDTPPATAATPAAAPQVAVPPAAPARQEGFNWTIATLFALIVLIMQLSYLVIL

SEQ ID NO: 10336 - protein, 111 aa, Neisseria meningitidis; identical to SEQ ID NO: 8680

SEQ ID NO: 10337 - protein, 215 aa, Neisseria meningitidis; identical to SEQ ID NO: 8650

SEQ ID NO: 10338 - protein, 286 aa, Neisseria meningitidis
MELNEFLDKAYAVLRRLDAVLPPEPGHTDWNALAFRWQSAGKKGFLEHLPDPHTFPLVRLAGVGRQTELLVRNTEQFIVGRPANNVLMSGARGTGKSSLVKALLHEYADKGLRLIEVDKSDLIGLPYLLTLLKERPEKFIVFCDDLSFESGDETYKALKTALDGGLSQRCANVLVYATSNRRHLMPEYFDENAGTTGMRGEIHQKEAVEEKISLSDRFLWLSFYPFDQNDYLAAVQNWLEDFGVPYDETAQMAALQWAQTRGSRSGRSAWQFACDWAGRLPKQRAL

SEQ ID NO: 10339 - protein, 92 aa, Neisseria meningitidis; identical to SEQ ID NO: 510

SEQ ID NO: 10340 - protein, 66 aa, Neisseria meningitidis; identical to SEQ ID NO: 421

SEQ ID NO: 10341 - protein, 197 aa, Neisseria meningitidis; identical to SEQ ID NO: 1551

SEQ ID NO: 10342 - protein, 218 aa, Neisseria meningitidis; identical to SEQ ID NO: 3206

SEQ ID NO: 10343 - protein, 405 aa, Neisseria meningitidis
MMKIKALMIAAALLAAADVHAAPQKAKTASAKAAKAAKAAKAAKAAKAAKAAKAAKAAKAAKVAKVAKVAKVAKVAKVAKVAKVAKVAKVAKVAKVAKVAKVAKVAKVAATAQKEAAPAQQQGGIRFSDGIAAVADNEVITRRRLAEAVAEAKANLPKEAQISESELSRQVLMQLVNQSLIVQAGKRRNIQASEAEIDAVVAKNSALKNLSPAQRRDFADNIIAEKVRQQAVMQNSRVSEAEIDAFLEQAQKQGITLPEGAPLRQYRAQHILIKADSENAAVGAESTIRKIYGEARSGTDFSSLARQYSQDASAGNGGDLGWFADGVMVPAFEEAVHALKPGQVGAPVRTQFGWHIIKLNEVRDAGTPQERIRNSVRQYIFQQKAEQATVNLLRDLHSGAYVDIR

SEQ ID NO: 10344 - protein, 62 aa, Neisseria meningitidis; identical to SEQ ID NO: 3927

SEQ ID NO: 10345 - protein, 695 aa, Neisseria meningitidis
MDYLSRLSFGFNKKLPVILQTEVAECGLACLTSILSYYGFHTDLRTLRQKYTLSLKGANLADIMRFGNEMNLTPRALRLELDELSNLQLPCILHWNLNHFVVLCSISKDSIVIMDPAVGMRKIKMDEVSQKFTGIALELFPNTHFEEKKETKKIKILSLLRGISGLKRSLIQMLILAISLEVFALVSPFFMQWVIDHVIVTADKNLLLTLTLGFGLLAILQQLISLLQAWVGMHLSTTLNLQWKANIFKRLLDLPNDYFSKRHLGDVISRFGSIDHIQETLTSTFFVLVLNSLMAIFTFVLMTIYSTQLSLIVLLTLVLYILIRWLAYYPLRNATEENIVHEAKQNSYFMETIRGIQSVKLFDKHYQRHGTWMSLFVNTVNTKLTTDKLSALFEFSNKLLFSMENIIIIYLGASAILDGSFTVGVLMAFLAYKGQFESRTASLVDQYIQIKMLGLHAERLADITLNETETEIIKYNHIPKLDNEQLVLKVENVSFRYADNEPYLFENINLEFKDNEAVVLTGQSGRGKSTLLNILTGSLKPETGTVSINGHDIYQVSPSFIRGLSGIVRQDDVLFAGSIGENISFFDESPNMELIEQCAKMAQIHDDILKMPMGYETLIGDMGNILSGGQKQRVILARALYKRPKILFLDEASSHLDVENEQKINHNLKSLGIMKIMVAHRQETIQSADKILNLG

SEQ ID NO: 10346 - protein, 462 aa, Neisseria meningitidis; identical to SEQ ID NO: 9246

SEQ ID NO: 10347 - protein, 358 aa, Neisseria meningitidis; identical to SEQ ID NO: 8668

SEQ ID NO: 10348 - protein, 502 aa, Neisseria meningitidis; identical to SEQ ID NO: 9511

SEQ ID NO: 10349 - protein, 107 aa, Neisseria meningitidis
MIVDEKSTSDVLKQYQELGFDLTKPMIIEFFIGGSQKNLQSIESRLISYRQDFQISIEQDEFGEMWTCYCSVNIVPSLENILAIETTLFGIAQKNDCNYEGFGSYGN

SEQ ID NO: 10350 - protein, 259 aa, Neisseria meningitidis; identical to SEQ ID NO: 2605

SEQ ID NO: 10351 - protein, 384 aa, Neisseria meningitidis; identical to SEQ ID NO: 4652

SEQ ID NO: 10352 - protein, 307 aa, Neisseria meningitidis; identical to SEQ ID NO: 2891

SEQ ID NO: 10353 - protein, 206 aa, Neisseria meningitidis
MLTPKSCDLFNIPFFQFAQLKKYRPESIPQIKADYKENWQIWQQLIQQVAAELGAPFAPPHIERWCNGWQVRAHFFAYFKYAQYKNSAAILSILLNRRRLSVSLDWHCYKADVSPITLPDYNRWLDNFDTEKYAAFDMWHGAESEYDDHRTVAQQNESDRKLQNDEDFFCIGKHIERDDLGRQDVAKWIAETVEDLLPLYEACHGK

SEQ ID NO: 10354 - protein, 279 aa, Neisseria meningitidis; identical to SEQ ID NO: 7960

SEQ ID NO: 10355 - protein, 444 aa, Neisseria meningitidis; identical to SEQ ID NO: 2522

SEQ ID NO: 10356 - protein, 152 aa, Neisseria meningitidis; identical to SEQ ID NO: 9291

SEQ ID NO: 10357 - protein, 318 aa, Neisseria meningitidis
LLIRYIDIAKRNFVIAVSSLSKTKTETNNPKGIAHTIEYLKKHKVALVVTESTGGLEIPAAKAIRRAGIAVIIANPRQTHQFAQSQPLTKTDAKDAKMPAFFAQMTAQKEDSQTMPYQPPTEAEEVLEALVNRRNQPADMRTAEKNRLHQVHETQVGSVKQLIAHFDRLIDELDKQIDDHTHTHFDGKAQVAEQIKGIGSITTATLMVMLPELGRLSHKRIAGLAGIAPHPRESGETKFKSRCFGGRSAVRKALYMATVAATRFEPLIRDFYQRLLSEGKPYKVAVTACMRKLLTISNARMRDYFAENDTAENGIRTA

SEQ ID NO: 10358 - protein, 117 aa, Neisseria meningitidis
MIELQLHELKLVSGGGPVTDNIAGNVANAATTKGGPTWGDLVAIPAAAAAVYYLPKNAYGAAGANGVYNVTRDWVNDAVNAPPYNGRPIFEIEHGLTAPATKADKSGNGYTDGTDYC

SEQ ID NO: 10359 - protein, 109 aa, Neisseria meningitidis
MGGLIIEDLQEGFGKEAVKGKEITVHYTGWLEDGTKFDSSLDRRQPLTITLGVGQVIKGWDEGFGGMKESGKRKLTIPSEMAYGAHGAGGVIPPHATLIFEVELLKVYE

SEQ ID NO: 10360 - protein, 398 aa, Neisseria meningitidis
MPSEAFRRHNATNTLISITQDDTMTHIKPVIAALALIGLAACSGSKTEQPKLDYQSRSHRLIKLEVPPDLNNPDQGNLYRLPAGSGAVRASDLEKRRTPAVQQPADAEVLKSVKGVRLERDGSQRWLVVDGKSHAEIWPLLKAFWQENGFDIKSEEPAIGQMETEWAENRAKIPQDSLRRLFDTVGLGGIYSTGERDKFIVRIEQGKNGVSDIFFAHKAMKEVYGGKDKDTTVWQPSPSDPNLEAAFLTRFMQYLGVDGQQAENASAKNPTLPAANEMARIEGKSLIVFGDYGRNWRRTALALDRIGLTVVGQNTERHAFLVQKAPNESNAVTEQKPGLFKRLLGKGKAEKPAEQPELIVYAEPVANGSRIVLLNKDGSAYAGKDASALLGKLHSELR

SEQ ID NO: 10361 - protein, 65 aa, Neisseria meningitidis; identical to SEQ ID NO: 5454

SEQ ID NO: 10362 - protein, 672 aa, Neisseria meningitidis
MMGGKGGFYRHLAVEGNFGGTTQSLAVCSTIGANSVKMPTSFLYTPHRQAEFMALLQISEPGMSASPHRHRLAAGIDLGTTNSLVATVRSGSAACLPDAEGRVTLPSVVRYLENGGIEVGKTALSAQKTDPLNTVSSAKRLIGRTLADLHQNTHYLPYRFGDNQRVIELHTRQGVKTPVEVSAEILKTLKSRAEETLGGDLVGVVITVPAYFDDAQRQATKDAARLAGLNVLRLLNEPTAAAIAYGLDNASEGTFVVYDLGGGTFDVSVLQLTKGLFEVKATGGNSALGGDDFDHRLFCRLLEQNGLSQLNEQDSQLLLSLVRAAKEQLTTQTEARIQATLSDGMAIDTSISRAEFHNLTQHLVMKTLEPVTQALKDAGVGKNEVKGVIMVGGSTRMLHVQQAVATFFGQTPLNNLNPDEVVALGAAIQANVLAGNKTDGEWLLLDVTPLSLGLETYGGLAEKIIPRNSTIPTARAQDFTTFKDGQTAMTIHVVQGERELVSDCRSLAKFTLRGIPPMAAGAARIRVTFQIDADGLLSVSAQEQSTGVQAQIEVKPSYGLDDGAITRMLKDSMDNAAEDMAARARAEAVVEAESLTDAVNAALELDSDLLDAKELQQIRQGIADLQGRLKDGKAEDIRSAVAKLSRSTDNFAAKRMNRNIQRALTGQSVDNI

SEQ ID NO: 10363 - protein, 160 aa, Neisseria meningitidis; identical to SEQ ID NO: 236

SEQ ID NO: 10364 - protein, 121 aa, Neisseria meningitidis; identical to SEQ ID NO: 1865

SEQ ID NO: 10365 - protein, 151 aa, Neisseria meningitidis; identical to SEQ ID NO: 4206

SEQ ID NO: 10366 - protein, 141 aa, Neisseria meningitidis; identical to SEQ ID NO: 7

SEQ ID NO: 10367 - protein, 1978 aa, Neisseria meningitidis
MNEGEVVLTPEQIQTLRGYASRGDTYGGWRYLANLGDRYADNAAAIVGKDTNLNGLNLWMKKGVENLWDDTVGKKTRLEKFDRVALQHFSQYVDLINKNNGRLPNTSEIERSYYKAVTYHGVSSSAAIDLVINRSLPDMADGYWALGLGIEAERIHNEQAVNNPNGSERDNRKQLISALDKGFDGSFKEKHFTFLQSVMMDLTKLGVEYTIDGWQKIGGWGNGIINDLYKSVVKREWTGIFEIVNNNIKQGNEAFKNEINSLVHDMKAAGKEFGDDLNTQWNNLTQAAEIIYNDIVDNTSQGIEKGVKAIKELSEKMKNAASDLADGSAEKAKQVVEDLAQAAKEAYENAKSTAEKAAQAAREFFKGLPSFKDLAEKFRDLFPNPEGWIDDGHQCFAPWVKETKKRNGKYHVYDPLALDLDGDGIETVATKGFSGSLFDHNRDGIRTATGWVAADDGLLVRDLNGNGIIDNGAELFGDNTKLADGSFAKHGYAALAELDSNGDNIINAADAAFQTLRVWQDLNQDGISQANELRTLEELGIQSLDLAYKDVNKNLGNGNTLAQQGSYTKTDGTTAKMGDLLLAADNLHSRFTNKMLSISHVRENTISPFVLGCLNKPMYIIINKKYLTIIDEILEKETVDMTNNSEKGNIYYPSTEHILGSLLFLLAEEDEGGLTREMSCCVIWMPCREAIDAITAVLLENLSLQNLKTLFLRKDKGRKNFWFLSCMKPCWNKCTPTIINNFRFLFYKLFIYDCKFIFMPKNIFYILHIVYMSLFEYILRWGNIYIFYNKFYSFANMSWNITCILNFSIKYSIYYFSELYFIFNIFTSYIYHKRANFILYVDNFILNFNSSRYFFNLLERKADMTSANFNINGFGDVKLTPYSPLLGYKAWDSFIGSIQSLSDLIYNVDNNRNKMEITVNNAIQAADSFLSSIGRDNKITNTASLLASLDNIFLNLRNVSRDIRETGKFKPNDIQQAIGDIFIAAGDGLQYIKQQTEAMAQSKFLPTKLKTGLNDVLNSRMLKSSTVLQHELNYLGFKIKDYGNERLGESIMNIDDFTPSKIANFFADPDTYSNVLEEVSRFIYSLVPDDANPWKGGEDYIGRGISEWGELLEKWYKQDFLPYLEKEWDQFPKFEDWLPEFPEWAREWLKLDPKRSGKYHVYDPLALDLDGDGIETVAAKGFAGALFDHRNQGIRTATGWVSADDGLLVRDLNGNGIIDNGAELFGDNTKLADGSFAKHGYAALAELDSNGDNIINAADAAFQTLRVWQDLNQDGISQANELRTLEELGIQSLDLAYKDVNKNLGNGNTLAQQGSYTKTDGTTAKMGDLLLAADNLHSRFKDKVELTAEQAKAANLAGIGRLRDLREAAALSGDLANMLKAYSAAETKEAQLALLDNLIHKWAETDSNWGKKSPMRLSTDWTQTANEGIALTPSQVAQLKKNALVSLSDKAKAAIDAARDRIAVLDAYTGQDSSTLYYMSEEDALNIVKVTNDTYDHLAKNIYQNLLFQTRLQPYLNQISFKMENDTFTLDFSGLVQAFNHVKETNPQKAFVDLAEMLAYGELRSWYEGRRLMADYVEEAKKAGKFEDYQKVLGQETVALLAKTSGTQADDILQNVGFGHNKNVSLYGNDGNDTLIGGAGNDYLEGGSGSDTYVFGKGFGQDTVYNYDYATGRKDIIRFTDGITADMLTFTREGNHLLIKAKDDSGQVTVQSYFQNDGSGAYRIDEIHFDNGKVLDVATVKELVQQSTDGSDRLYAYQSGSTLNGGLGDDYLYGADGNDLLNGDAGNDSIYSGNGNDTLDGGEGNDALYGYNGNDALNGGEGNDHLNGEDGNDTLIGGAGNDYLEGGSGSDTYVFGEGFGQDTVYNYHVDKNSDTMHFKGFKAADVHFIRSGSDLVLSASEQDNVRISGFFYGENHRVDTFVFDDAAISNPDFAKYINAGNNLVQSMSVFGSNTAATGGNVDANIQSVQQPLLVTPSA

SEQ ID NO: 10368 - protein, 92 aa, Neisseria meningitidis; identical to SEQ ID NO: 2137

SEQ ID NO: 10369 - protein, 201 aa, Neisseria meningitidis
MPSEMRMSRLMLLLSAFVLAACNAQNRQSCVRHQDFARVAVDLFRSACVLTQGSFEPVSKFAAVGHFVPVGKEDLSRLPPAVAEPDVQALWTLERDGGIYYLSLPRDCCSVKAERADSAVLLEHFDGLVRQPPKNTNIELRAEQSVQALFETRQISYAWRESGSPEETVLTAQTADSPDLPVQAVLNLTHRSHNGKPLILP

SEQ ID NO: 10370 - protein, 222 aa, Neisseria meningitidis; identical to SEQ ID NO: 3106

SEQ ID NO: 10371 - protein, 334 aa, Neisseria meningitidis
MSTFFRQTAQAMIAKHIDCFPLLKLDQVIDWQPIEQYLNRQKTRYLRDHRGRPAYPLLSMFKAVLLGQWHSLSDPELEHSLITRIDFNLFCRFDELSIPDYSTLCRYRNWLAQDDTLSELLKLINRQLTEKGLKIEKASAAVVDATIIQTAGSKQRQAIEVDEGQINGQTTPSKDSDARWIKKNGLYKLGYKQHTRTDAEGYIEKLHITPANAHECKHLPPLLEGLPEGTTVYADKGYDSAENRQHLEEHQLLDGIMRKACRNRPLSEVQTKRNRYLSKTRYVVEQSFGTLHRKFRYARSTYFGLIKVSAQSHLKAMCLNLLKAANRLSAPAAA

SEQ ID NO: 10372 - protein, 242 aa, Neisseria meningitidis; identical to SEQ ID NO: 2996

SEQ ID NO: 10373 - protein, 283 aa, Neisseria meningitidis; identical to SEQ ID NO: 9223

SEQ ID NO: 10374 - protein, 268 aa, Neisseria meningitidis; identical to SEQ ID NO: 9571

SEQ ID NO: 10375 - protein, 460 aa, Neisseria meningitidis; identical to SEQ ID NO: 9764

SEQ ID NO: 10376 - protein, 1038 aa, Neisseria meningitidis
MNKTLKRRVFRHTALYAAILMFSHTGGGGAMAQTYKYAIIMNEQNQPKVKQEGSYSTLREKDRERKFIYNKGGSGGGSVSFNNSDELVSQQSGTAVFGTATYLPPYGKVSGFDADALKERNNALNWINTTRPGLAGYSYANVICRDTRQCPQLFYETKFAFSNKDLVNNAGRLDRHPDPSRENSPIYKLKDHPWLGVSFNLGSEGTAKDGKVSNKLISSFSEDNNNQTIVSTTRDHPISLGDQQREHTAMAYYLNAKLHLLDKKGIKDIAQGKTVDLGTLRPRVETKTNNWGNLLNFWVTWKIEDNGQIPVKLGLPEVKAGRCTNAAHPNSKAKPPSPALTAPALWFGPVQNGKVQMYSASVSTYPGSSSSRIFLQELKTQTDPGRPGRYSLAALDAQNIKSHEPRFNGRQTVIRLPGGVYKISLGRNGGRVAGINGNDGKNDTFGIFKDRYVTPEADEWSEMLLPWTVRAFNDDGRFNTVNKEENNGKPKYSQRYRIRENGNNGKRDLGDIVNSPIVAVGGYLATSANDGMVHIFKQSGGDKRGYNLKLSYIPGTMPRKNIENNDSTLAKELRAFAEKGYVGDRYGVDGGFVLRRITDDQDKQKHFFMFGAMGFGGRGAYALDLTKADDNDPTKASLFDVKDNGNNGNNGNNRVELGYTVGTPQIGKTHNGKYAAFLASGYATKKIDDPTNKTALYVYDLENNNGTPIAKIEVPNGKGGLSSPTLVDKDLDGTVDIAYAGDRGGNMYRFDLSNNDPTKWSVRTIFKGTPDKPITSAPAVSKLKDKRVVIFGTGSDLSEDDVDKKDIQSIYGIFDNDTGTDVAEEGQGKGLLEQHLTQEDKTLFLTDYKRSDGSGDKGWVVKLEAGQRVTVKPTVVLRTAFVTIRKYNDGGCGAETAILGINTADGGKLTKKSARPIVPEANTAVAQYSGHKQTAKGKSIPIGCMWKNNETVCPNGYVYDKPVNVRYLDEKKTDDFPVTADGDAGGSGTFKEGKKPARNNRCFSGKGVRTLLMNDLDSLDITGPTCGMKRISWREIFY

SEQ ID NO: 10377 - protein, 387 aa, Neisseria meningitidis; identical to SEQ ID NO: 30

SEQ ID NO: 10378 - protein, 171 aa, Neisseria meningitidis; identical to SEQ ID NO: 2424

SEQ ID NO: 10379 - protein, 51 aa, Neisseria meningitidis; identical to SEQ ID NO: 5732

SEQ ID NO: 10380 - protein, 627 aa, Neisseria meningitidis
MKPDKAQMQQMSRFAVFQRESVDVEKRTVEVAFSSEESVRRWFGDEVLSHAQGAVDLSRLNDGGAVLFNHDWDDQIGIIERAWIDADKRGRALVRFGNGTKATEKFQDVQDGILRHISVGYRVEDMVLDNPDTDDEGYRYIVTRWMPYEISFVTVPADPTVGVGRSVEPFIENPVNPTPEKGNRNMDKNQTPTTVETSAAAIPAAAATDTNNTAERGMQNERARVSELLAIGRSYAAHGGIEAAEKVIKEGGSEAQLRAAIMANMQTKPTVTAGEIGMTDKEQREFSLLRAMSAAATGKWDKAGLEREVSEELEKRHGRAAAGFFVPTDLIARAYSKGNAANGGNVIENDFREDLFIELLRNRLAVAQLGATVLDGLVGDITIPKHLTGNTVQWVDENGSATESNATFGQMSLKPKTVTANTELSRKFILQSSLSAEQFARSELLKAMMLGIDLAAINGKGTGNEPTGILNTAGIGAVEIGANGGAPEWKHIVALESAIAAANADIGDLAYITNARVRGLLKTKLKADGVSGYIWQDGATPLNGYRCAVSNQIPSNLTKGTAANKCSPLIFGNWSDLMIAHWGVLDVIVDPYTKSTTGAVRITTLQDVDIAVRHVESFAAIKDIAAA

SEQ ID NO: 10381 - protein, 226 aa, Neisseria meningitidis; identical to SEQ ID NO: 9347

SEQ ID NO: 10382 - protein, 628 aa, Neisseria meningitidis; identical to SEQ ID NO: 8625

SEQ ID NO: 10383 - protein, 324 aa, Neisseria meningitidis
MIAKHIDRFPLLKLDQVIDWQPIEQYLNRQRTRYLRDHRGRPAYPLLSMFKAVLLGQWHSLSDPELEHSLITRIDFNLFCRFDELSIPDYSTLCRYRNRLAQDNTLSELLKLINRQLTEKGLKVEKASAAVVDATIIQTAGSKQRQAIEVDEEGQISGQTTPSKDSDARWTKKNSLYKLGYKQHTRTDAEGYIEKLYITPTNAHECTHLSPLLEGIAEGTTVYADKGYDSAENRQHLEEHQLQDGIMRKACRNRPLSEAQTKRNRYLSKTRYVVEQSFGTLHRKFRYARAAYFGLIKVSAQSHLKAMCLNLLKAANRLSAPAAA

SEQ ID NO: 10384 - protein, 305 aa, Neisseria meningitidis; identical to SEQ ID NO: 9487

SEQ ID NO: 10385 - protein, 176 aa, Neisseria meningitidis
VPVENENMNPFETKSVTFAEPIEMLYACHGKVRRFCGQVAMLSDYIAENGCNQIVLQTIRQIAQYFNVAAPLHHEDEEENFFPLLLQYAPQAQESVDELLRQHIGLHDNWAAVSAEFAKLEADNAYVPDAEAFKRFVAGYDVHLAIEEPLFDMGNAFIPKEKLTEIGEIMAARRRK

SEQ ID NO: 10386 - protein, 108 aa, Neisseria meningitidis; identical to SEQ ID NO: 8858

SEQ ID NO: 10387 - protein, 908 aa, Neisseria meningitidis
MQQQHLFRLNILCLSLMTALPVYAENVQAEQAQEKQLDTIQVKAKKQKTRRDNEVTGLGKLVKSSDTLSKEQVLNIRDLTRYDPGIAVVEQGRGASSGYSIRGMDKNRVSLTVDGVSQIQSYTAQAALGGTRTAGSSGAINEIEYENVKAVEISKGSNSSEYGNGALAGSVAFQTKTAADIIGEGKQWGIQSKTAYSGKDHALTQSLALAGRSGGAEALLIYTKRRGREIHAHKDAGKGVQSFNRLVLDEDKKEGGSQYRYFIVEEECHNGYAACKNKLKEDASVKDERKTVSTQDYTGSNRLLANPLEYGSQSWLFRPGWHLDNRHYVGAVLERTQQTFDTRDMTVPAYFTSEDYVPGSLKGLGKYSGDNKAERLFVQGEGSTLQGIGYGTGVFYDERHTKNRYGVEYVYHNADKDTWADYARLSYDRQGIDLDNRLQQTHCSHDGSDKNCRPDGNKPYSFYKSDRMIYEESRNLFQAVFKKAFDTAKIRHNLSINLGYDRFKSQLSHSDYYLQNAVQAYDLITPKKPPFPNGSKDNPYRVSIGKTTVNTSPICRFGNNTYTDCTPRNIGGNGYYAAVQDNVRLGRWADVGAGIRYDYRSTHSEDKSVSTGTHRNLSWNAGVVLKPFTWMDLTYRASTGFRLPSFAEMYGWRAGESLKTLDLKPEKSFNREAGIVFKGDFGNLEASYFNNAYRDLIAFGYETRTQNGQTSASGDPGYRNAQNARIAGINILGKIDWHGVWGGLPDGLYSTLAYNRIKVKDADIRADRTFVTSYLFDAVQPSRYVLGLGYDHPDGIWGINTMFTYSKAKSVDELLGSQALLNGNANAKKAASRRTRPWYVTDVSGYYNIKKHLTLRAGVYNLLNYRYVTWENVRQTAGGAVNQHKNVGVYNRYAAPGRNYTFSLEMKF

SEQ ID NO: 10388 - protein, 445 aa, Neisseria meningitidis; identical to SEQ ID NO: 2190

SEQ ID NO: 10389 - protein, 319 aa, Neisseria meningitidis; identical to SEQ ID NO: 3269

SEQ ID NO: 10390 - protein, 408 aa, Neisseria meningitidis; identical to SEQ ID NO: 2386

SEQ ID NO: 10391 - protein, 264 aa, Neisseria meningitidis; identical to SEQ ID NO: 9300

SEQ ID NO: 10392 - protein, 147 aa, Neisseria meningitidis; identical to SEQ ID NO: 2189

SEQ ID NO: 10393 - protein, 208 aa, Neisseria meningitidis; identical to SEQ ID NO: 1121

SEQ ID NO: 10394 - protein, 318 aa, Neisseria meningitidis
LLIRYIDIAKRNFVIAVSSLSKTKTETNNPKGIAHTIEYLKKHKVALVVTESTGGLEIPAAKAIRRAGIAVIIANPRQTHQFAQSQPLTKTDAKDAKMPAFFAQMTAQKEDSQTMPYQPPTEAEEVLEALVNRRNQPADMRTAEKNRLHQVHETQVGSVKQLIAHFDRLIDELDKQIDDHTHTHFDGKAQVAEQIKGIGSITTATLMVMLPELGRLSHKRIASLVGIAPHPRESGETKFKSRCFGGRSAVRKALYMATVAATRFEPLIRDFYQRLLSEGKPYKVAVTACMRKLLTISNARMRDYFAENDTAENGIRTA

SEQ ID NO: 10395 - protein, 107 aa, Neisseria meningitidis
KGTTIYADKGYDSAENRQHLKEHQLLDGIMRKACRNRPLSEAQTKRNRYLSKPRYVVEQSFGTLHRKFRYARAAYFGLLKVSAQSHLKAMCLNLLKAANRLSAPAAA

SEQ ID NO: 10396 - protein, 172 aa, Neisseria meningitidis; identical to SEQ ID NO: 601

SEQ ID NO: 10397 - protein, 402 aa, Neisseria meningitidis; identical to SEQ ID NO: 2438

SEQ ID NO: 10398 - protein, 430 aa, Neisseria meningitidis
MAVFPLSAKHRKYALRALAVSIILVSAAYIALTERTERVRPQRVEQNLPPLSWGGSGVQTAYWVQEAVQPGDSLADVLARSGMARDEIARITEKYGGEADLRHLRADQSVHVLVGGDGGAREVQFFTDEDGERNLVALEKKGGIWRRSASEADMKVLPTLRSVVVKTSARGSLARAEVPVEIRESLSGIFAGRFSLDGLKEGDAVRLMYDSLYFHGQQVAAGDILAAEVVKGGTRHQAFYYRSDKEGGGGGNYYDEDGRVLQEKGGFNIEPLVYTRISSPFGYRMHPILHTWRLHTGIDYAAPQGTPVRASADGVITFKGRKGGYGNAVMIRHANGVETLYAHLSAFSQAQGNVRGGEVIGFVGSTGRSTGPHLHYEARINGQPVNPVSVALPTPELTQADKAAFAAQKQKADALLARLRGIPVTVSQSD

SEQ ID NO: 10399 - protein, 107 aa, Neisseria meningitidis; identical to SEQ ID NO: 1793

SEQ ID NO: 10400 - protein, 604 aa, Neisseria meningitidis; identical to SEQ ID NO: 8822

SEQ ID NO: 10401 - protein, 288 aa, Neisseria meningitidis; identical to SEQ ID NO: 464

SEQ ID NO: 10402 - protein, 121 aa, Neisseria meningitidis; identical to SEQ ID NO: 4117

SEQ ID NO: 10403 - protein, 658 aa, Neisseria meningitidis; identical to SEQ ID NO: 8975

SEQ ID NO: 10404 - protein, 112 aa, Neisseria meningitidis
MKKIEAIVKPFKLDDVREALTEIGITGMTVSEVKGFGRQKGHTEIYRGAEYAVDFLPKVKIELVLADDAVERAIDVIVEVARSGKIGDGKIFVLPVEEAIRIRTGERSDAAV

SEQ ID NO: 10405 - protein, 146 aa, Neisseria meningitidis
MIKETLMRPIFLSFVLLPILITACSTPDKSARWENIGTISNGNIHTYINKDSVRKNGNLMIFQDKKVVTNLKQERFANTPAYKTAIAEWEIHCNNKTYRLSSLQLFDTKNTEISTQNYTASSLRPMSILSGTLTEKQYETVCGKKL

SEQ ID NO: 10406 - protein, 71 aa, Neisseria meningitidis; identical to SEQ ID NO: 3375

SEQ ID NO: 10407 - protein, 380 aa, Neisseria meningitidis; identical to SEQ ID NO: 5946

SEQ ID NO: 10408 - protein, 239 aa, Neisseria meningitidis; identical to SEQ ID NO: 434

SEQ ID NO: 10409 - protein, 157 aa, Neisseria meningitidis; identical to SEQ ID NO: 140

SEQ ID NO: 10410 - protein, 389 aa, Neisseria meningitidis
MDNELWIILLPIILLPVFFAMGWFAARVDMKTVLKQAKSIPSGFYKSLDALVDRNSGRAARELAEVVDGRPQSYDLNLTLGKLYRQRGENDKAINIHRTMLDSPDTVGEKRARVLFELAQNYQSAGLVDRAEQIFLGLQDGEMAREARQHLLNIYQQDRDWEKAVETARLLSHDDQTYQFEIAQFYCELAQAALFKSNFDVARFNVGKALEANKKCTRANMILGDIEHRQGNFPAAVEAYAAIEQQNHAYLSMVGEKLYEAYAAQGKPEEGLNRLTGYMQTFPELDLINVVYEKSLLLKGEKEAAQTAVELVRRKPDLNGVYRLLGLKLSDMNPAWKADADMMRSVIGRQLQRSVMYRCRNCHFKSQVFFWHCPACNKWQTFTPNKIEV

SEQ ID NO: 10411 - protein, 213 aa, Neisseria meningitidis; identical to SEQ ID NO: 6185

SEQ ID NO: 10412 - protein, 30 aa, Neisseria meningitidis
LKRPCILKRIKNYPDIQVIGQVVQVLKDLN

SEQ ID NO: 10413 - protein, 299 aa, Neisseria meningitidis; identical to SEQ ID NO: 3610

SEQ ID NO: 10414 - protein, 318 aa, Neisseria meningitidis; identical to SEQ ID NO: 8997

SEQ ID NO: 10415 - protein, 279 aa, Neisseria meningitidis; identical to SEQ ID NO: 9071

SEQ ID NO: 10416 - protein, 158 aa, Neisseria meningitidis; identical to SEQ ID NO: 8318

SEQ ID NO: 10417 - protein, 138 aa, Neisseria meningitidis; identical to SEQ ID NO: 937

SEQ ID NO: 10418 - protein, 351 aa, Neisseria meningitidis; identical to SEQ ID NO: 2371

SEQ ID NO: 10419 - protein, 145 aa, Neisseria meningitidis; identical to SEQ ID NO: 1767

SEQ ID NO: 10420 - protein, 336 aa, Neisseria meningitidis; identical to SEQ ID NO: 3061

SEQ ID NO: 10421 - protein, 104 aa, Neisseria meningitidis
CSKSDVVPVFEALIRDADFQYIFLSYNNEGLMSVGQVREIFECFGKYNLVQTEYRRFKADKTENRNHKANSIFEYLHILEKTFYSGLTKTSTALPRLSSKRTIL

SEQ ID NO: 10422 - protein, 214 aa, Neisseria meningitidis
DGNHLSRFKYIFQEAIRDKILVLRILFESIDYILHLPKSDRYLNDYNKIGDYTIILSINKHSRIIFYSNQKIFSIVLPFTYFNDKKTYEFYFNSILINSGIVSYIKEFLDMLSKNGNTLVLDEIMEFYTNNPEKDSDKDNAIIILSDLILLEDGYIRYDYDPEHENGNLHPLHHYDIFYQNKNTFKIGLKSAIGCKEFIELLDCTEERSFLSKL

SEQ ID NO: 10423 - protein, 404 aa, Neisseria meningitidis; identical to SEQ ID NO: 8856

SEQ ID NO: 10424 - protein, 427 aa, Neisseria meningitidis
MNRNEILFDRAKAIIPGGVNSPVRAFGSVGGVPRFIKKAEGAYVWDENGTRYTDYVGSWGPAIVGHAHPEVIEAMREAALGGLSFGAPTEGEIVIAEEIAKIMPSVERLRLVSSGTEATMTAIRLARGFTGRDKIIKFEGCYHGHSDSLLVKAGSGLLTFGNPSSAGVPADFTKHTLVLEYNNIAQLEEAFAQSGNDIACVILEPFVGNMNLVRPSEAFVKALRELTEKHGAVLIYDEVMTGFRVALGGAQSLHGITPDLTTMGKVIGGGMPLAAFGGRKDIMECISPLGGVYQAGTLSGNPIAVAAGLKTLEIIRREGFYENLTARTEQLVQGFRTAADAAGIEFTADSVGGMFGLYFAAHAPRNYADMARSNIDAFKRFFHGMLDRGIAFGPSAYEAGFVSAAHTPELIDETVAVAVEVFKAMAA

SEQ ID NO: 10425 - protein, 243 aa, Neisseria meningitidis; identical to SEQ ID NO: 697

SEQ ID NO: 10426 - protein, 311 aa, Neisseria meningitidis; identical to SEQ ID NO: 9507

SEQ ID NO: 10427 - protein, 144 aa, Neisseria meningitidis; identical to SEQ ID NO: 2747

SEQ ID NO: 10428 - protein, 209 aa, Neisseria meningitidis
MAAHLEEQQELDNFKYFWKTTGKWLFALLILAALGYLGYTVYQNRAASQNQEAAAVLANIVEKAQNKAPQNEINAELAKLQQSYPHSISAAQATLMAAATEFDAQRYDVAEGHLKWVLSNQKDSLIQALAAQRLGVVLLQQKKYDAALAALDTPVEADFSPLLMETKGDVYAAQGKSQEALKNYGQALEKMPQDSVGRELVQMKLDSLK

SEQ ID NO: 10429 - protein, 218 aa, Neisseria meningitidis
MKNKSKVWDFPTRLFHWLLAASLPFMWYSAKTGGDMLQWHTRVGLFILFLLVFRLCWGIWGSDTARFSRFVRGWSGIREYMKNGIPEHVQPGHNPLGALMVVALLAAVSFQVGTGLFAADENTFSTNGYLNHLVSEHTGSLMRKIHLNFFKLLAVFSAIHIAAVAAYRVFKKKNLVLPMITGFKYIEGKTSIRFAGKTALAAALSVAALVAAAILLLS

SEQ ID NO: 10430 - protein, 90 aa, Neisseria meningitidis
MQWKFEDPQNTAVITTRRILSKKNGILEVWHDADDGMLQFLDGNEIHEGDAVIVSLKEIVTIDSSVNLLSNLPLGGYAWRNTISEKWNFD

SEQ ID NO: 10431 - protein, 156 aa, Neisseria meningitidis; identical to SEQ ID NO: 2613

SEQ ID NO: 10432 - protein, 398 aa, Neisseria meningitidis; identical to SEQ ID NO: 3512

SEQ ID NO: 10433 - protein, 93 aa, Neisseria meningitidis; identical to SEQ ID NO: 3468

SEQ ID NO: 10434 - protein, 114 aa, Neisseria meningitidis; identical to SEQ ID NO: 2177

SEQ ID NO: 10435 - protein, 447 aa, Neisseria meningitidis; identical to SEQ ID NO: 2854

SEQ ID NO: 10436 - protein, 469 aa, Neisseria meningitidis; identical to SEQ ID NO: 8726

SEQ ID NO: 10437 - protein, 239 aa, Neisseria meningitidis
MLAGFAAAKAPEIDPALVDTLVAQIMQQADRHAEQSQKPDGQAIRNDAVRRLQTLEVLKNRALKEGLDKDKDVQNRFKIAEASFYAEEYVRFLERSETVSESALRQFYERQIRMIKLQQVSFATEEEARQAQQLLLKGLSFEGLMKRYPNDEQAFDGFIMAQQLPEPLASQFAAMNRGDVTRNPVKLGERYYLFKLSEVGKNPDAQPFELVRNQLEQGLRQEKARLKIDALLEENGVKP

SEQ ID NO: 10438 - protein, 376 aa, Neisseria meningitidis
LMLECTINYCSGEIMSQTIDELLLPHRNAIDTIDAEILRLLNERAQHAHAIGELKGTGAVYRPEREVAVLRRIQDLNKGPLPDESVARLFREVMSECLAVERPLTIAYLGPQGTFTQQAAIKHFGHAAHTMACPTIDNCFKQVETRQADYLVAPVENSTEGSVGRTLDLLAVTALQACGEVVLRIHHNLLRKNNGSTEGIAKVFSHAQALAQCNDWLGRHLPNAERIAVSSNAEAARLVAESDDGTVAAIAGRTAAEIYGLDMVAECIEDEPNNTTRFLVMGHHETGASGSDKTSLAVSAPNRAGAVASLLQPLTESGISMTKFESRPSKSVLWEYLFFIDIEGHRRDAQIQTALERLGERASFVKVIGSYPTAVL

SEQ ID NO: 10439 - protein, 348 aa, Neisseria meningitidis
MIPATYTLSQITARLGGEWRGEDISVTAVRPLADAQAEHISFLANPKYKAEVHDSSAGAVIVSAKAADGFEGRNLIVADDPYLYFAKVARLFSPVVKARGGIHPTAVVEPSATVPASCEIGANAYIGANTVLGEGCRILANAVVQHDCKLGDEVVLHPNAVVYYGCTLGRRVEIHSGAVIGADGFGLAFAGDSWFKIPQTGAVTLGDDVEIGSNTNIDRGAMSDTTVGNGTKIDNQVQIGHNCKIGSHTVIAAKTGISGSVTIGSYCIIGGGVGTVGHIEIADKTTIGGGTSVTHSITESGKHLAGIFPMSTHKEWARNAVYIHRLSEMNKRLKTLEQQLSDAGQDSK

SEQ ID NO: 10440 - protein, 159 aa, Neisseria meningitidis; identical to SEQ ID NO: 7978

SEQ ID NO: 10441 - protein, 338 aa, Neisseria meningitidis; identical to SEQ ID NO: 8361

SEQ ID NO: 10442 - protein, 213 aa, Neisseria meningitidis; identical to SEQ ID NO: 2765

SEQ ID NO: 10443 - protein, 611 aa, Neisseria meningitidis; identical to SEQ ID NO: 3111

SEQ ID NO: 10444 - protein, 221 aa, Neisseria meningitidis; identical to SEQ ID NO: 9745

SEQ ID NO: 10445 - protein, 208 aa, Neisseria meningitidis; identical to SEQ ID NO: 3590

SEQ ID NO: 10446 - protein, 336 aa, Neisseria meningitidis; identical to SEQ ID NO: 2187

SEQ ID NO: 10447 - protein, 351 aa, Neisseria meningitidis
MKNSKLKAVDFFCGGGGMSYGMQSAGIQVLAGIDYEPSCKETYEANINAKFIQADVFELQPETLEKELGLKKNDDDLILIGCSPCQYWSVIQTDKRKSEKSKSLLLEFQRFVEYFNPGYVVVENVPGILSRMKESRLDNFIKLLEEKGFTVHFGIHNTADYGIPQSRKRFTLIANRITKEKLEPVKYSGKRLTVRDVLGMENGFPKIIAGHQDETDFMHSCAGLSDINLKRLALIPKNGGNRLAFAHIPELQLECFIGKDNSFKDTFGRLWWDKPAPTITTKFFSISNGRFAHPEEDRALSLREGATLQSFPRNYVFKAGSRDKIARLIGNAVPPMYAEKIGRAIVDNIEC

SEQ ID NO: 10448 - protein, 521 aa, Neisseria meningitidis
MTQDKILILDFGSQVTQLIARRVREAHVYCELHSFDMPLDEIKAFNPKGIILSGGPNSVYESDYQADTGIFDLGIPILGICYGMQFMAHHLGGEVQPGNQREFGYAQVKTIDSELTRGIQDDTPNTLDVWMSHGDKVSKLPTGFTVIGDTPSCPIAMMENAEKQFYGIQFHPEVTHTKQGRALLNRFVLDICGAQPSWTMPNYIEEAVAKIREQVGSDEVILGLSGGVDSSVAAALIHRAIGDQLTCVFVDHGLLRLNEGKMVMDMFARNLGVKVIHVDAEGQFMEKLAGVTDPEKKRKIIGAEFIEVFDAEEKKLTNAKWLAQGTIYPDVIESAGAKTKKAHAIKSHHNVGGLPENMKLKLLEPLRDLFKDEVRELGVALGLPREMVYRHPFPGPGLGVRILGEVKKEYADLLRQADDIFIQELRNTTDENGTSWYDLTSQAFAVFLPVKSVGVMGDGRTYDYVVALRAVITSDFMTAHWAELPYSLLGRVSNRIINEVKGINRVVYDVSGKPPATIEWE

SEQ ID NO: 10449 - protein, 197 aa, Neisseria meningitidis; identical to SEQ ID NO: 2035

SEQ ID NO: 10450 - protein, 322 aa, Neisseria meningitidis; identical to SEQ ID NO: 8639

SEQ ID NO: 10451 - protein, 251 aa, Neisseria meningitidis; identical to SEQ ID NO: 8366

SEQ ID NO: 10452 - protein, 145 aa, Neisseria meningitidis; identical to SEQ ID NO: 2822

SEQ ID NO: 10453 - protein, 110 aa, Neisseria meningitidis
MLPKGFKYPQSYLKLAQSTHAINYDEQYSFPWWFENAESNISEVIDIYFEITGIPNLLPFARNQEWAACFDISDKSGNPKIIVVNLDNTKYYETFENFDTWLKEAENDGW

SEQ ID NO: 10454 - protein, 159 aa, Neisseria meningitidis
LEFWVGLFVLIGAAAVAFLAFRVAGGAAFGNSGKTYTVYADFGDIGGLKVNAPVKSAGVLVGRVGAIGLDPKSYQARVRLDLDGKYQFSSDVSAQILTSGLLGEQYIGLQQGGDTENLAAGDTISVTSSAMVLENLIGKFMTSFAEKNADGGNAEKAAE

SEQ ID NO: 10455 - protein, 511 aa, Neisseria meningitidis; identical to SEQ ID NO: 1088

SEQ ID NO: 10456 - protein, 186 aa, Neisseria meningitidis
MNPLIHQAKESSMQTRILSAVLLAFSTAAFAGGAFTLQFDNPSEDGGFTQNQLLSAPYGFGCSGGNAPPALSWKNPPAGTKSFVLTVYDKDAPTGLGWMHWVVADIPADVRRRNAASLQLSRCANIADDQSAAISAVISLRICRIRLTPSYTAKPMPSCCNHANTPQSAASATLCGTFSSASTAAA

SEQ ID NO: 10457 - protein, 259 aa, Neisseria meningitidis; identical to SEQ ID NO: 3194

SEQ ID NO: 10458 - protein, 371 aa, Neisseria meningitidis; identical to SEQ ID NO: 3554

SEQ ID NO: 10459 - protein, 461 aa, Neisseria meningitidis
MMARDNRIQMFPHEWRTSTTLSGVYALRMLGMFLVLPVLAVYAASLPGAEGNKTLVGLAMGIYGLTQALLQLPLGIASDKFGRKKTIYVGLIVFAAGSFLAAAADTLPMLIAARAIQGAGAVSAAVTALLADLTRDGVRTRAMAMIGLSIGLTFSVSLVVAPVIADAVGVRGLFLLTGILTVASIGVVAWMTPDPEVSKLHEDTQAQPSRIGEVLKNRRLLTLDFGIFALHAAQMALFTALPFAMTQLGLEKIQHWKVYLPSTITGLVVMVPLIIVGETRNKLKQVFVLGIVCIAAAQLGLLSGMRSVGLITAYLVVYFIGFNVLEASLPSMVSKIAPSDLKGTAMGVYNTMQSLGLFAGGAAGGLLFQKYGFSGVFAFCSILMLLWLVIAVLSPAPKPVKNLSYPVGGVWQGNQEGLYRALSELEGVEDIGFSFDGQTVYLKVLQKGFDQAAAEKIITGV

SEQ ID NO: 10460 - protein, 167 aa, Neisseria meningitidis
MSDEFNRFIERVLSHEGGYVNHPQDPGGETNWGITKRTAQANGYNGSMRAMTREQAISIYRKAFWERYRADQMPEAVAFQFFDACVNHGYGNAARMLQRAAGVPDDGIIGEISLKAINSLPENDLLLRFNAERLVFYTKLGTFTSFGKGWVRRVAQNLIHAAADNAD

SEQ ID NO: 10461 - protein, 581 aa, Neisseria meningitidis; identical to SEQ ID NO: 8251

SEQ ID NO: 10462 - protein, 77 aa, Neisseria meningitidis; identical to SEQ ID NO: 760

SEQ ID NO: 10463 - protein, 291 aa, Neisseria meningitidis; identical to SEQ ID NO: 3496

SEQ ID NO: 10464 - protein, 252 aa, Neisseria meningitidis; identical to SEQ ID NO: 4740

SEQ ID NO: 10465 - protein, 636 aa, Neisseria meningitidis
MTLETLLALPRNIKKICFLIHDFLMIFIAFWFIQSLKADYSNEWFDPANWQSFLLTAPLTIGLFVRMGLYRAVTRFISFRILSTALAGSLASAVLFFLNTLIFEERLRLALPIVYFLLLFVSVTGSRMVLRGLLSEHPKKQMIPVIIYGAGRSGRQLLEAVKQMREYSAAAFVDDDPKLWHTVIYDLAVYQPDAIAFLIERYGVEKILLAIPGATQEQRRRIINKLEAYPCEVLTIPGMKDLMDGKISIGTLKKISVSDLLGRDSVAPDDRLMSADIEGKTVMVTGAGGSIGSELCRQIIRRRPEKLLLFELSEFALYAIEKELRETCIQKRLDTEILPFLGSVQNRTLLEHVMTAFSVATVYHAAAYKHVPMVEFNTVEGIRNNIFGTLECALAATTSGVRTFVLISTDKAVRPTNTMGASKRMAELCLQALAAEPGQKTRFSMVRFGNVLGSSGSVVPLFEKQIAEGGPLTLTHPEITRYFMTIPEAAQLVIQAGAMGTGGDVFVLDMGESVKIIDLARQMITLSGLKPNTPEQPDGDIEILITGLRPGEKLYEELLIGDNVRKTAHPRIMTADEAMLPWHELSVLLDRIRSACDRYDQQAIRTLLINAPTGFAPSDGICDLLWVRETHRKNAV

SEQ ID NO: 10466 - protein, 57 aa, Neisseria meningitidis
MTYRELVERQLAVRHADLELGLSRAREQEPFVIHVSDLLDKAGIEYAVRMDKDFQTT

SEQ ID NO: 10467 - protein, 41 aa, Neisseria meningitidis; identical to SEQ ID NO: 2201

SEQ ID NO: 10468 - protein, 107 aa, Neisseria meningitidis; identical to SEQ ID NO: 2467

SEQ ID NO: 10469 - protein, 711 aa, Neisseria meningitidis
LKGTIMFNKHVKTFQYGNQTVTLETGEIARQAAAAVKVSMGDTVVLVAVTTNKEVKEGQDFFPLTVDYLERTYAAGKIPGGFFKREGKQSEKEILTSRLIDRPIRPLFPEGFYHDIQIVAMVVSVDPEIDSDIPAMLGASAALVLSGVPFAGPIGAARVGYVNGVYVLNPTKAELAKSQLDLVVAGTSKAVLMVESEAKILPEDVMLGAVVYGHDQMQVAINAINEFADEVNPELWDWKAPETNEELVAKVRGIAGETIKEAFKIRQKQARSAKLDEAWNAVKEALITEETDTLAANEIKGIFKHLEADVVRSQILDGQPRIDGRDTRTVRPLNIQTSVLPRTHGSALFTRGETQALAVATLGTSRDEQIIDALSGEYTDRFMLHYNFPPYSTGEVGRMGAPKRREIGHGRLAKRALLAVLPKPEDFSYTMRVVSEITESNGSSSMASVCGGCLSLLSAGVPLKAHVAGIAMGLILEGNKFAVLTDILGDEDHLGDMDFKVAGTTEGVTALQMDIKIQGITKEIMQIALAQAKEARLHILDQMKAAVAGPQELSAHAPRLFTMKINQDKIREVIGKGGETIRSITAETGTEINIAEDGTITIAATTQEAGDAAKKRIEQITAEVEVGKVYEGTVVKILDNNVGAIVSVMPGKDGLVHISQIAHERVRNVGDYLQVGQVVNVKALEVDDRGRVRLSIKALLDAPAREENAAE

SEQ ID NO: 10470 - protein, 258 aa, Neisseria meningitidis; identical to SEQ ID NO: 2774

SEQ ID NO: 10471 - protein, 138 aa, Neisseria meningitidis; identical to SEQ ID NO: 8310

SEQ ID NO: 10472 - protein, 344 aa, Neisseria meningitidis; identical to SEQ ID NO: 8641

SEQ ID NO: 10473 - protein, 145 aa, Neisseria meningitidis
VWAMMFSWFKLFHLFFVISWFAGLFYLPRIFVNMAMIDAPRGNPEYVRLSGMAVRLYRFMSPLGFGAVVFGSAIPFAAGWWGSGWVHVKLCLGLMLLAYQLYCGVLLRRFQDYSNAFSHRWYRVFNEIPVLLMVAALYLVVFKPF

SEQ ID NO: 10474 - protein, 96 aa, Neisseria meningitidis
GMTGFNDAAGVASASDIKGKYVEKVEVKNGVVTAEMKSSGVNKEIQGKKLSLWAKRQDGSVKWFCGQPVARNDKADTDKIDTKHLPSTCRDAASAD

SEQ ID NO: 10475 - protein, 305 aa, Neisseria meningitidis
MVLDGFAAHFDAYLENIVREGKSEHTVAAYRRDLEELFALLAQMPSEDVGGVPQDLSRRDFTAALRRLSQRGLNARTLARKLSSWRQYCVWLVERGLLHTDPTADIKPPKQPERVPKALPQEWLNRMLDLPVDGGDPLAVRDHALFELMYGSGLRVSEIHGLNADDVYLDEAWVHVTGKGRKQRQVPLTGKSVEALKNYLPLRQTASDGKALFTGRNGTRLSQRQIQKRLAQWAAQNGDGRHVSPHMMRHSYAGHLLQASRDIRAVQELLGHSSLSTTQIYTKLDFDHIARLYDEAHPRAKRRDE

SEQ ID NO: 10476 - protein, 280 aa, Neisseria meningitidis; identical to SEQ ID NO: 3261

SEQ ID NO: 10477 - protein, 674 aa, Neisseria meningitidis
MNDMTLYLIIALVPLAGSLIAGLFGNKIGRAGAHTVTILGVAVSAVLSAYVLWGFIDGSRAKFDENVYTWLTMGGLDFSVGFLVDTMTAMMMVVVTGVSLMVHIYTIGYMHDEKIGYQRFFSYISLFTFSMLMLIMSNNFIQLFFGWEAVGLVSYLLIGFYFKRPSATFANLKAFLINRVGDFGFLLGIGLVLAYFGGSLRYQDVFAYLPNVQTATIQLFPSVEWSLITVTCLLLFVGAMGKSAQFPLHVWLPDSMEGPTPISALIHAATMVTAGLFMVSRMSPIYEMSSTALSVIMMIGAITALFMGFLGVIQNDIKRVVAYSTLSQLGYMTVALGASAYSVAMFHVMTHAFFKALLFLAAGSAIIGMHHDQDMRHMGNLKKYMPVTWLTMLIGNLSLIGTPFFSGFYSKDSIIEAAKYSTLPGSGFAYFAVLASVFVTAFYAFRQYFMVFHGEEKWRSLPEHHDDHHGEEHHSLGKNDNPHESPLVVTLPLILLAIPSVIIGYVAIEPMLYGDFFKDVIFVNADAHPTMHIMKEEFHGALAMVSHSLHSPVLYLAIAGVLSAWLLYVKLPHLPAKIAQTFRPIYVLFENKYYLDALYFNVFAKGTRALGTFFWKVGDTAIIDNGIVNGSAKLVGAIAAQVRKAQTGFIYTYAAAMVFGVLVLLGMTFWGLFR

SEQ ID NO: 10478 - protein, 120 aa, Neisseria meningitidis; identical to SEQ ID NO: 2661

SEQ ID NO: 10479 - protein, 94 aa, Neisseria meningitidis
MKLLAALIPLLMSVAGRILTALGLMAVTYSGVDRLVAHFQQAITHSITGAPQAMLQLFYISGGGTVLNILFGAIAFILSFKQMTKLATSIGNKK

SEQ ID NO: 10480 - protein, 171 aa, Neisseria meningitidis; identical to SEQ ID NO: 8133

SEQ ID NO: 10481 - protein, 335 aa, Neisseria meningitidis
MSTFFQQTAQAMIAKHINRFPLLKLDQVIDWQPIEQYLNRQRTRYLRDHRGRPAYPLLSMFKAVLLGQWHSLSDPELEHSLITRIDFNLFCRFDELSIPDYSTLCRYRNWLAQDNTLSELLELINCQLTEKGLKVEKASAAVVDATIIQTAGSEQRQAIEVDEEGQVSGQTTLSKDKNARWTKKNSLYKLGYKQHTRTDAEGYIEKLHITPANTHECNHLSPLLEGIAEDTTVYADKGYDSKENRQHLKEHRLLDGIMRKAQRNRPLTEAQTKRNRYLSKTRYVVEQSFGTLHRKFRYARAAYFGLIKVSAQSHLKAMCLNLLKAANRLSVPVAA

SEQ ID NO: 10482 - protein, 161 aa, Neisseria meningitidis; identical to SEQ ID NO: 5306

SEQ ID NO: 10483 - protein, 948 aa, Neisseria meningitidis
MCNHHPQHSHDNDTIRIRGARTHNLKNVDLDIPRHKLVVVTGLSGSGKSSLAFDTLYAEGQRRYVESLSAYARQFLQMMDKPDVDLIEGLSPAISIEQKSTSHNPRSTVGTVTEIHDYLRLLYARVGTPYCPEHKLPLSSQTVSQMVDAVLKLPEDTRVMILAPAVRERKGEFVDFFADLQAQGFARVRVDGEVYQLDEVPKLEKNIKHNIDVVIDRVKVKADIKQRLAESFETALRHGNERALAMEMESGEEHWFSARFACPVCSYSLPELEPRLFSFNNPMGSCPTCDGLGNTNFFDPEKVVAHPELSLATGAIDGWDKRNQFYFQMIQSLARHYGFDVQAAWETLPEKVKKVVLHGSGKEVIDFTYLSERGTTFNRSHAFEGIIPNLERRYRETDSETVREKLREYQNHRACPSCGGARLRKEARYVYVSGEPLHEVSAWPLTKTHQFFETLDLDGNKKQIAEKILKEITERLGFLINVGLDYLNLSRSAETLSGGEAQRIRLASQIGSGLTGVMYVLDEPSIGLHQRDNDRLLATLKRLRDLGNSVIVVEHDEDAIREADFVVDMGPGAGEHGGNVLIADTPENVAQCENSVTGQYLSGKKSIAVPSERTPVNPDRMLVLKGARGNNLKNVTLELPLGLITCITGVSGSGKSTLINDTLAKITARELNRAQEEPAPYDDIRGLEHLDKVINVDQSPIGRTPRSNPATYTGLFTPIRELFAGIPLSRERGYNVGRFSFNVKGGRCEACQGDGVIKVEMHFLPDVYVPCEVCHGKRYNRETLEIQYKGKNISQVLDMTVEEAREFFDAVPTVSRKLQTLMDVGLGYIRLGQSATTLSGGEAQRVKLALELSKRDTGRTLYILDEPTTGLHFADIALLLEVIGRLKGKGNSIVIIEHNLDVIKTADYIVDLGPEGGDGGGRIIASGSPEEVAKVKGSYTGKYLKVVL

SEQ ID NO: 10484 - protein, 372 aa, Neisseria meningitidis; identical to SEQ ID NO: 3260

SEQ ID NO: 10485 - protein, 92 aa, Neisseria meningitidis; identical to SEQ ID NO: 419

SEQ ID NO: 10486 - protein, 484 aa, Neisseria meningitidis
MSIEHTPPTHDGETGQNHAERPSADFDRVHSLCEILEPAFEQIENGTPLEDAPLRDKLTELTVLLSELHPADVAAVLESLPPRERNIVWILVKPEDDGEVLLEVSDAVRETLIESMDKDELLAAVDDLDADELAELADDLPHQVVYEALQTRDEEERAQVKAAMSYEDNQVGAIMDFELVSIRADVACEVVLRYLRRFDSLPDHTDKIFVVDENDVLQGVLPIRKLLVADPEDLVENVMAKDVVRFRAEDDVEEAAQAFERYDLVTAPVVDENKKLIGRVTVDEMVDVIREESEADMLNMAGLQEEEDLFAPVLDSVKNRWMWLAVNLCTAFLASRVIGAFEGSIEKIVALAALMPIVAGIGGNSGNQTITMIVRAMAMGQLTGMQAGRLLKKEVGVALVNGIIWGTVMGAVSWLLYGSLGIGLVMIAAMTLNLLLAATVGVLIPVVMEKFGRDPALGSSVLITAVTDSGGFLIFLGLATLFLL

SEQ ID NO: 10487 - protein, 88 aa, Neisseria meningitidis; identical to SEQ ID NO: 1100

SEQ ID NO: 10488 - protein, 103 aa, Neisseria meningitidis; identical to SEQ ID NO: 2880

SEQ ID NO: 10489 - protein, 99 aa, Neisseria meningitidis; identical to SEQ ID NO: 7449

SEQ ID NO: 10490 - protein, 675 aa, Neisseria meningitidis; identical to SEQ ID NO: 3344

SEQ ID NO: 10491 - protein, 414 aa, Neisseria meningitidis; identical to SEQ ID NO: 8661

SEQ ID NO: 10492 - protein, 201 aa, Neisseria meningitidis; identical to SEQ ID NO: 2273

SEQ ID NO: 10493 - protein, 82 aa, Neisseria meningitidis; identical to SEQ ID NO: 1233

SEQ ID NO: 10494 - protein, 371 aa, Neisseria meningitidis; identical to SEQ ID NO: 8192

SEQ ID NO: 10495 - protein, 76 aa, Neisseria meningitidis; identical to SEQ ID NO: 8288

SEQ ID NO: 10496 - protein, 304 aa, Neisseria meningitidis; identical to SEQ ID NO: 8772

SEQ ID NO: 10497 - protein, 177 aa, Neisseria meningitidis; identical to SEQ ID NO: 3350

SEQ ID NO: 10498 - protein, 125 aa, Neisseria meningitidis
MRKSRLSRYKQNKLIELFVAGVTARTATEPDSIVYTDCYRSYDVLDVSEFSHFRINHSTHFAERQNHINGIENFWNRAKRHLRKFNGIPKAHFELYLKECEWRFNNSEIKVQISILKQLVKSSLS

SEQ ID NO: 10499 - protein, 67 aa, Neisseria meningitidis; identical to SEQ ID NO: 966

SEQ ID NO: 10500 - protein, 154 aa, Neisseria meningitidis; identical to SEQ ID NO: 1226

SEQ ID NO: 10501 - protein, 189 aa, Neisseria meningitidis; identical to SEQ ID NO: 8960

SEQ ID NO: 10502 - protein, 322 aa, Neisseria meningitidis; identical to SEQ ID NO: 7028

SEQ ID NO: 10503 - protein, 113 aa, Neisseria meningitidis
VKFAKKHKISDSELLEAVERADNGLIDADLGGGVIKQRIARQGQGRSGGYRSLILFKQADRAFFVYAFAKNDRENISDKELDVYRKAAAYYLKYTRAELAALKEDGIITEIES

SEQ ID NO: 10504 - protein, 385 aa, Neisseria meningitidis
MRKKLTALVLSALPLAAVADVSLYGEIKAGVEGRNIQLQLTEPLQNIQPQVTKRKSRIRTKISDFGSFIGFKGSEDLGEGLKAVWQLEQDVSVAGGGATQWGNRESFIGLAGEFGTLRAGRVANQFDDASQAIDPWDSNNDVASQLGIFKRHDDMPVSVRYDSPEFSGFSGSVQFVPAQNSKSAYTPAHFVQQTPKSQPTLVPAVVGKPGSDVYYAGLNYKNGGFAGNYAFKYAKHANVGRDAFELFLLGSGSDEAKGTDPLKNHQVHRLTGGYEEGGLNLALAAQLDLSENGDKTKNSTTEIAATASYRFGNAVPRISYAHGFDFIERGKKGENTSYDQIIAGVDYDFSKRTSAIVSGAWLKRNTGIGNYTQINAASVGLRHKF

SEQ ID NO: 10505 - protein, 324 aa, Neisseria meningitidis
MPSEKNIGFMAGSSRPLWVAFALLLVSCVLFMTLNVKGDWDFVLQLRLTKLAALLLVAYAVGVSTQLFQTLTNNPILTPSILGFDSLYVFLQTLLVFALGGVGYASLPLTGKFGFELVVMMGGSLLLFYTLIRQGGRDLPRMILIGVIFGILFRSLSSLLSRMIDPEEFTAAQANMFATFNTVHSELLGIGAIVLLISAAVIWRERHRLDVYLLGRNQAVNLGISYTRNTLWILLWIAALVATATAVVGPVSFFGLLAASLANHFSPSVRHSVRLPMTVCVGGILLVGGQTVFEHFLGMKAVLSVVVEFAGGLVFLYLVLKHKK

SEQ ID NO: 10506 - protein, 456 aa, Neisseria meningitidis
MLDNLTSRFSNVLKNIRGQAKLTEDNIKEALREVRLALLEADVALPVVKEFVNNVKEKALGQEVAGSLTPDQAFIGVVNQALVELMGKENKTLDLSVAPPAVVLMAGLQGAGKTTTVGKLARLLKNDQKKKVLVVSADVYRPAAIEQLRLLAEQVGVDFFPSDTNQKPVEIATAAVDYAKKHFYDVLMVDTAGRLAIDEEMMNEIKALHAAVNPVETLFVIDAMLGQDAVNTAQAFNEALPLTGVVLTKMDGDSRGGAALSVRHVTGKPIKFIGVGEKINGLEPFHPDRLASRILGMGDVLTLIEDVQKGIDEEAAAKMAKKLHKGKGFDLNDFKEQIQQMRNMGGLENLMSKMPGELGQISKQIPEGTAEKAMGKVEAIINSMTPKERANPALLKASRKRRIAVGAGTTVQEVNKLLKQFEQMQQMMKMFSGNGLGKLMRMAKGMRGIKGMFPGL

SEQ ID NO: 10507 - protein, 295 aa, Neisseria meningitidis
VQLLNRHKSTISREIRRHRTQGQQYSAEKAQRQSRTIKQRKRQPYKLDSQLIQHIDTLIRRKLSPEQVCAYLCKHHQITLHHSTIYRYLRQDKSNGSTLWQHLRICSKPYRKRYGSTWTRGKVPNRVGIENRPAIVDQKSRIGDWEADTIVGKGQKSALLTLVERVTRYTIICKLDSLKAEDTARAAVRALKAHKDRVHTITMDNGKEFYQHTKITKALKAETYFCRPYHSWEKGLNENTNGLIRQYFPKQTDFRNISDREIRRVQDELNHRPRKTLGYETPSVLFLNLFQPLIH

SEQ ID NO: 10508 - protein, 591 aa, Neisseria meningitidis; identical to SEQ ID NO: 3751

SEQ ID NO: 10509 - protein, 335 aa, Neisseria meningitidis
MSTFFQQTAQAMIAKHIDRFPLLKLDQVIDWQPIEQYLNRQKTRYLRDHRGRPACPLLSMFKAVLLGQWHSLSDPELEHSLITRIDFNLFCRFDELIIPDYSTLCRYRNWLAQDDTLSELLKLINCQLTEKGLKIEKASAAVVDATIIQTAGSKQRQAIEVDEEGQISGQTTPSKDSDARWIKKNGLYKLGYKQHTRTDAEGYIEKLHITPANAHECKHLSPLLEGLPKGTTVYADKGYDSAENRQHLEEHQLQDGIMRKACRNRPLTETQTKRNRYLSKTRYVVEQSFGTLHRKFRYARSTYFGLIKVSAQSHLKAMCLNLLKAANRLSAPAAA

SEQ ID NO: 10510 - protein, 298 aa, Neisseria meningitidis
MLTFQQIIFKLQTFWADKGCTVIQSFDMEVGAGTSHPATCLRALGPEPWFAAYVQPSRRPKDGRYGDNPNRLQHYYQFQVALKPAPANIQDLYLDSLRELGIDPKVHDIRFVEDDWENPTLGAWGLGWEVWLNGMEVTQFTYFQQVGGIDCTPVLGEITYGIERLAMYLQGVENVYDLVWAKTLDGNTVTYGDVYHQNEVEQSTYNFEYSDADWLLRQFNDYEAQAKRLLAVEEASLALPAYELVLKAGHTFNLLDARGAISVTERATYIGRIRALSRAVAQKYVESREKLGFPLIKK

SEQ ID NO: 10511 - protein, 119 aa, Neisseria meningitidis
MASYVSIKGWIECSDDDIKIIQENINNFWNNCPFNIEEKESAKIYKSGWVFPTNSFNWSSYIFFGACVKSYFIIYFEKCIKTIMELDIEISGFFELDYYEDSYKVHWKINNGNLIQTTN

SEQ ID NO: 10512 - protein, 298 aa, Neisseria meningitidis; identical to SEQ ID NO: 3584

SEQ ID NO: 10513 - protein, 193 aa, Neisseria meningitidis
LPYYLYCLRLRRLVLIFVNPLYLHQFHETQVGSVKQLIAHFDRLIDELDKQIDDHTHTHFDGKAQVAEQIKGIGSITTATLMAMLPELGRLSHKRIASLAGIAPHPRESGETKFKSRCFGGRSAVLKALYMATVAATRFEPLIRDFYQRLPSEGKPYKVAVTACMRKLLTISNARMRDYFAENDTAENGIQTA

SEQ ID NO: 10514 - protein, 370 aa, Neisseria meningitidis; identical to SEQ ID NO: 3173

SEQ ID NO: 10515 - protein, 215 aa, Neisseria meningitidis; identical to SEQ ID NO: 7475

SEQ ID NO: 10516 - protein, 391 aa, Neisseria meningitidis; identical to SEQ ID NO: 2276

SEQ ID NO: 10517 - protein, 83 aa, Neisseria meningitidis; identical to SEQ ID NO: 9519

SEQ ID NO: 10518 - protein, 182 aa, Neisseria meningitidis; identical to SEQ ID NO: 2877

SEQ ID NO: 10519 - protein, 320 aa, Neisseria meningitidis; identical to SEQ ID NO: 8264

SEQ ID NO: 10520 - protein, 125 aa, Neisseria meningitidis; identical to SEQ ID NO: 7790

SEQ ID NO: 10521 - protein, 249 aa, Neisseria meningitidis
MKALVAVKRVVDYNVKVRVKADGSDVDIGNVKMSMNPFDEIAVEEAVRLKEAGKVSEIVAVSLGEKKCEETLRTALAMGADRAIHVETDTKLESLAVAKLLKAVADKENPQIFFLGKQAIDDDANQVAQMLAALLNAAQGTFASKVHIECGEVQIVREIDGGEETIALKLPAVISADLRLNEPRFVKLPNIMAAKKKPLEKLTPDDLVADISPRLKTVKFAEPKARQAGVKVASVAELVEKLKNEAKVI

SEQ ID NO: 10522 - protein, 349 aa, Neisseria meningitidis; identical to SEQ ID NO: 261

SEQ ID NO: 10523 - protein, 239 aa, Neisseria meningitidis
LNLIHDTLPVNVLLLMCTRKQQGFTLTELLIVMVIAAIMAMIALPNMSQWIASRRIASHAERIANLLRFSRGEAVRLNLPVYICPVQVKKDGAPNNRCDFSKKGRGMLAFGDKNGNKAYDGDAADVFLRSVVLNDTDDSRINYAFNHIAFGSSQPTADRVVWTFNQNGTFGYTKDQHLTSKSSFFYSDGYIQIVLTDARAVLDADKKFRSAVVLIDSSGRVEVCPRGDRRTRRTMCQYK

SEQ ID NO: 10524 - protein, 111 aa, Neisseria meningitidis; identical to SEQ ID NO: 233

SEQ ID NO: 10525 - protein, 123 aa, Neisseria meningitidis; identical to SEQ ID NO: 2701

SEQ ID NO: 10526 - protein, 71 aa, Neisseria meningitidis; identical to SEQ ID NO: 9913

SEQ ID NO: 10527 - protein, 483 aa, Neisseria meningitidis
MTSERLRVFRRHQDFFMDTTLKTTLTSVAAAFALSACTMIPQYEQPKVEVAETFKNDTADSGIRAVDLGWHDYFADPRLQKLIDIALERNTSLRTAVLNSEIYRKQYMIERNNLLPTLAANANDSRQGSLSGGNVSSSYKVGLGAASYELDLFGRVRSSSEAALQGYFASTANRDAAHLSLIATVAKAYFNERYAEEAMSLAQRVLKTREETYKLSELRYKAGVISAVALRQQEALIESAKADYAHAARSREQARNALATLINQPIPEDLPAGLPLDKQFFVEKLPAGLSSEVLLDRPDIRAAEHALKQANANIGAARAAFFPSIRLTGTVGTGSAELGGLFKSGTGVWSFAPSITLPIFTWGTNKANLDVAKLRQQAQIVAYESAVQSAFQDVANALAAREQLDKAYDALSKQSRASKEALRLVGLRYKHGVSGALDLLDAERSSYSAEGAALSAQLTRAENLADLYKALGGGLKRDTQTDK

SEQ ID NO: 10528 - protein, 286 aa, Neisseria meningitidis; identical to SEQ ID NO: 2687

SEQ ID NO: 10529 - protein, 310 aa, Neisseria meningitidis; identical to SEQ ID NO: 2407

SEQ ID NO: 10530 - protein, 133 aa, Neisseria meningitidis; identical to SEQ ID NO: 8

SEQ ID NO: 10531 - protein, 72 aa, Neisseria meningitidis; identical to SEQ ID NO: 1294

SEQ ID NO: 10532 - protein, 184 aa, Neisseria meningitidis; identical to SEQ ID NO: 4537

SEQ ID NO: 10533 - protein, 61 aa, Neisseria meningitidis; identical to SEQ ID NO: 965

SEQ ID NO: 10534 - protein, 268 aa, Neisseria meningitidis; identical to SEQ ID NO: 8422

SEQ ID NO: 10535 - protein, 616 aa, Neisseria meningitidis
MIMLPNRFKMLTVLTATLIAGQVSAAGGGAGDMKQPKEVGKVFRKQQRYSEEEIKNERARLAAVGERVNQIFTLLGGETALQKGQAGTALATYMLMLERTKSPEVAERALEMAVSLNAFEQAEMIYQKWRQIEPIPGKAQKRAGWLRNVLRERGNQHLDGLEEVLAQADEGQNRRVFLLLAQAAVQQDGLAQKASKAVRRAALKYEHLPEAAVADVVFSVQGREKEKAIGALQRLAKLDTEILPPTLMTLRLTARKYPEILDGFFEQTDTQNLSAVWQEMEIMNLVSLHRLDDAYARLNVLLERNPNADLYIQAAILAANRKEGASVIDGYAEKAYGRGTGEQRGRAAMTAAMIYADRRDYTKVRQWLKKVSAPEYLFDKGVLAAAAAVELDGGRAALRQIGRVRKLPEQQGRYFTADNLSKIQMLALSKLPDKREALRGLDKIIEKPPAGSNTELQAEALVQRSVVYDRLGKRKKMISDLERAFRLAPDNAQIMNNLGYSLLSDSKRLDEGFALLQTAYQINPDDTAVNDSIGWAYYLKGDAESALPYLRYSFENDPEPEVAAHLGEVLWALGERDQAVDVWTQAAHLTGDKKIWRETLKRHGIALPQPSRKPRK

SEQ ID NO: 10536 - protein, 411 aa, Neisseria meningitidis; identical to SEQ ID NO: 3347

SEQ ID NO: 10537 - protein, 218 aa, Neisseria meningitidis; identical to SEQ ID NO: 6313

SEQ ID NO: 10538 - protein, 282 aa, Neisseria meningitidis; identical to SEQ ID NO: 1327

SEQ ID NO: 10539 - protein, 236 aa, Neisseria meningitidis; identical to SEQ ID NO: 5419

SEQ ID NO: 10540 - protein, 124 aa, Neisseria meningitidis
LRKKTMYFVDRTAVVLKPTARFLEWLKSTDENMPDLTIEQLRANCSVFLVPQFDEPEAVVSYFDERYRQIFEAELAGWDINKDKWPQDMGLKAFWEFFDIEIHDMVLDMEEAELNITPVFDNMM

SEQ ID NO: 10541 - protein, 323 aa, Neisseria meningitidis; identical to SEQ ID NO: 3380

SEQ ID NO: 10542 - protein, 250 aa, Neisseria meningitidis; identical to SEQ ID NO: 2637

SEQ ID NO: 10543 - protein, 163 aa, Neisseria meningitidis; identical to SEQ ID NO: 8718

SEQ ID NO: 10544 - protein, 187 aa, Neisseria meningitidis; identical to SEQ ID NO: 508

SEQ ID NO: 10545 - protein, 221 aa, Neisseria meningitidis; identical to SEQ ID NO: 2270

SEQ ID NO: 10546 - protein, 188 aa, Neisseria meningitidis
MLLQNILPFAHCLLRKALPEGGNALDGTAGNGHDTLFLAQTAGIRGKVWAFDIQPQALNNTRCRLQEAGYSNVRFILDGHENLKQYIPKPLDAAIFNFGWLPGGDKSLTTRTETSIAALSATLSLLKENGMLIAVLYPGHENGKQEAEAVGQWAKNLPQEQFAVLRYGFTNRKNSPPYLLAFEKLRQK

SEQ ID NO: 10547 - protein, 371 aa, Neisseria meningitidis; identical to SEQ ID NO: 3159

SEQ ID NO: 10548 - protein, 468 aa, Neisseria meningitidis; identical to SEQ ID NO: 3129

SEQ ID NO: 10549 - protein, 316 aa, Neisseria meningitidis
MKLQQLKYALEVYRHNLNVSEAAEALFTSQPGISKQIKLLEEEIGIQIFIRSGKRVVSVSQPGKVVLDIAERILRDVQNIKNIGSEFTGQDSGSLTVATTHTQARYALPLIVADFVKRYPKVNLTIKQGSPAAIARMVTSGEADLAIVTERIDDHPELGKLPCYDWTHAVIVPNDHPLLECRNPLRIEDLARFPLITYEFAFNAGSSIARAFSKARLEQPDVALAAADTDVLKTYVRLGLGVGLMAKMAYNPDTDGDLQLVDAAHLFEPSPTWIALRSDTYLRGYAYDFIQAFAPHLTREKVDRILYTPISEDFSI

SEQ ID NO: 10550 - protein, 244 aa, Neisseria meningitidis; identical to SEQ ID NO: 7982

SEQ ID NO: 10551 - protein, 173 aa, Neisseria meningitidis
LRERMKKKLLSGIKFAVQTALVFLLVSLFLDWIRKPDEPAGAAGRPLTLLSGQRLTLGQFSRDKAVLVYFWGSWCGVCRYQSPIIDDLAADGVPVVGVAVRSGSSAEVAAYMAKRGLGFPTANDEDGGLARSWRIVATPAVVLVKNGKMVHYTTGISSYWGLRARIFQADVFG

SEQ ID NO: 10552 - protein, 237 aa, Neisseria meningitidis; identical to SEQ ID NO: 1707

SEQ ID NO: 10553 - protein, 470 aa, Neisseria meningitidis
LALAVLLMLLVMRAKQGKKTPKRKSQGVGNTQGQTPGSNDSDWVDQIGQSVSDGTQPDWSWNESAETASAAVSAQEVDPLTEYQVYKQFGYQGKAAESLAAYLDGIPDGEAKPENLIRELLDINLEVGDVDVLADNLQKYGKLIPSELLAKYIEQALQRDSNHLRIRVLAEEGLGWGTQEIEKRAEGGSATAASASPPPDAGGKAYEAEEIKRIPIVRGKKDVSGISQEEIGAIAGLVRADQGAKILKDKVSYETASKQYDRAIQTSEKPANLIIDALKLDYQHADIDRFAGHLWKLYQTLGNYGRQVKERMLGWGYSLGYHEVFDDLEKGPNDRQIKDIGMGHGYLPKNIQKFKSQHRDLVLQDSSLINTGSSPADDAVKEVESLLMYGQIEAAMDVLEQAVLKYPDESQLYITLIDIYERTEDWDRLGQFLRVLRERADRLPEEVVMLMSRLLQRMNQNIKKIKRYGK

SEQ ID NO: 10554 - protein, 456 aa, Neisseria meningitidis; identical to SEQ ID NO: 9489

SEQ ID NO: 10555 - protein, 290 aa, Neisseria meningitidis
MPQMNNAFALPAIQSGNGSLEQYIHTVNSIPMLSQEEETRLAERRIKGDLNAAKQLILSHLRVVVSIARGYDGYGLNQADLIQEGNIGLMKAVKRYEPGRGARLFSFAVHWIKAEIHEFILRNWRLVRVATTKPQRKLFFNLRSMRKNLNALSPKEAQDIADDLGVKLSEVLEMEQRMTGHDIAIMADNSDDEDSFAPIDWLADHDSEPSRQLSKQAHYALQTEGLQNALAQLDDRSRRIVESRWLQDDGGLTLHQLAAEYGVSAERIRQIEAKAMQKLRGFLTEEAEAV

SEQ ID NO: 10556 - protein, 178 aa, Neisseria meningitidis; identical to SEQ ID NO: 8890

SEQ ID NO: 10557 - protein, 180 aa, Neisseria meningitidis; identical to SEQ ID NO: 2298

SEQ ID NO: 10558 - protein, 405 aa, Neisseria meningitidis; identical to SEQ ID NO: 9801

SEQ ID NO: 10559 - protein, 603 aa, Neisseria meningitidis; identical to SEQ ID NO: 3231

SEQ ID NO: 10560 - protein, 237 aa, Neisseria meningitidis
LRRQFAASDACRTGLKEGEIMGLGMEIGKLIVAFLVLINPFSALSLYLDLTNGHSTKERRKVARTAAVAVFAVIAVFALIGGTLLKVLGISVGSFQVGGGILVLLIAISMMNGNDNPAKQNLGAQPETGQARPARNAGAIAVVPIAIPITIGPGGISTVIIYASAAKTYSDIALIIVAGLVVSAICYAILIVAGKVSRLLGATGLTILNRIMGMMLAAVSVEIIVSGLKTIFPQLAG

SEQ ID NO: 10561 - protein, 156 aa, Neisseria meningitidis; identical to SEQ ID NO: 8202

SEQ ID NO: 10562 - protein, 141 aa, Neisseria meningitidis; identical to SEQ ID NO: 26

SEQ ID NO: 10563 - protein, 201 aa, Neisseria meningitidis
LHFDFCKTEYYFIDWRFTMKAYLALISAAVIGLAACSQEPAAPAAEATPAAEAPASEAPAAEAAPADAAEAPAAGNCAATVESNDNMQFNTKDIQVSKACKEFTITLKHTGTQPKASMGHNLVIAKAEDMDGVFKDGVGAADTDYVKPDDARVVAHTKLIGGGEESSLTLDPAKLADGDYKFACTFPGHGALMNGKVTLVD

SEQ ID NO: 10564 - protein, 316 aa, Neisseria meningitidis; identical to SEQ ID NO: 5301

SEQ ID NO: 10565 - protein, 63 aa, Neisseria meningitidis; identical to SEQ ID NO: 5865

SEQ ID NO: 10566 - protein, 139 aa, Neisseria meningitidis; identical to SEQ ID NO: 2531

SEQ ID NO: 10567 - protein, 259 aa, Neisseria meningitidis; identical to SEQ ID NO: 3243

SEQ ID NO: 10568 - protein, 410 aa, Neisseria meningitidis; identical to SEQ ID NO: 257

SEQ ID NO: 10569 - protein, 239 aa, Neisseria meningitidis; identical to SEQ ID NO: 1086

SEQ ID NO: 10570 - protein, 414 aa, Neisseria meningitidis; identical to SEQ ID NO: 9411

SEQ ID NO: 10571 - protein, 308 aa, Neisseria meningitidis; identical to SEQ ID NO: 9802

SEQ ID NO: 10572 - protein, 481 aa, Neisseria meningitidis; identical to SEQ ID NO: 9781

SEQ ID NO: 10573 - protein, 213 aa, Neisseria meningitidis
MRCFMIQNVVTSIILYSGTAVDLLIILMLFFAKRKSRKDIINIYLGQFLGSVSLILLSLLFAFVLDYIPSKEILGLLGLIPIFLGLKVLLLGDSDGEAIAKEGLRKDNKNLIFLVAMITFASCGADNIGVFVPYFTTLNLANLIVALLTFLVMIYLLVFSAQKLAQVPSVGETLEKYSRWFVAVVYLGLGVYILIENNSFDMLWTVSGQEKIL

SEQ ID NO: 10574 - protein, 214 aa, Neisseria meningitidis; identical to SEQ ID NO: 909

SEQ ID NO: 10575 - protein, 89 aa, Neisseria meningitidis; identical to SEQ ID NO: 4489

SEQ ID NO: 10576 - protein, 318 aa, Neisseria meningitidis; identical to SEQ ID NO: 4594

SEQ ID NO: 10577 - protein, 400 aa, Neisseria meningitidis; identical to SEQ ID NO: 8056

SEQ ID NO: 10578 - protein, 147 aa, Neisseria meningitidis
MYLTQHTDYGLRVLIYTAINDDALVNISTIAVTYGISKSHLMKVVTALVKGGFLHSVRGKGGGLRLATPPDRINIGSVVRHLEPMQLVECMGSNNECLITPSCRLTGILGGAMKSFFTYLDGFTLQDLLNKPTYDLLYEPRIPIAVQ

SEQ ID NO: 10579 - protein, 340 aa, Neisseria meningitidis; identical to SEQ ID NO: 2046

SEQ ID NO: 10580 - protein, 171 aa, Neisseria meningitidis
MYTCTSCGEKHEDMPAIGFTAPYPYNQLSEEERIAYQAECGGDFCIIRYPDQTDRFIRAVLLIPIIGHEETLEYGVWVSVSEKSFNDYQSHFHDNPENVVYFGMICNRLPPYETDTFGLHCNVVTQPDGQRPLLQLHQGSEHPLVRDFYHGIEYAEAQARIGAVSESDCSG

SEQ ID NO: 10581 - protein, 119 aa, Neisseria meningitidis; identical to SEQ ID NO: 3183

SEQ ID NO: 10582 - protein, 812 aa, Neisseria meningitidis; identical to SEQ ID NO: 8626

SEQ ID NO: 10583 - protein, 288 aa, Neisseria meningitidis; identical to SEQ ID NO: 8706

SEQ ID NO: 10584 - protein, 335 aa, Neisseria meningitidis; identical to SEQ ID NO: 9914

SEQ ID NO: 10585 - protein, 445 aa, Neisseria meningitidis
MTLENKKILVAGLGGTGISMIAYLRKNGAEVAAYDAELKPERVSQIGKMFDGLVFYTGRLKDALDNGFDILALSPGISERQPDIEAFKQNGGRVLGDIELLADIVNRRGDKVIAITGSNGKTTVTSLVGYLCIKCGLDTVIAGNIGTPVLEAEWQREGKKADVWVLELSSFQLENTESLRPTAATVLNISEDHLDRYDDLLDYAHTKAKIFRGDGVQVLNADDAFCRAMKRAGREVKWFSLEHEADFWLERETGRLKQGNEDLIATKDIPLQGLHNAANVMAAVALCEAVGLPREALLEHVKTFQGLPHRVEKIGKKNGVVFIDDSKGTNVGATAAAIAGLQNPLFVILGGMGKGQDFTPLRDALAGKAKGVFLIGVDAPQIRRDLDGCGLNMTDCATLEEAVQTAYAQAEACDIVLLSPACASFDMFKGYAHRSEVFIEAFKAL

SEQ ID NO: 10586 - protein, 321 aa, Neisseria meningitidis; identical to SEQ ID NO: 4435

SEQ ID NO: 10587 - protein, 156 aa, Neisseria meningitidis; identical to SEQ ID NO: 8010

SEQ ID NO: 10588 - protein, 195 aa, Neisseria meningitidis; identical to SEQ ID NO: 2216

SEQ ID NO: 10589 - protein, 267 aa, Neisseria meningitidis
MRAVKMKQAMKNWFAALLLAVPMGAAFASGGHAHYEKVDIDLRDQVSLQRGAQIFTNYCLSCHSASGMRFNRLKDIGLTDEEIKKNLMFTTDNVGDVMHSAMNPKDAAKWFGAAPPDLTLIARSKGADYLYAYMRGFYKDPTRPSGWNNTVFDKVGMPHPLWEQQGVQAVELDAKGQPVMVKDEHGEMKPKLYWESTGLHSRRLPNGKVIQKEYDAYVRDLVNYLVYMGEPAQLQRKRIGYVVMIFLFAVMLPLAYFLKKEYWKDVH

SEQ ID NO: 10590 - protein, 121 aa, Neisseria meningitidis
MASSGVNNEIKDKKLSLWAKRQDGSVKWFCGLPVARTDKATDDVKAATANGTDDKINTKHLPSTCRDDSSTGCIETPRADFKHFQKISRYRVLPESRQMAEKLRHSRKSGNLGLSAQKLIG

SEQ ID NO: 10591 - protein, 88 aa, Neisseria meningitidis; identical to SEQ ID NO: 255

SEQ ID NO: 10592 - protein, 79 aa, Neisseria meningitidis; identical to SEQ ID NO: 831

SEQ ID NO: 10593 - protein, 93 aa, Neisseria meningitidis; identical to SEQ ID NO: 939

SEQ ID NO: 10594 - protein, 413 aa, Neisseria meningitidis; identical to SEQ ID NO: 9853

SEQ ID NO: 10595 - protein, 184 aa, Neisseria meningitidis
MIIGGIGGARTQTGLRFEERTDLRTLFEEIPGYDLRKTYDNAGYEVWFNGELKAYCFKKYEFYRFLKRPGYNINWKDHLSKRLLPDNGLFIIIRDTLFIIEIKFQQTPGSVDEKLQTCDFKRKQYTKLVHSLGWRVEYVYVLNDWFTKPEYKDVLDYIISVNCHYQFNTIPLRWFGLPDGETNE

SEQ ID NO: 10596 - protein, 144 aa, Neisseria meningitidis; identical to SEQ ID NO: 8878

SEQ ID NO: 10597 - protein, 691 aa, Neisseria meningitidis; identical to SEQ ID NO: 2651

SEQ ID NO: 10598 - protein, 147 aa, Neisseria meningitidis
LALGHRCRRFGTDKITSRPLRRQPQENPMNIKHLITAALIASAAFAAQAAPQKPLAAAQTAQHPAVWIDVRSEQEFSEGHLHNAVNIPVDQIVRRIHEAAPDKDTPVNLYCRSGRRAKAALQELKKAGYTNVANHGGYEDLLKKGMK

SEQ ID NO: 10599 - protein, 303 aa, Neisseria meningitidis; identical to SEQ ID NO: 7939

SEQ ID NO: 10600 - protein, 223 aa, Neisseria meningitidis; identical to SEQ ID NO: 1947

SEQ ID NO: 10601 - protein, 544 aa, Neisseria meningitidis; identical to SEQ ID NO: 3972

SEQ ID NO: 10602 - protein, 227 aa, Neisseria meningitidis; identical to SEQ ID NO: 2905

SEQ ID NO: 10603 - protein, 227 aa, Neisseria meningitidis; identical to SEQ ID NO: 1151

SEQ ID NO: 10604 - protein, 317 aa, Neisseria meningitidis
LHKYRKHPHKEGYMDAVQLKSFVAVAHEGNLTQAAKRLFLSQPAVSAQIKALEEYVGTPLFRRTGKGMVLTRAGEILLPEAESLLQYKHKLEHFAKTLAGDYSEETSLGIIHPIDSAKLVALTDNIGQTAPKTRLHIQYGMSGEILSRIQHKTLHGGFILGNAAQRGIRSVFLQNLTYALICPQSQYPHLTRSLPQSLQECVWIEMSGVSGSRKHLHQFWRSNRLSPKKQILCDYPQTIIDLVAGGIGVAMVPGNKAEAAAKEGAGVAIIESCRHSMPLNFIYAEEYEDNPHVSLLLECIEKVWGVQAVQPPVVSDN

SEQ ID NO: 10605 - protein, 217 aa, Neisseria meningitidis
MQDNALTIALSKGRIFEETLPLLAAAGIVPTEEPEKSRKLIIGTNHENIRLVIVRATDVPTYVRYGAADFGIAGKDVLIEHGGTGLYRPLDLEIAKCRMMVAVRKGFDYEAASQPGCRLKIATKYPEIAASHFAGKGVHVDIIKLYGSMELAPLVGLSDAIVDLVSTGNTLKANGLEAVEHIVDISSRLVVNKAALKTKYALLEPIIQAFGGAVKAK

SEQ ID NO: 10606 - protein, 154 aa, Neisseria meningitidis; identical to SEQ ID NO: 9113

SEQ ID NO: 10607 - protein, 251 aa, Neisseria meningitidis; identical to SEQ ID NO: 3478

SEQ ID NO: 10608 - protein, 144 aa, Neisseria meningitidis; identical to SEQ ID NO: 528

SEQ ID NO: 10609 - protein, 66 aa, Neisseria meningitidis; identical to SEQ ID NO: 587

SEQ ID NO: 10610 - protein, 274 aa, Neisseria meningitidis
MGRGRGETRVAAVGAGVKMRLTDTHCHLADSVLRGNLAQVLAEARQAGVWRFIVPATRPQDWQSVAELSEMPSEHGQIRIALGIHPWFSDGIAERDCVRLETMLARYPQAWVGEIGLDFYDKTQTPPQRERQIQVFVRQLAIAQTLRRRVIIHNLKATADIAAAVKQTGFAQGGIVHAFSGSAEEARVLTKLGFKIGIGSLLLNPNARKVRDTLKALNDGDFVLETDSPFMLKKEINTPANILRIAEIAAQIRGTGAAEIAAITERNADSLLRP

SEQ ID NO: 10611 - protein, 125 aa, Neisseria meningitidis; identical to SEQ ID NO: 1050

SEQ ID NO: 10612 - protein, 426 aa, Neisseria meningitidis; identical to SEQ ID NO: 8666

SEQ ID NO: 10613 - protein, 227 aa, Neisseria meningitidis; identical to SEQ ID NO: 2059

SEQ ID NO: 10614 - protein, 207 aa, Neisseria meningitidis
MERKERLRAGIAAMGLDISETAQDRLLAYVDLLKKWNKTYNLTALRDEEKMIVHHLLDSLTLLPHIEGVQTMLDVGSGGGQPGIPAAVCRPDVQITLLDANTKKTAFLQQAVIELGLDNVRVVSGRVEAVSDVRADVVTSRAFAELADFVSWTGHLLKDGGYWAAMKGVYPQGEIGRLPQDVCVEKVQRLDVPGLDAERHIVILSKR

SEQ ID NO: 10615 - protein, 557 aa, Neisseria meningitidis; identical to SEQ ID NO: 8746

SEQ ID NO: 10616 - protein, 219 aa, Neisseria meningitidis; identical to SEQ ID NO: 8224

SEQ ID NO: 10617 - protein, 89 aa, Neisseria meningitidis; identical to SEQ ID NO: 2412

SEQ ID NO: 10618 - protein, 265 aa, Neisseria meningitidis; identical to SEQ ID NO: 376

SEQ ID NO: 10619 - protein, 347 aa, Neisseria meningitidis; identical to SEQ ID NO: 8276

SEQ ID NO: 10620 - protein, 240 aa, Neisseria meningitidis; identical to SEQ ID NO: 9589

SEQ ID NO: 10621 - protein, 108 aa, Neisseria meningitidis
LTGAHYGLRDWAMQRATAVIMLIYTVALLVVLFSLPKEYSAWQAFFSQTWVKVFTQVSFIAVFLHAWVGIRDLWMDYIKPFGVRLFLQVATIVWLVGCLVYSIKVIWG

SEQ ID NO: 10622 - protein, 153 aa, Neisseria meningitidis; identical to SEQ ID NO: 5052

SEQ ID NO: 10623 - protein, 550 aa, Neisseria meningitidis
MVAYVFLFLFVTAALVLIIRSHYRWTYFFASALFVFLAGGMLMLTAQWQRALNFASVWFVVLILFHRLKIHYYKQPLLISDFLLIADWRNWETLFHYKEAVIGMAGLLALAAYAVFGWSGADSLGVPWRWAGAALFAAAFVSMWYFSKHPGAVKTWLDSLPDDGRDVFLNLPMSCRAVFFQVPVFEGDGEAFAKQMPSETQPCGMSDEKPDIVVTLMESTLDPHCFDFAAAKIPDLKMFGRQEDTVFSSPLRVHTFGGATWKSEFAFLAGVPSTDFGALASGVFYSVVPHLQTGLVRNLREHGYFCVALSPFTKGNYNAKAAYDHFGFNLMFQPQDLGYPAPMGKNLWHISSEEMMQYARMILEKRHPDLENVRQPMFVYVLTMKEHGPYRTDTDNVFDLDAPDLNAKTVSALNDYIGRIADLDKAVESFDRYLHERGKPFVFGYFGDHQVPFEGVSVRKKWDYAQPDYVTQFAVRSNIAGGFVQRQDFLDLAFAGGVLMEAAGLEAKDGFMRANMAMRGLCGGGLEDCPNRKLVGDYRNYLYDVLKIAS

SEQ ID NO: 10624 - protein, 415 aa, Neisseria meningitidis
MFSLEAWIGLRYLRAKKRNGFMSFITMVSIAGIALGVTALIVVLSVMNGFQKEIRGQLLNVAPHAEIGYIDNTDTDWRNLLRFTENRKGILAAAPYVSNQALLANAGEIRGVQMRGILPSEERKVVEYGDKMPAGKFEDLIPGEFDIILGVGLAEALGAEVGNKVTVITPEGNVTPAGVVPRLKQFTVVGLVKTGVYEVDNSLAMTHIQDARVLYRLDKEVAGLRLKLADPQNAPALTATLIPEAQRDTVWVRDWTFSNRSYFEAVELEKRMMFIILTLIIAVAAFNLVSSLVMAVTEKQADIAILRTLGLSPGGVMKIFMVQGAFSGFFGTLAGVVCGVLLGWNVGRVVAFFENLLGVHLINSQVYFIDYLPSDVDMGDVALIACISLGLSFVATLYPSWRASKTQPAEALRYE

SEQ ID NO: 10625 - protein, 240 aa, Neisseria meningitidis; identical to SEQ ID NO: 3621

SEQ ID NO: 10626 - protein, 95 aa, Neisseria meningitidis; identical to SEQ ID NO: 589

SEQ ID NO: 10627 - protein, 157 aa, Neisseria meningitidis; identical to SEQ ID NO: 8805

SEQ ID NO: 10628 - protein, 381 aa, Neisseria meningitidis
MTETQSLELAKELISRPSVTPDDRDCQKLLAERLHKIGFAAEELHFGDTKNIWLRRGTKAPVVCFAGHTDVVPTGPVEKWDSPPFEPAERDGRLYGRGAADMKTSIACFVTACERFVAEHPDHQGSIALLITSDEEGDALDGTTKVVDVLKARDELIDYCIVGEPTAVDKLGDMIKNGRRGSLSGNLTVKGKQGHIAYPHLAINPVHTFAPALLELTQEVWDEGNEYFPPTSFQISNINGGTGATNVIPGELNVKFNFRFSTESTEAGLKQRVHAILDKHGVQYDLQWSCSGQPFLTQAGKLTDVARAAIAETCGIEAELSTTGGTSDGRFIKAIAKELIELGPSNATIHQINENVRLDDIPKLSAVYEGILARLLAGNAV

SEQ ID NO: 10629 - protein, 591 aa, Neisseria meningitidis; identical to SEQ ID NO: 3154

SEQ ID NO: 10630 - protein, 91 aa, Neisseria meningitidis; identical to SEQ ID NO: 4054

SEQ ID NO: 10631 - protein, 313 aa, Neisseria meningitidis
MKILLLLIPLVLTACGTLTGIPAHGGGKRFAVEQELVAASSRAAVKEMDLSALKGRKAALYVSVMGDQGSGNISGGRYSIDALIRGGYHNNPESATQYSYPAYDTTATTKSDALSSVTTSTSVLNAPAAALTRNSGRKGERSAGLSVNGTGDYRNETLLANPRDVSFLTNLIQTVFYLRGIEVVPPEYADTDVFVTVDVFGTVRSRTELHLYNAETLKAQTKLEYFAVDRDSRKLLIAPKTAAYESQYQEQYALWMGPYSVGKTVKASDRLMVDFSDITPYGDTTAQNRPDFKQNNGKNPDVGNEVIRRRKGG

SEQ ID NO: 10632 - protein, 690 aa, Neisseria meningitidis
VRHSTASKTAQTDFRQHQNMMKLNPQQLEAVRYLGGPLLVLAGAGSGKTGVITQKIKYLIVNVGYLPHTVAAITFTNKAAAEMQERVAKMLHKSQTRGLTICTFHSLGMKILREEANHIGYKKNFSILDSTDSAKIIGELLGGTGKEAVFKAQHQISLWKNDLKTPEDVVQTASNIWEQQTARVYASYQETLQSYQAVDFDDLIRLPAVLLQQNSEVRNKWQRRLRYLLVDECQDTNTCQFTLMKLLTGAEGMFTAVGDDDQSIYAWRGANMENLRKMQENYPQMKVIKLEQNYRSTARILKIANKVIENNPKLFTKKLWSKLGEGEPVKVVACQNEQHEADWVVSQIVKQKLIGGDKTQYADFAVLYRGKHQARIFEEALRGARIPYRLSGGQSFFDKAEIKDVLSYVRLLANPNDDPAFLRAVTTPKRGIGDVTLGKLNTYAHEHECSLYEAAQNEEALATLNNTNRQHLQAFMDMFGSYRAKAETGEAGEFINSLLEEIDYENHLMQNEEGKAGEIKWRNVSDLVSWFARKGGEDGKNIIELAQTVALMTLLEGKDEEETDAVSLSTLHAAKGLEYPYVFLVGCEEGVLPHNDSIEEGNVEEERRLMYVGITRAKRQLTLTHCVKRKKQGTWQFPEPSRFIDEMPQEDLKILGRKGGEPIVSKEEGRRNLADIIGRLDSMKKGNPSD

SEQ ID NO: 10633 - protein, 197 aa, Neisseria meningitidis; identical to SEQ ID NO: 763

SEQ ID NO: 10634 - protein, 98 aa, Neisseria meningitidis
LTVEYFMLLATDGENVYEARMAARPEHLKRLETLKSEGRLLTAGPNPLPEDSNRVSGSLIVAQFESLDAAEAWAEDDPYVHAGVYSEVLIKPFKAVFK

SEQ ID NO: 10635 - protein, 65 aa, Neisseria meningitidis; identical to SEQ ID NO: 127

SEQ ID NO: 10636 - protein, 203 aa, Neisseria meningitidis; identical to SEQ ID NO: 352

SEQ ID NO: 10637 - protein, 231 aa, Neisseria meningitidis
MKLKTLALTSLTLLALAACSKQAETSVPADSVQSSSSAPAAPAPLTEGVNYTVLSTPIPQQQAGKVEVLEFFGYFCPHCAHLEPVLSEHIKTFKDDTYMRREHVVWGDEMKPLARLAAAVEMAGESDKANSHIFDAMVNQKINLADTDTLKKWLSEQTAFDGKKVLAAFEASESQARAAQMEELTNKFQISGTPTVIVGGKYQVEFKDWQSGMTTIDQLVDKVREEQKKPQ

SEQ ID NO: 10638 - protein, 291 aa, Neisseria meningitidis; identical to SEQ ID NO: 8637

SEQ ID NO: 10639 - protein, 263 aa, Neisseria meningitidis
MITVNTLQKMKAAGEKIAMLTAYESSFAALMDDAGVEMLLVGDSLGMAVQGRKSTLPVSLRDMCYHTECVARGAKNAMIVSDLPFGAYQQSKEQAFAAAAELMAAGAHMVKLEGGVWMAETTEFLQMRGIPVCAHIGLTPQSVFAFGGYKVQGRGSKAQALLNDAKAHDDAGAAVVLMECVPAELAKKVTESVSCPTIGIGAGADCDGQVLVMHDMLGIFPGKTAKFVKNFMHGQSSIQAAVRAYVAEVKAKTFPAAEHIFAD

SEQ ID NO: 10640 - protein, 321 aa, Neisseria meningitidis; identical to SEQ ID NO: 3510

SEQ ID NO: 10641 - protein, 395 aa, Neisseria meningitidis; identical to SEQ ID NO: 9319

SEQ ID NO: 10642 - protein, 369 aa, Neisseria meningitidis; identical to SEQ ID NO: 9819

SEQ ID NO: 10643 - protein, 117 aa, Neisseria meningitidis; identical to SEQ ID NO: 408

SEQ ID NO: 10644 - protein, 485 aa, Neisseria meningitidis; identical to SEQ ID NO: 3359

SEQ ID NO: 10645 - protein, 162 aa, Neisseria meningitidis
MMSNKMEQKGFTLIEMMIVVAILGIISVIAIPSYQSYIEKGYQSQLYTEMVGINNTVKQVILKNPLDDNQTIKSKLEIFVSGYKMNPKIAKKYSVSVRFVDKEKSRAYSLVGVPKAGTGYTLSVWMNSVGDGYKCRDAASARAYSETLSADAGCEAFSNRKK

SEQ ID NO: 10646 - protein, 481 aa, Neisseria meningitidis
METLMDTQTYNYKVVRQFAIMTVVWGIVGMLVGVIVAAQLFAPALDLSNIGPWFHFGRLRPLHTNAVIFAFGGCGLIGTSYYVVQRTCNTRLFGGWLPAFTFWGWQAVIVAAVVSFPMGWTQGKEYAELEWPIDILITLVWVAYAIVFFGTIAKRKIKHIYVANWFYGGFILAVALLHIVNNISIPAGLMKSYPVYSGAIDAMVQWWYGHNAVGFFLTAGFLGMMYYFVPKQAARPVYSYRLSVVHFWALIFTYMWAGPHHLHYTALPDWTQSLGMVLSLILFAPSWGGMINGIMTLSGAWDKLRTDPILKFLIVSLSFYGMSTFEGPMMSIKTVNALSHYTDWTVAHVHAGALGWVGFVTIGSVYYMIPRLFGKEQMHSTKLVEAHFWIATIGVVLYIAAMWIAGVMQGLMWSSLNDDGTLTYSFVESVKRTMPYYVIRFAGGLLYLSGMCIMAYNVYRTAIGGKAVDAEIPAVSQTQHH

SEQ ID NO: 10647 - protein, 262 aa, Neisseria meningitidis; identical to SEQ ID NO: 8401

SEQ ID NO: 10648 - protein, 512 aa, Neisseria meningitidis; identical to SEQ ID NO: 9162

SEQ ID NO: 10649 - protein, 484 aa, Neisseria meningitidis; identical to SEQ ID NO: 8676

SEQ ID NO: 10650 - protein, 222 aa, Neisseria meningitidis; identical to SEQ ID NO: 7986

SEQ ID NO: 10651 - protein, 97 aa, Neisseria meningitidis; identical to SEQ ID NO: 4307

SEQ ID NO: 10652 - protein, 178 aa, Neisseria meningitidis; identical to SEQ ID NO: 1831

SEQ ID NO: 10653 - protein, 96 aa, Neisseria meningitidis
LKVPAKRYFTLDELCGLLQISPYGFAQWQHDYGVVVGYGGERYTRLDVVKLLKLQSTFAPYAEGAESGSDGNRPVTLQEIGDGLKELLADLDKELC

SEQ ID NO: 10654 - protein, 99 aa, Neisseria meningitidis; identical to SEQ ID NO: 1110

SEQ ID NO: 10655 - protein, 145 aa, Neisseria meningitidis; identical to SEQ ID NO: 3684

SEQ ID NO: 10656 - protein, 324 aa, Neisseria meningitidis; identical to SEQ ID NO: 3192

SEQ ID NO: 10657 - protein, 407 aa, Neisseria meningitidis
MSAQSQNNHTSPLIVLTTLFFMMGFITCMNDILIPHLKEIFDLSYVQAMLIQFCFFTAYAVMSIPMGAFVGKVGYKNGVIGGFLLTAVGCLLFYPAAGSHSYAVFLGALFILASGVTLLQVAGNPYVTLLAKPGKESATLTLVQAFNALGTTIAPQIGAFLILADATQTVSKAEQISSVQIPYLGLAGLLIILAVFVKMIRLPDARKIAAEESAHNHDGKTSVWQYKHLVFGTAGIFCYVGAEVSIGSLMVNVLGYLKGLDHASAAHYLSFYWGGAMVGRFLGSAVMAKFAPNRYLAFNASAAVVLLAVAMATGSGNADVAMWSLLAIGFFNSIMFPTIFSLATKGLGKFTNAASGVLCTAIVGGAVVPVVQGWVADTYTLMSSFVVSVICYLYIVFFAVYGYRADK

SEQ ID NO: 10658 - protein, 160 aa, Neisseria meningitidis
LKPAVCRSKTMNIEVEMKVLDERMADVVPVYATKGSAGLDLRACLDEEVVLQPGETFLVPTGLAIYLANPAYAAVLLPRSGLGHKHGIVLGNLVGLIDSDYQGELKVSLWNRSSEPFTVKPFERIAQMVVVPIVQARFKRVEEFVGSSRGEGGFGSTGLH

SEQ ID NO: 10659 - protein, 278 aa, Neisseria meningitidis
MQIIHTIRELRAWRKNAGKVAFVPTMGNLHEGHLALVREAKKRADNVVVSIFVNRLQFGQGEDFDKYPRTLQQDADKLEAEGVAVVFAPDEKELYPNVEQRYSVEPPNLQNELCGKFRPGHFLGVATVVSKLFNIVAPDVACFGKKDYQQLAVIKGLTEDLNFDVEIVPVDTGRAEDGLALSSRNQYLSAAERDEAPRLYRELKAVAESLAQGSLDYAGLEKRAVQSLTEYGWVVDYVEIRRADTLEVARAGDKKLVVLAAARLGTTRLIDNLEIKLP

SEQ ID NO: 10660 - protein, 307 aa, Neisseria meningitidis
MPSEHPFSDGISTPNPKETMNDTAQITASYGRRYIVRTPDGTTYEASTRKKRVDFACGDRVRISPVNAEQVVIEDFLPRQSLLYRQDAWKTKLIAANVTQLLIVTAAVPSPSMRLLQRALLAAEAAGIEAVIVLNKADLPETALWREKLKFYETLGYPVIETRALENADLLRPVLQGHSNILLGQSGMGKSTLTNALLGSQTARTGDISAALDSGKHTTTHARLYDLNGETQLIDSPGLQEFGLHHLQAADLPRYFPDFRHLVGQCRFHNCTHRAEPGCAFKAAAETGAASPERLAFLQGITDELPG

SEQ ID NO: 10661 - protein, 408 aa, Neisseria meningitidis
LRGQNPEMAERVRFLSESAIKCRLKTNMPTMGAEMNTRNMRYILLTGLLPMASAFGETALQCAALTDNVTRLACYDRIFAAQLPSSAGEGQESKAVLNLTETVRSSLDKGEAVIVVEKGGDALPADSAGETADIYTPLSLMYDLDKNDLRGLLGVREHNPMYLMPLWYNNSPNYAPGSPTRGTTVQEKFGQQKRAETKLQVSFKSKIAEDLFKTRADLWFGYTQRSDWQIYNQGRKSAPFRNTDYKPEIFLTQPVKADLPFGGRLRMLGAGFVHQSNGQSRPESRSWNRIYAMAGMEWGKLTVIPRVWVRAFDQSGDKNDNPDIADYMGYGDVKLQYRLNDRQNVYSVLRYNPKTGYGAIEAAYTFPIKGKLKGVVRGFHGYGESLIDYNHKQNGIGIGLMFNDLDGI

SEQ ID NO: 10662 - protein, 187 aa, Neisseria meningitidis; identical to SEQ ID NO: 8603

SEQ ID NO: 10663 - protein, 114 aa, Neisseria meningitidis; identical to SEQ ID NO: 1818

SEQ ID NO: 10664 - protein, 275 aa, Neisseria meningitidis; identical to SEQ ID NO: 67

SEQ ID NO: 10665 - protein, 424 aa, Neisseria meningitidis; identical to SEQ ID NO: 8842

SEQ ID NO: 10666 - protein, 296 aa, Neisseria meningitidis; identical to SEQ ID NO: 337

SEQ ID NO: 10667 - protein, 124 aa, Neisseria meningitidis; identical to SEQ ID NO: 2713

SEQ ID NO: 10668 - protein, 216 aa, Neisseria meningitidis; identical to SEQ ID NO: 9694

SEQ ID NO: 10669 - protein, 725 aa, Neisseria meningitidis
MTRFKYSLLFAALLPVYAQADVSVSDDPKPQESTELPTITVTADRTASSNDGYTVSGTHTPLGLPMTLREIPQSVSVITSQQMRDQNIKTLDRALLQATGTSRQIYGSDRAGYNYLFARGSRIANYQINGIPVADALADTGNANTAAYERVEVVRGVAGLLDGTGEPSATVNLVRKRPTRKPLFEVRAEAGNRKHFGLGADVSGSLNTEGTLRGRLVSTFGRGDSWRQRERSRDAELYGILEYDIAPQTRVHAGMDYQQAKETADAPLSYAVYDSQGYATAFGPKDNPATNWANSRHRALNLFAGIEHRFNQDWKLKAEYDYTRSRFRQPYGVAGVLSIDHNTAATDLIPGYWHADPRTHSASVSLIGKYRLFGREHDLIAGINGYKYASNKYGERSIIPNAIPNAYEFSRTGAYPQPASFAQTIPQYGTRRQIGGYLATRFRAADNLSLILGGRYSRYRTGSYDSRTQGMTYVSANRFTPYTGIVFDLTGNLSLYGSYSSLFVPQSQKDEHGSYLKPVTGNNLEAGIKGEWLEGRLNASAAVYRARKNNLATAAGRDLSGNTYYRAANQAKTHGWEIEVGGRITPEWQIQAGYSQSKTRDQDGSRLNPDSVPERSFKLFTAYHFAPEAPSGWTIGAGVRWQSETHTDPATLRIPNPAAKARAADNSRQKAYAVADIMARYRFNPRAELSLNVDNLFNKHYRTQPDRHSYGALRTVNAAFTYRFK

SEQ ID NO: 10670 - protein, 395 aa, Neisseria meningitidis; identical to SEQ ID NO: 2182

SEQ ID NO: 10671 - protein, 135 aa, Neisseria meningitidis; identical to SEQ ID NO: 2191

SEQ ID NO: 10672 - protein, 108 aa, Neisseria meningitidis
MIVFKSFYRSINMTIRPLHDRVVVKRLEAEEKTASGIVLPGAAAEKPDMGEVIAVGAGKIGKDGARRPLDVKVGDKIIFGKYSGQTVKADGEELLVMREEDIFGIVEK

SEQ ID NO: 10673 - protein, 125 aa, Neisseria meningitidis; identical to SEQ ID NO: 3172

SEQ ID NO: 10674 - protein, 249 aa, Neisseria meningitidis; identical to SEQ ID NO: 2006

SEQ ID NO: 10675 - protein, 70 aa, Neisseria meningitidis; identical to SEQ ID NO: 5197

SEQ ID NO: 10676 - protein, 514 aa, Neisseria meningitidis; identical to SEQ ID NO: 3437

SEQ ID NO: 10677 - protein, 1069 aa, Neisseria meningitidis
MFYLYQSNRLETLAALFARIQKVKPLKSALQPEQIIVQSQGMRRYLNTCLARDLGVAANLSFSLPAGLTWKLMKKLIPGIPELSPFAPEVMRWRLLDLFRSEAFRNTAEFEDVRNVLQDYLGSGESADYQLAGQLADIFDQYLVYRPQWIDAWQQGRRLGLGDDEIWQSKLWRYLDDGRQSAPHRVALWEKLLAALDKDKLPERYFVFGISTMAPMYLQLLHKLSEHCDVFVFALNPSGMYWGNVIEAAQILKGGGDPDLTQAGHPLLASLGKQGRDFFDFLNEMEIEGETPVFEEGGRDTLLHALQTDIQNLKMPSENVGSVNTGDGSIRIVSAHSPLRELQILKDKLLKILHEHPDWQPHDIAVLTPHIESYTPFIEAVFGQAQPGAQALPYSVSDVKISRRQPLFHALSCLFDLLESRFEVDKVLVLLETAPVLRRFGLTEDDLPLLHDMVADLNVHWGLDGEMRGGTDQLFTWKQAVERMILGWMLPEGGNPMWQDVSAWYADVNQTALFGRFAALLETLSDIVRIWRQPATIGEWVARCRDLLETLFQAEADDQKSVQNLENEWVKWQAETELAQFSGQLPQQTVIRHIRRFLDSESEAGFLRGGITFCSMVPMRSLPFKVICLLGLNDGDFPRNTKAAVFDLIAKHPAKGDRARRDDDRYLFLEALISAREILYLSYIGRDIRKDEELAPSSLLGELIDTVAAMAGIGSRQLAQNWIEQHPLQAFSRRYFQEGGRSDGIFGTRTDYATALGQTPEPPQPFFDQPVENAEPVAEIGQDEFIRFWRNPVKVWLQQQLAWSEPHIGEAWEPAEPFEPQHADQIAETYIEARREGRDFAQTAARIGAESLLPSGELGRLWQQNFQTAAKQIDTAVLNSPKLPPLSYAIPSDGQILKGSLGNLYRCGQVFYAYGKPNAPQRIAFLLEHLIFCAVMPSEAETRQTFIVQSGETEILAEIAQDRALQLLSEWMAFFNIGQNRPLPFFAKTSLAAAEAFAQKQDWEAALKKAQTAYYGNKVSKGQKDYTEVALVFGNASQNPLEQPLFENLARLLADTLAAAEKREGAGAA

SEQ ID NO: 10678 - protein, 421 aa, Neisseria meningitidis; identical to SEQ ID NO: 9018

SEQ ID NO: 10679 - protein, 1389 aa, Neisseria meningitidis
MTDTAPTDTDPTENGTRKMPSEHRPTPPAKKRRPLLKLSAALLSVLILAVCFLGWLAGTEAGLRFGLYQIPSWFGVNISSQNLKGTLLDGFDGDNWSIETEGADLKISRFRFAWKPSELMRRSLHITEISAGDIAIVTKPTPPKEERPPLSLPDSIDLPAAVYLDRFETGKISMGKAFDKQTVYLERLDASYRYDRKGHRLDLKAADTPWSSSSGSASVGLKKPFALDTAIYTKGGLEGKTIHSTARLSGSLKDVRAELAIDGGNIRLSGKSVIHPFAESLDKTLEEVLVKGFNINPAAFVPSLPDAGLNFDLTAIPSFSDGIALEGSLDLENTKAGFADRNGIPVRQVLGGFVIRQDGTVHIGNTSAALLGRGGIRLSGKIDTEKDILDLNIGINSVGAEDVLQTAFKGRLDGSIGIGGTTASPKISWQLGIGTARTDGSLAIASDPANGQRKLVLDTVNIAAGQGSLTAQGYLELFKDRLLKLDIRSRAFDPSRINPQLPAGNINGSINLAGELAKEKFTGKMRFLPGTFNGVPIAGSADIVYESRHLPRAAVDLRLGRNIIKTDGGFGKKGDRLNLNITAPDLSRFGFGLAGSLNVRGHLSGDLDGGIRTFETDLSGAARNLHIGKVADIRSLDFTLKGSPDTSRPIRADIKGSRLSLSGGAAVVDTADLMLDGTGVQHRIRTHAAMTLDGKPFKFDLDASGGINRELTLWKGSIGILDIGGAFNLKLQNRMTLEAGAERVAASAANWQAMGGSLNLQHFSWDRKTGISAKGGARGLHIAELHNFFKPPFEHNLVLNGDWDVAYGRNARGYLNINRQSGDAVLPGGQALGLNAFSLKTRFQNDRIGILLDGGARFGRINADLDIGNAFGGNMANAPLGGRITASLPDLGTLKPFLPAAAQNITGSLNAAAQIGGRVGSPSVNAAVNGSSNYGKINGNITVGQSRSFDTAPLGGRLNLTVADAEVFRNFLPVGQTVKGSLNAAVTLGGSIADPHLGGSINGDKLYYRNQTQGIILDNGSLRSHIAGRKWVIDSLKFRHEGTAELSGTVGMENSGPDVDIGAVFDKYRILSRPNRRLTVSGNTRLRYSPQKGISVTGMIKTDQGLFGSQKSSMPSVGDDVVVLGEVKKEAAAPLPVNMNLTLDLNDGIRFAGYGADVTIGGKLTLTAQSGGSVRGVGTVRVIKGRYKAYGQDLDITKGTVSFVGPLNDPNLNIRAERRLSPVGAGVEILGSLNSPRITLTANEPMSEKDKLSWLILNRAGSGSSGDNAALSAAAGALLAGQINDRIGLVDDLGFTSKRSRNAQTGELNPAEQVLTVGKQLTGKLYIGYEYSISSAEQSVKLIYRLTRAIQAVARIGRRSSGGELTYTIRFDRFSGSDKKDSAGNGKGK

SEQ ID NO: 10680 - protein, 490 aa, Neisseria meningitidis; identical to SEQ ID NO: 7973

SEQ ID NO: 10681 - protein, 156 aa, Neisseria meningitidis; identical to SEQ ID NO: 681

SEQ ID NO: 10682 - protein, 225 aa, Neisseria meningitidis; identical to SEQ ID NO: 1002

SEQ ID NO: 10683 - protein, 178 aa, Neisseria meningitidis; identical to SEQ ID NO: 5654

SEQ ID NO: 10684 - protein, 97 aa, Neisseria meningitidis; identical to SEQ ID NO: 2609

SEQ ID NO: 10685 - protein, 336 aa, Neisseria meningitidis
MLPFFPEPSLSYTQQNRTAVLLLNLGTPDAPTAQAVRPYLKSFLTDRRVVELPKWLWYPILHGLVLTLRPKKSAHAYEKIWFKEGSPLEVYTARQAAALAKRMPDLIVRHAMTYGNPSVADVLSELKAQGAGRLLVIPMYPQYAASSSGAAVDKVCEQLLLQRNQMSVRTVSRFYDDTGYIDAMKNHILRYWAEHGRGKKLMLSFHGVPQKHHDLGDPYPDECRHTAKLLAEALELTEDQYVVSFQSQFGRAKWVTPSTQDLFGKLPKQGVTELDVFCPGFLADCLETMEEIALMGREQFYEAGGKSYRYIPCLNDNPDWIDALVALAEENLGGWR

SEQ ID NO: 10686 - protein, 498 aa, Neisseria meningitidis
MFSNYLLSLAIWIPIAAGVLVLSTGKDSRAPLARVLAFMGALAGFLVTLPLFTGFDRLSGGYQFTEFHEWIPLLKINYALGVDGISVLFIILNAFITLLVVLAGWEVIQKRPAQYMAAFLMMSGLINGAFAAQDAILFYVFFEGMLIPLYLIIGVWGGPRRVYASVKLFLYTLMGSLLMLVAMVYLYYQTGSFSIVDFQNIKQIPLGVQQLLFAAFFLSFAVKVPMFPVHTWLPDAHVEAPTGGSMVLAAITLKLGAYGFLRFILPIMPDAARYFAPVIIVLSLIAVIYIGMVALVQTDMKKLVAYSSISHMGFVTLGMFLFVNGQLNDWALKGAIIQMISHGFVSAAMFMCIGVMYDRLHTRNIADYGGVVNVMPKFAAFMMLFGMANAGLPATSGFVGEFMVIMGAVKVNFWVGALAAMTLIYGASYTLWMYKRVIFGAIHNPHVAEMKDINCREFAILAILAVVVLGMGLYPNAFIEVVHQAANDLIAHVAQSKI

SEQ ID NO: 10687 - protein, 328 aa, Neisseria meningitidis; identical to SEQ ID NO: 2126

SEQ ID NO: 10688 - protein, 201 aa, Neisseria meningitidis; identical to SEQ ID NO: 291

SEQ ID NO: 10689 - protein, 642 aa, Neisseria meningitidis; identical to SEQ ID NO: 9709

SEQ ID NO: 10690 - protein, 351 aa, Neisseria meningitidis; identical to SEQ ID NO: 8449

SEQ ID NO: 10691 - protein, 318 aa, Neisseria meningitidis; identical to SEQ ID NO: 2723

SEQ ID NO: 10692 - protein, 460 aa, Neisseria meningitidis; identical to SEQ ID NO: 881

SEQ ID NO: 10693 - protein, 303 aa, Neisseria meningitidis
LFDLEVALRRVLSAAPTVQDTQIEQYNQLTQIMHRTLDPKDVKGNSIGGLLIHIGSGTKDEHIRTMSNRPVQQDDHGGTQAPPSGYSFLRKEAFLYIVGHHVIFCGHGFLSASTVASYLSLLSNKLRENNPDIVQFNIEFKAVGNCDKLSLIQQHGVKSILLDVSAYQLSRNRLYQDSRSTIAKALGKVGSVFTSELSDEELEAQSEIHINLEVLLNGNSRASIEAQSLMQEQAEEIIDDETVNQGFSITTQQGEVIQPSDVKLSKSVRIGRYDEANSLLPDSAFTAISEYFLELQSRNLTEQ

SEQ ID NO: 10694 - protein, 186 aa, Neisseria meningitidis; identical to SEQ ID NO: 9740

SEQ ID NO: 10695 - protein, 200 aa, Neisseria meningitidis; identical to SEQ ID NO: 321

SEQ ID NO: 10696 - protein, 431 aa, Neisseria meningitidis
MAQKIQSVKGMNDLLPVEQKDFKLTAAFWQAFEDTVNRWTRAYGYRQIRTPIVEQTGLFVRSIGEETDVVGKEMYTFSDSNDSLSLSLRPEGTASCLRAVVEHNLLYNSPQKLWYMGPMFRRERPQKGRYRQFHQVGIEALGFEGPDIDAEIIAMSADLWEKLGIREYLTLEINSLGNREERAAHRAALVEYLTRYEDKLDEDSKRRLKTNPLRVLDTKNPDLQEICNAAPRLVDYLGEASQNHYARFKAMLDGLGIQYIENPRLVRGLDYYNQTVFEWTTDKLGAQATVCGGGRYDGLIEELGGKPAPSIGFAMGIERLLLLVSEYGSLEVNAAPDVYAMHQGERADLQVMKYAQALRTQGFNVMQHSGYQSLKAQMKKADNSGARFALIVAQDELANGTVTLKDMNGAHGQQTVAAEDLTHTLQQWKNA

SEQ ID NO: 10697 - protein, 298 aa, Neisseria meningitidis
MFRLQFGLFPPLRTAMHILLTALLKCLSLLPLSCLHTLGNRLGHLAFYLLKEDRARIVANMRQAGMNPDPKTVKAVFAETAKGGLELAPAFFRKPEDIETMFKAVHGWEHVQQALDKHEGLLFITPHIGSYDLGGRYISQQLPFPLTAMYKPPKIKAIDKIMQAGRVRGKGKTAPTSIQGVKQIIKALRSGEATIVLPDHVPSPQEGGEGVWVDFFGKPAYTMTLAAKLAHVKGVKTLFFCCERLPGGQGFDLHIRPVQGELNGDKAHDAAVFNRNAEYWIRRFPTQYLFMYNRYKMP

SEQ ID NO: 10698 - protein, 188 aa, Neisseria meningitidis
MSLYALLLIALGMSMDAFAVALAKGAAVRMPPRKIAATALVFGTVEALTPLAGWVGGFYAKPFISEWDHWAAFVLLGGLGLKMMHEGLSGEAEDARENKRESWWLTVLTAFGTSIDSMIVGVGLAFMEVNIAFAAAIIGMATTVLVAVGLTVGRALGVLFGRRAEFAGGLVLIAIGTWTLLSHLGLIG

SEQ ID NO: 10699 - protein, 278 aa, Neisseria meningitidis
MIDLHCHSIVSDGMLSPAEVVRLAHQNGCTLLALTDHDHTGGIAEARAEADRLGLRLINGVEISVTWRGRTIHVVGLDFDEQDENLQNLLAQVRQGRLKRLEAIAAKLEKRGISGAYDGALALAANKEMVSRTHVAEFLIRVGHVKNKQQAFTKYLGDGKSCAVRHEWATLEDCVSAVNGAGGLAVIAHPMRYDLSATAKRNLFEEFKNLGGAGIEVHSGNCCKNDRLNYALLAERFGMLASAGSDFHRLNDFSGGILGACPELPENCRPVWAHFSRY

SEQ ID NO: 10700 - protein, 101 aa, Neisseria meningitidis
MRVSKIIGSMLLVTAVQTVFSANVYACRHNGKTSYSQTPGKHCTNAGLGRDLVYSSVRPAVKDRAEDAGADDHLDSVRDEHVQNPRENTHKDASNTGAKTH

SEQ ID NO: 10701 - protein, 258 aa, Neisseria meningitidis; identical to SEQ ID NO: 9233

SEQ ID NO: 10702 - protein, 93 aa, Neisseria meningitidis; identical to SEQ ID NO: 2125

SEQ ID NO: 10703 - protein, 876 aa, Neisseria meningitidis
MQEHYQPAAIEPAAQKKWDDARIFNVSEDASKPKYYCLSMFPYPSGKLHMGHVRNYTIGDVLSRFKLLNGFNVMQPMGWDAFGMPAENAAMKNNVAPAAWTYDNIEYMKTQLKSLGFAIDWARETATCKPEYYRWEQWLFTKLFEKGIVYRKNGTVNWDPVDQTVLANEQVIDGRGWRSGALIEKREIPMYYFKITDYAEELLNDLDKLEHWPEQVKTMQRNWIGKSRGMTVRFAVSDDSKQGLEGDYAKLLQVYTTRPDTLMGATYVAVAAEHPLAAAAAADKPELQAFIAECKAGSVAEADMATMEKKGVPTGRYVVNPLNGDKLEVWIANYVLWGYGDGAVMAVPAHDERDFEFAAKYNLPKKQVIAVGDNAFDANRWQEWYADKENGVLVNSGDLDGLDFQTAFDAVAAKLQSQGAGEPKTQYRLRDWGISRQRYWGCPIPIVHCEQCGDVPVPADQLPVVLPENVVPDGMGSPLAKMPEFYETACPCCGGAAKRETDTMDTFMESSWYFFRYMSPKFSDGMVDPAAAKYWGAVDQYIGGIEHAILHLLYARFFTKLMRDEGLVNVDEPFERLLTQGMVVCETYYRENDKGGKDWINPADVELTFDDKGRPISAVLKADGLPVVISGTEKMSKSKNNGVDPQELINAYGADTARLFMMFAAPPEQSLEWSDSGVEGAHRFLRRLWRTVYEYLKQGEAVKAFAGSQDGLSKELKDLRHKLHATTAKVSDDYGRRQQFNTAIAAVMELLNQYDKTDTGGEQGRAVAQEVLETAVRLLWPIVPHICETLWSELNGAKLWEAGWPTVDEAALVKSEIEVMVQVNGKLRGKITVAADASKADLEAAALATEGAVKFMEGKPAKKIIVVPGRLVNIVV

SEQ ID NO: 10704 - protein, 234 aa, Neisseria meningitidis; identical to SEQ ID NO: 1195

SEQ ID NO: 10705 - protein, 570 aa, Neisseria meningitidis; identical to SEQ ID NO: 8375

SEQ ID NO: 10706 - protein, 94 aa, Neisseria meningitidis; identical to SEQ ID NO: 10479

SEQ ID NO: 10707 - protein, 228 aa, Neisseria meningitidis; identical to SEQ ID NO: 380

SEQ ID NO: 10708 - protein, 121 aa, Neisseria meningitidis; identical to SEQ ID NO: 8424

SEQ ID NO: 10709 - protein, 318 aa, Neisseria meningitidis; identical to SEQ ID NO: 2723

SEQ ID NO: 10710 - protein, 383 aa, Neisseria meningitidis; identical to SEQ ID NO: 8491

SEQ ID NO: 10711 - protein, 143 aa, Neisseria meningitidis; identical to SEQ ID NO: 362

SEQ ID NO: 10712 - protein, 127 aa, Neisseria meningitidis
MTFAYWCILIACLLPLFCAAYAKKAGGFRFKDNHNPRDFLARTQGTAARAHAAQQNGFEAFAPFAAAVLTAHATGNAGQATVNTLAGLFILFRLAFIWCYIADKAALRSLMWAGGFACTVGLFVAAA

SEQ ID NO: 10713 - protein, 268 aa, Neisseria meningitidis
MSTFFRQTAQAMIAKHIDRFPLLKLDQVIDWQPIEQYLNRQKTRYLRDHRGRPACPLLSMFKAVLLGQWHSLSDPELEHSLITRIDFNLFCRFDELSIPDYSTLCRYRNWLAQDDTLSELLELINRQLTEKGLKIEKASAAVVDATIIQTAGSTQRQAIEVDEEGQINGQTTPSKDKDARWIKKNGLYKLGYKQHTRTDAEGYIEKLHITPANAHECKHLSPLLEGIAESTTVYADKGYDSAENRQHLKEHQLLDGIMRGQPISDCSK

SEQ ID NO: 10714 - protein, 485 aa, Neisseria meningitidis
MSRHPAPTGEKTFFGHPFQLSTLFHIELWERFSFYGMQGILLIYLYYTADKGGLGIDKTLAGGIVGAYSGSVYLSTILGAWFADRVWGAEKTLFLSGIVVMLGHIVLAAAPGLYGLLIGLIFIALGSGGVKSTASSMVGALYEQDEMRPLRDAGFSIFYIAINIGGFLGPLLTGLLQENIGFHYGFGAAAVGMAFGLWRYSLGRKNLPHPIVPHPLSKGQGKTAAAVGIALIAALATAIKTGLVNLDNFSGILLSTVILAVIAYFARLLTNPRVSSDNKRHIIAYIPLFLTICMFWAVWFQIYTVATVYFDETVNRTIGSFTVPVAWKDSMQSLWVILFSGLMAAMWTKMGRKQPKTPLKFAMAVFVTGASFLGFIPFISAGTPMPIAVFALIVLAITIGELMISPIALSISTKIAPPLFKTQMVALNFLAFSLGFTLGGVLFEKCYQAGDEIGFYRLLFYIGAATGFLLLLLVPKLNKMLEGTD

SEQ ID NO: 10715 - protein, 258 aa, Neisseria meningitidis; identical to SEQ ID NO: 9376

SEQ ID NO: 10716 - protein, 166 aa, Neisseria meningitidis; identical to SEQ ID NO: 1704

SEQ ID NO: 10717 - protein, 74 aa, Neisseria meningitidis; identical to SEQ ID NO: 2281

SEQ ID NO: 10718 - protein, 418 aa, Neisseria meningitidis; identical to SEQ ID NO: 8075

SEQ ID NO: 10719 - protein, 332 aa, Neisseria meningitidis; identical to SEQ ID NO: 8882

SEQ ID NO: 10720 - protein, 344 aa, Neisseria meningitidis
MQTLTIIRPDDMHLHLRDGDALKAVVPYTARQMGRAVIMPNLKPPVVSVADALAYKARIMAALPEGSAFEPLMTLYLTDQATPELVREAKAAGIVAFKLYPAGATTNSDSGVTDLFKLIPVLEEMAKQDILFLVHGEVTDPEIDIFDREAAFIERVMKPVLAQVPNLKVVFEHITTAEAARLVLEAGDNVAASVTPQHLLLNRNDLLVGGVRPHHFCLPVLKRETHRQALVAAVTGEKAHKFFLGTDSAPHAKSAKENACGCAGMFSAMTAVELYAEVFEKAGALDKLEAFASKNGARFYGIPENTDTITLVKQSQTVPASVPYGDGELVPMRAGGEIGWMVQY

SEQ ID NO: 10721 - protein, 100 aa, Neisseria meningitidis; identical to SEQ ID NO: 2893

SEQ ID NO: 10722 - protein, 587 aa, Neisseria meningitidis
VKPLRRLTNLLAACAVAAAALIQPALAADLAQDPFITDNTQRQHYEPGGKYHLFGDPRGSVSDRTGQINVIQDYTHQMGNLLIQQAAIQGNLGYTVRFSGHGYEEHAPFDNHAADSASKEQGNVDDGFTVYRLNWEGHEHHPADAYDGPKGGNYPKPTGARDEYTYHVNGTARSIKLNPTDTRSIRQRISDNYNNLGSNFSDRADEANKKIFEHNAKLDRWGNSMEFVNGIAAGALNPFISAGEALGIGDILYGTRYAIDKAAMRNIAPLPTEGKFAVIGGLGSVAGFEKNTREAVDRWIQENPNAAETVEALVNVLPFAKVKNLTKAAKPGKAAVSGDFSKSYTCSFHGSTLVKTADGYKAIAHIRVGESVFAKDETSGKTGYKPVTARYGNPYQETVYIEISDGIGNSQTLISNRIHPFYSQGKWIQAGRLKKGDTLLSESGAKQTVQNITLKQQPLKAYNLTVADWHTYFVKGNQAETEGVWVHNDCPYGEKYRTEVGSYTNTHESGRTYSGKGTRQRSQISGAREARVNNDPHIATDFTPAKNNREAFKDESRRIDAHGGSKSTNNYNRIESPGKKYRKQDGD

SEQ ID NO: 10723 - protein, 284 aa, Neisseria meningitidis; identical to SEQ ID NO: 3000

SEQ ID NO: 10724 - protein, 684 aa, Neisseria meningitidis
MSSNYFFSAIDESLITSNNSLSMFLNNLKNYSLDQKNHIFVIQAPLANNKYIYTYKDVVIVLIAKKKIAFINFGDTDSFETFREDFIEDLNAISDKYEYKSKIGRPRDWKTIFKNFSLDELVSNDIQNFVKNIEISSEREQRLSELIISLLTGSINDIEKIDGLNIQDNILDKIKKKIILFDSNQTNFLYQNKNQKKIIIQGLSGTGKTELLLHKLKELYLESDNNRIFFTCNNKILAESLRNRIPRFFNFMQVSQQIDWDNRLWCNHAWGSGKNKNSGLYSFICHFYGIPFLNYAQESSFSKICSMAIEQIKSNSDNLNKYAFDYILIDESQDFGESFFELCSLVTKHKIYIAGDIFQSIFGEQKIYDHVDYLLNQCYRTDPKTLMFSHGLSMGLFESEKLQWLTDQQWEQYGYIFQKNNNRYIFTREPIRRFEDLKDNDNSIHIENIKELNNSQISDKIVELIMDIKSKYPSVQPDDIAIIFLEQNRRYNSEMLNYIRYTLEEKGIDWPINPAFESKQQLTGYLSITNFNHVKGLEFPFVICISPYEVTADLRKRNAIYMAMTRSFLHSSLLMPVSTDNFFLYSRGLNEINSTKRMTIEEPNEENKNRIREINIQFDGSHSFKDIVIEILDSFPKSSSITDKDREWCIQGVLRSLGETYDKNAIKSHLKPLIDYIQGERNES

SEQ ID NO: 10725 - protein, 1306 aa, Neisseria meningitidis
LNYIIAFSNPPETEFSDGIQIKTAKHGHTMTTTTAPQRIREIPYNYTSYTDREIVIRLLGDEAWQILQDLRGQRKTGRSARMLFEVLGDIWVVVRNPYLVDDLLEHPKRRAALVREMRHRLNEIRKRRDDNRQVDVLVAAAEKAVERFDSSFDETSQKRRQILERLSKITKPHNIMFDGLARVTHVTDATDWRVEYPFVVVNPDTEAEVAPLVRALIELDLVIIPRGGGTGYTGGAIPLDAMSAVINTEKLDKHRGVEYVELAGLDGKHPIIRCGAGVVTRRVEETAHQAGLVFAVDPTSADASCVGGNVAMNAGGKKAVLWGTALDNLAYWQMVNPQGEWLRIERVRHNFGKIHDEETAVFDVHTLDSDGLNIVKTERLEIPGHKFRKVGLGKDVTDKFLSGLPGVQKEGTDGIITGVAFVLHKMPKYTRTVCMEFFGTVATATPSIVEIRDFLLAHDSVRLAGLEHLDWRYVRAVGYATKAAGKGRPKMVLLADVVSDDEAAVEAAAEHICELARARDGEGFIAVSPEARKTFWLDRSRTAAIAKHTNAFKINEDVVIPLERLGEYSDGIERINIELSIQNKLKLCAALEQYLSGKLPIDKMGTDLPTAELLGERGKHALAHVAAVKERWDWLLANLDTPLADYKARYGAAVHAAPEAKDNESCFTAFRDFRLRVSVKADVMKPLAEIFSGKTDTKIIQGLGKIHAKTVRGRVFVALHMHAGDGNVHTNIPVNSDDAEMLQTAYRSVERIMKIARSLGGVISGEHGIGITKLEFLSDEEMQPFWDYKNQVDPKHTFNRHKLMKGSDLRNAYTPSFELLGAESLIMEKSDLGTIADSVKDCLRCGKCKPVCSTHVPRANLLYSPRNKILGVGLLTEAFLYEEQTRRGVSVKHFEELMDIGDHCTVCHRCVKPCPVNIDFGDVTVAVRNYLADSGHKRFAPAAAMGMAFLNATGPKTIKALRAAMIQTGFPAQNFAYKIGKLLPIGTKKQKAEPKATVGKAPIKEQVIHFINRPLPKSVPAKTPRSLLGIEDGKSIPIIRNPAAPEDAEAVFYFPGCGSERLFSQIGLAVQAMLWHVGVQTVLPPGYMCCGYPQDAGGNKAKAEEMSTNNRVAFHRMANTLNYLDIKTVVVSCGTCYDQLEKYRFEEIFPGCRIIDIHEYLLEKGVKLDGVQGQQYLYHDPCHTPIKTMNATQMASSLMGQKVVLSDRCCGESGMFAVKRPDIATQVKFRKQEEIEKNLKELPQGEPVKMLTSCPACLQGLSRYTDDNNMPADYIVIEMAKHILGENWLDEFVKKANNGGVEKVLL

SEQ ID NO: 10726 - protein, 214 aa, Neisseria meningitidis
LMKLYIYDHCPFCVRARMAAGLFGADVEEAVLANDDEATPIGMIGAKQVPVLQKEDGSFMGESLDIVRHFDREDRLKDEVRPEIRAWLDKVGGYNDKLVQPRVIKIGLPEFATPEAVKYFTDKKEKSIGSFSANLNKTAQYLERINADLQELENLMDGASDGINGGIGMEDILVFPVLRNLTVVRGIEWPQKVMGYLMMMSEKSGVPLYFDRAL

SEQ ID NO: 10727 - protein, 449 aa, Neisseria meningitidis
MKLPVMSPEHSAQLQAFEAKILSNHAKIEAWFRTQWSVHRPPFYGSVDIRNAGYKISSIDMNLFPGGFNNLNPNFIPLAAVAAQDAVQRACETAKSVLIIPENHTRNTFYLQNVYALGEILCSAGYEVRLGSLNPEVTEPTEFETALGDKILLEPLLRTRDRVHLADGFSPCVVLLNNDLSAGIPDILKGISQTVLPPLHGGWTTRRKTNHFGAYNQVAAEFAKLIGIDEWQINPYFEKIGGLDFQGREGEDALAEAVERVLAKIQAKYDESGITDKPFVIVKADAGTYGMGVMSVKSADEVRGLNRKNRNKMAKVKEGLEVSEVIVQEGIYTYETLNSAVCEPVVYMMDRFVIGGFFRVHEGRGADENLNAGGMVFVPLSNSIPTGNGDNSQEAPEACKRVFEQWDSLGMPRSEKDCDVDNEHNRLYVYGVMARLSLLAASIELEETA

SEQ ID NO: 10728 - protein, 138 aa, Neisseria meningitidis
MRLLHTMLRVGNLEKSLDFYQNVLGMKLLRRKDYPEGRFTLAFVGYGDETDSTVLELTHNWDTERYDLGNAYGHIAIEVDDAYEACERVKRQGGNVVREAGPMKHGTTVIAFVEDPDGYKIEFIQKKSGDDSVAYQTA

SEQ ID NO: 10729 - protein, 140 aa, Neisseria meningitidis; identical to SEQ ID NO: 5192

SEQ ID NO: 10730 - protein, 268 aa, Neisseria meningitidis
MPTVFIFLMAVYAGLGAFAWHCQQQGRGRDYPWKTELPVLGAALTVHGAALLMPVIQDKIIIMGFGYSGSLIVWMMLFIYFAGSFFYPLRGVQLLLYPCAVLMLLSGLVFPGKFSGYEITDLPFMLHIGTSLLAYGLFGIATLLSVLTLLLNRSLHRRNFSKLAGFLPSLLSLEKLMFQAMWAGFILLTYSVVSGTFFAEAVFGKPMTFTHKTVFGILSWLIYGGLLLKHSMTAWRGKKAAVWTIIGFVSLMIAYMGSKFVLEIILKR

SEQ ID NO: 10731 - protein, 202 aa, Neisseria meningitidis; identical to SEQ ID NO: 8932

SEQ ID NO: 10732 - protein, 174 aa, Neisseria meningitidis
VLDREGYRPNVGIILTNNRDEVFWGKRVREHSWQFPQGGIKPGESPETAMYRELYEEVGLLSQHVKIVGRTRDWLRYDVPNNWVRREWRGSYRGQKQIWYLLRLTGRDCDVNLRATRHPEFDGWRWHQYWAPVDEVIDFKRDVYLGALKELSSRFLRGMESYEDFAARQLSGNR

SEQ ID NO: 10733 - protein, 436 aa, Neisseria meningitidis; identical to SEQ ID NO: 7990

SEQ ID NO: 10734 - protein, 363 aa, Neisseria meningitidis; identical to SEQ ID NO: 2781

SEQ ID NO: 10735 - protein, 399 aa, Neisseria meningitidis; identical to SEQ ID NO: 1456

SEQ ID NO: 10736 - protein, 354 aa, Neisseria meningitidis; identical to SEQ ID NO: 3286

SEQ ID NO: 10737 - protein, 139 aa, Neisseria meningitidis
VGKCMTVWFVAAVAVLIIELLTGTVYLLVVSAALAGSGIAYGLTGSTPAAVLTAALLSALGIWFVHAKTAVGKVETDSYQDLDAGQYVEILRHTGGNRYEVFYRGTHWQAQNTGQEELEPGTRALIVRKEGNLLIIANP

SEQ ID NO: 10738 - protein, 83 aa, Neisseria meningitidis
MRKSRLSQYKQNKLIELFVAGVTARTAAELVGVNKNTAAYYFHRLRLLIYQNSPHLEMFDGKVEADESYFAERQNHINGIGNF

SEQ ID NO: 10739 - protein, 544 aa, Neisseria meningitidis; identical to SEQ ID NO: 2758

SEQ ID NO: 10740 - protein, 292 aa, Neisseria meningitidis; identical to SEQ ID NO: 3715

SEQ ID NO: 10741 - protein, 469 aa, Neisseria meningitidis
MKYISTRGETAHKPFSEVLLMGLAPDGGLMLPEHYPQIGRETLDKWRGLAYPELAFEIMRLFVTDIPEDDLRDILNRTYTEAAFGTKEITPVRTLSDGIKIQALSNGPTLAFKDMAMQFLGNAFEYVLNKEGKKLNILGATSGDTGSAAEYALRGKKGVNVFMLSPDGKMSAFQRAQMYSLQDGNIHNIAVKGMFDDCQDIVKAVQNDAAFKEKYHIGTVNSINWGRIVAQVVYYFAGYFKATQSNDEQVSFCVPSGNFGNVCAGHIAKQMGLPIRRLIVATNENDVLDEFFKTGAYRPRNSAHTYVTSSPSMDISKASNFERFVFDLMDRDPQEINTLWTEVAAGKGFDLQFALDKVGGKYGFTSSKSTHADRLATIKQVYEQDQELIDPHTADGVKVAREVREEGETVVCLETALAAKFDATIREAVGDAAIPRPAALEGLENLPQRVQTVPNSADAVKGIIEQTLA

SEQ ID NO: 10742 - protein, 405 aa, Neisseria meningitidis; identical to SEQ ID NO: 163

SEQ ID NO: 10743 - protein, 148 aa, Neisseria meningitidis; identical to SEQ ID NO: 4019

SEQ ID NO: 10744 - protein, 405 aa, Neisseria meningitidis
LGGKMQTLISADNHLLLWAFVMLAAAAAIFIEQNSRLAGKVPGAVLALLIALIASNLGVIPTDAPVFDAVWSYIVPLAIPLLLFQLDLHALFKESGRMLFIFLISSLGTVIGTLVSFALLKNYIPELDKVAGMISASYTGGGVNFAAMSAKLNPAKDVIAATIVADNLMMACYFFILIGISSSYWVRKVWGSPYQDKLEQEYHDPSVNKAAEYWKPKSISLQSIALSLAASILLVAVSFSLSSFLQNHFQSVDGVALKMLTGLISDKYLLLTTFTLAVVLFFRKGIQKLDGSQELGTYCIYLFFVVIGVPASIPLIIKTAPLLFVFTLIIAVLNLLLTLVLGKLFKFSIEEIVLACNANIGGPTTAAALAISKGWRDLVGAILLIGTVGYIIGNYIGSFVYALLS

SEQ ID NO: 10745 - protein, 136 aa, Neisseria meningitidis
WINKNQDKTTKPQTVQIVRQGEATPYWFKFNPRYYEQCKNISQTAATFNLSRNTLYLWIRLKKQTGSLKHQVTGLNAVKSDRQKPAQYIGQHQDAYLHEIAKHFDCTAATVCYALKQMGITRKKRPPLTKNKTRPK

SEQ ID NO: 10746 - protein, 96 aa, Neisseria meningitidis; identical to SEQ ID NO: 3692

SEQ ID NO: 10747 - protein, 77 aa, Neisseria meningitidis; identical to SEQ ID NO: 707

SEQ ID NO: 10748 - protein, 140 aa, Neisseria meningitidis
LVFARIFPGFVCRFDIYMTCFKIRLSKQPLKDRNMNKPFITQAQLALYKYQPSSKYFGQSMALIASKEFEEFVRNVKEYDVIECFSYFLNKRVTHNIWKIYFSDESNIFIRKSEENGKISHEFIYSEFSDSNTDFNVLFS

SEQ ID NO: 10749 - protein, 97 aa, Neisseria meningitidis
MSFGYLIATSQPCELLTKSRGETFSLIMDKMDLWIYFRFCEGNIYTIRKNETESCLTERGGKWLKHIYEFNRGSFIFSYVLLKKRESEENFAEIVLK

SEQ ID NO: 10750 - protein, 260 aa, Neisseria meningitidis; identical to SEQ ID NO: 8293

SEQ ID NO: 10751 - protein, 149 aa, Neisseria meningitidis; identical to SEQ ID NO: 3543

SEQ ID NO: 10752 - protein, 397 aa, Neisseria meningitidis; identical to SEQ ID NO: 759

SEQ ID NO: 10753 - protein, 100 aa, Neisseria meningitidis; identical to SEQ ID NO: 1890

SEQ ID NO: 10754 - protein, 148 aa, Neisseria meningitidis; identical to SEQ ID NO: 3068

SEQ ID NO: 10755 - protein, 395 aa, Neisseria meningitidis
MAEICLITGTPGSGKTLKMVSMMANDEMFKPDENGIRRKVFTNIKGLKIPHTYIETDAKKLPKSTDEQLSAHDMYEWIKKPENIGSIVIVDEAQDVWPARSAGSKIPENVQWLNTHRHQGIDIFVLTQGSKLLDQNLRTLVRKHYHIASNKMGMRTLLEWKICADDPVKMASSAFSSIYTLDKKVYDLYESAEVHTVNKVKRSKWFYTLPVIILLIPIFVGLSYKMLSSYGKKQEEPAAQESAATEQQAVLPDKTEGESVNNGNLTADMFVPTLSEKPESKPIYNGVRQVRTFEYIAGCVEGGRTGCTCYSHQGTALKEVTQVMCKDYVKNGLPFNPYKEESQGRDVQQSEKQHSDRPQVAALGGKSQQNLMYDNWQERGKPFEGIGGGVVGSAN

SEQ ID NO: 10756 - protein, 318 aa, Neisseria meningitidis; identical to SEQ ID NO: 2723

SEQ ID NO: 10757 - protein, 91 aa, Neisseria meningitidis; identical to SEQ ID NO: 5452

SEQ ID NO: 10758 - protein, 75 aa, Neisseria meningitidis; identical to SEQ ID NO: 3903

SEQ ID NO: 10759 - protein, 268 aa, Neisseria meningitidis; identical to SEQ ID NO: 8872

SEQ ID NO: 10760 - protein, 78 aa, Neisseria meningitidis; identical to SEQ ID NO: 1246

SEQ ID NO: 10761 - protein, 223 aa, Neisseria meningitidis; identical to SEQ ID NO: 1391

SEQ ID NO: 10762 - protein, 328 aa, Neisseria meningitidis; identical to SEQ ID NO: 7999

SEQ ID NO: 10763 - protein, 229 aa, Neisseria meningitidis; identical to SEQ ID NO: 2235

SEQ ID NO: 10764 - protein, 333 aa, Neisseria meningitidis
LMKIAIYGTKSYDREHFTRANRHFGFELEFFDFMLDAKTAKMAEGAEAVCIFVNDDGSRPVLEKLAQIGVKTVALRCAGFNNVDLKAAEELGLKVVRVPAYSPESVAEHTVGLMLTLNRRIHKAYQRTRDANFSLEGLTGFNMYGKTAGVIGTGKIGIATMRILKGFGMNLLAHDPFCNPEAEKIGGRYVDLDELYAQSDIITLHCPATPENHYMLNEAAFDKMKDGVMIINTSRGGLIDSAAAIEALKRRKIGALGMDVYENERELFFEDKSNDVITDDVFRRLSSCHNVLFTGHQAFLTEEALGNISEVTLSNIREVGQTGDCGNAVRADG

SEQ ID NO: 10765 - protein, 132 aa, Neisseria meningitidis
MCEFKDFRRNIPCFEEYDENSFIGKWYDDGVWDDEEYWKLENALIEVRKKYPYPMDIPRDIVIGIGTIIDFLMVQNWKLFEIKASPWLPKSVKINERYERFRVMLRYIFTDLDVDDWKFFYFPIQHSKGRLR

SEQ ID NO: 10766 - protein, 716 aa, Neisseria meningitidis
MLTDLEKNAIRDHYQNIGKNLPGFRPRASQREMIAAVANAFSRTLAREEGGEPPKREGESIAVIEGPTGVGKSLAYLLAGGIMAQTRGKRLIVSSATVALQEQLVDRDLPFLVEKSGLELTFALAKGRGRYLCPYKLYQLTQSNAQQNLLGFEAPAVLWDSKPKPEELKLLRDIADEFSARRFNGDRDTWPEKIDDAIWLKVTNDRHGCLKTACPNRPECPFYLARDVLETVDVVVANHDLLLADISMGGGVILPAPENSFYCIDEAHHLPKKALSRFAAEHSWNIAVWTLEKLPQLTGKIAALTDKAELANLADEAAASLLDSLHEWQFHLAEEPSLSMGPSENDRRTNSEPTWLWEDGKIPEGLETTVSNTAIAARSLLKHVVGLNDALSAARREKEQDGALLDRLTGEFGIFIVRIEQISAVWDLLSTVPLEGEEPLAKWITRRADDKNDYIFNASPISSASHLANSLWRRAAGAVLTSATLQSLGNFNLMLRQTGLQWLPETTTLALKSPFDFEKQGELYIPPIYASPKDPEAHTAAVIEWLPKLISPTEAIGTLVLFSSRKQMQDVALRLPGDYLPLLLVQGELPKAVLLQKHHRAIEEGKASIIFGLDSFAEGLDLPGTACVQVIIAKLPFAMPDNPIEKTQNRWIEQRGGNPFIEITVPEAGIKLIQAVGRLIRTEQDYGRVTILDNRIKTQRYGQQLLAGLPPFKRIG

SEQ ID NO: 10767 - protein, 311 aa, Neisseria meningitidis
MMYEIKQPFHSGYLQVSEIHQIYWEESGNPDGVPVIFLHGGPGAGASPECRGFFNPDVFRIVIIDQRGCGRSRPYACAEDNTTWDLVADIEKVREMLGIGKWLVFGGSWGSTLSLAYAQTHPERVKGLVLRGIFLCRPSETAWLNEAGGVSRIYPEQWQKFVAPIAENRRNRLIEAYHGLLFHQDEEVCLSAAKAWADWESYLIRFEPEEVDEDAYASLAIARLENHYFVNGGWLQGDRAILNNIGKIQHIPTIIVQGRYDLCTPMQSAWALSKAFPEAELRVVQAGHRAFDPPLADALVQAVEDIFPRLL

SEQ ID NO: 10768 - protein, 469 aa, Neisseria meningitidis; identical to SEQ ID NO: 3744

SEQ ID NO: 10769 - protein, 259 aa, Neisseria meningitidis; identical to SEQ ID NO: 2935

SEQ ID NO: 10770 - protein, 685 aa, Neisseria meningitidis
VQRTDRCRTGCRLYRSALTSFCKKQPALFRLLFMSERRQPHIYAIIHPDQTTDSGCRCSSRPTDMIEKLTFGLFKKEDARSFMRLMAYVRPYKIRIVAALIAIFGVAATESYLAAFIAPLINHGFSAPAAPPELSAAAGIISTLQNWREQFTYMVWGTENKIWTVPLFLIILVVIRGICRFTSTYLMTWVSVMTISKIRKDMFAKMLTLSSRYHQETPSGTVLMNMLNLTEQSVSNASDIFTVLTRDTMIVTGLTIVLLYLNWQLSLIVVLMFPLLSLLSRYYRDRLKHVISDSQKSIGTMNNVIAETHQGHRVVKLFNGQAQAANRFDAINRTIVRLSKKITQATAAHSPFSELIASIALAVVIFIALWQSQNGYTTIGEFMAFIVAMLQMYAPIKSLANISIPMQTMFLAADGVCAFLDTPPEQDKGTLAPQRVEGRISFRNVDVEYRSDGIKALDGFNLDIRQGERVALVGRSGSGKSTVVNLLPRFVEPSAGNICIDGIDIADIKLDCLRAQFALVSQDVFLFDDTLFENVRYSRPDAGEAEVLSALQAANLQSLIDASPLGLHQPIGSNGSNLSGGQRQRVAIARAILKDAPILLLDEATSALDNESERLVQQALERLMENRTGIIVAHRLTTIEGADRIIVMDDGKIIEQGTHEQLMSQNGYYTMLRNISNKDAAVRTA

SEQ ID NO: 10771 - protein, 321 aa, Neisseria meningitidis; identical to SEQ ID NO: 4435

SEQ ID NO: 10772 - protein, 209 aa, Neisseria meningitidis; identical to SEQ ID NO: 1305

SEQ ID NO: 10773 - protein, 144 aa, Neisseria meningitidis; identical to SEQ ID NO: 9512

SEQ ID NO: 10774 - protein, 80 aa, Neisseria meningitidis
MIPYVKRNPMKEYKVVIYQESQLSSLFFGAAKVNPVNFSAFLNKQTPEGWRVVTMEKDLRRMLLFFKREAYVVILERDRV

SEQ ID NO: 10775 - protein, 349 aa, Neisseria meningitidis; identical to SEQ ID NO: 328

SEQ ID NO: 10776 - protein, 384 aa, Neisseria meningitidis
MSTFFQQTAQAMIARHIDRFPLLKLDQVIDWQPIEQYLNRQKTRYLRDHRGRPAYPLLSMFKAVLLGQWHSLSDPELEHSLITRIDFNLFCRFDELSIPDYSIVDQKPVRRCLALAQRERFSKVLKHQVNRFRTICTVCGFVALSFLLIHYTLCRYRNWLAQDDTLSELLKLINCQLTEKNLKVEKASAAVVDATIIQTAGSKQRQAIEVDEEGQVSGQTTPSKDSDARWIKKNGLYKLGYKQHTRTDAEGYIEKLHITPANAHECKHLPPLLEGLPEGTTVYADKGYDSAENRQHLEERQLLDGIMRKACRNRPLSEAQTKRNRYLSKTRYVVEQSFGTLHRKFRYARSTYFGLIKVSAQSHLKAMCLNLLKAANRLSAPAAA

SEQ ID NO: 10777 - protein, 166 aa, Neisseria meningitidis; identical to SEQ ID NO: 8979

SEQ ID NO: 10778 - protein, 207 aa, Neisseria meningitidis
LVNTFFKRSMPSEKPCFRFQATFENRLKSMDYNQTVLSHLQNFWKHHDIKGFTWALGRIVEELPDFQVFQVIPNHEDEPWVYVSSGIGQFLEQEFFIISPFETPEHIETLAMLASASMHYPDRFQLGKTVNIGRPWVEQSSFQHFLISLPYPYGQELEYMDNVRFFWLLPITQPERLFLNTHSVEDLETRFDELGIDYLDINRASVI

SEQ ID NO: 10779 - protein, 169 aa, Neisseria meningitidis; identical to SEQ ID NO: 3746

SEQ ID NO: 10780 - protein, 261 aa, Neisseria meningitidis; identical to SEQ ID NO: 3032

SEQ ID NO: 10781 - protein, 402 aa, Neisseria meningitidis; identical to SEQ ID NO: 2438

SEQ ID NO: 10782 - protein, 183 aa, Neisseria meningitidis; identical to SEQ ID NO: 8995

SEQ ID NO: 10783 - protein, 92 aa, Neisseria meningitidis
MYYQVGNKCLEKHQAENLYFSLVVPRIKENGQIVRPEYNGSLWKMSDGQPLRLLLAECSPKDNLQSGLETGWIVFGVMASVYFVSLLKKVLK

SEQ ID NO: 10784 - protein, 274 aa, Neisseria meningitidis; identical to SEQ ID NO: 5218

SEQ ID NO: 10785 - protein, 174 aa, Neisseria meningitidis
MDGVGKNRRGIKIGKNMEHLFGKWLPDLPAAVSDGIDLPMSRLLKARSLTAALRALPHTFSVELLKLGELETECGGRLVREVLLKLDRIPVVEARSECRIGSAFWQNILDCGTRPLGERLFQADLEGARSAFEFAVSGEGCGRYFAARRSRFSRHGEEMLLTEYFLPELKRFIG

SEQ ID NO: 10786 - protein, 128 aa, Neisseria meningitidis; identical to SEQ ID NO: 605

SEQ ID NO: 10787 - protein, 599 aa, Neisseria meningitidis
MNNPLVNQAAMVLPVFLLSACLGGGGSFDLDSVETVQDMHSKPKYEDEKSQPESQQDVSENSGAAYGFAVKLPRRNAHFNPKYKEKHKPLGSMDWKKLQRGEPNSFSERDELEKKRGSSELIESKWEDGQSRVVGYTNFTYVRSGYVYLNKNNIDIKNNIVLFGPDGYLYYKGKEPSKELPSEKITYKGTWDYVTDAMEKQRFEGLGSAAGGDKSGALSALEEGVLRNQAEASSGHTDFGMTSEFEVDFSDKTIKGTLYRNNRITQNNSENKQIKTTRYTIQATLHGNRFKGKALAADKGATNGSHPFISDSDSLEGGFYGPKGEELAGKFLSNDNKVAAVFGAKQKDKKDGENAAGPATETVIDAYRITGEEFKKEQIDSFGDVKKLLVDGVELSLLPSEGNKAAFQHEIEQNGVKATVCCSNLDYMSFGKLSKENKDDMFLQGVRTPVSDVAARTEANAKYRGTWYGYIANGTSWSGEASNQEGGNRAEFDVDFSTKKISGTLTAKDRTSPAFTITAMIKDNGFSGVAKTGENGFALDPQNTGNSHYTHIEATVSGGFYGKNAIEMGGSFSFPGNAPEGKQEKASVVFGAKRQQLVQ

SEQ ID NO: 10788 - protein, 310 aa, Neisseria meningitidis; identical to SEQ ID NO: 8806

SEQ ID NO: 10789 - protein, 384 aa, Neisseria meningitidis; identical to SEQ ID NO: 9041

SEQ ID NO: 10790 - protein, 160 aa, Neisseria meningitidis; identical to SEQ ID NO: 1762

SEQ ID NO: 10791 - protein, 265 aa, Neisseria meningitidis; identical to SEQ ID NO: 1691

SEQ ID NO: 10792 - protein, 259 aa, Neisseria meningitidis; identical to SEQ ID NO: 9036

SEQ ID NO: 10793 - protein, 330 aa, Neisseria meningitidis; identical to SEQ ID NO: 8389

SEQ ID NO: 10794 - protein, 269 aa, Neisseria meningitidis; identical to SEQ ID NO: 9247

SEQ ID NO: 10795 - protein, 122 aa, Neisseria meningitidis; identical to SEQ ID NO: 6911

SEQ ID NO: 10796 - protein, 101 aa, Neisseria meningitidis; identical to SEQ ID NO: 2399

SEQ ID NO: 10797 - protein, 195 aa, Neisseria meningitidis; identical to SEQ ID NO: 9126

SEQ ID NO: 10798 - protein, 459 aa, Neisseria meningitidis
MFAFKSLLDMPRGEALAVVVALIAAMGYTIISLEWLPHMSIIAAIVVLILYGLARGLKYNDMQQGMIGALNQGMGAIYLFFFIGLMVSALMMSGAIPTLMYYGFGLISPTYFYFSAFALCSVIGVSIGSSLTTCATVGVAFMGMAAAFHADMAMTAGAIVSGAFFGDKMSPLSDTTGISASIVGIDLFEHIKNMMYTTIPAWLISAALMLWLLPSVAAQDLNSVESFRSQLEATGLVHGYSLIPFALLVILALMRVNAVVAMLFTVMVAVAVTYLHSTPDLRQLGAWFYGGYKLEGEAFKDVVKLISRGGLESMFFTQTIVILGMSLGGLLFALGVIPSLLEAIRTFLTNAGRATFSVAMTSVGVNFLIGEQYLSILLSGETFKPVYDKLGLHSRNLSRTLEDAGTVINPLVPWSVCGVFISHALGVPVWEYLPYAFFCYLSLALTLLFGWTGLTLSKK

SEQ ID NO: 10799 - protein, 231 aa, Neisseria meningitidis; identical to SEQ ID NO: 3708

SEQ ID NO: 10800 - protein, 361 aa, Neisseria meningitidis
VHAPDVTLRNLTVTRSGMSLPAMDAGIYLEETAPRALIEHNNILDNSVGVYLHGSADAMVRENKIVGDATLRVNERGNGVTVWNAPGAQVVGNDISKGRDGIFSNTSTHNTYKNNRFSDLRFAVHYMYTNDSEISGNISVGNNMGYVLMFSERLKVFDNIAVGSRDQGIMLNYVNYSDIHDNIINKAGKCVFAYNANYDKLSANHFENCQIGIHFTAAIEGTSLHDNSFINNESQVKYVSTRFLDWSEGGHGNYWSDNSAFDLNGDGFGDSAYRPNGIIDQIIWRAPVLRLLMNSLAISIVKWAQAQFPAVLPGGVVDSKPLMKPYVPKIQTRYQAMKDELLKEAETRQSEWGRAENGSLN

SEQ ID NO: 10801 - protein, 110 aa, Neisseria meningitidis; identical to SEQ ID NO: 8460

SEQ ID NO: 10802 - protein, 412 aa, Neisseria meningitidis
MAFYAFKAMRAAALAAAVALVLSSCGKGGDAAQGGQPAGREAPAPVVGVVTVHPQTVALTVELPGRLESLRTADVRAQVGGIIQKRLFQEGSYVRAGQPLYQIDSSTYEAGLESARAQLATAQATLAKADADLARYKPLVAAEAVSRQEYDAAVTAKRSAEAGVKAAQAAIKSAGINLNRSRITAPISGFIGQSKVSEGTLLNAGDTTVLATIRQTNPMYVNVTQSASEVMKLRRQIAEGKLLAADGVIAVGIKFDDGTVYPEKGRLLFADPTVNESTGQITLRAAVPNDQNILMPGLYVRVLMDQVAVDNAFIVPQQAVTRGAKDTVMIVNAQGGMEPREVTVAQQQGTNWIVTSGLKDGDKVVVEGISIAGITGAKKVTPKEWAPSENQAAAPQSGVQTASEAKTASEAE

SEQ ID NO: 10803 - protein, 299 aa, Neisseria meningitidis; identical to SEQ ID NO: 167

SEQ ID NO: 10804 - protein, 545 aa, Neisseria meningitidis; identical to SEQ ID NO: 3410

SEQ ID NO: 10805 - protein, 615 aa, Neisseria meningitidis
MHDTRTMMIKPTALLLPALFFFPHAYAPAADLSENKAAGFALFKNKSPDTESVKLKPKFPVRIDTQDSEIKDMVEEHLPLITQQQEEVLDKEQTGFLAEEAPDNVKTMLHSKGYFSSKVSLTEKDGAYTVHITPGPRTKIANVGVAILGDILSDGNLAEYYRNALENWQQPVGSDFDQDSWENSKTSVLGAVTRKAYPLAKLGNTRAAVNPDTATADLNVVVDSGRPIAFGDFEITGTQRYPEQIVSGLARFQPGTPYDLDLLLDFQQALEQNGHYSGASVQADFDRLQGDRVPVKVSVTEVKRHKLETGIRLDSEYGLGGKIAYDYYNLFNKGYIGSVVWDMDKYETTLAAGISQPRNYRGNYWTSNVSYNRSTTQNLEKRAFSGGIWYVRDRAGIDARLGAEFLAEGRKIPGSDIDLGNSHATMLTASWKRQLLNNVLHPENGHYLDGKIGTTLGAFLSSTALIRTSARAGYFFTPENKKLGTFIIRGQAGYTVARDNANVPSGLMFRSGGASSVRGYELDSIGLAGPNGSVLPERALLVGSLEYQLPFTRTLSGAVFHDMGDAAANFKRMKLKHGSGLGVRWFSPLAPFSFDIAYGHSDKKIRWHISLGTRF

SEQ ID NO: 10806 - protein, 445 aa, Neisseria meningitidis
MTDTAGLRRRNLRQWIAEHYGGLQTRFAEAVALNTGELSALLKNKSFGEKKARKIEQAAKMPAFWLDTEHTARPPEHTGKHTMSHISPIPEILADIKAGKMVIITDAEDRENEGDLLMAAQFVTPEAINFMIKHARGLVCLPMDGEMVEKLGLPMMTQKNGAQYGTNFTVSIEAAHGITTGISAADRALTIQTAVSPTAKPADIVQPGHIFPLRAQKGGVLVRAGHTEAGVDLAQMNGLIPAAVICEIINDDGTMARMPELMKFAEEHNLKIGTIADLIEYRSRTESLLEDMGNAPVQTPWGEFQQHVYVDKLSGETHLALVKGTPAADTETLVRVHEPFSVMDFIQANPRHSWSLPKALERVQQAESGVVILLHRTEDGASLLDRTLPKGANQAYKWDSKSYGIGAQILVGLNVKKLRVLGQPSSFTGLTGFGLEVVGFEEAEK

SEQ ID NO: 10807 - protein, 163 aa, Neisseria meningitidis; identical to SEQ ID NO: 2144

SEQ ID NO: 10808 - protein, 212 aa, Neisseria meningitidis; identical to SEQ ID NO: 3448

SEQ ID NO: 10809 - protein, 300 aa, Neisseria meningitidis; identical to SEQ ID NO: 2507

SEQ ID NO: 10810 - protein, 158 aa, Neisseria meningitidis; identical to SEQ ID NO: 9372

SEQ ID NO: 10811 - protein, 590 aa, Neisseria meningitidis
MIPSDFIDELLAKTDIVDIIDEQVPLKKGGANYMACCPFHKEKTPSFSVSPTKQFYHCFSCGAHGSAIGFVMEHQGLSFPEAVQFLADRVGMVVPKVRGQNDNPEVRAERKKKQQTLEETTAAAADFYAQQLKFNPAAKAYLDKRGLSAEVIAHYGLGYAPDGWQPLAQVFQPYPNTALVDTGMVIDNEGRYYDRFRHRIMFPIRNPRGQVIGFGGRVLDDSKPKYLNSPDTPLFDKGKNLYGLYEGRAAVKEAERILVVEGYMDVVALAQFGVGYGVAALGTATTAEHVKILMRQADSIYFCFDGDSAGRKAAWRALENALPQLKDDKSLHFLFLPEEHDPDSYIRAYGKAQFEDALLNQSKPLSEYFWEHLSDGIHLNTQEGKAELVKTSSPLLAQITAPALAYLLKQRLSELVGIDPDNLAQLLGQEAPKRHVKQKNYKLPPISVKQPVMLTLVQRQIRSLLINPDWAAYIDLPDYLALDGDFACLANLAESIKNHAAVPETAQVLEYMRGSPYEETITRIFHSTHQSEEMNSSSEEDCENFQIGMKKLLNELKYSQIEALKQKSLQSGLNESEKKLLLSLLTAKQN

SEQ ID NO: 10812 - protein, 448 aa, Neisseria meningitidis; identical to SEQ ID NO: 2224

SEQ ID NO: 10813 - protein, 76 aa, Neisseria meningitidis; identical to SEQ ID NO: 8288

SEQ ID NO: 10814 - protein, 65 aa, Neisseria meningitidis; identical to SEQ ID NO: 926

SEQ ID NO: 10815 - protein, 896 aa, Neisseria meningitidis
MSDNRLDTARRHSLFLARQLDNGKLKPEIFLPMLDKVLTEADFQAFADWDKIRAEENEEELARQLRGLRRYVVSQIIVRDINRISDLNEVTRTITLFADFAVNTALDFAYAYYRDMYGTPIGRDTKSPQHLSVVAMGKAGGYELNVSSDIDLIFIYPESGDTDGRRERGNQEFFTKVGQKLIALLNDITADGQVFRVDMRLRPDGDSGALVLSETALEQYLITQGREWERYAWCKGRVLTPYPNGIKSLVRPFVFRKYLDYGAYEAMRKLHRQIRSEVGKKGMADNIKLGAGGIREVEFIAQIFQMIRGGQMRALQLKGTQETLEKLAESGIMPSENVETLLAAYRFLRDVEHRLQYWDDRQTQTLPASPEQRQRLAESMGFDDYADFLNALNQHRNQVNRLFNEILSEPGEQTQSSGEWQWVWQEKPDEEGRQCRLKEHGFDAETIAARLDQIRNGHKYRRLSAHAQPRFDALVPLLVQAAAAQTNPTDTLMRLLDFLENISRRSAYLAFLNEHPQTLAQLAQIMSQSSWVAAYLNKYPILLDELISAQLLDTAFDWDKLAAELSDGIKACGGDTEAQMDTLRHFQHAQVFRLTVQDLAGLWTVESLSDQLSALADTVIAAALSCAWADMPKKHRDTPQFAIVGYGKLGGKELGYASDLDLVYLYDDPHPDAGDVYSRLARRLTNWLSAATGAGSLYETDLRLRPNGDAGFLAHSIAAFEKYQRENAWTWEHQSLTRARFICGTPEIQTAFDRIRTEILTAERDQTALSGEIIEMREKMFPTHPPADSNVKYARGGVVDVEFIVQYLILAHARKYPQLLANYGNIALLNIAADCSLIDKNLAEQSRTAYRFYRRQQHNTKLRDAEKTEVSGELLAHYGNVRKLWREVFGEEAATA

SEQ ID NO: 10816 - protein, 389 aa, Neisseria meningitidis
MTAHKILPVLLSIILGVSHATAASPAPNKPAVHAAPTFQTPETLTAAHIVIDLQSKQILSAKNINTPVEPAALTQLMTAYLVFKNMKSGNIRSEENLKIPESAWASEGSRMFVRPGDTVSTDKLLKGMIALSANDAALTLAGRLGNGSIENFVQQMNKEARRLGMKNTVFKNPTGLSREGQVSTAKDLAQLSEALMRDFPEYYPLFSIKSFKFKNIEQNNRNILLYRDNNVNGLKAGHTESGGYNLAVSYSGNGRHILVITLGSESAETRASDNSKLLNWALQAFDTPKIYPKGKTVAQIQISGGSKKTVRAGFLKEAYITLPHKEAKMAEQILETIQPIPAPVKKGQILGKIKIRQNGYTIAEKEIVALENVKKRSRWQRLWARLTGQ

SEQ ID NO: 10817 - protein, 63 aa, Neisseria meningitidis; identical to SEQ ID NO: 980

SEQ ID NO: 10818 - protein, 415 aa, Neisseria meningitidis; identical to SEQ ID NO: 846

SEQ ID NO: 10819 - protein, 192 aa, Neisseria meningitidis; identical to SEQ ID NO: 746

SEQ ID NO: 10820 - protein, 206 aa, Neisseria meningitidis; identical to SEQ ID NO: 1164

SEQ ID NO: 10821 - protein, 51 aa, Neisseria meningitidis
MKITHCKLKKKVQKELLRFLYWKLPPVLHLQTVLSDYARFDDALLSYFDFN

SEQ ID NO: 10822 - protein, 81 aa, Neisseria meningitidis; identical to SEQ ID NO: 1901

SEQ ID NO: 10823 - protein, 206 aa, Neisseria meningitidis; identical to SEQ ID NO: 4838

SEQ ID NO: 10824 - protein, 477 aa, Neisseria meningitidis
MSQYDVVVIGAGPGGYVAAIRAAQLGFKTACVDAGVNKAGNAPALGGTCLNVGCIPSKALLQSSEHFHAAQHEFAEHGITVGDVKFDVAKMIERKDAIVTKLTGGVKFLFQKNKVTSLFGTASFAGKNGDAYQIEVDNKGEKTVIEAKHVIVATGSVPRPLPQVAIDNVNVLDNEGALNLTEVPAKLGVIGSGVIGLEMGSVWNRVGAEVTILEAAPTFLAAADQQIAKEAFKYFTKEQGLSIELGVKIGDIKSEGKGVSVAYETAAGEAKTEVFDKLIVAIGRIPNTKGLNAEAVGLEKDERGFIKVDGECRTNLPNVWAIGDVVRGPMLAHKASDEGVAVAERIAGQKPHIDFNNVPFVIYTDPEIAWVGKTEEQLKAEGVEYKKGTSGFGANGRALAMGKAKGTVKVLADAKTDRILGVHMIGPVVSELVTEGVTALEFFASSEDIARIIHAHPTLSEVVHEAALAADKRALHG

SEQ ID NO: 10825 - protein, 253 aa, Neisseria meningitidis
MENLKKEADMIQRQIILDTETTGLYADGGDRLVEFAGLEMVNRQMTDKNLHLYVHPERDMPEEAARVHGLTIEVLEGKNAPPFAEVGRQIADFLRGAELIIHNAKFDVGFLNMEFRRMGLPTVEELGCTVTDTLAMAREMFPGQKASLDALCNRFSVDRSKRVLHGALIDCELLGEVYLAMTRRQFDLMGAAAEEKMETKPVVHTETKRSGKLKVIRADENELAAHGQYLDGLGEACIWRKEAVPSENGGTDA

SEQ ID NO: 10826 - protein, 472 aa, Neisseria meningitidis; identical to SEQ ID NO: 4196

SEQ ID NO: 10827 - protein, 371 aa, Neisseria meningitidis; identical to SEQ ID NO: 8227

SEQ ID NO: 10828 - protein, 462 aa, Neisseria meningitidis; identical to SEQ ID NO: 8923

SEQ ID NO: 10829 - protein, 502 aa, Neisseria meningitidis
MPVRLLVNIQDADSDGIQTASENNNGTRMGYNRSMEKNTLSARAPSPWLPLLLAIAIFMQMLDATILNTALPEIAADLNESPLNMQLAVISYTLTVALLIPLSGYLADRFGTKKVFFGSIAVFMLGSALCAASGSLFELTLSRVVQGIGGSMLVPIPRLTILRVYDKSKLLNAINYAVMPALIGPVLGPLAGGYLVEYASWHWIFLLNLPIGLLGFILGRNIMPDIKGSNISLDFKGYLIFSAAACLLLLSAESLSHALPPYFALLPLCGGLLFARRYFRHMKTASKPIYSADLFLIRTFRLGLAGNLFSRLGISSIPFLMPLMFQVAFGFGASLSGWLVAPVALSSLLVKPLIAPLMKRFGYRTVLLWNTKLLAAFIMLLALPDGNSPLWIWIFLSLAIGACNSLQFSAMNTLTLADLRPQQTGSGNSLMAVNQQLAISMGIVVGALILKNWTFLIPASSGLHSAFRMTLLSIGGITLASSLVFKRLHVSDGANLTRNTPS

SEQ ID NO: 10830 - protein, 122 aa, Neisseria meningitidis; identical to SEQ ID NO: 848

SEQ ID NO: 10831 - protein, 508 aa, Neisseria meningitidis; identical to SEQ ID NO: 3491

SEQ ID NO: 10832 - protein, 143 aa, Neisseria meningitidis; identical to SEQ ID NO: 28

SEQ ID NO: 10833 - protein, 729 aa, Neisseria meningitidis
MIYHRIAVNVPLSDGLLTYSHSDPLPPGTRVLVPFRNKTVVGMVWETDIAPDMDTARILSVRTAFVEEKPLPQSWRDLLAFTSRYYHYPTGQAVFAALPQGLKETRAVEMPQPPLFYALNEAGRAQTPPPARFNKKAALWDALLSGGMTMAALKQVNAQAAKLIEDWAEQGWIETTEAAKPVLRPYHGQASHSEFVLNANQQKASDAIQTALGRFQPFLLYGITGSGKTEVYFDAMAKVLAQGRQVLFLLPEINLTPQLLKRVENRFADVPTAVLHSRMAAGRRTQDYLSAMSGQAKLVIGTRLAVFTPMDDVGLIVVDEEHDGSFKQDNELRYHARDLAVWRAKQSGCPIILGSATPSLESWHKAQSGAYRLLQLTERAHTAAQLPQVDILNVGRLKLDNGFSPQALQLLKQNFEAGGMSLVYLNRRGFAPALFCSDCGHTFGCPNCSAKMVLHQRARQLRCHHCDHREPVPFKCPDCGNQDLTAVGHGTQRVEETLRAFLPKAAVVRVDRDSTAHKNDWADLYRRIADNEIDILVGTQMLAKGHDFARLNLVIVLNADGSLYSADFRAPERLFAELMQVSGRAGRADKPGKVLIQTQLPEHPVFAAVKAQDYAVFAENELNERQMFAMPPFGFQTAVRADAPRVADAMEFLNAAKETLAPLLPESVSQFGAAPMLMVRLAERERAQIFLESTSRQDLHRAVSLWVQVLQQNRDGKIRWSVDVDPQEA

SEQ ID NO: 10834 - protein, 160 aa, Neisseria meningitidis; identical to SEQ ID NO: 1608

SEQ ID NO: 10835 - protein, 129 aa, Neisseria meningitidis
MWKITKEQGQDLSFATYCLLSAAINLQEFKLWLEKVVLDMPIDNIPFYIFDLIDLKEGVGDIYNILDFVPNSDLSKDQDDALTGIAFLRGIDVYDPPVSKEKALKALEKHPEIYQRFQHFFPFVELPPL

SEQ ID NO: 10836 - protein, 581 aa, Neisseria meningitidis
MLIKSEYKPRMLPKEEQVKKPMTSNGRISFVLMAIAVLFAGLIARGLYLQTVTYNFLKEQGDNRIVRTQTLPATRGTVSDRNGAVLALSAPTESLFAVPKEMKEMPSAAQLERLSELVDVPVDVLRNKLEQKGKSFIWIKRQLDPKVAEEVKALGLENFVFEKELKRHYPMGNLFAHVIGFTDIDGKGQEGLELSLEDSLHGEDGAEVVLRDRQGNIVDSLDSPRNKAPKNGKDIILSLDQRIQTLVYEELNKAVEYHQAKAGTVVVLDARTGEILALANTPAYDPNRPGRADSEQRRNRAVTDMIEPGSAIKPFVIAKALDAGKTDLNERLNTQPYKIGPSPVRDTHVYPSLDVRGIMQKSSNVGTSKLSARFGAEEMYDFYHELGIGVRMHSGFPGETAGLLRNWRRWRPIEQATMSFGYGLQLSLLQLARAYTALTHDGVLLPVSFEKQAVAPQGKRIFKESTAREVRNLMVSVTEPGGTGTAGAVDGFDVGAKTGTARKFVNGRYADNKHIATFIGFAPAKNPRVIVAVTIDEPTAHGYYGGVVAGPPFKKIMGGSLNILGISPTKPLTAAAVKTPS

SEQ ID NO: 10837 - protein, 114 aa, Neisseria meningitidis; identical to SEQ ID NO: 402

SEQ ID NO: 10838 - protein, 264 aa, Neisseria meningitidis; identical to SEQ ID NO: 9463

SEQ ID NO: 10839 - protein, 214 aa, Neisseria meningitidis; identical to SEQ ID NO: 3176

SEQ ID NO: 10840 - protein, 91 aa, Neisseria meningitidis
MQWSRETEWLGLNVIAHRNFGKQHAQVEFEAYFRDGQHRSAHHELSGFINIGGQWYFIDPTVPHPAMKQPCICGSGKKFKACCGKYLKPVA

SEQ ID NO: 10841 - protein, 204 aa, Neisseria meningitidis; identical to SEQ ID NO: 504

SEQ ID NO: 10842 - protein, 154 aa, Neisseria meningitidis; identical to SEQ ID NO: 741

SEQ ID NO: 10843 - protein, 107 aa, Neisseria meningitidis
MMKKQRHILCVGCLYIILKVNVFPNTGWMEASKGMQGMSFSTFGYADAPGYTFSRIGHTLIFLLGKTTGTRTTVSDSSHNVYYVKLYICANGLLRIRPCVTPLTPRH

SEQ ID NO: 10844 - protein, 163 aa, Neisseria meningitidis; identical to SEQ ID NO: 2563

SEQ ID NO: 10845 - protein, 124 aa, Neisseria meningitidis; identical to SEQ ID NO: 2472

SEQ ID NO: 10846 - protein, 468 aa, Neisseria meningitidis; identical to SEQ ID NO: 2141

SEQ ID NO: 10847 - protein, 90 aa, Neisseria meningitidis; identical to SEQ ID NO: 1115

SEQ ID NO: 10848 - protein, 127 aa, Neisseria meningitidis; identical to SEQ ID NO: 2779

SEQ ID NO: 10849 - protein, 420 aa, Neisseria meningitidis; identical to SEQ ID NO: 9623

SEQ ID NO: 10850 - protein, 465 aa, Neisseria meningitidis; identical to SEQ ID NO: 1096

SEQ ID NO: 10851 - protein, 916 aa, Neisseria meningitidis
MLTNIAKKIFGSRNDRLLKQYRKSVARINALEEQMQALSDADLQAKTAEFKQRLADGQTLDGILPEAFAVCREASRRTLGMRHFDVQLIGGMVLHDGKIAEMRTGEGKTLVATLAVYLNALAGKGVHVVTVNDYLASRDAGIMEPLYNFLGLTVGVIISDMQPFDRQNAYAADITYGTNNEFGFDYLRDNMVTDQYDKVQRELNFAVVDEVDSILIDEARTPLIISGQADDNIQLYQIMNTVPPHLVRQETEEGEGDYWVDEKAHQVILSEAGHEHAEQILTQMGLLAENDSLYSAANIALMHHLMAALRAHSLFHKDQHYVIQDGEIVIVDEFTGRLMSGRRWSEGLHQAVEAKEGVEIKRENQTLASITFQNYFRLYTKLSGMTGTADTEAFEFQSIYNLETVIIPTNRPVQRKDFNDQIFRSAEEKFEAVVKDIEECHKRGQPVLVGTTSIENSELVSHLLQKAGLPHNVLNAKEHEREALIVAQAGKVGAITVATNMAGRGTDIVLGGNLKHQTDAIRADETLSDEEKQAQIAALEDGWQAEHDKVMEAGGLHIIGTERHESRRIDNQLRGRSGRQGDPGSSRFYLSFEDPLLRLFALDRAAAILNRLAPERGVAIEHNLLTRQIEGAQRKVEGRNFDMRKQVLEYDDVANEQRKVIYSQRNEILTSKDISDLMQEIRSDVVSDLVDTYMPPDSMEEQWDIPTLENRLAAEFRLHEDIQSWLKADNAIDGQDIKERLIERIENEYAAKTELVGKQAMADFERNVMLQVIDNQWREHLAAMDYLRQGIHLRSYAQKNPKQEYKREAFTMFQDLWNGIKFHIASLLTSVQIEQNPVAVVEEQPIGNIQSIHSESPDMEELLGQSQTDLVTEAFNPDGTDFSPEALEARGQIVHRNDPCPCGSGLKYKQCHGKLA

SEQ ID NO: 10852 - protein, 75 aa, Neisseria meningitidis; identical to SEQ ID NO: 1870

SEQ ID NO: 10853 - protein, 328 aa, Neisseria meningitidis
MPMGIAPYCRNLIIQEQKMKIANSITELIGNTPLVKLNRLTEGLKAEVAVKLEFFNPGSSVKDRIAEAMIEGAEKAGKINKNTVIVEATSGNTGVGLAMVCAARGYKLAITMPESMSKERKMLLRAFGAELILTPAAEGMAGAIAKAKSLVDAHPDTYFMPRQFDNEANPEVHRKTTAEEIWRDTDGKVDVFVAGVGTGGTITGVGEVLKKYKPEVKVVAVEPEASPVLSGGEKGPHPIQGIGAGFIPTVLNTKIYDSITKVSNEAAFETARAIAEKEGILVGISSGAAVWSALQLAKQPENEGKLIVVLLPSYGERYLSTPLFADLA

SEQ ID NO: 10854 - protein, 218 aa, Neisseria meningitidis; identical to SEQ ID NO: 9359

SEQ ID NO: 10855 - protein, 418 aa, Neisseria meningitidis; identical to SEQ ID NO: 9181

SEQ ID NO: 10856 - protein, 129 aa, Neisseria meningitidis; identical to SEQ ID NO: 3613

SEQ ID NO: 10857 - protein, 641 aa, Neisseria meningitidis
LRICIMNILSVENASFAIGHVALLDKTSFQLDSGEKVGLIGRNGAGKSSFLKILAGVQKLDDGQIIIQNNLKIVYVPQESFFDKDATVFDTVAEGLGEIRDLLRRYHRVGHELENGSGEALLKELNELQLEIEAKDGWKLDAAVKQTLGELGLPENEKIGNLSGGQKKRVALAQAWVQKPDVLLLDEPTNHLDIDAIIWLENLLKAFEGSLVVITHDRRFLDNIATRIVELDRGILRSYPGSFSKYSEKKVQELAVEAEHNRLFDKFHAQEEAWIRKGIEARRTRNEGRVRRLEELRRQRAERRNVQGQVNFKLDSGEKSGKIIAELEHASFAYGDKVIMDKFSAILQRGDKIGLIGPNGIGKTTFLKLILGELNPTYGRIRIGSKQEVAYFDQFRSTLNENDTVFYTLGQGNDYVEVGGKKKHVMSYLEDFLFHPARAQSPVSSLSGGERNRLLLAKLFTRPANILILDEPTNDLDIDTQELLEDLLRDYQGTVFLVSHDRMFLDNVITQSIIFEGNGRLKEYIGGYQDYIDAKSREAKIQTESAPKTADAEPVKEKPKANRTVKLSYKEQRELDALPDEIAALEAEQAEINAQLSDPEIFKDYEKAGALQSRAEEIEMLLLEKLERWELLETKQNGNAV

SEQ ID NO: 10858 - protein, 260 aa, Neisseria meningitidis
VMKLVRPQKISDQVLSVLEGRIVEGVYAEGGKIPPERVLAEEFGVSRPSVRSALNVLVARQVLEARQGDGYYVSVKPQQDFLQSWQELLGKHSNWEQDVFDFSCHIEGCMAALAAERRTDADLKRIGFWLEKFEEACESGNLEHQSEADVSFHQTIADAAHNLLFSHLSGGLLKMLYRQTRSSLIYLNQEEDPRPKLMAQHRVLYEAISNRRPGEASEAAKAHLNYVASSIMKDREYQSRNRHADTLAQNDLKRVQDWEV

SEQ ID NO: 10859 - protein, 286 aa, Neisseria meningitidis
MSDLSVLSPFAVPLAAVFGLLVGSFLNVVIYRVPVMMERGWTVFAKKHLNLPLTEKESRTFNLMKPDSCCPKCRVPIRAWQNIPIVSYLLLRGKCASCQTKISIRYPLIELLTGVLFGLVAWQYGWSWITLGGLILTAFLISLTFIDADTQYLPDSMTLPLIWLGLIFNLDGGFVPLQSAVLGAVAGYGSIWLLCAVYKLIKGEIGMGNGDFKLIAALGAWLGISALPVLIFVSSLIGLVAAIVMRVAKGQHFAFGPALTVSGWIIFTANDSVWRAVNWWLTHPVL

SEQ ID NO: 10860 - protein, 718 aa, Neisseria meningitidis; identical to SEQ ID NO: 8002

SEQ ID NO: 10861 - protein, 107 aa, Neisseria meningitidis; identical to SEQ ID NO: 8140

SEQ ID NO: 10862 - protein, 177 aa, Neisseria meningitidis; identical to SEQ ID NO: 3295

SEQ ID NO: 10863 - protein, 118 aa, Neisseria meningitidis
MLSAYFPVFVFILVGLAASVLFILLGTILGPKRHYAEKDAPYECGFEAFENARMKFDVRYYLVAILFILFDLEVAFMLPWAVVFKDLGAYGFWSMLVFIVVLTVGFVYEWKKGALEWE

SEQ ID NO: 10864 - protein, 174 aa, Neisseria meningitidis; identical to SEQ ID NO: 3281

SEQ ID NO: 10865 - protein, 618 aa, Neisseria meningitidis
MMNRYPLWKYLLIVFTIAVAAVYSLPNLFGETPAVQVSTNRQAIIINEQTQSKVDAALQNAGIQTDGMFVVDNSLKVRFKDTETQLKARDVIENTLGEGYITALNLLADSPEWMAKIKANPMFLGLDLRGGVHFTMQVDMKAAMQKTFERYSGGIRRELRREKIRSGTVRQAGNSLTVPLQDAGDVQKALPQLRKLFPEATLNSDGSNIVLTLSEEAVNKVRSDAVKQNITTLHNRVNELGVAEPVIQQSGADRIVVQLPGVQDTAKAKDIIGRTATLELRMVEDDPAKLREALEGNVPSGYELLSSGGDRPETLLISKQVELTGDNINDAQPSFDQMGAPAVSLSLDSAGGSIFGELTAANVGKRMAMVLIDQGKSEVVTAPVIRTAITGGRVEISGSMTTAEANDTSLLLRAGSLAAPMQIVEERTIGPSLGKENIEKGFHSTLWGFAIVAAFMVVYYRLMGFFSTIALSANILFLIGILSAMQATLTLPGMAALALTLGMAIDSNVLINERIREELRVGVPPQQAINLGFQHAWATIVDSNLTSLIAGIALLVFGSGPVRGFAVVHCLGILTSMYSSVVVFRALVNLWYGRRRKLQNISIGAVWKPEAETAAGKE

SEQ ID NO: 10866 - protein, 503 aa, Neisseria meningitidis
MRPFYEARYIRRKVMEKHNGTYRDLHRPASEFATRDEYLEHELQIMQPKRWRPNLPFRDYRFEWEDLIPAMAGTIGKVVMVGAVAAAFAAPLGLPDSFVLENVRYELLIAAAFILLVSGFFLPGANLPGTHGPLIPMIPIVVSAGGHPLAFGISIAVLGLLMALFRGGSIMAKLTSNGVCGGLLLYLGFIGTTGQVKKLFSWAGGFNMPYIAFTVIIVTIVMYALLEHWKKRWLAVPLGCLIAGVVAFALGAPFEFHTAPGLPPMSPAYWWGENSGWHLGLPTAESFLVVFPFAVLAVAMWSPDFLGHQVFQKISYPEKTDKVLMNIDDTMTSCSVRQAVGSILGGANFTSSWGTYIVPASIAKRPIPGGAVLTAVLCIIAGLWGYPMDLAIWQPVLSVALVVGVYLPLLEAGMEMTRKGKTTQSAAIVVFSSALVNPVFGWALTMLLDNLGLIGCKERSAQLGFAGRVLIPAVGFLILCVAMGAVGMLPGIPPFLEHFKSLG

SEQ ID NO: 10867 - protein, 199 aa, Neisseria meningitidis
MRKQNTLTGIPTSDGQRGFALFIVLMVMIVVAFLVVTAAQSYNTEQRISANESDRKLALSLAEAALREGELQVLDLEYDTDSKVTFSENCEKGLCTAVNVRTNTNNGNEEAFDNIVVQGKPTVEAVKRSCPAKSTGLCIDNKGMEYKKGTRSVSKMPRYIIEYLGVKNGENVYRVTAKAWGKNANTVVVLQSYVSNNDE

SEQ ID NO: 10868 - protein, 391 aa, Neisseria meningitidis; identical to SEQ ID NO: 7218

SEQ ID NO: 10869 - protein, 254 aa, Neisseria meningitidis
LPTEDIEEIFMSANVSRLVVQNLQKSFKKRQVVKSFSLEIESGEVVGLLGPNGAGKTTSFYMIVGLIAADAGSVMLDGQELRHLPIHERARLGVGYLPQEASIFRKMTVEQNIRAILEISTKDKSRIDGEVEKLLADLNIERLRNNPAPSLSGGERRRVEIARVLAMKPHFILLDEPFAGVDPIAVIDIQKIIGFLKSRGIGVLITDHNVRETLSICDRAYIISDGTVLASGKPDDLVGNEQVRSVYLGKNFKY

SEQ ID NO: 10870 - protein, 305 aa, Neisseria meningitidis
MNVSVLNFGNTPVSFRQDGFLNATAIASHFGKLPKDYLKSEQTQQYISALAENLSVRRKILTEANQIVIVKRGGSEQGTWLHPKLAIHFARWLNPKFAVWCDEQIEILLNGKISDGIKTVTPKPTRALPDGLTGEQIEAVKKLHNALTKSAPKEAQARIAITLWSAVKSKFGCSYKEVPAEQFPEVLSVMSRVAVENGVLYGEVLDREPLPAPQPALPISGNALYDLAVAVRYGAWAIQMGRDVSLPLKQLGCKQAVTMWTVWAETRSRLKAAANALEALNAHADAEHAAKIRPMLPEIRNLSSV

SEQ ID NO: 10871 - protein, 164 aa, Neisseria meningitidis; identical to SEQ ID NO: 7379

SEQ ID NO: 10872 - protein, 861 aa, Neisseria meningitidis
MLEAYRKAAAERAALGIPALPLNAQQTADLVELLKSPPAGEGEFLVELLAHRVPPGVDDAAKVKASFLAAVAEGSASSPLISPEYATELLGTMLGGYNIHTLIELLDDDKLAPIAAKGLKHTLLMFDSFHDVQEKAEKGNKYAQEVLQSWADAEWFTSRAKVPEKITVTVFKVDGETNTDDLSPAPDAWSRPDIPLHALAMLKNPRDGITPDKPGEVGPIKLLEELKAKGHPVAYVGDVVGTGSSRKSATNSVIWHTGEDIPFVPNKRFGGVCLGGKIAPIFFNTQEDSGALPIEVDVSALKMGDVVDILPYEGKIVKNGETVAEFELKSQVLLDEVQAGGRINLIIGRGLTAKAREALKLPASTAFRLPQAPAESKAGFTLAQKMVGRACGLPEGQGVRPGTYCEPRMTTVGSQDTTGPMTRDELKDLACLGFSADMVMQSFCHTAAYPKPVDVKTHKELPAFISTRGGVSLRPGDGVIHSWLNRLLLPDTVGTGGDSHTRFPIGISFPAGSGLVAFAAATGVMPLDMPESVLVRFSGKLQPGVTLRDLVNAIPLYAIKQGLLTVAKAGKKNIFSGRILEIEGLPDLKVEQAFELTDASAERSAAGCTVKLNKEPIIEYMKSNVVLMKNMIADGYQDPRTLERRIKAMEKWLANPELLEADKDAEYAAVIEINMDDIKEPIIACPNDPDDVCFMSERSGTKIDEVFIGSCMTNIGHFRAASKLLEGKADTPVRLWIAPPTKMDAKQLSDEGHYGVLGRAGARMEMPGCSLCMGNQAQVREGATVMSTSTRNFPNRLGKNTFVYLGSAELAAICSKLGKIPTVEEYQANIGIINEQGDKIYRYMNFNEIDSYNEVAETVNV

SEQ ID NO: 10873 - protein, 375 aa, Neisseria meningitidis; identical to SEQ ID NO: 8635

SEQ ID NO: 10874 - protein, 338 aa, Neisseria meningitidis
MIGGLMQFPYRNVPASRMRRMRRDDFSRRLMREHTLTADDLIYPVFVLEGSAREEDVPSMPGVKRQSLDRLLFTAEEAVKLGIPMLALFPVVTANKTERAQEAYNPEGLVPSTVRALRERFPELGIMTDVALDPYTVHGQDGLTDENGYVMNDETVEVLVKQALCHAEAGAQVVAPSDMMDGRIGAIREALEDAGHIHTRIMAYSAKYASAFYGPFRDAVGSSGNLGKADKKTYQMDPANTDEALHEVALDIQEGADMVMVKPGLPYLDVVRRVKDEFGVPTYAYQVSGEYAMLQAAVANGWLDGDKVVLESLLAFKRAGADGILTYYAIEAAKMLKR

SEQ ID NO: 10875 - protein, 318 aa, Neisseria meningitidis; identical to SEQ ID NO: 2723

SEQ ID NO: 10876 - protein, 415 aa, Neisseria meningitidis
MLKQTTLLAACASFAALLGGCATQQPAPVIAGNSGMQDAPSSAVYNNPYGATPYSPAPAGDAPYVPPVQSAPVYTPPAYVPPSAPAVSGTYVPSYAPVDINAATHTIVRGDTVYNISKRYHISQDDFRAWNGMTDNTLSIGQIVKVKPAGYAAPKAAAVKSRPAVPVAAQPPVQSAPVDINAATHTIVRGDTVYNISKRYHISQDDFRAWNGMTDNMLSIGQIVKVKPAGYAAPKTSAVESRPAVPAAVQTPVKPAAQPPVQSAPQPAAPAAENKAVPAPAPQSPAASPSGTRSVGGIVWQRPTQGKVVADFGGNNKGVDIAGNAGQPVLAAADGKVVYAGSGLRGYGNLVIIQHNSSFLTAYGHNQKLLVGEGQQVKRGQQVALMGNTDASRTQLHFEVRQNGKPVNPNSYIAF

SEQ ID NO: 10877 - protein, 109 aa, Neisseria meningitidis
MDVQKQYPFETVAVCVLPNHIHAIWTLPPDDADYSLLRRLIKTKFSAYSPYTKNLSAGKQRQHERGIWQRRFYGHTVRDETDLQRCADYIHSNPIKQKMSRAKTESCKK

SEQ ID NO: 10878 - protein, 208 aa, Neisseria meningitidis; identical to SEQ ID NO: 1448

SEQ ID NO: 10879 - protein, 352 aa, Neisseria meningitidis; identical to SEQ ID NO: 327

SEQ ID NO: 10880 - protein, 119 aa, Neisseria meningitidis; identical to SEQ ID NO: 1252

SEQ ID NO: 10881 - protein, 152 aa, Neisseria meningitidis; identical to SEQ ID NO: 77

SEQ ID NO: 10882 - protein, 492 aa, Neisseria meningitidis
MFSKLTPLAETGIPTLSCANAAGRLLHSDSRQIKQGDIFVACPGEYADGRSYIPAAVANGAAFVFWDDDGKFAWNPEWKVPNQGIKDLKHRAGILAAQVYGNVSDGLKFWGVTGTNGKTSITQWLAQAADLLGEKTAIVGTVGNGFWGALEETTHTTPAPVDVQTLLYRFRQQGATAAAMEVSSHGLDQSRVNGVPFRSAIFTNLTRDHLDYHGTMEAYGAIKSRLFYWHGLKHAVINVDDGYGAELIGRLKKDCPDLAVYSYGFSEHADIRITDFTASSDGIEAVFRTPWGEGKCRTRLLGRFNAQNLAACIALLCANDYPLDKVLDVLAKIRPASGRMDCIMNSGKPLVVVDYAHTPDALEKALATLQEIKPQGAALWCVFGCGGNRDRGKRLLMGAAAVQGADKVVVTSDNPRLENPHDIINDILPAVPAPECVEADRAAAIRYAVEQAAANDIILIAGKGHENYQDVQGVKHRFSDLEIVGQALLTRK

SEQ ID NO: 10883 - protein, 257 aa, Neisseria meningitidis; identical to SEQ ID NO: 780

SEQ ID NO: 10884 - protein, 65 aa, Neisseria meningitidis; identical to SEQ ID NO: 127

SEQ ID NO: 10885 - protein, 350 aa, Neisseria meningitidis; identical to SEQ ID NO: 8682

SEQ ID NO: 10886 - protein, 238 aa, Neisseria meningitidis; identical to SEQ ID NO: 3066

SEQ ID NO: 10887 - protein, 121 aa, Neisseria meningitidis; identical to SEQ ID NO: 1070

SEQ ID NO: 10888 - protein, 249 aa, Neisseria meningitidis
MPSERKDMIKFKNVHKHFKDLHVINGVNLEIKKGEVVVVCGPSGSGKSTLIRTVNQLESIESGEIWVDGVNVADPKTDLNKIREEVGFVFQSFNLYPHLTVLENITLAPMKVKGQNAEQAEKKAMELLERVGLAHKKDAFPSQLSGGQQQRVAIARGLAMEPRVMLFDEPTSALDPEMVGEVLKVMKDLAESGMTMMCVTHEMGFAREVADRVIFVDKGQILEDETPEAFFTNPKHERAKQFLQQVMTH

SEQ ID NO: 10889 - protein, 428 aa, Neisseria meningitidis
MIYIVLFLAVVLAVVAYNMYQENQYRKKVRDQFGHSDKDALLNSKTSHVRDGKPSGGSVMMPKPQPAVKKTAKPQDPAMRNLQEQDAVYIAKQKQAKASPFKTEIETALEESGIIGNSAHTVSEPQTGHSAPKPADAPAKPAPVPQTPAKPLITLKELSKVELPWFDVRFDFISYIALTEAKELHALPRLSNRCRYQIVGCTMDDHFQIAEPIPGIRYQAFIVGIQAVSRNGLASQEELSAFNRQVDAFAQSMGGQTLHTDLAAFIEVASALDAFCARVDQTIAIHLVSPTSISGVELRSAVTGVGFVLEDDGAFHYTDTSGSTMFSICSLNNEPFTNALLDNQSYKGFSMLLDIPHSPAGEKTFDDLFMDLAVRLSGQLNLNLVNDKMEEVSTQWLKDVRTYVLARQSEMLKVGIEPGGKTALRLFS

SEQ ID NO: 10890 - protein, 245 aa, Neisseria meningitidis
MALQDRTGQKVPSVVFRTRVGDTWKDVSTDDLFKGKKVVVFSLPGAFTPTCSSSHLPRYNELFGAFKENGVDAIYCVSVNDTFVMNAWAAEEESDNIYMIPDGNGEFTEGMGMLVGKEDLGFGKRSWRYSMLVNDGVVEKMFIEPEEPGDPFKVSDADTMLKFVAPDWKAQESVAIFTKPGCQFCAKAKQALQDKGLSYEEIVLGKDATVTSVRAITGKMTAPQVFIGGKYIGGSEDLEAYLAKN

SEQ ID NO: 10891 - protein, 259 aa, Neisseria meningitidis; identical to SEQ ID NO: 2978

SEQ ID NO: 10892 - protein, 451 aa, Neisseria meningitidis; identical to SEQ ID NO: 8048

SEQ ID NO: 10893 - protein, 421 aa, Neisseria meningitidis; identical to SEQ ID NO: 9531

SEQ ID NO: 10894 - protein, 352 aa, Neisseria meningitidis; identical to SEQ ID NO: 2780

SEQ ID NO: 10895 - protein, 864 aa, Neisseria meningitidis; identical to SEQ ID NO: 8467

SEQ ID NO: 10896 - protein, 344 aa, Neisseria meningitidis
LEDEDFIRAASMLAEEVFGFGIYKESKGSGGRFYERCWLMGSEDVLYGRVHFGGQNNTILFELTGTGCGVAKEGWESRLFAFLTNAIRPKITRVDIAKDFFNGEYSPNQAREDRNKGMFTCHHVKPKGECLGSDWEEDDEAKMTKGKTYGIGSRESSKYVRVYEKGKQLGDKTSTWTRFEIEFKAKDIVIPFEVLQNPGEYFGGAYPICERFAQKATRIHAVKEDKVISADRYLEWVKKQFGRAANGLKFIFPELDKAKLFELIEPSHHKLPKSLAPEAYDCAFLKAQAIHEQPAFKPYKDPYYMYEYYENLEKQLEQQKHVNNEESYNNFIYDKFARLPISWA

SEQ ID NO: 10897 - protein, 558 aa, Neisseria meningitidis; identical to SEQ ID NO: 1615

SEQ ID NO: 10898 - protein, 979 aa, Neisseria meningitidis; identical to SEQ ID NO: 9381

SEQ ID NO: 10899 - protein, 118 aa, Neisseria meningitidis
VRSCPGGVFIYGANMKLIYTFIKIIILLLFLLLAVINTDAVTFSYLPGQKFDLPLIVVLFGAFVVGIIFGMFALFGRLLSLRGENGRLRAEVKKNARLTGKELTAPPAQNAPESTKQP

SEQ ID NO: 10900 - protein, 268 aa, Neisseria meningitidis
MQNHVISLASAAERRAHIAATFGARGIPFQFFDALMPSERLEQAMAELVPGLSAHPYLSGVEKACFMSHAVLWKQALDEGLPYIAVFEDDVLLGEGAEKFLAEDAWLKERFDPDSAFIVRLETMFMHVLTSPSGVADYCGRAFPLLESEHWGTAGYIISRKAMRFFLDRFAVLPSERLKAVDWMLFSSFLDKGGMTVCQLTPALCVQSETLPSQLKNGRQESYRNRRSPKVLLKRALGKIGREIERARERKRQKKLEKHLGRHVVPFE

SEQ ID NO: 10901 - protein, 702 aa, Neisseria meningitidis
VCAPARMRSMIYGSMPSEKLTIFQTAFVMQVNIQIPCMLYRRGSVKPPLFEAPRLLPSFTDPVVPKLSAPGGYIVDIPKGNLKTEIEKLAKQPEYAYLKQLQTAKNVDWKQVQLAYDKWDYKQEGLTGAGAAIVVIIVTALTYGYGAAAAGSVTAAGSSTAAAATTTAAATTTVSTAAAMQTAALASLYSQAAVAIINNKGDVGKALKDLGTSDTVKQIVTSALTAGALNQMGADIAQLNSKVRTELFSSTGNQTIANLGGRLATNLSNAGISAGINTAVNGGSLKDNLGNAALGALVNSFQGEAASKIKTTFSDDYVAKQFAHALAGCVSGLVQGKCKDGAIGAAVGEIVAESILGGRNPATLSDAEKHKVISYSKIIAGSVAALNGGDVNTAANAAEVAVVNNALNFDSTPTNAKKHQPQKPDKTALEKIIQSIMPAHAAGAMTNPQDKDAAIWISNIRNGITGPIVITSYGVYAAGWTAPLIGTAGKAAISTCMANPSGCTVMVTQAAEAGAGIATGAVTVGNAWEAPVGALSKAKAAKQAAPKETINNLANLAKAEQQILFRIAQRDTQLDAWKTGFNNRVRKGAGLLDASNIPITINGKTIKPVQAISLKGAPVYSGVSEQEIFALYRQMTGQNPNFRVLPDGRLANGIISTGEWAGTKIALRNFSKTENSTQARWTLDLQNPPSFIKGTKLELKFQ

SEQ ID NO: 10902 - protein, 304 aa, Neisseria meningitidis; identical to SEQ ID NO: 9759

SEQ ID NO: 10903 - protein, 146 aa, Neisseria meningitidis; identical to SEQ ID NO: 5620

SEQ ID NO: 10904 - protein, 543 aa, Neisseria meningitidis
MFLILGRNFLKIILCFSFFVSKFALASVNVPGKFDRVEVYDDGRYLGIRGSDDKRRRVWEGVFDKESGRYLNSEAQDLTVRHVSTGASSTGKVSAVVSSSVSRAGVLAGVGKLARLGAKFSTRAVPYVGTALLAHDVYETFKEDIQAQGYQYDPETDKFVKGYEYSNCLWYEDERRINRTYGCYGVDSSIMRLMSDYSRFPEVKELMESQMYRLARPFWNWHKEELNKLSSLDWNNFVLNRCTFDWNGGDCVVNKGDDYRNGANFSLSRNPKYKEEMDAKKLEEILSLKVDANPDKYIKATGYPGYSEKVEVAPGTKVNMGPVTDRNGNPVQVVATFGRDSQGNTTVDVQVIPRPDLTPGSAEAPNAQPLPEVSPAENPANNPAPNENPGTRPNPEPDPDLNPDANPDTDGQPGTRPDSPAVPDRPNGRHRKERKEGEDGGLLCKFFPDILACDRLPEPNPAEDLNLPSETVNVEFQKSGIFQDSAQCPAPVTFTVTVLDSSRQFAFSFENACTIAERLRYMLLALAWAVAAFFCIRTVSREV

SEQ ID NO: 10905 - protein, 129 aa, Neisseria meningitidis; identical to SEQ ID NO: 8759

SEQ ID NO: 10906 - protein, 196 aa, Neisseria meningitidis
CLSAVCQHYQPPDENDKGSISFHSKTGNLFNMNVKVHKDTHHFGIHNLNNTDVHLTAEDSDNVIEIKGELADLMPTGNVESTSFLRGIETAFKSNTVLTGNNNKISIATEGKGLGLGVNGLQSNSPYSGRTTGIFINNQSSDLTQPSLDGISTIKLKAVKGNNEVDLNVKNHASVKGIIASHSAKATLEAEGDNIV

SEQ ID NO: 10907 - protein, 658 aa, Neisseria meningitidis; identical to SEQ ID NO: 8968

SEQ ID NO: 10908 - protein, 77 aa, Neisseria meningitidis; identical to SEQ ID NO: 3979

SEQ ID NO: 10909 - protein, 146 aa, Neisseria meningitidis
MPKATFYTHVAQVPIFTCRLIARAIRDGGRILVWSDSFGRLQELDKMLWQYEAESFIPHEIWEMEEAMPSETSVLLACGGNPPRIPEGMTVLNLSDGFWNTAPVLPARVLEIVGNSLEDLADARERFTAYRRSGFAIEHHGMEGKA

SEQ ID NO: 10910 - protein, 150 aa, Neisseria meningitidis; identical to SEQ ID NO: 3757

SEQ ID NO: 10911 - protein, 109 aa, Neisseria meningitidis; identical to SEQ ID NO: 8939

SEQ ID NO: 10912 - protein, 394 aa, Neisseria meningitidis; identical to SEQ ID NO: 277

SEQ ID NO: 10913 - protein, 1067 aa, Neisseria meningitidis; identical to SEQ ID NO: 495

SEQ ID NO: 10914 - protein, 470 aa, Neisseria meningitidis; identical to SEQ ID NO: 2364

SEQ ID NO: 10915 - protein, 219 aa, Neisseria meningitidis; identical to SEQ ID NO: 744

SEQ ID NO: 10916 - protein, 238 aa, Neisseria meningitidis; identical to SEQ ID NO: 3469

SEQ ID NO: 10917 - protein, 292 aa, Neisseria meningitidis
MARRSKTFEEAAAEVEERFGHRGIKLVEFEGTAKPCVINCPKHGNQTCSRYSNMFIGSSWGCPSCGNEQAAKAGIATLRKNHIALEMLKQAVTGMTKQERITTQAYNEMTKSVAGSNSIVLNDVQGDTTINNHHTHTHNHSDADGKALSMRLTPRPLLSDRQAAAFARTGKLTGSFDLFASVVAPSQYTFAVAMPDTSMSPVIEKGDLLVVEPRMRPADEDIVLIELSDKRLVVAHLVIDIAGRMLIYQTGRPSEALDLPEGSVILGVVLEVKKRFMSAAQARRRVDSDYRP

SEQ ID NO: 10918 - protein, 194 aa, Neisseria meningitidis
MISRLTGKLVEKNPPQIVIDVNGVGYEADVSMQTFYNLPPVGESVQLFTQLIIREDAHLLFGFATAEERKTFRQLIKVSGIGAKTALGILSAMTADELAQAVAEEDVKRLSSAPGIGKKTAERMVLELRGKLVAHAVTDGLFAAAPAADETEDIVGTLLALGYSEREAKAAVKGVPKGTDVGEGVRLALKNLLK

SEQ ID NO: 10919 - protein, 328 aa, Neisseria meningitidis; identical to SEQ ID NO: 372

SEQ ID NO: 10920 - protein, 498 aa, Neisseria meningitidis; identical to SEQ ID NO: 8909

SEQ ID NO: 10921 - protein, 128 aa, Neisseria meningitidis; identical to SEQ ID NO: 3576

SEQ ID NO: 10922 - protein, 543 aa, Neisseria meningitidis
MNWLNLRAIVPSDKQNMPNKKKKAAFARAATENGVPDVSNIKNSYDDLMYESKAFSQTAINALEARARMMGLQPAPAANAKVLELGCSMGGNIITQALYYPDAEFVGIDLSGRQVAQGNAIIEKMGLKNVRLEEKDILTVDESFGKFDYIIVHGIWSWVPDAVKDKIFSICRNNLTKHGIAYISYNVYPGWKRQEQLREIMYFAGRDVLEEPLEARTRKGLDALKALAEILENDKGLGGGGKLPAIQKILNHNTYYVAHEYMEIFNDPIYVNGFIEWANRHRLAYIGDTDLHASFVSWMAEHTRERILALAGGDYIAKEFYSDILSDRQFRRSLLCREEVGDTVRRDESVAVEVIESLNFRPARGETINFDENDTLLSGIRDVMKTGEAFKTEDVAENLARRFPGLTFDRMKINSQLLLQTILGRFSVSSDNAGKQFFEDHKTYVPARFTDYVAAFVEHGAEAFVQPANRYNESTPSFGYGHLYIMRQLSRPTSKQALIETVAENLNIVSTTPDGLTFHPPAEVYVEEILADLADRHFLVSAD

SEQ ID NO: 10923 - protein, 296 aa, Neisseria meningitidis
MFPVFHLSGESRRRMLQAASRFPYVFKARAEDSHKGTFGTLAVVGGSAGMRGAPVLAASAAMYLGCGKVWAGFNQDALPFAVIAGFPEIMLDTADGLTKRQGINAWMVGCGLGTDKAAVGTLAGILAEHTDKPVLLDADALNILSTDAETRNLARGCKNLILTPHPAEAARLLGTTVAQVQADRTAAVRKIRAIFGATVVLKGHKTLVASPDTEIYVNESGNAGLATAGSGDVLGGIIGSLLAQGVPVFEAACAGVWLHGAAADVIKESAGIAAGLLAGEISPAARWLRNRITESM

SEQ ID NO: 10924 - protein, 419 aa, Neisseria meningitidis
MCSNTPQAATKNRETRHMTGIIHSLLDTDLYKFTMLQVVLHQFPQTHSLYEFRCRNASTVYPLADIKEDLEAELDALCRLRFTHDELGYLRSLRFIKSDFVDYLELFQLQRRFVEIGTDDKDRLNIRIEGPMIQAMFFEIFILAIVNELYFRRLETPAVIEEGERRLQAKAARLKEIAAAQNPDDPPFLISDFGTRRRYKLAWQEHVIRTLLEAAPSIVRGTSNVFLAKKLGITPIGTMAHEFLQAFQALDVRLRNFQKAALESWVHEYRGDLGVALTDVVGMDAFLRDFDLYFAKLFDGLRHDSGDPYVWGDKAYAHYQKLKIDSRTKMLTFSDGLDIERSWALHQYFKDRFKTGFGIGTNLTNDMGHTPLNIVLKLVECNGQSVAKLSDSPGKTMTNNSTFLAYLRQVFDVPEPETP

SEQ ID NO: 10925 - protein, 201 aa, Neisseria meningitidis; identical to SEQ ID NO: 2357

SEQ ID NO: 10926 - protein, 144 aa, Neisseria meningitidis
LRRDMSEQTALAVCADGVETALAEAASLLEEGCGSVLVLAADDPLPEGYAVSATRAPFAYALAMVLTKGTRYSLTLSASDDMPSEAGMLPEAYWSGLEWVRFLLNGSRECRRVYRNREWLWQPASCRLKISAMSAPSTTWYRRY

SEQ ID NO: 10927 - protein, 59 aa, Neisseria meningitidis; identical to SEQ ID NO: 642

SEQ ID NO: 10928 - protein, 271 aa, Neisseria meningitidis; identical to SEQ ID NO: 3288

SEQ ID NO: 10929 - protein, 437 aa, Neisseria meningitidis
MMSVTVETLENLERKVVLSLPWSEINAETDKKLKQTQRRAKIDGFRPGKAPLKMIAQMYGASAQNDVINELVQRRFHDVAVAQELKVAGFPRFEGVEEQDDKESFKVAAIFEVFPEVVIGDLSAQEVEKVTASVGDAEVDQTVEILRKQRTRFNHVEREARNSDRVIIDFEGKIDGEPFAGGASKNYAFVLGAGQMLPEFEAGVVGMKAGESKDVTVNFPEEYHGKDVAGKTAVFTITLNNVSEATLPEVDADFAKALGIADGDVAKMREEVQKNVSREVERRVNEQTKESVMNALLKAVELKAPVALVNEEAARLANEMKQNFVNQGMADAANLDLPLDIFKEQAERRVSLGLILAKLVDENKLEPTEEQVKAVVANFAESYEDPQEVIDWYYAEPSRLQAPTSLAIESNVVDFVLGKAKVNEKALSFDEVMGAQA

SEQ ID NO: 10930 - protein, 300 aa, Neisseria meningitidis; identical to SEQ ID NO: 9406

SEQ ID NO: 10931 - protein, 475 aa, Neisseria meningitidis; identical to SEQ ID NO: 2942

SEQ ID NO: 10932 - protein, 388 aa, Neisseria meningitidis; identical to SEQ ID NO: 9033

SEQ ID NO: 10933 - protein, 101 aa, Neisseria meningitidis; identical to SEQ ID NO: 1118

SEQ ID NO: 10934 - protein, 410 aa, Neisseria meningitidis; identical to SEQ ID NO: 446

SEQ ID NO: 10935 - protein, 78 aa, Neisseria meningitidis; identical to SEQ ID NO: 1622

SEQ ID NO: 10936 - protein, 273 aa, Neisseria meningitidis; identical to SEQ ID NO: 8582

SEQ ID NO: 10937 - protein, 404 aa, Neisseria meningitidis; identical to SEQ ID NO: 8535

SEQ ID NO: 10938 - protein, 458 aa, Neisseria meningitidis; identical to SEQ ID NO: 3358

SEQ ID NO: 10939 - protein, 526 aa, Neisseria meningitidis; identical to SEQ ID NO: 2237

SEQ ID NO: 10940 - protein, 366 aa, Neisseria meningitidis
MSTFFQQTAQAMIAKHIDRFPLLKLDQVIDWQPIEQYLNRQKTRYLRDHRGRPAYPLLSMFKAVLLGQWHSLSDPELEHSLITRIDFNLFCRFDELSSIVDQKPVRRCLALAQRERFSKVLKHQVNRFRTICTVCGFVALSFLLIHYTLCRYRNWLAQDNTLSELLELINCQLTEKGLKVEKALTPPLFRPLAANSVRPKLTKKDKSAAKPHRVKTAMPVGRKTASTNSVTNNIPVPMWKAISRNCTLPPPMPMSANTCRLCWKGLKVRPSMPTKAMTVRKTGNIWKSVSCTALCAKPAATVRCRKRKPNATDICRRPVMWSNKASVRCTVNSAMRGQPISDLKVRKATRRCVTCKPPTGVRPLPP

SEQ ID NO: 10941 - protein, 449 aa, Neisseria meningitidis; identical to SEQ ID NO: 481

SEQ ID NO: 10942 - protein, 249 aa, Neisseria meningitidis
MPSVELLLEIVGLPRGTFYYQLAVQSAEDKYADLKRHIHDIYRRHKGRYGYRRIAAAIRHAGTPVNHKKVSRLMAKTGLKAVIRRRKYRSFKGEVGKIAPNILRRCFHAEKPNEKWVTDVTEFNVGGEKIYLSPIMDLFNGEIVSYRIQIRPTFDLAGEILKGAPEKPGSSEKPILHSDQGWQYQMFFYSGLNLNQDKAMKPQTVQIVRQGEATPYWFKFNPLYNNDRIKLKLKGLSLVQYRIQSLKAA

SEQ ID NO: 10943 - protein, 701 aa, Neisseria meningitidis; identical to SEQ ID NO: 1407

SEQ ID NO: 10944 - protein, 199 aa, Neisseria meningitidis; identical to SEQ ID NO: 9118

SEQ ID NO: 10945 - protein, 601 aa, Neisseria meningitidis
MRYKPLLLALMLVFSTPAVAAHDAAHNRSAEVKKQTKNKKEQPEAAEGKKEKGKNGAVKDKKTGGKEAAKEGKESKKTAKNRKEAEKEATSRQSARKGREGDKKSKAEHKKAHGKSVSGSKEKNAKTQPENKQGKKEAKGQGNPRKGGKAEKDTVSANKKVRSDKNGKAVKQDKKYREEKNAKTDSDELKAAVAAATNDVENKKALLKQSEGMLLHVSNSLKQLQEERIRQERIRQERIRQARGNLASVNRKQREAWDKFQKLNTELNRLKTEVAATKAQISRFVSGNYKNSQPNAVALFLKNAEPGQKNRFLRYTRYVNASNREVVKDLEKQQKALAVQEQKINNELARLKKIQANVQSLLKKQGVTDAAEQTESRRQNAKIAKDARKLLEQKGNEQQLNKLLSNLEKKKAEHRIQDAEAKRKLAEARLAAAEKARKEAAQQKAEARRAEMSNLTAEDRNIQAPSVMGIGSADGFSRMQGRLKKPVDGVPTGLFGQNRSGGDVWKGVFYSTAPATVESIAPGTVSYADELDGYGKVVVVDHGENYISIYAGLSEISVGKGYMVAAGSKIGSSGSLPDGEEGLYLQIRYQGQVLNPSSWIR

SEQ ID NO: 10946 - protein, 162 aa, Neisseria meningitidis
MKKDIFYCEQWSYGYKRLHKPFSEKQAEEKHIKGELYSAVIGSATQPEYVITLREEVGFFSVDFFDKFGRDYLTHQFQKYSNSNYYFLSMAVWRDYITLDSHDLAEGYTYFFNENTDDCYVLKEDFINNERYEKTELYSQKDKVILFPKFGEYDLVLNPDII

SEQ ID NO: 10947 - protein, 469 aa, Neisseria meningitidis; identical to SEQ ID NO: 3473

SEQ ID NO: 10948 - protein, 277 aa, Neisseria meningitidis; identical to SEQ ID NO: 3602

SEQ ID NO: 10949 - protein, 87 aa, Neisseria meningitidis; identical to SEQ ID NO: 932

SEQ ID NO: 10950 - protein, 397 aa, Neisseria meningitidis; identical to SEQ ID NO: 8317

SEQ ID NO: 10951 - protein, 392 aa, Neisseria meningitidis; identical to SEQ ID NO: 2495

SEQ ID NO: 10952 - protein, 501 aa, Neisseria meningitidis
MYALSEKYNDNGFKAYKVLGEGGGIYTEYNYKFDKSLNLNVLESSTGARSLEKVPVKFTASVSRAGVLAGVGKLARLGAKFSTRAVPYVGTALLAHDVYETFKEDIQARGYQYDPETDKFVKGYEYSNCLWYEDERRINRTYGCYGVDSSIMRLMSDYSRFPEVKELMESQMERLARPYWEKLRNRPDMYYFKNYNFKRCYFGLNGGDCLVAKGDDGRTFISFSLQGNSKYKEEMDAKKLEEILSLKVDANPDKYIKATGYPGYSEKVEVAPGTKVNMGPVTDRNGNPVQVVATFGRDSQGNTTVDVQVIPRPDLTPGSAEAPNAQPLPEVSPAENPANNPAPNENPGTRPNPEPDPDLNPDANPDTDGQPGTRPDSPAVPDRPNGRHRKERKEGEDGGLLCKFFPDILACDRLPEPNPAEDLNLPSETVNVEFQKSGIFQDSAQCPAPVTFTVTVLDSSRQFAFSFENACTIAERLRYMLLALAWAVAAFFCIRTVSREV

SEQ ID NO: 10953 - protein, 247 aa, Neisseria meningitidis; identical to SEQ ID NO: 4076

SEQ ID NO: 10954 - protein, 672 aa, Neisseria meningitidis; identical to SEQ ID NO: 9125

SEQ ID NO: 10955 - protein, 485 aa, Neisseria meningitidis
MHKILPIAHVLSRLGMLFSFILLIPAALSYAFSDGAYTAFATTATVTLSGSYIVRLATLRFRRELRPRDGFTLVLMLWLAFAAMAAMPMYLYFPNMGFTDAFFESMSGLTTTGATVIPHVDGLAPSVNFWRHMLNWLGGMGIIVLAVAILPMLGVGGTQLFKAEIPGIDKESKMSPRISQVAKKLWFGYTLITILAAACLHFAGMSWFDAVCHAMATLSLGGFSTHDASIAYYNSPLIEAVIIVFTIVGGINFASHFAALNSRSLKTYWKDEECRTMLLLLSGSILTAALYLWHTGYYAGFTESLRYTAFNFVSIGLANGLANTDFAQWPLLISLWMFFLANILANSGSTGGGIKTIRALVLFKFSLREMMVLLHPKAVRTVKISGKAIPDRLALTVMSFIFIYFMTVVLFSFLLMASGMEFTTAFTAVIACITNAGPGLGEVGPAGNYAGLDVMQKWICVTAMLLGRLEIFTVFILFTPAYWKK

SEQ ID NO: 10956 - protein, 405 aa, Neisseria meningitidis
MTAPVPTCNMSGNPINLHKLTLIMPLPLPSPEARQFSLKLQTLIAEEIGKHGNWIPFSRFMELVLYAPQYGYYTGGSHKIGNTGDFITAPTLTSLFAQTLARQLQELLSQTAGNIYEFGAGTGQLAADLLGSISDGISRYYIIEISPELAARQKNLIQARAPEASQKVVHLTALPEAFDGIIIGNEVLDAMPVEIVRKNEGGSFEHVGVCLDNDRFTYSARPLHDLQLSALASLYFPQTDYPYTSELHPQQYAFIRTLASRLERGGMIFIDYGFDAAQYYHPQRNQGTLIGHYRHHVIHNPFDFIGLADLTAHVNFTDIAQAGTDAGLDLTGYLPQSHFLLNLGITELLAQVGKTDSPAYIREAAAVQKLIDQHEMGELFKVIAFGKNIGVDWAGFRFGDICHKL

SEQ ID NO: 10957 - protein, 245 aa, Neisseria meningitidis
MIILDKVSKHYQTRDKTRFAAVEPTSLEIRDGEIFGLMGYSGAGKSTLLRLINLLERPDSGKVNVCGQELTALDAAALRQARQNIGMVFQQFNLLNNRTVAGNVAFPLEIAGWPSEKIKARVAECLEIVGLTERAGHYPAQLSGGQKQRVGIARALAPKPQVILADEPTSALDPATTRSVLECLEDINKRFNVTIVIVTHEMSVIRRLCDRSALLDKGKVVEIVEVRGNQIHARSDIGRELIRED

SEQ ID NO: 10958 - protein, 329 aa, Neisseria meningitidis; identical to SEQ ID NO: 247

SEQ ID NO: 10959 - protein, 69 aa, Neisseria meningitidis; identical to SEQ ID NO: 8208

SEQ ID NO: 10960 - protein, 648 aa, Neisseria meningitidis
MPLFFNLSERLMLNITLPDGSVRQYESPVTVAQIAASIGVGLARAAVAGRVNGKLVDACDPIVENSAVQIITPKDQEGIEIIRHSCAHLVGHAVKQLYPNAKMVIGPVIEEGFYYDIATEKPFTPEDVAAIEARMKELIAQDYDVVKIMTPRAEAIKIFQERGEEYKLRLIDDMPEVEAMGMYHHQEYVDMCRGPHVPNTRFLKNFKLTKLAGAYWRGDSNNEMLQRIYGTAWATKDELKAYIQRIEEAEKRDHRKLGKQLDLFHLQDEAPGMVFWHPKGWALWQVIEQHMRKELNAAGYKEVKTPQIMDKTFWEKSGHWDNYKDNMFVTSSEKREYAVKPMNCPGHVQIFNNGLRSYRDLPMRLAEFGSCHRNEPSGALHGLMRVRGFVQDDAHIFCTEDQIVSEARAFNELLVRIYKQFGFHDVAVKLSLRPEQRAGSDEVWDKAEQGLRDALTACGVEWEELPGEGAFYGPKIEYHVKDALGRSWQCGTLQLDFVLPERLDAEYVTENNDRARPVMLHRAILGSLERFIGILIENHAGSFPLWLAPVQMVIMNITENQADYCREVAAKLQAAGFRAELDLRNEKIGYKIRDNSQYRFPYQIVVGDKEKQENKVAVRRKAEDLGSLDLDDFIAQLQQEITDALVNH

SEQ ID NO: 10961 - protein, 89 aa, Neisseria meningitidis; identical to SEQ ID NO: 6952

SEQ ID NO: 10962 - protein, 377 aa, Neisseria meningitidis
MKRILCITGTRADFGKLKPLLAYIENHPDLELHLIVTGMHMMKTYGRTYKEVTRENYQHTYLFSNQIQGEPMGAVLGNTITFISRLSDEIEPDMVMIHGDRLEALAGAAVGALSSRLVCHIEGGELSGTVDDSIRHSISKLSHIHLVANEQAVTRLVQMGEKRKHIHIIGSPDLDVMASSTLPSLEEVKEYYGLPYENYGISMFHPVTTEAHLMPQYAAQYFKALELSGQNIISIYPNNDTGTESILQELLKYQSDKFIAFPSIRFEYFLVLLKHAKFMVGNSSAGIREAPLYGVPSIDVGTRQSNRHMGKSIIHTDYETKNIFDAIQQACSLGKFEADDTFNGGDTRTSTERFAEVINNPETWNVSAQKRFIDLNL

SEQ ID NO: 10963 - protein, 766 aa, Neisseria meningitidis; identical to SEQ ID NO: 8604

SEQ ID NO: 10964 - protein, 503 aa, Neisseria meningitidis; identical to SEQ ID NO: 8447

SEQ ID NO: 10965 - protein, 339 aa, Neisseria meningitidis; identical to SEQ ID NO: 8559

SEQ ID NO: 10966 - protein, 193 aa, Neisseria meningitidis; identical to SEQ ID NO: 1378

SEQ ID NO: 10967 - protein, 1048 aa, Neisseria meningitidis
MNKTWKRQVFRHTALYTAILMFSHTGGGGGAQAQENPYAIVMNSQKLPEVKWGNSYKKGELRPEDRDRKFTFTSTYGIKRNTNITFNNTDYLVSEKNGTAVFGAATYLPPYGKVSGFDTDRLTKRGNAVDWINTTHPGLIGYSYQGITCSSSSSCPEFGYKTQFTFGNSGLAKKTNSSKLDIYEDKSRDNSPIYKLQDYPWLGVSFNLSSDSYVKQKRHNSLVSSFSEDVTQSNGTQSPYKDRNLVYRTDDYHNKGNYSHQDAHHAIAFYLNAKLHLLDKKQIKNIAQGSELNLGMLKTHIELPKNFNQRSLVGSVVSWTVKDEGKVSVKLKLPEVKAGRCINKDNPNPKSKAPSPALTAPALWFGPVQNGKAQMYSASVSTYPDSSSSRIFLQNLKRKDDPNKPGRHSLATLTENDIKNREPTFNQRQTIIRLDGGVQQIKLDKSNEATGLNGNTNNNTFGIVKDLGVDPDANEWKKVLLPWTVRAFNDDGRFNTVNKEENNGKPKYSQKYRSRDNGKHERNLGDIVNSPIVAVGEYLATSANDGMVHIFKQSGGDKRSYNLKLSYIPGTMPRKDIQNTESTLAKELRAFAEKSYVGDRYGVDGGFVLRKVERNGKDHVFMFGAMGFGGRGAYALDLSKIDSGNGNLADVSLFDVKHDKNGNNGVKLGYTVGTPQIGKTHDGKYAAFLASGYATKDITSGDNKTALYVYDLESSGTLIKKIEVPNGKGGLSSPTLVDKDLDGTVDIAYAGDRGGNMYRFDLSNNDPTKWSVRTIFKGTPDKPITSAPAVSKLKDKRVVIFGTGSDLSEDDVDKKDIQSIYGIFDNDTGTDVAEEGQGKGLLEQHLTQEDKTLFLTDYKRSDGSGDKGWVVKLEAGQRVTVKPTVVLRTAFVTIRKYNDGGCGAETAILGINTADGGKLTKKSARPIVPEANTAVAQYSGHKQTAKGKSIPIGCMWKNNETVCPNGYVYDKPVNVRYLDEKKTDGFSTTADGDAGGSGIDPAGKRSGKNNRCFSQKGVRTLLMNDLDSLDITGPTCGMKRISWREVFY

SEQ ID NO: 10968 - protein, 256 aa, Neisseria meningitidis; identical to SEQ ID NO: 3040

SEQ ID NO: 10969 - protein, 416 aa, Neisseria meningitidis; identical to SEQ ID NO: 2246

SEQ ID NO: 10970 - protein, 298 aa, Neisseria meningitidis; identical to SEQ ID NO: 2777

SEQ ID NO: 10971 - protein, 744 aa, Neisseria meningitidis
MKADIQTELTQALLSHEKVWANEEKTILAKNILLDLVEKTDPAIIGLLLGNDELKRHFFVEVNGVLVFKLQDFRFFLDKHSVNNSYTKYANRIGLTDGNRFLKDSSDIVLDFPFKDCVLNGGQSSEEGEEIYFKHSNSQPASQPASQPASQPASQPASQPASQPASQPASQLYTKLTRKRQEIFFNQTLAFDEIDRLFDAKAFSKFSRHTADGKQAVGEIKRHSDGTPAENLIIKGNNLIALHSLATQFKGKVKLIYIDPPYYFVKKKQQDSFGYNTNFKLSTWLTFMKNRLSIAKELLTDDGIIVISIDDDGNAYLKILLDEIFGFENFIGNLPTIMNLKGNNDEYAFAGTHEYTLVFAKNKDKSTFYEFPIDEDNFLEKWEEDEIGFYKKGAPMRATGTEDKREDRPEMFYPFLVKNNTVSTITDEEFSQIYNKDLEVFNDDFIQKLKEKYENLGYNFILPIADKQWGRWRWGYSIKNKARLQTDIIVSQSKNGISLYKKQRPELDDLPTKKPKTIFYKPEYSSGNGTEQMKNLFGEKAFKNPKPEELIQDFITITTNESDIVLDYHLGSGTTAAVAHKMNRQYIGIEQMDYIETLAVERLKKVIDGEQGGISKAVNWQGGGEFVYAELAPFNETAKQQILACEDSDGIKTLFEGLCERYFLKYNVSVNEFSQIIQEPEFQSLALDEQKQMVLEMLDLNQMYVSLSEMDDEQFAGCLNDDDKALSREFYQSAKNQAEKKDGE

SEQ ID NO: 10972 - protein, 166 aa, Neisseria meningitidis; identical to SEQ ID NO: 1240

SEQ ID NO: 10973 - protein, 482 aa, Neisseria meningitidis; identical to SEQ ID NO: 9935

SEQ ID NO: 10974 - protein, 488 aa, Neisseria meningitidis; identical to SEQ ID NO: 2117

SEQ ID NO: 10975 - protein, 945 aa, Neisseria meningitidis
MLDKYSPAEIESKHYQNWEEQGYFQPDMDLTKPSFSIQLPPPNVTGTLHMGHAFNQTIMDGLTRYYRMKGCNTAWIPGTDHAGIATQIVVERQLAAQNVSRHDLGREKFLEKVWEWKEVSGGTITQQMRRVGCSADWTREYFTMDDVRAETVTEVFVRLYEQGLIYRGKRLVNWDPVLGTAVSDLEVESVEEQGSMWHIRYPLADNPAEAVIVATTRPETLLGDVAVAVNPEDERYTHLIGKELILPLTGRTIPVIADEYVEKDFGTGCVKITPAHDFNDYEVGKRHDTRLVNVFDLEAKVLANAEVFNFKGEAQPSFALPEKYAGLDRFAARKQMVADLQEQGFLVEIKAHTLMTPKGDRTGSVIEPMLTSQWFVAMSATPNGGEPDSEFKGLSLADKAKKAVDSGAVRFIPENWVNTYNQWMNNIQDWCISRQLWWGHQIPAWYDNEGNVYVARNQEEAEKQAGKTGLTREEDVLDTWFSSALVPFSTLGWPSETDELKAFLPSNVLVTGYEIIFFWVARMIMMTTHFTGKVPFKDVYIHGIVRDHEGKKMSKSEGNVIDPVDLIDGIDLEKLLVKRTTGLRKPETAPKVEEASRKLFPEGIPSMGADALRFTMASYASLGRSVNFDFKRAEGYRNFCNKIWNATNFVLMNTENQDCGYGATATEPRGYSFPDMWIVDRLNQTIEQVTQAYETYRFDLAAETLYSFMWNDYCDWYLELAKVQLQTGCASRQRATRHTLLRVLEAALRLLHPIIPFITEELWQTVAPMCDAKTADSIMLARFPEADGGDIVQTAFEQMTVLQDLIGAVRNLRGEMGIQPNVKAPLFVESTDDLADYLKYLPMMTRLIEAQQVAALPESEDAPVAVCNGARLMLKVEIDKAAETARLSKEAEKLQKALDKLNAKLSKPGYTEKAPAHLVEKDKADLAELEDKMAKVQNQLAKLKD

SEQ ID NO: 10976 - protein, 289 aa, Neisseria meningitidis; identical to SEQ ID NO: 2681

SEQ ID NO: 10977 - protein, 413 aa, Neisseria meningitidis; identical to SEQ ID NO: 9110

SEQ ID NO: 10978 - protein, 127 aa, Neisseria meningitidis; identical to SEQ ID NO: 2622

SEQ ID NO: 10979 - protein, 862 aa, Neisseria meningitidis; identical to SEQ ID NO: 9543

SEQ ID NO: 10980 - protein, 186 aa, Neisseria meningitidis
MNRLLLLSAAVLLTACGSGETDKIGRASTVFNMLGKNDRIEVEGFDDPDVQGVACYISYAKKGGLKEMVNLEEDASDASVSCVQTASSISFDETAVRKPKEVFKHGASFAFKSRQIVRYYDPKRKTFAYLVYSDKIIQGSPKNSLSAVSCFGGGIPQTDGVQADTSGKLFAGTCMISNPIENPDKR

SEQ ID NO: 10981 - protein, 216 aa, Neisseria meningitidis
MRVLMAGKVRKQIKQGGWLSVIALTSLFVSVFTLFYIFRHSVQFNLWGTAEWLMFWQLTVVSVTAVIALGTIFINKKTSKQKATLDVILNDYQDAQFVEADNHISPYIRGTAVDDNNARIDLYEIYQNKGGQWEKERGHLLTVINRHEFYACAINSGVLDEDLFKRLHCTNFIKLWNAVSPLVMKIREEERKDTIFRELEILVALWKANPLKASDL

SEQ ID NO: 10982 - protein, 102 aa, Neisseria meningitidis; identical to SEQ ID NO: 254

SEQ ID NO: 10983 - protein, 106 aa, Neisseria meningitidis
LLPLTRNTMFRILLLLFPCAILAACTRNIPANPAVSNCAHLQNRTILYFDAHGKPADGAVKGGFYKIIEIQGANRILIQDFNSTGNALGGSYVPDCRKSSLFPKNI

SEQ ID NO: 10984 - protein, 186 aa, Neisseria meningitidis; identical to SEQ ID NO: 2604

SEQ ID NO: 10985 - protein, 269 aa, Neisseria meningitidis; identical to SEQ ID NO: 3572

SEQ ID NO: 10986 - protein, 419 aa, Neisseria meningitidis
MKQTVLKNNLQNLLESAENILLLQGPVGDFFLRLADWLTANGKTVHKFNFNAGDDYFYPPTQAHTVVFNDNYDAFPEFLQEYITQHHIQAVVCFGDTRPYHVIAKRIANENQASFWAFEEGYFRPYYITLEKDGVNAFSPLPRRADFFLEQFPKLAQQEYKAPTPVRGGFTPMAKNAIRYYIELFRNLRKYPDYIHHRAPNAGHYLKPWSLSILKRLNYYIEDIQIAKRVEAGKYGKFFIVPLQVFNDSQVHIHCDFPSVRSFLLHVLSSFAEHAPADTNIIIKHHPMDRGFIDYWRDIKRFIKEHPELKGRVIYVHDVPLPVFLRHGLGMVTINSTSGLSGLIHNMPVKVLGRAYYDIPGITDQNTLAEFWNHPTPPDKELFHAYRMYHLNVTQINGNFYSQVFFPNKNTSDSSTPTT

SEQ ID NO: 10987 - protein, 228 aa, Neisseria meningitidis
LILKCEGVGKRYRDGGLDVRVLHGLDLEIRAGESTGIIGSSGSGKSTLLHILGGLDMPSEGRVLLMGEDLRTLSQRQLGILRNRHLGFVYQFHHLLPEFSALENVMMPLLIGKKKREEAAETAMAMLEKVGLKHRSTHRAGELSGGERQRAAIARALVTQPKCLLADEPTGNLDRANARNVLDMMLELKTELGTGLVVVTHDDELAGRFERVMVMKDGSLHPKQGANA

SEQ ID NO: 10988 - protein, 483 aa, Neisseria meningitidis
LLIHYISPSYRFPVSDDIRSERKTTIMSNPFSSLGLGTELVSALTAQGYENPTPIQAAAIPKALAGHDLLAAAQTGTGKTAAFMLPSLERLKRYATASTSPAMHPVRMLVLTPTRELADQIDQNVQSYIKNLPLRHTVLFGGMNMDKQTADLRAGCEIVVATVGRLLDHVKQKNISLNKVEIVVLDEADRMLDMGFIDDIRKIMQMLPKQRQTLLFSATFSAPIRKLAQDFMNAPETVEVAAQNTTNANVEQHIIAVDTIQKRNLLERLIVDLHMNQVIVFCKTKQSVDRVTRELVRRNLSAQAIHGDRSQQSRLETLNAFKDGSLRVLVATDIAARGLDIAELPFVINYEMPAQPEDYVHRIGRTGRAGADGVAISLMDESEQKMFESIKELTGNKLLIERIEGFEPQWWEQGGAKPEKTEMREPRQRNRYESARAQREKNTRPETTANDAGAACGKIAGRSRRSRREHRTCALLQPRYGVK

SEQ ID NO: 10989 - protein, 245 aa, Neisseria meningitidis; identical to SEQ ID NO: 9622

SEQ ID NO: 10990 - protein, 185 aa, Neisseria meningitidis; identical to SEQ ID NO: 313

SEQ ID NO: 10991 - protein, 258 aa, Neisseria meningitidis; identical to SEQ ID NO: 8194

SEQ ID NO: 10992 - protein, 273 aa, Neisseria meningitidis; identical to SEQ ID NO: 221

SEQ ID NO: 10993 - protein, 67 aa, Neisseria meningitidis; identical to SEQ ID NO: 3983

SEQ ID NO: 10994 - protein, 833 aa, Neisseria meningitidis; identical to SEQ ID NO: 9278

SEQ ID NO: 10995 - protein, 119 aa, Neisseria meningitidis; identical to SEQ ID NO: 9294

SEQ ID NO: 10996 - protein, 354 aa, Neisseria meningitidis; identical to SEQ ID NO: 2527

SEQ ID NO: 10997 - protein, 366 aa, Neisseria meningitidis; identical to SEQ ID NO: 1553

SEQ ID NO: 10998 - protein, 290 aa, Neisseria meningitidis
MPILNHIALIGVGLIGGSFVLDLKRQGLVRTVTGIDTDRDNLERALERGVIDRASVAIDADSIGGADLVLIATPVATFPAILTALRPVLPEHTWISDVGSTKSSVIEAFRRCLPDRLHRCIAAHPIAGSDRSGAQAAQFGLFRHRKLIITPHGGEHSDGIALVEELWHAVGAEIYTMDAQRHDAVFAAVSHMPHLTAFAYVHQILDHPDGQEYLKFAATGFRDFTRIASGHPAVWADICLANKDSLLQLVQGLGKQLDVLANILTTDDREALYRYFEEAKTTRDRWLDGN

SEQ ID NO: 10999 - protein, 354 aa, Neisseria meningitidis; identical to SEQ ID NO: 3291

SEQ ID NO: 11000 - protein, 196 aa, Neisseria meningitidis; identical to SEQ ID NO: 2662

SEQ ID NO: 11001 - protein, 867 aa, Neisseria meningitidis; identical to SEQ ID NO: 8589

SEQ ID NO: 11002 - protein, 364 aa, Neisseria meningitidis; identical to SEQ ID NO: 1930

SEQ ID NO: 11003 - protein, 365 aa, Neisseria meningitidis; identical to SEQ ID NO: 11

SEQ ID NO: 11004 - protein, 429 aa, Neisseria meningitidis; identical to SEQ ID NO: 2821

SEQ ID NO: 11005 - protein, 153 aa, Neisseria meningitidis; identical to SEQ ID NO: 750

SEQ ID NO: 11006 - protein, 293 aa, Neisseria meningitidis; identical to SEQ ID NO: 9178

SEQ ID NO: 11007 - protein, 177 aa, Neisseria meningitidis; identical to SEQ ID NO: 3550

SEQ ID NO: 11008 - protein, 425 aa, Neisseria meningitidis
MRSSDILIVDDEIGIRDLLSEILQDEGYSVALAENAEEARKLRHQVRPAMVLLDIWMPDCDGITLLKEWAKNGQLNMPVVMMSGHASIDTAVEATKIGALDFLEKPISLQKLLSAVENALKHGAAKIETGPVFDKLGNSAAIQEMNCEVEAAAKRTSPVFLTGEAGSPFETVARYFHKNGTPWVSPARVEYLIDMPMELLQKAEGGVLYVGDIAQYSRNIQTGIAFIIGKAERCRVRVVASGSRAAGSDGIACEEKLAELLSESVVRIPPLRMQHEDIPFLIQGIACNVAESQKIAPASFSEEALAALTRYDWPGNFDQLQSVVATLLLEADGQEIGAAAVSSLLGQNVPAEGAEDMVGGFNFNLPLRELREEVERRYFEYHIAQEGQNMSKVAQKVGLERTHLYRKLKQLGIGVSRRAGEKTEE

SEQ ID NO: 11009 - protein, 307 aa, Neisseria meningitidis; identical to SEQ ID NO: 8903

SEQ ID NO: 11010 - protein, 123 aa, Neisseria meningitidis
MNITLGRNHQINCDEKDLYKFIGYLANHPNDVNLVFEKNSVQGAWGDEGRIQFFSSKAQNIFVPLGFKFTAGVGNIAYRLNCNELFEMLSQLDFVSGGKQNLSTIKANIPSQFHAEFDAGANM

SEQ ID NO: 11011 - protein, 464 aa, Neisseria meningitidis; identical to SEQ ID NO: 8899

SEQ ID NO: 11012 - protein, 94 aa, Neisseria meningitidis; identical to SEQ ID NO: 3728

SEQ ID NO: 11013 - protein, 251 aa, Neisseria meningitidis; identical to SEQ ID NO: 1587

SEQ ID NO: 11014 - protein, 173 aa, Neisseria meningitidis
IIAQEREARINGEITAKEVRLISESGEQLGVVSVREALAMAEGQDVDLVEISPTAKPPVCKLMDYGKYKYQQAKKRDEAKKNQKQVQIKEIKFRPGTDEGDYQIKMRNINRFLADGDKVKVTLRFRGREMAHQQLGAQLLERVKEDLAEVAQIESFPKMEGRQMVMMIAPKKK

SEQ ID NO: 11015 - protein, 115 aa, Neisseria meningitidis; identical to SEQ ID NO: 844

SEQ ID NO: 11016 - protein, 214 aa, Neisseria meningitidis; identical to SEQ ID NO: 5138

SEQ ID NO: 11017 - protein, 416 aa, Neisseria meningitidis
MPSESPSDGIVRLRGTKAEKPFAPYFQTRYTCRRCFQPFDYPQPPSLRRRFACQRHCAAVNTKEHIMTVSPVALRRKTECKPHPTARYWKKCDVEALFGLPFLELVHQAAEVHRQNFNPREIQLSTLLSIKTGGCPEDCAYCPQSAHHNTNLGKEQMMDVDEIVEKAKIAKSRGASRFCMGAAWRGPKPKDVETVSAIIKAVKGLGMETCGTFGMLEEGMAEDLKEAGLDYYNHNLDTDPDRYNDIIHTRRHEDRMDTLGKVRNAGLKVCCGGIVGMNETRAERAGLIASLANLDPQPESVPINRLVKVEGTPLADAEDLDWTEFVRTIAVARITMPQSYVRLSAGRSNMPEAMQAMCFMAGANSIFYGDKLLTTGNPDEDGDRILMEKLNLYPLQFELEGEVAEVEKASGIKVDY

SEQ ID NO: 11018 - protein, 205 aa, Neisseria meningitidis; identical to SEQ ID NO: 8342

SEQ ID NO: 11019 - protein, 242 aa, Neisseria meningitidis; identical to SEQ ID NO: 624

SEQ ID NO: 11020 - protein, 103 aa, Neisseria meningitidis; identical to SEQ ID NO: 2233

SEQ ID NO: 11021 - protein, 329 aa, Neisseria meningitidis; identical to SEQ ID NO: 2335

SEQ ID NO: 11022 - protein, 90 aa, Neisseria meningitidis; identical to SEQ ID NO: 311

SEQ ID NO: 11023 - protein, 31 aa, Neisseria meningitidis; identical to SEQ ID NO: 180

SEQ ID NO: 11024 - protein, 174 aa, Neisseria meningitidis
MLLLRRDNIDRAFKIVKNRRFDSPWWPGEYDAGMNFLGVQGELKVHELHHRTATLCFEWLGEVSAPRRKENYKDLKPNVLYDFDGSGKHFANPDARYLLPVGSSGLILKHIQIDDEDTLLRLWCARNIPMPHRLSKIPMLRQYYLSKAWHEIYAINQHLRKTKLIVDVAYGPTD

SEQ ID NO: 11025 - protein, 434 aa, Neisseria meningitidis; identical to SEQ ID NO: 3368

SEQ ID NO: 11026 - protein, 107 aa, Neisseria meningitidis; identical to SEQ ID NO: 150

SEQ ID NO: 11027 - protein, 111 aa, Neisseria meningitidis
MMADKEQVEKMIYSENKQSVIDGMLGMTFSSEEDEIPWISEKLTELSKHKDLDIARLSLTCFGHLARMHENIGDCDKVIALLRSKQGNPDFQGFAEDALDDISFFIFKKHP

SEQ ID NO: 11028 - protein, 197 aa, Neisseria meningitidis; identical to SEQ ID NO: 9107

SEQ ID NO: 11029 - protein, 369 aa, Neisseria meningitidis; identical to SEQ ID NO: 9667

SEQ ID NO: 11030 - protein, 816 aa, Neisseria meningitidis; identical to SEQ ID NO: 9691

SEQ ID NO: 11031 - protein, 687 aa, Neisseria meningitidis
MTTQTLLIELLTEELPPKALNNLGNHFAAAVAEGLEKAQLVDGAAEFTAYASPRRLAVQVKNVKAVQADQKIVKKGPAVANAVKDGAPTKALEGFARGAGAKIEDLTIVHDGKQDVYAYEYVQTGKPLGGLLEDIINAAVKKLPIPKVMRWGSSTFTFVRPVHGLIVLHGGDIVNVSVLGLQSSNQTLGHRFLSNGEITIENADSYAAQMREQGKVVASFAERKAAIQTALEGQARRLNATVAADEALLDEVTALVEYPVVLEAGFEEHFLAVPQECLILTMQQNQKYFPLLDQNGKLMNRFLLVSNLQTEDPSHIIRGNERVLRARLSDAEFFYKQDQKATLESRLPKLANVVYHNKIGSQAERIERLQSIAAHIAKALDADAAAAERAARLAKADLVTEMVGEFPELQGTMGKYYARLDGETEEIAEAIEQHYQPRFAGDKLPESKIAAAVALADKLETLVGIWGIGLIPTGDKDPYALRRAALGILRMLMQYGLDVNELIQTAFDSFPKGLLNEKTPSETADFMQARLAVLLQNDYPQDIVAAVLAKQPRRLDDLTAKLQAVAAFKQLPEAAALAAANKRVQNLLKKADAELGEVNESLLQQDEEKALFAAAQGLQPKIAAAVAEGNFQTALSELASVKPQVDAFFDGVMVMAEDAAVKQNRLNLLNRLAEQMNAVADIALLGE

SEQ ID NO: 11032 - protein, 305 aa, Neisseria meningitidis; identical to SEQ ID NO: 8920

SEQ ID NO: 11033 - protein, 351 aa, Neisseria meningitidis; identical to SEQ ID NO: 5145

SEQ ID NO: 11034 - protein, 89 aa, Neisseria meningitidis; identical to SEQ ID NO: 494

SEQ ID NO: 11035 - protein, 162 aa, Neisseria meningitidis
MLKLTLIAACAENLCIGAGNAMPWHIPEDFAFFKAYTLGKPVIMGRKTWESLHVKPLPGRRNIVISRQADYCAAGAETAASLEAALALCAGAEEAVIMGGAQIYGQAMPLATDLRITEVDLSVEGDAFFPAIDRTHWKEAERTERRVSSKGTSYAFVHYLRY

SEQ ID NO: 11036 - protein, 243 aa, Neisseria meningitidis
LMRKGTLLMEKMSFEIYRYNPDVDAKPYMQRYELELEPTDVKLLDALVRLKAQDDTLSFRRSCREGICGSDGMNINGKNGLACLTDLRGLKQPVKIRPLPGLPVIRDLIVDMTQFFKQYHSVKPYVVNDNPIDADKERLQTQEERKELDGLYECILCACCSTACPSFWWNPDKFVGPSGLLNAYRFIADSRDTITNERLDNLNDPYRLFRCHTIMNCVDVCPKHLNPTRAIGKIKEIMLKRAV

SEQ ID NO: 11037 - protein, 221 aa, Neisseria meningitidis
MAVLSKEQVLSAFKNRKSCRHYDAARKISAEDFQFILELGRLSPSSVGSEPWQFVVVQNPEIRQAIKPFSWGMADALDTASHLVVFLAKKNARFDSPFMLESLKRRGVTEPDAMAKSLARYQAFQADDIKILDDSRALFDWCCRQTYIALGNMMTGAAMAGIDSCPVEGFNYADMERVLSGQFGLFDAAEWGVSVAATFGYRVQEIATKARRPLEETVIWA

SEQ ID NO: 11038 - protein, 463 aa, Neisseria meningitidis; identical to SEQ ID NO: 9172

SEQ ID NO: 11039 - protein, 505 aa, Neisseria meningitidis; identical to SEQ ID NO: 2005

SEQ ID NO: 11040 - protein, 391 aa, Neisseria meningitidis
MLNTSLSPWPCFTQEEADAVSKVLLSNKVNYWTGNECREFEKEFAAFAGTRYAVALSNGTLALDVALKAMGIGAGDDVIVTSRTFLASASCIVNAGANPVFADVDLNSQNISAETVKAVLTPNTKAIIVVHLAGMPAEMDGIMALAKEHDLWVIEDCAQAHGAKYKGKSVGSIGHVGAWSFCQDKIMTTGGEGGMVTTNDKTLWEKMWSYKDHGKSYDAVYHREHAPGFRWLHESFGTNWRMMEMQAVIGRIQLKRLPEWTARRQENAAKLAESLGKFASIRLVEVADYIEHAQYKFYTFVKPEHLKDGWMRDRIVNELNARKVPCYQGSCSEVYLEKAFDNTPWRPKERLKNAVELGDTSLMFLVHPTLTDGEIAFCKEHIEAVLTEATR

SEQ ID NO: 11041 - protein, 128 aa, Neisseria meningitidis; identical to SEQ ID NO: 9112

SEQ ID NO: 11042 - protein, 79 aa, Neisseria meningitidis; identical to SEQ ID NO: 1083

SEQ ID NO: 11043 - protein, 459 aa, Neisseria meningitidis; identical to SEQ ID NO: 9603

SEQ ID NO: 11044 - protein, 44 aa, Neisseria meningitidis; identical to SEQ ID NO: 6328

SEQ ID NO: 11045 - protein, 622 aa, Neisseria meningitidis
MQAVRYRPEIDGLRAVAVLSVMIFHLNDRWLPGGFLGVDIFFVISGFLITGIILSEIQNGSFSFRGFYTRRIKRIYPAFIAAVSLASVIASQIFLYEDFNQMRKTVELSAVFLSNIYLGFQQGYFDLSADENPVLHIWSLAVEEQYYLLYPLLLIFCCKKTKSLRVLCHISIILFLILTASSFLPSGFYTDILNQPNTYYLSTLRFPELLAGSLLAVYGQTQNGRRQTANGKRQLLSSLCFGALLACLFVIDKHNPFIPGMTLLLPCLLTALLIRSMQYGTLPTRILSASPIVFVGKISYSLYLYHWIFIAFAHYITGDKQLGLPAVSAVAALTAGFSLLSYYLIEQPLRKRKMTFKKAFFCLYLAPSLILVGYNLYAMGILKQEHLRPLPGAPLAAENHFPETVLTLGDSHAGHLRGFLDYVGSREGWKAKILSLDSECLVWVDEKLADNPLCRKYRDEVEKAEAVFIAQFYDLRMGGQPVPRFEAQSFLIPGFPARFRETVKRIAAVKPVYVFANNTSISRSPLREEKLKRFAANQYLRPIQAMGDIGKSNQAVFDLIKDIPNVHWVDAQKYLPKNTVEIYGRYLYGDQDHLTYFGSYYMGREFHKHERLLKSSRDGALQ

SEQ ID NO: 11046 - protein, 399 aa, Neisseria meningitidis
LSTFPNHTMHTISFPNRTRLTALPPLSLYIHIPWCIKKCPYCDFNSHSLKNGLPEAAYIDALLTDLQLELPNIWGRPVETIFFGGGTPSLFQAESIDRLLSGVRSLLRLQPEAEITLEANPGTFEIEKFQGFKDAGITRLSIGVQSFNNDMLSRLGRVHNGKEALTAIDTALKLFDKVNIDLMYALPNQTVQTALDDVQTAIATGATHISAYHLTMEPNTPFGHTPPKGLPQDEAALDIEDAVHGALEGAGFVHYETSAFAKPAMQCRHNLNYWQFGDYLGIGAGAHGKISYPDRIERTVRRRHPNDYLALMQSQPSEAVERKTVAAEDLPFEFMMNALRLTDGVPAAMLQERTGVPSAKIMAQIETARQKGLLETDPAVFRPTEKGRLFLNDLLQCFL

SEQ ID NO: 11047 - protein, 709 aa, Neisseria meningitidis; identical to SEQ ID NO: 8778

SEQ ID NO: 11048 - protein, 182 aa, Neisseria meningitidis; identical to SEQ ID NO: 3686

SEQ ID NO: 11049 - protein, 140 aa, Neisseria meningitidis; identical to SEQ ID NO: 8860

SEQ ID NO: 11050 - protein, 212 aa, Neisseria meningitidis; identical to SEQ ID NO: 324

SEQ ID NO: 11051 - protein, 308 aa, Neisseria meningitidis; identical to SEQ ID NO: 1981

SEQ ID NO: 11052 - protein, 508 aa, Neisseria meningitidis; identical to SEQ ID NO: 8621

SEQ ID NO: 11053 - protein, 461 aa, Neisseria meningitidis
MDGWTQTLSAQTLLGISAAAIILILILIVKFRIHALLTLVIVSLLTALATGLPTGSIVNDVLVKNFGGTLGGVALLVGLGAMLGRLVETSGGAQSLADALIRMFGEKRAPFALGVASLIFGFPIFFDAGLIVMLPIVFATARRMKQDVLPFALASIGAFSVMHVFLPPHPGPIAASEFYGANIGQVLILGLPTAFITWYFSGYMLGKVLGRTIHVPVPELLSGGTQDNDLPKEPAKAGTVVAIMLIPMLLIFLNTGVSALISEKLVSADETWVQTAKIIGSTPIALLISVLVALFVLGRKRGESGSALEKTVDGALAPVCSVILITGAGGMFGGVLRASGIGKALADSMADLGIPVLLGCFLVALALRIAQGSATVALTTAAALMAPAVAAAGFTDWQLACIVLATAAGSVGCSHFNDSGFWLVGRLLDMDVPTTLKTWTVNQTLIALIGFALSALLFSIV

SEQ ID NO: 11054 - protein, 129 aa, Neisseria meningitidis; identical to SEQ ID NO: 1031

SEQ ID NO: 11055 - protein, 195 aa, Neisseria meningitidis; identical to SEQ ID NO: 1987

SEQ ID NO: 11056 - protein, 176 aa, Neisseria meningitidis; identical to SEQ ID NO: 3632

SEQ ID NO: 11057 - protein, 93 aa, Neisseria meningitidis; identical to SEQ ID NO: 3308

SEQ ID NO: 11058 - protein, 456 aa, Neisseria meningitidis
MINPIASLSPLDGRYAQSVEALRPIFSEYGLMKARVKVELNWLKALAAEPKIVEVPPFSAETLAEIDTVIENFSLEDAAAVKAIEATTNHDVKAIEYWLKERFSGVPEVAAASEFIHFACTSEDINNLSHALMLQEAREAVLLPKLAEIIEKLTGMAHELAAVPMMSRTHGQPATPSTLGKEIANVVYRLQRQFKNLQAQEFLGKINGAVGNYNAHMVAYPDVDWETHCRNFVEISLGLTFNPYTIQIEPHDYMAEFFQAISRVNTILIDFNRDVWGYISLGYFKQKVKAGEVGSSTMPHKVNPIDFENSEGNLGMANAVLGFLSEKLPISRWQRDLTDSTVLRNMGVGVGYAVLGFAAHLRGLNKLEPNPAALAADLDATWELLAEPIQTVMRRYGVANPYEKLKDLTRGKDGITPEVLKLFIESLEIPAEAKAKLLELTPALYVGKAEALAKRI

SEQ ID NO: 11059 - protein, 152 aa, Neisseria meningitidis; identical to SEQ ID NO: 1697

SEQ ID NO: 11060 - protein, 239 aa, Neisseria meningitidis
VLQKSCLRPLYVGALVKTADGYKAIAHIRVGESVLSKDEASGKTGYKPVTAQYGNPYQETVYIKVSDGIGNSQTLISNRIHPFYSQGKWIQAGRLKKGDTLLSESGAKQTVQNITFKQQPLKAYNLTVADWHTYFVKGDKAETEGVWVHNACPPRKTPSTPVYGNDSEAYAAAKKLGYRKIKERTRNDAAIFKKGKSYISRDVDSHNGGAWKEASSPKNLNRKETRNGTFDKNLNRIGD

SEQ ID NO: 11061 - protein, 159 aa, Neisseria meningitidis; identical to SEQ ID NO: 3392

SEQ ID NO: 11062 - protein, 359 aa, Neisseria meningitidis
MNIQNIRTLLDTVAVPNTARTLGGEKAVRSVEQRSDGIHIALHFGFPVAHIASETADRIQEILMPLTGDTHIHLSMDTEIGTHKVQPGVTTIKGVKNIIAVASGKGGVGKSTTTANLAAAMARMGARVGVLDADLYGPSQPTMLGVDDRKPDQKNQKLIPVESSNGIQVMSIGFLVDTDQAVVWRGPMVSQALQQLMFQSEWDEVDYLFIDLPPGTGDIQLTLSQRIPVTGSVIVTTPQDIALIDARKAVDMFRKVNIPILGVLENMSVHICSNCGHSEALFGTDGGKDLAARLNVPLLGQLPLSLPVREAMDGGTPAQLFDEHPAIARIYTDAAFQIALGIADKGKDFSSRFPKIVVE

SEQ ID NO: 11063 - protein, 213 aa, Neisseria meningitidis; identical to SEQ ID NO: 2169

SEQ ID NO: 11064 - protein, 313 aa, Neisseria meningitidis; identical to SEQ ID NO: 2172

SEQ ID NO: 11065 - protein, 352 aa, Neisseria meningitidis
MELKIDIATNNFKHGGGTERYTLDLVKGLNRQNITPAVYATKFDHGIPEYAMIEPHLVDQHRTLKKLRSFLFSSRLAQTRKNSAAKLIACHHADYADLLICGGTHLGYLHHMAQKPNLLDRLAIRRNRSNYATAKLIMAHSHMMRRELVGLYGVPPERIQVAPPPPADTERFFPQPGETADLRAKYGFADHETVFLFPSTGHTRKGLELLADFFEHTGLPVKLAVVGSPLPRPMKNVVGLGFCTDMPELYRAADFTIMASLYEPFGLVGVESVLCGTRVVLSENMACTEVMNEEAGFFFSRQNPETLAQAVAQAVSLKKQGGHRLSDPMRALNYNPSLSHHIDRLTDILASV

SEQ ID NO: 11066 - protein, 542 aa, Neisseria meningitidis; identical to SEQ ID NO: 2483

SEQ ID NO: 11067 - protein, 402 aa, Neisseria meningitidis; identical to SEQ ID NO: 2438

SEQ ID NO: 11068 - protein, 94 aa, Neisseria meningitidis; identical to SEQ ID NO: 10479

SEQ ID NO: 11069 - protein, 128 aa, Neisseria meningitidis; identical to SEQ ID NO: 4472

SEQ ID NO: 11070 - protein, 1099 aa, Neisseria meningitidis
MQNMKNQVRGSGMDARSNPANVSDGLQNSSGHIGTNTRYRLTKLGEQMARLPIDPKIARILLAAKKHDCMAEILVIASALSIQDPRERPLEARDAAAKAHERFTDKQSDFLAYLNIWDSFQRERDKGLSNKQLVQWCRQYFLSHLRMREWRELHHQLAQTAIEMGLTTKEAAFRRLSEIKQLTSSENQGDQDLSAKRKQKQLDKKQHRAQIRAAKEAGYEQIHRALLTGLIANVGMKSPDGNDYTGARGSRFHLFPASALFKAKPKWVMAAELVETTKLYARDVAVIQPEWIEQEAPHLVRYHYFEPHWEQKRGEVVASERVTLYGLTVLPRRPVPYGKVAPEEAREIFIRSALVAQECDLKADFFVHNKKLIKEITELEHKSRKQDVLVDDEALFAFYNERLPEMAWKDAQGSVWGSEDSVRIIESDKAERSSENERNEFRKNKRNGSRQNENHGNTVGWVENPTSAATAKTVGFDNPTYATQQPTPSPAREGRGEGKTVAAQTNFSATAANPLPQEREQSAAASAVSNDLHPANPQQTAPSPVGEGWGEGKTVATQTNFSATTANPLPNPLPQEGEQSAAASAVSNDPQPQKQPAPQKDRLKPLPLADIRTFQAWLKTAERENPRLLFLSRDDLMQHAAAHITEEQFPKFWQTADGKFELSYRFEPHHPLDGVTLTLPLTVLNRISPAALEWLVPGMLREKIQLLIKALPKQIRRICVPVPEFITQFLSQNPDRNAPILPQLAQAIAKTAGDIRIFEQINQDEWAAFRLPEHCYFNLRIIDDGGQELAIGRDLIQIQQQLGQAAAVTFRDNTQEFERDNVTTWDIGILPESIKFARGKQQLTGYLGLQKEKDGRIALRLFDTIEAAEQAHRQGVIELMKLQLKEQVKDLNKGIQGFTQAAMLLKHINADTLRDDLTQAVCDRAFIGEDELPRNEKAFKEQIKRARSRLPAVKEALSRYLQETAAAYAELNSKLGKHPLTHLLRQRLQTLLAAGFATRTPWAQWPRLPIYLKAMTLRLEKYSSNPARDAAREADIQELEQMWQEKTDSLIKQGLPISDGLAAFKWMIEELRVSLFAQELKTPYPVSVKRLLKMWEDLN

SEQ ID NO: 11071 - protein, 149 aa, Neisseria meningitidis; identical to SEQ ID NO: 4552

SEQ ID NO: 11072 - protein, 230 aa, Neisseria meningitidis; identical to SEQ ID NO: 3035

SEQ ID NO: 11073 - protein, 633 aa, Neisseria meningitidis; identical to SEQ ID NO: 8835

SEQ ID NO: 11074 - protein, 322 aa, Neisseria meningitidis
MKLTLALPSLNLDEDEIRIPLCLPAFNKILQYGSLHRQSCTASAFYARYLWCGRLAERAAQSLNMPSETVALATPVWQKMGMHQANVLTAEYLDVGTDEAERLCRDLSAFYGDIPWRFVPVLPELWLVSLPRAYRWGAKPVLDLGGLLGADDQPDGEDALEWLRVQTEIQMWLAAHPVNHNRKKRGLPELNGLWLWGGTNGGTQGGTLFADTVWSRFHPDRRALPDNFRAYEETAAHLPDTHHILFMDDLRLTALTGDRERYAAILQQWEERWFAPLYEAVRIGKIKRLDIATDGQHGGTLTFKPADRWKFWRGAKTFDGIW

SEQ ID NO: 11075 - protein, 332 aa, Neisseria meningitidis
MSRPVPAVFGSVFHSQMPVLAYREGKWQPTEWQSSQDLSLAPGAHALHYGSECFEGLKAFRQADGKIVLFRPTANIARMRQSADILHLPRPETEAYLDALVELVKRAADEIPDAPSALYLRPTLIGTDPVIGKAGSPSETALLYILASPVGDYFKVGSPVKILVETEHIRCAPHMGRVKCGGNYASAMHWVLKAKAEYGANQVLFCPNGDVQETGASNFILINGDEIITKPLTDEFLHGVTRDSVLTVAKDLGYTVSERNFTVDELKAAVENGAEAILTGTAAVISPVTSFVIGGKEIEVKSQERGYAIRKAITDIQYGLAEDKYGWLVEVC

SEQ ID NO: 11076 - protein, 181 aa, Neisseria meningitidis; identical to SEQ ID NO: 3765

SEQ ID NO: 11077 - protein, 193 aa, Neisseria meningitidis
IPIQLHLTGGTVWGGKKVELNPTKWDWVKNTGYKTPTARPMQTLDGEMAGGNKPPKPSTQQHPTHSDNNIGLPASYVKPDTSISPTGTIQDRIRWTKSKFPTEKSLNGHFKAHGKEFGDITIEDYQKMASDLLSKQTSDKILGYQTEHRRVRYDINNNIYVLANPKTFKIKTMFKPNLGKKYYDGEFKKDMGN

SEQ ID NO: 11078 - protein, 367 aa, Neisseria meningitidis; identical to SEQ ID NO: 1944

SEQ ID NO: 11079 - protein, 324 aa, Neisseria meningitidis; identical to SEQ ID NO: 8003

SEQ ID NO: 11080 - protein, 128 aa, Neisseria meningitidis
VMSKIHSKETKPEILVRKFLFSQGFRYRKNDKRYAGKPDIVLPKYKTVVFIHGCFWYGHSCNKGHIPKSNTDFWLEKITKNCERDIKNETELEKIGFKVIVVWECELKNKAIGRERLNRLVREIKDAV

SEQ ID NO: 11081 - protein, 171 aa, Neisseria meningitidis; identical to SEQ ID NO: 3235

SEQ ID NO: 11082 - protein, 397 aa, Neisseria meningitidis
MTEDERFAWLQLAFTPYIGAESFLLLLRRFGSASNALSAPAEQVAPAVRHKQAAEAWRNAEKRASARQAAEAALEWEMRDGCRLMLLQDEDFPEMLTQGLTAPPVLFLRGNVRLLHKPSAAIVGSRHATPQAMRIAKDFGRALGGKGIPVVSGMASGIDTAAHQGALQAEGGTIAVWGTGIDRIYPPSNKNLAYEIAERGLIVSEFPLDTRPFAGNFPRRNRLIAALSQVTLVVEAALESGSLITAGLAAEMGREVMAVPGSIDNPHSKGCHKLIKDGAKLTECLDDILNECPRLLQNEGASSYSINKGMPEKRITAVQTASDQLSLPEGKMPSEKTENRPVGGSILDRMGFDPVHPDVLAGQLAMPAADLYAALLELELDGSVAAMPGGRYQRIRT

SEQ ID NO: 11083 - protein, 281 aa, Neisseria meningitidis; identical to SEQ ID NO: 3753

SEQ ID NO: 11084 - protein, 106 aa, Neisseria meningitidis; identical to SEQ ID NO: 2510

SEQ ID NO: 11085 - protein, 56 aa, Neisseria meningitidis; identical to SEQ ID NO: 5635

SEQ ID NO: 11086 - protein, 485 aa, Neisseria meningitidis
MSEWRGFNRKGNTMNIHALLSKQWTLPPFLPKRLLLSLLILLAPNAMFWVLALLTATARPIVNLDYLPAALLIALPWRFVKIAGVLAFWLAVLFDGLMMVIQLFPFMDLIGAINLVPFILTAPTPYQIMTGLLLLYMLAMPFVLQKAAAKTDFRHIAVCAAVVAAAGYFTGHLSYYDRGRMANIFGANNFYYAKSQAMLYTVSQNADFITAGLVDPVFLPLGNQQRAATHLNEPKSQKILFIVAESWGLPANPELQNATFAKLLAQKDRFSVWESGSFPFIGATVEGEMRELCAYGGLRGFALRRAPDEKFARCLPNRLKQEGYATFAMHGAGSSLYDRFSWYPRAGFQEIKTAENLIGKKTCAIFGGVCDSELFGEVSAFFKKHDKGLFYWMTLTSHADYPESDIFNHRLKCTEYGLPAETDLCRNFSLHTQFFDQLADLIQRPEMKGVEVIIVGDHPPPVGNLNETFRYLKQGHVAWLNFKIK

SEQ ID NO: 11087 - protein, 617 aa, Neisseria meningitidis
LNKIFSWFESRIDPYPEAAPKTPEKGLWRFVWSSMAGVRKWIAALAALTAGIGIMEALIFQFMGKIVEWLGKYAPAELFAEKGWELAAMAAMMVFSVVWAFAASNVRLQTLQGVFPMRLRWNFHRLMLNQSLGFYQDEFAGRVSAKVMQTALALRDAVMTVADMVVYVSVYFITSGVILASLDSWLLLPFIGWIVGFASVMRLLIPKLGQTAAWQADARSLMTGRITDAYSNIATVKLFSHGAREAAYAKQSMEEFMVTVRAQMRLATLLHSCSFIVNTSLTLSTAALGIWLWHNGQVGVGAVATATAMALRVNGLSQYIMWESARLFENIGTVGDGMATLSKPHTILDKPRALPLNVPQGAIKFEHIDFCYEAGKPLLNGFNLTIRPGEKVGLIGRSGAGKSTIVNLLLRFYEPQSGTVSIDGQDISGVTQESLRAQIGLVTQDTSLLHRSVRDNIIYGRPDATDAEMVSAAERAEAAGFIPELSDAKGRRGYDAHVGERGVKLSGGQRQRIAIARVMLKDAPILLLDEATSALDSEVEAAIQESLDKMMNGKTVIAIAHRLSTIAAMDRLVVLDKGRIIEEGTHAELLEKRGLYAKLWAHQSGGFLNEHVEWQHD

SEQ ID NO: 11088 - protein, 250 aa, Neisseria meningitidis
VKPIMLIVRPSGRAKDDVETCRRAEWQAEVLSPIEIETDKASLKRLPEMYARADAVFWVSPTAVETAVPYLNLSDGIKMHISVGQGSRRALERCLGRTVIAPDDGNDSEAVLRLPVWNSLPEGARVLFVRGHGGRDFLMNALQEKGFRTEVAEVYFRRHKPLNFQNFQTENIAAAYITSAELVQSLFAQVPPQFSRFFKSLLYFTHHPRIAEALKREGVCSVETVPTLEAALSHSSISVSDGMVFPGTSN

SEQ ID NO: 11089 - protein, 280 aa, Neisseria meningitidis; identical to SEQ ID NO: 3736

SEQ ID NO: 11090 - protein, 421 aa, Neisseria meningitidis
MSHLFRKEVFVAQQNKWTGQVILTRPFSFLFLTFCAFLIALCIIIFLIFGSYTNKTTVEGQLLPTMGVVRVYSSDIGTITHKFVEDGNFVKAGEPLFKLSTSRFGEKGNVQAKLAAEANLKKTLALQELERLKRIHQNEQKNVHNNIHRLNNQLENIKQQITGQNRQIRLAEKTLNKNKFLASQGAVSQQDKMTAESHLLEQRSRLESLKREQNNAIRELDEQKITLSSLPERHKTELSQLNRAITEMNQEILDFDLKSEQTIRASKSGYISTINVDIGQQVEPSKLLLSIVPEQTELVANLYIPSKAVGFIKPKDKVVLRYQAYPYQKFGHATGEIISVARTALGKQELSGLGIIFTNPTLLNEPAYLVKVKLEKQTIKAYGENKPLQIGMILEADILHERKKLYEWVLDPLYSISGKIN

SEQ ID NO: 11091 - protein, 668 aa, Neisseria meningitidis
MADMKKITPQNLRPLLSESLGHTDFVNVLNALIKFLRRGGKKCAGERFDLIIDTFKQDRELLSRFSRCFYIWLAQIHIYPALIKLGIFSRHSFAREMGIRIYERFSPSYKDFANLGEVFLYLFHSENDDKWLQTLNIRQWLVLYELIRSHAEPSKLQTAGIRLADARLRAIEMLSVWTASEAIEPDLIRIAPRLLEADSSFVALQRETAKLVEHYRNGTAPYDTAHLEVMFDQCFSQIDYLRRKGTGAGSGSSVKVAHLLERLRQTVDRLKLLTDIQTGAGNSNRLTIALMNSLIYAAVEQYSTRHLRRSSIRMLARSITENKSHHGEHYITRNRKEYFKMFYSAAGGGVIIALMALLKIRIGTLGLSPFLTSLSAGFNYGIGFMIIHMLHCTVATKQPAMTAASFAEQVDLNEGGKAVDNKLAKLLIDVCRSQSVAVFGNVSIAILLACAISFGYAHLYRQPILDAHTAAYQFKSIDIIAYPTLWYAAIAGLWLFCSGIIAGFFDNRADYLNLRQRLPFNPLLRKIMRPGPRRVLAAYIHKHYGSLVGNFIFGMLLGMTGYFGHLLGLPLDIRHVAFSSANLGYAAVSGNVGLGTFVLGIFSVLAIGLVNLCVSFSLALFVALRSRGTKIGSIRNLIKSFWNQIKSNPCILFLPPAKEQGHPPSDKP

SEQ ID NO: 11092 - protein, 488 aa, Neisseria meningitidis
VQNQTNSCRISGFHLTSPADFRRHLIQSAAQLYRQRIFSSFNIYISVGLQGDTMKPVNIGLLGLGTVGGGTAAVLRDNAEEISRRLGREVRISAVCDLSEEKARQICPSAAFVKDPFELVARKDVDVVVELFGGTGIAKDAVLKAIENGKHIVTANKKLLAEYGNEIFPLAEEKNVMVQFEAAVAGGIPIIKALREGLAANRIKSIAGIINGTSNFILSEMREKGSAFADVLKEAQALGYAEADPTFDIEGHDAGHKITIMSALAFGTPMNFSACYLEGISKLDSRDIKYAEELGYRIKLLGITRKTGKGIELRVHPTLIPESRLLANVNGVMNAVRVNADMVGETLYYGAGAGALPTASAVVADIIDIARLVEADTAHRVPHLAFQPAQVQAQTILPMDEITSSYYLRVQAKDEPGTLGQIAALLAQENVSIEALIQKGVIDQTTAEIVILTHSTVEKHIKSAIAAIEALDCVEKPITMIRMESLHD

SEQ ID NO: 11093 - protein, 626 aa, Neisseria meningitidis
MNIFYEESGQFKIAAIIQKNDATYQVDTPHGKRTKVKANNVFTEFDGDMAAFLENAQAQAADIDTDLLWEVCGEEEFTAEAIAEEYYGHAPTKTELAATLIALYAAPMYFYKKAKGVFKAAPEETLKQALAAIERKKQQDAQIDAWAEALKRGEMPSEIAADLKTILHAPDKQSLTYKAFTKAADALKTSAYELAKKTGGITSIPQYLQDGFEIKYFPKGTGFPDLPLPEMPDLPKADVTAFSIDDESTTEVDDALSLTDLDNGTKRVGIHIAAPSLAIKQGDKMKKNIMERLSTVYFPGGKITMLPENWIAAFSLDAGAHRPAVSIYFDVDGEFNVGAPTCKIEAVNISENLRIQAIEPHFNAEAGLDEAGEMMFAHHQDLIWFYQFAITLQKARGKYEPNRAPQYDYSIELDKEDNVSVVRRERGSPIDTLVSEMMILANSTWAQMLHDNDLPGLFRVQPTGKVRMSTKSEPHIGMGVQHYGWFTSPLRRAADYINQKQLISLIDDTAEPLYQNSDAELFAALRDFDAAYTAYADFQRQMEAYWSLVYLQQQGTSELTATILKEDLVRIEGLPLVTRATGIPFDALPKSQALFKITELDAEKQFVSLNYIKAVALAGKTAGNAV

SEQ ID NO: 11094 - protein, 522 aa, Neisseria meningitidis; identical to SEQ ID NO: 968

SEQ ID NO: 11095 - protein, 233 aa, Neisseria meningitidis
LNPTYNLSHLNKIPHSTRRTEMSKLTPREILTAGAVVPVMAIDDLSTAIDLSHALVEGGIPTLEITLRTPVGLDAIRLIAKEVPNAIVGAGTVTNPEQLKAVEDAGAVFAISPGLHESLAKAGHNSGIPLIPGVATPGEVQLALEHGIDTLKLFPAEVVGGKAMLKALYGPYADVRFCPTGGISLATAPEYLALPNVLCVGGSWLTPKEAVKNKDWDTITRLAKEAAALKPKA

SEQ ID NO: 11096 - protein, 321 aa, Neisseria meningitidis; identical to SEQ ID NO: 4435

SEQ ID NO: 11097 - protein, 278 aa, Neisseria meningitidis; identical to SEQ ID NO: 8180

SEQ ID NO: 11098 - protein, 295 aa, Neisseria meningitidis
MYTGRFAPSPTGLLHIGSLLTAAASYADARSNGGKWLVRMEDLDPPREMPGAASHILHTLEAFGFEWDGEVAYQSRRYALYEETLCRLQTAGLVYPCHCSRKDWQAAAVHGADGFVYNGRCRNPQQRPALQGKQPAWRIRVPDRDIGFSDGIVGGYAQNLARDIGDFVLLRADGYWAYQLAVVADDAEQGVTHIVRGQDLLVSTPRQIYLQQCLGVPTPQYAHLPLLTNAQGQKWSKQTLAPALDLNRREQLLRQVFRYLKLPEAPETDRPAELLDWAVAHWDMGKVPKHAITTP

SEQ ID NO: 11099 - protein, 130 aa, Neisseria meningitidis; identical to SEQ ID NO: 425

SEQ ID NO: 11100 - protein, 2026 aa, Neisseria meningitidis
MNKGLHRIIFSKKHSTMVAVAETANSQGKGKQAGSSVSVSLKTSGDLCGKLKTTLKTLVCSLVSLSMVLPAHAQITTDKSAPKNQQVVILKTNTGAPLVNIQTPNGRGLSHNRYTQFDVDAKGAVLNNDRNNNPFLAKGSAQLILNEVRGAASKLNGIVTVGGQKADVIIANPNGITVNGGGFKNVGRGILTTGAPQIGKDGALTGFDVRQGTLTVGAAGWNDKGGADYTGVLARAVALQGKLQGKNLAVSTGPQKVDYASGEISAGTAAGTKPTIALDTTALGGMYADSITLIANEKGVGVKNAGTLEAAKQLIVTSSGRIENSGRIATTADGTEASPTYLSIETTEKGAAGTFISNGGRIESKGLLVIETGEDISLRNGAVVQNNGSRPATTVLNAGHNLVIESKTNVNNAKGSANLSAGGRTTINDATIQAGSSVYSSTKGDTELGENTRIIAENVTVLSNGSIGSAAVIEAKDTAHIESGKPLSLETSTVASNIRLNNGNIKGGKQVVLMADGDIQAKASNLNASGNLYIHAGKDLDLNADKDLSTQSISLRADNTALISSNGNTLTAEKNLDIQAGSLSVRQSNLQSSGGNVQMSATKGNISLNQSWINASQNIDTAALQGNIISDGLTAVAEVGRVSLLANGNVDFNGLNTLIAEGDINAGSVGKGRLKMDNTDIYASAGDVKLVAGGQLDLGNGTVNGGHISLDSNKGSMVVQDVHLNARASLKVDADQTLTINNSKLNSGHNTQINTNHGHMTLNQLDAHSRRHMSISAQGKGKGKDSGQILQNDQQNSKSTLAADGVLSLNSSALQVLDNTTLRGGAINIKAGGGIIKRGYIDWETQDTATMRSAELKPLSGMMSIESGGDNPLTVEPGNRIVSAGDLAVNHNGTFQISARAGNNGNPSAQTASVSAKGNIGIVAGEVDIDAANIAAGKDLALVATKGNISLNSIRNTFSNYQLKTDKHNITQQLTDVEQELSKLTSDPKYRKAQDLPQMLRRKYKRRDKVFGDSEARLRGLRAEINAADEAWAELQSPVKALLERKQLLQQALLTVSQPGSGHENQGSTLSGQNIKLLAAGGIRIQGSKVAATQQANIQAAGFLPAPAAEELQEGRLQSAIDISGVFDTFEYGQQGSDKYGYAIFSRPSEISGKTGVTLSAPNANENSRISLSAANIEAENGKIKLQSYGDQSYYAGQGELYTLERRSYKTGKWYNRKHITEVKEHKNAKPDAVNLSASQGIDIKSGGNIDAYATAFDAPKGSINIEAGRKLTLYAVEELNYDKLDSQKRRRFLGISYSKAHDTTTQVMKTALPSRVVAESANLQSGWDTKLQGTQFETTLGGATIRAGVGEQARADAKIILEGIKSSIHTETVSSSKSTLWQKQAGRGSNIETLQLPSFTGPVAPVLSAPGGYIVDIPKGNLKTEIEKLAKQPEYAYLKQLQTAKNVDWKQVQLAYDKWDYKQEGLTGAGAAIVVIIVTALTYGYGAAAAGSVTAAGSSTAAAATTTAAATTTVSTAAAMQTAALASLYSQAAVAIINNKGDVGKALKDLGTSDTVKQIVTSALTAGALNQMGADIAQLNSKVRTELFSSTGNQTIANLGGRLATNLSNAGISAGINTAVNGGSLKDNLGNAALGALVNSFQGEAASKIKTTFSDDYVAKQFAHALAGCVSGLVQGKCKDGAIGAAVGEIVAESILGGRNPATLSDAEKHKVISYSKIIAGSVAALNGGDVNTAANAAEVAVVNNALNFDSTPTNAKKHQPQKPDKTALEKIIQSIMPAHAAGAMTNPQDKDAAIWISNIRNGITGPIVITSYGVYAAGWTAPLIGTAGKAAISTCMANPSGCTVMVTQAAEAGAGIATGAVTVGNAWEAPVGALSKAKAAKQAIPTQTVKELDGLLQESKNIGAVNTRINIANSTTRYTPMRQTGQPVSAGFEHVLEGHFHRPIANNRSVFTISPNELKVILQSNKVVSSPVSMTPDGQYMRTVDVGKVIGTTSIKEGGQPTTTIKVFTDKSGNLITTYPVKGN

SEQ ID NO: 11101 - protein, 488 aa, Neisseria meningitidis; identical to SEQ ID NO: 3695

SEQ ID NO: 11102 - protein, 228 aa, Neisseria meningitidis; identical to SEQ ID NO: 5838

SEQ ID NO: 11103 - protein, 208 aa, Neisseria meningitidis; identical to SEQ ID NO: 9498

SEQ ID NO: 11104 - protein, 530 aa, Neisseria meningitidis; identical to SEQ ID NO: 8011

SEQ ID NO: 11105 - protein, 111 aa, Neisseria meningitidis; identical to SEQ ID NO: 7069

SEQ ID NO: 11106 - protein, 671 aa, Neisseria meningitidis
MSKSRRSPPLLSRPWFAFFSSMRFAVALLSLLGIASVIGTVLQQNQPQTDYLVKFGPFWAQIFGFLGLYDVYASAWFVVIMMFLVVSTSLCLIRNVPPFWREMKSFREKVKEKSLAAMRHSSLLDVKIAPEVAKRYLEVQGFQGKTVSREGGSVLIAAKKGTMNKWGYIFAHVALIVICLGGLIDSNLLLKLGMLTGRIVPDNQAVYAKDFKPESILSASNLSFRGNVNISEGQSADVVFLNADNGILVQDLPFEVKLKKFHIDFYNTGMPRDFASDIEVTDKATGEKLERTIRVNHPLTLHGITIYQASFADGGSDLTFKAWNLGDASREPVVLKATSIHQFPLEIGKHKYRLEFDQFTSMNVEDMSEGAEREKSLKSTLNDVRAVTQEGKKYTNIGPSIVYRIRDAAGQAVEYKNYMLPVLQEQDYFWITGTRSGLQQQYRWLRIPLDKQLKADTFMALREFLKDGEGRKRLVADATKDAPAEIREQFMLAAENTLNIFAQKGYLGLDEFITSNIPKEQQDKMQGYFYEMLYGVMNAALDETIRRYGLPEWQQDEARNRFLLHSMDAYTGLTEYPAPMLLQLDGFSEVRSSGLQMTRSPGALLVYLGSVLLVLGTVLMFYVREKRAWVLFSDGKIRFAMSSARSERDLQKEFPKHVESLQRLGKDLNHD

SEQ ID NO: 11107 - protein, 207 aa, Neisseria meningitidis; identical to SEQ ID NO: 2101

SEQ ID NO: 11108 - protein, 82 aa, Neisseria meningitidis; identical to SEQ ID NO: 3017

SEQ ID NO: 11109 - protein, 411 aa, Neisseria meningitidis
LNRLKEDGMNQLKLAVSGAQILFVAFGAMVLVPLLTGLNPALALLGAGLGTLLFQITTKRKVPIFLGSSFAFIAPIIYSVGEWGLPSTMFGLFAAGFMYFVFAALIRWRGLAAVHKLLPPVVIGPVIMVIGLSVAVAASSMAMGQADGKQVIDYTDSLILSGFTFAVTAIVSVFGSRMMKLIPILIGVASGYVLALLMGLVDTASIAHAPWFAVPHFETPQVNWQAALFMLPVAVAPAIEHIGGIMAIGNVTGKDYTKDPGLDKTLAGDGLGVCVAGLIGGPPVTTYGEVTGAVMITKNSNPVIMTWAAVFAVCMAFFGKFNAFLASIPMPVMGGIMLLLFGTIASLGVKTLIDAKVDLMLPKNLVIVSSVLTTGIGGMTLKLGSFSFAGVGLCAVLAIMLNSLLPDPKES

SEQ ID NO: 11110 - protein, 306 aa, Neisseria meningitidis
MNQKYILSANNNSLIEEIHNTVQSIGYCIVRGLNLNHLDGSRRNKKLFDFLSQLGMLTNHKGDGFKSIFWDIKYGDDYVIWINKNQDKATKLQTVQIVRNRFTWCFSTLENRSLAKARQRRTGFCSTINNDITFSEDVGECPLHSDSSFSENPESYLVMYVVKSANDGGNSLFLSSSDIVNQLSKTETGKKHLKTLTGNLYPFKAPASFDKKQGVRWGNILSVNTQMIRFRSDCIYKGIEENRNKVSKEMVLALDYLVKIIKNASDIQEFSAQDDGLIIIDNVNGLHAGTDYTDKNRHYIRARITV

SEQ ID NO: 11111 - protein, 2029 aa, Neisseria meningitidis
MNEGEVVLTPEQIQTLRGYASRGDTYGGWRYLANLGDRYADNAAAIVGKDTNLNGLNLWMKKGVENLWDDTVGKKTRLEKFDRVALQHFSQYVDLINKNNGRLPNTSEIERSYYKAVTYHGVSSSAAIDLVINRSLPDMADGYWALGLGIEAERIHNEQAVNNPNGSERDNRKQLISALDKGFDGSFKEKHFTFLQSVMMDLTKLGVEYTIDGWQKIGGWGNGIINDLYKSVVKREWTGIFEIVNNNIKQGNEAFKNEINSLVHDMKAAGKEFGDDLNTQWNNLTQAAEIIYNDIVDNTSQGIEKGVKAIKELSEKMKNAASDLADGSAEKAKQVVEDLAQAAKEAYENAKSTAEKAAQAAREFFKGLPSFKDLAEKFRDLFPNPEGWIDDGHQCFAPWVKETKKRNGKYHVYDPLALDLDGDGIETVATKGFSGSLFDHNRDGIRTATGWVAADDGLLVRDLNGNGIIDNGAELFGDNTKLADGSFAKHGYAALAELDSNGDNIINAADAAFQTLRVWQDLNQDGISQANELRTLEELGIQSLDLAYKDVNKNLGNGNTLAQQGSYTKTNGTTAKMGDLLLAADNLHSRFKDKVELTAEQAKAANLAGIGRLRDLREAAALSGDLANMLKAYSAAETKEAQLALLDNLIHKWAETDSNWGKKSPMRLSTDWTQTANEGIALTPSQVAQLKKNALVSLSDKAKAAIDAARDRIAVLDAYTGQDSNTLYYMSEEDALNIVKVTNDTYDHLAKNIYQNLLFQTRLQPYLNQISFKMENDTFTLDFSGLVQAFNHVKETNPQKAFVDLAEMLAYGELRSWYEGRRLMADYVEEAKKAGKFEDYQKVLGQETVALLAKTSGTQADDILQNVGFGHNKNVSLYGNDGNDTLIGGAGNDYLEGGSGSDTYVFGKGFGQDTVYNYDYAIGRKDIIRFTDGITADMLTFTREGNHLLIKAKDGSGQVTVQSYFQNDGSGAYRIDEIHFDNGKVLDVATVKELVQQSTDGSDRLYAYQSGNTLNGGLGDDYLYGADGDDLLNGDAGNDSIYSGNGNDTLNGGEGNDALYGYNGNDALNGGEGNDHLNGEDGNDTLIGGAGNDYLEGGSGSDTYVFGKGFGQDTVYNYDYATGRKDIIRFTDGITADMLTFTREGNHLLIKAKDGSGQVTVQSYFQNDGSGAYRIDEIHFDNGKVLDVATVKELVQQSTDGSDRLYAYQSGNTLNGGLGDDYLYGADGDDLLNGDAGNDSIYSGNGNDTLDGGEGNDALYGYNGNDALNGGEGNDHLNGEDGNDTLIGGAGNDYLEGGSGSDTYVFGKGFGQDTVYNYDYATGRKDIIRFTDGITADMLTFTREGNHLLIKAKDDSGQVTVQSYFQNDGSGAYRIDEIHFDNGKVLDVATVKELVQQSTDGSDRLYAYQSGSTLNGGLGDDYLYGADGDDLLNGDAGNDSIYSGNGNDTLDGGEGNDALYGYNGNDALNGGEGNDHLNGEDGNDTLIGGAGNDYLEGGSGSDTYVFGKGFGQDTVYNYDYATGRKDIIRFTDGITADMLTFTREGNHLLIKAKDGSGQVTVQSYFQNDGSGAYRIDEIHFDNGKVLDVATVKKLVQQSTDGSDRLYAYQSGSTLNGGLGDDYLYGADGDDLLNGDAGNDSIYSGNGNDTLNGGEGNDALYGYNGNDVLNGAEGNDHLNGEDGNDTLIGGAGNDYLEGGSGSDTYVFGEGFGQDTVYNYDYATGRKDIIRFTDGITADMLTFTREGNHLLIKAKDGSGQVTVQSYFQNDGSGAYRIDEIHFDNGKVLDVATVKKLVQQSTDGSDRLYAYQSGNTLNGGLGDDYLYGADGDDLLNGDAGNDSIYSGNGNDTLNGGEGNDALYGYNGNDVLNGGEGNDHLNGEDGNDTLIGGAGNDYLEGGSGSDTYVFGKGFGQDTVYNYHVDKNSDTMHFKGFKAADVHFIRSGSDLVLSASEQDNVRISGFFYGENHRVDTFVFDDAAISNPDFAKYINAGNNLVQSMSVFGSNTAATGGNVDANTQSVQQPLLVTPSA

SEQ ID NO: 11112 - protein, 197 aa, Neisseria meningitidis
LRMRAVGHCWKRFPNKAIEYKYKTASCRIGCSDGINREFMKTNFKQKIIEQARSEGLQVTALREQVLDIVLQQSGVIKAYNVLSQMQQQSEGVLAPPTAYRALDFWAEQGVLHKVAAVNGYILCSHAQHECDDHCHDHEEAEAHHSAFILVCTECGTADEQTLSHEWAALRAGVAESGFALKEEHVVLTGICKKCQK

SEQ ID NO: 11113 - protein, 65 aa, Neisseria meningitidis; identical to SEQ ID NO: 6901

SEQ ID NO: 11114 - protein, 48 aa, Neisseria meningitidis; identical to SEQ ID NO: 6016

SEQ ID NO: 11115 - protein, 950 aa, Neisseria meningitidis
MKLSELFNPNEFAARHLSFGDEAALLAAVGEKSMDEFVGNTVPQSIRMPSELDLPDALTEADALAKLKGIASKNVINKSYIGLGYYPTRVPNVILRNVLENPGWYTAYTPYQAEIAQGRLEALLNFQQVCIDLTGFPVAGASLLDEATAAAEAMAMAHRVGKVKSERFFVDARVYPQTLDVMKTRAKYFGFELVVSDFAKADDGEYFGALFQYVGKDGDVQDLQDVIGRLKAKGTIVAVAADIMSLVLLKSPAELGADIALGNTQRFGVPMGFGGPHAAYFAFKDAFKRSAPGRIIGVSKDASGKPALRMALSTREQHIRREKATSNICTAQALLANLAGMYAVYHGPEGVKRIANRIHALASAFADALVSDGINVVHKVFFDTVTVDFGNKEKADQVFAAALESGYNLRRVNDTQVAAAFHETSACEDLVDLYRAFTGKDTFAFADDVKGRLNAELLRQDDILQHPVFNRYHTEHEMLRYLKKLEDRDLAMNRSMISLGSCTMKLNATAEMLPITWAEFSDIHPYAPEAQTAGYRELLADMENSLKSITGFDAISFQPNSGAQGEYSGMLAIRRYQEAQGEAQRNICLIPKSAHGTNPATAAMLGLKVVVVDTDEHGNVNIDDLKAKAEQHRDALSAIMITYPSTHGVYEEGIRDICRIVHENGGQVYMDGANLNAQIGIMQPAEVGADVLHMNLHKTFCIPHGGGGPGMGPIGLKAHLAPFAPGHALTDTHSASADQTAVAAAAFGSASILPITWMYLTMMGKQGMEQATRWALLNANYVAKRLSEDYPILYTGKNGRVAHECIVDLRPLKAESGITETDIAKRLMDYGFHAPTVSFPVAGTLMIEPTESESKAELDRFIAALKQIKQEVLKVGRGEWPKEDNPLVNAPHTASDVTGEWAHPYSREEAVFPLPFVREHKFWPSVNRVDDVYGDRNLVCSCPPMENYED

SEQ ID NO: 11116 - protein, 321 aa, Neisseria meningitidis; identical to SEQ ID NO: 4435

SEQ ID NO: 11117 - protein, 808 aa, Neisseria meningitidis; identical to SEQ ID NO: 2836

SEQ ID NO: 11118 - protein, 259 aa, Neisseria meningitidis; identical to SEQ ID NO: 9318

SEQ ID NO: 11119 - protein, 354 aa, Neisseria meningitidis
MTLLKNDTFLRALLKQPVEYTPIWMMRQAGRYLPEYKATRAKAGSFLDLCKNTELATEVTIQPLERFDLDAAILFSDILTVPDAMGLGLYFAEGEGPKFKRAMQHEADIAKLHVPDMEKLQYVFDAVTSIRKALDGRVPLIGFSGSPFTLACYMVEGGGSKEFRTIKTMMYSRPDLLHKILDTNAQAVTAYLNAQIDAGAQAVQIFDTWGGVLSDAAFKEFSLKYIRQIVAGLKRESEGRRVPVIVFAKGGGLWLESMAQIGADALGLDWTCNIGEARRRVGNQVALQGNFDPSALFGTPESIRAEVARILADYGHGSGHVFNLGHGINQHADPEHAKILVDTVHELSRQYHGG

SEQ ID NO: 11120 - protein, 836 aa, Neisseria meningitidis
LCHRTKHRRNRNAMKKTCFHCGLDVPEHLHLTVRYENEDRETCCAGCQAVAQSIIDAGLGSYYKQRTADAQKTELPPQEILDQIRLYDLPEVQSDFVETHGGTREAVLMLGGITCAACVWLIEQQLLRTDGIVRIDLNYSTHRCRVVWDDGKIRLSDILLKIRQIGYTAAPYDAQKIEAANQKERKQYIVRLAVAGLGMMQTMMFALPTYLYGGDIEPDFLQILHWGGFLMVLPVVFYCAVPFYQGALRDLKNLRAGMDTPIAVAIIMTFIAGVYSLATNAGQGMYFESIAMLLFFLLGGRFMEHIARRKAGDAAERLVKLIPAFCHRMPGYPAVQDVREAAVVKLQAGDVVLVKPGETIPVDGTVLEGSSAVNESMLTGESLPVAKMPSEKVTAGTLNTQSPLIIRTDRTGGGTRLSHIVRLLDRALAQKPRTAELAEQYASSFIFGELLLAVPVFIGWTLYADAHTALWITVALLVITCPCALSLATPTALAASTGTLAREGILIGGKQAIETLAQTTDIIFDKTGTLTQGKPAVRRISLLRGTDEAFVLAVAQALEQQSEHPLARAILNCRISDGSVPDIAIKQRLNRIGEGVGAQLTVNGETQVWALGRASYVAEISGKEPQTEGGGSAVYLGSQSGFQAVFYLTDPLKDSAAEAVRQLAGKNLTLHILSGDRETAVAETARALGVAHYRAQAMPEDKLEYVKALQKEGKKVLMIGDGINDAPVLAQADVSAAAAGGTDIARDGADIVLLNEDLRTVAHLLDQARRTRHIIRQNLIWAGAYNIIAVPLAVLGYVQPWIAALGMSFSSLAVLGNALRLHKRGKMQSEKMPSEQ

SEQ ID NO: 11121 - protein, 419 aa, Neisseria meningitidis; identical to SEQ ID NO: 2185

SEQ ID NO: 11122 - protein, 405 aa, Neisseria meningitidis
MTHTASKTPKFWLTITAAAFILLITIGMRMTLGLFVQPVVNTTELSIAQFSLIIAVFQLMWGISQPLSGALADRFGAFRVLSGGAVLLVCACLIAPNIPTYWGLMIAVGLLLAFGTGSGGFSIIMGQVAAQVPAHKRGLASGLVNAGGSAGQFLFAPLVQGLVVLPEVGWTGTFYVWGAIALLILPVSWWLAGGNNAAHTQHAQATHGQSLGEAVKTAFKTPSYILLHLSFFACGFHIAFLVTHLPTEVALCGLPATVASTAIAIIGLANIAGCVFSGWCTSRVRGKYVLFGLYASRAAMILIYIFSPKTDLNFYIFAAALGFTWLATVTPTASITGKLFGTRYLATLFGLKMLSHQIGGFLGSYIGGIVITQFGDYGWMWYADALLAGTAALLNLPIREPRTAA

SEQ ID NO: 11123 - protein, 141 aa, Neisseria meningitidis; identical to SEQ ID NO: 3635

SEQ ID NO: 11124 - protein, 72 aa, Neisseria meningitidis; identical to SEQ ID NO: 1579

SEQ ID NO: 11125 - protein, 252 aa, Neisseria meningitidis
MITIRNVSYRIGTRPILDNVSLDIPEGGITALVGPNGAGKSTLFSFMARLRPLESGSIAYRGKNLAGTPTAELARTLSILTQENSIMSRITVRDLLMFGRYPYHQGRPTAECHRIVNGAIEEFHLQDLSDRYLTELSGGQRQRAMIAMVFCQSTDYVLLDEPLNNLDMYHARSLMQILQKLTREHKRTTVAVLHDINQAAAYADHVVAMKNGKAVLTGTPEEVFTVHNIKELFDMDVDVLDYEGKKLIVHHI

SEQ ID NO: 11126 - protein, 265 aa, Neisseria meningitidis
MAADFNRTTGVIMPFKPSKRISLLLVLALGACSTSYRPSRAEKANQVSNIKTQLAMEYMRGQDYRQATASIEDALKSDPKNELAWLVRAEIYQYLKVNDKAQESFRQALSIKPDSAEINNNYGWFLCGRLNRPAESMAYFDKALADPTYPTPYIANLNKGICSAKQGQFGLAEAYLKRSLAAQPQFPPAFKELARTKMLAGQLGDADYYFKKYQSRVEVLQADDLLLGWKIAKALGNAQAAYEYEAQLQANFPYSEELQTVLIGQ

SEQ ID NO: 11127 - protein, 716 aa, Neisseria meningitidis
MKTPLLKPLLITSLPVFASVFTAASIVWQLGEPKLAMPFVLGIIAGGLVDLDNRLTGRLKNIITTVALFTLSSLTAQSTLGTGLPFILAMTLMTFGFTILGAVGLKYRTFAFGALAVATYTTLTYTPETYWLTNPFMILCGTVLYSTAIILFQIILPHRPVQENVANAYEALGSYLEAKADFFDPDEAEWIGNRHIDLAMSNTGVITAFNQCRSALFYRLRGKHRHPRTAKMLRYYFAAQDIHERISSAHVDYQEMSEKFKNTDIIFRIHRLLEMQGQACRNTAQALRASKDYVYSKRLGRAIEGCRQSLRLLSDGNDNPDIRHLGRLLDNLGSVDQQFRQLQHNGLQAENDRMGDTRIAAIETGSLKNTWQAIRPQLNLESGVFRHAVRLSLVVAAACTIVEALNLNLGYWILLTALFVCQPNYTATKSRVRQRIAGTVLGVIVGSLVPYFTPSVETKLWIVIASTTLFFMTRTYKYSFSTFFITIQALTSLSLAGLDVYAAMPVRIIDTIIGASLAWAAVSYLWPDWKYLTLERTAALAVCSNGAYLEKITERLKSGETGDDVEYRATRRRAHEHTAALSSTLSDMSSEPAKFADSLQPGFTLLKTGYALTGYISALGAYRSEMHEECSPDFTAQFHLAAEHTAHIFQHLPETEPDDFQTALDTLRGELDTLRTHSSGTQSHILLQQLQLIARQLEPYYRAYRQIPHRQPQNAA

SEQ ID NO: 11128 - protein, 50 aa, Neisseria meningitidis
MSNNHSFFRPEVFVAQRNKWTGPVGWVGAIGAGIFSAAGGYNIGRGMMKP

SEQ ID NO: 11129 - protein, 307 aa, Neisseria meningitidis; identical to SEQ ID NO: 3808

SEQ ID NO: 11130 - protein, 119 aa, Neisseria meningitidis; identical to SEQ ID NO: 3189

SEQ ID NO: 11131 - protein, 258 aa, Neisseria meningitidis; identical to SEQ ID NO: 3585

SEQ ID NO: 11132 - protein, 367 aa, Neisseria meningitidis; identical to SEQ ID NO: 7962

SEQ ID NO: 11133 - protein, 398 aa, Neisseria meningitidis; identical to SEQ ID NO: 8296

SEQ ID NO: 11134 - protein, 272 aa, Neisseria meningitidis; identical to SEQ ID NO: 1395

SEQ ID NO: 11135 - protein, 201 aa, Neisseria meningitidis
MKKIGLFGGTFDPIHNGHLHIARAFADEIGLDAVVFLPAGGPYHKDAASASAADRLAMVELATAEDARFAVSDCDIVREGATYTFDTVQIFRQQFPSAQLWWLMGSDSLMKLHTWKKWQMLVRETNIAVAMRQGDSLHQTPRELHAWLGKSLQDGSVRILSAPMHNVSSTEIRRNLASQGVSDGIPPAAARYIREHGLYEK

SEQ ID NO: 11136 - protein, 217 aa, Neisseria meningitidis
MKITHCKLKKKVQKELLRFFVLEVTARSAADILGIHPNSAALFYRKIRTVINHHLALAADEVFEGPVEPDESDFGGRRKGRRGRGAAGKVVVFGILKRNGRVYTVVVDNAKSETLLPVIKKKIMPDSIVYTDSLSSCDKLDVSGFIHYRINHSKEFADRQNHINGIENFWNQAKRVLRKYNEIDRKSFPLFLKECKFRFNFGTPSRQLKILRDWCGI

SEQ ID NO: 11137 - protein, 417 aa, Neisseria meningitidis
MQTYLVGGAVRDYLLGLPVKDRDWVVVGADAQTMLAQGFQPVGKDFPVFLHPETHEEYTLARTERKTAKGYVGFSFHADKDVTLEQDLMRRDLTINAMAQDADGKIIDPFGGQRDLAAGILRHVSPAFAEDPVRILRTARFAARYRFEIAEETIKLMRQMVENGEADALVAERVWQEFAKGLMEKNPRKMIEVLRECGALKVLLPEVNALFGVPQRADYHPEIDSGIHTLMTLQRAADMGLSLPERYAALLHDLGKAKTPSDILPRHHGHDLAGVEPVREVNQRLRAPKHCAELAELVCRWHIIFHQVGQLKSQTILNVLKKTDAFRRPERFQTALNVCIADTQGRLNREHTPYPQRAHWFALLEAANQADSGKIAAECRAQGKAHLIAEQIDRARLAQIAPLQKTFRAAQDKTEKH

SEQ ID NO: 11138 - protein, 350 aa, Neisseria meningitidis
LGYTVARILRRIPNAGNPTMLRKLLKWSAVFLTVSAAVFAALLFVPKDNGRAYRIKIAKNQGISSVGRKLAEDRIVFSRHVLTAAAYVLGVHNRLHTGTYRLPSEVSAWDILQKMRGGRPDSVTVQIIEGSRFSHMRKVIDATPDIEHDTKGWSNEKLMAEVAPDAFSGNPEGQFFPDSYEIDAGGSDLRIYQTAYKAMQRRLNEAWESRQDGLPYKNPYEMLIMASLVEKETGHEADRDHVASVFVNRLKIGMRLQTDPSVIYGMGAAYKGKIRKADLRRDTPYNTYTRGGLPPTPIALPGKAALDAAAHPSGEKYLYFVSKMDGTGLSQFSHDLTEHNAAVRKYILKK

SEQ ID NO: 11139 - protein, 794 aa, Neisseria meningitidis; identical to SEQ ID NO: 2564

SEQ ID NO: 11140 - protein, 512 aa, Neisseria meningitidis
LISVAAALLGVALGTPYYLGVKAEESLTQQQKILQETGFLTVESHQYERGWFTSMETTVIRLKPELLNNARKYLPDNLKTVLEQPVTLVNHITHGPFAGGFGTQAHIETEFKYAPETEKVLERFFGKQAPVSLANTVYFNGSGKMEVSVPAFDYEELSGIRLHWEGLTGKTVYQKGFKSYRNSYDAPLFKIKLADKGDAAFEKAHFDSETSDGINPLALGSSNLTLEKFSLEWKEGVDYNVKLNELVNLVTDLQIGAFINPNGSIAPSKIEVGKLAFSTKTGESGSFINSEGQFRFDTLVYGNEKYGPLDIHIAAEHLDASALTVLKRKFAQISAKKMTEEQIRNDLIAAVKGEASGLFTNNPVLDIKTFRFTQPSGKIDVGGKIMFKDMKKEDLNQLGLMLKKTEADIRMSIPQKMLEDLAVSQAGNIFSVNAEDEAEGRASLDDINETLRLMVDSTVQSMAREKYLTLNGDQIDTAISLKNNQLKLNGKTLQNEPEPDFDEAGMVSEPQQ

SEQ ID NO: 11141 - protein, 602 aa, Neisseria meningitidis
MRTNYCGLISEQYLDQTVTVKGWVHRRRDHGGVIFIDLRDREGIVQVVIDPDTPEAFAAADSARNEYVLSITGRVRNRPEGTTNDKMISGKIEILAKEIEVLNAAATPPFQIDDENISENVRLTNRVIDLRRPVMQRNLRLRYQVAMGVRRYLDAQGFIDIETPMLTRSTPEGARDYLVPSRVHPGEFFALPQSPQLFKQLLMVAGFDRYYQITKCFRDEDLRADRQPEFTQIDLETSFLNEDEIMDITEGMAKQVFKDALNVDLGDFPRMPYAEAMFYYGSDKPDMRINLKFTELTDLMKTEEFKVFRGAADMKGGRVVALRVPNGAKFSRKEIDEYTKFVGIYGAKGLAYIKVNDVGNLSNGEDSGLQSPIVKFLSENALKEIIARTGAENGDIIFFGADKAKVVNEAIGALRIKVGLEHGAENGYFTDEWKPLWVVDFPMFEYDEEADRYVAVHHPFTAPKEGHEDLMVSDPANCLARAYDMVLNGWEIGGGSIRIHRADVQEKVFAALKISPEEQQEKFGFLLDNLKFGAPPHGGLAFGLDRLVTLMTGAESIRDVIAFPKTQRAQCLLTNAPNSVDDKQLRELSLRLRQKAAETKEA

SEQ ID NO: 11142 - protein, 242 aa, Neisseria meningitidis; identical to SEQ ID NO: 3849

SEQ ID NO: 11143 - protein, 475 aa, Neisseria meningitidis; identical to SEQ ID NO: 3229

SEQ ID NO: 11144 - protein, 66 aa, Neisseria meningitidis; identical to SEQ ID NO: 2062

SEQ ID NO: 11145 - protein, 530 aa, Neisseria meningitidis
MRAFAVRNHKGSFMNRTYANFYEMLAAACRKNGNGTAVFDGKEKTAYRALKQEAEAVAAYLQNIGVKFGDTVALAVSNSTEFITAYFAVSAIGAVAVPMNTFLKNSEYAYILNDCKARFLFASAGLSKELAGLKAQTPVEKIIWTDKSRPAGEMAEGDAFFEDVRRFPEKPDLGRQPRINDLAHIIYTSGTTGHPKGALISYANLFANLNGIERIFKISKRDRFIVFLPMFHSFTLTAMVLLPIYMACSIILVKSVFPFSNVLKQALLKRATVFLGIPAIYTAMSKAKIPWYFRWFNRIRLFISGGAPLAEQTILDFKAKFPRAKLLEGYGLSEASPVVAVNTPERQKARSVGIPLPGLEAKAVDEELVEVPRGEVGELIVRGGSVMRGYLNMPAATDETIVNGWLKTGDFVTIDEDGFIFIVDRKKDLIISKGQNVYPREIEEEIYKLDAVEAAAVIGVKDRYADEEIVAFVQLKEGMDLGENEIRRHLRTVLANFKIPKQIHFKDGLPRNATGKVLKRVLKEQFDGNK

SEQ ID NO: 11146 - protein, 219 aa, Neisseria meningitidis; identical to SEQ ID NO: 8152

SEQ ID NO: 11147 - protein, 228 aa, Neisseria meningitidis
MTVLQERYREVSDRIGKLVLQAGRKPHSVSLIAVGKTFPSDGIREVYAAGQRDFGENYIQEWYGKTEELADLTDIVWHVIGDVQSNKTKFVAERAHWVHTVCRLKTAVRLSGQRPSSMPPLQVCIEVNIAGEAAKHGVAPEEAVALAVEVAKLPNLVVRGLMCVAKANSSETELKTQFQTMQKLLADLNTAGVKADVLSMGMSDDMPAAIECGATHVRIGSAIFGKRG

SEQ ID NO: 11148 - protein, 83 aa, Neisseria meningitidis; identical to SEQ ID NO: 925

SEQ ID NO: 11149 - protein, 76 aa, Neisseria meningitidis
METLDERIKNLGKSLEDRIDANLIDAALEYITFSERLLAFETLCDYIEDFNIQLTEKESQEISFINKEFGIESTSD

SEQ ID NO: 11150 - protein, 105 aa, Neisseria meningitidis; identical to SEQ ID NO: 9830

SEQ ID NO: 11151 - protein, 273 aa, Neisseria meningitidis; identical to SEQ ID NO: 1044

SEQ ID NO: 11152 - protein, 288 aa, Neisseria meningitidis
VPSEPGKNMIQHAGLGYRRDLAEDFLSLSENSPICFIEAAPENWLKMGGWARKQFDRVAERLPLALHGLSMSLGGQAPLDTDLIDGIKEMMRRYDCTFFSDHLSYCHDGGHLYDLLPLPFTEEMVHHTARRIREVQDRLGCRIAVENTSYYLHSPLAEMNEVEFLNAVAREADCGIHLDVNNIYVNAVNHGLLSPEAFLKNVDADRVCYIHIAGHDVETPELLIDTHGAAVLPTVWDLLELAYAKLPTIPPTLLERDFNFPPFAELEAEVAKIADYQTRAGKEYRRAA

SEQ ID NO: 11153 - protein, 143 aa, Neisseria meningitidis; identical to SEQ ID NO: 9142

SEQ ID NO: 11154 - protein, 421 aa, Neisseria meningitidis; identical to SEQ ID NO: 8925

SEQ ID NO: 11155 - protein, 399 aa, Neisseria meningitidis
MSDQLILVLNCGSSSLKGAVIDRKSGSIVLSCLGERLTTPEAVITFSKDGNKRQVPLSGRNCHAGAVGMLLNELEKHGLHDRIKAIGHRIAHGGEKYSESVLIDQAVMDELNACIPLAPLHNPANISGILAAQEHFPGLPNVGVMDTSFHQTMPERAYTYAVPRELRKKYAFRRYGFHGTSMRYVAPEAARILGKPLEDIRMIIAHLGNGASITAIKNGKSVDTSMGFTPIEGLVMGTRCGDIDPGVYSYLTSHAGMDVAQVDEMLNKKSGLLGISELSNDCRTLEIAADEGHEGARLALEVMTYRLAKYIASMAVACGGVDALVFTGGIGENSRNIRAKTVSYLDFLGLHIDTKANMDKRYGNSGIISPTDSSPAVLVVPTNEELMIACDTAELAGIL

SEQ ID NO: 11156 - protein, 225 aa, Neisseria meningitidis; identical to SEQ ID NO: 8438

SEQ ID NO: 11157 - protein, 494 aa, Neisseria meningitidis
MPYNQAPDFLCADTMHPTYSAVQARLLEANRLSPELLAKSLCIIGAHHVDYADIYCQRTAYESWHLEEGIVKSGSFQINQGVGVRAVSGDKTAFAYADSLCIDSINRSARAVRAIGAAGGKVSAKMPSETRGKPVCSASDPIAGLDSAAKVALLNKVEAIAKAADPRIVQVMAGLTCEYDMVYLARLDGKHAADIRPMVRLNVTVIAKQGERREQGSAGGGGRYDLAYFDENLVRQFVDAAVKQALTNLESRPAPAGEMTVVLGNGWPGVLLHEAVGHGLEGDFNRKGTSVFSGRIGERVAAKGVTVVDQGDIAGRRGSLNIDDEGNETRRTVLIEDGILVGYMQDETNARLTGTQSTGNGRRESYASVPMPRMTNTFMENGSYEPEEIIASIDKGIYAVNFGGGQVDITSGKFVFSASEAWWVEGGRLQYPVKGATIIGNGPEVLKHVSMIGNDTALDSGVGVCGKEGQSVPVGVGQPTLRIDAGLTVGGSAI

SEQ ID NO: 11158 - protein, 546 aa, Neisseria meningitidis
MTDNSPPPNGHAQAHVRKNNTFLSAVWLVPLIALIAGGWLWIKEIRNRGPVVTLLMDSAEGIEVNNTVIKVLSIDVGRVTRIKLRDDQKGVEVTAQLNADVSGLIRSDTQFWVVKPRIDQSGVTGLGTLLSGSYIAFTPGKSDEAKDVFQVQDIPPVTAIGQSGLRLNLIGKNDRILNVNSPVLYENFMVGQVESAHFDPSDQSVHYTIFIQSPNDKLIHSASRFWLESGINIETTGSGIKLNSAPLPALLSGAISFDSPKTKNSKNVKSEDSFTLYDSRSEVANLPDDRSLYYTAFFKQSVRGLTVGSPVEYKGLNVGVVSDVPYFDRNDSLHLFENGWIPVRIRIEPSRLEINADEQSKEHWKQQFQTALNKGLTATISSNNLLTGSKMIELNDQPSSSPKLRPHTVYADDTVIATQGGGLDDLQVKLADLLDKFGKLPLDKTVSGLNASLAELKSTLKSINTLSNNPQTQNIPNELNQTLKELRTTLQGVSPQSPIYGDVQNTLQSLDKTLKDVQPVINTLKEKPNALIFNSSSKDPIPKGSR

SEQ ID NO: 11159 - protein, 135 aa, Neisseria meningitidis
MEIRAIKYTATAALLAFTVAGCRLAGWYECSSLSGWCKPRKPAAIDFWDIGGESPPSLEDYEIPLSDGNRSVRAKEYESAQQSYFYRKIGKFEACGLDWRTRDGKPLIETFKQEGFDCLKKQGLRRNGLSERVRW

SEQ ID NO: 11160 - protein, 109 aa, Neisseria meningitidis
MRKSRLSRYKQNKLIELFVAGVTARTAAELVGINKNTAAYYFHRLRLLIYQNSPHLEMFDGEVEADESYFGGQRKGKRGRGAAGKVAVFGLLKRNGKVYTVTVPNTQTA

SEQ ID NO: 11161 - protein, 90 aa, Neisseria meningitidis
MKQTVKWLAAALIALGLNQAVWADDVSDFRENLQAAAQGNAAAQYNLGAMYYKGRGVRQDLVLAQEWFGKACQNGDQDGCDIYQRLKAGY

SEQ ID NO: 11162 - protein, 140 aa, Neisseria meningitidis
MMKRIKCFCDKFPSGDTFRMCIILDDYDNRVDYYVGIYDYITSTLMSDIYYRSTIDEHFKIIELIENNPNEIYDDGGGQQFCLEFHHDKVIFYHNEFDEEDGYPVLSCSLHTFKTALIAWNAFLQLPKSIHSVVETVIEE

SEQ ID NO: 11163 - protein, 267 aa, Neisseria meningitidis; identical to SEQ ID NO: 2269

SEQ ID NO: 11164 - protein, 92 aa, Neisseria meningitidis; identical to SEQ ID NO: 752

SEQ ID NO: 11165 - protein, 354 aa, Neisseria meningitidis; identical to SEQ ID NO: 3126

SEQ ID NO: 11166 - protein, 199 aa, Neisseria meningitidis; identical to SEQ ID NO: 360

SEQ ID NO: 11167 - protein, 458 aa, Neisseria meningitidis; identical to SEQ ID NO: 9229

SEQ ID NO: 11168 - protein, 333 aa, Neisseria meningitidis
LIIWEAHPPSVLFSRRPQPYSRHPNNQSEKIMNQTAINRADVRTRFIFDDMPVRGLHVRLENEWQHIVKQKNYPAAIRRALGELLAAGVLLSGNLKNEGTLIVQVQGQGRLKMLVAEATSDRTVRATARWDEAAEIGEDESLVDLLGEGGVFVLTLQPKDGEPWQGVVPLEGDGIAQMLMNYMKRSEQLDTHIVLSASDEAAGGLLVQRLPEEVLDEEAWEHVSTLARTLTAGELAELDAQHVLYRLFHETPPRVFEPETFEFSCTCSRGKVSDMLLMLGGEEVGGVVVEQGSIEVDCDFCHSKYVFDETDVNALFGEDVVGVAKGLPRHTVQ

SEQ ID NO: 11169 - protein, 388 aa, Neisseria meningitidis
MNLHEYQAKELLAGYGLPVQGGILAHNGEEAAAAYDKLGGKFAVVKAQVHAGGRGKAGGVKVVKSREEAKEVAESLIGTNLVTYQTDANGQPVNSVLVCEDMYPVQTELYLGAVVDRSTRRITFMASTEGGVEIEKVAAETPEKIFKVTVDPLVGLQPCQAREVAFQLGLKDKQINEFVKLMTGAYKAFVENDFALFEVNPLAVRENGALACVDGKIGIDSNALYRLPKIAELRDKSQENERELKASEFDLNYVALEGNIGCMVNGAGLAMATMDIIKLKGGQPANFLDVGGGATKDRVVEAFKLILEDKSVQGVLINIFGGIVRCDMIAEAIVAAVKEINVDVPVVVRLEGNNAELGAKILNESGLKLTSADGLNDAAEKIVAAVNA

SEQ ID NO: 11170 - protein, 321 aa, Neisseria meningitidis; identical to SEQ ID NO: 2168

SEQ ID NO: 11171 - protein, 236 aa, Neisseria meningitidis; identical to SEQ ID NO: 9307

SEQ ID NO: 11172 - protein, 615 aa, Neisseria meningitidis; identical to SEQ ID NO: 5697

SEQ ID NO: 11173 - protein, 394 aa, Neisseria meningitidis; identical to SEQ ID NO: 9082

SEQ ID NO: 11174 - protein, 369 aa, Neisseria meningitidis; identical to SEQ ID NO: 8556

SEQ ID NO: 11175 - protein, 277 aa, Neisseria meningitidis; identical to SEQ ID NO: 2920

SEQ ID NO: 11176 - protein, 148 aa, Neisseria meningitidis
MDQAKRTAYVKIINALFDGAVKVQPSQITETVVDMVDKMFDEIATCHERIRPMAVLADGIAGSIVKLAPNEIPLIFGNSSFGSYLKSKTRDEVFKVLKQSKVNNAGKVLEAFYESWLKYTAKDRRLKVCIVTAQSRWRSRFEMELLGI

SEQ ID NO: 11177 - protein, 296 aa, Neisseria meningitidis; identical to SEQ ID NO: 72

SEQ ID NO: 11178 - protein, 125 aa, Neisseria meningitidis; identical to SEQ ID NO: 535

SEQ ID NO: 11179 - protein, 325 aa, Neisseria meningitidis
MIYPWHNEQWRQIAEHWERRPNAWLFAGKKGIGKTEFARFAAQALLCENPSPDHRACGACASCHFFEQGSHPDFYEITPLSDESENGRKLLQIKIDAVREIIDNVYLTSVRGGLRVVLIHPAESMNIQAANSLLKVLEEPPPQVVFLLVSHAADKVLPTIKSRCRKMVLPAPSHEEALAYLRERGVAEPEERLAFHSGAPLFDEADGVRALRIKLLDILAEPRLLKILDYAALFDKEKLPLAVFVGWMQKWLVDLGLCLQHMKPVYYPAYEDRLLQTASGFRPRNVFAAEDMLKQLAPYGFHTLNVKMQIEHLLINYLELKKENG

SEQ ID NO: 11180 - protein, 200 aa, Neisseria meningitidis; identical to SEQ ID NO: 9503

SEQ ID NO: 11181 - protein, 230 aa, Neisseria meningitidis; identical to SEQ ID NO: 3169

SEQ ID NO: 11182 - protein, 70 aa, Neisseria meningitidis; identical to SEQ ID NO: 232

SEQ ID NO: 11183 - protein, 113 aa, Neisseria meningitidis; identical to SEQ ID NO: 118

SEQ ID NO: 11184 - protein, 265 aa, Neisseria meningitidis
MNRLYPHPIIAREGWPIIGGGLALSLLVSMCCGWWSLPFWVFTVFALQFFRDPAREIPQNPEAVLSPVDGRIVVVECARDPYRDVDALKISIFMNVFNVHSQKSPADCTVTKVVYNKGKFVNADLDKASTENERNAVLATTASGREITFVQVAGLVARRILCYTQAGAKLSRGERYGFIRFGSRVDMYLPVDAQAQVVIGDKVTGVSTVLARLPLTAPQIESEPESEPALQTAPVETAANPSAEQRQIEAAAAKIQAAVQDVLKD

SEQ ID NO: 11185 - protein, 309 aa, Neisseria meningitidis
MDSIIELRHLKTLLALEETGSVSLAAKRVFLTQSALSHQIRMLENHYGAPLFERKSTPLRFTPVGERLLRLAHDLLPQVTDAERDLARIIEGEAGELRIAVECHTCFDWLMPAMGEFRPIWPQIELDIVSGFQADPIGLLLQHRADLAIVSEAEKQNGISFQPLFAYEMVGICAPDHPLAAKTVWEAEDFIGETLITYPVPDEMLDLPKKILIPKNINPPRRHSELTIAIIQLVASRRGIAALPYWTVMPYLEKGYVVHRQITADGLQSKLYAAIRTEDTDKSYLNNFCQIIRERGFADLPGLSELEPV

SEQ ID NO: 11186 - protein, 164 aa, Neisseria meningitidis; identical to SEQ ID NO: 7401

SEQ ID NO: 11187 - protein, 60 aa, Neisseria meningitidis; identical to SEQ ID NO: 4635

SEQ ID NO: 11188 - protein, 1391 aa, Neisseria meningitidis; identical to SEQ ID NO: 3726

SEQ ID NO: 11189 - protein, 296 aa, Neisseria meningitidis
MIFQNHAVRTATLSHFTTSAMAHYAIGDIQGCFDELTALLGKIGFNHGTDTLWLTGDIVNRGPKSLETLQFCIRHENSVQIVLGNHDLHLLAVGCGEGAPKRSDTIEPILKHPDGKKMLDWLRAQPLLIREGSRVMVHAGILPQWRITKAESLAREAEAELRGKKYVKFFSKMYGNKPAAWDEGLKGYARLRFIVNAFTRMRALTFKNELDFDYKSTVKKMPPYLRPWFKAPDRQNLDRTIIFGHWSSLGYTNADNVISLDTGALWGGQLTAVNLETEEITQVQAAGGIDWKSFAK

SEQ ID NO: 11190 - protein, 267 aa, Neisseria meningitidis
MCAVCSLKVFLYFWSMETHSGCFLRKTVMKDDVLKQQAHAAIQKKLGYAFRDISLLRQALTHRSHHAKHNERFEFVGDSILNYTVARMLFDAFPKLTEGELSRLRASLVNEGVLAEMAAEMNVGDGLYLGAGELKSGGFRRPSILADAMEAMFAAVSFDADFNTAEKVVRHLFADRVRRADFQNQAKDGKTALQEALQARRFALPKYRIEEQIGHANDSMFVVSCDLGELGFVCRAKGTSRKAAEQEAAKEALKWLEEKLPLKKKKK

SEQ ID NO: 11191 - protein, 367 aa, Neisseria meningitidis; identical to SEQ ID NO: 8815

SEQ ID NO: 11192 - protein, 962 aa, Neisseria meningitidis; identical to SEQ ID NO: 9314

SEQ ID NO: 11193 - protein, 290 aa, Neisseria meningitidis; identical to SEQ ID NO: 1941

SEQ ID NO: 11194 - protein, 87 aa, Neisseria meningitidis; identical to SEQ ID NO: 1364

SEQ ID NO: 11195 - protein, 580 aa, Neisseria meningitidis
MKFFPAPCLLVILAVIPLKTLAADENDAELIRSMQRQQHIDAELLTDANVRFEQPLEKNNYVLSEDETPCTRVNYISLDDKTARKFSFLPSVLMKETAFKTGMCLGSNNLSRLQKAAQQILIVRGYLTSQAIIQPQNMDSGILKLRVSAGEIGDIRYEEKRDGKSAEGSISTFNNKFPLYRNKILNLRDVEQGLENLRRLSSVKTDIQIIPSEEEGKSDLQIKWQQNKPIRFSIGIDDAGGKTTGKYQGNVALSFDNPLGLSDLFYVSYGRGLAHKTDLTDATGTETASGSRSYSVHYSVPVKKWLFSFNHNGHRYHEATEGYSVNYDYNGKQYQSSLAAERMLWRNRLHKTSVGMKLWTRQTYKYIDDAEIEVQRRRSAGWEAELRHRAYLNRWQLDGKLSYKRGTGMRQSMPAPEENGGDILPGTSRMKIITAGLDAAAPFILGKQQFFYATAIQAQWNKTPLVAQDKLSIGSRYTVRGFDGEQSLFGERGFYWQNTLTWYFHPNHQFYLGADYGRVSGESAQYVSGTQLMGAVVGFRGGHKVGGMFAYDLFAGKPLHKPKGFQTTNTVYGFNLNYSF

SEQ ID NO: 11196 - protein, 228 aa, Neisseria meningitidis; identical to SEQ ID NO: 9344

SEQ ID NO: 11197 - protein, 321 aa, Neisseria meningitidis; identical to SEQ ID NO: 4435

SEQ ID NO: 11198 - protein, 348 aa, Neisseria meningitidis
MKMQAVVVNKNVAGDVEIVEREVRPLEYGEALVEVEYCGVCHTDLHVAAGDYGEKPGRVLGHEGIGLVKEVADGVKNLKVGDRVSIAWLFQSCGSCEYCNTGRETLCRSVLNAGYTADGGMATHCIVSADYAVKVPEGLDPAQASSITCAGVTTYKAIKVSSVRPGQWIAIYGAGGLGNLGVQYAKKVFGAHVVAIDINDEKLAFAKESGADLVINAAKEDAAKVIQEKTGGAHVAIVTAVSAAAFNSAVNCVRAGGRVVAIGLPPESMDLSIPRLVLDGIEVVGSLVGTRKDLEEAFQFGAESLVVPKVQLRALDEAPAIFQEMREGKITGRMVIDMKKECGCGHHH

SEQ ID NO: 11199 - protein, 558 aa, Neisseria meningitidis
MSFKTDAEIAQSSTMRPIGEIAAKLGLNADNIEPYGHYKAKINPAEAFKLPQKQGRLILVTAINPTPAGEGKTTVTIGLADALRHIGKDAVIALREPSLGPVFGVKGGAAGGGYAQVLPMEDINLHFTGDFHAIGAANNLLAAMLDNHIYQGNELDIDPKRVLWRRVVDMNDRQLRNIIDGMGKPVDGVMRPDGFDITVASEVMAVFCLAKDISDLKERLGNILVAYAKDGSPVYAKDLKAHGAMAVLLKDAIKPNLVQTIEGTPAFVHGGPFANIAHGCNSVTATRLAKHLADYAVTEAGFGADLGAEKFCDIKCRLAGLKPDAAVVVATVRALKYNGGVERANLGEENLEALAKGLPNLLKHISNLKNVFGLPVVVALNRFVSDSDAELAMIEKACAEHGVEVSLTEVWGKGGVGGADLARKVVNAIENQPNNFNFSYDVELSIKDKIRAIAQKVYGAEDVDFSAEASAEIASLEKLGLDKMPICMAKTQYSLSDNAKLLGCPEGFRITVRGITVSSGAGFIVALCGNMMKMPGLPKVPAAEKIDVDAEGVIHGLF

SEQ ID NO: 11200 - protein, 292 aa, Neisseria meningitidis
MTDIRISMNYALDALWWKLTSQPVRDLASLLTAPPLWQSGCELGVRELLGERGFRYLLALDADPAPLTEHLTRRAPFGHRLGIYAEELLAFWFANAPHAELLAHNLTVSGSDGNTQGAADFVVRLNGKPYHIELTCKYYGGGTGRLEDMRGLDPKDTLLGKAAKLTAQLGLPHTSDGIRTLRQHGLPLDVKPVSIVRGIGFFPQSFHAFEPPLNPYGWRGIYIQDWAEYGFERQEVRYHLLDRMAYLAPARAAETETLNETEIRRIDQGLIAVLECRPDGFWHEIERIMKAV

SEQ ID NO: 11201 - protein, 117 aa, Neisseria meningitidis
LNLICSGRIQIMFGKQLFEEVGSKISETIANSPAKDVEKNIKAMLGGAFNRMDLVTREEFDIQQQVLIKTRTKLAALEARLAKLEAAQNPERAALEAAEAAAEEAVAEIRQQTEAGE

SEQ ID NO: 11202 - protein, 360 aa, Neisseria meningitidis; identical to SEQ ID NO: 7291

SEQ ID NO: 11203 - protein, 205 aa, Neisseria meningitidis; identical to SEQ ID NO: 9114

SEQ ID NO: 11204 - protein, 445 aa, Neisseria meningitidis
LLFLYRDGTVLTLDAFEQCLKDCFPQGLNGKKTAVALSGGLDSVVLLHLLVRAGKRAGFVPEALHIHHGLSPRADDWADFCQNYCDMLGVGLETVKVCVEKNGLGIEAAARQKRYAAFAEKGFDILALAHHRDDQIETFMLAVARGGGLRALAAMPAVRPFGEKGIIWRPLLPFSRQDIWDYAQKHGLPNIEDESNTDTAYLRNRFRHRILPELSAQIPHFGRHVLNNVRALQEDLALLDEVVVQDCRWVCGAGYFDTARWLTFSPRRKTHILRHFLKENGIPVPNQNALADIARVLTEAKTGRWNLQGFELHHYAGRLFVFRQEKTDKLRFLKDRQISGNLREILTGQGFVLKRHPFGLPEHLLEQDGILRTVAASDTLAVGGIHKDVKKILQGKRVLPVLRPIWPLVADSGNRPLALANCCADFQYSVSDGILPVHPDFPILF

SEQ ID NO: 11205 - protein, 103 aa, Neisseria meningitidis; identical to SEQ ID NO: 392

SEQ ID NO: 11206 - protein, 331 aa, Neisseria meningitidis
MKTSIRYALLAAALTAATPALADITVYNGQHKEAAQAVADAFTRATGIKVKLNSAKGDQLAGQIKEEGSRSPADVFYSEQIPALATLSAANLLEPLPASTINETRGKGVPVAAKKDWVALSGRSRVVVYDTRKLSEKDLEKSVLNYATPKWKNRIGYAPTSGAFLEQVVAIVKLKGEAAALKWLKGLKEYGKPYAKNSVALQAVENGEIDAALINNYYWHAFAREKGVQNVHTRLNFVRHRDPGALITYSGAAVLKSSQNKDEAKKFVAFLAGKEGQRALTAVRAEYPLNPHVVSTFNLEPIAKLEAPQVSATTVSEKEHATRLLEQAGMK

SEQ ID NO: 11207 - protein, 168 aa, Neisseria meningitidis
LKVVPERTVSADAKTRDPMWDNAALQTSEGVNFIARFLGFFSDGEYRYVDVLQPNHSDIIRYSGKDFPINQIFNHIHPARYAVTFENNVDSKLRRHWVAGATIRIIDRQTDEVIAKKTIYVFEKGLDGTGGARMPWKFAILCNKERLTSSEPLSDFVLSVLKPYILRP

SEQ ID NO: 11208 - protein, 85 aa, Neisseria meningitidis; identical to SEQ ID NO: 209

SEQ ID NO: 11209 - protein, 136 aa, Neisseria meningitidis
MVQTVFFYPKETIMSKDKNQITVGINREIIDTETDSSAEFHVIRHVSLDYATGFNVVLLDSYVRKSTFERRGRSVGSMQLNIPGVPPRGTDVLDWAYQAVVAAVEGGAVDAYGQPISANSLTGAELVYADLPEAAI

SEQ ID NO: 11210 - protein, 498 aa, Neisseria meningitidis; identical to SEQ ID NO: 2733

SEQ ID NO: 11211 - protein, 359 aa, Neisseria meningitidis; identical to SEQ ID NO: 2157

SEQ ID NO: 11212 - protein, 357 aa, Neisseria meningitidis; identical to SEQ ID NO: 3038

SEQ ID NO: 11213 - protein, 90 aa, Neisseria meningitidis; identical to SEQ ID NO: 2539

SEQ ID NO: 11214 - protein, 513 aa, Neisseria meningitidis
MKFLDREASIAKPGFNRWLVPPAALAVHLAIGQIYAYSVFNAPLTKLIGITESAAGDWKLTTVGWIFSIALAMLGTSAALFGTWMERVGPRKAIFAAACCFSLGFFVSAFGVRTHNLFLLYLGNGVIGGVGLGLGYIGPVSTLMKWFPDKPGMATGLAIMGFGGGAMLASPLSVSLMNAFSNAASVGVAETFAVLGLLYLALMMFGAFTIRVPADGWKPEGYTAPKTQNKLVSSNHVNVSQAMKTPQFWLLFWVLCLNVTAGIGVLGQASVMIQELFSETSIGRQAAVGAGAAAGFVSLLSLFNMGGRFLWSSVSDKIGRKNTYTIFFVLGSLLYFAVPSIGEGGSKALFIIGFCVIISMYGGGFAAIPAYLKDLFGTYQVGAIHGRILLAWSTAAVIGPVLVNYIRQSQIDSGIPAAQAYGVTMYIMACLLIIGLLCNLAVKSVHEKHHEKDIKTAAHSGNPDDETAISDAYLVGEKVSGGGISVWWRWALAVIPLAYGVVMVFVKALDLFS

SEQ ID NO: 11215 - protein, 117 aa, Neisseria meningitidis; identical to SEQ ID NO: 8268

SEQ ID NO: 11216 - protein, 161 aa, Neisseria meningitidis; identical to SEQ ID NO: 8432

SEQ ID NO: 11217 - protein, 475 aa, Neisseria meningitidis
MDTKEILGYAAGSIGSAVLAVIILPLLSWYFPADDIGRIVLMQTAAGLTVSVLCLGLDQAYVREYYAAADKDTLFKTLFLPPLLSAAAIAALLLSRPSLPSEILFSLDDAAAGIGLVLFELSFLPIRFLLLVLRMEGRALAFSSAQLVPKLAILLLLLLPLTVGLLHFPANTAVLTAVYALANLAAAAFLLFQNRCRLKAVRHAPFSPAVLHRGLRYGIPIALSSIAYWGLASADRLFLKKYAGLEQLGVYSMGISFGGAALLFQSIFSTVWTPYIFRAIEENAPPARLSATAESAAALLASALCLTGIFSPLASLLLPENYAAVRFIVVSCMLPPLFCTLVEISGIGLNVVRKTRPIALATLGALAANLLLLGLAVPSGGARGAAVACATSFWLFFVFKTESSCRLWQPLKRLPLYTHTLLCLTSSAAYTCFGTPANYPLFAGVWAVYLAGCILRHWKDLHKLFHYLKKQGFPL

SEQ ID NO: 11218 - protein, 594 aa, Neisseria meningitidis; identical to SEQ ID NO: 9182

SEQ ID NO: 11219 - protein, 185 aa, Neisseria meningitidis; identical to SEQ ID NO: 5793

SEQ ID NO: 11220 - protein, 479 aa, Neisseria meningitidis
VFYHSKTGDKKSAATDVSAARILTKVNMKPLDLNFICQALKLPMPSESKPVSRIVTDSRDIRAGDVFFALAGGRFDAHDFVEDVLAAGAAAVVVSREDCVAMDGALKVDDTLAALQTLAKVWRENVNPFVFGITGSVGKTTVKEMLAAVLRRRFGDNAVLATAGNFNNHIGLPLTLLKLNEKHRYAVIEMGMNHFGELAVLTQIAKPDAALVNNAMRAHVGCGFDGVGDIAKAKSEIYQGLCSDGMALIPQEDANMAVFKTATLNLNTRTFGIDSGDVHAENIVLKPLSCEFDLVCGDERAAVVLPVPGRHNVHNAAAAAALSLAAGLSLNDVAEGLKGFSNIKGRLNVKSGIKGATLIDDTYNANPDSMKAAIDVLARMPAPRIFVMGDMGELGEDEAAAMHAEVGAYARDQGIEAAYFVGDNSVEAAEKFGADGLWFAAKDPLIQVLRHDLPERATVLVKGSRFMQMEEVVEALEDK

SEQ ID NO: 11221 - protein, 460 aa, Neisseria meningitidis; identical to SEQ ID NO: 8349

SEQ ID NO: 11222 - protein, 753 aa, Neisseria meningitidis; identical to SEQ ID NO: 9137

SEQ ID NO: 11223 - protein, 346 aa, Neisseria meningitidis; identical to SEQ ID NO: 8941

SEQ ID NO: 11224 - protein, 407 aa, Neisseria meningitidis; identical to SEQ ID NO: 3034

SEQ ID NO: 11225 - protein, 343 aa, Neisseria meningitidis; identical to SEQ ID NO: 614

SEQ ID NO: 11226 - protein, 446 aa, Neisseria meningitidis
LHTLLAFIFAILILVSLHEFGHYIVARLCGVKVVRFSVGFGKPFFTRKRGDTEWCLAPIPLGGYVKMVDTREGEVSEADLPYAFDKQHPAKRIAIVAAGPLTNLALAVLLYGLSFSFGVTELRPYVGTVEPDTIAARAGFQSGDKIQSVNGTPVADWGSAQTEIVLNLEAGKVAVGVQTASGAQTVRTIDAAGTPEAGKIAKNQGYIGLMPFKITTVAGGVEKGSPAEKAGLKPGDRLTAADGKPIASWQEWANLTRQSPGKKITLNYERAGQTHTADIRPDTVEQSDHTLIGRVGLRPQPDRAWDAQIRRSYRPSVIRAFGMGWEKTVSHSWTTLKFFGKLISGNASVSHISGPLTIADIAGQSAELGLQSYLEFLALVSISLGVLNLLPVPVLDGGHLVFYTAEWIRGKPLGERVQNIGLRFGLALMMLMMAVAFFNDVTRLLG

SEQ ID NO: 11227 - protein, 657 aa, Neisseria meningitidis
MHPIETPDKTFHDGDGVSELGTILPAWWLNQVQSELLAVLTAAGIQPDKSQPNQLLAALNRLAVVTTGNQEIGGQKTFTAQTQFQSGIHLSANQTNWNGGHKAYIGADADNAHIVFGDDTLRLHGANNRISYNNHDIFHKANKPRFAEDIEGKPNTLSGYGIGNFKVETFRGDLNTLKTDGIYSLSTAVGSSNLPVENTACHIQVIAGTKHGWCRQLGYPAYTSDVYERHQTSSANDNWSAWKKLNSDGIPVGAIVSFPKAVRNPAGYLKANGTTFAQNTFPDLYRALGNSNRLPDLSRTDIGMTAWFPSDQIPTGWLAFDDIRTRVTETAYPELYRLLTGKYGSIQNVPQAEDRFIRNAGNSLAVGTKQEDEIKRHVHKVFSHWTNHTDTAAVGYEDHNERQRSALVSTWTDGDLNDNGFLTPRPDSKMATGGDENRPKALVLKLCIKAADTLGEAVFWIKSHGETINAGALDAGTLAQNLQDKADRAHTHTAAQIQGLDEKISTAVAAQFTRQTIGGVDIVRFPDGTMIQTGSYRFTRSGGPIENEVVFPVAFADGNVKCFVSERHSGRVTGDRRQHNWLFIRAKNHAAAIITNWYEGSCDWMAIGKAASGNAASSPIGPEIPETNEEPQRESGRTSTGPRNRRRRDGLLEALQD

SEQ ID NO: 11228 - protein, 264 aa, Neisseria meningitidis
VLHRLQKVVRHIAQTEIMPRFLNTPSCRKEDGSMLSEADIAAQTAFAAALPLLIDCPMLGEEMSRQEQSALWEQYSGEKGLWIVDPIDGTNNFVNGLPHFAVSVAFVRNGRAELGVIYNPVSGECFYAERGQGAFLNGTRLPLRLVDKKLNEAIAGVEIKYLRSGKLSSRMSTLAPFGTIRSMGSSTLDWCYLACGRYDVYVHGGQKLWDYAAGALIFEEAGGRLTTLEGDGFWSGEHVFKRSVVAALEPKLFERWVEWIRENQ

SEQ ID NO: 11229 - protein, 328 aa, Neisseria meningitidis; identical to SEQ ID NO: 9651

SEQ ID NO: 11230 - protein, 140 aa, Neisseria meningitidis
MKKTFLSAVLLLSAATQTVWADTVFSCKTDNNKYIEVQKINRNLYEYSFGSAAKKEIAIRNSKADLLGRSDRWQGWGRGRWATMKFQNGEFMYTVDAGFDSVTHAVGSGVLVERRGKEIARFDCTSKTAQANFDDDDFAW

SEQ ID NO: 11231 - protein, 524 aa, Neisseria meningitidis
MKKSLFVLFLYSSLLTASEIAYRFVFGIETLPAAKMAETFALTFVIAALYLFARYKATRLLIAVFFAFSIIANNVHYAVYQSWMTGINYWLMLKEITEVGGAGASMLDKLWLPALWGMLEVMLFCSLAKFRRKTHFSADILFAFLMLMIFVRSFDTKQEHGISPKPTYSRIKANYFSFGYFVGRVLPYQLFDLSKIPVFKQSAPSKIGQGSVQNIVLIMGESESAAHLKLFGYGRETSPFLTQLSQADFKPIVKQSYSAGFMTAVSLPSFFNVIPHANGLEQISGGDTNMFRLAKEQGYETYFYSAQAENQMAILNLIGKKWIDHLIQPTQLGYGNGDNMPDEKLLPLFDKINLQQGRHFIVLHQRGSHAPYGALLQPQDKVFGEADIVDKYDNTIHKTDQMIQTVFEQLQKQPDGNWLFAYTSDHGQYVRQDIYNQGTVQPDSYLVPLVLYSPDKAVQQAANQAFAPCEIAFHQQLSTFLIHTLGYDMPVSGCREGSVTGNLITGDAGSLNIRDGKAEYVYPQ

SEQ ID NO: 11232 - protein, 126 aa, Neisseria meningitidis; identical to SEQ ID NO: 3371

SEQ ID NO: 11233 - protein, 180 aa, Neisseria meningitidis
MINHIEKYIGTISHGSKSDSGSQYKLNIAAIPSSPNRDLKTYITLGLSKHDLNYKSRFEILFVCSLKYDENQIFPFLRWLAETIIENKKILLRGQVVYLPRSIVDSTKMDALYVSAPFYFDDDFQVCYGEHYNIVFPLLVPLYKQEAELVEKKGWNAFEQFLLDNEVGNLSDMNRKPFTW

SEQ ID NO: 11234 - protein, 241 aa, Neisseria meningitidis
LMDKDKGSYAGIPVQNTKELVWQKIQDIPISECGEPLVSVGNTGRIRVNPVYFSQGIEGAINSVLLRRSVADRLTQVVSLLPEVYGLEIFDGWRPVIVQRALRENMKQEIEKRHPEYDEVQVREALDCFAADPDRAGMPLPHLTGGSVDVGLFDIKSGKSLDMGSEFDATGHLSYSDALEKEGEYFSSARNLRRILIHAMKEAGFSNLPTEWWHFDYGNQNWAYFTQQSNAVFGAVEEQDT

SEQ ID NO: 11235 - protein, 759 aa, Neisseria meningitidis
MNTPTDLKVTKRDGRLEAIDLDKIHRVVTWAADGLENVSVSQVELKSHIQFYNGIRTDDIHETIIKAAADLISEDTPDYQYLAARLAIFHLRKIAYGEYEPPHLYDHVKKLTDAGKYDRHILEDYSREEFDELNAYIDHERDMSFSYAAVKQLEGKYLVQNRVTRQIYETPQFLYVLVAMCLFSKYPKEARLGYVKRFYDAVSTFKVSLPTPIMSGVRTPTRQFSSCVLIECDDSLDSINATTSAIVKYVSQRAGIGINAGRIRGLDSEIRGGEARHTGCIPFFKMFQAAVKSCSQGGVRGGAATLFYPLWHIEAESLLVLKNNRGVEDNRIRQLDYGVQINRLLYTRLIKGGNITLFSPNEVPGLYEAFFADQDEFERLYTKYEQDPDIRKRIIPAADLFSTLMQERAGTGRIYIQNVDHCNTHSPFDPRVAPVHQSNLCMEIALPTKPLDNINDPNGEIALCTLSAFNLGALNSLDELEGLADLTVRALDALLDYQGYPVEAARTSTMGRRSLGIGVINYAYYLAKNGVRYSDGSALGLTHRTFEAIQYYLLKASANLAKEYGACTLFNQTVYSQGKLPIDTYKKDLDAVCGEPLHYDWESLRAEIVKYGLRNSTLTALMPSETSSQIANATNGIEPPRGLVTVKASKDGILKQVVPEFETLKDAYETLWQLPGNEGYLKLVGVMQKFVDQSISANTAYDPNKFEGSKVSMKQMLKDLLTAYKYGVKTLYYHNTRDGADDTQADIQDDGCAGGACKI

SEQ ID NO: 11236 - protein, 122 aa, Neisseria meningitidis; identical to SEQ ID NO: 2373

SEQ ID NO: 11237 - protein, 76 aa, Neisseria meningitidis; identical to SEQ ID NO: 286

SEQ ID NO: 11238 - protein, 528 aa, Neisseria meningitidis; identical to SEQ ID NO: 4033

SEQ ID NO: 11239 - protein, 463 aa, Neisseria meningitidis; identical to SEQ ID NO: 9011

SEQ ID NO: 11240 - protein, 57 aa, Neisseria meningitidis; identical to SEQ ID NO: 2401

SEQ ID NO: 11241 - protein, 162 aa, Neisseria meningitidis; identical to SEQ ID NO: 2816

SEQ ID NO: 11242 - protein, 199 aa, Neisseria meningitidis; identical to SEQ ID NO: 3649

SEQ ID NO: 11243 - protein, 275 aa, Neisseria meningitidis
MKLIEQHQIFGGSQQVWAHHAQTLQCEMKFAVYLPNNPENRPLGVIYWLSGLTCTEQNFITKSGFQRYAAEHQVIVVASDSSPRGEQVPNDDAYDLGQGAGFYLNATEQPWAANYQMYDYILNELPRLIEKHFPTNGKRSIMGHSMGGHGALVLALRNQERYQSVSAFSPILSPSLVPWGEKAFTAYLGKDREKWQQYDANSLIQQGYKVQGMRIDQGLEDEFLPTQLRTEDFIETCRAANQPVDVRFHKGYDHSYYFIASFIGEHIAYHAAFLK

SEQ ID NO: 11244 - protein, 472 aa, Neisseria meningitidis; identical to SEQ ID NO: 8248

SEQ ID NO: 11245 - protein, 169 aa, Neisseria meningitidis; identical to SEQ ID NO: 8109

SEQ ID NO: 11246 - protein, 68 aa, Neisseria meningitidis; identical to SEQ ID NO: 4044

SEQ ID NO: 11247 - protein, 358 aa, Neisseria meningitidis; identical to SEQ ID NO: 96

SEQ ID NO: 11248 - protein, 72 aa, Neisseria meningitidis; identical to SEQ ID NO: 113

SEQ ID NO: 11249 - protein, 91 aa, Neisseria meningitidis; identical to SEQ ID NO: 8478

SEQ ID NO: 11250 - protein, 100 aa, Neisseria meningitidis; identical to SEQ ID NO: 1023

SEQ ID NO: 11251 - protein, 166 aa, Neisseria meningitidis; identical to SEQ ID NO: 987

SEQ ID NO: 11252 - protein, 171 aa, Neisseria meningitidis
VMKNFNGKLILIGLMGAGKTTLGRQMAQRLDYRFYDSDHEIAAAAGVPIPTIFEMEGEQGFRSRETAILKKLVILPHIVLSTGGGAVLKEENRALIRKSGTVVYLHAPPEILLERTRCDNSRPLLQVADPLAKLRELYAARDPVYRQTADFTVESANCRETVQTLLKRLSR

SEQ ID NO: 11253 - protein, 66 aa, Neisseria meningitidis; identical to SEQ ID NO: 2062

SEQ ID NO: 11254 - protein, 1204 aa, Neisseria meningitidis
MSAPIQAFDPLTVPIAGTNLIEASAGTGKTYGIAALFTRLIVLEQKNVERVLVVTFTKAATAELKTRLRARLDDVLQVLESKEIAKLGDDTLSDGIAAYCAEHHKGDTFLPALLKQALQKEGRTRLIVRLKAAIGQFDNAAIYTIHGFCQRILRDYAFLCQAPFDVELTEEDGDRLLVPAQDFWRERVSNDPVLAALAFKRKAVPQTVLAQIRAYLSRPYLNFRRPQTDLPQARDAALASWQNICGNLAELKETFWRIHPLLNGNSYRKNSFAELFDALEQKALSPDLPFLEAKLHERLLKLASDKLEAGLKKGKTPDAAVFAELQKLADFRRDLDALEEAEEATIIRLQLDLIGYLNRSLAEMKKSRRERGFDDLLLDVHTALTDNPHAETLARAVAENWETALIDEFQDTDPLQYEIFQKIFIAQNRPLFLVGDPKQAIYSFRGADIYAYLQAAEDARHRYTLATNYRSHAALIGSIGALFRLKERPFVLENIGYSEVGAARAESRLSPERPAVQVRWLHENDNEKANKDVLRRRAADYCADEIAHALNEAAECRLNFKGCPLQSGDIAVLVRTHNEAVMVSAALKKRQVQSVLLSRESVFASPEAAALSALIGFWLEPRRAGTLRFVLTSGIFGYDAQQLHDFNQNESEILHWAESARTALDNWNQYGIFAAMQQFSQTHGIETRLLSRNNGRSLTNYFQLLELLAAEDAQNRNPAALHKWLRDQISLAGNNSGDNRAIRLESDEDLVKIVTMHASKGLQYPLVYCPFAWDAQDTGPSDWQILHQSANRTELLAKAQLSEDEQKQYADEEMAERLRLLYVALTRAEEQLNIYAAYSSDTADNPLAYLIEGLPQDSRETVRQTYDWEKDGIAMLKRNWRRLTDNAPAGTDFAFTEDAPPPAAYRGNAGQTAEFAANSIPERRFRFVRHTSFTALSRHTQTPDGGEEDACPSLDAAETSVPAMPSETPTASDGISIHDFPKGTQAGLCLHEILEDFKFGQAAAGQETLIADKLKKYGFEEIWLPAVAEMAEACRKTPLTGAYCLSDIPPECRCPEMGFTLHTEDFGLKRLRDWFARDDIRLPEVCRAAAETLDFHTVNGFLNGFIDMVCQDPDGNICVIDYKSNHLGADASAYTQQAMDEAVAHHHYYLQALIYAVAAARYFKLRGQPPAAVSVRYLFLRGLDGKGGGVWRWDIDAAALEQIK

SEQ ID NO: 11255 - protein, 109 aa, Neisseria meningitidis; identical to SEQ ID NO: 4604

SEQ ID NO: 11256 - protein, 572 aa, Neisseria meningitidis
MNLHQTVEHEAAAAFAAAGIADSPVVLQPTKNAEHGDFQINGVMGAAKKAKQNPRELAQKVADALAGNAVIESAEVAGPGFINLRLRPEFLAQNIQTALNDARFGVAKTDKPQTVVIDYSSPNLAKEMHVGHLRSSIIGDSISRVLEFMGNTVIRQNHVGDWGTQFGMLVAYLVEQQKDNAAFELADLEQFYRAAKVRFDEDPAFADTAREYVVKLQGGDETVLALWKQFVDISLSHAQAVYDTLGLKLRPEDVAGESKYNDDLQAVVDDLVQKGLAVEDDGAKVVFLDEFKNKEGEPAAFIVQKQGGGFLYASTDLACLRYRVGTLHADRLLYVVDHRQALHFEQLFTTSRKAGYLPENVGAAFVGFGTMMGKDGKPFKTRSGDTVKLVDLLTEAVERATALVKEKNPELGADEAAKIGKTVGIGAVKYADLSKNRTSDYVFDWDAMLSFEGNTAPYLQYAYTRVQSVFRKAGEWDADAPTVLTEPLEKQLAAELLKFENVLQSVADTAYPHYLAAYLYQIATLFSRFYEACPILKAEGASRNSRLQLAKLTGDTLKQGLDLLGIDVLDVM

SEQ ID NO: 11257 - protein, 423 aa, Neisseria meningitidis; identical to SEQ ID NO: 3402

SEQ ID NO: 11258 - protein, 151 aa, Neisseria meningitidis; identical to SEQ ID NO: 9467

SEQ ID NO: 11259 - protein, 92 aa, Neisseria meningitidis
MSNDENLLFSQPHLTKVNIMQVLTLNEIQVSGAACNWRDFSKNTIGSALGGAAGGAIVGSFAGGIGAIPGAKFGAIGGAITGAVQYGSTCWW

SEQ ID NO: 11260 - protein, 589 aa, Neisseria meningitidis; identical to SEQ ID NO: 9214

SEQ ID NO: 11261 - protein, 219 aa, Neisseria meningitidis
MTTPKLIIFDWDGTLADTTQPIIDTMRRSFAECGFPPPEAERVRSLIGYSLPEIIRDLLEMPSETAVADIARTYSAHYLNPNNRNMTLFPDALPCLDKLKAQGFRLAVATGKGRAGLDNAISQTATGGYWLATACAGEYPSKPSPEMVFGICGELGFDPKEALVVGDTAHDLHMAANAGAAAVGVATGAHSREQLLSAPHLAVLDGLSELPGFLARHYA

SEQ ID NO: 11262 - protein, 299 aa, Neisseria meningitidis
MPALTVTWMIYTKYLVYQIYLVIFCGVFMERIDLALNLVEERSRLGYSRKNFAEQTGCSAESLRLYESGQVNIPADFLLAAVQLGVDIQFVFTGIHSANLNAVSDDLNKKLDDAIGKSNVENQINGNVSNAVIASSGSVVHQINTQNHVIRTRVDSKPGKEHITLEQASKLQQLVKQVAAAEEIAKRSPKSIRAIWASLNAHCKVPSYKLIALSDYDKAETYLRKWLGRLSNTATSKNNDPDWRKKKYAYIKLNVKQLELEDWLKSYLEKNFSVESLTELSDEDLQKTYAAVSTKKRKK

SEQ ID NO: 11263 - protein, 358 aa, Neisseria meningitidis
LPKPSNTMPSETRLPNFIRVLIFALGFIFLNACSEQTAQTVTLQGETMGTTYTVKYLSNNRDKLPSPAEIQKRIDDALKEVNRQMSTYQPDSEISRFNQHTAGKPLRISSDFAHVTAEAVRLNRLTHGALDVTVGPLVNLWGFGPDKSVTREPSPEQIKQAASYTGIDKIILKQGKDYASLSKTHPKAYLDLSSIAKGFGVDKVAGELEKYGIQNYLVEIGGELHGKGKNARGEPWRIGIEQPNIVQGGNTQIIVPLNNRSLATSGDYRIFHVDKSGKRLSHIINPNNKRPISHNLASISVVADSAMTADGLSTGLFVLGETEALKLAEREKLAVFLIVRDTGGYRTAMSSEFEKLLR

SEQ ID NO: 11264 - protein, 373 aa, Neisseria meningitidis; identical to SEQ ID NO: 306

SEQ ID NO: 11265 - protein, 284 aa, Neisseria meningitidis
MKIVLISGLSGSGKSVALRQMEDSGYFCVDNLPLEMLPALVSYHIERADETELAVSVDVRSGIDIGQAREQIASLRGLGHRVEVLFVEAEEAVLVRRFSETRRGHPLSNQDMTLLESLKKEREWLFPLKEIAYCIDTSKMNAQQLRHAVRQWLKVERTGLLVILEFFGFKYGVPNNADFMFDMRSLPNPYYDPELRPYTGMDKPVWDYLDGQPLVQEMVDDIERFVTHWLPRLEDESRSYVTVAIGCTGGQHRSVYVVEKLARRLKGRYELLIRHRQAQNLSDR

SEQ ID NO: 11266 - protein, 438 aa, Neisseria meningitidis
MKAAAAFAAGLDAQAVRIVIDIYGSLALTGYGHGTFDALMLGLEGSLPHDIPLAGIPERLERIRTQHILRLNGQEIRFIPDRDLNILGNQVLPKHPNSLRFTAYASDGTVLNEQVYYSVGGGFVVTEEDFDRQAETEKAVPYPYTSCAELLARCRLNRLDISEVVLANEAALAGCGEAEIRRRAAAVAEVMEGCIKRGLGADGELPGLNVRRRAPQLAAKLKVLRETEIVNTQLWPMVYAMAVNEENAAGGRVVTAPTNGAAGIIPAVLHYFRKFNPHATQERVENFLLTAGAIGILYKTNASISGADVGCQGEVGVACSMAAGAYAEVIGGTPKQVENAAEMAMEHHLGLTCDPVGGLVQIPCIERNGIAAEKALKLGTLALLEDGTDKKVSLDEVIRTMLQTGRDMKATYKETSLAGLAATLRKKAVPVSVRVVEC

SEQ ID NO: 11267 - protein, 471 aa, Neisseria meningitidis; identical to SEQ ID NO: 7980

SEQ ID NO: 11268 - protein, 172 aa, Neisseria meningitidis; identical to SEQ ID NO: 296

SEQ ID NO: 11269 - protein, 132 aa, Neisseria meningitidis
LMMYSFEANANAVKISETVSVDTGQGAKIHKFVPKNSKTYSSDLIKTVDLTHIPTGAKARINAKITASISRAGVLAGGGKLARLGAKFSTRAVPYVGTALLAHDVYETFKEDIQARGYQYDTETDKFVKVSG

SEQ ID NO: 11270 - protein, 104 aa, Neisseria meningitidis; identical to SEQ ID NO: 1772

SEQ ID NO: 11271 - protein, 263 aa, Neisseria meningitidis
MARHPYRRLRPAKSGFPEVGISEEGNIRSLHLGSDTIQSSMNLDHPSELVLSYSRAMMGWLLLAERLPQHITQIGLGGGSFARWIDTYLPDTRQTAVDINPQVIAIARNLFELPFEGEKFEIIEADGAEYIKVFRHNTDVILVDGFDGEQIIDTLVEEPFFRDCRNALSSDGIFVTNWWSGDKRYQRFIERLLSVFEGRVLELPAESHGNVAVMAFQSSPKEQNIDKLKKRADKLSNAYGLDFHRMLADLKASNPNNGKHFYL

SEQ ID NO: 11272 - protein, 321 aa, Neisseria meningitidis; identical to SEQ ID NO: 2913

SEQ ID NO: 11273 - protein, 659 aa, Neisseria meningitidis; identical to SEQ ID NO: 9619

SEQ ID NO: 11274 - protein, 764 aa, Neisseria meningitidis
MRREAKMAQTTLKPIVLSILLINTPLLAQAHETEQSVDLETVSVVGKSRPRATSGLLHTSTASDKILSGDTLRQKAVNLGDALDGVPGIHASQYGGGASAPVIRGQTGRRIKVLNHHGETGDMADFSPDHAIMVDTALSQQVEILRGPVTLLYSSGNVAGLVDVADGKIPEKMPENGVSGELGLRLSSGNLEKLTSGGINIGLGKNFVLHTEGLYRKSGDYAVPRYRNLKRLPDSHADSQTGSIGLSWVGEKGFIGVAYSDRRDQYGLPAHSHEYDDCHADIIWQKSLINKRYLQLYPHLLTEEDIDYDNPGLSCGFHDDDDAHAHTHSGRPWIDLRNKRYELRAEWKQPFPGFEALRVHLNRNDYRHDEKAGDAVENFFNNQTQNARIELRHQPIGRLKGSWGVQYLQQKSSALSAISEAVKQPMLLDNKVQHYSFFGVEQANWDNFTLEGGVRVEKQKASIRYDKALIDRENYYNHPLPDLGAHRQTARSFALSGNWYFTPQHKLSLTASHQERLPSTQELYAHGKHVATNTFEVGNKHLNKERSNNIELALGYEGDRWQYNLALYRNRFGNYIYAQTLNDGRGPKSIEDDSEMKLVRYNQSGADFYGAEGEIYFKPTPRYRIGVSGDYVRGRLKNLPSLPGREDAYGNRPFIAQDDQNAPRVPAARLGVHLKASLTDRIDANLDYYRVFAQNKLARYETRTPGHHMLNLGANYRRNTRYGEWNWYVKADNLLNQSVYAHSSFLSDTPQMGRSFTGGVNVKF

SEQ ID NO: 11275 - protein, 758 aa, Neisseria meningitidis; identical to SEQ ID NO: 2629

SEQ ID NO: 11276 - protein, 1421 aa, Neisseria meningitidis; identical to SEQ ID NO: 8590

SEQ ID NO: 11277 - protein, 181 aa, Neisseria meningitidis; identical to SEQ ID NO: 3612

SEQ ID NO: 11278 - protein, 320 aa, Neisseria meningitidis; identical to SEQ ID NO: 8490

SEQ ID NO: 11279 - protein, 678 aa, Neisseria meningitidis
MTDNALLHLGEEPRFDQIKTEDIKPALQTAIAEAREQIAAIKAQTHTGWANTVEPLTGITERVGRIWGVVSHLNSVADTPELRAVYNELMPEITVFFTEIGQDIELYNRFKTIKNSPEFDTLSPAQKTKLNHDLRDFVLSGAELPPEQQAELAKLQTEGAQLSAKFSQNVLDATDAFGIYFDDAAPLAGIPEDALAMFAAAAQSESKTGYKIGLQIPHYLAVIQYADNRELREQIYRAYVTRASELSDDGKFDNTANIDRTLANALQTAKLLGFKNYAELSLATKMADTPEQVLNFLHDLARRAKPYAEKDLAEVKAFARESLGLADLQPWDLGYASEKLREAKYAFSETEVKKYFPVGKVLNGLFAQIKKLYGIGFTEKTVPVWHKDVRYFELQQNGKTIGGVYMDLYAREGKRGGAWMNDYKGRRRFSDGTLQLPTAYLVCNFAPPVGGREARLSHDEILILFHETGHGLHHLLTQVDELGVSGINGVEWDAVELPSQFMENFVWEYNVLAQMSAHEETGVPLPKELFDKMLAAKNFQRGMFLVRQMEFALFDMMIYSEDDEGRLKNWQQVLDSVRKKVAVIQPPEYNRFALSFGHIFAGGYSAGYYSYAWAEVLSADAYAAFEESDDVAATGKRFWQEILAVGGSRSAAESFKAFRGREPSIDALLRHSGFDNAA

SEQ ID NO: 11280 - protein, 352 aa, Neisseria meningitidis; identical to SEQ ID NO: 6670

SEQ ID NO: 11281 - protein, 118 aa, Neisseria meningitidis; identical to SEQ ID NO: 3785

SEQ ID NO: 11282 - protein, 69 aa, Neisseria meningitidis; identical to SEQ ID NO: 4226

SEQ ID NO: 11283 - protein, 356 aa, Neisseria meningitidis
LSNPAPRRTKSPPNLPHTLKHNSHRKQITMSEIKTDDPKRGIKLRGADKTARIPIKVVPLQEKLKKPEWIRAKLPSRKFFEIKDILREQKMHTVCEEASCPNIGECFSKGTATFMIMGDICTRRCPFCDVGHGRPNMLDPDEPKNLAESVKAMNLRYVVITSVDRDDLRDGGAQHFADCIKAIRETSPNTKIEILVPDFRGRLDIALKILAETPPDVMNHNLETHPSLYRKARPGANYQHSLDLLKRYKEMMPHIPTKSGIMVGLGETDEDVREIMRDMRAHNIEMITIGQYLQPSDGHLPVLRYVTPEQFKIFEKEAYELGFSNAAIGAMVRSSYHADEQAAEALRESHGGCGHH

SEQ ID NO: 11284 - protein, 196 aa, Neisseria meningitidis
MSAMNLRDDLQLIYDRIPEGSRVLDLGCGDGELLAALVEHKKCSGYGIEIDTDSVIAAMSRGVNVIQADLEEGLTAFNDQSFDVIVLSQTIQAMQNTEKILRCLMRVAKQAIVSFPNFGYWRNRVQIALGGHMPVSERMPYHWYDTPNIHWCTLKDFDLLCAKNNIRVLERAVMTGNRQVKHFPNLLGSLAFYRVG

SEQ ID NO: 11285 - protein, 317 aa, Neisseria meningitidis
MNQKKVVVLDADTLPGRTFHFDFPHELAVYGTTDAAETAGRVRDAHIIITNKVMISADIIAANPQLELIAVSATGVNNVDIGAAEAAGVAVCNVRAYGNESVAEHAFMLMIALMRNLPAYQRDVAAGLWEKSPFFCHYGAPIQDLNGKTLAVFGRGNIGRTLAGYAQAFGMGVVFAEHKHAPAVREGYVAFENAVRTADVLSLHCPLNAQTENMIGENELRQMKPGAVLINCGRGGLVDENALLAALKYGQIGGAGVDVLTNEPPKNGNPLLKARLPNLIVTPHTAWASREALDRLFDILLANIHAFVKGEAQNRVV

SEQ ID NO: 11286 - protein, 257 aa, Neisseria meningitidis; identical to SEQ ID NO: 8017

SEQ ID NO: 11287 - protein, 168 aa, Neisseria meningitidis; identical to SEQ ID NO: 5003

SEQ ID NO: 11288 - protein, 59 aa, Neisseria meningitidis
MSTGQPQCRRNRRSRLQHCRRQSRKVGKNGKTGEIKADGRKVNVRIDSTEADLLYPAGQ

SEQ ID NO: 11289 - protein, 196 aa, Neisseria meningitidis; identical to SEQ ID NO: 2946

SEQ ID NO: 11290 - protein, 436 aa, Neisseria meningitidis
MIVPDLFVAHFREAVPYIRQMRGKTLVAGIDDRLLEGDTLNKLAADIGLLSQLGIRLVLIHGARHFLDRHAAAQGRTPHYCRGLRVTDETSLEQAQQFAGTVRSRFEAALCGSVSGFARAPSVPLVSGNFLTARPIGVIDGTDMEYAGVIRKTDTAALRFQLDAGNIVWLPPLGHSYSGKTFYLDMLQTAASVAVSLQAEKLVYLTLSDGISRPDGTLAETLSAQEAQSLAEHAGGETRRLISSTVAALEGGVHRVQILNGASDGSLLQELFTRNGIGTSIAKEAFVSIRQAHSGDIPHIAALIRPLEEQGILLHRSREYLENHISEFSILEHDGNLYGCAALKTFAEADCGEISCLAVSPQAQDGGYGERLLAHIIDKARSMGISRLFALSTNTGEWFAERGFQTASEDELPETRRKDYRSNGRNSHILVRRLHR

SEQ ID NO: 11291 - protein, 166 aa, Neisseria meningitidis; identical to SEQ ID NO: 8644

SEQ ID NO: 11292 - protein, 446 aa, Neisseria meningitidis
MLNPSRKLVELIRILDEGGFIFSGDPVQATEALRRVDGSTEEKIIRRAEMIDRNRMLRDTLERVRAGSFWLWVAAATFAFFTGFSGTYLLMDNQGLNFFLVLAGVLGMNTLMLAVWLAMLFLRVKVGRFFSSPATWFRGKDPVNQAVLRLYADEWRQPSVRWKIGATSHSLWLCTLLGMLVSVLLLLLVRQYTFNWESTLLGDSSSVRLVEMLAWLPAKLGFPVPDARAVIEGRLNGNIADARAWSGLLVGSIACYGILPRLLAWAVCKILLKTSENGLDLEKPYYQAVIRRWQNKITDADTRRETVSAVSPKIVLNDAPKWAVMLETEWQDGEWFEGRLAQEWLDKGVAANREQVAALETELKQKPAQLLIGVRAQTVPDRGVLRQIVRLSEAAQGGAVVQLLAEQGLSDDLSEKLEHWRNALAECGAAWLEPDRAAQEGRLKDQ

SEQ ID NO: 11293 - protein, 127 aa, Neisseria meningitidis; identical to SEQ ID NO: 1080

SEQ ID NO: 11294 - protein, 106 aa, Neisseria meningitidis
MMGNKLTLPAELPDEQDLRAVLAYNMRLFRVNKGWSQEELARQCGLDRTYVSAVERKRWNIALSNIEKMAAALGVAAYQLLLPPQERLNLMTNSADTRQMPSESGI

SEQ ID NO: 11295 - protein, 248 aa, Neisseria meningitidis; identical to SEQ ID NO: 8507

SEQ ID NO: 11296 - protein, 324 aa, Neisseria meningitidis
MLENLPYFQRHLPEDLAKVNEVINRAVQSDVALISQIGTYIISAGGKRLRPIMTILAGKAVGYDDGKLYSLAAMVEFIHTSTLLHDDVVDESDLRRGRATANNLFGNAAAVLVGDFLYTRAFQLMVDSDSMRVLEVMADATNIIAEGEVMQLMNIGNTDITEEQYIQVIQYKTAKLFEAAAQVGAILGKASPEHERALKDYGMYVGTAFQIIDDVLDYSGETEETGKNVGDDLAEGKPTLPLIYLMRQGSEQVANDVRTALENADRSYFEKIHDYVVRSDALAYSIGEARKAVDCAVAALDALPDSEVKDAMIQLAKESLVRVS

SEQ ID NO: 11297 - protein, 159 aa, Neisseria meningitidis; identical to SEQ ID NO: 9538

SEQ ID NO: 11298 - protein, 268 aa, Neisseria meningitidis; identical to SEQ ID NO: 8685

SEQ ID NO: 11299 - protein, 187 aa, Neisseria meningitidis; identical to SEQ ID NO: 784

SEQ ID NO: 11300 - protein, 113 aa, Neisseria meningitidis; identical to SEQ ID NO: 995

SEQ ID NO: 11301 - protein, 768 aa, Neisseria meningitidis; identical to SEQ ID NO: 8423

SEQ ID NO: 11302 - protein, 435 aa, Neisseria meningitidis
MEWAENETETFAKFLSLPTAETQTQVFSCFQLFSPQIPPNFTQIPPSSPDTSGIRAAFAAAGALSLLAAFNRFKHIAFRWLCALTLISPKAARARNLRCSVPKLCSTTWVFDKYRLRLVCVSDSGRLRQALRIMPSCNCSSRCCRFSALSPLSATVVPLGTPSNNGGRCLHSWALAGVMCSFSIPSASVRVCCLPSLRPFFFIQRASLSLLGVVWPPTCPSSSTSMARCLLPAVIMVASTTAADAFSTFKPFSVSWRLISSSNSDRVSSCASRLRRHKVLSGMLSSSKRQNRLKSMRVMRLCSSSGSERLCHCPSRTALNMDNRGAGRPRWSLRRVFRFRYCSIGCQSITWSNFNSGKRSMCLAIMAWAVCWKKVLMRNPLNVLVGIGILGNFAKVSDREISPKMGTRAEKTTNSTEKGNKIAKTQSQSLGNGTL

SEQ ID NO: 11303 - protein, 59 aa, Neisseria meningitidis
MNTNLNDKDKAMDTAIRFQKRMRIPKFFFLILITMVLAFIQDVITGSNFLQITINVKFS

SEQ ID NO: 11304 - protein, 55 aa, Neisseria meningitidis; identical to SEQ ID NO: 2625

SEQ ID NO: 11305 - protein, 563 aa, Neisseria meningitidis; identical to SEQ ID NO: 2966

SEQ ID NO: 11306 - protein, 556 aa, Neisseria meningitidis; identical to SEQ ID NO: 8472

SEQ ID NO: 11307 - protein, 117 aa, Neisseria meningitidis; identical to SEQ ID NO: 3854

SEQ ID NO: 11308 - protein, 408 aa, Neisseria meningitidis
MTFLQRLQGLADNKICAFAWFVVRRFDEERVPQAAASMTFTTLLALVPVLTVMVAVASIFPVFDRWSDSFVSFVNQTIVPQGADMVFDYINAFREQANRLTAIGSVMLVVTSLMLIRTIDNTFNRIWRVNSQRPWMMQFLVYWALLTFGPLSLGVGISFMVGSVQDAALASGAPQWSGALRTAATLTFMTLLLWGLYRFVPNRFVPARQAFVGALATAFCLETARSLFTWYMGNFDGYRSIYGAFAAVPFFLLWLNLLWTLVLGGAVLTSSLSYWRGEAFRRGFDSRGRFDDVLKILLLLDAAQKEGKALPVQEFRRHINMGYDELGELLEKLARHGYIYSGRQGWVLKTGADSIELNELFKLFVYRPLPVERDHVNQAVDAVMTPCLQTLNMTLAEFDAQAKKQQQS

SEQ ID NO: 11309 - protein, 212 aa, Neisseria meningitidis
MQTAIIDYGMGNLHSVLKSVRTAGQLAGKNTEIFLSGDPDRVSRADKVIFPGQGAMPDCIAALTRGGLDEAVKDALKNKPFFGICVGAQLLFDHSEEGNTDGLGWFGGKVRRFERDLRDPQGCRLKVPHMGWNTVRQTQNHPLFQGIPQDTRFYFVHSYYFAPENPETILGESDYPSPFACIVGKDNVFATQFHTEKSHDAGLTMLKNFLNW

SEQ ID NO: 11310 - protein, 415 aa, Neisseria meningitidis; identical to SEQ ID NO: 2921

SEQ ID NO: 11311 - protein, 239 aa, Neisseria meningitidis
MLTTPPLAPKTVAALHRLGIRTLEELRQNGAVQTFLLLKASGLTLTKSTLWQLQSLLDGTPPQEMAQHDKTRLLAELKNHPPVAAFPPQGEMAHFMGLALEQAKLSALMGEIPVGAVIVSDGKIIASAHNTCIADCNVSRHAEINALAQAGSEMQNYRLDGCDIYITLEPCAMCASALIQARIRRVIYGAAEPKTGAAGSIVNLFADKRLNTHTAIRGGILQEECRAVLSRFFQNKRKG

SEQ ID NO: 11312 - protein, 62 aa, Neisseria meningitidis
MGSRARATGDDKPSVRVMGRGMRPLSYLQTPTNPQSAFQSRLFWTNPPLPPPVPVWLSLCPP

SEQ ID NO: 11313 - protein, 288 aa, Neisseria meningitidis; identical to SEQ ID NO: 1688

SEQ ID NO: 11314 - protein, 217 aa, Neisseria meningitidis
MKITHCKLKKKVQKELLRFFVLEVTARSAADILGIHPNSAALFYRKIRTVINHHLALAADEVFEGPVEPDESDFGGRRKGRRGRGAAGKVVVFGILKRNGRVYTVVVDNAKSETLLPVIKKKIMPDSIVYTDSLSSCDKLDVSGFIHYRINHSKEFADRQNHINGIENFWNQAKRVLRKYNGIDRKSFPLFLKECEFRFNFGTPSRQLKILQDWCGI

SEQ ID NO: 11315 - protein, 181 aa, Neisseria meningitidis; identical to SEQ ID NO: 2183

SEQ ID NO: 11316 - protein, 131 aa, Neisseria meningitidis
LLIHYTSANAHECKHLSPLLEGLPKGTTVYADKGYDSAENRQHLEEHQLQDGIMRKACRNRPLSETQTKRNRYLSKTRYVVEQSFGTLHRKFRYARSTYFGLIKVSAQSHLKAMCLNLLKAANRLSAPAAA

SEQ ID NO: 11317 - protein, 112 aa, Neisseria meningitidis; identical to SEQ ID NO: 1765

SEQ ID NO: 11318 - protein, 145 aa, Neisseria meningitidis
LARLPRPLVFTNGCFDILHRGHVTYLAQARSAGAALVLALNTDASVRRLGKDGDRPINPLENRAAVAAALESVDLVTWFDGDTPAALIEAVKPEILVKGGDWAADKIVGAAETLARGGQVFSIPFLHQTSTTKTLAKIRAAEGGK

SEQ ID NO: 11319 - protein, 469 aa, Neisseria meningitidis
LKQGNIMSGHMGKGADAPDLVYGLEDRPPFGNALLSAVTHLLAIFVPMITPALIVGGALELPVEMTAYLVSMAMVASGVGTYLQVNRFGPVGSGMLSIQSVNFSFVTVMIALGAGMKEGGLTKDAMISTLLGVSFVGAFLVCFSAWLLPYLKKVITPTVSGVVVMLIGLSLVHVGITDFGGGFGAKADGTFGSMENLGLASPVLLIVLVFNCMKNPLLRMSGIAVGLIAGYIVALFLGKVDFSALQNLPLVTLPVPFKYGFAFDWHAFIVAGAIFLLSVFEAVGDLTATAMVSDQPIEGEEYTKRLRGGVLADGLVSVIATALGSLPLTTFAQNNGVIQMTGVASRHVGKYIAVILVLLGLFPVVGRAFTTIPSPVLGGAMVLMFGLIAIAGVRILVSHGIRRREAVIAATSVGLGLGVAFEPEVFKNLPVLFQNSISAGGITAVLLNLVLPEDKTEAAVKFDTDHLEH

SEQ ID NO: 11320 - protein, 262 aa, Neisseria meningitidis; identical to SEQ ID NO: 6514

SEQ ID NO: 11321 - protein, 448 aa, Neisseria meningitidis
LNKMLPSSRSSKEAESKTVIPAERHNIRAEMLSFAAENVIRRLKEAGFQAYVVGGAVRDLLLGIEPKDFDVATDATPEQVHKLFRRSRIIGRRFQIVHVMNGAEIIEVTTFRGGAKVHQNAHGRIMKDNTYGSIEEDAMRRDFTCNALYYDPEKEEILDFHNGIADVAARRLVMIGDAAERYQEDPVRILRAIRLSGKLGFDLSEETAAPIAESICRLKHEPVARLFDEIMKLLFSGHARECLKRLNGFDIPDDIHPLLNALRVSDGIAGKMTVLALKNTDERLRADKSVSVGFVLAALMWPELERHWKSNLQQGLKPVPALSDAINTMRETVERGWGVPQRFSATMREIWMFQPQFENRKGARPHKLFAQARFRAAYDFLLLRAETGNADRALAEWWTAFQTASQEQRTEMTKNEAAARHEKNEGQAKKRRRRRRKPKPKVEGTDWE

SEQ ID NO: 11322 - protein, 28 aa, Neisseria meningitidis
AYENYHLKEIMDAVINHIPVCRRKMHTL

SEQ ID NO: 11323 - protein, 169 aa, Neisseria meningitidis; identical to SEQ ID NO: 111

SEQ ID NO: 11324 - protein, 311 aa, Neisseria meningitidis; identical to SEQ ID NO: 8738

SEQ ID NO: 11325 - protein, 707 aa, Neisseria meningitidis; identical to SEQ ID NO: 3919

SEQ ID NO: 11326 - protein, 147 aa, Neisseria meningitidis; identical to SEQ ID NO: 1095

SEQ ID NO: 11327 - protein, 250 aa, Neisseria meningitidis; identical to SEQ ID NO: 3444

SEQ ID NO: 11328 - protein, 312 aa, Neisseria meningitidis; identical to SEQ ID NO: 8564

SEQ ID NO: 11329 - protein, 230 aa, Neisseria meningitidis
MTAFVHTLSDGMELTVEIKRRAKKNLIIRPAGTHTVRISVPPCFSVSALNRWLYENEAVLRQTLAKTPPPQTAENRLPEHIWFHGRQLALTAHQDTQILLMPSEIRVPEGAPEKQLALLRDFLERQAHSYLIPRLERHARTTQLFPAPSSLTSAKTFWGVCRKTTGIRFNWRLVGAPEYVADYVCIHELCHLAHADHSRAFWALTRRFAPYTPEAKQWLKIHGRELFALG

SEQ ID NO: 11330 - protein, 115 aa, Neisseria meningitidis; identical to SEQ ID NO: 3528

SEQ ID NO: 11331 - protein, 105 aa, Neisseria meningitidis; identical to SEQ ID NO: 2941

SEQ ID NO: 11332 - protein, 179 aa, Neisseria meningitidis; identical to SEQ ID NO: 403

SEQ ID NO: 11333 - protein, 311 aa, Neisseria meningitidis; identical to SEQ ID NO: 9342

SEQ ID NO: 11334 - protein, 100 aa, Neisseria meningitidis; identical to SEQ ID NO: 3521

SEQ ID NO: 11335 - protein, 180 aa, Neisseria meningitidis
VNMSATVRILGIDPGSRVTGFGIIDVRGRDHFYVASGCIKTPPDAPLADRIAVIVRHIGEVVAVYKPQQAAVEQVFVNVNPASTLMLGQARGAALAALVSHKLPVSEYTALQVKQAVVGKGKAAKEQVQHMVVQMLGLSGTPQADAADGLAVALTHALRNHGLAAKLNPSGMQVKRGRFQ

SEQ ID NO: 11336 - protein, 122 aa, Neisseria meningitidis; identical to SEQ ID NO: 9390

SEQ ID NO: 11337 - protein, 258 aa, Neisseria meningitidis
MRAVPPPHISITGLGYLGLPLAQKFYQHGSRVAAIKRSLTSDDINLPIHLDTFDLGSTDAFQTALWRHHADKPVWFFLLPPSSLTHYADTVKQWAELARACNVQHLIFTSSTSVYGDTARECDETATPDPQTESARQILAAEQHLLDSGISNIDILRLGGLYCAERHPVSRLVQKQNIPGGNRPINIVHRNIAVESLFQTAFNPGGRRLKNIIEPRHPTRREFYTEEAAKLGLPAPDFAPDDSVGKIIRTVCDNGLSL

SEQ ID NO: 11338 - protein, 517 aa, Neisseria meningitidis
MPSEKPADCCPAHFVVKFRKSTLNCGRRFDRPPINGNRQRKPMIHTEPSAQPSTMDTAAFLKHIESAFRRIFSDGIDLMRYLPEDKWLALKQAGLLLPFLDKRHGGRKGSQFEIQEVLRIAGHYGVPVTLRTGIEGALVLQPLQEFGDEAQIAQGLDMVFKGEGGGLGVTEPETSGAAIAREMQSYYEYTDGQTIYVNAAKYWQGNSQSDFLLVAAKERKNGKLAKVIDLLLVPKTYIRCETLASEGLRAVRYAVNRIDAEMPATAVMKLSQSDAAGLRAFQNIFIRSRLQLIGMTHGIMEYILENLERYVRNDIRFVDYERREIRRRHQVSEILYRYVCHSVSPVAPVAHQLMEANIVKTLATEYTYAAAQMLQKLLGAKGFERGHTAGNIAIDIRPFTIFEGPNDMLYAEIYDQFVRATAEEKEAGMKLDKNQTLLDRLQTDARFAAVARDYTLPEDIRSFLQEHTLTDACALQKVFIGKIIARLFVFVQAEHEDTAAFLLNDIRKDILDCRYCG

SEQ ID NO: 11339 - protein, 266 aa, Neisseria meningitidis; identical to SEQ ID NO: 2607

SEQ ID NO: 11340 - protein, 169 aa, Neisseria meningitidis; identical to SEQ ID NO: 219

SEQ ID NO: 11341 - protein, 341 aa, Neisseria meningitidis
LNQIPTRIMIDGQTTEPKQKTRIILAPMQGLVDDVMRDLLTRIGGYDECVSEFVRITHTVHSRSIWLKYVPEIANGNKTFSGTPCTVQLLGSDADNMAANALEAVRFGANKIDLNFGCPAPTVNKHKGGAILLKEPELIFHIVKTLRGRLPAHIPLTAKMRLGYEDKSRALECACAIAEGGACGLTVHARTKAEGYEPPAHWEWIRKIRDSVNIPVTANGDVFSLQDYIGIKTISGCNSVMLGRGAVIRPDLARQIKQYENGGPVKDTDFAEVSKWIRQFFELCLTKEANNKYPIARLKQWLGMMKKTFDPAQTLFDRVRTVKDADEVRRILNAFEHEINV

SEQ ID NO: 11342 - protein, 95 aa, Neisseria meningitidis; identical to SEQ ID NO: 6515

SEQ ID NO: 11343 - protein, 244 aa, Neisseria meningitidis; identical to SEQ ID NO: 8034

SEQ ID NO: 11344 - protein, 283 aa, Neisseria meningitidis
MFMNKFSQSGKGLSGFFFGLILATVIIAGILFYLNQSGQNAFKIPASSKQPAETEILKPKNQPKEDIQPEPADQNALSEPDAATEAEQSDAEKAADKADEVEEKAGEPEREKSDGQAVRKKVLTEEREQTVREKAQKKDAETVKKQAVKPSKETEKKAPKEEKKAEKEKVAPKPTPEQILNSGSIEKARSAAAKEVQKMKTSDKAEATHYLQMGAYADRRSAEGQRAKLAILGISSKVVGYQAGHKTLYRVQSGNMSADAVKKMQDELKKHEVASLIRSIESK

SEQ ID NO: 11345 - protein, 752 aa, Neisseria meningitidis; identical to SEQ ID NO: 2486

SEQ ID NO: 11346 - protein, 261 aa, Neisseria meningitidis; identical to SEQ ID NO: 8388

SEQ ID NO: 11347 - protein, 160 aa, Neisseria meningitidis; identical to SEQ ID NO: 8291

SEQ ID NO: 11348 - protein, 327 aa, Neisseria meningitidis; identical to SEQ ID NO: 294

SEQ ID NO: 11349 - protein, 394 aa, Neisseria meningitidis; identical to SEQ ID NO: 1253

SEQ ID NO: 11350 - protein, 265 aa, Neisseria meningitidis
MLKQRVITAMWLLPLMLGMLFYAPQWLWAAFCGLIALIALWEYARMGGLCKIKTNHYLVATLVFGVVAYAGGWMLPNLVWYVVLAFWLAIMPLWLRFKWRLNGGWQVYAVGWLLIMPFWFALVSLRPHPDNALPLLAVMGLVWIADVFAYFSGKAFGKHKIAPAISPGKSWEGAIGGAVCVAVYMTAVRSAGWLAFDTGWFDTVLIGLVLTVVSVCGDLLESWLKRAAGIKDSSKLLPGHGGVFDRTDSLIAVISVYAAMMSVLN

SEQ ID NO: 11351 - protein, 366 aa, Neisseria meningitidis; identical to SEQ ID NO: 9546

SEQ ID NO: 11352 - protein, 159 aa, Neisseria meningitidis; identical to SEQ ID NO: 9034

SEQ ID NO: 11353 - protein, 275 aa, Neisseria meningitidis
MQNHVISLASAAERRAHIAATFGARGIPFQFFDALMPSERLEQAMAELVPGLSAHPYLSGVEKACFMSHAVLWKQALDEGLPYIAVFEDDVLLGEGAEKFLAEDAWLKERFDPDSAFIVRLETMFMHVLTSPSGVADYCGRAFPLLESEHWGTAGYIISKKAIRFFLQHFVMLQPEQIKPIDLMMFSDFFDKEGMPVYQVSPALCAQELHYAKFHDQNSALGSLIEHDRLLNRKQQRRDSPANTFKRRLIRALTKISREREKRRQRREQFIVPFQ

SEQ ID NO: 11354 - protein, 395 aa, Neisseria meningitidis; identical to SEQ ID NO: 10755

SEQ ID NO: 11355 - protein, 305 aa, Neisseria meningitidis
LGKNIKHLMKWAKRNGIEAWRIYDRDIPQFPFAADVYGDRIHLQEYDTGWLMRPEEYEAWLAEVLEAVAFVTGFEPEQIRLKRRERQKGLQQYEKTGKAGDDFVITENGRKFWVNLDKYLDTGLFLDHRNTRKKVGETAAGKRFLNLFSYTGSFTVYAATGGAASSETVDLSNTYLDWARRNFELNGIDTERHKIVRADVFQYLQTAYGEGRRFDLIVMDPPSFSNSKKMSDILDIQRDHKKLIDGAVKLLASDGILYFSNNLRSFVLDDLVSEQYAVKDISKQSVPEDFRNKKIHRCWEIRHKS

SEQ ID NO: 11356 - protein, 374 aa, Neisseria meningitidis; identical to SEQ ID NO: 9205

SEQ ID NO: 11357 - protein, 428 aa, Neisseria meningitidis; identical to SEQ ID NO: 9520

SEQ ID NO: 11358 - protein, 188 aa, Neisseria meningitidis; identical to SEQ ID NO: 9541

SEQ ID NO: 11359 - protein, 303 aa, Neisseria meningitidis; identical to SEQ ID NO: 1821

SEQ ID NO: 11360 - protein, 433 aa, Neisseria meningitidis; identical to SEQ ID NO: 2952

SEQ ID NO: 11361 - protein, 194 aa, Neisseria meningitidis
MHILTAGVDEAGRGPLVGSVFAAAVILPEIFDLPGLTDSKKLSEKKRDALAEMIKNQAVAWHVAAAGPEEIASLNILHATMLAMKRAVDGLAVRPEKIFIDGNRIPEHLNIPAEAVVKGDSKIIEISAASVLAKTARDAEMYALAQRHPQYGFDKHKGYGTKQHLEALEKYGVLPEHRRDFAPVRNLFAQQALF

SEQ ID NO: 11362 - protein, 202 aa, Neisseria meningitidis; identical to SEQ ID NO: 597

SEQ ID NO: 11363 - protein, 107 aa, Neisseria meningitidis; identical to SEQ ID NO: 178

SEQ ID NO: 11364 - protein, 481 aa, Neisseria meningitidis; identical to SEQ ID NO: 437

SEQ ID NO: 11365 - protein, 200 aa, Neisseria meningitidis; identical to SEQ ID NO: 2775

SEQ ID NO: 11366 - protein, 613 aa, Neisseria meningitidis; identical to SEQ ID NO: 8132

SEQ ID NO: 11367 - protein, 365 aa, Neisseria meningitidis; identical to SEQ ID NO: 3268

SEQ ID NO: 11368 - protein, 371 aa, Neisseria meningitidis; identical to SEQ ID NO: 849

SEQ ID NO: 11369 - protein, 356 aa, Neisseria meningitidis; identical to SEQ ID NO: 2827

SEQ ID NO: 11370 - protein, 215 aa, Neisseria meningitidis; identical to SEQ ID NO: 709

SEQ ID NO: 11371 - protein, 210 aa, Neisseria meningitidis; identical to SEQ ID NO: 3262

SEQ ID NO: 11372 - protein, 148 aa, Neisseria meningitidis
MKAIQKGFTLIELMIVIAIVGILAAVALPAYQDYTARAQMSEALTLAEGQKSAVIEYYSDNGTFPNSNTSAGIAASNEIKGKYVASVKVEGNASVASITATMNSSNVNKDIKGKTLVLVGKQNSGSFSWGCKKGSVDEKFLPSTCRTK

SEQ ID NO: 11373 - protein, 228 aa, Neisseria meningitidis; identical to SEQ ID NO: 2819

SEQ ID NO: 11374 - protein, 436 aa, Neisseria meningitidis; identical to SEQ ID NO: 1523

SEQ ID NO: 11375 - protein, 211 aa, Neisseria meningitidis; identical to SEQ ID NO: 8340

SEQ ID NO: 11376 - protein, 96 aa, Neisseria meningitidis
LRKTMNIRTAFALCAIALSAAAAAYAKEIKIDANNTPYSEADAQKLAATAVGMGVKEPISLNGGSGSITVSGSSATQCVFKVGNGGALQIQGLNCK

SEQ ID NO: 11377 - protein, 447 aa, Neisseria meningitidis; identical to SEQ ID NO: 2839

SEQ ID NO: 11378 - protein, 103 aa, Neisseria meningitidis; identical to SEQ ID NO: 3283

SEQ ID NO: 11379 - protein, 943 aa, Neisseria meningitidis
MNKKHGFQLTLTALAVAAAFPSYAANPETAAPDAAQTQSLKEVTVRAAKVGRRSKEATGLGKIVKTSETLNKEQVLGIRDLTRYDPGVAVVEQGNGASGGYSIRGVDKNRVAVSVDGVAQIQAFTVQGSLSGYGGRGGSGAINEIEYENISTVEIDKGAGSSDHGSGALGGAVAFRTKEAADLISDGKSWGIQAKTAYGSKNRQFMKSLGAGFSKDGWEGLLIRTERQGRETHPHGDIADGVAYGINRLDAFRQTYGIKKPSEGGEYFLAEGESELKPVAKVAGNGNYLNNQLNRWVKERIEQNQPLSAEEEAMVREAQARHENLSAQAYTGGGRILPDPMDYRSGSWLAKLGYRFGGRHYVGGVFEDTKQRYDIRDMTEKQYYGTDEAKKFRDKSGVYDGDDFRDGLYFVPNIEEWKGDQKLIRGIGLKYSRTKFIDEHHRRRRMGLLYRYENEKYSDNWADKAVLSFDKQGVATDNNTLKLNCAVYPAVDKSCRASADKPYSYDSSDRFHYREQHNVLNASFEKSLKNKWTKHHLTLGFGYDASNAISRPEQLSHNAARISEYSDYTDKGDKYLLGKPEVVEGSVCGYIETLRSRKCVPRKINGSNIHISLNDRFSIGKYFDFSLGGRYDRKNFTTSEELVRSGRYVDRSWNSGIVFKPNRHFSLSYRASSGFRTPSFQELFGIDIYHDYPKGWQRPALKSEKAANREIGLQWKGDFGFLEISSFRNRYTDMIAVADHKTKLPNQAGQLTEIDIRDYYNAQNMSLQGVNILGKIDWNGVYGKLPEGLYTTLAYNRIKPKSVSNRPGLSLRSYALDAVQPSRYVLGFGYDQPEGKWGANIMLTYSKGKNPDELAYLAGDQKRYSTKRASSSWSTADVSAYLNLKKRLTLRAAIYNIGNYRYVTWESLRQTAESTANRHGGDSNYGRYAAPGRNFSLALEMKF

SEQ ID NO: 11380 - protein, 72 aa, Neisseria meningitidis; identical to SEQ ID NO: 332

SEQ ID NO: 11381 - protein, 389 aa, Neisseria meningitidis; identical to SEQ ID NO: 3300

SEQ ID NO: 11382 - protein, 351 aa, Neisseria meningitidis
MSGQKLTAANLVSAIDSLKKNVNYNYVNSSNTHTIQIVHVEKPEGPIKIKRGDTETSISKQAIWRLADALSTGEPVNVDRVFGASYNFRSALEALLAHTPEIYWCKLQRIQPGLNKSEVVEGHKHIIWLPDRPHEKGVMKEYETDVVISEIPSNNVVYDALSLPSTHSEIDIDVKRRHVQIQIALSAIGFQLGFRTWIARNDQGISYGDKKIADLDGIVQKIESEKLISSFDGAVQAAMNIDCIWFRNGKLMPAVMEVEHSTGVRSGLARMKQLKDLLPPYANTRWVIVAPDEDRDKVFKEANVPMFKNLDTQYFPYSAVEELYSLCIRRKLTNKAVNEEFLDCFMEKCVM

SEQ ID NO: 11383 - protein, 83 aa, Neisseria meningitidis; identical to SEQ ID NO: 5347

SEQ ID NO: 11384 - protein, 283 aa, Neisseria meningitidis
MTLLGYKLKQTQQLNQRLQQSLRVLQMSGIELEREVEDWLSDNPLLERKDTDEFSDAEFSHYTAPARQIGGDEGEDMLSNIAGEQDFKQYLHAQVCEHPLSDQEAACVHILIDFLDEQGYLTDSIEDILDHTPLEWMLDEAMLKQALTALKKFDPAGVAAADLNESLILQIERLGECAAKPSALHIVRNALDSIDGNRSQTLARIKKHLPQTDSGTLEAALDLIASLNPFPAAGFASSTPTPYSDEALANLLAFRGMEVSRRTIAKYRESLEIPAAHKRKTAE

SEQ ID NO: 11385 - protein, 209 aa, Neisseria meningitidis; identical to SEQ ID NO: 1847

SEQ ID NO: 11386 - protein, 468 aa, Neisseria meningitidis
MTAAPDILYRQAAALLEQSNTAQALPLLQQAAEQGYAEAAFVLGNHLLQNGQPEQALSWLEAAAAQRHPKALFSLLQQREHNGTPTGQLLNDYAWLGEQGHSEAQLILMRYHAQRNDPQSLYWAELAAARYAAPAYYHLARHHQRQGDVETAIEQYEKAAALGVTAACWQLGQIYFYGTGVSLNHAQAEHYLEPAAQAGHIAAQTLLADLLAAQRKPEALEWYRRAADKEQAEAQSKLAQYALTGELSERDPFQAARYAKAAAEKNHPEALKIMGDLYRYGLGIKADNHIAQDYYHRAAALGSAAAAQKLISDAALYHPQQYEQIKTAALQQQQTETIYRLAEAQACAIGRPADYNAARKNYMEAAGFHHKNAAAALGRIYHYGLGTAQDPRAAAHWYAIAAEQNHPSAQYHLACFYYHGQGIGCHVPTACYWLQAAISNGHTSAESLISLLEQWRREAHHAIGQKAV

SEQ ID NO: 11387 - protein, 205 aa, Neisseria meningitidis; identical to SEQ ID NO: 8862

SEQ ID NO: 11388 - protein, 465 aa, Neisseria meningitidis; identical to SEQ ID NO: 9615

SEQ ID NO: 11389 - protein, 233 aa, Neisseria meningitidis; identical to SEQ ID NO: 3223

SEQ ID NO: 11390 - protein, 464 aa, Neisseria meningitidis; identical to SEQ ID NO: 9179

SEQ ID NO: 11391 - protein, 296 aa, Neisseria meningitidis
MSVLINKDTKVLVQGFTGKNGTFHSEQALAYGTKVVGGVTPGKGGQTHLNLPVFNTMKEAVKETGADASVIYVPAPFVLDSIVEAVDSGVGLVVVITEGVPTLDMLKAKRYLETNGNGTRLVGPNCPGVITPDECKIGIMPGHIHTPGRIGIISRSGTLTYEAVAQTTKLGLGQSTCIGIGGDPIPGMNQIDALKLFQEDPDTDAIIMIGEIGGTAEEEAAEYIQSNVTKPVVGYIAGVTAPKGKRMGHAGAIISGGKGTAEEKFAAFEKAGIAYTRSPAELGTTMLEVLKTKGLA

SEQ ID NO: 11392 - protein, 733 aa, Neisseria meningitidis
MNMENYFSNLNLDIRTHKLGTFTDQKVTPDVLCAVAECIIEYIENIGEIFSINDIRYSDYAEYIATAVFKKPSIENAGSEYNKFFSQRRIRISATFPNRKRPVCGSIRPFLQERLPATRNPKANDTTSNTCPATAPSPKSPNSTATKAPSAAKSDGTAPKGSNTAPKKPSGKAGLSNSVSDNPISSIRSFSTSTPLSAANSVPNKYAPTCANTTRSRSTTAPFTATFAKTKATAARCGNISEYAANPTANATAAHGPEAKSPTVSAKTDPLSSTRNPVSAIGKPTPLSAKDRKAHYPWSNALPATPSSANWIASKPKTLPGQLLGHRHIKTGCTPLPWITAKSSTNTPKPKHKRRLIFVALTILGRKGMRTPTDSSGNTSPNKPISVTSVIGRYAGFKMSTTDQEKHLATKRQVFYSICSNHYTSVALEIRIQEPIKMLSYCGVLSEEKFSRYYRYGVQNNKILQYIANRERNALNFIQAFSEKLLKDSGIYPKFADFFAQPNKNTFESMKTAFTDLVIQNTPKNTEVEVRRIFTKIINPLAYKHNTFGTRKGSISNTPITLDELYYNRLNWRDKGKEKSLTRKEAQTLFADSANAANLNYLVNKATKFVKTLHKTSEVQRFDPTEANQAHHIFMASEFPDLASLPENLICLTPNQHFNLAHPSNKTTVIDKHYQRICLMAKLDSIEQDNRANTGNYDYHEFIHVLNTGFNTDQFDVSMSYETLKHRILMFDF

SEQ ID NO: 11393 - protein, 48 aa, Neisseria meningitidis
LKGKLMRVLLVEDDAMIAEAVSASLKDGGYAVDWVKNGARLPLPSLMT

SEQ ID NO: 11394 - protein, 83 aa, Neisseria meningitidis
MDNTRIMAAREAGVKVEANVHNFNDRLSSKERIRFKHDGIEPQTWGEAIQLRIRKQETQKGVPEGWSKRFPNGSIYDVKVLRK

SEQ ID NO: 11395 - protein, 81 aa, Neisseria meningitidis; identical to SEQ ID NO: 2565

SEQ ID NO: 11396 - protein, 268 aa, Neisseria meningitidis; identical to SEQ ID NO: 9528

SEQ ID NO: 11397 - protein, 249 aa, Neisseria meningitidis
LEWAVRQMGGKMSDKKYNVDEGEIAKFSRIADKWWDKSGEFKTLHDINPLRLDYIDGHADLCGKRVLDVGCGGGILAESMARRGAAFVKGIDMAEQSLETARLHAALNNVADIEYECIRVEDLAEAEPHSFDVVTCMEMMEHVPDPAAIVRACANLVKPDGMVFFSTINKNPKSYLHLIVAAEYLLKFVPKGTHDWKKFIAPAELARMCRQAGLDVADTKGMTYHVLSQTYALCDSTDVNYMFACRPAF

SEQ ID NO: 11398 - protein, 190 aa, Neisseria meningitidis
MDNHAEAHWQNGWLQSIRHTPSPNFSPRETGETVSLIVLHNISLPPFEYGTDAVERLFANRLDPNDHPFFGLIHTLRVSSHFLIKRDGKTVQFVSCDNMAYHAGVSSFGGREKCNAFSIGIELEGCDFEPFAEAQYRSLEALLDAICRHYPVTAVTGHQDIAPGRKTDPGHFFDWRRIREKGFLVDRNAV

SEQ ID NO: 11399 - protein, 434 aa, Neisseria meningitidis; identical to SEQ ID NO: 9617

SEQ ID NO: 11400 - protein, 421 aa, Neisseria meningitidis; identical to SEQ ID NO: 3252

SEQ ID NO: 11401 - protein, 351 aa, Neisseria meningitidis
MTHHYPTDDIKIKEVKELLPPIAHLYELPISKEASGLVHRTRQEISDLVHGRDKRLLVIIGPCSIHDPKAALEYAERLLKLRKQYENELLIVMRVYFEKPRTTVGWKGLINDPHLDGTFDINFGLRQARSLLLSLNNMGMPASTEFLDMITPQYYADLISWGAIGARTTESQVHRELASGLSCPVGFKNGTDGNLKIAIDAIGAASHSHHFLSVTKAGHSAIVHTGGNPDCHVILRGGKEPNYDAGHVSEAAEQLRAAGVTDKLMIDCSHANSRKDYTRQMEVAQDIAAQLEQDGGNIMGVMVESHLVEGRQDKPEVYGKSITDACIGWGATEELLALLAGANKKRMARAG

SEQ ID NO: 11402 - protein, 716 aa, Neisseria meningitidis
MPSETGADAAKPSDGIACPLRPNNNHLWENLMPEQNRILCRELSLLAFNRRVLAQAEDKNVPLLERLRFLCIVSSNLDEFFEVRMAWLKRENKLHPRRRLDNGKMPSETIADVTEAARSLIRHQYDLFNNVLQPELARESIHFYRRRNWTGTQKKWIEDYFDRELLPILTPIGLDPSHPFPRPLNKSLNFAVELDGTDAFGRPSGMAIVQAPRILPRVVPLPSELCGGGHGFVFLSSILHAHVGKLFPGMNVKGCHQFRLTRDSDLTVDEEDLQNLRAAIQNELHDREYGDGVRLEVADTCPAYIRDFLLAQFKLTAAELYQVKGPVNLVRLNAVPDLVNRPDLKFPTHTPGRLKALGKTASIFDLVRQSPILLHHPYQSFDPVVEMMREAAADPDVLAVKMTIYRTGTRSELVRALMKAALAGKQVTVVVELMARFDEANNVNWAKQLEEAGAHVVYGVFGYKVHAKMALVIRREDGVLKRYAHLGTGNYHQGTSRIYTDFGIITADEQITADVNTLFMEITGLGKPGRLNKLYQSPFTLHKMVIDRIARETEHAKAGKPARITAKMNSLIEPTVIEALYRASAAGVQIDLIVRGMCTLRPGVKGLSENIRVRSIIGRQLEHARVYCFHNNGADDTFISSADWMGRNFFRRIETAAPIAAPELKKRVIREGLEMALADNTHAWLMQPDGGYIRAAPAEGESEADLQNDLWTLLGG

SEQ ID NO: 11403 - protein, 206 aa, Neisseria meningitidis
MAVRSKSSKAWLHEHVNDHYVHMAQKDGYRARAAYKLLEINEKDKLIKPGTVLADLGSAPGSWSQVAAKLTGTSGAVFALDILPMEAIGGVSFIQGDFRENDVLAQFEGLLNNRPLDLVICDMAPNMSGNAVSDQARSFYLCELALDFASQHLKTGGSFLVKVFQGAGYQEYMAAMREFFGTVQTRKPEASRNRSSEIYLLGKNKR

SEQ ID NO: 11404 - protein, 874 aa, Neisseria meningitidis; identical to SEQ ID NO: 3254

SEQ ID NO: 11405 - protein, 440 aa, Neisseria meningitidis
LAGSALVALTALFFAHLADFALELNAKLVQQYPWFAWVALPLGLPLIAWLTRKFAPFTVGSGIPQVIASLSLPYGAQKTRLIRLGQTLLKIPLTFLGMLFGVSIGREGPSVQVGAAVMGAWGAWCKKHGLAFKGMQENDLMAAGAAGGLAAAFNAPLAGVIFAIEELGRGIMLRWERQILLGVLASGFIQVAIQGNNPYFSGFNGGVLEHIFLWVALSGLVCGAAGGLFGRLLYRGAAAFAPRKIRGFIRNRPLLLAALMGLLLALLGTFYQGKTYGTGYHEAAQALHGIYEAPFGLAAAKWLATVFSYWAGVPGGIFTPSLTIGAVLGEHIAAIADISQGANIIVLICMAAFLAGATQSPITSAVVVMEMTGGQSLLFWMLIACIFASQVSRQFSPRPFYHASGMRFRQRVLQETAAQTGNAPARPQTANSKTGMPSEN

SEQ ID NO: 11406 - protein, 539 aa, Neisseria meningitidis; identical to SEQ ID NO: 8183

SEQ ID NO: 11407 - protein, 155 aa, Neisseria meningitidis; identical to SEQ ID NO: 1336

SEQ ID NO: 11408 - protein, 119 aa, Neisseria meningitidis; identical to SEQ ID NO: 7953

SEQ ID NO: 11409 - protein, 434 aa, Neisseria meningitidis
MAMAKNVVVIGAQWGDEGKGKIVDWLAEEAGGVVRFQGGHNAGHTLVVGGKKTILRLIPSGILHESLDCFIGSGVVVSPEALLGEIDELNAAGVKNVEGRLKIAPTCPLILPYHIALDQAREASRGKGKIGTTGRGIGPAYEDKVARRAIRAADLLHPEKLREKLDAILAYYNVQLQHLHNAEPVKAEDVMAVIEKVALRIAPMITDVSRVLNEKNKNGEKLLFEGAQGALLDIDYGTYPFVTSSNCLAGAASAGAGVGPQMLDYVLGIVKAYTTRVGSGPFPTELFDEVGAGLAERGHEFGSVTGRARRCGWFDAAALKRSIQINGISGMCITKLDVMDGVETINICVGYELPDGGKTDILPCGSDAVETCKPIYETMPGWRESTFGVKSYDALPANAKAYLKRIEEVCGAPVAIVSTGPDREETIVLHHPFA

SEQ ID NO: 11410 - protein, 714 aa, Neisseria meningitidis
MNAPFFRLSLLSLTLAAGFAHAAENNAKVVLDTITVKGDRQGSKIRTNIVTLQQKDESTATDMRELLKEEPSIDFGGGNGTSQFLTLRGMGQNSVDIKVDNAYSDSQILYHQGRFIVDPALVKVVSVQKGAGSASAGIGATNGAIIAKTVDAQDLLKGLDKNWGVRLNSGFASNEGVSYGASVFGKEGNFDGLFSYNRNNEKDYEAGKGFRNNFNGGKTVPYSALDKRSYLAKIGTSFGDGDHRIVLSHMKDQHRGIRTVREEFTVGGDKERISMERQAPAYRETTQSNTNLAYTGKNLGFVEKLDANAYVLEKKRYSADDKGSGYAGNVEGPNHTRITTHGANFNFDSRLAEQTLLKYGINYRHQEIKPQAFLNGEFKIKDKSGATQAEKQKNRDDENIVKAYRLTNPTKTDTGAYIEAIHEIDGFTLTGGLRYDRFKVKTHDGKTVSSSSLNPSFGVIWQPHEYWSFSASHNYASRSPRLYDALQTHGKRGIISIADGTKAERARNTEIGFNYNDGTFAANGSYFWQTIKDALANPQNRHDSVAVREAVNAGYIKNHGYELGASYRTGGLTAKVGVSHSKPRFYDTHKDKLLSANPEFGAQVGRTWTASLAYRFKNPNLEIGWRGRYVQKAVGSILVAGQKDRQGNLENVVRKGFGVNDVFANWKPLGKDTLNVNLSVNNVFNTFYYPHSQRWTNTLPGVGRDVRLGVNYKF

SEQ ID NO: 11411 - protein, 262 aa, Neisseria meningitidis; identical to SEQ ID NO: 7522

SEQ ID NO: 11412 - protein, 157 aa, Neisseria meningitidis; identical to SEQ ID NO: 8970

SEQ ID NO: 11413 - protein, 275 aa, Neisseria meningitidis; identical to SEQ ID NO: 9134

SEQ ID NO: 11414 - protein, 1071 aa, Neisseria meningitidis; identical to SEQ ID NO: 373

SEQ ID NO: 11415 - protein, 455 aa, Neisseria meningitidis; identical to SEQ ID NO: 8196

SEQ ID NO: 11416 - protein, 489 aa, Neisseria meningitidis
LIMVIFYFCGKTFMPARNRWMLLPLLASAAYAEETPREPDLRSRPEFRLHEAEVKPIDREKVPGQVREKGKVLQIDGETLLKNPELLSRAMYSAVVSNNIAGIRVILPIYLQQAQQDKMLALYAQGILAQADGRVKEAISHYRELIAAQPDAPAVRMRLAAALFENRQNEAAADQFDRLKAENLPPQLMEQVELYRKALRERDAWKVNGGFSVTREHNINQAPKRQQYGKWTFPKQVDGTAVNYRLGAEKKWSLKNGWYTTAGGDVSGRVYPGNKKFNDMTAGVSGGIGFADRRKDAGLAVFHERRTYGNDAYSYTNGARLYFNRWQTPKWQTLSSAEWGRLKNTRRARSDNTHLQISNSLVFYRNARQYWMGGLDFYRERNPADRGDNFNRYGLRFAWGQEWGGSGLSSLLRLGAAKRHYEKPGFFSGFKGERRRDKELNTSLSLWHRALHFKGITPRLTLSHRETRSNDVFNEYEKNRAFVEFNKTF

SEQ ID NO: 11417 - protein, 113 aa, Neisseria meningitidis; identical to SEQ ID NO: 9778

SEQ ID NO: 11418 - protein, 148 aa, Neisseria meningitidis; identical to SEQ ID NO: 4053

SEQ ID NO: 11419 - protein, 72 aa, Neisseria meningitidis; identical to SEQ ID NO: 202

SEQ ID NO: 11420 - protein, 209 aa, Neisseria meningitidis
DGEAQLMAAPAGVATECRLTVQGGTDRESDASLLARLLKIIRRPPAGGNRYDYKNWALSVDGVTSAYVYPLRRGLGTVDIAITSADGVPSEETVRRVQAYIDEMRPVTAKNALVLKPTVTAVPVTVQVKLDGIDLDEAKRRIRTALKEYFDTLIPGDGLTVSQIEAAISNVDGVIDRRLTAPTANRAADTVNRIEWFKAGAINVTEMPS

SEQ ID NO: 11421 - protein, 256 aa, Neisseria meningitidis; identical to SEQ ID NO: 7987

SEQ ID NO: 11422 - protein, 162 aa, Neisseria meningitidis; identical to SEQ ID NO: 911

SEQ ID NO: 11423 - protein, 64 aa, Neisseria meningitidis; identical to SEQ ID NO: 3483

SEQ ID NO: 11424 - protein, 434 aa, Neisseria meningitidis
LPRREDGIMKSLFIRLLLLGSAAGVFYHTQNQSLPAGELVYPSAPQIRDGGDALHYLNRIRAQIGLHKLAHAPVLENSARRHARYLTLNPEDGHGEHHPDNPHYTAQKLTERTRLAGYLYNGVHENISTEEEAAESSDSDIRTQQRQVDGLMSAIYHRLSLLDRHTDEAGAAFVRENGKTVLVFNQGNSRFERHCAQGRNQPEAGRKYYRNACHNGAVVYTDEAMPAQELLYTAYPVGSGALPYFHGERPDPVPEYEITGNPASIDFSEAAGKITMKSFKLYQGKNEIRPVRVLTAGNDPNGRLTAYQFALFPLKPLEYGTLYTAVFDYVRNGRRAQAKWQFRTRKPDYPYFEVNGGETLAVRKGEKYFIHWRGRWCLEACTRYTYRQRPGSRLSIGRHEAGGIVFSVDGMAGSRITLAPEGETERGVTLYLQD

SEQ ID NO: 11425 - protein, 304 aa, Neisseria meningitidis; identical to SEQ ID NO: 8391

SEQ ID NO: 11426 - protein, 585 aa, Neisseria meningitidis; identical to SEQ ID NO: 88

SEQ ID NO: 11427 - protein, 103 aa, Neisseria meningitidis; identical to SEQ ID NO: 1510

SEQ ID NO: 11428 - protein, 160 aa, Neisseria meningitidis; identical to SEQ ID NO: 515

SEQ ID NO: 11429 - protein, 942 aa, Neisseria meningitidis; identical to SEQ ID NO: 9455

SEQ ID NO: 11430 - protein, 37 aa, Neisseria meningitidis; identical to SEQ ID NO: 970

SEQ ID NO: 11431 - protein, 68 aa, Neisseria meningitidis; identical to SEQ ID NO: 3041

SEQ ID NO: 11432 - protein, 422 aa, Neisseria meningitidis; identical to SEQ ID NO: 8427

SEQ ID NO: 11433 - protein, 390 aa, Neisseria meningitidis; identical to SEQ ID NO: 7103

SEQ ID NO: 11434 - protein, 553 aa, Neisseria meningitidis
MTESITRDSMQYDVVIVGAGPSGLSAAIKLKQLAEQNGREISVCVVEKGSEAGAHSLAGAVIDPIALNELIPDWKEKGAPLTRTVTQDKVLFLTEKKAFNLPITPNFDNHGNYIVSLGEVVRWLAEQAENLGVEIYPGFAAAEVLYHKDGSVKGIATGNMGVGKNGEPTDSFQPGMELWARQTLFAEGCRGSLSKQIIERFKLDQNSQPQTYGLGIKEVWEVPSEQHQPGLVVHSAGWPLDSKTYGGAFVYHFDDNKVAVGFVVGLDYQNPYLSPFEEFQRFKTHPEIRKTFEGGRRIAYGARSLIEGGFQSLPKLSFKGGVLVGDAAGFLNMPRIKGIHTAMKSAMLAAEAVFPLLENLEEVENFDSGKEAADYQQRFEQSWLYQELYAARNVRPSFKWGVYLGSIYTGIDQMIFRGKAPWTLKHHGKDNEQLKKAAACKPIDYPKPDGVLTFDRLSSVFLANLAHEENQPDHLVLNNPQTMIDVNYKEYASPETRYCPVGVYEIVEENGSPRLQINAANCVHCKTCDIKDPTQNITWICPESASGPNYGGM

SEQ ID NO: 11435 - protein, 280 aa, Neisseria meningitidis; identical to SEQ ID NO: 9669

SEQ ID NO: 11436 - protein, 78 aa, Neisseria meningitidis; identical to SEQ ID NO: 3909

SEQ ID NO: 11437 - protein, 203 aa, Neisseria meningitidis; identical to SEQ ID NO: 9288

SEQ ID NO: 11438 - protein, 242 aa, Neisseria meningitidis; identical to SEQ ID NO: 5117

SEQ ID NO: 11439 - protein, 344 aa, Neisseria meningitidis; identical to SEQ ID NO: 9761

SEQ ID NO: 11440 - protein, 148 aa, Neisseria meningitidis; identical to SEQ ID NO: 2500

SEQ ID NO: 11441 - protein, 225 aa, Neisseria meningitidis
LVKTADGYKAIARIRTGDRVFAKDEASGKTGYKPVTARYGNPYQETVYIEISDGIGNNQTLISNKIHPFYSQGKWIQAGRLKKGDTLLSESGAKQTVQNITFKQQPLKAYNLTVADWHTYFVKGSQAETEGVWVHNACPPRKTPSTPVYGNDSEAYAAAKKLGYRKIKERTRNDAAIFKKGKSYISRDVDSHNGGAWKEASSPKNLNRKETRNGTFDKNLNRIGD

SEQ ID NO: 11442 - protein, 868 aa, Neisseria meningitidis
MAANQRYRKPLPGTDLEYYDARAACEDIKPGSYDKLPYTSRILAENLVNRADKVDLPTLQSWLGQLIEGKQEIDFPWYPARVVCHDILGQTALVDLAGLRDAIAEKGGDPAKVNPVVQTQLIVDHSLAVECGGYDPDAFRKNREIEDRRNEDRFHFINWTKTAFENVDVIPAGNGIMHQINLEKMSPVVQVKNGVAFPDTCVGTDSHTPHVDALGVISVGVGGLEAETVMLGRASMMRLPDIVGVELNGKRKAGITATDIVLALTEFLRKERVVGAFVEFFGEGARSLSIGDRATISNMTPEFGATAAMFAIDEQTIDYLKLTGRDDAQVKLVETYAKTAGLWADALKTAVYPRVLKFDLSSVTRNMAGPSNPHARFATVDLAAKGLAKPYEEPSDGQMPDGAVIIAAITSCTNTSNPRNVVAAALLARNANRFGLKRKPWVKTSFAPGSKVAEIYLKEAGLLPEMEKLGFGIVAFACTTCNGMSGALDPKIQKEIIDRDLYATAVLSGNRNFDGRVHPYAKQAFLASPPLVVAYALAGSIRFDIENDVLGVADGKEIRLKDIWPADEEIDAVVAEYVKPQQFRDVYVPMFDTGTAQKAPSPLYDWRPMSTYIRRPPYWEGALAGERTLSGMRPLAILPDNITTDHLSPSNAILASSAAGEYLAKMGLPEEDFNSYATHRGDHLTAQRATFANPKLFNEMVRNEDGSVRQGSLARVEPEGQTMRMWEAIETYMNRKQPLIIIAGADYGQGSSRDWAAKGVRLAGVEAIVAEGFERIHRTNLIGMGVLPLQFKPGTNRHTLQLDGTETYDVVGERKPRCDLTLVIHRKNGETVEVPVTCRLDTAEEVLVYEAGGVLQRFAQDFLEGNAA

SEQ ID NO: 11443 - protein, 363 aa, Neisseria meningitidis
MPMYSELNLNQYSVASPLKENDSLRCSTKIGSVLFVLSAASPPCPDFCSTICCRRRILRLHQTEAVHCLPGYPSRTRWQKNTCDPAGFGLAGQQTAWGGGAGGFETTLQRLKEYWKYCMNKKLNYIFMLDCLGLVILFTCIIATFERDYGFKIFTNSKRPEFYYWIGMFYYGIISCWFDYQLISTKANSYKRKVKQYKIFSVIFSVLIFISTIVKLILEQKFMSDSIEYVLGTRSAHVGKCCRANGICTGWEYRAAGRRRHATVCLFLGRRLRRVPSVEMAADTRKTEKGIQKSRQKQKDRDVCRTGIRHIQTEFERCLGFRRDGTEGVSLPVFAVSDQVAKSIWINKNQYGVASPLKENDSL

SEQ ID NO: 11444 - protein, 798 aa, Neisseria meningitidis; identical to SEQ ID NO: 2881

SEQ ID NO: 11445 - protein, 186 aa, Neisseria meningitidis; identical to SEQ ID NO: 104

SEQ ID NO: 11446 - protein, 187 aa, Neisseria meningitidis; identical to SEQ ID NO: 2456

SEQ ID NO: 11447 - protein, 570 aa, Neisseria meningitidis
LAVYRKELYMSMENFAQLLEESFTLQEMNPGEVITAEVVAIDQNFVTVNAGLKSESLIDVAEFKNAQGEIEVKVGDFVTVTIESVENGFGETKLSREKAKRAADWIALEEAMENGDILSGIINGKVKGGLTVMISSIRAFLPGSLVDVRPVKDTSHFEGKEIEFKVIKLDKKRNNVVVSRRAVLEATLGEERKALLENLQEGSVIKGIVKNITDYGAFVDLGGIDGLLHITDLAWRRVKHPSEVLEVGQEVEAKVLKFDQEKQRVSLGMKQLGEDPWSGLTRRYPQGTRLFGKVSNLTDYGAFVEIEQGIEGLVHVSEMDWTNKNVHPSKVVQLGDEVEVMILEIDEGRRRISLGMKQCQANPWEEFAANHNKGDKISGAVKSITDFGVFVGLPGGIDGLVHLSDLSWTESGEEAVRKYKKGEEVEAVVLAIDVEKERISLGIKQLEGDPFGNFISVNDKGSLVKGSVKSVDAKGAVIALSDEVEGYLPASEFAADRVEDLTTKLKEGDEVEAVIVTVDRKNRSIKLSVKAKDAKESREALNSVNATANANAGTTSLGDLLKAKLSGEQE

SEQ ID NO: 11448 - protein, 186 aa, Neisseria meningitidis
VGIQDEKSPETVLPDKFPHRQVWIPACAGMTMQVFLTIPGYDVEAEIEKFVWMDAVIWQMPSWWMHEPWTVKKYIDEVLTAGHGKLYQSDGRHSVNPTEGYGTGGLLQGKKHMLSLTWNAPIEAFTREGDFFEGKGVDVLYMHFHKANEFLGMTRLPTFLCNDVVKNPQVEKYLADYQAHLEKVFG

SEQ ID NO: 11449 - protein, 273 aa, Neisseria meningitidis
MMKGMDKLRYQQDFLNIRPIFTAGEQEYLTGLSDRLPLSVLTGSVRNIEEIGIDFVYSSAKLEGNTYNQYDTQALLKLGQTAGGKLYSDAVMLINLRESYRHLLSGLDSPEPFDWLDFLKTTHSLISENLLEKGSGGVVRRDSVTISGTDYTPLSNPQSLDTELKWLLQEAPKIENPFDRAVYLHNNLAYLQYFKDCNKRTARNCMTLSLMRSGFFPCVFSPDSYPAYAEAVVAYYETGDYGLFKKYFISAYENTVNKYGPQPDMDISRNFSL

SEQ ID NO: 11450 - protein, 51 aa, Neisseria meningitidis; identical to SEQ ID NO: 1536

SEQ ID NO: 11451 - protein, 151 aa, Neisseria meningitidis
MLAKPTVLQAFSYFGVQHGTIMPTSTKPYILRALCEWCSDNSLTPHILVWVNEHTRVPMQYVRDNEIMLNIGATATQNLQIDNDWISFSARFGGQAHDIWIPVGHVLSLFARETGEGMGFELEAYRPDTPPENTSAETAPRPAKKGLKLVK

SEQ ID NO: 11452 - protein, 404 aa, Neisseria meningitidis; identical to SEQ ID NO: 9479

SEQ ID NO: 11453 - protein, 1568 aa, Neisseria meningitidis; identical to SEQ ID NO: 9504

SEQ ID NO: 11454 - protein, 520 aa, Neisseria meningitidis; identical to SEQ ID NO: 2831

SEQ ID NO: 11455 - protein, 221 aa, Neisseria meningitidis
VDNMMKFKYVFLLACVVVSLSYRLNAAPMFNDNPVVYGKIKVQSWKERRDFNIVKQDLDFSCGAASVATLLNNFYGQTLTEEEVLKKLDKEQMRASFEDMRRIMPDLGFEAKGYALSFEQLAQLKIPVIVYLKYRKDDHFSVLRGIDGNTVLLADPSLGHVSMSRAQFLDAWQTREGNLAGKILAVVPKKAETISNKLFFTHHPKRQTEFAVGQIRQARAE

SEQ ID NO: 11456 - protein, 287 aa, Neisseria meningitidis
MRILLTGSKSQLARCLRDRLPEDWETIATDSASLDITDADAVCNMVKSFQPDAIVNTAAYTAVDKAEGNAAAAFAVNASAVYNLALAAHRAHARFIHISTDYIFDGKGKRPYQESDFTNPSNVYGQSKTAGELLALSANPDSLILRTSWLFSEYGDNFVRTMLNLARERSPLSAVHNQIGCPTYAGDLAAAIIRLLQQTSPVRGIYHYAGGKSVSWYEFAQHIFQAASQQQTSFPVPELTAVSDKEYPTAAPRPAYSILDCRKIENDFSIKPSDWQKALAQVVSKLL

SEQ ID NO: 11457 - protein, 257 aa, Neisseria meningitidis
MSANILAIANQKGGVGKTTTTVNLAASLASRGKRVLVVDLDPQGNATTGSGIDKAGLQSGVYQVLLGDADVKSAAVRGKEGGYAVLGANRALAGAEIELVQEIAREVRLKNALKAVAEDYDFILIDCPPSLTLLTLNGLVAAGGVIVPMLCEYYALEGISDLIATVRKIRQAVNPDLDITGIVRTMYDSRSRLVAEVSEQLRSHFGDLLFETVIPRNIRLAEAPSHGMPVMAYDAQAKGTKAYLALADELMARVSGK

SEQ ID NO: 11458 - protein, 255 aa, Neisseria meningitidis; identical to SEQ ID NO: 8663

SEQ ID NO: 11459 - protein, 418 aa, Neisseria meningitidis; identical to SEQ ID NO: 1968

SEQ ID NO: 11460 - protein, 737 aa, Neisseria meningitidis; identical to SEQ ID NO: 8684

SEQ ID NO: 11461 - protein, 131 aa, Neisseria meningitidis; identical to SEQ ID NO: 3391

SEQ ID NO: 11462 - protein, 573 aa, Neisseria meningitidis; identical to SEQ ID NO: 3691

SEQ ID NO: 11463 - protein, 139 aa, Neisseria meningitidis; identical to SEQ ID NO: 8720

SEQ ID NO: 11464 - protein, 169 aa, Neisseria meningitidis
RAVQHAFGAACYDNGIGWRLARFACPQTNGKAERVIRTLMEMWHEEQSFDSPEHRQKELCCFINLGAALDHGNSNVRIIPMRESRLSRTKTHFVIVAMMYWMRANLAISVSITAHILPNDKTILMELRTFGIKQNVIYASLTAFPKRILSCIRSANGVLTTVKKFLFHF

SEQ ID NO: 11465 - protein, 172 aa, Neisseria meningitidis; identical to SEQ ID NO: 8750

SEQ ID NO: 11466 - protein, 356 aa, Neisseria meningitidis; identical to SEQ ID NO: 8612

SEQ ID NO: 11467 - protein, 722 aa, Neisseria meningitidis
MGQFMSVFRINMTAATVLAALSSSVFAAQTADLETVHIKGQRSYNAIATEKNGDYSSFAATVGTKIPASLREIPQSVSIITNQQVKDRNVDTFDQLARKTPGLRVLSNDDGRSSVYARGYEYSEYNIDGLPAQMQSINGTLPNLFAFDRVEVMRGPSGLFDSSGEMGGIVNLVCKRPAKAFQGHAAAGFGTHKQYKAEADVSGSLNSDGSVRGRVMAQTVGASPRPAEKNNRHETFYAAADWDINPDTVLGAGYLYQQRHLAPYNGLPADANNKLPSLPQHVFVGADWNKFKMNSHDVFADLKHYFGNGGYGKVGMRYSDRDADSNYAFAGSKLGMKTLAGRPGCNTADDKACAVGLGTEIKQKALAFDASYSRPFRLGNTANEFVIGADYNRFRSTNEQGRTTLYARGGLALNEFRSIPQVDLIANARKGVRGYSHTVATENLDEFGIYGKSTFHPADGLSLIGGGRLGHYKIELGEGKTLHKASKTKFTGYAGAVYDLNDNNSLYLSLSQLYTPQTNLDADGKLLKPRQGNQFEVGYKGSYMDDRLNARVSFYRMKDKNAAAPLNPNNKKTRYAALGKRVMEGVETEISGAVTPKWQIHAGYSYLHSQIKTASNSRDDGIFLLMPKHSANLWTTYQVTPELTIGGGVNAMSGITSSAGMHAGGYATFDAMAAYRFTPKLKLQINADNIFNRHYYARVGGANTFNIPGSERSLTANLRYSF

SEQ ID NO: 11468 - protein, 464 aa, Neisseria meningitidis
MQGKPMAKTLKTLYQCTECGGTSPKWQGKCPHCGEWNTLQESLAAPEPKNARFQSWAADTSTVQSLSSVTATEVPRNPTGMGELDRVLGGGLVDGAVILLGGDPGIGKSTLLLQTIAKMAQSRKVLYVSGEESAQQVALRAQRLELPTEGVNLLAEIRMEAIQTALKQHQPEVVVIDSIQTMYSDQITSAPGSVSQVRECAAQLTRMAKQMGIAMILVGHVTKDGAIAGPRVLEHMVDTVLYFEGDQHSNYRMIRAIKNRFGAANELGVFAMTENGLKGVSNPSAIFLASYRDDTPGSCVLVTQEGSRPLLVEIQALVDDAHGFTPKRLTVGLEQNRLAMLLAVLNRHGGIACFDQDVFLNAVGGVKIGEPAADLAVILAMLSSFRNRPMPEKTVVFGEIGLSGEVRPVARGQERLKEAEKLGFKRAIVPKANMPRNAKEFPNLKIYGVSSLQEAIDICRDSRE

SEQ ID NO: 11469 - protein, 125 aa, Neisseria meningitidis; identical to SEQ ID NO: 9816

SEQ ID NO: 11470 - protein, 80 aa, Neisseria meningitidis
MTNLKLDFYSEVIIKDSCPNDLLENGETIKGKKGVVLGISEEDGIIYGYTILLFDIKYCRYIDKKYIIPTGKKFSRDDFY

SEQ ID NO: 11471 - protein, 226 aa, Neisseria meningitidis; identical to SEQ ID NO: 8827

SEQ ID NO: 11472 - protein, 419 aa, Neisseria meningitidis; identical to SEQ ID NO: 1950

SEQ ID NO: 11473 - protein, 306 aa, Neisseria meningitidis; identical to SEQ ID NO: 4339

SEQ ID NO: 11474 - protein, 395 aa, Neisseria meningitidis; identical to SEQ ID NO: 10755

SEQ ID NO: 11475 - protein, 195 aa, Neisseria meningitidis; identical to SEQ ID NO: 3348

SEQ ID NO: 11476 - protein, 398 aa, Neisseria meningitidis
MKHFPSKVLTTAILATFCSGALAATNDDDVKKAATVAIAAAYNNGQEINGFKAGETIYDIDEDGTITKKDATAADVEADDFKGLGLKKVVTNLTKTVNENKQNVDAKVKAAESEIEKLTTKLADTDAALDATTNALNKLGENITTFAEETKTNIVKIDEKLEAVADTVDKHAEAFNDIADSLDETNTKADEAVKTANEAKQTAEETKQNVDAKVKAAETAAGKAEAAAGTANTAADKAEAVAAKVTDIKADIATNKDNIAKKANSADVYTREESDSKFVRIDGLNATTEKLDTRLASAEKSITEHGTRLNGLDRTVSDLRKETRQGLAEQAALSGLFQPYNVGRFNVTAAVGGYKSESAVAIGTGFRFTENFAAKAGVAVGTSSGSSAAYHVGVNYEW

SEQ ID NO: 11477 - protein, 487 aa, Neisseria meningitidis; identical to SEQ ID NO: 2121

SEQ ID NO: 11478 - protein, 1454 aa, Neisseria meningitidis; identical to SEQ ID NO: 8488

SEQ ID NO: 11479 - protein, 182 aa, Neisseria meningitidis; identical to SEQ ID NO: 125

SEQ ID NO: 11480 - protein, 101 aa, Neisseria meningitidis; identical to SEQ ID NO: 2735

SEQ ID NO: 11481 - protein, 147 aa, Neisseria meningitidis
LVMPVKKVEKNILVLHGADKMFELVDKVEDYPHFLPWYSKTEVIGRSGNELKARLFMDYMHVRQSFATHNRNIPGREIRMELLEGPFKTLRGTWKFIDLGDDMCKIEFNLEYDFSNAVLSALISPVFNHLSVTLVEAFVKEADRRYA

SEQ ID NO: 11482 - protein, 283 aa, Neisseria meningitidis
MVGCVWQAGRFEIGLDKPKIMGIVNLTPDSLSDGGAYSQNAQTALAHAERLLKEGADILDIGGESTRPGADYVSPEEEWARVESVLAEVAGWGVPVSLDTRHTVVMEKALALGGIDIINDVAALTDEGALELLACQADTGICLMHMQGLPKNMQINPKYQDVVGEVARYLKARAAECIAAGIAPQRITLDPGFCFGKTLQHNITLMRHLPELMAETGYPLLIGVSRKSMIGELTGETDAAARGHGSVAAALAAVARGAKIVRVHDVKATADALKAWEALGINL

SEQ ID NO: 11483 - protein, 191 aa, Neisseria meningitidis
VFLPASDAEILFFLPNNLFSQGKLDYNGGMKKYLIPLSIVAVLSGCQSIYVPTLTEIPVNPINTVKTEAPAKGFRLASSHWTDVAKISDEATRLGYQVGIGKMTKVQAAQYLNNFRKRLVGRNAVDDSMYEIYLRSAIDSQRGAINTEQSKLYIQNALRGWQQRWKNMDVKPNNPAFTNFLMEVMKMQPLK

SEQ ID NO: 11484 - protein, 228 aa, Neisseria meningitidis; identical to SEQ ID NO: 9592

SEQ ID NO: 11485 - protein, 608 aa, Neisseria meningitidis; identical to SEQ ID NO: 1400

SEQ ID NO: 11486 - protein, 150 aa, Neisseria meningitidis; identical to SEQ ID NO: 8244

SEQ ID NO: 11487 - protein, 248 aa, Neisseria meningitidis; identical to SEQ ID NO: 2041

SEQ ID NO: 11488 - protein, 212 aa, Neisseria meningitidis
LHGTPNPSAGRMASVKEILMKHTVSASVILLLTACAQLPQNNENLWQPSEHTRSFTAEGRLAVKAEGKGSYANFDWTYQPPVETININTPLGSTLGQLCQDRDGALAVDGKGNVYQAESAEELSRQLVGFKLPIQYLHIWADGRRVAGAPYRILPDGILEQYGWTVGRTADSGGQVRTLQLNNGNLNIRLVFTEIGMPSETETPERCAARTR

SEQ ID NO: 11489 - protein, 359 aa, Neisseria meningitidis
VRIMAACPNESVKMDISDFDFTLPEKLIAQHPPEVRGSSRLLVALPDMPLQDRVFGDLPDYVEAGDVLVFNNTKVMKARLFGQKDSGGRIEALIERVLDNHTALAHIRSSKSPKPGMGLVFEGGIRAVTVGREGELFCLRFEGGQTVYELLEQNGHLPLPPYIERAADADDDSRYQTVYAKYQGAVAAPTAGLHFTEELLRRLKDKGAVTAEVTLHVGAGTFQPVRVDKIEEHKMHSEWFEVPSETAAAVEAAKARGNKVWAVGTTSMRALESAARATGRLKAGQGDTDIFITPGYRFNVVDRLVTNFHLPKSTLLMLVSAFSGMGHIRAAYRYAVEREYRFFSYGDAMVLGWNEGVVR

SEQ ID NO: 11490 - protein, 389 aa, Neisseria meningitidis
MPQIKIPAVYYRGGTSKGVFFKRSDLPEAAREAGSARDKILLRVLGSPDPYGKQIDGLGNASSSTSKAVILDKSERADHDVDYLFGQVSIDKPFVDWSGNCGNLTAAVGAFAIEQGLVDKGKIPSDGICTVKIWQKNIGKTIIAHVPMQNGAVLETGDFELDGVTFPAAEVQIEFLDPADGEGSMFPTGNLVDEIDVPNIGRLKATLINAGIPTVFLNAADLGYTGKELQDDINNDAAALEKFEKIRAYGALKMGLISDVSEAAARAHTPKVAFVAPAADYTASSGKTVNAADIDLLVRALSMGKLHHAMMGTASVAIATAAAVPGTLVNLAAGGGTRKEVRFGHPSGTLRVGAAAECQDGQWTATKAVMSRSARVMMEGWVRVPEDCF

SEQ ID NO: 11491 - protein, 518 aa, Neisseria meningitidis; identical to SEQ ID NO: 8503

SEQ ID NO: 11492 - protein, 321 aa, Neisseria meningitidis; identical to SEQ ID NO: 4435

SEQ ID NO: 11493 - protein, 274 aa, Neisseria meningitidis; identical to SEQ ID NO: 8054

SEQ ID NO: 11494 - protein, 125 aa, Neisseria meningitidis
LKETDMDIRYFGTTPRYSEAVGANGLIFLSGMVPENGETAAEQTADVLAQIDRWLAECGSDKAHVLDAVIYLRDMGDYAEMNGVWDAWVAAGRTPARACVEARLARPEWRVEIKITAVKKDAATE

SEQ ID NO: 11495 - protein, 335 aa, Neisseria meningitidis; identical to SEQ ID NO: 3108

SEQ ID NO: 11496 - protein, 52 aa, Neisseria meningitidis; identical to SEQ ID NO: 8509

SEQ ID NO: 11497 - protein, 233 aa, Neisseria meningitidis; identical to SEQ ID NO: 8026

SEQ ID NO: 11498 - protein, 217 aa, Neisseria meningitidis; identical to SEQ ID NO: 9349

SEQ ID NO: 11499 - protein, 217 aa, Neisseria meningitidis; identical to SEQ ID NO: 480

SEQ ID NO: 11500 - protein, 230 aa, Neisseria meningitidis; identical to SEQ ID NO: 1058

SEQ ID NO: 11501 - protein, 313 aa, Neisseria meningitidis
MKTLLLLIPLVLTACGTLTGIPAHGGGKRFAVEQELVAASSRAAVKEMDLSALKGRKAALYVSVMGDQGSGNISGGRYSIDALIRGGYHNNPESATQYSYPAYDTTATTKADALSSVTTSTSLLNAPAAALTRNSGRKGERSAGLSVNGTGDYRNETLLANPRDVSFLTNLIQTVFYLRGIEVVPPEYADTDVFVTVDVFGTVRSRTELHLYNAETLKAQTKLEYFAVDRDSRKLLIAPETAAYESQYQEQYALWMGPYSVGKTVKASDRLMVDFSDITPYGDTTAQNRPDFKQNNGKKPDVGNEVIRRRKGG

SEQ ID NO: 11502 - protein, 295 aa, Neisseria meningitidis; identical to SEQ ID NO: 3063

SEQ ID NO: 11503 - protein, 163 aa, Neisseria meningitidis; identical to SEQ ID NO: 1830

SEQ ID NO: 11504 - protein, 241 aa, Neisseria meningitidis; identical to SEQ ID NO: 400

SEQ ID NO: 11505 - protein, 219 aa, Neisseria meningitidis
LCASCLNVNKIVIIATFYRNPERPSEMRNEEKHALRRELRGRRSQMGWDVRAAATVKINRLLKRYIKHGRKIGVYWPMGKELRLDGFVRAAQKRGAKLYLPYIEPRSRRMWFTPYPESGMERERIRGRARLNVPQFAGRKIRVHGLSVLLVPLVGIDREGYRLGQAGGYYDATLAAMKYRLQAKTVGVGFACQLVDRLSVEAHDLPLDGFVSEAGILCF

SEQ ID NO: 11506 - protein, 331 aa, Neisseria meningitidis
LKAAYQNIATVWQGDFHNAKQVLSAMKKRARKPAAVRSDADIAALFHAHRMKQAQQSRILNMLAVEIRPGFVLDNKRAPDIRAALLDVYGEADGKPFFLPLNLLLGFMGAHEWHKKGVAVPQLGGSIHVPFGVFSPLRGEYLDLLAHAPSTGFQTAFDIGTGSGVLAAILAKQGIPSVIGTDTNPKAVACARANIARLGFEKQVEIRETDLFPEGFADLIVCNPPWLPAKPTSAVESALYDPESAMLAAFLRDAPKHLNPDGEIRLIISDLAEHLGLRPADFLEKAFIRAGLRVADMMKTKPKHKKAANPSDPLAFARTWETTFLYRLKKA

SEQ ID NO: 11507 - protein, 266 aa, Neisseria meningitidis; identical to SEQ ID NO: 8298

SEQ ID NO: 11508 - protein, 81 aa, Neisseria meningitidis; identical to SEQ ID NO: 7948

SEQ ID NO: 11509 - protein, 120 aa, Neisseria meningitidis; identical to SEQ ID NO: 1496

SEQ ID NO: 11510 - protein, 152 aa, Neisseria meningitidis; identical to SEQ ID NO: 9368

SEQ ID NO: 11511 - protein, 160 aa, Neisseria meningitidis; identical to SEQ ID NO: 1377

SEQ ID NO: 11512 - protein, 173 aa, Neisseria meningitidis; identical to SEQ ID NO: 3735

SEQ ID NO: 11513 - protein, 165 aa, Neisseria meningitidis; identical to SEQ ID NO: 2055

SEQ ID NO: 11514 - protein, 331 aa, Neisseria meningitidis; identical to SEQ ID NO: 2336

SEQ ID NO: 11515 - protein, 123 aa, Neisseria meningitidis; identical to SEQ ID NO: 5008

SEQ ID NO: 11516 - protein, 318 aa, Neisseria meningitidis; identical to SEQ ID NO: 3091

SEQ ID NO: 11517 - protein, 125 aa, Neisseria meningitidis; identical to SEQ ID NO: 2523

SEQ ID NO: 11518 - protein, 163 aa, Neisseria meningitidis; identical to SEQ ID NO: 684

SEQ ID NO: 11519 - protein, 251 aa, Neisseria meningitidis; identical to SEQ ID NO: 6395

SEQ ID NO: 11520 - protein, 311 aa, Neisseria meningitidis; identical to SEQ ID NO: 8181

SEQ ID NO: 11521 - protein, 336 aa, Neisseria meningitidis
LRASSVQPWDWRKASAASSPASPCLWFRRIIGLTFIMSVFQTAFFMFQKHLQKASDSVVGGTLYVVATPIGNLADITLRALAVLQKADIICAEDTRVTAQLLSAYGIQGKLVSVREHNERQMADKIVGYLSDGMVVAQVSDAGTPAVCDPGAKLARRVREVGFKVVPVVGASAVMAALSVAGVAGSDFYFNGFVPPKSGERRKLFAKWVRAAFPVVMFETPHRIGATLADMAELFSERRLMLAREITKTFETFLSGTVGEIQTALSADGNQSRGEMVLVLYPAQDEKHEGLSESAQNIMKILTAELPTKQAAELAAKITGEGKKALYNLALSWKNK

SEQ ID NO: 11522 - protein, 157 aa, Neisseria meningitidis; identical to SEQ ID NO: 8117

SEQ ID NO: 11523 - protein, 469 aa, Neisseria meningitidis
MDTQIKTEADNQSNRRYLTVWRWHFYAGLLVMPFLTLLAVTGLGMLLFANITGKEGERIHVVPQATVQPLSVQAEAARSAVNPETSSVVQYIAPRADDMVAVFRVNNEGKATMVAVDPYTAKVVNTMPRNQGWYHTMDEIHSDMMLGSTGDYLLETAASLTIIMIISGLYLWWVKRRGIKAMLLPSKGRARSWWRNLHGTFGTWVSLILLLFCLSGIAWAGIWGGKFVQAWSQFPAGKWGVEPNPVSVVPTHGEVLNDGKVKEVPWVLELTPMPVSGTTVGKDGINPDEPMTLETVDRFAREIGFKGRYQLNLPKGEDGVWTLSQDSMSYDMISPFADRTVHIDQYSGKILADIRFDDYNPFGKFMAASIALHMGTLGWWSVLANVLFCLAVIFIGISGCVMWWKRRPTGAVGIVPPAQKVKLPVWWMMALPLLAIALLFPTALLAIAVIWLLDTLLLSRIPVLRRWFK

SEQ ID NO: 11524 - protein, 228 aa, Neisseria meningitidis; identical to SEQ ID NO: 8057

SEQ ID NO: 11525 - protein, 179 aa, Neisseria meningitidis
MSQVFKDFDLSSVWESDSWADENYKEAPFTPEILAAVESELGYKLPQSFIELMAVQNGGIFVKNCFPTTQRNSWAKDHVQICEVSGIGFEKEGSLCGETGQKLWMEEWEYPPIGVYFANDPSGGHAMFALDYRECGKDGEPKVVFVEQESDFEIVELAPDFETFIRSLRHEDEFIDEEI

SEQ ID NO: 11526 - protein, 123 aa, Neisseria meningitidis; identical to SEQ ID NO: 4020

SEQ ID NO: 11527 - protein, 367 aa, Neisseria meningitidis; identical to SEQ ID NO: 8577

SEQ ID NO: 11528 - protein, 336 aa, Neisseria meningitidis; identical to SEQ ID NO: 9366

SEQ ID NO: 11529 - protein, 278 aa, Neisseria meningitidis; identical to SEQ ID NO: 7961

SEQ ID NO: 11530 - protein, 299 aa, Neisseria meningitidis; identical to SEQ ID NO: 7158

SEQ ID NO: 11531 - protein, 246 aa, Neisseria meningitidis; identical to SEQ ID NO: 2993

SEQ ID NO: 11532 - protein, 115 aa, Neisseria meningitidis; identical to SEQ ID NO: 2034

SEQ ID NO: 11533 - protein, 62 aa, Neisseria meningitidis; identical to SEQ ID NO: 1869

SEQ ID NO: 11534 - protein, 201 aa, Neisseria meningitidis; identical to SEQ ID NO: 3703

SEQ ID NO: 11535 - protein, 213 aa, Neisseria meningitidis
MLKPETIHISGPAGILETIHIPSEQVLARGVAVINHPNPLQGGTNTNKVIQTAAKALSKLGFHCYLPNLRGVGNSEGTHDYGRGETQDCLAVIDYARAQHPEAPEFALSGFSFGGYVATFAAQARIPDLLLLIGAAVCHYTGRPEPSAVPNVAKTLMIHGAEDEVVEIEKALKWAEPQDLPVITIAGSTHFFHGKLIVLRDTILRFAPVCLNG

SEQ ID NO: 11536 - protein, 256 aa, Neisseria meningitidis; identical to SEQ ID NO: 975

SEQ ID NO: 11537 - protein, 157 aa, Neisseria meningitidis; identical to SEQ ID NO: 5447

SEQ ID NO: 11538 - protein, 133 aa, Neisseria meningitidis
VKIKPLQFSNNNHRFYVDKICVTEQDVNILASDRNYELNIEIFIDNIIHFQITDESYKVKFSEYLFENKEENNSDGNPTANYFFEIIDDSYMDWLKEESFDFFEKKYYKAYIFFFSDSVIDVISSTEPVFYSK

SEQ ID NO: 11539 - protein, 292 aa, Neisseria meningitidis; identical to SEQ ID NO: 1803

SEQ ID NO: 11540 - protein, 175 aa, Neisseria meningitidis; identical to SEQ ID NO: 5

SEQ ID NO: 11541 - protein, 161 aa, Neisseria meningitidis; identical to SEQ ID NO: 896

SEQ ID NO: 11542 - protein, 231 aa, Neisseria meningitidis; identical to SEQ ID NO: 1028

SEQ ID NO: 11543 - protein, 640 aa, Neisseria meningitidis; identical to SEQ ID NO: 9576

SEQ ID NO: 11544 - protein, 135 aa, Neisseria meningitidis; identical to SEQ ID NO: 803

SEQ ID NO: 11545 - protein, 431 aa, Neisseria meningitidis; identical to SEQ ID NO: 3103

SEQ ID NO: 11546 - protein, 386 aa, Neisseria meningitidis
LNERSKTMKKTLVAAAILSLALTACGGGSDTAAQTPSAKPEAEQSGKLNIYNWSDYVDPETVAAFEKETGIKTRSDYYDSNETLEAKVLTGKSGYDLTAPSIANVGRQIKAGAYQKIDKAQIPHYGNIDKDLLKMMEAVDPGNEYAVPYFWGINTLAINTRQVQKALGTDKLPENEWDLVFNPEYTAKLKSCGISYFDSAIEQIPLALHYLGKDPNSENPEDIKAAVDMMKAVRGDVKRFSSSGYIDDMAAGNLCAAIGYGGDLNIAKTRAEEAANGVEIKVLTPKTGVGVWVDSFMIPRDAQNVANAHRYIDYTLRPEVAAKNGSFVTYAPASRPARELMDEKYTSDASIFPNKELMEKSFIVSPKSAESAKLGVKLWQGLKAGK

SEQ ID NO: 11547 - protein, 96 aa, Neisseria meningitidis; identical to SEQ ID NO: 2105

SEQ ID NO: 11548 - protein, 392 aa, Neisseria meningitidis; identical to SEQ ID NO: 8479

SEQ ID NO: 11549 - protein, 367 aa, Neisseria meningitidis
MEAEVINQLNNTLNDLEKRSEDIRVYMDYQGKKDRLEEVIGLSEDPELWNDPKRAQEIGKERKILEGIVLTLDNIASGIEDNRMLIEMTVEENDEEGFAAVQEDVAGLEKQMADLEFKRMFNQPADPNNCFIDITAGAGGTEAEDWAGMLFRMYSRYAERKGFKIEILEEDDGEIAGINRATIRVEGEYAYGLLRTETGVHRLVRYSPFDSNNKRHTSFASVFVYPEIDDSIEIEINPADLRIDTYRASGAGGQHINKTDSAVRITHEPTGIVVQCQNDRSQHANKAAAMEMLKSKLYELEMRKRNEEKQALEEGKSDVGWGSQIRSYVLDSSRIKDLRTGYEVGNTKAVLDGDLDGFIEASLKQGV

SEQ ID NO: 11550 - protein, 232 aa, Neisseria meningitidis; identical to SEQ ID NO: 9204

SEQ ID NO: 11551 - protein, 659 aa, Neisseria meningitidis
MEYMDLKSLLNFGLPNMPRTVIGLRKKAQRDGWQTRRRQGKGGGVEYALPAEIRAAIMKRQSDELAEKMPKTLPQVRPGTAMSAQALAEAAKLLNEKQRSVADARCAVVAAVLGIKYQYDCSAKAAVAQFLGLLAEGKLDAVTLGNLEKANDRSRSAKVGERTLDGWISAYLKAENATERLVALAPKTTKAVKPIESYGWLPMFMQFHNIPSAPKLAHSYRRFVQWAEAENMPVNDVPNLSMVRRVWDKLPLIMQERGRKTGAAYKSLLPYVKRDWGALKPNDVWIGDGHSFKAKVAHPVHGRPFKPEVTVIIDGCTRFVVGFSVSLAESCVAVSDALRIGVKHFGLPIIYYSDNGGGQTGKTIDHEITGITSRLGIRHETGIAGNPQGRGIIERWWKDNLIEMARQYETFAGAGMDSSTKNLMYRKMESAFNALEKGKDLTEEQQKYLKKLPGWSRFIADVVKCIDEYNNRPHGELPRHPDGGHYSPKAYREMRLEQDGIAPDMLSAQELATMFMPQEVRKVQRGWLDLFNNSYFSVELAEYHKDEVRVSYDLSDASAVNVFDMDGKFITKAQANGNTREAFPTARIDQLAEKRRKGKIKRAENAIKLANAEVNPALEQAAVWDELGHLGGNVIEAEYAVLPKTGTDDGIFLFEADRS

SEQ ID NO: 11552 - protein, 140 aa, Neisseria meningitidis; identical to SEQ ID NO: 2533

SEQ ID NO: 11553 - protein, 262 aa, Neisseria meningitidis; identical to SEQ ID NO: 8292

SEQ ID NO: 11554 - protein, 73 aa, Neisseria meningitidis; identical to SEQ ID NO: 9598

SEQ ID NO: 11555 - protein, 281 aa, Neisseria meningitidis; identical to SEQ ID NO: 8149

SEQ ID NO: 11556 - protein, 90 aa, Neisseria meningitidis; identical to SEQ ID NO: 3546

SEQ ID NO: 11557 - protein, 517 aa, Neisseria meningitidis
MTQANRVIIFDTTLRDGEQSPGAAMTKEEKIRVARQLEKLGVDIIEAGFAAASPGDFEAVNAIAKTITKSTVCSLSRAIERDIRQAGEAVAPAPKKRIHTFIATSPIHMEYKLKMKPKQVIEAAVKAVKIAREYTDDVEFSCEDALRSEIDFLAEICGAVIEAGATTINIPDTVGYSIPYKTEEFFRELIVKTPNGGKVVWSAHCHNDLGLAVANSLAALKGGARQVECTVNGLGERAGNASVEEIVMALKVRHDLFGLETGIDTTQIVPSSKLVSTITGYPVQPNKAIVGANAFSHESGIHQDGVLKHRETYEIMSAESVGWATNRLSLGKLSGRNAFKTKLADLGIELESEEALNAAFARFKELADKKREIFDEDLHALVSDEMGSMNAESYKFISQKISTETGEEPRADIVFSIKGEEKRASATGSGPVDAIFKAIESVAQSGATLQIYSVNAVTQGTESQGETSVRLARGNRVVNGQGADTDVLVATAKAYLSALSKLEFSAAKPKAQGSGTI

SEQ ID NO: 11558 - protein, 295 aa, Neisseria meningitidis; identical to SEQ ID NO: 2981

SEQ ID NO: 11559 - protein, 223 aa, Neisseria meningitidis; identical to SEQ ID NO: 2385

SEQ ID NO: 11560 - protein, 117 aa, Neisseria meningitidis; identical to SEQ ID NO: 1331

SEQ ID NO: 11561 - protein, 94 aa, Neisseria meningitidis
MFGGRLKNAPSITAKHFLKENIMKFINTCRKYGAKLAVVTAVPLALATQANATLPDTAKNALEAAKADGMEAGWIVVGIFAALFVFSIVKRVMK

SEQ ID NO: 11562 - protein, 284 aa, Neisseria meningitidis; identical to SEQ ID NO: 2008

SEQ ID NO: 11563 - protein, 185 aa, Neisseria meningitidis; identical to SEQ ID NO: 5086

SEQ ID NO: 11564 - protein, 89 aa, Neisseria meningitidis; identical to SEQ ID NO: 1367

SEQ ID NO: 11565 - protein, 259 aa, Neisseria meningitidis; identical to SEQ ID NO: 2706

SEQ ID NO: 11566 - protein, 313 aa, Neisseria meningitidis
MRRKMLNVPKGNYDGMKGFTIIEFLVAGMLSMIVLMAVGSSYFTSRKLNDAANERLSEQQDLRNAATLIVRDARMAGSFGCFNMSEHPAIDVISDTTQQNSPFSLKRNGIDKLIPIAESSNINYQNFFQFGSALIFQYGIDDVNASTATTVVSSCAAISKPGKQIPTLEDAKKELKIPDQDKEQNGNIARQRHVVNAYAVGKIADEEGLFRFQLDDKGKWGNPQLLVKKVRRMKVRYIYVFGCPEDDDAGKEETFKYTDKFDSSTNAVTPAGVEVLLSSGTDTKIAASSDNHIYAYRIDATIRGGNVCANRTL

SEQ ID NO: 11567 - protein, 336 aa, Neisseria meningitidis; identical to SEQ ID NO: 1943

SEQ ID NO: 11568 - protein, 153 aa, Neisseria meningitidis; identical to SEQ ID NO: 8704

SEQ ID NO: 11569 - protein, 210 aa, Neisseria meningitidis; identical to SEQ ID NO: 5238

SEQ ID NO: 11570 - protein, 619 aa, Neisseria meningitidis; identical to SEQ ID NO: 1938

SEQ ID NO: 11571 - protein, 292 aa, Neisseria meningitidis; identical to SEQ ID NO: 76

SEQ ID NO: 11572 - protein, 409 aa, Neisseria meningitidis
MAFGKSLFHAIGRVSLVRQIAAGLALGIVIGSVSPQLGLAAGLFGSLFVGALKAVAPVLVFILVAATIAQHQKGNKAHIRPIIVLYLIGTFSAALTAVIAGMVFPTHIVLAGAGDVSAAPPSGIVEVLKSLLMNLVANPINAIANANYIGILAWALVLGAALRNHGSDVTRQVVADLAEAVSTVVKWIIRFAPLGIFGLVSSTIAETGFGALAGYAKLLAVLLGCMAFIALVVNPAIVWWKIRRNPYPLVFTCLRESGVYAFFTRSSAANIPVNMALAKKLGLHEDTYSISIPLGATVNMGGAAITITVLAMAAAYTQGIQVDFATALLLSLVATVSACGASGVAGGSLLLIPLACSLFGISNDVAMQVVAVGFIIGVIQDSAETALNSSTDVLFTAAADLGRQRNRAE

SEQ ID NO: 11573 - protein, 197 aa, Neisseria meningitidis; identical to SEQ ID NO: 2603

SEQ ID NO: 11574 - protein, 196 aa, Neisseria meningitidis
MLLFIDNYDSFTYNIVQYFTELGQEVAVRRNDDITLEEIEALNPQYLVIGPGPCSPKEAGISVAAMRHFAGRLPIMGVCLGHQTIGEAFGGRIVRAKTLMHGKVSPVYHSGKGMFKGLPNPVTCTRYHSLVIERGTLPECLEITAWTEDGEIMGVRHKEYAVEGVQFHPEALLTEYGHDMLNNFFIEFQNFKPQKI

SEQ ID NO: 11575 - protein, 220 aa, Neisseria meningitidis; identical to SEQ ID NO: 8978

SEQ ID NO: 11576 - protein, 441 aa, Neisseria meningitidis; identical to SEQ ID NO: 8312

SEQ ID NO: 11577 - protein, 242 aa, Neisseria meningitidis; identical to SEQ ID NO: 201

SEQ ID NO: 11578 - protein, 45 aa, Neisseria meningitidis
MIGLWSAKSREASEQADLAAFEFAEGELANYQEMLKRHLQTKSVE

SEQ ID NO: 11579 - protein, 318 aa, Neisseria meningitidis
VMGFLIGLSRNLTRFTALVILLASAVAFIGPASFAWVKGDVQVLVLGIIMLGMGMTLGREDYRILAQRPLDVFIGAAAQYTVMPLLAIGIAKLFDLSPGLTLGLVLVGTCPGGVSSNIMSFLAKGDVAFSVGMTTVSTVLAPAVTPLWMTCLVGQTVDMDGWGMFRFMLLVTLLPVVLGSAANILLHGKHWFENVRAVMPGVAVLAFACIVGGVASVHGHRFAESALVMVLAIAVHNIAGYVSGYYAAALFGMDTAKKRTLAIEVGVQNAGLATGLSAKFFPGNPESAVAAAVACVWHSVSGTVLGNLFALWDKRRDA

SEQ ID NO: 11580 - protein, 157 aa, Neisseria meningitidis
MLSAESLKQIDTELAKYPADQRRSAIMGALRIAQTEKGWLAPETIAFVADYIGITPAQAYEVATFYNMYDLEPVGKYKLTVCTNLPCALRGGMATGEYLKQRLGIGYGETTPDGKFTLVEGECMGACGDAPVMLVNNHSMCSFMTEEAIEKKLAELE

SEQ ID NO: 11581 - protein, 122 aa, Neisseria meningitidis; identical to SEQ ID NO: 5231

SEQ ID NO: 11582 - protein, 99 aa, Neisseria meningitidis; identical to SEQ ID NO: 3688

SEQ ID NO: 11583 - protein, 270 aa, Neisseria meningitidis
MDKIRVAAVQMVSGVSPETNVAAMKRLVARAAEQGVDWVLLPEYWVLMGANDTDKLALAEPLGGGRFQTALSETAKECGVVLFGGTVPLQSPEAGKVMNTLLVYGRDGKRTGLYHKMHLFGFSGLGERYAEADTIRAGGEVPHLSAEGVPVAAGICYDVRFPEFFRRQLPFDVLMLPAAFTHTTGKAHWELLLRARAVENQCYVVAAAQGGLHENGRRTFGHSMIVDPWGDVLDVLPEGEGIVTADIDANRLNSVRNRLPALKYRVLDAV

SEQ ID NO: 11584 - protein, 238 aa, Neisseria meningitidis
VIMLFEGLPCLAVWCKNRLSAVLPVGGLNVSENLLEIETHPFDSVLPPKAAVMMMGTFPPKEDKRAMQFHYPNFQNDMWRVYGLVFFGDADYFKVPSNGEAAHSEKAFDAEKIKAFLHERGIASCPTVLKAVRQHGNASDKFLKVVETVDLAAVLAKIPECRHICTTGGKATEILLDIQGGGIKMPKTGETVPFPFAGRDLTLTRLPSTSRAYPLSLAKKAAAYRAFFEMAGLCEKQL

SEQ ID NO: 11585 - protein, 658 aa, Neisseria meningitidis; identical to SEQ ID NO: 9433

SEQ ID NO: 11586 - protein, 288 aa, Neisseria meningitidis; identical to SEQ ID NO: 1688

SEQ ID NO: 11587 - protein, 443 aa, Neisseria meningitidis; identical to SEQ ID NO: 279

SEQ ID NO: 11588 - protein, 157 aa, Neisseria meningitidis; identical to SEQ ID NO: 8174

SEQ ID NO: 11589 - protein, 273 aa, Neisseria meningitidis; identical to SEQ ID NO: 8755

SEQ ID NO: 11590 - protein, 143 aa, Neisseria meningitidis
MNLSDFAPLLIQMKRQQDKKMLFEENPIDEHFAEYDRRTGEIRLSGRHFNKPVLLHRDSAGLSKWQSLSELTPDNLLSDVKADDYPEILIIGTGAAQEFIHPKIMADFSRIGIGVECMNTDSAFRTLVFLHSEGRRAWAWLQP

SEQ ID NO: 11591 - protein, 79 aa, Neisseria meningitidis
VRDSMKNWKQFTFFVILVIACYQVLYFLSDMFLLDYINKYSWNLNFIQGTLNFFSIYLPYVFVSRIFRNTNQEKEYKND

SEQ ID NO: 11592 - protein, 187 aa, Neisseria meningitidis; identical to SEQ ID NO: 3115

SEQ ID NO: 11593 - protein, 244 aa, Neisseria meningitidis
MLSARYLHLHEALGLGPMWLKQAAAVLPPKNTPATPAQARPQTVRAAPIRPSQPHNGQARLETMKALETAAVPTRKPAPETETPLPGLSDGIAPVPAASGITKLAVVSLCPPIEDAVYGQLFHGKAGVLLDNILKAVGLDAAYVHKTSWVKTAAVGNPMPSEQAVANALGQIARELDGCRAPAVLFLGQAFVQPERQTMIETLCGSRPFFIIDHPARLLRQPELKARNWQVLKQLKHALQAGGS

SEQ ID NO: 11594 - protein, 478 aa, Neisseria meningitidis; identical to SEQ ID NO: 8016

SEQ ID NO: 11595 - protein, 242 aa, Neisseria meningitidis; identical to SEQ ID NO: 8064

SEQ ID NO: 11596 - protein, 167 aa, Neisseria meningitidis; identical to SEQ ID NO: 2196

SEQ ID NO: 11597 - protein, 875 aa, Neisseria meningitidis
MPAGRLPRRCPMMTKFTDCTRSNRIQPPTHRGYILKNNRQIKLIAASVAVAASFQAHAGLGGLNIQSNLDEPFSGSITVTGEEAKALLGGGSVTVSEKGLTAKVHKLGDKAVIAVSSEQAVRDPVLVFRIGAGAQVREYTAILDPVGYSPKTKSALSDGKTHRKTAPTAESQENQNAKALRKTDKKDSANAAVKPAYNGKTHTVRKGETVKQIAAAIRPKHLTLEQVADALLKANPNVSAHGRLRAGSVLHIPNLNRIKAEQPKPQTAKPKAETASMPSEPSKQATVEKPVEKPEAKVAAPEAKAEKPAVRPEPVPAANTAASETAAESAPQEAAASAIDTPTDETGNAVSEPVEQVSAEEETESGLFDGLFGGSYTLLLAGGGAALIALLLLLRLAQSKRARRTEESVPEEEPDLDDAADDGIEITFAEVETPATPEPAPKNDVNDTLALDGESEEELSAKQTFDVETDTPSNRIDLDFDSLAAAQNGILSGALTQDEETQKRADADWNAIESTDSVYEPETFNPYNPVEIVIDTPEPESVAQTAENKPETVDTDFSDNLPSNNHIGTEETASAKPASPSGLAGFLKASSPETILEKTVAEVQTPEELHDFLKVYETDAVAETAPETPDFNAAADDLSALLQPAEAPSVEENITETVAETPDFNATADDLSALLQPSKVPAVEENAAETVADDLSALLQPAEAPAVEENVTETVAETPDFNATADDLSALLQPSEVPAVEENAAETVADDLSALLQPAEAPAVEENAAEITLETPDSNTSEADALPDFLKDGEEETVDWSIYLSEENIPNNADTSFPSESVGSDAPSEAKYDLAEMYLEIGDRDAAAETVQKLLEEAEGDVLKRAQALAQELGI

SEQ ID NO: 11598 - protein, 518 aa, Neisseria meningitidis; identical to SEQ ID NO: 9387

SEQ ID NO: 11599 - protein, 94 aa, Neisseria meningitidis
GCNLQSEFVACGICGMNVWDIWGRMVEIYHKYKKPCLVLAVDFVMGMVFIEPNEELCIGRCYAPMSESPDFANAVAMAVAMICIVWIAVLSMTD

SEQ ID NO: 11600 - protein, 92 aa, Neisseria meningitidis; identical to SEQ ID NO: 1005

SEQ ID NO: 11601 - protein, 107 aa, Neisseria meningitidis; identical to SEQ ID NO: 875

SEQ ID NO: 11602 - protein, 544 aa, Neisseria meningitidis; identical to SEQ ID NO: 3460

SEQ ID NO: 11603 - protein, 703 aa, Neisseria meningitidis
MKISFHLALLPTLIIASFPVAAADTQDNGEHYTATLPTVSVVGQSDTSVLKGYINYDEAAVTRNGQLIKETPQTIDTLNIQKNKNYGTNDLSSILEGNAGIDAAYDMRGESIFLRGFQADASDIYRDGVRESGQVRRSTANIERVEILKGPSSVLYGRTNGGGVINMVSKYANFKQSRNIGAVYGSWANRSLNMDINEVLNKNVAIRLTGEVGRANSFRSGIDSKNVMVSPSITVKLDNGLKWTGQYTYDNVERTPDRSPTKSVYDRFGLPYRMGFAHRNDFVKDKLQVWRSDLEYAFNDKWRAQWQLAHRTAAQDFDHFYAGSENGNLIKRNYAWQQTDNKTLSSNLTLNGDYTIGRFENHLTVGMDYSREHRNPTLGFSSAFSASINPYDRASWPASGRLQPILTQNRHKADAYGIFVQNIFSATPDLKFVLGGRYDKYTFNSENKLTGSSRQYSGHSFSPNIGAVWNINPVHTLYASYNKGFAPYGGRGGYLSINTSSSAVFNADPEYTRQYETGVKSSWLDDRLSTTLSAYQIERFNIRYRPDEQNDPYTWAVGGKHRSRGVELSAIGQIIPKKLYLRGSLGVMQAKVVEDKENPDRVGIHLNNTSNVTGNLFFRYTPTENLYGEIGVTGTGKRYGYNSRNKEVTTLPGFARVDAMLGWNHKNVNITFAAANLLNQKYWRSDAMPGAPRTYTARVNYSF

SEQ ID NO: 11604 - protein, 106 aa, Neisseria meningitidis; identical to SEQ ID NO: 853

SEQ ID NO: 11605 - protein, 123 aa, Neisseria meningitidis; identical to SEQ ID NO: 3099

SEQ ID NO: 11606 - protein, 231 aa, Neisseria meningitidis; identical to SEQ ID NO: 2473

SEQ ID NO: 11607 - protein, 414 aa, Neisseria meningitidis; identical to SEQ ID NO: 9499

SEQ ID NO: 11608 - protein, 319 aa, Neisseria meningitidis
MMKVLFIADPMASFKTYKDTTYAMMREMAKRGWRLFHTLSGELSVKNGLVVADASAFEFLGAQDDHDKNWFAAADKVQTALKAFDAVIMRTDPPFDMQYLYATQLLTLAEQQGAKVFNSGQAMRDFNEKLAILNFSRFTAPTLVTTRSADVRAFLKEHGDIIIKPLDGMGGMGIFRLTEKDPNIGSILETLMRLDSRTIMAQRYIPEIVHGDKRILIIGGEVVPYALARIPQNGETRGNLAAGGRGVAQELDGRDREIAETLAPELKRRGILLAGLDVIGSNLTEVNVTSPTGFQEIMKQKGFDVAAMFADAVAAWSVR

SEQ ID NO: 11609 - protein, 94 aa, Neisseria meningitidis; identical to SEQ ID NO: 10479

SEQ ID NO: 11610 - protein, 203 aa, Neisseria meningitidis; identical to SEQ ID NO: 2845

SEQ ID NO: 11611 - protein, 291 aa, Neisseria meningitidis; identical to SEQ ID NO: 827

SEQ ID NO: 11612 - protein, 238 aa, Neisseria meningitidis; identical to SEQ ID NO: 945

SEQ ID NO: 11613 - protein, 196 aa, Neisseria meningitidis; identical to SEQ ID NO: 1629

SEQ ID NO: 11614 - protein, 263 aa, Neisseria meningitidis; identical to SEQ ID NO: 3390

SEQ ID NO: 11615 - protein, 383 aa, Neisseria meningitidis
LTDKSCNLDISIRQERKKTLIFSFFSGAGFLDLGFELSGFDIAFVNEVHPPFLEAYKYSRSRMDIPKPKYGYFKGSIDECLYAEKAKDLAGWVKKEKQNGIIVGFIGGPPCPDFSIAGKNKGKDGENGKLSQSYVDLICKNQPDFFVFENVKGLYRTAKHREFFNALKRQLSDFGYVCTEKLINAIEYGVPQDRERIILVGFLSQHVDALQKFDWDAHISFPDALEKDWPTTEEVGRVVSQPANIYPELTVQYWFNRNGVDTHPNASKHFQPRAGLEKFQTISEGDDKKKSYKRLHRWRYSPTAAYGNNEVHIHPYLPRRISAAEALAIQSLPKEFELPDNMTLSNMFKTIGNGVPFLAAKGIAMTLKSYLENHYERTKTDGC

SEQ ID NO: 11616 - protein, 192 aa, Neisseria meningitidis; identical to SEQ ID NO: 5124

SEQ ID NO: 11617 - protein, 220 aa, Neisseria meningitidis; identical to SEQ ID NO: 5269

SEQ ID NO: 11618 - protein, 548 aa, Neisseria meningitidis; identical to SEQ ID NO: 9419

SEQ ID NO: 11619 - protein, 255 aa, Neisseria meningitidis
VPERNTAVQPETSAQYQHRFAQAIRGGEAADGLPQDRLNVYIRLIRNNIHSFIDRCYTETRQYFDSEEWSRLKEGFVRDAHAQTPYFQEIPGEFLQYCQSLPLLDGILALMDFEYTQLLAEVAQIPDIPDIHYSNDSKYTPSPAAFIRQYRYDVTDDLHEAETALLIWRNAEDDVMYQTLDGFDMMLLEIMGSSALSFDTLAQTLVEFMPEDDNWKNILLGKWSGWTEQRIIIPSLSAISENMEGNSPGQNHLSA

SEQ ID NO: 11620 - protein, 166 aa, Neisseria meningitidis; identical to SEQ ID NO: 3831

SEQ ID NO: 11621 - protein, 266 aa, Neisseria meningitidis
MNPAPKNLLFSSLLFSSLLFSSLLFSSAAQAASEDGSRSPYYVQADLAYAAERITHDYPKATGANNTSTVSDYFRNIRAHSIHPRVSVGYDFGDWRIAADYASYRKWNNNKYSVNTKELENKHNNKKDLKTENQENGTFHAASSLGLSAIYDFKLNDKFKPYIGARVAYGHVRHSIDSTKKTTEVVTSTHGGADTKPTIYNGESTQNAYHESHSIRRLGLGVVAGVGFDITPKLTLDTGYRYHNWGRLENTRFKTHEVSLGMRYHF

SEQ ID NO: 11622 - protein, 405 aa, Neisseria meningitidis; identical to SEQ ID NO: 8083

SEQ ID NO: 11623 - protein, 477 aa, Neisseria meningitidis
MNEYSQLIKHPDISLSPISDSIGIGNPATGEILAYVRNTGSDKLKNLIQKAAAAQKLWAAKTALERADILWRWYFLVKENKEALARLMTMEQGKSLTEARGEIDYAASFVRWFAEEARRIDGDVLTSVKASQKLVVLKQPVGVTAAITPWNFPSAMIARKAAPALAVGCAMIVKPASLTPLSAYALASLAYEAGIPQDLLPVVSGSASEIGHEFATNPIIRKISFTGSTEVGAKIFADSAADIKKLSLELGGNAPFIVFDDADLDKAVEGALASKFRNSGQTCVCTNRVYAQSAIYDEFCRKLSEKAAALKLGNGLEDGVNQGPLIEEKAVEKVEQHIADALAKGASCLTGGKRSALGGTFFEPTVLSGVTAQMAVAREETFGPLCPVFRFETEAEVIEAANNTEYGLAAYLFTADTARQWRVGEALEYGMVGINTGLISNEAAPFGGVKRSGLGREGSKYGADEYLELKYLCMDVG

SEQ ID NO: 11624 - protein, 289 aa, Neisseria meningitidis
MKFIFFVLYVLQFLPFALLHKLADLTGLLAYLLVKPRRRIGEINLAKCFPEWDGKKRETVLKQHFKHMAKLMLEYGLYWYAPAGRLKSLVRYRNKHYLDDALAAGEKVIILYPHFTAFEMAVYALNQDVPLISMYSHQKNKILDAQILKGRNRYDNVFLIGRTEGLRALVKQFRKSSAPFLYLPDQDFGRNDSVFVDFFGIQTATITGLSRIAALANAKVIPAIPVREADNTVTLHFYPAWESFPSEDAQADAQRMNRFIEERVREHPEQYFWLHKRFKTRPEGSPDFY

SEQ ID NO: 11625 - protein, 279 aa, Neisseria meningitidis; identical to SEQ ID NO: 2627

SEQ ID NO: 11626 - protein, 491 aa, Neisseria meningitidis; identical to SEQ ID NO: 2986

SEQ ID NO: 11627 - protein, 238 aa, Neisseria meningitidis; identical to SEQ ID NO: 4111

SEQ ID NO: 11628 - protein, 612 aa, Neisseria meningitidis
MCGIVGAIRAHHNVVDFLTDGLKRLEYRGYDSSGIAVNTDGKIKRVRRVGRVQLMEDAAREKGISGGIGIGHTRWATHGGVTEPNAHPHISGGMIAVVHNGIIENFESERKRLEGLGYRFESQTDTEVIAHSINHEYAQNGGRLFEAVQEAVKRFHGAYAIAVIAQDKPDELVVARMGCPLLVALGDDETFIASDVSAVIAFTRRVAYLEDGDIALLASDGIKRLTDKSGLPAERKVKVSELSLASLELGPYSHFMQKEIHEQPRAIADTAEVFLDGGFIPENFGKNAKSVFESIRSVKILACGTSYYAALTAKYWLESIAKIPADVEIASEYRYRSVIADPDQLVITISQSGETLDTMEALKYAKSLGHRHSLSICNVMESALPRESSLVLYTRAGAEIGVASTKAFTTQLVALFGLAVTLAKVRGLVSEEDEARYTEELRQLPGSVQHALNLEPQIAAWAQQFAKKTSALFLGRGIHYPIALEGALKLKEITYIHAEAYPAGELKHGPLALVDENMPVVVIAPNDSLLDKVKANMQEVGARGGELFVFADLDSNFNATKGVHVIRAPRHVGKLSPVVHTIPVQLLAYHTALARGTDVDKPRNLAKSVTVE

SEQ ID NO: 11629 - protein, 438 aa, Neisseria meningitidis
MMLTFIGLLIIGVIVWLLLTEKVSPIIALILVPLFGALLAGFDVSQLKEFYSGGTKSVMQIVIMFMFSILFFGIMNDVGLFRPMIGGLIKLTRGNIVAVSVGTVLVSVVAQLDGAGATTFLLVVPALLPLYKRLHMNPYLLFLLLTSSAGLINLLPWGGPTGRVASVLGADVGELYKPLLTVQIIGVVFILALSLLLGVREKRRIVRELGALPAVADLIKPVPLSEEEQKLARPKLFWWNVLLFLAAMSLLFSGIFPPGYVFMLAATAALLLNYRSPQEQMERIYAHAGGAVMMASIILAAGTFLGILKGAGMLDAISKDLVHILPDALLPYLHIAIGVLGIPLELVLSTDAYYFGLFPIVEQITSQAGVAPEAAGYAMLIGSIVGTFVTPLSPALWMGLGLAKLSMGKHIRYSFFWAWGLSLAILASSIAAGIVPLP

SEQ ID NO: 11630 - protein, 277 aa, Neisseria meningitidis
MFISRLPRTFAIVLTGASMAVAGMIMQILMRNRFVEPSMAGAGQSAALGLLLMSLLLPAAPLPVKMSVAAVAALIGMLVFMMLIRRLPPTAQLMVPLVGIIFGGVIEAVATFVAYEFEMLQMLGVWQQGDFSSVLLGRYELLWITGGLAVFAYLIADRLTILGLGETVSVNLGLNRTAVLWSGLIIVALITSLVIVTVGNIPFVGLVVPNIISRLIGDRLRQSLPAVALLGASLVLLCDIIGRVIVFPFEIPVSTVFGVLGTALFLWLLLRKPAHAV

SEQ ID NO: 11631 - protein, 512 aa, Neisseria meningitidis; identical to SEQ ID NO: 3339

SEQ ID NO: 11632 - protein, 356 aa, Neisseria meningitidis; identical to SEQ ID NO: 2047

SEQ ID NO: 11633 - protein, 590 aa, Neisseria meningitidis; identical to SEQ ID NO: 8127

SEQ ID NO: 11634 - protein, 395 aa, Neisseria meningitidis; identical to SEQ ID NO: 10755

SEQ ID NO: 11635 - protein, 916 aa, Neisseria meningitidis; identical to SEQ ID NO: 3146

SEQ ID NO: 11636 - protein, 374 aa, Neisseria meningitidis
MFKKFKPVLLSFFALVFAFWLGTGIAYEINPRWFLSDTATENPNAFVAKLARLFRNADRAVVIVKESMRTEESLAETVDDGPLQSEKDYLALAIRLSRLKEKAKWFHVTEQEHGKEVWLDYHIGEGGLVAVSLSQRSPEAFVNAEYLYRNDRPFSVNVYGGTAHGENYETTGEYRVVWQPDGSVFDASGRGKIGEDVYEHCLGCYQMAQVYLAKYRDVANDEQKVWDFREESNRIASDSRDYVFYQNMRELMPRGMKANSLVVGYDADGLPQKVYWSFDNGKKRQSFEYYLKNGNLFIAQSSTVALKADGVTADIQTYHAQQTWYLDGGRIIREEKQGDRLPDFPLNLENLEKEVRRYAEAAARRSGGRRDLSH

SEQ ID NO: 11637 - protein, 522 aa, Neisseria meningitidis; identical to SEQ ID NO: 739

SEQ ID NO: 11638 - protein, 791 aa, Neisseria meningitidis
MNKNIKSLNLREKDPFLSREKQRYEHPLPSREWIIELLERKGVPSKIESLARELSITEDEYVFFERRLKAMARDGQVLINRRGAVCAADKLDLVKCRVEAHKDGFGFAVPLTPAKDGDFVLYERQMRGIMHGDIVTVRPAGMDRRGRREGTVLDIVERAQSKVVGRFYMDRGVAILEPEDKRLNQSIVLEPDGVARFKPESGQVIVGEIEVYPEQNRPAVAKIIEVLGDYADSGMEIEIAVRKHHLPHQFSEACAKAVKKIPDHVRKSDLKGRVDLRDLPLVTIDGETARDFDDAVFAEKIGRNYRLVVAIADVSHYVRPDDAIDTDAQERSTSVYFPRRVIPMLPENLSNGICSLNPNVERLCMVCDMVITYAGNIKEYRFYPAVMRSHARLTYNQVWKWLSGGIGHPFKAQIDTLYKLFKILQKKRFERGAVEFDSIETQMLFDDNGKIEKIVPVVRNDAHKLIEECMLAANVCAADFLLKNKHTALFRNHLGPTPEKLAALREQFGLLGLQLGGGDNPSPKDYAALAGQFKGRPDAELLQVMMLRSMQQAVYEPHCDGHFGLAYEAYAHFTSPIRRYPDLTVHRAIKAVLNQQTYTPKKSWQALGVHTSFCERRADDASRDVENWLKTYYMRDKVGEIFEGKISGVANFGIFVTLDDIHIDGLVHISDLGEDYFNFRPEIMAIEGERSGIRFNMGDRVAIKVARADLDDGKIDFVLIAEGSGRGRKVKSSASAKPAGTAGKGKPKTAAGKKTARGGKVRGRGASAAAESGKKAKKPVPIKVKKRKGKS

SEQ ID NO: 11639 - protein, 210 aa, Neisseria meningitidis; identical to SEQ ID NO: 5679

SEQ ID NO: 11640 - protein, 307 aa, Neisseria meningitidis
MENQRPLLGFALALLAAMTWGTLPIAVRQVLKFVDAPTLVWVRFTVAAAVLFVLLALGGRLPKWRDFSWCSFRLLLLGVAGISANFVLIAQGLHYISPTTTQVLWQISPFTMIVVGVLVFKDRMTAAQKIGLVLLLAGLLMFFNDKFGELSGLGAYAKGVLLCAAGSMAWVCYAVAQKLLSAQFGPQQILLLIYAASAAVFLPFAKPAHIGSLDGTLAWVCFAYCCLNTLIGYGSFGEALKHWEASKVSAVTTLLPVFTVIFSLLGHYVMPDTFAAPDMNGLGYVGALVVVGGAVTAAVGDRLFKRR

SEQ ID NO: 11641 - protein, 658 aa, Neisseria meningitidis
VRPNANRRHLANRKQTMSKNQNHEEYQDDARPLTIEEQRARLRQLIIMGKERGYITYSEINDALPDDMSDADQIDNIVSMISGLGIQVTEHAPDAEDILLSDNAAVTDDDAVEEAEAALSSADSEFGRTTDPVRMYMREMGQVDLLTREDEIIIAKKIENALKNMVQAISACPGSIAEILELIEKIRKDEIRVDEVVEAIIDPNEVLLNELGLGHLETTAPEKPSNDNSDENEDDEESEEDADEISAANLAELKQKVIGHFAQIEKDYKKMIGRLEKHHSRHKDYLAYRDAIANKLLEVRFATRQIDSLSSSLRGKVENIRKLEREIRDICLDRVHMERDYFIQNFLPEITNLEWIEEEIAKGRVWSDALDRFRHAILEKQTELADMEKETRISIEELKEINKNMVSSEKETAAAKQEMIQANLRLVISIAKKYTNRGLQFLDLIQEGNIGLMKAVDKFEYRRGYKFSTYATWWIRQAITRSIADQARTIRIPVHMIETINKMNRISRQHLQETGEEPDSAKLAELMQMPEDKIRKIMKIAKEPISMETPIGDDDDSHLGDFIEDANNVAPADAAMYTSLHEVTKEILESLTPREAKVLRMRFGIDMNTDHTLEEVGRQFDVTRERIRQIEAKALRKLRHPTRSDRLRSFLDSEDSKL

SEQ ID NO: 11642 - protein, 592 aa, Neisseria meningitidis; identical to SEQ ID NO: 9091

SEQ ID NO: 11643 - protein, 133 aa, Neisseria meningitidis; identical to SEQ ID NO: 2967

SEQ ID NO: 11644 - protein, 240 aa, Neisseria meningitidis; identical to SEQ ID NO: 8752

SEQ ID NO: 11645 - protein, 765 aa, Neisseria meningitidis; identical to SEQ ID NO: 2833

SEQ ID NO: 11646 - protein, 186 aa, Neisseria meningitidis; identical to SEQ ID NO: 2093

SEQ ID NO: 11647 - protein, 207 aa, Neisseria meningitidis; identical to SEQ ID NO: 1132

SEQ ID NO: 11648 - protein, 194 aa, Neisseria meningitidis
MPKSPPPKPTPFPSPAKIEVDEKGQINGQTTPSKDSDARWIKKNGLYKLGYKQHTRTDAEGYIEKLHITPANAHECKHLSPLLEGLPEGTTVYADKGYDSAENRQHLEEHQLQDGIMRKACRNRPLSEAQTKRNRYLSKTRYVVEQSFGTLHRKFRYARAAYFGLIKVSAQSHLKAMCLNLLKAANRLSAPAAA

SEQ ID NO: 11649 - protein, 269 aa, Neisseria meningitidis; identical to SEQ ID NO: 1709

SEQ ID NO: 11650 - protein, 143 aa, Neisseria meningitidis; identical to SEQ ID NO: 2432

SEQ ID NO: 11651 - protein, 270 aa, Neisseria meningitidis; identical to SEQ ID NO: 3098

SEQ ID NO: 11652 - protein, 355 aa, Neisseria meningitidis; identical to SEQ ID NO: 10134

SEQ ID NO: 11653 - protein, 504 aa, Neisseria meningitidis; identical to SEQ ID NO: 9282

SEQ ID NO: 11654 - protein, 208 aa, Neisseria meningitidis; identical to SEQ ID NO: 8964

SEQ ID NO: 11655 - protein, 146 aa, Neisseria meningitidis
VNIRRAVYADCAALAALDAVCNPSAWTQRQFESALVSLSEQVFLAEKDGGLAAFIVWQNLPDESELHLIATAPECRRQGIASALLEYWFAHLPEGTQRLLLEVRAGNTAAQALYAAHGFSIAGRRKNYYRATDGQTEDAVLMEKIC

SEQ ID NO: 11656 - protein, 318 aa, Neisseria meningitidis
LLIHYIDIAKRNFVIAVSSLSKTKTETNNPKGIAHTIEYLKKHKVALVVTESTGGLEIPAAKAIRRAGIAVIIANPRQTHQFAQSQPLTKTDAKDAKMPAFFAQMTAQKEDSQTMPYQPPTEAEEVLEALVNRRNQPADMRTAEKNRLHQVHETQVGSVKQLIAHFDRLIDELDKQIDDHTHTHFDGKAQVAEQIKGIGSITTATLMVMLPELGRLSHKRIAGLAGIAPHPRESGETKFKSRCFGGRSAVRKALYMATVAATRFEPLIRDFYQRLLSEGKPYKVAVTACMRKLLTISNARMRDYFAENDTAENGIRTA

SEQ ID NO: 11657 - protein, 1010 aa, Neisseria meningitidis
MFWIVLIVILLLALAGLFFVRAQSEREWMREVSAWQEKKGEKQAELPEIKDGMPDFPELALMLFHAVKTAVYWLFVGVVRFCRNYLAHESEPDRPVPPASANRADVPNASDGYSDSGNGTEEAETEAAEAAEEEAADTEDIATAVIDNRRIPFDRSIAEGLMPSESEISPVRPVFKEITLEEATRALNGAALRETKKRYIDAFEKNETAVPKVRVSDTPMEGLQIIGLDDPVLQRTYSRMFDADKEAFSESADYGFEPYFEKQHPSAFSAVKAENARNAPFRRHAGQAEAKSPDVSQGQSVSDGTAVRDARRRVSVNLKEPNKATVSAEARISRLIPESRTVVGKRDVEMPSETENVFTETVSSVGYGGPVYDETADIHIEEPAAPDAWVVEPPEVPKVPMPAIDIPPPPPVSEIYNRTYEPPSGFEQAQRSRIAETDHLADDVLNGGWQEETAAIADDGSEGAAERSSGQYLSETEAFGHDSRAVCPFEDVPSERPSCRVSDTEADEGAFQSEETDAVYEHLPTTDLLLPPLFNPGATQTEEELLENSITIEEKLAEFKVKVKVVDSYSGPVITRYEIEPDVGVRGNSVLNLEKDLARSLGVASIRVVETIPGKTCMGLELPNPKRQMIRLSEIFNSPEFAESKSKLTLALGQDITGQPVVTDLGKAPHLLVAGTTGSGKSVGVNAMILSMLFKAAPEDVRMIMIDPKMLELSIYEGIPHLLAPVVTDMKLAANALNWCVNEMEKRYRLMSFMGVRNLAGFNQKIAEAAARGEKIGNPFSLTPDNPEPLEKLPFIVVVVDEFADLMMTAGKKIEELIARLAQKARAAGIHLILATQRPSVDVITGLIKANIPTRIAFQVSSKIDSRTILDQMGAENLLGQGDMLFLPPGTAYPQRVHGAFASDEEVHRVVEYLKQFGEPDYVDDILSGGGSEELPGIGRSGDGETDPMYDEAVSVVLKTRKASISGVQRTLRIGYNRAARLIDQMEAEGIVSAPEHNGNRTILVPLDNA

SEQ ID NO: 11658 - protein, 245 aa, Neisseria meningitidis; identical to SEQ ID NO: 4045

SEQ ID NO: 11659 - protein, 929 aa, Neisseria meningitidis
MTDYSKTVNLLESPFPMRGNLAKREPAWLKSWYEQKRYQKLREIAKGRPKFILHDGPPYANGDIHIGHAVNKILKDIIIRSKTQAGFDAPYVPGWDCHGLPIEVMVEKLHGKDMPKARFRELCREYAAEQVACQKKDFIRLGVLGDWDKPYLTMDFKTEADTVRMLGEIYKSGYLYRGAKPVQFCLDCGSSLAEAEVEYKDKVSPAIDVGYPFKDTAALAAAFGLAGIEGKAFAVIWTTTPWTLPASQAVSAGADVVYQLIDTPKGKLVLAKDLAEDALKRYGFSDGIAILAETTGDKLENLHMNHPFLERDIPMLNGDHVTTDAGTGLVHTAPAHGLEDYAVCNKYGIELYNPVNAEGKYISETPRVAGMSVWEANPVILQWLEETGNLLASSKIEHSYAHCWRHKTPLIYRATGQWFVGMDKAGADGKTLRDKAIKAVDDTEFFPSWGRARLEAMIEGRPDWVVSRQRYWGTPMTFFVHKETGELHPNSAELLEKVAQRIEEKGIEAWFSLDKGELLSAEDCEHYDKLSDTMDVWFDSGSTHYSVVKQREELDWPADLYLEGSDQHRGWFQSSMLTGCASSMGRAPYKQLLTHGFVVDQNGRKMSKSIGNVVAPQEVYNEFGADILRLWAASTDYSGELAISKEILKRVTESYRRIRNTLSFLFANLSDFNPIEDAVQQADMVEIDRYAVVLARQLQERLAGDYYPRYTFHFAVKDIVSFCSEDLGAFYLDILKDRLYTTKADSRARRSAQTALYHITRSLVLLIAPILCFTGEEAWDIIGGGEEDSVLFHTWHEFPTINEKAEAELVKKWTAIREAREAVTAAIEPLRADKTVGSSLQAEAEITAPEEMAGYLNALGEELRFALLVSKAEVKVGSELAVAAKASDGEKCERCWHYTRDVGAVAGYETVCKRCAENVGREGETRHYA

SEQ ID NO: 11660 - protein, 371 aa, Neisseria meningitidis
LLIHYIDIAKRNFVIAVSSLSKTKTETNNPKGIAHTIEYLKKHKVALVVTESTGGLEIPAAKAIRRAGIAVIIANPRQTHQFAQSQPLTKTDAKDAKMPAFFAQMTAQKEDSQTMPYQPPTEAEEVLEALVNRRNQSADMRTAEKNRLHVHETQVGSVKQLIAHFDRLIDELDKQIDDHTHTHFDGKAQVAEQIKGIGSITTATLMAMLPELGRLSHKRIASLAGIAPHPRESGETKFKSRCFGGKSAVRKALYMATVAATRFEPLIRDFYQRLLSEGKPYKVAVTACMRKLLETFAKFLSLPTAETQTQVFSCFRPKYRLILPKYPLNPAQIPDNQASVLPFRRQRAHLACWRLSTGSNTSPSGGFAHSL

SEQ ID NO: 11661 - protein, 109 aa, Neisseria meningitidis; identical to SEQ ID NO: 899

SEQ ID NO: 11662 - protein, 176 aa, Neisseria meningitidis; identical to SEQ ID NO: 2300

SEQ ID NO: 11663 - protein, 127 aa, Neisseria meningitidis; identical to SEQ ID NO: 2146

SEQ ID NO: 11664 - protein, 444 aa, Neisseria meningitidis
MAKKYFGTDGVRGEVGQFPITPDFVLKLGYAAGQVLVQHDTDQKPTVLIGKDTRISGYMLEAALVAGFTAAGVNVVQTGPLPTPGVAYLTRALRLSAGVMISASHNAYSDNGIKFFAEGGVKLSDEVELEIEAKIDGEMKTLPSARLGRARRISGADDRYIEFCKSTFPSHSDLRGLKLVIDTANGAGYGVAPKVFHELGAQVVSIGDEPNGYNINEKCGATYTKTLQAAVLQHEADYGIALDGDGDRLMMVDKNGKVYDGDSLIYVIAKARAREGINIGGVVGTVMTNMAMEIALKEQGVDFCRAKVGDRYVLAQLNQRSWLIGGEASGHILCMDKHNTGDGIISALQVLAALQTLNQDLATVCADWQPYPQTMINVRIQKGQKWQEASKDVLAEVEKELEGKGRVVLRASGTEPVVRVMVEARQADWARDGAERIASAIGSL

SEQ ID NO: 11665 - protein, 810 aa, Neisseria meningitidis
MPIPFKPVLAVAAIAQAFPAFAADPAPQSAQTLNEITVTGTHKTQKLGEEKIRRKTLDKLLVNDEHDLVRYDPGISVVEGGRAGSNGFTIRGVDKDRVAINVDGLAQAESRSSEAFQELFGAYGNFNANRNTSEPENFSEVTITKGADSLKSGSGALGGAVNYQTKSASDYVSEDKPYHLGIKGGSVGKNSQKFSSITAAGRLFGLDALLVYTRRFGKETKNRSTEGNVEIKNDGYVYNPTDTGGPSKYLTYVATGVARSQPDPQEWVNKSTLFKLGYNFNDQNRIGWIFEDSRTDRFTNELSNLWTGTTTSAATGDYRHRQDVSYRRRSGVEYKNELEHGPWDSLKLRYDKQRIDMNTWTWDIPKNYDLRGINSEVYHSFRHIRQNTAQWTADFEKQLDFSKAVWAAQYGLGGGRGDNANSDYSYFVKLYDPKILTSNQAKITMLIENRSKYKFAYWNNVFHLGGNDRFRLNAGIRYDKNSSSAKDDPKYTTAIRGQIPHLGSERAHAGFSYGTGFDWRFTKHLHLLAKYSTGFRAPTSDETWLLFPHPDFYLKANPNLKAEKAKNWELGLAGSGKAGNFKLSGFKTKYRDFIELTYMGVSSDNPNKPTYAPLSDGTALVSSPVWQNQNRSSAWVKGLEFNGTWNLDSIGLPQGTHAGVNVSYIKGKAKQTNGQETPINALSPWSAVYNLGYDAPSKRWGINAYATRTAAKKPSDTVHSNDDLNNPWPYAKHSKAYTLFDLSAYLNIGKQVTLRAAAYNITNKQYYTWESLRSIREFGTVNRVDNKTHAGIQRFTSPGRSYNFTIEAKF

SEQ ID NO: 11666 - protein, 797 aa, Neisseria meningitidis
MKLKQIASALMMLGISPLAFADFTIQDIRVEGLQRTEPSTVFNYLPVKVGDTYNDTHGSAIIKSLYATGFFDDVRVETADGQLLLTVIERPTIGSLNITGAKMLQNDAIKKNLESFGLAQSQYFNQATLNQAVAGLKEEYLGRGKLNIQITPKVTKLARNRVDIDITIDEGKSAKITDIEFEGNQVYSDRKLMRQMSLTEGGIWTWLTRSNQFNEQKFAQDMEKVTDFYQNNGYFDFRILDTDIQTNEDKTKQTIKITVHEGGRFRWGKVSIEGDTNEVPKAELEKLLTMKPGKWYERQQMTAVLGEIQNRMGSAGYAYSEISVQPLPNAETKTVDFVLHIEPGRKIYVNEIHITGNNKTRDEVVRRELRQMESAPYDTSKLQRSKERVELLGYFDNVQFDAVPLAGTPDKVDLNMSLTERSTGSLDLSAGWVQDTGLVMSAGVSQDNLFGTGKSAALRASRSKTTLNGSLSFTDPYFTADGVSLGYDVYGKAFDPRKASTSIKQYKTTTAGAGIRMSVPVTEYDRVNFGLVAEHLTVNTYNKAPKHYADFIKKYGKTDGTDGSFKGWLYKGTVGWGRNKTDSALWPTRGYLTGVNAEIALPGSKLQYYSATHNQTWFFPLSKTFTLMLGGEVGIAGGYGRTKEIPFFENFYGGGLGSVRGYESGTLGPKVYDEYGEKISYGGNKKANVSAELLFPMPGAKDARTVRLSLFADAGSVWDGKTYDDNSSSATGGRVQNIYGAGNTHKSTFTNELRYSAGGAVTWLSPLGPMKFSYAYPLKKKPEDEIQRFQFQLGTTF

SEQ ID NO: 11667 - protein, 1490 aa, Neisseria meningitidis
MRFTHTTPFCSVLSTLGLFAVSPAYSSIVRNDVDYQYFRDFAENKGAFAVGASNISIQDKQGKILGRVLNGIPMPDFRVSNRQTAIATLIHPQYVNSVKHNVGYGSIQFGNDTQNPEEQAYTYRLVSRNPHPDYDYHLPHLNKLVTEISPAALSSVPLLGNGQPKANAYLDTDRFPYFVRLGSGTQQVRKADGTRTRTAPAYQYLTGGTPLKVLGFQNHGLLVGGSLTDQPLNTYAIAGDSGSPLFAFDKHENRWVLAGVLSTYAGFDNFFNKYIVTQPEFIRSTIRQYETRLDVGLTTNELIWRDNGNGDSTLQGLNERITLPIANPSLAPQNDSRHMPSEDAGKTLILSSRFDNKTLMLADNINQGAGALQFDSNFTVVGKNHTWQGAGVIVADGKRVFWQVSNPKGDRLSKLGAGTLIANGQGINQGDISIGEGTVVLAQKAASDGSKQAFNQVGITSGRGTAVLADSQQIKSENLYFGFRGGRLDLNGNNLAFTHIRHADGGAQIVNHNPDQAATLTLTGNPVLSPEHVEWVQWGNRPQGNAAVYEYINPHRNRRTDYFILKPGGNPREFFPLNMENSTSWQFIGNNRQQAAKQVAQAENARPDLITFGGYLGENAQTGKAAPSYSKTNIEWVNGPNTPHKPSPYTNTPTRTGAGVPTITASKKAATPAPTSHGMPTAPKTGNFSDMTGEAAIEKNRHIANAAVYGRPEYRYNGALNLHYRPKRTDSTLLLNGGMNLNGEVLIEGGNMIVSGRPVPHAYDHQAKREPVLENEWTDGSFKAARFTLRNHARLTAGRNTAHLDGDITAYNLSGIDLGFIQGKTPECYRSYHSGSTHCTPNAVLKAENYRALPVTQVRGDITLNDRSELRLGKAHLYGSIRAGKDTAVRMEADSNWTLSQSSHTGALTLDGAQITLNPDFANNTHNNRFNTLTVNGTLDGFGTFRFLTGIVRKQNAPPLKLEGDSRGAFQIHVKNTGQEPQTTESLALVSLNPKHSHQARFTLQNGYADLGAYRYILRKNNNGYSLYNPLKEAELQIEATRAEHERNQQAYNQLQATDISRQVQHDSDATRALQAWQNSQTELARIDSQVQYLSAQLKQTDPLTGILTRAQNLCAAQGYSVDICRQVAKAADTNDLTLFETELDTYIERVEMAESELDKARQGGDAQAVETARHAYLNALNRLSRQIHSLKTGVAGIRMPNLAELISRSANTAVSEQAAYNTGRQQAGRRIDRHLTDPQQQNIWLETGTQQTDYHSGTHRPYQQTTNYAHIGIQTGITDRLSVGTILTDERTNNRFDEGVSARNRSNGAHLFVKGENGALFAAADLGYSNSRTRFTDYDGAAVRRHAWDAGINTGIKIDTGINLRPYAGIRINRSNGNRYVLDGAEINSPAQIQTTWHAGIRLDKTVELGQAKLTPAFSSDYYHTRQNSGSALSVNDRTLLQQAAHGTLHTLQIDAGYKGWNAKLHAAYGKDSNTARHKQAGIKIGYNW

SEQ ID NO: 11668 - protein, 280 aa, Neisseria meningitidis; identical to SEQ ID NO: 986

SEQ ID NO: 11669 - protein, 172 aa, Neisseria meningitidis; identical to SEQ ID NO: 1304

SEQ ID NO: 11670 - protein, 397 aa, Neisseria meningitidis; identical to SEQ ID NO: 2969

SEQ ID NO: 11671 - protein, 336 aa, Neisseria meningitidis
MHIGGYFIDNPIALAPMAGITDKPFRRLCRDFGAGWAVCEMLTSDPTLRNTKKTLHRSDFADEGGIVAVQIAGSDPQQMADAARYNVSLGAQVIDINMGCPAKKVCNAQAGSALMQNEPLVAAILEAVVRAVDVPVTLKTRLGWHDDHKNLPAVARIAEDCGIAALAVHGRTRTQMYKGEAAYDLIAETKCRLNIPVWVNGDITSPQKAAAVFKQTAADGIMIGRGAQGRPWFFRDLKHYAEHGVLPPALSLAECSAAILNHVRAMHAFYGETAGVRIARKHIGWYIGEMPDGEQARREINRLDSAAAQYDMLAGYLERLAGKTDRWACGYRTNAF

SEQ ID NO: 11672 - protein, 167 aa, Neisseria meningitidis; identical to SEQ ID NO: 189

SEQ ID NO: 11673 - protein, 107 aa, Neisseria meningitidis
MQNETINPKQHLAAIKEYWQPEIINRHGFQFRLVKLLGDYGWHTHGYSDKVLFAVEGDMAVDFADGGSMTIREGEMAVVPKSVSHRPRSENGCSLVLIELSDPSEAV

SEQ ID NO: 11674 - protein, 300 aa, Neisseria meningitidis
MENMVTFSKIRPLLAIAAAALLAACGTAGNNAARKPVQTAKPAAVVGLALGGGASKGFAHVGIIKVLKENGIPVKVVTGTSAGSIVGSLFASGMSPDRLELEAEILGKTDLVDLTLSTSGFIKGEKLQNYINRKVGGRQIQQFPIKFAAVATDFETGKAVAFNQGNAGQAVRASAAIPNVFQPVIIGRHTYVDGGLSQPVPVSAARRQGANFVIAVDISARPGKNISQGFFSYLDQTLNVMSVSALQNELGQADVVIKPQVLDLGAVGGFDQKKRAIQLGEEAARAALPEIKRKLAAYRY

SEQ ID NO: 11675 - protein, 240 aa, Neisseria meningitidis; identical to SEQ ID NO: 9167

SEQ ID NO: 11676 - protein, 129 aa, Neisseria meningitidis
MWKISKENCEDLGFAIVCMFYDAINLSEFKLWLDIVVRDTPIDTIPLYIFDLIDFDKSIGEIYDVIGVVNYGYISNDQKNALTGIAFLRGIDVYDPPISKEKALKALEKYPEIYQRFQHFFPFVELPLF

SEQ ID NO: 11677 - protein, 466 aa, Neisseria meningitidis; identical to SEQ ID NO: 8157

SEQ ID NO: 11678 - protein, 144 aa, Neisseria meningitidis; identical to SEQ ID NO: 6

SEQ ID NO: 11679 - protein, 513 aa, Neisseria meningitidis
MKIGIPRESLSGETRVACTPATVALLGKLGFETVVESGAGLAASLDDAAYQTAGATVADKAAVWACPLIYKVNAPSEGELPLLNEGQTIVSFLWPRQNEALVEALRAKKVNALAMDMVPRISRAQALDALSSMANISGYRAVIEAANAFGRFFTGQITAAGKVPPAQVLVIGAGVAGLAAIGTANSLGAVVRAFDTRLEVAEQIESMGGKFLKLDFPQESGGSGDGYAKVMSDEFIAAEMKLFAEQAKEVDIIITTAAIPGKPAPKLITKEMVESMKSGSVIVDLAAATGGNCELTRPGELSVTGNGVKIIGYTDMANRLAGQSSQLYATNLVNLTKLLSPNKDGEITLDFEDVIIRNMTVTHDGEITFPPPPIQVSAQPQQTPSEKAAPAAKPEPKPVSLWKKLAPAVIAAVLVLWVGAVAPAAFLNHFIVFVLACVIGYYVVWNVSHSLHTPLMSVTNAISGIIVVGALLQISQGNGFVTLLAFIAILIASINIFGGFFVTRRMLNMFRKG

SEQ ID NO: 11680 - protein, 334 aa, Neisseria meningitidis; identical to SEQ ID NO: 10078

SEQ ID NO: 11681 - protein, 52 aa, Neisseria meningitidis
MPANRQGAAMQNQNTRPVKIELKGEAGKRVLLAAARRIAKTHQKAVKALADK

SEQ ID NO: 11682 - protein, 326 aa, Neisseria meningitidis; identical to SEQ ID NO: 8539

SEQ ID NO: 11683 - protein, 201 aa, Neisseria meningitidis
MTRQSLQQAAESRRSIYSLNKNLPVGKDEVVQIVEHAVLHTPSSFNSQSARVVVLFGEEHDKVWQFVEDALRAVVPADSFEPTAQKLNLFKAGAATILFYEDQNVVKGLQEQFPAYAANFPVWADQANAMVQYAVWTTLAAVGVGANLQHYNPLPDAAIAKAWNIPENWLLRAQMVIGGIEGAAGEKTFEPVAERLKVFGA

SEQ ID NO: 11684 - protein, 119 aa, Neisseria meningitidis; identical to SEQ ID NO: 420

SEQ ID NO: 11685 - protein, 100 aa, Neisseria meningitidis; identical to SEQ ID NO: 10117

SEQ ID NO: 11686 - protein, 66 aa, Neisseria meningitidis; identical to SEQ ID NO: 2062

SEQ ID NO: 11687 - protein, 515 aa, Neisseria meningitidis
MQLNPAEISDLIKAKIENLSVNAEVRTRGTVVSVTDGIVRIHGLSDAMQGEMLEFPGNTFGLAMNLERDSVGAVVLGEYEHIKEGDTVTCTGRILEVPVGRELVGRVVDALGRPIDGKGPINTTLTAPIEKIAPGVIARKSVDQPMQTGLKAIDSMVPVGRGQRELIIGDRQTGKTAVALDAIVNQKGTGVICIYVAIGQKASSIANVVRKLEEHGAMEHTIVVAATASEAAALQYIAPYSGCTMGEFFRDRGEDALIVYDDLSKQAVAYRQISLLLRRPPGREAYPGDVFYLHSRLLERAARVNEHEVEKLTNGEVKGKTGSLTALPIIETQAGDVSAFVPTNVISITDGQIFLETDLFNAGIRPAINAGISVSRVGGAAQTKVIKKLGGGIRLALAQYRELAAFSQFASDLDEATRKQLEHGEVVTELMKQKQFSTLNTAEMALTLWAINNGSYSDVPVAKALAFESEFLSFVRTQHPEVLEAVNASGAMSDESEKTLEAAMKSFKSSYAYQA

SEQ ID NO: 11688 - protein, 206 aa, Neisseria meningitidis; identical to SEQ ID NO: 379

SEQ ID NO: 11689 - protein, 264 aa, Neisseria meningitidis; identical to SEQ ID NO: 9604

SEQ ID NO: 11690 - protein, 630 aa, Neisseria meningitidis; identical to SEQ ID NO: 1381

SEQ ID NO: 11691 - protein, 255 aa, Neisseria meningitidis; identical to SEQ ID NO: 3724

SEQ ID NO: 11692 - protein, 365 aa, Neisseria meningitidis; identical to SEQ ID NO: 8102

SEQ ID NO: 11693 - protein, 91 aa, Neisseria meningitidis; identical to SEQ ID NO: 9295

SEQ ID NO: 11694 - protein, 241 aa, Neisseria meningitidis
MPRFHLPENLSVGQTVALPDNIVRHLNVLRVRPNENITLFDGKGKAHAARLSFLEKRRAEAEILHEDTTDNESPLNITLIQSISSGDRMDFTLQKSVELGVTAIQPVISERCIVRLDGERAAKRLARWQEIVISACEQSGRNTVPPVLPIIGYREALDKMPSESTKLIMSINRARKLGDIRHPSGAIVFMVGPEGGWTEQEEQQAFEAGFQAVTLGKRILRTETAPLAALAAMQTLWGDFA

SEQ ID NO: 11695 - protein, 796 aa, Neisseria meningitidis; identical to SEQ ID NO: 7975

SEQ ID NO: 11696 - protein, 136 aa, Neisseria meningitidis; identical to SEQ ID NO: 1274

SEQ ID NO: 11697 - protein, 240 aa, Neisseria meningitidis
VDYKECCSIFSDFRMERYKNAVGEDKAAELYLLNLSLSRELFHVVSIFEIVLRNKIDICLQQAFKDRNWLYNSIQPQTNPALKYQGCFLRNGTKESAELIKVALSKIQNNSGGKFDHNQLVAGLGFGFWRYLFAGGKDAQFDATGKVLMKVFPKKPKSTPSVQYNQKWIFRELSNINKFRNRLAHHEPICFKGAIKDTNYARNIHQSIFELLNYMDVDTASVFSHFSDQVIAVCDEIDKL

SEQ ID NO: 11698 - protein, 383 aa, Neisseria meningitidis; identical to SEQ ID NO: 3357

SEQ ID NO: 11699 - protein, 248 aa, Neisseria meningitidis; identical to SEQ ID NO: 3755

SEQ ID NO: 11700 - protein, 505 aa, Neisseria meningitidis
MLYFRYGFLVVWCAAGVSAAYGADAPAILDDKALLQVQRSVSDKWAESDWKVENDAPRVVDGDFLLVHPKMLEHSLRDALNGNQADLIASLADLYAKLPDYDAVLYGRARALLAKLAGRPAEAVARYRELHGENAADERILLDLAAAEFDDFRLKSAERHFAEAAKLDLPAPVLENVGRFRKKTEGLTGWRFSGGISPAVNRNANNAAPQYCRQNGGSQICSVSRAERAAGLNYEIEAEKLTALADNHYLLFRSNIGGTSYYFSKKSAYDDGFGRAYLGWQYKNARQTAGILPFYQVQLSGSDGFDAKTKRVNNRRLPPYMLAHGVGVQLSHTYRPNPGWQFSVALEHYRQRYREQDRAEYNNGRQDGFYVSSAKRLGESATVFGGWQFVRFVPKRETVGGAVNNAAYRRNGVYAGWAQEWRQLGGLNSRVSASYARRNYKGIAAFSTEAQRNREWNVSLALSHDKLSYKGIVPALNYRFGRTESNVPYAKRRNSEVFVSADWRF

SEQ ID NO: 11701 - protein, 218 aa, Neisseria meningitidis; identical to SEQ ID NO: 5422

SEQ ID NO: 11702 - protein, 174 aa, Neisseria meningitidis
MKKALATLIALALPAAALAEGASGFYVQADAAHAKASSSLGSAKGFSPRISAGYRINDLRFAVDYTRYKNYKAPSTDFKLYSIGASAIYDFDTQSPVKPYLGARLSLNRASVDLGGSDSFSQTSTGLGVLAGVSYAVTPNVDLDAGYRYNYIGKVNTVKNVRSGELSAGVRVKF

SEQ ID NO: 11703 - protein, 428 aa, Neisseria meningitidis; identical to SEQ ID NO: 3581

SEQ ID NO: 11704 - protein, 307 aa, Neisseria meningitidis; identical to SEQ ID NO: 9941

SEQ ID NO: 11705 - protein, 264 aa, Neisseria meningitidis; identical to SEQ ID NO: 9656

SEQ ID NO: 11706 - protein, 277 aa, Neisseria meningitidis
MVADLRAATGLGMMECKKALVEAEGNFDKAEEILRIKSGAKAGKLAGRTAAEGVLAYAINGNVGALVEVNCETDFVAKDAGFVEFANFVAKTAAEKKPASVEELSELVEAERKAIIAKLGENMSVRRFQVIDTANQLVAYIHGALATEGVLVEYKGSEDVARKIGMHIVAAKPQCVSEAEVDAETVEKERHIYTEQAIASGKPADIAAKMVEGRIRKFLAEITLNGQAFVMNPDQTVAQFAKENGTEVVSFVRYKVGDGIEKAVVDYAAEVAAAAKV

SEQ ID NO: 11707 - protein, 140 aa, Neisseria meningitidis; identical to SEQ ID NO: 8443

SEQ ID NO: 11708 - protein, 1072 aa, Neisseria meningitidis
MNNETKIYITAETGGVVSGVEKAKQSIKSLGDVASSQGRRISDGLVHSGDGAEKSSTVVSAASKRTERSLASLENAIRRDIAVKIAGGKANREYYEELARQRGIDIARLNPLLSQLDRHNTQTNRATQSVKQFNNALRQTPAQITDIVTQLAGGQSPFLIMIQQGGQLRDMYGGFGGMLKGLATVISPMRLAVAGLGGGIAALGYAMYQGAEESCEYRKALILAGDAAGITADRMQEIAVSVGAATGGYADARAAITALVSSGKVATDNYEQFARSITLQSQATGQSIDDLVEKYTEIAKDPLKAVVSLSATYRTMTADVYQQVKALQAQGREQDAVALVQRKFSEESEDMAKRVLGNLGLIERAWKDIKESASEAWDAVKSIGRDKTKLDEIAALDSFISQIETSKKHPVTQLFWGEEGERKLQEAYARRARLRAEIDKEAAAAETLRQKQKQNQNRTEGIAELEAVSERYATREQQRQRELLKNDKARKKALDGITDAKKRQEIINKHAANAKLINESFAEKKHERQKEKTDKTSYPTVSNGLRIKPGAEAGGKALGGTYAFAHAMQQMLGDRLFRFGAFRDRYHIGKNSLHNSGLAFDATPSPGMGMKQKQEVVAQMTRYLESLGFKNGQDFNLKLELAGQRNKNGTVATGDHWHFNWRSREAAARFAGGVEGQVKNMAHLGLFKGVEKEPLSGYEKWHEDFNRRAAEAGAKRVLEILNGNRAIGEQLKLLSDPTFGDWTLKQQADARELAEKADAQDSLTAASKKYSDIVKQMTDDSKEKLDDRLFEISLIGKTREEIEKLTLARLWDRQIAKAREEGAPLESIDLLERGKAEGMSNLSQMQKARADSDNDWRGGIESGLKSYIDSFGTMRQAMENATVQTFDKMGDALADFVATGKLDFRSLTVSILQDLSKMLIKMAIVNAMKSALGYADGGIVGGGSTQFDALFSGGGYTGYGGKYEPAGIVHKGEVVFSQRDVRNHGGVAAVERLRLNGYAGGGAVGLPSVLTGVRSAGAGSMQVNITINRDGSTESDSSADTEMAKHLAAAIPGMVEQWYVKNVYRENGTYHK

SEQ ID NO: 11709 - protein, 67 aa, Neisseria meningitidis
MNGLKADRPSANKANLSIDDVIKQEEIKRISFDMSESLHRELKKYAAENGVTIRVVLNKLVSDLLNK

SEQ ID NO: 11710 - protein, 675 aa, Neisseria meningitidis; identical to SEQ ID NO: 3019

SEQ ID NO: 11711 - protein, 281 aa, Neisseria meningitidis
MNIADGRQAFPAPAKLNLDLRITGRREDGYHNIESIFCLIDLQDTVYLKSRDDGKIILHNPVDGMPQEADLSYRAASLLQKYARNPAGVEIWLDKKIPTGAGLGGGSSDAATVLLVLNRWWQCGLTQRQLIDSGAALGADVPFFIFGKNAFARGIGDRLDEMDIPKQWYVIVKPPVHVSTAKIFTHEGLTRNSASSIMPTFQNLQPFRNDMQAVVFKEYPEVWKAYSELSRYGFALMTGSGACVFTACQDRNSAYNIYRQVSDLYEAYLAEGLSKHPWLSV

SEQ ID NO: 11712 - protein, 85 aa, Neisseria meningitidis
MVLLLIVNKYWKVNDMKNEIQKIMDKYNPWHEDDFKSYEDIARDVSLTTDKTFIEHYLLEVYSEENGHFDQENVHAMIEEIKNAI

SEQ ID NO: 11713 - protein, 370 aa, Neisseria meningitidis; identical to SEQ ID NO: 9185

SEQ ID NO: 11714 - protein, 261 aa, Neisseria meningitidis; identical to SEQ ID NO: 335

SEQ ID NO: 11715 - protein, 275 aa, Neisseria meningitidis; identical to SEQ ID NO: 8986

SEQ ID NO: 11716 - protein, 294 aa, Neisseria meningitidis
LQRGCIIEGHIIMLSKISESLANLSGAERKVAECALAEPKWFVHAAVAEIAERASVSQPTVIRFCRSLGYKGLPEFKLALSASIGHEGMPYVHEELNADDDMASVVEKVLGNAAASLLGERRFLKESELENAIATLMHARRVEFYGVGNSGIVAQDAQHKFFRFGMSTVAYVDTHTQLMAASVLSDQDVLVAISNTGSSIELLDAVSIAKENGASVIALTRNDSPLAQLADCVLSVATQENAELYTPMVSRLLQLAVIDILAIGLALRLGDAASLQLQKSKKSIHNKHIDYDKD

SEQ ID NO: 11717 - protein, 160 aa, Neisseria meningitidis; identical to SEQ ID NO: 4185

SEQ ID NO: 11718 - protein, 71 aa, Neisseria meningitidis; identical to SEQ ID NO: 2248

SEQ ID NO: 11719 - protein, 841 aa, Neisseria meningitidis
MNPNSKHNTNFTNLLKPSDSDIKQFAAQHIRHLTDLLNRYAYEYYTLDAPSVPDAEYDKLFRELEALELNHPELKLPDSPTQRVGGEPLAGFAEVRHEVPMLSLTNAFSPQDENGVFDHAEMYAFDQRVRDGLDGGKPEYVIEPKFDGLAISLLYRDGVLVQAATRGDGTTGEDVTQNIKTVSNIPLRLHGENTPELIEVRGEVLMLKADFVALNKRQAENGQKPFANPRNAAAGSLRQLDSRITAQRKLHFFPYSVARQQDGFVAEEHIQELAYFQALGFSLPNGNFGCFKNIDEVLAFYEHMQQKRPELPYEIDGMVVKVNSLAQQHELGFISRAPRWAVAHKFPAEEALTIVEAIDVQIGRTGAVTPVARLQPVFVGGVTVTNATLHNQDEVSRKDVRVGDTVVVRRAGDVIPEVVRVIFERRPMRETAVAVSDGIGHRQDDLFAETPSANQTQSVPLHKPYRLPTHCPICRSEIEREEGEAVARCSGGMLCQAQRAQGLIHFASRKAMDIDGLGEKQIEQLVAQDLVRHFADLYRLDIPTLQKMKETADKTVAESDQMPSEGSSVGASGKHKKQPVKWAENILAGIEASKTPELARFLFALGIRHVGERTAKTLAQAFGTLERVRRAPEPVLACLPDIGTVVARSIAHFFAQAEQQAMIDELLAAGVAPQTQAVTIPPARHAEPQRWIARLPGFKISENKAQALWELAGKNIEGLQTDKALPTDWQAWRSEPQNAALLENLKTFFAQMPSEDEAAQGSDGINKAVAGKTFVLTGTLPTLKRDQAQSLIEAAGGKVSGSVSKKTDYVVAGEAAGSKLEKANALGVSVLSEAELLTLLG

SEQ ID NO: 11720 - protein, 442 aa, Neisseria meningitidis
MKKVFIRTFGCQMNEYDSDKMLAVLAEEHGGIEQVTQADEADIILFNTCSVREKAQEKVFSDLGRVRPLKEKNPGLIIGVAGCVASQEGENIIKRAPYVDVVFGPQTLHRLPKMIVDKETSGLSQVDISFPEIEKFDHLPPARVEGGAAFVSIMEGCSKYCSFCVVPYTRGEEFSRPLNDVLTEIANLAQQGVKEINLLGQNVNAYRGEMDDGEICDFATLLRIVHEIPGIERMRFTTSHPREFTDSIIECYRDLPKLVSHLHLPIQSGSDRVLSAMKRGYTALEYKSIIRKLRAIRPDLCLSSDFIVGFPGETEREFEQTLKLVKDIAFDLSFVFIYSPRPGTPAANLHDDTPHEEKVRRLEALNEVIEAETARINQTMIGTVQRCLVEGISKKDPDQLQARTANNRVVNFTGTPDMINQMIDLEITEAYTFSLRGKVVEA

SEQ ID NO: 11721 - protein, 598 aa, Neisseria meningitidis
LPRIAMPYFALFDDAVSGRAKRYQNHVESRFFRPEELDALDGALQSGWQKGLHAVLFADYGFGLPLTGVESERGGNLALHWFADCADTDAASWLARHSDDLPAGISTPQSSVSEADYLDHIRQIHEAIRRGDTYQINYTTRLHLQAYGNPVKLYQRLRQPVPYAVLSHLPDAQGQSAWTLCFSPELFLKIGSDGTISTEPMKGTAPILGDGQDERRAAELQADPKNRAENVMIVDLLRNDLGKIAQTGTVCVPEPFKVSRFGSVWQMTSTIQAQALPHTSFADILRAAFPCGSITGAPKKMSMQIIESLEAEARGLYTGSIGYLNPCSGGLGFEGTFNVVIRTLSLTPLSDGIYQGVYGVGSGIVIDSDPAAEYRECGWKARFLNELRPNFGIFETLRAENGRCTLLDRHLCRLKTSARALNLPLPDGCENQIKQYIADLPDGAFRVKALLASDGISLSRAVLNRLTDKQRVIISPTILPAQNYLRRFKTTHRALFDQAWQTAETQGAFDSLFFNSDGILLEGGRSNVFVKYQGQWLTPSLDLDILNGIMRQAVLDEPQKYLQTNQVIETHITQKTLQEAEEIRLSNALRGVFAAALA

SEQ ID NO: 11722 - protein, 221 aa, Neisseria meningitidis; identical to SEQ ID NO: 9751

SEQ ID NO: 11723 - protein, 378 aa, Neisseria meningitidis; identical to SEQ ID NO: 2478

SEQ ID NO: 11724 - protein, 378 aa, Neisseria meningitidis; identical to SEQ ID NO: 7324

SEQ ID NO: 11725 - protein, 447 aa, Neisseria meningitidis; identical to SEQ ID NO: 2570

SEQ ID NO: 11726 - protein, 365 aa, Neisseria meningitidis
LTVKKIRSSEESDMSGYTGGLVVSGGISLIDRLDIMENVNRIVAEGIAAVEAAQDFNALEQIKARYLGKTGELTGLLKTLGQMSPEERKTIGAHINECKNRFQTAFNAKRDALNEAKLQARLAAEALDITLPGRAQEGGSLHPVTLTLQRVVELFHGMGFEVADGPEIEDDFHNFQALNIPANHPARAMQDTFYVENGDVLRTHTSPIQIRYMLDKKEPPIRIIAPGRVYRVDSDATHSPMFHQAEGLWVEEGVTFADLKAVFTDFIRRFFERDDLQVRFRPSFFPFTEPSGEIDIMGENGKWLEVGGCGMVHPNVLRNVNIDPEKYTGFAFGIGLDRFAMLRYNVNDLRLFFDNDLNFLKQFAK

SEQ ID NO: 11727 - protein, 533 aa, Neisseria meningitidis; identical to SEQ ID NO: 3462

SEQ ID NO: 11728 - protein, 294 aa, Neisseria meningitidis; identical to SEQ ID NO: 8165

SEQ ID NO: 11729 - protein, 187 aa, Neisseria meningitidis; identical to SEQ ID NO: 9755

SEQ ID NO: 11730 - protein, 183 aa, Neisseria meningitidis; identical to SEQ ID NO: 9012

SEQ ID NO: 11731 - protein, 283 aa, Neisseria meningitidis; identical to SEQ ID NO: 9103

SEQ ID NO: 11732 - protein, 352 aa, Neisseria meningitidis; identical to SEQ ID NO: 1807

SEQ ID NO: 11733 - protein, 383 aa, Neisseria meningitidis
AKRPSKNRKTVSDGLCLTPPIQRVTKRSQCRCASTGRITECRQNIGRIIEFTQDKRFDSRFKDLKKESLYYLNKHPDLVASYLKAEYEKLDREDKSILHRYISPGAEIVSGSLGVVLSGVAGGGSCAETFGLGCAAALVGVTSSYDHVITGTKNFGKKASEQRPTIAVQALKQLGLSEQAAEYVQFSIDLFSVGKSGGGIPKAKPVFDAKPRWEVDRKLNKLTTREQVEKNVQETRRRSQSSQFKAHAQREWENKTGLDFNHFIGGDINKKGTVTGGHSLTRGDVRVIQQTSAPDKHGVYQATVEIKKPDGSWEVKTKKGGKVMTKHTMFPKDWDEARIRAEVTSAWESRIMLKDNKWQGTSKSGIKIEGFTEPNRTAYPIYE

SEQ ID NO: 11734 - protein, 188 aa, Neisseria meningitidis; identical to SEQ ID NO: 1467

SEQ ID NO: 11735 - protein, 548 aa, Neisseria meningitidis; identical to SEQ ID NO: 3866

SEQ ID NO: 11736 - protein, 149 aa, Neisseria meningitidis; identical to SEQ ID NO: 3816

SEQ ID NO: 11737 - protein, 87 aa, Neisseria meningitidis
MDKEIKICPRCEQGYLYHAKPKYFSGEVILCDECYAMWLGDMKIFYGQYGKDFYDYHEFMKDKGIEEINMWEGELFDHPYYEDEKFK

SEQ ID NO: 11738 - protein, 149 aa, Neisseria meningitidis; identical to SEQ ID NO: 5576

SEQ ID NO: 11739 - protein, 735 aa, Neisseria meningitidis; identical to SEQ ID NO: 8656

SEQ ID NO: 11740 - protein, 361 aa, Neisseria meningitidis; identical to SEQ ID NO: 2308

SEQ ID NO: 11741 - protein, 242 aa, Neisseria meningitidis; identical to SEQ ID NO: 9647

SEQ ID NO: 11742 - protein, 66 aa, Neisseria meningitidis; identical to SEQ ID NO: 2062

SEQ ID NO: 11743 - protein, 307 aa, Neisseria meningitidis
MKKRNNPLPLLNGVKPSYLVLPHEKQFYGLPLLHFLCIRFPFVGADDWRRRLNSGFVVGSDGAALDEHSLFEPGKVMFYYRETSSEDEPRIPFEEKILHIDEHLIVVDKPHFLPVIPSGRFLRETLLTRLRLRPELQHLNVEDITPLHRLDKDTAGVMLLSHNPATRGAYQTMFQNKTVWKTYEALALTRTDLPYPLDVVSRLVRGEKFFTTQEVEGVPNAHTTVELIENRGEFSLYRLTPHTGKKHQLRVHMMGLGMPLLNDALYPVLSEAGSEDYRKPLKLLAKKIAFADPLSGRERVFCSGFCL

SEQ ID NO: 11744 - protein, 225 aa, Neisseria meningitidis
MSIKQWPEGERPREKLLERGAAALSDAELLAILLRVGTRGMSAVDLARYLLQEFGSLGRLMSAEVGKLSAYKGMGTASFTQFAVVREIGRRILAEELQESIVLSDPDTVADYLRFHLGQEKVEVSVALLLNRQNQLIAVRELSRGTVAENTIYIREIVKLALDEYADSLIIAHNHPGGSPEPSQEDIMFTRRLAQAMSLVDVSLLDHFIVTSQSVRSFRQLGLMP

SEQ ID NO: 11745 - protein, 500 aa, Neisseria meningitidis; identical to SEQ ID NO: 8952

SEQ ID NO: 11746 - protein, 211 aa, Neisseria meningitidis
VLFVLPAASSPCPDLNLIHYKLIELFVAGVTARKAAELVGVNKNTAAYYFHRLRLLIYQNSPHLEMFDGEVEADESYFGGQRKGKRGRGAAGKVAVFGLLKRNGKVYTVTVPNTQTATLFPIIREQVKPDSIFCSYDVLDVREFSHFSFAETSFSYQSQHTFCRTTKPYWNELLESSKTSFTQVRHSQSAFAVFKGVRMAFQQDKSSCSIL

SEQ ID NO: 11747 - protein, 217 aa, Neisseria meningitidis; identical to SEQ ID NO: 9583

SEQ ID NO: 11748 - protein, 698 aa, Neisseria meningitidis
MLIYLSRLSFGFLRRLPVVLQTEAAECGLACLVSVLGFHGFYTDLRYLRGRFSLSLKGATLADLVRFATSMNLTARAVRLDLDELVNLRLPCILHWDLNHFVVLHEVHRNHIIIMNPASGWQKIRMEEVSRCFTGVALELFPNTQFEEKQETRKIRVLPMLRGVVGLKRSLFQLLLLATVLQVFALASPFFMQWVIDHAIVSADRDLLLTLALGFGLLMIVQQLVSLLQTWAGMYLSTSLNIQWKANVFSHLMDLPISYFAKRHLGDVVSRFGSVDSIQSTLTSTFFVLVINSILAVFTLGLMYLYSPSLMAVVLVVLLIYIGIRWVAYYPLRHATEENIVHAAKQSSYFMETIRGIQTVKLFDKNTQRHAAWLNLFIDTINTGLTTQKLSALFGFANSLLFGIANILIVYFGAVSVLNGGFTVGALMAFMSYKSQFESKAGSLIDQFVQIKMLGLHAERLADIVLEETENEQNNDFSLPKNLEHFDIQIENVSFSYAENEPYILQNFSLIIKQGTAIAFAGHSGCGKSTLIQILTGSLKPESGHVLLGGHDIHALPPAFIRTWSASVMQNDVLFTGSIAENISFFDDTPNMEKIAFCAQMANIHHEIVAMPMAYETLIGDMGSALSGGQKQRIVLARALYREPKILFLDEASSHLDINNERVINDNLRQLNITKIMVAHRQETLNTADSVVYLDKVA

SEQ ID NO: 11749 - protein, 105 aa, Neisseria meningitidis
MAEKLAMSAGGYAKIERGETQLNVPRLEQLAQIFKIDMWDLLKSGGGGMVFQINEGDSGGDIALYASGDVSMKIEFLKMELKHCKEMLEQKDKEIELLRKLTETV

SEQ ID NO: 11750 - protein, 144 aa, Neisseria meningitidis; identical to SEQ ID NO: 3188

SEQ ID NO: 11751 - protein, 247 aa, Neisseria meningitidis; identical to SEQ ID NO: 9788

SEQ ID NO: 11752 - protein, 394 aa, Neisseria meningitidis; identical to SEQ ID NO: 8125

SEQ ID NO: 11753 - protein, 1201 aa, Neisseria meningitidis
MFHFAFPAQTALRQAITDAYRRNEIEAVQDMLQRAQMSDEERNAASELARRLVTQVRAGRTKAGGVDALMHEFSLSSEEGIALMCLAEALLRIPDNATRDRLIADKISDGNWKSHLNNSPSLFVNAAAWGLLITGKLTATNDKQMSSALSRLISKGGAPLIRQGVNYAMRLLGKQFVTGQTIEEALQNGKEREKMGYRFSFDMLGEAAYTQADADRYYRDYVEAIHAIGKDAAGQGVYEGNGISVKLSAIHPRYSRAQHCRVMGELLPRLKELFLLGKKYDIGINIDAEEANRLELSLDLMEALVSDPDLAGYKGIGFVVQAYQKRCPFVIDYLIDLARRNNQKLMIRLVKGAYWDSEIKWAQVDGLNGYPTYTRKVHTDISYLACARKLLSAQDAVFPQFATHNAYTLGAIYQMGKGKDFEHQCLHGMGETLYDQVVGPQNLGRRVRVYAPVGTHETLLAYLVRRLLENGANSSFVNQIVDENISIDCLIKSPFDTIAEQGIHLHNALPLPRDLYGKCRLNSQGVDLSNENVLQQLQEQMNKAAAQDFHAASIVNGKARDVGEAQPIKNPADHDDIVGTVSFADAALAQEAVGAAVAAFPEWSATPAAERAACLRRFADLLEQHTPALMMLAVREAGKTLNNAIAEVREAVDFCRYYANEAEHTLPQDTKAVGAIVAISPWNFPLAIFTGEVVSALAAGNTVIAKPAEQTSLIAGYAVSLMHEAGIPTSALQLVLGAGDVGAALTNDARIGGVIFTGSTEVARLINKALAKRNDNPVLIAETGGQNAMIVDSTALAEQVCADVLNSAFDSAGQRCSALRILCVQEDVADRMLDMIKGAMDELVVGKPIQLTTDVGSVIDAEAQQNLLNHINKMKGVAKSYHEVKTAADVDSEKSTFVRPILFELNNLNELQREVFGPVLHVVRYRADELDSVIDQINSKGYALTHGVHSRIEGTVRHIRSRIEAGNVYVNRNIVGAVVGVQPFGGHGLSGTGPKAGGSFYLQKLTRAGEWVAPTLSQIGQADEAALKRLEALVHKLPFNAEEKKAAAAALGHARIRTLRRAETVLTGPTGERNSISWHAPKRVWIHGGSLLQAFCALTELAASGVQAVVEPDSPLASYTADLEGLLLVNGKPETADISHVAALSPLDSARKQELAAHDGALIRILPSENGLDILQVFEEISCSVNTTAAGGNASLMAVAD

SEQ ID NO: 11754 - protein, 357 aa, Neisseria meningitidis; identical to SEQ ID NO: 8094

SEQ ID NO: 11755 - protein, 261 aa, Neisseria meningitidis
MSRIRQAFAALDGGKALIPYITVGDPDIRTTLALMHGMVANGADILELGVPFSDPMADGSVIQRAAERALANGISLRDVLDVVRKFRETDTQTPVVLMGYLNPVHKMGYREFAQEAAKAGVDGVLTVDSPVETIDPLYRELKDNGVDCIFLIAPTTTEDRIKTIAELAGGFVYYVSLKGVTGAASLDTDEVSRKIEYLHQYIDIPIGVGFGISNAESARKIGRVADAVIVGSRIVKEIENNTGNEAAVVGALVKELKDAVR

SEQ ID NO: 11756 - protein, 287 aa, Neisseria meningitidis; identical to SEQ ID NO: 7964

SEQ ID NO: 11757 - protein, 120 aa, Neisseria meningitidis; identical to SEQ ID NO: 9052

SEQ ID NO: 11758 - protein, 704 aa, Neisseria meningitidis
MDLLSVFHKYRLKYAVAVLTILLLAAIGLHASVYRIFTPENIRSRLQQSIAHTHRKISFDADIQRRLLPRPTVILKNLTITEPGGDRTAVSVQETKIGLSWKNLWSDQIQIEKWVVSSAELALTRDGKGVWNIQDLIDSQKRQASVNRIIVENSTVRLNFLQEQLILKEINLNLQSPDSSGQPFESSGILVWGKLSVPWKSRGLFLSDGIGTPKISPFHFEASTSLDGHGITISTTGSPSVRFNAGGADAAGLGLRADTSFRNLHLTAQIPTLALRNNSIKIETVNGAFTAGGEYAQWDGSFKLDKANLHSGIANIGNAEISGSFKTPRHQTNFSLNSPLVWTENKGLDAPRLYVSTLQDTVNRLPQPRFISRLDGSLSVPNLQNWNAELNGTFDRQTVAAKFRYTHEDAPHLEAAVALQKLNLTPYLDDVRQQNGKIFPDTLAKLSGDIEAHLKIGKVQLPGLQLDDMETYLHADKGHIALSRFKSGLYGGHTEGGISIANTRPATYRLQQNASNIQIQPLLQDLFGFHSFSGNGDAVIDLTAGGETRKELIRSLQGSLSLNISNGAWHGIDMDNILKNGISGKTADNAAPSTPFHRFTLNSEISDGISRHIDTELFSDSLYVTSNGYTNLDTQELSEDVLIRNAVHPKNKPIPLKITGTVDKPSITVDYGRLTGGINSRKEKQKILEDTLLEQWQWLKPKEP

SEQ ID NO: 11759 - protein, 273 aa, Neisseria meningitidis; identical to SEQ ID NO: 9791

SEQ ID NO: 11760 - protein, 124 aa, Neisseria meningitidis; identical to SEQ ID NO: 3797

SEQ ID NO: 11761 - protein, 99 aa, Neisseria meningitidis; identical to SEQ ID NO: 9794

SEQ ID NO: 11762 - protein, 99 aa, Neisseria meningitidis; identical to SEQ ID NO: 7743

SEQ ID NO: 11763 - protein, 99 aa, Neisseria meningitidis; identical to SEQ ID NO: 9794

SEQ ID NO: 11764 - protein, 131 aa, Neisseria meningitidis; identical to SEQ ID NO: 7977

SEQ ID NO: 11765 - protein, 82 aa, Neisseria meningitidis; identical to SEQ ID NO: 2740

SEQ ID NO: 11766 - protein, 423 aa, Neisseria meningitidis
MFQWLYDVLWLLAPIWIRRYLDKRSGSAPAYRAHRGERFGKPYPNPVTGAVWIHAVSVGETRAAQPLIRELRQRFPDAPLLMTQMTPTGRETAQVLFPDAQCRYLPYDKKTWVRQFLREHRPMFGVLMETEIWPNLMKECRRAGVPLFLANARLSEKSLNGYLKVRSLIRPAVASLTGCLVQTEADAARLAKLGAASVQVCGNTKYDLMPSEQMKTLAGQFEKRIGDRPVAVCGSTRVYRGEDEAEKLLAAWQQYRGDALLVVVPRHPEHFQTAFETAKRFGFKVQRRSDGLPVEPDTQVWIGDSMGELYAYYLCADVAFVGGSLVDSGCQNIIEPLSCGVPTIFGFSTYNFSEACRHALASGAAVQVESADAWREAVEKTLSYEGGGMQMQARVDSFIAQHRGAGARIAEAVREAVCGHRGR

SEQ ID NO: 11767 - protein, 174 aa, Neisseria meningitidis; identical to SEQ ID NO: 9770

SEQ ID NO: 11768 - protein, 179 aa, Neisseria meningitidis
MNIIDTAIPDVKLLEPQVFGDARGFFMETFRDEWFKTQVCERTFVQENHSKSGKGVLRGLHYQTENTQGKLVRVVVGEVFDVAVDMRKDSPTFGKWVGEILSAENKRQLWVPEGFAHGFYVLSDEAEFVYKCTDYYNPEAEHSLIWNDPTVGIDWPLQTAPNLSPKDLAGKVLAEAVTF

SEQ ID NO: 11769 - protein, 173 aa, Neisseria meningitidis; identical to SEQ ID NO: 9042

SEQ ID NO: 11770 - protein, 757 aa, Neisseria meningitidis
MNITQILSQELSATAAQITAAVELLDDGATVPFIARYRKEATGGLDDTQLRRLAERLQYLRELEERKAVVLKSIEEQGKLSDDLRAQIEAADNKTALEDLYLPYKPKRRTKAQIAREHGLQPLADVLLAEQSQDVEAAAQGYLNENVPDAKAALDGARAILMEQFAEDAELIGTLRDKLWNEAEIHAQVVGGKETEGEKFSDYFDHREPIRAMPSHRALAVLRGRNEGVLNIALKYQPDDTPITQQSEYEQIIARRFKVSDGHKWLRDTVRLTWRAKIFLSLELEALNRLKEAADTDAITVFARNLKDLLLAAPAGRLTTLGLDPGYRNGVKCAVVDDTGKLLDTVIVYLHQENNMLATLSRLIKQHGVKLIAIGNGTASRETDKIAGELVREMSKMGLHKIVVSEAGASIYSASELAAREFPDLDVSLRGAVSIARRLQDPLAELVKIDPKSIGVGQYQHDVNQSRLAKSLDAVVEDCVNAVGVDVNTASAPLLARISGLNQTLAQNIVAYRDENGAFDSRKKLLKVPRLGEKTFEQAAGFLRINGGKEPLDASAVHPEAYPVVAKMLAQQGINAAELIGNRERVKQIKASDFTDERFGLPTILDILSELEKPGRDPRGEFQTASFAEGIHEISDLQVGMILEGVVSNVANFGAFVDIGVHQDGLVHISALSNKFVQDPREVVKAGDVVKVKVLEVDAARKRIALTMRLDDEPGGAKHKMPSENRSRERTAGRKPQRNDRAPANSAMADAFAKLKR

SEQ ID NO: 11771 - protein, 1392 aa, Neisseria meningitidis; identical to SEQ ID NO: 2806

SEQ ID NO: 11772 - protein, 394 aa, Neisseria meningitidis
MTPQVLTILGSTGSIGESTLDVVSRHPEKFRVFALAGHKQVEKLAAQCQTFRPEYAVVADAEHAARLEALLKRDGTATQVLHGAQALVDVASADEVSGVMCAIVGAVGLPSALAAAQKGKTIYLANKETLVVSGALFMETARANGAAVLPVDSEHNAVFQVLPRDYAGRLNEHGIASIILTASGGPFLTADLNTFDSITPAQAVKHPNWSMGRKISVDSATMMNKGLELIEAHWLFNCPPDKLEVVIHPQSVIHSMVRYRDGSVLAQLGNPDMRTPIAYCLGLPERIDSGVGDLDFDALSALTFQKPDFDRFPCLKLAYEAMNAGGAAPCVLNAANEAAVAAFLDGQIKFTDIAKTVAHCLSQDFSDGIGDIGGLLAQDARTRAQARAFIGTLR

SEQ ID NO: 11773 - protein, 248 aa, Neisseria meningitidis
MKSSTQAVLEHTAIPKHIAVIMDGNGRWAKKRFLPRIMGHKRGLDALENMVKHCAKLGVQYLTVFAFSTENWRRPEDEVSFLMGLFLQALQKQVRRLHENNMRLKILGSRERFNRQILQGIEEAEALTANNTGLTLSIAADYGGRWDILQAANKLIAEGVSEITEDTLAKHLMLGDAPEPDLFIRTGGETRISNFLLWQMAYAELYFTDILWPDFDETALDAAVASFQKRERRFGRTSEQLPIEQQRN

SEQ ID NO: 11774 - protein, 628 aa, Neisseria meningitidis
MIYPKTYDVIVVGGGHAGTEAALAAARMGAQTLLLTHNIETLGQMSCNPSIGGIGKGHLVRELDALGGAMALATDKSGIQFRRLNASKGAAVRATRAQADRILYKATIREMLENQENLDLFQQAVEDVTLDGERISGVVTAMGVEFKARAVVLTAGTFLSGKIHIGLENYEGGRAGDPAAKSLGGRLRELNLPQGRLKTGTPPRIDGRTIDFSQLTEQPGDTPVPVMSVRGSADMHPRQVSCWITHTNTQTHDIIRSGFDRSPMFTGKIEGVGPRYCPSIEDKINRFADKDSHQIFLEPEGLTTHEYYPNGISTSLPFDIQIALVRSMKGLENAHILRPGYAIEYDYFDPRNLKASLETKTIQGLFFAGQINGTTGYEEAAAQGLLAGANAVQYVREQDPLLLRREQAYLGVLVDDLITKGVNEPYRMFTSRAEYRLQLREDNADMRLTEDGYKIGLVGEAQWRMFNEKREAIEREIQRLKTTWYTPQKLAEDEQIRVFGQKLSREANLHDLLRRPNLDYAALMTLEGAMPSERLSAEVVEQVEIQVKYQGYIDRQNEEIDSRRDIETLKLPDGIDYGKVKGLSAEVQQKLNQHKPETVGQASRISGVTPAAVALLMVHLKRGFKDAK

SEQ ID NO: 11775 - protein, 290 aa, Neisseria meningitidis
MEIWNRLDTWLGAVPIRAEAVESVAAVAALLLARALLLNIHFKRHPDFGIESKRRFLVASRNITLLLVLFSLAFIWSAQIQTLALSMFAVAAAVVVATKELIMCLSGSILRSATQQYSVGDYIEINGLRGRVVDINLLNTLMMQVGPNPLVGQLAGTTVSFPNSLLLSHPVRRDNILGDYVIHTVEIPVPIHLDSDEAVCRLKAVLEPLCAPYIPAIQRHLENVQAEKLFITPAARPRVTRVPYDDKAYRIIVRFASPVSKRLEIQQAVMDEFLRVQYRLLNYPAGSETL

SEQ ID NO: 11776 - protein, 206 aa, Neisseria meningitidis; identical to SEQ ID NO: 1725

SEQ ID NO: 11777 - protein, 483 aa, Neisseria meningitidis
MLSFLSGLLSLGIEVLWVRMFSFAAQSVPQAFSFTLACFLTGIAVGAYFGKRICRSRFVDIPFIGQCFLWAGIADFLILGAAWLLTGFSGFVHHAGIFITLSAVVRGLIFPLVHHVGTDGNKSGRQVSNVYFANVAGSALGPVLIGFVILDFLSTQQIYLLICLISAAVPLFCTLFQKSLRLNAVSVAVSLMFGILMFLLPDSVFQNIADRPDRLIENKHGIVAVYHRDGDKVVYGANVYDGAYNTDVFNSVNGIERAYLLPSLKSGIRRIFVVGLSTGSWARVLSAIPEMQSMIVAEINPAYRSLIADEPQIAPLLQDKRVEIVLDDGRKWLRRHPDEKFDLILMNTTWYWRAYSTNLLSAEFLKQVQSHLNPDGIVMFNTTHSPHAFATAVHSIPYAYRYGHMVVGSATPVVFPNKELLKQRLSRLIWPESGRHVFDSSTVDAAAQKVVSRMLIQMTEPSAGAEVITDDNMIVEYKYGRGI

SEQ ID NO: 11778 - protein, 358 aa, Neisseria meningitidis; identical to SEQ ID NO: 9712

SEQ ID NO: 11779 - protein, 99 aa, Neisseria meningitidis; identical to SEQ ID NO: 3406

SEQ ID NO: 11780 - protein, 108 aa, Neisseria meningitidis; identical to SEQ ID NO: 3002

SEQ ID NO: 11781 - protein, 792 aa, Neisseria meningitidis; identical to SEQ ID NO: 9809

SEQ ID NO: 11782 - protein, 162 aa, Neisseria meningitidis; identical to SEQ ID NO: 9363

SEQ ID NO: 11783 - protein, 65 aa, Neisseria meningitidis; identical to SEQ ID NO: 3913

SEQ ID NO: 11784 - protein, 473 aa, Neisseria meningitidis; identical to SEQ ID NO: 2148

SEQ ID NO: 11785 - protein, 149 aa, Neisseria meningitidis; identical to SEQ ID NO: 2330

SEQ ID NO: 11786 - protein, 205 aa, Neisseria meningitidis
MPYTEDMRPGDTANPYGASKAMVERMLTDIQKADPRWSVILLRYFNPIGAHESGLIGEQPNGIPNNLLPYICQVAAGKLPQLAVFGGDYPTPDGTGMRDYIHVMDLAEGHVAAMQAKSNVAGTHLLNLGSGRASSVLEIIRAFEAASGLTIPYEVKPRRAGDLACFYADPSYAKAQIGWQTQRDLTQMMEDSWRWVSNNPNGYDD

SEQ ID NO: 11787 - protein, 316 aa, Neisseria meningitidis; identical to SEQ ID NO: 3819

SEQ ID NO: 11788 - protein, 185 aa, Neisseria meningitidis; identical to SEQ ID NO: 9285

SEQ ID NO: 11789 - protein, 257 aa, Neisseria meningitidis; identical to SEQ ID NO: 7786

SEQ ID NO: 11790 - protein, 385 aa, Neisseria meningitidis
MKFATKAIHSSYDCDEHNRALMPPIYQNSMFALHEIGENVPYRYSRLSNPTRQILEDTVADLEHGAAGFAFSSGMAGIDAVWRTFLRPGDTIVAVADIYGGAYDLLVDVYQKWGVNVVFADLGNLDNLDKLLKAHKVKLVWLETPSNPLLRLVDIKALAAKAKAAGALVGIDNTFATPYLQQPLDMGCDFVFHSATKYLCGHSDVLMGIVVAKTKELAQPLHDMMVHTGAVAGPMDCWLVLRGIKTLALRMNAHCQNALEIARRLEAHPAIEKVFHPGLPSHEHYELAQAQMPKGIGGVVTVYLKNDTREAANSVIKNMKLVKMASSLGGVESLVNHCYSQSHSGVPHNVKMEMGIKVGLLRFSIGIEDADDIWNDISAALDTTL

SEQ ID NO: 11791 - protein, 252 aa, Neisseria meningitidis; identical to SEQ ID NO: 3275

SEQ ID NO: 11792 - protein, 56 aa, Neisseria meningitidis; identical to SEQ ID NO: 8938

SEQ ID NO: 11793 - protein, 68 aa, Neisseria meningitidis; identical to SEQ ID NO: 3821

SEQ ID NO: 11794 - protein, 190 aa, Neisseria meningitidis; identical to SEQ ID NO: 4428

SEQ ID NO: 11795 - protein, 180 aa, Neisseria meningitidis
MRTHRKTCSAVCFAFQTASKPAVSIRHPSEDIMSLKIRLTEDMKTAMRAKDQVSLGTIRLINAAVKQFEVDERTEADDAKITAILTKMVKQRKDSAKIYTEAGRQDLADKENAEIEVLHRYLPQMLSAGEIRTAVEAAVAETGAAGMADMGKVMGVLKTRLAGKADMGEVNKILKAVLTA

SEQ ID NO: 11796 - protein, 310 aa, Neisseria meningitidis; identical to SEQ ID NO: 9784

SEQ ID NO: 11797 - protein, 96 aa, Neisseria meningitidis
MNIQLQGHIVGVKKFNGQIEGRSFDYCRLIVATPLDSSQGNALGSSTTEYDFGGSANFEQFRNAQFPIEANLNVEIVTTGKTQKLKVIGFQLVKKG

SEQ ID NO: 11798 - protein, 96 aa, Neisseria meningitidis; identical to SEQ ID NO: 2317

SEQ ID NO: 11799 - protein, 155 aa, Neisseria meningitidis; identical to SEQ ID NO: 3828

SEQ ID NO: 11800 - protein, 178 aa, Neisseria meningitidis
LTYRILVLVTREVCEPRSWTVKTRIIQANAFRRHLNAMPSEHAAYADLMASSAKRLLCAKAILFSSAVRTGAAVGNIFFDGFADGGDFGDGAQYGFATFNAVDAASDSAGGIAGATVLEIVEDEDFEGDLGSWADSVKMVRSSDGITVVPMPSETAAVQAFVPDGKIGYNIGHQCPTY

SEQ ID NO: 11801 - protein, 326 aa, Neisseria meningitidis; identical to SEQ ID NO: 9789

SEQ ID NO: 11802 - protein, 206 aa, Neisseria meningitidis
MAQFFAIHPDNPQERLIKQAVEIVNQGGVVVYPTDSCYALGCKLGDKAAMERILSIRKIDLKHHLTLMCADLSELGTYAKIDNVQFRQLKAATPGPYTFILQATKEVPARTLHPKRKTIGLRIPDNAIAQALLGELGEPLLSCTLMLPEDGEPLTDPYEIRERLEHAVDLVIDGGWCGTEPTTVVDMTDGTELVRRGCGDTAVFGL

SEQ ID NO: 11803 - protein, 105 aa, Neisseria meningitidis; identical to SEQ ID NO: 87

SEQ ID NO: 11804 - protein, 500 aa, Neisseria meningitidis
MSREMLQLAEALASEKNVDAEVVFQALEFALSTAAKKKADREHMDVRVQINRDTGEYQTFRRWLIVADEDYTYPDVEKTIEEIQEEIPGTTIQIGEYYEEQLPNEGFGRQAAQTAKQIILQRIRDAEREQNLNEFLAVKEDIVSGTVKRVERHGIIVEVVAGKLDALIPRDQMIPRENFRSGDRIRALFLRVEEIGNTGRKQVILSRTSGDFLVKLYANEVPEIADGMLEIRAVARDPGQRAKVAVKANDQRIDPQGTCIGVRGSRVNAVSNELSGERIDVVLWSPEPAQFVMSALSPAEVSRIVIDEDKHAVDVIVDENQLALAIGRGGQNVRLASDLTGWQLNIMTSAEADERNAAEDAAIRRLFMDHLNVDEETADVLVQEGFATLEEVAYVPAAELLAIEGFDEEIVDMLRNRARDAILTMAIAAEEKLGEVSDDMRNLEGIDADMLRSLAEAGITTRDDLAELAVDELIEITGVNEETAKAVILTAREHWFTEDK

SEQ ID NO: 11805 - protein, 511 aa, Neisseria meningitidis; identical to SEQ ID NO: 3843

SEQ ID NO: 11806 - protein, 142 aa, Neisseria meningitidis; identical to SEQ ID NO: 5523

SEQ ID NO: 11807 - protein, 71 aa, Neisseria meningitidis; identical to SEQ ID NO: 1785

SEQ ID NO: 11808 - protein, 90 aa, Neisseria meningitidis
VFAVIFFSTLGCILAWIRDIPKIKSKKILARSLYIIGIINVIISYVLIKNILVSVSDGGGIKYVAIYLSNLFFWTVLMYVLVKRLSKKPS

SEQ ID NO: 11809 - protein, 185 aa, Neisseria meningitidis; identical to SEQ ID NO: 9800

SEQ ID NO: 11810 - protein, 99 aa, Neisseria meningitidis; identical to SEQ ID NO: 2699

SEQ ID NO: 11811 - protein, 302 aa, Neisseria meningitidis; identical to SEQ ID NO: 1790

SEQ ID NO: 11812 - protein, 382 aa, Neisseria meningitidis; identical to SEQ ID NO: 2860

SEQ ID NO: 11813 - protein, 92 aa, Neisseria meningitidis; identical to SEQ ID NO: 3856

SEQ ID NO: 11814 - protein, 75 aa, Neisseria meningitidis; identical to SEQ ID NO: 8304

SEQ ID NO: 11815 - protein, 553 aa, Neisseria meningitidis
MLTYTPPDARPPAKTHEKPWLLLLMAFAWLWPGVFSHDLWNPAEPAVYTAVEALAGSPTPLVAHLFGHADFGIPPVYLWVAAAFKHLLSPWAADPYDAARFAGVFFAVVGLTSCGFAGFNFLGRHHGRSVVLILIGCIGLIPTVHFLNPAAAAFAAAGLVLHGYSLARRRVIAASFLLGTGWTLMSLAAAYPAAFALMLPLPVLMFFRPWQSRRLMLTAVASLAFALPLMTVYPLLLAKTQPALFAQWLDYHVFGTFGGVRHVQTAFSLFYYLKNLLWFALPALPLAVWTVCRTRLFSTDWGILGVVWMLAVLVLLAVNPQRFQDNLVWLLPPLALFGAAQLDSLRRGAAAFVNWFGIMAFGLFAVFMWTGFFAMNYGWPAKLAERAAYFSPYYVPDIDPIPMAVAVLFTPLWLWAITRKNIRGRQAVTNWAAGVTLTWALLMTLFLPWLDAAKSHAPVVRSMEASLSPELKRELSDGIECIDIGGGDLHTRIVWTQYGTLPHRVGDVQCRYRIVRLPQNADASQGWQTVWQGARPRNKDSKFALIRKIGENI

SEQ ID NO: 11816 - protein, 273 aa, Neisseria meningitidis
VNRTAFCCLSLTAALILTACSSGGGGVAADIGAGLADALTAPLDHKDKSLQSLTLDQSVRKNEKLKLAAQGAEKTYGNGDSLNTGKLKNDKVSRFDFIRQIEVDGQLITLESGEFQIYKQDHSAVVALQIEKINNPDKIDSLINQRSFLVSGLGGEHTAFNQLPSGKAEYHGKAFSSDDPNGRLHYSIDFTKKQGYGRIEHLKTPEQNVELASAELKADEKSHAVILGDTRYGGEEKGTYHLALFGDRAQEIAGSATVKIREKVHEIGIAGKQ

SEQ ID NO: 11817 - protein, 346 aa, Neisseria meningitidis
MKAMVYHGANDIRFEEKPRPQIIDPTDAVVKIVKTTICGTDLGIWKGKKTEVADGRILGHEGIGIVEEVGEAVKNIKVGDKVIISCVSKCCTCDNCKIQLYSHCCNGGWILGYMIDGTQAEYVRTPYADNSLVPLPDNVNEEVALLLSDALPTAHEIGVQYGDVKPGDTVFIAGAAPVGMSALLTAQLYSPAAIIVCDMDENRLKLAKELGATHTISPASGDVSKQVFAIVGEDGVDCAIEAVGIPATWNMCQDIVKPGGHIAVVGVHGQSVDFKLEKLWIKNLAITTGLVNANTTEMLMKAISSSSVDYTKMMTHHFKFSELEKAYDVFKHAAENQAMKVVLEAD

SEQ ID NO: 11818 - protein, 219 aa, Neisseria meningitidis
MGRHFGRRRFLTVAAVAAAGAAVSFLPNPFAADDEKRNKDEKRNENVFFWKGVALGSGAELRLFGVDDRQAADLVNKVLAEVARLEKMFSLYREDSLISRLNRDGYLTSPSADFLELLSLCRDIHALTDGAFDPTVQALWKLYADYFAARPDAETPPPQNSVKEALKRVGFGKVSFDDREIRFAEKGMGLSLNGIAQVYSGLTKTSTALPRLSSKRTIL

SEQ ID NO: 11819 - protein, 380 aa, Neisseria meningitidis
MQKWQTELYSTPLWLCLTPKSAVKVLLLITAMITLVLTEMRLNVLSTFMSKGLYDSMQDLNASAFWMFAAMNAGVVLIRAFNNVVNDFLDQGLAIKWSEQLNEVLTTRWLADKNYYRLQMRRHAPDNIDQRIQQDAQDFIASTIEFVRGMVNSVVTSLEFAVVLWGLAGILTVFGFDIPRGIVWLVFIFVILATFIAMWIGNPLIRYNYENEKLNGDYRYSLIRVRDHAESVAFYNGEQHEHGRLSDRFKAIIRNRWRIARQSVCLSGFNDMFTNGIKLFPIILQAPRLFAGQIKIGDIQQTVQAFARLQNALSFFRMFYNKFTAYRARLERLYGFLLSTEEQHSARQPEISEVSDGIALECKAAAAFARIGGSFCTAEA

SEQ ID NO: 11820 - protein, 203 aa, Neisseria meningitidis; identical to SEQ ID NO: 3861

SEQ ID NO: 11821 - protein, 360 aa, Neisseria meningitidis
MKIILTTSMSGLGGTETATVRLGRLLKRRGHDIILASSDGPFVGEAQASGIRWQPVDFYRGGLAGYLKSTFAYARMLRREQPDIIDCQMARVVPACALAAKIVSPKTKIIYHSHGLDAATYPKIAKLFDKLGVYIIGNCKHEREKLIRHGFPAGRIAYAYNALPPPPPPPEFHFRKTKKECAVLGTLSRLDTVRAVHLMLDILKKMVDRGMPVRLNVAGIGEEMDNLKAQAKRLGIEDKVTFLGGVRDLTGYFKEVDILVNTPHCVGDHGAGVGNNILEAGLYDTPVVTYNMAGISEMVITGQTGYCIPFGDDEAFIEAVDTLIKHPELRSQMGKALHKHVETLCSDDEIYRTTMAAYEM

SEQ ID NO: 11822 - protein, 421 aa, Neisseria meningitidis
MQQIKFIDLFSGMSGIRKGFEQACRKQSVACECVFTSEIKPAALEVLKQNYPDEVPYGDITKIETGDIPDFDILLAGFPCQAFSFAGKRLGFEDTRGTLFFDVARILKAKKPKGFILENVEGLVTHDRKDSTQKGRTLTVILETLEALGYYVSWKVLNAKDFGIPQNRKRIYLTGSLKSKPDLSFETSPSPKLKNILESGLPTESSPFIKKLLKKFPPSELYGKSVKDKRGGKNNIHSWDIELKGAVTEEEKQLLNILLKERRKKWASEIGIDWMDGMPLTKAQISTFYKHPDLQNILDSLTDKGYLVLEHPKQKIGGQRIKDESLPKGYNIVSGKKSFEINKILDPNDVAPTLVAMDMEHLFVVDNGGLRTLTGKEGLRLFGYPDDYSFDIPKKDRCDLLGNTVAVPVIKAVSERLLHTL

SEQ ID NO: 11823 - protein, 333 aa, Neisseria meningitidis
MHTPLTYIDLFSGAGGLSLGFEQAGFQQLLSVEMESDYCQTYRTNFPHHQLLQKDLTTLTEQDLINCLNGQAVDLIIGGPPCQGFSMAGKIGRTFTDDPRNHLFKEFVRIVKIVQPYFFVMENVARLYTHNSGKTRIEIIQAFQNIGYSVECKILSAADFGVPQIRSRVIFIGRRDKGKISFPEPLQISHQTVGSAIGHFPKLAAGESNPHVANHEAMNHSAQMLEKMAFVKNGGNRNDIPEPLRPKTGDIRKYIRYNSNKPAVCITGDMRKVFHYEQNRALTVRELAALQSFPDNFIFCGSKIAQQQQVGNAVPPLLAKAIAESILKMSENE

SEQ ID NO: 11824 - protein, 1066 aa, Neisseria meningitidis
MRTTPTFPTKTFKPAAMALAVATTLSACLGGGGGTSAPDFNAGGTGIGSNSRATTAKSAAVSYAGIKNEMCKDRSMLCAGRDDVAVTDRDAKINPPPNLHTGDFTNPNDAYKNLINLKPAIEAGYTGRGVEVGIVDTGESVGSISFPELYGRKEHGYNENYKNYTAYMRKEAPEDGGGKDIKASFDDEAVIETEAKPTDIRHVKEIGHIDVVSHIIGGRSVDGRPAGGIAPDATLHIMNTHDGTKNEIMSAAIRNAWVKLGERGVRIVNNSFGTTSRAGTADHFQIANSEEQYRQALLAYSGGDKTDEGIRLMQQSDYGNLSYHIRNKNMLFIFSASNDAQAQPNTLTLLPFYEKDAQKGIITVAGVDRSGEKFNGSNHCGITAMWCLSAPYEASVRFTRTNPIQIAGTSFSAPIVTGTAALLLQKYPWMSNDNLRTTLLTTAQDIGAVGVDSKFGWGLLDAGKAMNGPASFPFGDFTADTKGTSDIAYSFRNDISGTGGLIKKGGSQLQLHGNNTYTGKTIIEGGSLVLYGNNKSDMRVETKGALIYNGAASGGSLNSDGIVYLADTDRSGANETVHIKGDLQLGGEGTLYTRLGKLLKVDGTAMTGGKLYMSARGKGAGYLNRTGQRVPFLSAAKIGRDYSFFTNIETDGGLLASLDSVEKTAGSEGDTLSYYVRRGNAARTASAAAHSAPAGLKHAVEQGGSNLENLMVELDASESSATPETVETAAADRTDMPGIRPYGATFRAAAAVQHANAADGVRIFNSLAATVYADSTAAHADMQGRRLKAVSDGLDHNATGLRVIAQTQQDGGTWEQGGVEGKMRGSTQTVGIAAKTGENTTAAATLGMGHSTWSENSANAKTDSISLFAGIRHDAGDIGYLKGLFSYGRYKNSISRSTGADEHAEGSVNGTLMQLGALGGVNVPFAATGDLTVEGGLRYDLLKQDAFAEKGSALGWSGNSLTEGTLVGLAGLKLSQPLSDKAVLFATAGVERDLNGRDYTVTGGFTGATAATGKTGARNMPHTRLVAGLGADVEFGNGWNGLARYSYAGSKQYGNHSGRVGVGYRF

SEQ ID NO: 11825 - protein, 258 aa, Neisseria meningitidis
MNRPKQPFFRPEVAVARQTSLTGKVILTRPLSFSLWTTFASISALLIILFLIFGNYTRKTTAEGQILPASGVIRVYAPDTGTITAKFVEDGEKVKAGDKLFALSTSRFGAGGSVQQQLKTEAVLKKTLAEQELGRLKLIHGNETRSLKATVERLENQKLHISQQIDGQKRRIRLAESVAKTALGRQELSGLGMVSSDLAKSNEPVYLVKIKPDKPTITAYGEEKPLQIGMTLEADILHEKRRLYEWVLELIYSMSGKL

SEQ ID NO: 11826 - protein, 249 aa, Neisseria meningitidis; identical to SEQ ID NO: 131

SEQ ID NO: 11827 - protein, 525 aa, Neisseria meningitidis
MNKFFKRLFDIIASASGLIILSPVFLILVYLIRKNLGSPVFFIQERPGKDGRPFKMIKFRSMRDAIDKDGNPLPDSERLTDFGKKLRATSLDELPELWNVLKGEMSLVGPRPLLMGYLPLYNEFQNRRHEMKPGVTGWAQVNGRNAISWDEKFAHDVWYIDNFSFWLDIKILFLTVKKVFVKEGISAEGEATMPYFTGNKTDEKNNILILSAGRRVELVQDFQTEAARFSDGISVFATDLNPRMSSACHVSDGSFEVPPISADSYIDSIFNLAVRENIGLIIPTIDTELQKLADERERFEAASVHIVVSDSDFIAQCRDKRKTATLFARYGIRSPEIYDRKKLVFPCFAKPYDGSRAIGAKRIDTPADLTPEVLADTKLMFCQFIDIENKFSEFTVDMYYDRQCRLKCAIPRKRLEVRSGEISKGVTCKNSLYQTLLEKMSVLQGARGCITAQFFYNEETGEFYGVEINPRFGGGFPLTYAAGGNYPSRLMREYLGDEEIPFSDDWENNLIMLRYDAKVLVHEND

SEQ ID NO: 11828 - protein, 321 aa, Neisseria meningitidis
MNPAMIERLKAVENQAEAMGRGARSAYLKQQAQELGISLATLYRKLEAVSIKPTRKRRSDAGKTELKPEEAKLISAVLVEAMRRNGKRLMSVRQAVEMLRANGKIEAARIDGETGEVIPSVRTAFRPLARHRPHRPVMAHPRRRHEDQTPLYRPTVGLGGRNTPRAAHTDRRQHPPFPRHPPTAQTRPPSDHISIKFAHNAIRRLGYDGSTPGKSKHTMHGFRHLFTNISLTAGKDTLTTDLALGHISRAALQRAGFSSLHHYLTADSYRLQERRELAEWYSRRHRQAYEAAAKTPQNKKPPEKNSDGILPKTLAIKPKRY

SEQ ID NO: 11829 - protein, 337 aa, Neisseria meningitidis
MIFSIIVPIYNVEKYLRCCVDSVLAENFADYEMILVDDGSPDGCGKICDEYAGKYPHIKVIHQENGGLSDARNAGIRAAKGDYLIFLDSDDYWADTNRSKKRGGGILFDLQQLADKKVDLILHPSSFNYRDIPKGADFSDNDFVRHFETLVEGRYYIANAWTKIVRREIIIKNNLFFPKGYIHEDFPYSLQLARFIKTFAFYDNPFYQYRVLGGSISHNIKYKNFSDVLTHLDRGVDFLVENKNSPIYGGLQKFVFDNIGYLRSILVRLYFSKNIILIYRKYFSFKEKCRKIFGAKAIRPVFIGKTAFIIGLPILRLLVPPMLYPAIKAVYQKFFSE

SEQ ID NO: 11830 - protein, 657 aa, Neisseria meningitidis
MLPTQPNPTQPNPTQPNPTQPNPTQPNPSPYLIDTAGVNTEAIYTSDGITANSTQLEQLKKLFPACFDADGNFLIDRLQAEIAPQTDIGREFYEMNWLGKSYARLLRNLPPETLISEDKTHNAKPENAGSQNLLIRGDNLEVLKHLKNAYTNSVKMIYIDPPYNTGSDGFVYQDDRKFTPAELACLANIDEDEAARILDFTDKGSNSHSAWLTFMYPRLYIARELLKDDGVIFISIDDNEAAQLKLLCDEVFGEGNFIKDLIVNTSEGGGNAKYVVNGHETVLVYAKDITHFDNLKRPKDIRGKKIVINDELYWIQEDAVREQFGKYGNLHYEDIIEIKGIEFKNKIDKDIENNEYILIPKSYGKTIIGKLRKVSDDFSKFHSILNIGNISKNLTKDGIRELEELFETGKGYSPFETPKPLDLLKRLVLSATFKGNQTDLILDFFAGSGTTAHAVMQLNAEGQNGNRRYICVQLPEKTAEKSEARKAGYPTIFDITKARIEKAAAKIRVEHPDYTGDSGFKIFQTADNFRQHPDKDFSPEQPDLPLNDELSEEQLQTLLTTWTLYDGAALTTPVEPVRLGAYTAYLCEKRLYLMNAGFTSADLLAFIRKLDDDAAFNPNRVIVFGSNMASAMQHELDQAVRGYANKKEIELNVVIRV

SEQ ID NO: 11831 - protein, 765 aa, Neisseria meningitidis; identical to SEQ ID NO: 8087

SEQ ID NO: 11832 - protein, 233 aa, Neisseria meningitidis; identical to SEQ ID NO: 8818

SEQ ID NO: 11833 - protein, 924 aa, Neisseria meningitidis; identical to SEQ ID NO: 2343

SEQ ID NO: 11834 - protein, 158 aa, Neisseria meningitidis
MPIEIERRFLIRNDNWRQYADEPLLLKQAYLSVEKERTVRVRIVGQQAWLTLKGYISELSRSEFEYEIPLADAEKMMETMCPFKMEKWRYPVRWGGSLFEIDVFLGDNAPLVVAEIELPDENADFDRPDWLGREITADGMFTNAYLSRHPFSSWKNAV

SEQ ID NO: 11835 - protein, 508 aa, Neisseria meningitidis
MDYPPLKGAALAWVTLSLGLAVFMEVLDTTIANVAVPVIAGNLGAATTQGTWVITSFAVANAVSVPLTGFLAKRIGEVKLFTAAAVGFVITSWLCGIAPNLQSLVVFRILQGFIAGPLIPLSQSLLMASYPPAKRTLALALWAMTVVVAPVLGPILGGWISGNWHWGWIFFINIPIGIISAWITWKHLKYRETETVKMPTDYVGLTLMVVGIGALQMMLDRGKELDWFASGEIITLGVVALVCLSYFIVWELGEKYPIVDLSLFKDRNFTVGVIATSLGFMVYMGTLTLLPLVLQTNLGYTSTWAGLAAAPVGILPVFLSPLIGRFGNKIDMRLLVTASFLTFAFTFYWRTDFYADMDIGNVIWPQFWQGAGVAMFFLPLTTITLSHMKGGQIAAAGSLSNFLRVLMGGVGVSVVSTLWERREALHHTRFAEHITPYSATLHETAAHLSQHGVSDIQTLGIINNTITQQGFIIGSNEIFMAGSLLFIIMIPVIWLAKPPFHNGGGGGH

SEQ ID NO: 11836 - protein, 547 aa, Neisseria meningitidis
MNAFTRAWYALERHYQDTRHVLLRDRFACEPDRFERMHERLDGMLFDYSKNRLGEDTLQLLCRLAETADLEGKMRALRTGAKVNGSEGRAALHTALRLPDGADAVYVDGRDVLPEIRRELNRALEFAHSLDDGSYQGITGKRITDFVHIGIGGSDLGPAMCVQALEPFRRHIAVHFAANADPACLDAVLCRLNPETTVFCVASKSFKTPETLLNAQAVKAWYRGAGFSESETACHFCAVSADTAAAAAFGIAAERVFAMYDWVGGRYSVWSSVGLPVMVAVGGARFRELLAGAHAMDSHFFHTPPRRNIPVLMALIAVWYNNFQHADGQTAVPYSHNLRLLPVWLNQLDMESLGKSRASDGSPAVCKTGGIVFGGEGVNCQHAYFQLLHQGTRLIPCDFIVPMTAQGVEDGRSRFTVANAFAQAEALMKGKTLDEARAELADLPEAERERLAPHKEFPGNRPSNSILLDRLTPYNLGMLMAAYEHKTFVQGTIWNVNPFDQWGVEYGKQLAKTIIGELEGGTSVHDASTEGLMAFYRECRLKGGGAA

SEQ ID NO: 11837 - protein, 176 aa, Neisseria meningitidis; identical to SEQ ID NO: 1829

SEQ ID NO: 11838 - protein, 792 aa, Neisseria meningitidis
MKPLQMLPIAALVGSIFGNPVFAADEAATETTPVKAEVKAVRVKGQRNAPAAVERVNLNRIKQEMIRDNKDLVRYSTDVGLSDSGRHQKGFAVRGVEGNRVGVSIDGVNLPDSEENSLYARYGNFNSSRLSIDPELVRNIDIVKGADSFNTGSGALGGGVNYQTLQGRDLLLPERQFGVMMKNGYSTRNREWTNTLGFGVSNDRVDAALLYSQRRGHETESAGKRGYPVEGAGSGANIRGSARGIPDPSQHKYHSFLGKIAYQINDNHRIGASLNGQQGHNYTVEESYNLLASYWREADDVNRRRNTNLFYEWTPESDRLSMVKADVDYQKTKVSAVNYKGSFPIEDSSTLTRNYNQKDLDEIYNRSMDTRFKRITLRLDSHPLQLGGGGHRLSFKTFASRRDFENLNRDDYYFSGRVVRTTSSIQHPVKTTNYGFSLSDQIQWNDVFSSRAGIRYDHTKMTPQELNAECHACDKTPPAANTYKGWSGFVGLAAQLNQAWRVGYDITSGYRVPNASEVYFTYNHGSGNWLPNPNLKAERSTTHTLSLQGRSEKGTLDANLYQSNYRNFLSEEQKLTTSGDVSCTQMNYYYGMCSNPYSEKLEWQMQNIDKARIRGIELTGRLNVDKVASFVPEGWKLFGSLGYAKSKLSGDNSLLSTQPLKVIAGIDYESPSEKWGVFSRLTYLGAKKVKDAQYTVYENKGWGTPLQKKVKDYPWLNKSAYVFDMYGFYKPVKNLTLRAGVYNVFNRKYTTWDSLRGLYSYSTTNSVDRDGKGLDRYRAPSRNYAVSLEWKF

SEQ ID NO: 11839 - protein, 209 aa, Neisseria meningitidis; identical to SEQ ID NO: 9868

SEQ ID NO: 11840 - protein, 587 aa, Neisseria meningitidis; identical to SEQ ID NO: 9279

SEQ ID NO: 11841 - protein, 453 aa, Neisseria meningitidis
MSSPSNTNRQTSSRLTYILTVAGATVGFGATWRFPYLVGENGGGAYVFLFCIAMLVIGIPMILVENVIGRRKGVNALDAFGGPMNGKPIAKIWKLVGWMGLLGAFGIMAYYMALGGWVISYIVNIIGGNLNISSPIDGVVTKGFFAEHINSPWEIAFYTLLFVAVNQWILVKGVIGGIEKAAKLMPLLFLFLIAMVVRNVTLPGAMEGVAFYLKPDFSKITAELFVFVLGQVFFALSLGFGVMITLSSYLDKNENLVQTAVITAITNTIIAILAGFMIFPSLFSFGVAPDSGPTLVFQSLPIVFSHMWAGSVFAVIFFSLLLIAALTTSLTIYEVLITTIQEKTKIRRTAAITIVLAAIFIFGNIPSILSYGPWKDVSIFGKNIFDAFDYISGNILFMLTALGSALFVGFVMKDEAKEELLYKGNHTTVNIWFAYVKYLVPLVILLIFISNLF

SEQ ID NO: 11842 - protein, 170 aa, Neisseria meningitidis; identical to SEQ ID NO: 9874

SEQ ID NO: 11843 - protein, 626 aa, Neisseria meningitidis
MSQALPYRPDIDTLRAAAVLSVIVFHIEKNWLPGGFLGVDIFFVISGFLMTMILHREMSGGGGRFSLKAFYIRRIKRILPAFFAVLAATLIGGFFLFTKDDFFLLWKSALTALGFASNLYFARGKDYFDPAQEEKPLLHIWSLSVEEQFYFVFPILLLLVARKSPRVQFGFLAALCALSLAASFMPSAFDKYYLPHLRACEMLVGSLTAVWMRYRQQRNLAVGRCCAAAGALFSACILSACLFAYSKQTAYFPGPAALIPCLAVAALIYFNHYEHPLKKFFQWKITVAAGLISYSLYLWHWPILAFMRYIGPDNLPPYSTAAAIVLILLLSLISYHCIEKPFKKWKGSFAQSVLWIYALPMLILGAGSFFAMRLPFMAQYDRLGLTRSNTSCHNNTGKQCLWGDTEKQPELLVLGDSHADHYKTFFDAVGKKEKWSATMVSADACAYVEGYASRVFQNWAACRAVYRYAEEHLPLYSKVVLAMRWGSQMPENSRSLAYDAGFFQKFDRMLHKLSSEKQAVYLMADNLASSYNVQRAYILSSRIPGYRQTLRPDDESTLKANARIRELAAKYPNVYIIDAAAYIPANFQIGGLPVYSDKDHINPYGGTELAKRFSEKQRFLDTRHNH

SEQ ID NO: 11844 - protein, 548 aa, Neisseria meningitidis; identical to SEQ ID NO: 3181

SEQ ID NO: 11845 - protein, 88 aa, Neisseria meningitidis
MIHEEICAMPMGYETLIGDMAAHCQADKNNASYWRGPYIANRKSYFMQRPAIWILPMKKQSMQTMACLSKLWRHTERKRWNQQIGKCL

SEQ ID NO: 11846 - protein, 61 aa, Neisseria meningitidis; identical to SEQ ID NO: 1836

SEQ ID NO: 11847 - protein, 58 aa, Neisseria meningitidis; identical to SEQ ID NO: 6347

SEQ ID NO: 11848 - protein, 467 aa, Neisseria meningitidis
MNNPDLPYRQTLECLSQKQYNFTEVRRLLTEAALAGHPAAAFELAKHLMDADSPYQDREQGMEMLRIAAEQGHPYARYNLAYIQELEGAPPETLISLYRPPAEAGVPEAQVRLMYLLYASRHFEEALEWAKTSAKNNNPHGQYLLAQYCRYGTPPDFETAHLLYRKAAAQGLPEAHWQLGLQYRFGQGTKVDTAQAVNHLRAAAQQGYIPAYTPLAELILPTAPDEAVYRFQQAAQENDPDAHAALADIYLQGKYQERNHKLALHHAEAAAAERHPEGLRILGDICRYGLGIAPDTEKARHYYRQAAEAGSLSAYQKLISDSALNHPDQYGGIKDSAIRRQRAEQLYQKAQALHYGLQCAPEYAAALKLYTEAAELGHSKAQTNLGSMYYFGQGIAADYGKARKWFEQAAAQKDSMAFYNLACIHYSGHGVGPDKEKACRYLQEAINNGYGQKSVLQELLQQWQNAV

SEQ ID NO: 11849 - protein, 384 aa, Neisseria meningitidis; identical to SEQ ID NO: 4520

SEQ ID NO: 11850 - protein, 284 aa, Neisseria meningitidis; identical to SEQ ID NO: 1957

SEQ ID NO: 11851 - protein, 260 aa, Neisseria meningitidis
MESLTAINKSRIRQAFQKALNDYDRHALIQQKMTINLMTHLQDYLPDMPLENVLELGCGSGMLSALLQKQISANYWLFNDLCDVQPQLAEKLPQSFDFYCGDAENFPFQRQFDLIASASAVQWFHQPDAFIAHCKTGLKANGLLAVATFGKDNLKEVRQITNIGLNYPTLSQWQTWLAKDFELLWCEDFKVILDFDTPLDVLKHLKYTGVTATNQKNWTRKNLNEFIGDYLSAFSMPSGKVHLTYHPLFFIARYSAAGRQ

SEQ ID NO: 11852 - protein, 105 aa, Neisseria meningitidis; identical to SEQ ID NO: 895

SEQ ID NO: 11853 - protein, 137 aa, Neisseria meningitidis; identical to SEQ ID NO: 9005

SEQ ID NO: 11854 - protein, 473 aa, Neisseria meningitidis; identical to SEQ ID NO: 1953

SEQ ID NO: 11855 - protein, 366 aa, Neisseria meningitidis; identical to SEQ ID NO: 8931

SEQ ID NO: 11856 - protein, 500 aa, Neisseria meningitidis
MAKVLIVPVSAGLDASAAAQAFAKALDAQIFQAVDATAETLLAQGKSDDWFDALVGKVAALDAANLVIEGIAPDADKIYLAGKNVELALSLDAAAVFAVRSDNADADELANRLNLAKQFFAAAPGVLEGFVVDGAAASVAEAAAEKTGLTFFGSSDALKDVSVLAGREAKRLSPAQFRYNLIDFARQADKRIVLPEGAEPRTVQAAAICHEKGIARCVLLAKREEVEAVAKERGISLPDSLEIIDPASLVEQYVEPMCELRKSKGLTPEDARKQLQDTVVLGTMMMAQNDVDGLVSGAVHTTANTIRPALQLIKTAPGASLVSSVFFMLLPNQVLVFGDCAVNPNPTAQQLADIAIQSADSAKAFGIDPKVAMISYSTVNSGSGPDVDTVIEATKLAREKRPDLAIDGPLQYDAATVPGVGKSKAPGSPVAGQATVLVFPDLNTGNCTYKAVQRSANVLSVGPLLQGLRKPVNDLSRGALVEDIVFTIALTAVQAKQMEG

SEQ ID NO: 11857 - protein, 177 aa, Neisseria meningitidis; identical to SEQ ID NO: 1513

SEQ ID NO: 11858 - protein, 290 aa, Neisseria meningitidis
MSWLDKILPPKIKNRSKDGSSNVPEGLWHKCPSCSATVYSTELQQNNQVCPKCNHHNPLSARQRLNLLLDEDGREEVAGNVKPTDPLKFKDGKKYPDRLSAARKLTGEDDALVVMKGKMNGLPVVVAAFEFRFIGGSMGSVVGERFVQGIRRAVADNCPFVCVAASGGARMQEGVNSLMQMTKTSAALHLLTEKRLPFISVLTDPTMGGVSASFAFLGDVVLAEPNALIGFAGPRVIEQTVRETLPEGFQRAEFLLEKGAIDQIVDRRDMKRRISDLITLLCRQDKVSAA

SEQ ID NO: 11859 - protein, 119 aa, Neisseria meningitidis; identical to SEQ ID NO: 3614

SEQ ID NO: 11860 - protein, 93 aa, Neisseria meningitidis; identical to SEQ ID NO: 9009

SEQ ID NO: 11861 - protein, 442 aa, Neisseria meningitidis; identical to SEQ ID NO: 3795

SEQ ID NO: 11862 - protein, 360 aa, Neisseria meningitidis; identical to SEQ ID NO: 9549

SEQ ID NO: 11863 - protein, 106 aa, Neisseria meningitidis; identical to SEQ ID NO: 3892

SEQ ID NO: 11864 - protein, 42 aa, Neisseria meningitidis; identical to SEQ ID NO: 9053

SEQ ID NO: 11865 - protein, 97 aa, Neisseria meningitidis; identical to SEQ ID NO: 3898

SEQ ID NO: 11866 - protein, 103 aa, Neisseria meningitidis; identical to SEQ ID NO: 3104

SEQ ID NO: 11867 - protein, 93 aa, Neisseria meningitidis; identical to SEQ ID NO: 2977

SEQ ID NO: 11868 - protein, 108 aa, Neisseria meningitidis
LIWRHPPRQKKTIRNASDRSGLFSGESAASEHTAHAHIDLPSLAHRVHRRPLRLKIKLPSVVGITTQKNELLDIPMFFICFYIVMRSDKRPPDICLDGIVLLNFYKYV

SEQ ID NO: 11869 - protein, 74 aa, Neisseria meningitidis
LQKFYVIDFLSLKSIFLNKFALKYSGLNLNQDKATKPQTVRIVRQGEATPYWFKFNPLYRKFIQWIDREENKVV

SEQ ID NO: 11870 - protein, 51 aa, Neisseria meningitidis; identical to SEQ ID NO: 1872

SEQ ID NO: 11871 - protein, 64 aa, Neisseria meningitidis; identical to SEQ ID NO: 3555

SEQ ID NO: 11872 - protein, 70 aa, Neisseria meningitidis
LEICGIRRKRKPVMYLTVVFFTSVRLLTSKRRAKTGFSSAFYRIFFYLSVWYGYFFISTRRGLRRNNAAG

SEQ ID NO: 11873 - protein, 68 aa, Neisseria meningitidis; identical to SEQ ID NO: 3446

SEQ ID NO: 11874 - protein, 63 aa, Neisseria meningitidis
LLPTRSVSSLLLGEYLEFEENDTKITAEIGSAWHFLGAACRISINGKYYAGNRIVWFAKKAES

SEQ ID NO: 11875 - protein, 507 aa, Neisseria meningitidis
MCCSLSFAEPARIDDRIIKFRPSKSKFFESTGYRKINNEFSKFTEAANVEHIPTGAKARINAKITASVSRAAVLSGVGKLVRQGAKFSTRAVPYVGTALLAHDVYETFKEDIQARGYQYDTETDKFVKGYEYSNCLWYEDERRINRTYGCYGVDSSIMRLMSDYSRFPEVKELMESQMERLARPYWEKLRNRPDMYYFKNYNFKRCYFGLNGGDCLVAKGDDGRTFISFSLQGNSKYKEEMDAKKLEEILSLKVDANPDKYIKATGYPGYSEKVEVAPGTKVNMGPVTDRNGNPVQVVATFGRDSQGNTTVDVQVIPRPDLTPGSAEAPNAQPLPEVSPAENPANNPAPNENPGTRPNPEPDPDLNPDANPDTDGQPGTRPDSPAVPDRPNGRHRKERKEGEDGGLLCKFFPDILACDRLPEPNPAEDLNLPSETVNVEFQKSGIFQDSAQCPAPVTFTVTVLDSSRQFAFSFENACTIAERLRYMLLALAWAVAAFFCIRTVSREV

SEQ ID NO: 11876 - protein, 68 aa, Neisseria meningitidis; identical to SEQ ID NO: 3910

SEQ ID NO: 11877 - protein, 68 aa, Neisseria meningitidis; identical to SEQ ID NO: 3911

SEQ ID NO: 11878 - protein, 64 aa, Neisseria meningitidis; identical to SEQ ID NO: 9896

SEQ ID NO: 11879 - protein, 147 aa, Neisseria meningitidis; identical to SEQ ID NO: 1529

SEQ ID NO: 11880 - protein, 106 aa, Neisseria meningitidis
MLDASPPQERGSRRETRSQKKRHKPPFSDGWAAWSLIRPQGKSAIPNFGQTSPQPPLGSSCRRRTRPNGFGGHTARWSAGMHSNAASPPYRSWRKSKNPQIRKGGG

SEQ ID NO: 11881 - protein, 40 aa, Neisseria meningitidis
MRPLQNSPKFPPRHLGDFGEFCKGLGQYFERSARKFVWKP

SEQ ID NO: 11882 - protein, 131 aa, Neisseria meningitidis; identical to SEQ ID NO: 3914

SEQ ID NO: 11883 - protein, 65 aa, Neisseria meningitidis; identical to SEQ ID NO: 204

SEQ ID NO: 11884 - protein, 69 aa, Neisseria meningitidis; identical to SEQ ID NO: 1883

SEQ ID NO: 11885 - protein, 61 aa, Neisseria meningitidis; identical to SEQ ID NO: 9900

SEQ ID NO: 11886 - protein, 40 aa, Neisseria meningitidis; identical to SEQ ID NO: 1884

SEQ ID NO: 11887 - protein, 116 aa, Neisseria meningitidis; identical to SEQ ID NO: 3836

SEQ ID NO: 11888 - protein, 140 aa, Neisseria meningitidis
MNLEQLGRRDALLSGLLKQAGQWRRLDAAVKKLLPANLHPHFQTACVEDGRLILLAANNMAASRLKMIAPSVLPQLAGLDASIRSVSVRLVPKPEKPPKTNTLHLSKAALESFGSAAAKLEKRHPELAEALANLVRRHGA

SEQ ID NO: 11889 - protein, 121 aa, Neisseria meningitidis; identical to SEQ ID NO: 847

SEQ ID NO: 11890 - protein, 117 aa, Neisseria meningitidis; identical to SEQ ID NO: 3438

SEQ ID NO: 11891 - protein, 73 aa, Neisseria meningitidis; identical to SEQ ID NO: 3916

SEQ ID NO: 11892 - protein, 70 aa, Neisseria meningitidis; identical to SEQ ID NO: 3527

SEQ ID NO: 11893 - protein, 67 aa, Neisseria meningitidis; identical to SEQ ID NO: 86

SEQ ID NO: 11894 - protein, 67 aa, Neisseria meningitidis; identical to SEQ ID NO: 3513

SEQ ID NO: 11895 - protein, 59 aa, Neisseria meningitidis; identical to SEQ ID NO: 1937

SEQ ID NO: 11896 - protein, 61 aa, Neisseria meningitidis; identical to SEQ ID NO: 9904

SEQ ID NO: 11897 - protein, 132 aa, Neisseria meningitidis
LNMKERIVGQSGELFCFGQMPVWKAENLPEVLLSGYSSEEGEWVCLNVLQGDVEVRTQDGAAEVWSAESGDCVFAPQQVFSVKLKTDDAEIRLSLYCAAADYFHKKYGMSATHSAVAAARDTVPAGRALDMG

SEQ ID NO: 11898 - protein, 71 aa, Neisseria meningitidis; identical to SEQ ID NO: 3920

SEQ ID NO: 11899 - protein, 183 aa, Neisseria meningitidis; identical to SEQ ID NO: 3701

SEQ ID NO: 11900 - protein, 410 aa, Neisseria meningitidis
MPSAHYPEMSEKLMAVLMAMLVTLMPFSIDAYLPAIPEMAQSLNADVHRIEQSLSLFMFGTAFGQVVGGSVSDIKGRKPVALTGLAVYCLAVAAIVFASSAEQLLNLRVVQAFGAGMTVVIVGAMVRDYYSGRKAAQMFALIGIILMVVPLVAPMVGALLQGLGGWQAIFVFLAAYSLVLLGLVQYFLPKPAVGGKIGRDVFGLVAGRFKRVLKTRAAMGYLFFQAFSFGSMFAFLTESSFVYQQLYHVTPHQYAWAFALNIITMMFFNRITAWRLKTGAHPQSILLWGIVVQFAANLSQLAAVLFFGLPPFWLLVACVMFSVGTQGLVGANTQACFMSYFKEEGGSANAVLGVFQSLIGAGVGMAATFLHDGSATVMAATMTASTSCGIALLWLCSHRAWKENEQSEYL

SEQ ID NO: 11901 - protein, 78 aa, Neisseria meningitidis
MAYTSTIGKNMDEAVFADWALKICLTGLIIFLGFIVWNLGKESKAGKFGIAILFLVLGLGVFGFVFKELLIKFLVLPK

SEQ ID NO: 11902 - protein, 78 aa, Neisseria meningitidis; identical to SEQ ID NO: 1907

SEQ ID NO: 11903 - protein, 50 aa, Neisseria meningitidis
MSALLPAACQHVSDRHGKFRFQILHCQRRQTGSKKRRKRRRICPVPFAGQ

SEQ ID NO: 11904 - protein, 66 aa, Neisseria meningitidis; identical to SEQ ID NO: 3365

SEQ ID NO: 11905 - protein, 58 aa, Neisseria meningitidis
MCVAIMAYFGGFVRALFDLGVFERGGVKGRGKWFSRVWRRSEVLCLMCGGIFSVKLIL

SEQ ID NO: 11906 - protein, 189 aa, Neisseria meningitidis
VNYKIYDGAKIIKKENLSIGDYSQIDDFVFFNCGEKSILGSFVHISSFTSIIGGGEFYMDHFSGLSAGCRIITGSDDFMGGGGTNPTVPSKYTNVKKSSVRIGKHAILGTNVTVLPGVTIGDGVAVGAGAIVRKNLEPWTIYVGVDCKPLKRRSQDKILELEKHLVAEFNLDLCPIIPSPNLPKPKETR

SEQ ID NO: 11907 - protein, 376 aa, Neisseria meningitidis; identical to SEQ ID NO: 7223

SEQ ID NO: 11908 - protein, 318 aa, Neisseria meningitidis
MHQYYDAVILSVGNGLLKRFFKQNAQLNIASRPLIITLFPGVVFGDQASILSRMGADIVLYNNKHDFRIAETYKKQYKLSCQNILYGYPNFRHASKGCHGERIYFIDQVKIPFKKEERIYTLKKLIALAEKYPEKEFTILLRVADKDITVHQDKHSYIELAKQFQLPSNLTIERKSTAQAFQEMGYCLSYSSTMLFEAECKGIPVGVVADLGFSKSYANQHFLGSGVLIYFDQIDFTSPKIANPGWLDCYATKKVITTDEFNKLLKQVVPLQHDYQEYLFAVNSIESTQTIFLRKFKKLIRDPKQFFYDSKWFRRRNS

SEQ ID NO: 11909 - protein, 266 aa, Neisseria meningitidis
MADILPSDKRRQPPKTKGNPMNIIEQEMKHSSLRKVDAEIAKIIADAHKINAESVKIAQESRWYPMIAATGLVTAIAAVLALIFKFAPQAPRGALSLQNEQSRTIQPLPRMDYRARRRKPFHYPLPLSPPDCQNPQADRRRMPGRALPPFRKRHHPLRFYFFRRQTGRRSPICRRPYRNLPQGSQKNMRNKINRNDMELGYTPYNLRTLRNRCKLTQAELAQIVGVKHYIQVGRWEAEPDTETRRADMPLEKWRQFLDWIEKTNAV

SEQ ID NO: 11910 - protein, 279 aa, Neisseria meningitidis; identical to SEQ ID NO: 3315

SEQ ID NO: 11911 - protein, 47 aa, Neisseria meningitidis; identical to SEQ ID NO: 3740

SEQ ID NO: 11912 - protein, 302 aa, Neisseria meningitidis
MEKAEHLNSSRFVNLVKSGGGSYVEGSYRFDTLSNGISIHGGTVTARCDFCSSRLAEPYVSFVLLLEGSLDFGINRCRFQIDADGGKIVLIAVGEEVLFSRYLYRGGKTVKMTIKGMEQWLLRPEYARFAPLLYREPVRIDLPPNLRGLAASCLKAVPKGHLGKTLRREADVLRLLSDLWDTVSDGIGPAAGQTAEADAMPSEDFSRTLNAAFADGQVNRLTDALNISERTLQRRMRDHFGITASEWLHHKQMQHALYLLQNGGKSIGETAYLCGYRHVSSFTQAFRQYFGSTPAETKKENR

SEQ ID NO: 11913 - protein, 259 aa, Neisseria meningitidis
QPPKNLLFSSLLFSSLLFSSAAQAASEDSGHGPYYVQADLAYAAERITHDYPKATGANNTSTVSDYFRNIRAHSIHPRVSVGYDFGGWRIAADYASYRKWKESNSSTKKVTEDIADNYKETKTEHQGNGSFHAASSLGLSAIYDFKLNDKFKPYIGARVAYGHVKHQVHSVETKTTTVTSKPTATSPQGGPIIQTDPSKPPYHESHSISSLGLGVIAGVGFDITPKLTLDTGYRYHNWGRLENTRFKTHEVSLGMRYRF

SEQ ID NO: 11914 - protein, 133 aa, Neisseria meningitidis; identical to SEQ ID NO: 5891

SEQ ID NO: 11915 - protein, 183 aa, Neisseria meningitidis
MEFLSLHPWWSFFIILTIILSYIGFCAHLHIQNRAVFFYSYRDVTIIFLTPVILIALSYLIKNKEILSACILCITLIAFSWAWIIIYRPNTKRFFLSLLIVWGKLLLSTIVWAILAISLGLAVITGNSKRKKYERRDRHAERNEKAFIGALLVGFELSRNLLNLCCLHKDFSTPSKNIEVNRS

SEQ ID NO: 11916 - protein, 589 aa, Neisseria meningitidis
MNTKLTKIISGLFVATAAFQTASAGNITDIKVSSLPNKQKIVKVSFDKEIVNPTGFVTSSPARIALDFEQTGISMDQQVLEYADPLLSKISAAQNSSRARLVLNLNKPGQYNTEVRGNKVWIFINESDDTVSAPARPAVKAAPAAPAKQQAAAPSTKSAVSVSTGRKISLDFQDVEIRTILQILAKESGMNIVASDSVNGKMTLSLKDVPWDQALDLVMQARNLDMRQQGNIVNIAPRDELLAKDKAFLQAEKDIADLGALYSQNFQLKYKNVEEFRSILRLDNADTTGNRNTLVSGRGSVLIDPATNTLIVTDTRSVIEKFRKLIDELDVPAQQVMIEARIVEAADGFSRDLGVKFGATGKKKLKNDTSAFGWGVNSGFGGDDKWGAETKINLPITAAANSISLVRAISSGALNLELSASESLSKTKTLANPRVLTQNRKEAKIESGYEIPFTVTSIANGGSSTNTELKKAVLGLTVTPNITPDGQIIMTVKINKDSPAQCASGNQTILCISTKNLNTQAMVENGGTLIVGGIYEEDNGNTLTKVPLLGDIPVIGNLFKTRGKKTDRRELLIFITPRIMGTAGNSLRY

SEQ ID NO: 11917 - protein, 390 aa, Neisseria meningitidis
MDLSIVVPIYNVESYLEACLSSIEPILSNENVELLLVNDGSKDGSEDICYKYIDKTTNNKQQTTNNKQQTTNNKQQTTNNKQQTTNNKQQTTNNKQQTTNNKQQTTNNKQQTTNNKQQTTNNKHRTPNIKYIYQDNQGLSEARNTGIKNSNGKYIVFIDSDDFINCQVLLDFLSKDDIDMPDVVFLNAVKYDKGSVSYFGEDYQPEKILNQSKVEVLKGLCRFRKFPGSAWNKIIKRELIIKEKLFFEKGIYSEDIEWSMRLFNAATTFFYLDGCYYYYRQGRKDSITGTVSEKSIKSLLYILEKNAEMEFNRDISSYLYSFLSYEYLVLLFIMTSKNIECDADIKRRAYHLRFMLLKSNKLIYKLIFPIITLFGVDITGRILKVIRGNV

SEQ ID NO: 11918 - protein, 385 aa, Neisseria meningitidis
MKRQALAAMIASLFALAACGGEPAAQAPAASAEAASSAAQTAAETPTGELPVIDAVTTHAPEVPPAIDRDYPAKVRVKMETVENMTMEDGVEYRYWTFDGDVPGRMIRVREGDTVEVEFSNNPSSTVPHNVDFHAATGQGGGAAATFTAPGRTSTFSFKALQPGLYIYHCAVAPVGMHIANGMYGLILVEPKEGLPKVDKEFYIVQGDFYTKGKKGAQGLQPFDMDKAVAEQPEYVVFNGHVGSIAGDNALKAKAGETVRMYVGNGGPNLVSSFHVIGEIFDKVYVEGGKLINENVQSTIVPAGGSAIVEFKVDIPGSYTLVDHSIFRAFNKGALGQLKVEGAENPEIMTQKLSDTAYAGNGAAPAASAPAASAPAASASEKSVY

SEQ ID NO: 11919 - protein, 64 aa, Neisseria meningitidis
MPSENRSAGFVVHYAVLQDKAQGRAAGCIVATVFLPDGVKNTVATPTDNEKREQCRLNRVLRRA

SEQ ID NO: 11920 - protein, 163 aa, Neisseria meningitidis; identical to SEQ ID NO: 2144

SEQ ID NO: 11921 - protein, 141 aa, Neisseria meningitidis; identical to SEQ ID NO: 3955

SEQ ID NO: 11922 - protein, 91 aa, Neisseria meningitidis; identical to SEQ ID NO: 3956

SEQ ID NO: 11923 - protein, 255 aa, Neisseria meningitidis
MNPAPKNLLFSSLLFSSLPQRRRQVKTAAAARIMCRRIPMPPNALPTIIRKQPVQTTQAQAIISETSVRIPSTPECQSATISATGERQIMPVIENGTTINIPSTQKSCKETIAVASGKNRRKIRKTVHSTPSHRSAYPPFTISNSTINSINSNPISARASPTDTLNIRFIREKKPRLLSVNQGLALQSQARSKVRPPNLPITKATVSAAWVLVSSPVSVSTSHPSPWTPDTATTTGDAKTPASKPTKSHWACATA

SEQ ID NO: 11924 - protein, 203 aa, Neisseria meningitidis
MNFTRLLNQVLSTVQKSNTFSDSPLNSFGGGALVAGVASMLLNGKNRKTITKIGSTAALGYLAYRGYQMWQQNKGRATVTQSDFQPAGETEETYSRTVLRTMIATAASDGMIDEAERRTIEQESGTDPETAAWLAAEYRLPASIEDIAAAVGNDEALAAEAYLAARLVCADLSRKETVFLARLSQALELDDNLVENLERQLGF

SEQ ID NO: 11925 - protein, 680 aa, Neisseria meningitidis
MKLEASKQASKQEKFKKSFIISLFFSILYTSPLLAVDYVYDNSKLTNEQIDRLKKLRDKSSEYWKQETYLLKPTNGSSQNSLKVPALYSKTHQFKNINNSKKISFYDKEYTEDYLVGFARGFGVEKRNGEEEKTLQQYFKDCVNTGNSNNDKCEQPSFENSGPRLIKSDIFALAPQIKNSHINSEILSVGNYIEWLRPTLNKLPSWQEHLYSGLDPFHYIEVTDNSHVIGQTISLDEFRLENSLWEPRWDSDVGELKTTNADIRFNTKSESLLVKEDYAGGARFRFAYDLKDKVSETPVLTFEKNITGTSDIIFENPIDDLKSLDGHQIIKVNGTADKHAFRLSGKHQKGIYTLSLQQRPEGFFTKVQERDDISIYAQQAQAANTLFALRLNDKNSDIFDRTLPRKGLWLRVIDGHSNQWVQGKTAPVEGYRKGVQLGGEVFTWQNESNQLSVGLMSGQAEQRSTFRNPDTDNLTTGNVKGFGAGIYATWHQLQDKQTGAYADSWVQYQRFRHRINTEDATERFTSKGITASIEAGYNALLAEHFTKKGNSLRVYLQPQAQLTYLGVNGKFSDSENAHVNLLGSRQLQTRVGVQAKAQFSLYKNIAIEPFAAVNALYHNKPFGVEIDGERRVINNKTAIESQLGVAVKIKSHLTLQASFNRQTSKYHQAKQGALNLQWTF

SEQ ID NO: 11926 - protein, 705 aa, Neisseria meningitidis
MTLKASKQASKQASKQASKQASKQASSRVNLLTLSVLSLFCTPYVGSDAYDPVKEAEIKNKFILEAAEDRNSHVWRGPCSISFDCFGMFRAQLGSNTRSTKIGDDADFSFSDKPKPGTSHYFSSGKTDQNSSEYGYDEINIGKNYNSGILAVDNMPVVKKYITDTYGDNLKDAVKKQLQDLYKTRPEAWEENKKRTEEAYIEQLGPKFSILKQKNPDLINKLVEDSVLTPHSNTSQTSLNNIFNKKLHVKIENKSHVAGQVLELTKMTLKDSLWEPRRHSDIHTLETSDNARIRLNTKDEKLTVHKAYQGGADFLFGYDVRESDEPALTFEQNVSGKSNVVLERRPENLKTLDGRKLIAAEKADPNSFAFKQNYRQGLYELLLKQCEGGFCLGVQRLAIPEAEAVLYAQQAYAANTLFGLRAADRGGDVYAADPSRQKLWLRFIGGRSHQNIRGGAAADGRRKGVQIGGEVFVRQNEGSRLAIGVMGGRAGQHASVNGKGGAAGSYLHGYGGGVYAAWHQLRDKQTGAYLDGWLQYQRFKHRINDENRVERYKTKGWTASVEGGYNALVAEGVVGKGNNVRFYLQPQAQFTYLGVNGGFTDSEGTAVGLLGSGQWQSRAGIRAKTRFALRNGVNLQPFAAFNVLHRSKSFGVEMDGEKQTLAGRTALEGRFGIEAGWKGHMSARIGYGKRTDGDKEAALSLKWLF

SEQ ID NO: 11927 - protein, 384 aa, Neisseria meningitidis
MSIHLDFGISPKTFRQTNLYQKPKLFKGAVRNLEAASWKDINEIYQRADPTAPLFYLRKKGAIVPKEEYVESFDALGKTRYRFIKSVIYEHMKNGASLVYNHINNEPFSDHISRQVARLAGAHTIVSGYLAFGSDESYKNHWDTRDVYAIQLFGKKRWQLTAPDFPMPLYMQQTKDTDISIPEHIDMDIILEAGDVLYIPRGWWHRPIPLGCETFHLAVGTFPPNGYNYLEWLMKKFPTIESLRHSFSDWEQDRTRINDTAAQIAAMIADPVNYEAFSEDFLGKERTDTAFHLEQFANPNATPLSDDVRLRLNANNLDTLEKGYLIGNGMKISVDELGKKVLEHIGKNEPLLLKNLLVNFNQGKYEEVRKLIYQLIELDFLEIL

SEQ ID NO: 11928 - protein, 90 aa, Neisseria meningitidis; identical to SEQ ID NO: 311

SEQ ID NO: 11929 - protein, 601 aa, Neisseria meningitidis; identical to SEQ ID NO: 2513

SEQ ID NO: 11930 - protein, 305 aa, Neisseria meningitidis; identical to SEQ ID NO: 1198

SEQ ID NO: 11931 - protein, 475 aa, Neisseria meningitidis; identical to SEQ ID NO: 3229

SEQ ID NO: 11932 - protein, 545 aa, Neisseria meningitidis; identical to SEQ ID NO: 3410

SEQ ID NO: 11933 - protein, 371 aa, Neisseria meningitidis; identical to SEQ ID NO: 3024

SEQ ID NO: 11934 - protein, 261 aa, Neisseria meningitidis; identical to SEQ ID NO: 3032

SEQ ID NO: 11935 - protein, 58 aa, Neisseria meningitidis; identical to SEQ ID NO: 1171

SEQ ID NO: 11936 - protein, 480 aa, Neisseria meningitidis; identical to SEQ ID NO: 2461

SEQ ID NO: 11937 - protein, 762 aa, Neisseria meningitidis
LTLYAVEELNYDKLDSHKKRKFLGITYDKVHDTSTQQMQTALPSRVVAESANLQSGWDTKLQGTQFETTLGGAVIRAGVGDQARADAKIILEGIKSSIHTETVSSSKSALWQKQAGRGSNIETLQLPSFTGPVAPVLSAPGGYIVDIPKGNLKTEIEKLAKQPEYAYLKQLQVAKNINWNQVQLAYDRWDYKQEGLTEAGAAIIALAVTVVTSGAGTGAVLGLNGAAAAATDAAFASLASQASVSFINNKGDVGKTLKELGRSSTVKNLVVAAATAGVADKIGASALNNVSDKQWINNLTVNLANAGSAALINTAINGGSLKDNLGDAALGAIVSTVHGEVASKIKFNLSEDYITHKIAHAIAGCAAAAANKGKCQDGAIGAAVGEIVGEALTNGKNPATLTAKEREQILAYSKLVAGTVSGVVGGDVNAAANAAEVAVKNNQLSDKEGREFDNEMTACAKQNNPQLCRKNTVKKYQNVADKRLAASIAICTDISRSTECRTIRKQHLIDSRSLHSSWEAGLIGKDDEWYKLFSKSYTQADLALQSYHLNTAAKSWLQSGNTKPLSEWMSDQGYTLISGVNPRFIPIPRGFVKQNTPITNVKYPEGISFDTNLKRHLANADGFSQKQGIKGAHNRTNFMAELNSRGGRVKSETQTDIEGITRIKYEIPTLDRTGKPDGGFKEISSIKTVYNPKKFSDDKILQMAQNAASQGYSKASKIAQNERTKSISERKNVIQFSETFDGIKFRSYFDVNTGRITNIHPE

SEQ ID NO: 11938 - protein, 157 aa, Neisseria meningitidis; identical to SEQ ID NO: 140

SEQ ID NO: 11939 - protein, 179 aa, Neisseria meningitidis; identical to SEQ ID NO: 8483

SEQ ID NO: 11940 - protein, 636 aa, Neisseria meningitidis; identical to SEQ ID NO: 3644

SEQ ID NO: 11941 - protein, 281 aa, Neisseria meningitidis; identical to SEQ ID NO: 11711

SEQ ID NO: 11942 - protein, 191 aa, Neisseria meningitidis; identical to SEQ ID NO: 2004

SEQ ID NO: 11943 - protein, 90 aa, Neisseria meningitidis
VNNSVITVIGKDRVGIVYDVSKILAENRINILNISQQLMDDFFTMIILVDTSKCPKSRQDVLDLFAEESKKLALDIRMQNEEIFQAMHRI

SEQ ID NO: 11944 - protein, 176 aa, Neisseria meningitidis; identical to SEQ ID NO: 2300

SEQ ID NO: 11945 - protein, 164 aa, Neisseria meningitidis; identical to SEQ ID NO: 7379

SEQ ID NO: 11946 - protein, 245 aa, Neisseria meningitidis
MIILDKVSKHYQTRDKTRFAAVEPTSLEIRDGEIFGLMGYSGAGKSTLLRLINLLERPDTGKVNVCGQELTALDAAALRQARQNIGMVFQQFNLLNNRTVAGNVAFPLEIAGWPSEKIKARVAECLEIVGLTERAGHYPAQLSGGQKQRVGIARALASKPQVILADEPTSALDPATTRSVLECLEDINKRFNVTIVIVTHEMSVIRRLCDRAALLDKGKVVEIVEVRGNQIHARSDIGRELIRED

SEQ ID NO: 11947 - protein, 274 aa, Neisseria meningitidis; identical to SEQ ID NO: 3529

SEQ ID NO: 11948 - protein, 86 aa, Neisseria meningitidis; identical to SEQ ID NO: 3484

SEQ ID NO: 11949 - protein, 514 aa, Neisseria meningitidis; identical to SEQ ID NO: 3437

SEQ ID NO: 11950 - protein, 556 aa, Neisseria meningitidis; identical to SEQ ID NO: 2805

SEQ ID NO: 11951 - protein, 259 aa, Neisseria meningitidis; identical to SEQ ID NO: 2706

SEQ ID NO: 11952 - protein, 333 aa, Neisseria meningitidis; identical to SEQ ID NO: 7958

SEQ ID NO: 11953 - protein, 140 aa, Neisseria meningitidis; identical to SEQ ID NO: 2732

SEQ ID NO: 11954 - protein, 283 aa, Neisseria meningitidis
MARHVWQAGRFEIGLDKPKIMGIVNLTPDSFSDGGAYSQNARTALAHAERLLKEGADILDIGGESTRPGADYVSSEEEWARVEPVLAEVAGWGVPVSLDTRRTVIMEKALALGGIDIINDVAALTDEGAVELLARQTDTGICLMHMRGLPENMQINPKYQDVVGEVARYLKARAAECIAAGIAPQRITLDPGFGFGKTLQHNIALMRHLPELMAETGFPLLIGVSRKRMVGELTGEADAAARVHGSVAAAVAAVARGAQIVRVHDVKATADALKVWEALGINL

SEQ ID NO: 11955 - protein, 328 aa, Neisseria meningitidis; identical to SEQ ID NO: 991

SEQ ID NO: 11956 - protein, 436 aa, Neisseria meningitidis; identical to SEQ ID NO: 3415

SEQ ID NO: 11957 - protein, 765 aa, Neisseria meningitidis
MLAPELEQILQQLYREARKAHYEFISLEHLLLVLIEEDASVPNVLKLCGADLKVVSEQLAASVAENTPLIPEHLLDTVETRPTLGFQRVMQRAMVHTQSAGKAAVEPLDVLVALMSETDSHTVYFLKLQSVTRFEVLRCIAHGSPDEDEDEDDGNYSSDGMDDDNGNRTKPGKNPLSAYTVNLNTEVKAGRIDPLIGRKHEMERLVQILCRRRKNNPLLVGEAGVGKTALAEGLAHQIVNGGIPDALKDAEVYALDMGSLLAGTKYRGDFEARVKSVLKQLEKIPHAILFIDEIHTIIGAGSTSGGTMDASNLLKPALAKGSLRCIGATTYDEYRTIFDKDYALSRRFQKIDVVEPTVSETVQILRGLKPMFEAFHQVRYTQGALEAAAELSARYINERFLPDKAIDVMDEAGAAQRILPKSKQKKVIGKAQIETVIAKVSRIPEKTVSHDDKQVLQFLGRDLKNMVYGQENAIDALVAAVKMSRSGLALPDKPIGSFLFSGPTGVGKTEAAKQLAYSLGVPLQRFDMSEYMERHAVSRLIGAPPGYVGFEQGGLLTEAVNKQPHCVLLLDEIEKAHPDIFNVLLQVMDAGKLTDNNGKSADFRNVILIMTTNAGAESLSRPSLGFTAKRERGDEMQAINKLFTPEFRNRLDAIIPFAPLSEPIIVKVVDKFLLQLEHQLLDKKVEAEFTSALHKYLAEKGFDPQMGARPMHRLIQEKIRKPLADELLFGKLSDGGFVRIDWDAVKEEAVLKFKKSKVKIKTASA

SEQ ID NO: 11958 - protein, 416 aa, Neisseria meningitidis; identical to SEQ ID NO: 8411

SEQ ID NO: 11959 - protein, 468 aa, Neisseria meningitidis; identical to SEQ ID NO: 8840

SEQ ID NO: 11960 - protein, 311 aa, Neisseria meningitidis
MSVLIIVEHDNKQLNPTTLHAVTAAAKLGKIDLLVAGSGASAVVEFAKQVAGVEKVLVADAAHYAEGLAEELAPLVVKLAADYCYVAATATTFGKNLLPRVAALLDVPQISDLTEIVDNTTFVRPIYAGNAFETVQADSEKLVLTFRATVFDAVAAQGGNAEVINVEATPAQNLSRFVNRQLSHSDRPELTQAKVIVSGGRALGSAEKFNEVLTPLADVLGAAIGASRAAVDAEYAPNDAQVGQTGKVVAPQLYFAIGISGAIQHVAGMQDSKVIVAINKDADAPIFNVADYGLVGDLFEIVPQLTEVLKN

SEQ ID NO: 11961 - protein, 117 aa, Neisseria meningitidis; identical to SEQ ID NO: 3438

SEQ ID NO: 11962 - protein, 241 aa, Neisseria meningitidis; identical to SEQ ID NO: 400

SEQ ID NO: 11963 - protein, 243 aa, Neisseria meningitidis; identical to SEQ ID NO: 2962

SEQ ID NO: 11964 - protein, 138 aa, Neisseria meningitidis
MAKLTEQDILNWNGPEDDYMNDDHLAFFRELLVKMQDELIENASVTTGHLQEHESAPDPADRATQEEEYALELRTRDRERKLLSKIQATIRNIDEGDYGFCADTGEPIGLKRLLARPTATLSVESQERRERMKKQFAD

SEQ ID NO: 11965 - protein, 744 aa, Neisseria meningitidis
MCKPNYGGIVLLPLLLASCIGGNFGVQPVVESTPTAYPVTFKSKDVPTSPPAKPSIETTPVNQPAVGAAMRLPRRNIAAFDKNGNEIPDSKQAEEYLPLKEEDILFLDGTPKEQADKLKKEINGRYPNVTIYTSDLKDAVYKYEHVRAGYVYTRFGTDEIEQNSGGKQVTHRLGYDGFVYYSGERPSQSLPSAGTVKYSGNWQYMTDVKRHRAGKAVGIDNLGYITFYGNDVGATSYAAKDVDEREKHPAKYTVDFDKKTLTGQLIKNQYVQKKTDEKKPLTIYNITAKLDGNRFTGSAKVNPDLAKNPAGNERLFFHADADQRLEGGFFGDNGEELAGRFISNDNSVFGVFAGKKTETANAADTKPALPSGKHTKILDSLKISVDEATDGHARKFAISSMPDFGHPDKLLVEGREIPLVNKEQIIKLADGRKMTVSACCDFLTYVKLGRIKTERPAVKPKAQDEEGDEEDAGVDNGEDEEEIAEESEDEVSEDEGEEAEVSEDESEEDEEIVEEETEEEAEPEEAEETEEESPAESGSGSNAILPAPEAPGRDIDLFLKGIRTAEADIPQTGKARYTGTWEARIGEPIQWDNQADKEAAKAVFTVDFDKKSISGTLTEQNGVEPAFHIEKGKIEGNGFYATARTRDNGIDLSGQGSTKPQIFQANDLRVEGGFYGPKAEELGGTIFNKDGKSLGITEGTENKVEAEVEVEVEADVGKQLEPDEVKHKFGVVFGAKKDMQEVEK

SEQ ID NO: 11966 - protein, 251 aa, Neisseria meningitidis; identical to SEQ ID NO: 3511

SEQ ID NO: 11967 - protein, 498 aa, Neisseria meningitidis; identical to SEQ ID NO: 2733

SEQ ID NO: 11968 - protein, 156 aa, Neisseria meningitidis; identical to SEQ ID NO: 3234

SEQ ID NO: 11969 - protein, 109 aa, Neisseria meningitidis; identical to SEQ ID NO: 2476

SEQ ID NO: 11970 - protein, 468 aa, Neisseria meningitidis; identical to SEQ ID NO: 29

SEQ ID NO: 11971 - protein, 189 aa, Neisseria meningitidis
LYCLRLRRLVLIFVNPLYLHQFHETQVGSVKQLIAHFDRLIDELDKQIDDHTHTHFDGKAQVAEQIKGIGSITTATLMAMLPELGRLSHKRIASLAGIAPHPRESEETKFKSRCFGGRSAVRKALYMATVAATRFEPLIRDFYQRLLSEGKPYKVAVTACMRKLLTISNARMRDYFAENDTAENGIRTA

SEQ ID NO: 11972 - protein, 158 aa, Neisseria meningitidis; identical to SEQ ID NO: 2965

SEQ ID NO: 11973 - protein, 54 aa, Neisseria meningitidis; identical to SEQ ID NO: 2634

SEQ ID NO: 11974 - protein, 228 aa, Neisseria meningitidis
MTVLQERYREVSDRIGKLVLQAGRKPHSVSLIAVGKTFPSDGIREVYAAGQRDFGENYIQEWYGKTEELADLTDIVWHVIGDVQSNKTKFVAERAHWVHTVCRLKTAVRLSGQRPSSMPPLQVCIEVNIAGEAVKHGVAPEEAVALAVEVAKLPNIVVRGLMCVAKANSSETELKVQFQTMRKLLADLNTAGVKADVLSMGMSDDMPAAIECGATHVRIGSAIFGKRG

SEQ ID NO: 11975 - protein, 134 aa, Neisseria meningitidis; identical to SEQ ID NO: 2143

SEQ ID NO: 11976 - protein, 550 aa, Neisseria meningitidis; identical to SEQ ID NO: 3515

SEQ ID NO: 11977 - protein, 241 aa, Neisseria meningitidis; identical to SEQ ID NO: 2918

SEQ ID NO: 11978 - protein, 78 aa, Neisseria meningitidis; identical to SEQ ID NO: 1622

SEQ ID NO: 11979 - protein, 1389 aa, Neisseria meningitidis; identical to SEQ ID NO: 3356

SEQ ID NO: 11980 - protein, 193 aa, Neisseria meningitidis; identical to SEQ ID NO: 1378

SEQ ID NO: 11981 - protein, 334 aa, Neisseria meningitidis; identical to SEQ ID NO: 3486

SEQ ID NO: 11982 - protein, 929 aa, Neisseria meningitidis
MTDYSKTVNLLESPFPMRGNLAKREPAWLKSWYEQKRYQKLREIAKGRPKFILHDGPPYANGDIHIGHAVNKILKDIIIRSKTQAGFDAPYVPGWDCHGLPIEVMVEKLHGKDMPKARFRELCREYAAEQVARQKKDFIRLGVLGDWDHPYLTMDFKTEADTVRMLGEIYKSGYLYRGAKPVQFCLDCGSSLAEAEVEYKDKVSPAIDVAYPFKDTAALAAAFGLAGIEGKAFAVIWTTTPWTLPASQAVSAGADVVYQLIDTPTGKLVLAKDLAEDALKRYGFSDGIAILAETTGDKLENLHMNHPFLERDIPMLNGEHVTTDAGTGLVHTAPAHGLEDYAVCNKYGIELYNPVNAEGKYIGETPRVAGMRVWEANPVILQWLEETSNLLASSKIEHSYAHCWRHKTPLIYRATGQWFVGMDKAGADGKTLRDKAIKAVDDTEFFPSWGRARLEAMIEGRPDWVVSRQRYWGTPMTFFVHKETGELHPNSAELLEKVALKIEEKGIEAWFSLDKSELLSAEDCENYDKLSDTMDVWFDSGSTHYSVVKQREELEWPADLYLEGSDQHRGWFQSSMLTGCASSMGRAPYKQLLTHGFVVDGEGKKMSKSIGNVVAPQEVYNEFGADILRLWAASTDYSGELAISKEILKRVTESYRRIRNTLSFLFANLSDFNPIEDAVQQADMVEIDRYAVVLARQLQERLAGDYYPRYAFHFAVKDIVSFCSEDLGAFYLDILKDRLYTTKADSHARRSAQTALYHITRSLVLLIAPILCFTGEEAWDIIGGGEEDSVLFHTWHEFPTINEKAEAELVKKWTAVRKVREAVTAAIEPLRADKTIGSSLQAEAEITAPEEMAGYLNALGEELRFAMLVSKAEVKVGDELAVAAKAGSGEKCERCWHYTRDVGAVAGYETVCKRCAENVGGEGETRHYA

SEQ ID NO: 11983 - protein, 71 aa, Neisseria meningitidis; identical to SEQ ID NO: 2248

SEQ ID NO: 11984 - protein, 398 aa, Neisseria meningitidis; identical to SEQ ID NO: 1004

SEQ ID NO: 11985 - protein, 287 aa, Neisseria meningitidis; identical to SEQ ID NO: 3193

SEQ ID NO: 11986 - protein, 321 aa, Neisseria meningitidis; identical to SEQ ID NO: 2168

SEQ ID NO: 11987 - protein, 520 aa, Neisseria meningitidis; identical to SEQ ID NO: 2831

SEQ ID NO: 11988 - protein, 95 aa, Neisseria meningitidis; identical to SEQ ID NO: 6515

SEQ ID NO: 11989 - protein, 242 aa, Neisseria meningitidis; identical to SEQ ID NO: 2996

SEQ ID NO: 11990 - protein, 92 aa, Neisseria meningitidis; identical to SEQ ID NO: 3407

SEQ ID NO: 11991 - protein, 287 aa, Neisseria meningitidis; identical to SEQ ID NO: 2812

SEQ ID NO: 11992 - protein, 378 aa, Neisseria meningitidis; identical to SEQ ID NO: 2478

SEQ ID NO: 11993 - protein, 658 aa, Neisseria meningitidis
MNEFSLAPIVIVLLVSVITVILCRKFNIPSMLGYLLVGFLAGPGMLSLIPKSHATDYLGEIGIVFLMFSIGLEFSLPKLRAMRRLVFGLGGLQVGVTMLSVMGILMLTGVPFNWAFAVSGALAMSSTAIVSRILSEKTELGQPHGQMAMGVLLMQDIAVVPLMILIPALAGGGDGNIWAALGLAFAKMLLTLGLLFFVGSKIMSRWFRMVAKRKSSELFMINVLLVTLGVAYLTELEGLSMALGAFVAGMLLSETEYRFQVEDDIRPFRDILLGFFFITVGMKLDIQALIGGWRQVLMLLAMLLVLKALVVFAIAFKMKHSVGDSLKTALYLAQGGEFGFVMLAIAGQLDMVSPEWEQAATAAVLLSMIIAPFLLGGSDALVGRLVKSSWDMKSLDLHSMLVETMSKSDHVLIVGFGRGGQTVGRVLAQEDIPYFALDLDIARVQVARSAGEPVSFGDAKRREVLEAAGLGRAKMVVVTLNNMHETQHVLDNVLSMYPNMPVYVRATNDDYVKTFTDIGAEEAVSDTKETGLVLAGYAMLGNGASYRHVYQTMANIRHSRYAALEGLFVGSDDEAGFGENGETVRHAFPLAAEAYAVGKTVGTLPMAAYGIKLLFVRRRTGRIENPDASFTLKGGDVLVVAGKKEEIISFENWSLQGI

SEQ ID NO: 11994 - protein, 238 aa, Neisseria meningitidis; identical to SEQ ID NO: 3042

SEQ ID NO: 11995 - protein, 68 aa, Neisseria meningitidis; identical to SEQ ID NO: 1421

SEQ ID NO: 11996 - protein, 481 aa, Neisseria meningitidis; identical to SEQ ID NO: 437

SEQ ID NO: 11997 - protein, 146 aa, Neisseria meningitidis; identical to SEQ ID NO: 2365

SEQ ID NO: 11998 - protein, 766 aa, Neisseria meningitidis; identical to SEQ ID NO: 3452

SEQ ID NO: 11999 - protein, 120 aa, Neisseria meningitidis; identical to SEQ ID NO: 3127

SEQ ID NO: 12000 - protein, 233 aa, Neisseria meningitidis; identical to SEQ ID NO: 3101

SEQ ID NO: 12001 - protein, 408 aa, Neisseria meningitidis; identical to SEQ ID NO: 1777

SEQ ID NO: 12002 - protein, 461 aa, Neisseria meningitidis; identical to SEQ ID NO: 264

SEQ ID NO: 12003 - protein, 223 aa, Neisseria meningitidis; identical to SEQ ID NO: 1947

SEQ ID NO: 12004 - protein, 57 aa, Neisseria meningitidis; identical to SEQ ID NO: 2401

SEQ ID NO: 12005 - protein, 171 aa, Neisseria meningitidis; identical to SEQ ID NO: 3235

SEQ ID NO: 12006 - protein, 371 aa, Neisseria meningitidis; identical to SEQ ID NO: 849

SEQ ID NO: 12007 - protein, 427 aa, Neisseria meningitidis; identical to SEQ ID NO: 2465

SEQ ID NO: 12008 - protein, 352 aa, Neisseria meningitidis; identical to SEQ ID NO: 2705

SEQ ID NO: 12009 - protein, 133 aa, Neisseria meningitidis; identical to SEQ ID NO: 8

SEQ ID NO: 12010 - protein, 64 aa, Neisseria meningitidis; identical to SEQ ID NO: 7996

SEQ ID NO: 12011 - protein, 205 aa, Neisseria meningitidis; identical to SEQ ID NO: 2641

SEQ ID NO: 12012 - protein, 435 aa, Neisseria meningitidis; identical to SEQ ID NO: 4637

SEQ ID NO: 12013 - protein, 620 aa, Neisseria meningitidis; identical to SEQ ID NO: 9100

SEQ ID NO: 12014 - protein, 502 aa, Neisseria meningitidis; identical to SEQ ID NO: 2442

SEQ ID NO: 12015 - protein, 217 aa, Neisseria meningitidis; identical to SEQ ID NO: 8419

SEQ ID NO: 12016 - protein, 595 aa, Neisseria meningitidis; identical to SEQ ID NO: 3312

SEQ ID NO: 12017 - protein, 114 aa, Neisseria meningitidis; identical to SEQ ID NO: 2177

SEQ ID NO: 12018 - protein, 39 aa, Neisseria meningitidis
MSDKPILLSPAVKKEALARAVKEIRAKYGDKAIVKGCVK

SEQ ID NO: 12019 - protein, 57 aa, Neisseria meningitidis
MSLKNSIVTNRFNIEHILKLINDILEICNSTSEDKSISNLAKYFDWEFDDYNLNIQD

SEQ ID NO: 12020 - protein, 197 aa, Neisseria meningitidis; identical to SEQ ID NO: 2035

SEQ ID NO: 12021 - protein, 63 aa, Neisseria meningitidis; identical to SEQ ID NO: 980

SEQ ID NO: 12022 - protein, 124 aa, Neisseria meningitidis; identical to SEQ ID NO: 8954

SEQ ID NO: 12023 - protein, 91 aa, Neisseria meningitidis; identical to SEQ ID NO: 9295

SEQ ID NO: 12024 - protein, 351 aa, Neisseria meningitidis; identical to SEQ ID NO: 3114

SEQ ID NO: 12025 - protein, 548 aa, Neisseria meningitidis; identical to SEQ ID NO: 2964

SEQ ID NO: 12026 - protein, 122 aa, Neisseria meningitidis; identical to SEQ ID NO: 2347

SEQ ID NO: 12027 - protein, 318 aa, Neisseria meningitidis; identical to SEQ ID NO: 3091

SEQ ID NO: 12028 - protein, 203 aa, Neisseria meningitidis; identical to SEQ ID NO: 2115

SEQ ID NO: 12029 - protein, 96 aa, Neisseria meningitidis; identical to SEQ ID NO: 2317

SEQ ID NO: 12030 - protein, 253 aa, Neisseria meningitidis; identical to SEQ ID NO: 1532

SEQ ID NO: 12031 - protein, 40 aa, Neisseria meningitidis; identical to SEQ ID NO: 2556

SEQ ID NO: 12032 - protein, 60 aa, Neisseria meningitidis; identical to SEQ ID NO: 2815

SEQ ID NO: 12033 - protein, 201 aa, Neisseria meningitidis; identical to SEQ ID NO: 2405

SEQ ID NO: 12034 - protein, 303 aa, Neisseria meningitidis; identical to SEQ ID NO: 1821

SEQ ID NO: 12035 - protein, 334 aa, Neisseria meningitidis; identical to SEQ ID NO: 1997

SEQ ID NO: 12036 - protein, 103 aa, Neisseria meningitidis; identical to SEQ ID NO: 1510

SEQ ID NO: 12037 - protein, 61 aa, Neisseria meningitidis; identical to SEQ ID NO: 1836

SEQ ID NO: 12038 - protein, 456 aa, Neisseria meningitidis; identical to SEQ ID NO: 9164

SEQ ID NO: 12039 - protein, 91 aa, Neisseria meningitidis; identical to SEQ ID NO: 5452

SEQ ID NO: 12040 - protein, 187 aa, Neisseria meningitidis; identical to SEQ ID NO: 2230

SEQ ID NO: 12041 - protein, 133 aa, Neisseria meningitidis; identical to SEQ ID NO: 825

SEQ ID NO: 12042 - protein, 339 aa, Neisseria meningitidis; identical to SEQ ID NO: 2597

SEQ ID NO: 12043 - protein, 206 aa, Neisseria meningitidis; identical to SEQ ID NO: 320

SEQ ID NO: 12044 - protein, 718 aa, Neisseria meningitidis; identical to SEQ ID NO: 2124

SEQ ID NO: 12045 - protein, 89 aa, Neisseria meningitidis
LNTKEILELKARAHHLHPVVMVGQQGLTDAVIKETDAALTAHELIKVRVFGDDRAERIEICTALCEAVDAQPVQHIGKLLVLWRKNIEG

SEQ ID NO: 12046 - protein, 179 aa, Neisseria meningitidis; identical to SEQ ID NO: 403

SEQ ID NO: 12047 - protein, 916 aa, Neisseria meningitidis; identical to SEQ ID NO: 3146

SEQ ID NO: 12048 - protein, 55 aa, Neisseria meningitidis; identical to SEQ ID NO: 1257

SEQ ID NO: 12049 - protein, 726 aa, Neisseria meningitidis
MNAPFFRLSLLSLTLAAGFAHAAGFAHAAENNANVALDTVTVKGDRQGSKIRTNIVTLQQKDESTATDMRELLKEEPSIDFGGGNGTSQFLTLRGMGQNSVDIKVDNAYSDSQILYHQGRFIVDPALVKVVSVQKGAGSASAGIGATNGAIIAKTVDAQDLLKGLDKNWGVRLNSGFASNEGVSYGASVFGKEGNFDGLFSYNRNDEKDYEAGKGFRNDNGGKTVPYSALDKRSYLAKIGTSFGDDDHRIVLSHMKDQHRGIRTVREEFAVSEKNSRITIKRQAPAYRETTQSNTNLAYTGKDLGFVEKLDANAYVLEKKRYSADDKDNGYAGNVKGPNHTRITTRGMNFNFDSRLAEQTLLKYGINYRHQEIKPQAFLNSQFSIPKTEKKDGKDVAKSSEQQTKDRKDETIVHSYKLSNPTKTDTGAYIEAIHEIDGFTLTGGLRYDRFKVKTHDGKTVSSSNLNPSFGVIWQPHEHWSFSASHNYASRSPRLYDALQTHGKRGIISIADGTKAERARNTEIGFNYNDGTFAANGSYFWQTIKDALANPQNRHDSVAVREAVNAGYIKNHGYELGASYRTGGLTAKVGVSHSKPRFYDTHPKKLLSANPEFGAQVGRTWTASLAYRFQNPNLEIGWRGRYVQKAVGSILVAGQKDRSGKLENVVRQGFGVNDVFANWKPLGKDTLNVNLSVNNVFNTFYYPHSQRWTNTLPGVGRDVRLGVNYKF

SEQ ID NO: 12050 - protein, 251 aa, Neisseria meningitidis; identical to SEQ ID NO: 3478

SEQ ID NO: 12051 - protein, 95 aa, Neisseria meningitidis; identical to SEQ ID NO: 589

SEQ ID NO: 12052 - protein, 252 aa, Neisseria meningitidis; identical to SEQ ID NO: 3168

SEQ ID NO: 12053 - protein, 160 aa, Neisseria meningitidis; identical to SEQ ID NO: 236

SEQ ID NO: 12054 - protein, 1204 aa, Neisseria meningitidis; identical to SEQ ID NO: 2916

SEQ ID NO: 12055 - protein, 472 aa, Neisseria meningitidis
MSIKNAVKLIEESEARFVDLRFTDTKGKQHHFTVPARIVLEDPEEWFENGQAFDGSSIGGWKGIQASDMQLRPDASTAFVDPFYDDVTVVITCDVIDPADGQGYDRDPRSIARRAEAYLKSSGIGDTAYFGPEPEFFVFDGVEFETDMHKTRYEITSESGAWASGLHMDGQNTGHRPAVKGGYAPVAPIDAGQDLRSAMVNILEELGIEVEVHHSEVGTGSQMEIGTRFATLVKRADQTQDMKYVIQNVAHNFGKTATFMPKPIMGDNGSGMHVHQSIWKDGQNLFAGDGYAGLSDTALYYIGGIIKHAKALNAITNPSTNSYKRLVPHFEAPTKLAYSAKNRSASIRIPSVNSSKARRIEARFPDPTANPYLAFAALLMAGLDGIQNKIHPGDPADKNLYDLPPEEDALVPTVCASLEEALAALKADHEFLLRGGVFSKDWIDSYIAFKEEDVRRIRMAPHPLEFEMYYSL

SEQ ID NO: 12056 - protein, 231 aa, Neisseria meningitidis; identical to SEQ ID NO: 2369

SEQ ID NO: 12057 - protein, 507 aa, Neisseria meningitidis; identical to SEQ ID NO: 2566

SEQ ID NO: 12058 - protein, 90 aa, Neisseria meningitidis; identical to SEQ ID NO: 2539

SEQ ID NO: 12059 - protein, 260 aa, Neisseria meningitidis
LQKVVRHIAQTEIMPRFLNTPSHRKEDGSMLSEADIAAQTAFAAALPLLIDCPMLGEEMSRQEQSALWAEYSGEKGLWIVDPIDGTNNFVNGLPHFAVSVAFVRNGRAELGVIYNPVSGECFYAERGQGAFLNGTRLPLRLVDKKLNEAIAGVEIKYLRSGKLSSRMSTLAPFGTVRSMGSSTLDWCYLACGRYDVYVHGGQKLWDYAAGALIFEEAGGRLTTLEGDGFWSGEHVFKRSVVAALEPKLFERWVGWIRENQ

SEQ ID NO: 12060 - protein, 144 aa, Neisseria meningitidis; identical to SEQ ID NO: 4528

SEQ ID NO: 12061 - protein, 135 aa, Neisseria meningitidis; identical to SEQ ID NO: 803

SEQ ID NO: 12062 - protein, 94 aa, Neisseria meningitidis; identical to SEQ ID NO: 2111

SEQ ID NO: 12063 - protein, 765 aa, Neisseria meningitidis; identical to SEQ ID NO: 2833

SEQ ID NO: 12064 - protein, 235 aa, Neisseria meningitidis
LVKTADGYKAIARIRTGDRVFAKDEASGKTGYKPVTARYGNPYQETVYIEISDGIGNNPTLISNKIHPFYSQGKWIQAGRLKKGDTLLSESGAKQTVQNITFKQQPLKAYNLTVADWHTYFVKGSQAETEGVWVHNDCPYDKGNQRYKDASYHGKNDNSVKSRAPTNGQAALDNSVQVKSTSPRRVGVDKANNEIVVLDKTQTFNNGFAEYHGHVRSWQDLHTDQKNALKKAGLD

SEQ ID NO: 12065 - protein, 206 aa, Neisseria meningitidis
MKPQFITLDGIDGAGKSTNLAVIKAWFERRGLPVLFTREPGGTPVGEALREILLNPETKAGLRAETLMMFAARMQHIEDVILPALSDGIHVVSDRFTDATFAYQGGGRGMPSEDIEILEHWVQGGLRPDLTLLLDVPLEVSMARIGQSREKDRFEQEQADFFMRVRSVYLNRAAACPERYAIIDSNRSLDEVRNNIEKVLDGHFGC

SEQ ID NO: 12066 - protein, 74 aa, Neisseria meningitidis; identical to SEQ ID NO: 2464

SEQ ID NO: 12067 - protein, 155 aa, Neisseria meningitidis; identical to SEQ ID NO: 2118

SEQ ID NO: 12068 - protein, 131 aa, Neisseria meningitidis
MPSDVGMRLQTAFKRKLNMKKILYFLMFVFSTSVWAGDAEDNLLSIQSGYRALLQKQNNLDGKIIGMQSDLEDARRRLQTAQADIARLEAEIPAAMAQKARQAEELRQIGVRLDYAWNAVYGAGGTKASGN

SEQ ID NO: 12069 - protein, 278 aa, Neisseria meningitidis; identical to SEQ ID NO: 8180

SEQ ID NO: 12070 - protein, 258 aa, Neisseria meningitidis; identical to SEQ ID NO: 2897

SEQ ID NO: 12071 - protein, 144 aa, Neisseria meningitidis; identical to SEQ ID NO: 2088

SEQ ID NO: 12072 - protein, 178 aa, Neisseria meningitidis; identical to SEQ ID NO: 1654

SEQ ID NO: 12073 - protein, 431 aa, Neisseria meningitidis
MSVIQDLQSRGLIAQTTDIEALDALLNEQKIALYCGFDPTADSLHIGHLLPVLALRRFQQAGHTPIALVGGATGMIGDPSFKAAERSLNSAETVAGWVESIRNQLTPFLSFEGGNAAIMANNADWFGSMNCLDFLRDIGKHFSVNAMLNKESVKQRIDRDGAGISFTEFAYSLLQGYDFAELNKRHGAVLEIGGSDQWGNITAGIDLTRRLNQKQVFGLTLPLVTKSDGTKFGKTEGGAVWLNAKKTSPYQFYQFWLKVADADVYKFLKYFTFLSIEEIDAIEAKDKASGSKPEAQRILAEEMTRLIHGEEALAAAQRISESLFAEDQSSLTESDFEQLALDGLPAFEVSDGINVVEALVKTGLASSNKEARGFVNSKAVLLNGKPAEANNPNHAAERPDDACLLNGEHKRFGKYTILRRGKRNHALLVWK

SEQ ID NO: 12074 - protein, 291 aa, Neisseria meningitidis
MAVGKEILTKIRSVQNTQKITKAMQMVSTSKMRKTQERMRLARPYAEKVRMVMSHLAQTNTDHGIPLLESHREIRRVGFILITSDKGLCGSLNANVLKKFLAQVQEYRNQGIEEEIVCLGSKGLMACQSIGLNVIASAVNLGDTPKMEMLLGPLTELFQRYEKHEIDRIHLVYSGFVNTMRQEPRMEVLLPIGENVIGDSAPKSPFSWEYRYEPTALAVLEYLVRRYLESVVYQALSDNMASEQAARMVAMKAATDNAGNAIKELRLVYNKSRQAAITTELSEIVAGAAAV

SEQ ID NO: 12075 - protein, 87 aa, Neisseria meningitidis; identical to SEQ ID NO: 1364

SEQ ID NO: 12076 - protein, 548 aa, Neisseria meningitidis; identical to SEQ ID NO: 3181

SEQ ID NO: 12077 - protein, 335 aa, Neisseria meningitidis
MSTFFQQTAQAMIAKHIDRFPLLKLDQVIDWQPIEQYLNRQKTRYLRDHRGRPACPLLSMFKAVLLGQWHSLSDPELEHSLITRIDFNLFCRFDELIIPDYSTLCRYRNWLAQDDTLSELLKLINCQLTEKGLKVEKASAAVIDATIIQTAGSTQRQAIEVDEEGQISGQTTPSKDSDARWIKKNGLYKLGYKQHTRTDAEGYIEKLHITPANAHECKHLSPLLEGLPEGTTVYADKGYDSAENRQHLEEHQLQDGIMRKACRNRPLSEAQTKRNRYLSKTRYVVEQSFGTLHRKFRYARAAYFGLIKVSAQSHLKAMCLNLLKAANRLSAPAAA

SEQ ID NO: 12078 - protein, 942 aa, Neisseria meningitidis
MMDEKLNFSYLFGSNAPYIEELYEAFLENPDAVDEKWKQYFTDLSKQPGTVAVDVAHTPIRESFVTLAKKKIASAVAGGADEAMLKKQVSVLRLISAYRIQGVGAAQLDPLKRIPPRDIEALDPKFHGLSDADMALQFNMGEGDFANRGKLPLSQIISNLKQTYCGHIALEYIYIPNTEERRWVRNYFESVLSTPHYNADQKRRILKEMTAAETLERYLHTKYVGQKRFGVEGGESAIAGLNYLIQNAGKDGVEEVIIGMAHRGRLNVLVNILGKKPGDLFAEFEGRAEIKLPSGDVKYHMGFSSDIATPHGPMHVSLAFNPSHLEIVNPVVEGSARAKQKRLGENGRDKVLPVLIHGDSAFIGLGVNQATFNLSKTRGYTTGGTVHIVINNQIGFTTSDIRDTRSTVHCTDIAKMVSAPVIHVNGDDPERVCFAIQAALDYRKKFHKDIVIDVVCYRKWGHNEGDDPTLTQPMMYKKVSQHPGARALYTEQLIAEGVVTQAEADGYIQAYRDALDKGEHVEQTTLSNFQRTQIDWSKYQGKDWREHIETGLPAADIERLTEKFTAVPEGFALHPTAKRVIEARKAMASGKQAIDWGMAETLAYASLVTKGHGVRISGEDSGRGTFSHRHAVLHDQKREKWDDGTYVPLRHMGEGMGEFLVIDSILNEEAVMAFEYGFACSAPDKLTIWEAQFGDFANGAQVTIDQFLSSGETKWGRLCGLTTILPHGYDGQGPEHSSARVERWLQLCSENNMQVIMPSEASQMFHLLQRQVLGSYRKPLVIFMSKRLLRFKGAMSPLENFTEGSTFRPVIGDTAERASNDSVKRVALCAGQVYYDLEAGRAERKLEDDVAIVRVEQLYPFPYDEVKAELAKYPNAKSVVWAQEEPKNQGAFYQIRHRIEDVISEEQKLSYAGRPSSASPAVGYSSKHIAQLKQLVEDALAL

SEQ ID NO: 12079 - protein, 229 aa, Neisseria meningitidis; identical to SEQ ID NO: 2235

SEQ ID NO: 12080 - protein, 96 aa, Neisseria meningitidis; identical to SEQ ID NO: 2105

SEQ ID NO: 12081 - protein, 100 aa, Neisseria meningitidis; identical to SEQ ID NO: 1675

SEQ ID NO: 12082 - protein, 52 aa, Neisseria meningitidis; identical to SEQ ID NO: 3971

SEQ ID NO: 12083 - protein, 250 aa, Neisseria meningitidis; identical to SEQ ID NO: 2214

SEQ ID NO: 12084 - protein, 795 aa, Neisseria meningitidis
MQLLAAEGIHQHQLNVQKSTRFIGIKVGKSNYSKNELNETKLPVRVIAQTAKTRSGWDTVLEGTEFKTTLSGADIQAGVGEKARADAKIILKGIVNRIQSEEKLETNSTVWQKQAGRGSTIETLKLPSFESPTPPKLSAPGGYIVDIPKGNLKTEIEKLSKQPEYAYLKQLQVAKNINWNQVQLAYDRWDYKQEGLTEAGAAIIALAVTVVTSGAGTGAVLGLNGAAAAATDAAFASLASQASVSFINNKGDVGKTLKELGRSSTVKNLVVAAATAGVADKIGASALNNVSDKQWINNLTVNLANAGSAALINTAINGGSLKDNLGDAALGAIVSTVHGEVASKIKFNLSEDYITHKIAHAIAGCAAAAANKGKCQDGAIGAAVGEIVGEALTNGKNPATLTAKEREQILAYSKLVAGTVSGVVGGDVNTAANAAKVAIENNLLSQEEYALREKLIKKAKGKGLLSLDWGSLTEQEARQFIYLIEKDRYSNQLLDRYQKNPSSLNNQEKNILAYFINQTSGGNTAWAASILKTPQSMGNLTIPSKDINNTLSKAYQTLSRYDSFDYKSAVAAQPALYLLNGPLGFSVKAATVAAGGYNIGQGAKAISNGEYLHGTVQVVNGTLMVAGSVSAQAAISAKPAPVTRYLSNDSAPALRQALTAESQRIRMKLPEEYRQIGNLAIAKIDVKGLPQRMEAFSSFQKGEHGFISLPETKIFKPISVDKYHNIASPPRGTLRNIDGEYKLLETIAQQLGNNRNVSGRIDLFTELKACQSCSNVILEFRNRYPNIQLNIFTGK

SEQ ID NO: 12085 - protein, 360 aa, Neisseria meningitidis; identical to SEQ ID NO: 2477

SEQ ID NO: 12086 - protein, 63 aa, Neisseria meningitidis; identical to SEQ ID NO: 5865

SEQ ID NO: 12087 - protein, 159 aa, Neisseria meningitidis; identical to SEQ ID NO: 9034

SEQ ID NO: 12088 - protein, 615 aa, Neisseria meningitidis
MHDTRTMMIKPTALLLPALFFFPHAYAPAADLSENKAAGFALFKNKSPDTESVKLKPKFPVRIDTQDSEIKDMVEEHLPLITQQQEEVLDKEQTGFLAEEAPDNVKTMLRSKGYFSSKVSLTEKDGAYTVHITPGPRTKIANVGVAILGDILSDGNLAEYYRNALENWQQPVGSDFDQDSWENSKTSVLGAVTRKGYPLAKLGNTRAAVNPDTATVDLNVVVDSGRPIAFGDFEITGTQRYPEQIVSGLARFQPGTPYDLDLLLDFQQALEQNGHYSGASVQADFDRLQGDRVPVKVSVTEVKRHKLETGIRLDSEYGLGGKIAYDYYNLFNKGYIGSVVWDMDKYETTLAAGISQPRNYRGNYWTSNVSYNRSTTQNLEKRAFSGGIWYVRDRAGIDARLGAEFLAEGRKIPGSDVDLGNSHATMLTASWKRQLLNNVLHPENGHYLDGKIGTTLGTFLSSTALIRTSARAGYFFTPENKKLGTFIIRGQAGYTLARDNADVPSGLMFRSGGASSVRGYELDSIGLAGPNGSVLPERALLVGSLEYQLPFTRTLSGAVFHDMGDAAANFKRMELKHGSGLGVRWFSPLAPFSFDIAYGHSDKKIRWHISLGTRF

SEQ ID NO: 12089 - protein, 117 aa, Neisseria meningitidis
MSEIKIFHNPRCSKSRAALSLLEERGIAAEVVKYLDTPPDLSELKDIFNKLGLESARGMMRVKDDLYKELGLDNPDLDNNALLRAIADHPALLERPIVLANGKAAVGRPLENIEAVL

SEQ ID NO: 12090 - protein, 591 aa, Neisseria meningitidis; identical to SEQ ID NO: 3751

SEQ ID NO: 12091 - protein, 256 aa, Neisseria meningitidis; identical to SEQ ID NO: 2322

SEQ ID NO: 12092 - protein, 887 aa, Neisseria meningitidis; identical to SEQ ID NO: 89

SEQ ID NO: 12093 - protein, 152 aa, Neisseria meningitidis; identical to SEQ ID NO: 9291

SEQ ID NO: 12094 - protein, 469 aa, Neisseria meningitidis; identical to SEQ ID NO: 2356

SEQ ID NO: 12095 - protein, 68 aa, Neisseria meningitidis; identical to SEQ ID NO: 2429

SEQ ID NO: 12096 - protein, 394 aa, Neisseria meningitidis; identical to SEQ ID NO: 277

SEQ ID NO: 12097 - protein, 257 aa, Neisseria meningitidis; identical to SEQ ID NO: 780

SEQ ID NO: 12098 - protein, 65 aa, Neisseria meningitidis; identical to SEQ ID NO: 926

SEQ ID NO: 12099 - protein, 472 aa, Neisseria meningitidis
MNIHTLLSKQWTLPPFLPKRLLLSLLILLAPNAVFWVLALLTATARPIVNLDYLPAALLIALPWRFVKIAGVLAFWLAVLFDGLMMVIQLFPFMDLIGAINLVPFILTAPAPYQIMTGLLLLYMLAMPFVLQKAAAKTDFRHIAVCAAVVAAAGYFTGHLSYYDRGRMANIFGANNFYYAKSQAMLYTVSQNADFITAGLVDPVFLPLGNQQRAATHLNEPKSQKILFIVAESWGLPANPELQNATFAKLLAQKDRFSVWESGSFPFIGATVEGEMRELCAYGGLRGFALRRAPDEKFARCLPNRLKQEGYATFAMHGAGSSLYDRFSWYPRAGFQEIKTAENLIGKKTCAIFGGVCDSELFGEVSAFFKKHDKGLFYWMTLTSHADYPESDIFNHRLKCTEYGLPAETDLCRNFSLHTQFFDQLADLIQRPEMKGTEVIIVGDHPPPVGNLNETFRYLKQGHVAWLHFKIK

SEQ ID NO: 12100 - protein, 138 aa, Neisseria meningitidis; identical to SEQ ID NO: 774

SEQ ID NO: 12101 - protein, 112 aa, Neisseria meningitidis; identical to SEQ ID NO: 1765

SEQ ID NO: 12102 - protein, 518 aa, Neisseria meningitidis; identical to SEQ ID NO: 8503

SEQ ID NO: 12103 - protein, 107 aa, Neisseria meningitidis; identical to SEQ ID NO: 875

SEQ ID NO: 12104 - protein, 109 aa, Neisseria meningitidis
MSLPPCPQCASEYTYEDGGQYICPECAHEWNETESAADLAAQVRDANGAALQNGDTVILIKDLKVKGSSMVIKQGTKVKGIRLQEGDHNISCKIDGSAMNLKSEFVKKA

SEQ ID NO: 12105 - protein, 125 aa, Neisseria meningitidis; identical to SEQ ID NO: 1050

SEQ ID NO: 12106 - protein, 70 aa, Neisseria meningitidis; identical to SEQ ID NO: 2310

SEQ ID NO: 12107 - protein, 219 aa, Neisseria meningitidis; identical to SEQ ID NO: 2848

SEQ ID NO: 12108 - protein, 592 aa, Neisseria meningitidis; identical to SEQ ID NO: 3087

SEQ ID NO: 12109 - protein, 371 aa, Neisseria meningitidis; identical to SEQ ID NO: 3554

SEQ ID NO: 12110 - protein, 597 aa, Neisseria meningitidis; identical to SEQ ID NO: 2139

SEQ ID NO: 12111 - protein, 714 aa, Neisseria meningitidis
MNNPLVNQAAMVLPVFLLSACLGGGGSFDLDSVDTEAPRPAPKYQDVSSEKPQAQKDQGGYGFAMRFKRRNWYPQANPKEDEKKLSENDWEATGLPGNPKNLPKRQKSVIEKVETGSDSNIYSSPYLTQSNHPNGNTGNGTNLPKNEVTDYKDFKYVYSGWFYKHAKRNFDITNKIVRQGDDGYIFYHGKEPSRQLPVSEKITYKGVWHFVTDTKNGQKFYDIIQPSKKQGDRYSGFSGDDDEQYSNKNDMLKGDQEGYGFTSNLEVDFNNKKLTGKLIRNNRVTGATNDKYTTQYYSLEAQVTGNRFNGTATATDKPEQDGTKQHPFVSDSSSLSGGFFGPQGEELGFRFLSNDKKVAVVGSAKTKDKPANGNTAEASGGTDAAASGGTAGTPSESTKLTTVLDAVELKSGGKEVKNLDNFSNAAQLVVDGIMIPLLPETSESGSNQADKGKNGETEFTRKFDHTPKSDKKDAQAGTQTNGAQTASNTAGDTNGKTKTYEVEVCCSNLNYLKYGMLTRKNSKSAMQAGENGSQADAKTEQVEQSMFLQGERTDEKEIPSEQNIVYRGSWYGHIANGTSTSWSGNASDKEGGNRADFTVNFGEKKINGTLTAENRQQATFTIEGMIQGNGFSGTAKTADSGFDLDQSNTTGTPKAYITNAKVQGGFYGPKAEELGGWFAYPGDKQAQPPASGSGASAANSATVVFGAKRQQLVQ

SEQ ID NO: 12112 - protein, 120 aa, Neisseria meningitidis; identical to SEQ ID NO: 2661

SEQ ID NO: 12113 - protein, 286 aa, Neisseria meningitidis; identical to SEQ ID NO: 4385

SEQ ID NO: 12114 - protein, 791 aa, Neisseria meningitidis
MNKNIKSLNLREKDPFLSREKQRYEHPLPSREWIIELLERKGVPSKIESLARELSITEDEYVFFERRLKAMARDGQVLINRRGAVCAADKLDLVKCRVEAHKDGFGFAVPLTPAKDGDFVLYERQMRGIMHGDIVTVRPAGMDRRGRREGTVLDIVERSQSKVVGRFYMDRGVAILEPEDKRLNQSIVLEPDGVARFKPESGQVIVGEIEVYPEQNRPAVAKIIEVLGDYADSGMEIEIAVRKHHLPHQFSEACAKAVKKIPDHVRKSDLKGRVDLRDLPLVTIDGETARDFDDAVFAEKIGRNYRLVVAIADVSHYVRPDDAIDTDAQERSTSVYFPRRVIPMLPENLSNGICSLNPNVERLCMVCDMVITYAGNIKEYRFYPAVMRSHARLTYNQVWKWLSGGIGHPFKAQIDTLYKLFKILQKKRFERGAVEFDSIETQMLFDDNGKIEKIVPVVRNDAHKLIEECMLAANVCAADFLLKNKHTALFRNHLGPTPEKLAALREQFGLLGLQLGGGDNPSPKDYAALAGQFKGRPDAELLQVMMLRSMQQAVYEPHCDGHFGLAYEAYAHFTSPIRRYPDLTVHRAIKAVLNQQTYTPKKSWQALGVHTSFCERRADDASRDVENWLKTYYMRDKVGEIFEGKISGVANFGIFVTLDDIHIDGLVHISDLGEDYFNFRPEIMAIEGERSGIRFNMGDRVAIKVARADLDDGKIDFVLIAEGSGRGRKVKSSASAKPAGTAGKGKPKTAAGKKTARGGKVRGRGASAAAESGKKAKKPVPIKVKKRKGKS

SEQ ID NO: 12115 - protein, 273 aa, Neisseria meningitidis; identical to SEQ ID NO: 2413

SEQ ID NO: 12116 - protein, 76 aa, Neisseria meningitidis; identical to SEQ ID NO: 841

SEQ ID NO: 12117 - protein, 145 aa, Neisseria meningitidis; identical to SEQ ID NO: 1767

SEQ ID NO: 12118 - protein, 242 aa, Neisseria meningitidis; identical to SEQ ID NO: 5117

SEQ ID NO: 12119 - protein, 199 aa, Neisseria meningitidis; identical to SEQ ID NO: 3649

SEQ ID NO: 12120 - protein, 275 aa, Neisseria meningitidis; identical to SEQ ID NO: 67

SEQ ID NO: 12121 - protein, 188 aa, Neisseria meningitidis; identical to SEQ ID NO: 8617

SEQ ID NO: 12122 - protein, 126 aa, Neisseria meningitidis; identical to SEQ ID NO: 3142

SEQ ID NO: 12123 - protein, 769 aa, Neisseria meningitidis; identical to SEQ ID NO: 8897

SEQ ID NO: 12124 - protein, 135 aa, Neisseria meningitidis; identical to SEQ ID NO: 2191

SEQ ID NO: 12125 - protein, 323 aa, Neisseria meningitidis; identical to SEQ ID NO: 3380

SEQ ID NO: 12126 - protein, 140 aa, Neisseria meningitidis; identical to SEQ ID NO: 2226

SEQ ID NO: 12127 - protein, 275 aa, Neisseria meningitidis
MMLKKFVLGGIAALVLAACGGSEGGSGASSAPAQSAVSGSLIERINNKGTVTVGTEGTYAPFTYHDKDGKLTGYDVEVTRAVAEKLGVKVEFKETQWDSMMAGLKAGRFDVVANQVGLTSPERQATFDKSDPYSWSGAVLVARNDSNIKSIDDIKGVKTAQSLTSNYGEKAKAAGADLVAVDGLAQSLTLIEQKRADATLNDELAVLDYLKKNPNAGVKIVWSAPADEKVGSGLIVNKGNDEAVAKFSTAINELKADGTLKKLGEQFFGKDISVQ

SEQ ID NO: 12128 - protein, 394 aa, Neisseria meningitidis; identical to SEQ ID NO: 3588

SEQ ID NO: 12129 - protein, 198 aa, Neisseria meningitidis
MKITHCKLKKKVQKELLHFFVLEVTARSAADILGIHPNSAALFYRKIRTVINHHLVLAADEVFEDPVEPDESDFGGRRKGRRGRGAAGKVVVFGILKRNGRVYTVVVNNAKSETLLPVIKKKIMPDSIVYTDSLSSCDKLDVSSFIHYRINHSKEFADRQNHINGIENFWNQAKRVLRKYSGLARTFPRIGSATGCAD

SEQ ID NO: 12130 - protein, 75 aa, Neisseria meningitidis; identical to SEQ ID NO: 8304

SEQ ID NO: 12131 - protein, 316 aa, Neisseria meningitidis
LLNEAVDALAVREDGVYVDGTFGRGGHSRLILSRLGDAGRLIVFDKDPQAIAVAEELARSDKRVGVVHGGFASFQAALDGLGIGKVDGALFDLGISSPQIDDGSRGFSFRFDAPLDMRMDTTRGMSAAEWIAVASEQDLHEVIKNYGEERFSRQIARAIVAQRAESPIDTTRKLAQIVAQNVRTRERGQDPATRTFQAVRIFINRELEEVGAVLPQVMCRLKEGGRLAVIAFHSLEDRIVKQFVKKYSQHAPLPRWAAVREADLPELPLKIVGRALKPGEAEIAANPRARSAVLRVAERTAGSIPEQSQRKTSEWQ

SEQ ID NO: 12132 - protein, 214 aa, Neisseria meningitidis; identical to SEQ ID NO: 1408

SEQ ID NO: 12133 - protein, 602 aa, Neisseria meningitidis; identical to SEQ ID NO: 2934

SEQ ID NO: 12134 - protein, 349 aa, Neisseria meningitidis; identical to SEQ ID NO: 328

SEQ ID NO: 12135 - protein, 436 aa, Neisseria meningitidis; identical to SEQ ID NO: 8096

SEQ ID NO: 12136 - protein, 725 aa, Neisseria meningitidis
MQQKIRFQIEGMTCQACASRIEKVLNKKDFVKSAGVNFASEEAQVTFDDSKTSAADIAKIIEKTGYGAKEKTEDTLPQPEAEHHIGWRLWLLLAINIPFLIGMVGMMLKGLNWTRHDWMLSPLLQFALASVVQLWLAVPFYKSAWASIKGGLANMDVLVTIGTVSIYLYSVYMLFFSPHAAYGMAHVYFEVGVMVIGFVSLGKFLEHRTKKSSLNSLGLLLKLTPTQVNVQRNGEWKQLPIDQVQIGDLIRANHGERIAADGIIESGSGWADESHLTGESNPEEKKAGSKVLAGALMTEGSVVYRATQLGSQTLLGDMMNALSEAQGSKAPIARVADKAAAVFVPTVVGIALLTFIATWLVKGDWTVALMHAVAVLVIACPCALGLATPAAIMVGMGKAVKHGIWFKDAAAMEEAAHVDAVVLDKTGTLTEGKPQVAAVYCVPDSGFDEDALYRIAATVEQNAAHPLARAIVSAAQARGLGIPAAQNAQTVVGAGIAAEVKGAGLVKAGKAEFAELTLPKFSDGVWKIASVVAVSVNGKPIGAFALADALKADTAEAIGRLKKHNIDVYIMSGDNQGTVEYVAQQLGIAHAFGNMSPRDKAAEVQKLKAAGKTVAMVGDGINDAPALAAANVSFAMKGGADVAEHTASATLMQHSVNQLADALLVSQATLKNIKQNLFFAFFYNILGIPLAALGFLNPVIAGAAMAASSVSVLSNALRLKRVKID

SEQ ID NO: 12137 - protein, 408 aa, Neisseria meningitidis; identical to SEQ ID NO: 2386

SEQ ID NO: 12138 - protein, 487 aa, Neisseria meningitidis; identical to SEQ ID NO: 2121

SEQ ID NO: 12139 - protein, 146 aa, Neisseria meningitidis; identical to SEQ ID NO: 2658

SEQ ID NO: 12140 - protein, 259 aa, Neisseria meningitidis; identical to SEQ ID NO: 2935

SEQ ID NO: 12141 - protein, 213 aa, Neisseria meningitidis; identical to SEQ ID NO: 2169

SEQ ID NO: 12142 - protein, 107 aa, Neisseria meningitidis; identical to SEQ ID NO: 1970

SEQ ID NO: 12143 - protein, 43 aa, Neisseria meningitidis; identical to SEQ ID NO: 3165

SEQ ID NO: 12144 - protein, 693 aa, Neisseria meningitidis; identical to SEQ ID NO: 8128

SEQ ID NO: 12145 - protein, 248 aa, Neisseria meningitidis; identical to SEQ ID NO: 4029

SEQ ID NO: 12146 - protein, 499 aa, Neisseria meningitidis
VFKKYQYLALAALCAASLAGCDKAGSFFGADKKEASFVERIEHTKDDGSVSMLLPDFVQLVQSEGPAVVNIQAAPAPRTQNGSGNAETDSDPLADSDPFYEFFKRLVPNMPEIPQEEADDGGLNFGSGFIISKDGYILTNTHVVTGMGSIKVLLNDKREYTAKLIGSDVQSDVALLKIDATEELPVVKIGNPKDLKPGEWVAAIGAPFGFDNSVTAGIVSAKGRSLPNESYTPFIQTDVAINPGNSGGPLFNLKGQVVGINSQIYSRSGGFMGISFAIPIDVAMNVAEQLKNTGKVQRGQLGVIIQEVSYGLAQSFGLDKAGGALIAKILPGSPAERAGLQAGDIVLSLDGGEIRSSGDLPVMVGAITPGKEVSLGVWRKGEEITIKVKLGNAAEHIGASSKTDEAPYTEQQSGTFSVESAGITLQTHTDSSGGHLVVVRVSDAAERAGLRRGDEILAVGQVPVNDEAGFRKAMDKAGKNVPLLIMRRGNTLFIALNLQ

SEQ ID NO: 12147 - protein, 385 aa, Neisseria meningitidis
MRKKLTALVLSALPLAAVADVSLYGEIKAGVEGRNIQLQLTEPLPNIQPQVTKRKSRIRTKISDFGSFIGFKGSEDLGEGLKAVWQLEQDVSVAGGGASQWGNRESFIGLAGEFGTLRAGRVANQFDDASQAIDPWDSNNDVASQLGIFKRHDDMSVSVRYDSPEFSGFSGSVQFVPAQNSKSAYTPAHFVQNKQNQPPTLVPAVVGKPGSDVYYAGLNYKNGGFAGNYAFKYAKHANVGRDAFELFLLGSGSDEAKGTDPLKNHQVHRLTGGYEEGGLNLALAAQLDLSENADKTKNSTTEIAATASYRFGNAVPRISYAHGFDFIERGKKGENTSYDQIIAGVDYDFSKRTSAIVSGAWLKRNTGIGNYTQINAASVGLRHKF

SEQ ID NO: 12148 - protein, 230 aa, Neisseria meningitidis; identical to SEQ ID NO: 675

SEQ ID NO: 12149 - protein, 65 aa, Neisseria meningitidis; identical to SEQ ID NO: 2354

SEQ ID NO: 12150 - protein, 376 aa, Neisseria meningitidis
MKIVFITTVASSIYGFRAPVIKKLIGKNHQVYAFVSEFSDNELDIIREMGVTPVTYRSNRSGLNPFSDIKSTFLIFKELKKISPDLVFPYFAKPVIFGTFAAKLAGVPRIVGMLEGLGFAFTPQLEGIPLKTKIIKGILIALYRIALPMLESLIVLNPDDKDDLLHQYGIKIKNIHILGGIGLDLRQYPYSEADIPDEKEPVKFLFIGRLLKEKGIDEFIRAAEQVKDKYPDTVFTALGAIDKSRGGGGGDLERLIARDIIRFPGFVNNVSEVIKAHHIFVLPSYREGVPRSTQEAMAVGRAVITTDVPGCRETVADKVNGFLIEPWNPRILAEKMIYFIENREAVRLMGNASYAIAKDKFDAEKVDLKLLDILKA

SEQ ID NO: 12151 - protein, 70 aa, Neisseria meningitidis; identical to SEQ ID NO: 5197

SEQ ID NO: 12152 - protein, 451 aa, Neisseria meningitidis; identical to SEQ ID NO: 2210

SEQ ID NO: 12153 - protein, 66 aa, Neisseria meningitidis; identical to SEQ ID NO: 1185

SEQ ID NO: 12154 - protein, 366 aa, Neisseria meningitidis
MAGNTFGQLFTVTTFGESHGAGLGCIIDGCPPGLELSEADIQFDLDRRKPGTSRHVTQRRETDQVEILSGVFKGKTTGTPIALLIRNTDQRSKDYGNIAQSFRPGHADYTYWHKYGTRDYRGGGRSSARETAARVAAGAVAKKWLKEKFGTEITAYVTQVGEKEIRFEGCEHISQNPFFAANHSQIAELENYMDSVRKSLDSVGAKLHIEAANVPVGLGEPVFDRLDAEIAYAMMGINAVKGVEIGAGFGSVVQRGSEHGDELTPQGFLSNHSGGILGGISTGQDIHVNIAIKPTSSIATPRRSIDINGNPIELATHGRHDPCVGLRAAPIAEAMLALVLIDHALRHRAQNADVQVNTPDITLSNK

SEQ ID NO: 12155 - protein, 411 aa, Neisseria meningitidis; identical to SEQ ID NO: 3347

SEQ ID NO: 12156 - protein, 226 aa, Neisseria meningitidis; identical to SEQ ID NO: 1949

SEQ ID NO: 12157 - protein, 146 aa, Neisseria meningitidis; identical to SEQ ID NO: 2999

SEQ ID NO: 12158 - protein, 223 aa, Neisseria meningitidis; identical to SEQ ID NO: 3489

SEQ ID NO: 12159 - protein, 581 aa, Neisseria meningitidis; identical to SEQ ID NO: 2972

SEQ ID NO: 12160 - protein, 391 aa, Neisseria meningitidis; identical to SEQ ID NO: 2540

SEQ ID NO: 12161 - protein, 256 aa, Neisseria meningitidis; identical to SEQ ID NO: 9022

SEQ ID NO: 12162 - protein, 97 aa, Neisseria meningitidis; identical to SEQ ID NO: 4307

SEQ ID NO: 12163 - protein, 161 aa, Neisseria meningitidis; identical to SEQ ID NO: 5306

SEQ ID NO: 12164 - protein, 461 aa, Neisseria meningitidis; identical to SEQ ID NO: 2017

SEQ ID NO: 12165 - protein, 120 aa, Neisseria meningitidis; identical to SEQ ID NO: 2736

SEQ ID NO: 12166 - protein, 242 aa, Neisseria meningitidis; identical to SEQ ID NO: 3156

SEQ ID NO: 12167 - protein, 671 aa, Neisseria meningitidis; identical to SEQ ID NO: 3253

SEQ ID NO: 12168 - protein, 490 aa, Neisseria meningitidis
MNQTSRDLTRISHNTKIVATLGPGSNNVELLEDMIRVGGLNVVRFNFSHGTPEFHQENARIVREAAKRTGQEIAIIADLQGPKIRVGKIAGGGIELNKGETLVLDAALEGEGTREAVGLDYRDLPDDVTAGDVLWLDDGLLTLTVESVEGSRIITRVENSHVLKSNKGINKRGGGLSAGALTEKDFRDLKTAIAIGCDYLAISFVKSAEDLHIARAKVEEEMKGSTAVRPGLVSKIERVEAIENLDEIILAGDGIMVARGDLAVEVGHAAVPALQKRMIRRARELRRFSITATQMMESMITNPVPTRAEVSDVANAVLDGTDAVMCSAETAVGAYPFETVSQMAVICAAAEKEQDSLNGVAEQAEYPEAVSTNLAVAGGAVSVARAVHAKAIVALTESGSTAFEISRHNITLPIFALTPSVSAQRRMAMYRGVRPMILATSTDHDTALNEVEAVLVEHQILCSGDQYIITSGSKMRESGSTNTLEVLRVK

SEQ ID NO: 12169 - protein, 151 aa, Neisseria meningitidis; identical to SEQ ID NO: 658

SEQ ID NO: 12170 - protein, 380 aa, Neisseria meningitidis; identical to SEQ ID NO: 2984

SEQ ID NO: 12171 - protein, 179 aa, Neisseria meningitidis; identical to SEQ ID NO: 8483

SEQ ID NO: 12172 - protein, 128 aa, Neisseria meningitidis; identical to SEQ ID NO: 3576

SEQ ID NO: 12173 - protein, 269 aa, Neisseria meningitidis; identical to SEQ ID NO: 1709

SEQ ID NO: 12174 - protein, 292 aa, Neisseria meningitidis; identical to SEQ ID NO: 1803

SEQ ID NO: 12175 - protein, 331 aa, Neisseria meningitidis
MLRKLLKWSAVFLTVSAAVFAALLFVPKDNGRAYRIKIAKNQGISSVGRKLAEDRIVFSRHVLTAAAYVLGVHNRLHTGTYRLPSEVSAWDILQKMRGGRPDSVTVQIIEGSRFSHMRKVIDATPDIEHDTKGWSNEKLMAEVAPDAFSGNPEGQFFPDSYEIDAGGSDLRIYQIAYKAMQRRLNEAWESRQDGLPYKNPYEMLIMASLIEKETGHEADRDHVASVFVNRLKIGMRLQTDPSVIYGMGAAYKGKIRKADLRRDTPYNTYTRGGLPPTPIALPGKAALDAAAHPSGEKYLYFVSKMDGTGLSQFSHDLTEHNAAVRKYILKK

SEQ ID NO: 12176 - protein, 37 aa, Neisseria meningitidis
LPYYLYCLRLRRLVLIFVNPLYYFVPPEFFVKLGQNT

SEQ ID NO: 12177 - protein, 263 aa, Neisseria meningitidis
MNVYFLGGGNMAAAVAGGLVKQGGYRIHIANRGAEKRERLQKELGVETSETLPELHSDDVLILAVKPQDMEAACKNIRTNGALVLSVAAGLPVDTLSRYIGGTRRIVRVMPNTPGKIGLGVSGMFAEAEVSETDRRIADRIMKSVGLTIWLEDEAQMHGITGISGSGPAYVFYLLDALQNAAIRQGFDMAEARALSLATFKGAVALAEQTGEDFEKLQKNVTSKGGTTHEAVEAFRRHRVAEAINEGVCACVRRSQEMERQYQ

SEQ ID NO: 12178 - protein, 197 aa, Neisseria meningitidis
LYGSHRLLCTQTDGDNAQKKTTTYKEQDPAKVTHYLTQPAEFSDYQRVYLDETGFDRYLFRPYARSLKGQIVKAQISGKRYQRLSLVSAQVGNRLIAPMVYQNTMTGVFFEAWFQQCLLPALTQKSVIILDNARFHRMGVLREMAEKLGHKVLPLAPYSPELNPIEKVWANIKRYLRTVLSDYARFDDALLSYFDFN

SEQ ID NO: 12179 - protein, 74 aa, Neisseria meningitidis; identical to SEQ ID NO: 2281

SEQ ID NO: 12180 - protein, 201 aa, Neisseria meningitidis; identical to SEQ ID NO: 2273

SEQ ID NO: 12181 - protein, 461 aa, Neisseria meningitidis
MDGWTQTLSAQTLLGISAAAIILILILIVKFRIHALLTLVIVSLLTALATGLPTGSIVNDILVKNFGGTLGGVALLVGLGAMLGRLVETSGGAQSLADALIRMFGEKRAPFALGVASLIFGFPIFFDAGLIVMLPIVFATARRMKQEVLPFALASIGAFSVMHVFLPPHPGPIAASEFYGANIGQVLILGLPTAFITWYFSGYMLGKVLGRTIHVPVPELLSGGTQDNDLPKEPAKAGTVVAIMLIPMLLIFLNTGVSALISEKLVSADETWVQTAKIIGSTPIALLISVLVALFVLGRKRGESGSALEKTVDGALAPVCSVILITGAGGMFGGVLRASGIGKALADSMADLGIPVLLGCFLVALALRIAQGSATVALTTAAALMAPAVAAAGFTDWQLACIVLATAAGSVGCSHFNDSGFWLVGRLLDMDVPTTLKTWTVNQTLIALIGFALSALLFAIV

SEQ ID NO: 12182 - protein, 194 aa, Neisseria meningitidis; identical to SEQ ID NO: 2798

SEQ ID NO: 12183 - protein, 212 aa, Neisseria meningitidis; identical to SEQ ID NO: 324

SEQ ID NO: 12184 - protein, 469 aa, Neisseria meningitidis; identical to SEQ ID NO: 2689

SEQ ID NO: 12185 - protein, 114 aa, Neisseria meningitidis; identical to SEQ ID NO: 9878

SEQ ID NO: 12186 - protein, 198 aa, Neisseria meningitidis; identical to SEQ ID NO: 1998

SEQ ID NO: 12187 - protein, 453 aa, Neisseria meningitidis; identical to SEQ ID NO: 2170

SEQ ID NO: 12188 - protein, 344 aa, Neisseria meningitidis; identical to SEQ ID NO: 10896

SEQ ID NO: 12189 - protein, 427 aa, Neisseria meningitidis
MNRNEILFDRAKAIIPGGVNSPVRAFGSVGGVPRFIKKAEGAYVWDENGTRYTDYVGSWGPAIVGHAHPEVIEAMREAALGGLSFGAPTEGEIVIAEEIAKIMPSVERLRLVSSGTEATMTAIRLARGFTGRDKIIKFEGCYHGHSDSLLVKAGSGLLTCGNPSSAGVPADFTKHTLVLEYNNIAQLEEAFAQSGNDIACVILEPFVGNMNLVRPSEAFVKALRELTEKHGAVLIYDEVMTGFRVALGGAQSLHGITPDLTTMGKVIGGGMPLAAFGGRKDIMECISPLGGVYQAGTLSGNPIAVAAGLKTLEIIRREGFYENLTARTEQLVQGFQTAADAAGIEFTADSVGGMFGLYFASHTPRNYADMARSNIDAFKRFFHGMLDRGIAFGPSAYEAGFVSAAHTPELIDETVAVAVEVFKAMAA

SEQ ID NO: 12190 - protein, 346 aa, Neisseria meningitidis; identical to SEQ ID NO: 3646

SEQ ID NO: 12191 - protein, 143 aa, Neisseria meningitidis; identical to SEQ ID NO: 362

SEQ ID NO: 12192 - protein, 235 aa, Neisseria meningitidis; identical to SEQ ID NO: 2898

SEQ ID NO: 12193 - protein, 370 aa, Neisseria meningitidis; identical to SEQ ID NO: 1989

SEQ ID NO: 12194 - protein, 93 aa, Neisseria meningitidis; identical to SEQ ID NO: 3308

SEQ ID NO: 12195 - protein, 291 aa, Neisseria meningitidis; identical to SEQ ID NO: 8367

SEQ ID NO: 12196 - protein, 446 aa, Neisseria meningitidis; identical to SEQ ID NO: 3218

SEQ ID NO: 12197 - protein, 217 aa, Neisseria meningitidis; identical to SEQ ID NO: 9349

SEQ ID NO: 12198 - protein, 164 aa, Neisseria meningitidis; identical to SEQ ID NO: 2577

SEQ ID NO: 12199 - protein, 841 aa, Neisseria meningitidis
MNPNSKHNTNFTNLLKPSDSDIKQFAAQHICRLTDLLNRYAYEYYTLDAPSVPDAEYDKLFRELEALELNHPELKLPDSPTQRVGGEPLAGFAEVRHEVPMLSLTNAFSPQDENGVFDHAEMYAFDQRVRDGLDGGNPEYVIEPKFDGLAISLLYRDGVLVQAATRGDGTTGEDVTQNIKTVSNIPLRLHGENTPELIEVRGEVLMQKADFAALNKRQAENGQKPFANPRNAAAGSLRQLDSRITAQRKLHFFPYSVARRQGGFVAEEHIQELAYFQALGFSLPNGNFGCFKNIDEVLAFYEHMQQKRPELPYEIDGMVVKVNSLAQQRELGFISRAPRWAIAHKFPAEEALTVVEAIDVQIGRTGAVTPVARLQPVFVGGVTVTNATLHNQDEVSRKDVRVGDTVVVRRAGDVIPEVVRVIFERRPMQETAVAVSDGIGHRQDDLFAEAPAANQTQSVPLYKPYRLPTHCPICRSEIEREEGEAVARCSGGMLCQAQRAQGLIHFASRKAMDIDGLGEKQIEQLVAQDLVRHFADLYRLDIPTLQKMKETADKTVAESDQMPSEGSSVGASGKHKKQPTKWAENILAGIESGKTPELARFLFALGIRHVGERTAKTLAQAFGTLERVRRAPEPVLACLPDIGTVVARSIAHFFAQAEQQAMIDELLAAGVAPQAQAVSLPAAQYAEPQRWIARLPGFKISENKAQALWELAGKSIEGLQTDKSLPADWQAWRSEPQNAALLENLKTFFAQMPSEDEAAQGSDGINKAVAGKTFVLTGTLPTLKRDQAQSLIEAAGGKVSGSVSKKTDYVVAGEAAGSKLEKANALGVSVLSEAELLTLLG

SEQ ID NO: 12200 - protein, 108 aa, Neisseria meningitidis; identical to SEQ ID NO: 10621

SEQ ID NO: 12201 - protein, 282 aa, Neisseria meningitidis; identical to SEQ ID NO: 1323

SEQ ID NO: 12202 - protein, 302 aa, Neisseria meningitidis; identical to SEQ ID NO: 3208

SEQ ID NO: 12203 - protein, 298 aa, Neisseria meningitidis; identical to SEQ ID NO: 2112

SEQ ID NO: 12204 - protein, 431 aa, Neisseria meningitidis; identical to SEQ ID NO: 2927

SEQ ID NO: 12205 - protein, 96 aa, Neisseria meningitidis; identical to SEQ ID NO: 688

SEQ ID NO: 12206 - protein, 200 aa, Neisseria meningitidis; identical to SEQ ID NO: 3212

SEQ ID NO: 12207 - protein, 274 aa, Neisseria meningitidis; identical to SEQ ID NO: 3058

SEQ ID NO: 12208 - protein, 394 aa, Neisseria meningitidis
MSLHSDILVVGAGPAGLSFAAELAGSGLKVTLIERSPLTVLQNPPYDGREIALTHFSREIMQRLGMWDNIPENEIYPLRDAKVLNGRSDYQLHFPQPTEARGEPADCLGYLISNHNIRRAAYEVVSQLDNITILTDTAVKEVKTSDNEAQVFLENGDILTARLLLAADSRFSQTRRQLGISSDMHDYSRTMFVCRMKHTLSNQHTAYECFHYGRTIALLPLEEHLTNTVITVDTDKINSVQNLSPEELAASVKEQLKGRLGDMELVSSIHHYPLVGMIAKRFYGKRSALIGDAAVGMHPVTAHGFNLGLSSADILAKLILEAEQRGQDIGASSLLEKYSNKHMLHAHPLYHGTNMMLKLFTNETAPAKLLRGLVLRAGNNFPPLKKLITKQLTG

SEQ ID NO: 12209 - protein, 491 aa, Neisseria meningitidis; identical to SEQ ID NO: 2986

SEQ ID NO: 12210 - protein, 172 aa, Neisseria meningitidis; identical to SEQ ID NO: 1304

SEQ ID NO: 12211 - protein, 166 aa, Neisseria meningitidis; identical to SEQ ID NO: 3961

SEQ ID NO: 12212 - protein, 389 aa, Neisseria meningitidis; identical to SEQ ID NO: 3300

SEQ ID NO: 12213 - protein, 168 aa, Neisseria meningitidis; identical to SEQ ID NO: 2631

SEQ ID NO: 12214 - protein, 260 aa, Neisseria meningitidis; identical to SEQ ID NO: 3655

SEQ ID NO: 12215 - protein, 161 aa, Neisseria meningitidis; identical to SEQ ID NO: 1442

SEQ ID NO: 12216 - protein, 346 aa, Neisseria meningitidis
MQAVVVNKNVAGDVEIVEREVRPLEYGEALVEVEYCGVCHTDLHVAAGDYGEKPGRVLGHEGIGLVKEVADGVKNLKVGDRVSIAWLFQSCGSCEYCNTGRETLCRSVLNAGYTADGGMATYCIVSADYAVKVPEGLDPAQASSITCAGVTTYKAIKVSGVRPGQWIAIYGAGGLGNLGVQYAKKVFGAHVVAIDINDDKLAFAKETGADLVVNAAKEDAAKVIQEKTGGAHAAVVTAVSAAAFNSAVNCVRAGGRVVAIGLPPESMDLSIPRLVLDGIEVVGSLVGTRKDLEEAFQFGAEGLVVPKVQLRALDEAPAIFQEMREGKITGRMVIDMKKECGCGHHH

SEQ ID NO: 12217 - protein, 498 aa, Neisseria meningitidis; identical to SEQ ID NO: 3059

SEQ ID NO: 12218 - protein, 374 aa, Neisseria meningitidis
MQNTSFDNESDYSDDSDFASASETENRIGLTVPLELAGGRLDAVLAKLLPDYSRSRLTLWIKEGAVIVNDKPSQPKDKMIGGEQIRVTVRPSEENLAFVPEPMALDIVYEDDTVIVVNKPAGLVVHPAAGNWRGTLLNGLLAHCPELSQVPRAGIVHRLDKETSGLMVVAKTLPAQNSLVRQLQERTVKRIYRAVANGIVPFDGKIETQIGRDPHNRLKMAVVKFGGKPAVTHVKVLERYLPHSYIECSLETGRTHQIRVHMREANHPLAGDPVYGNPRHPCSDPVKEAVKSLGARQALHAYRLSFTHPESGETVSFEAPIPDDIYHLLSVLRLEAGLDSSLSNEEEWQDKFGADDDDDWNEDDYDVEVVYVRE

SEQ ID NO: 12219 - protein, 40 aa, Neisseria meningitidis; identical to SEQ ID NO: 2302

SEQ ID NO: 12220 - protein, 339 aa, Neisseria meningitidis; identical to SEQ ID NO: 1972

SEQ ID NO: 12221 - protein, 96 aa, Neisseria meningitidis; identical to SEQ ID NO: 2317

SEQ ID NO: 12222 - protein, 462 aa, Neisseria meningitidis
MNAVVVAVIVMLVLSLSRVHVVLSLTVGAFVGGAVAGMPLQNIADAAGQVSQAGIIPVFDKGLEGGAKIALSYAMLGAFAMAITHSGLPQQLAGAVVRKLNRGGMPDSVRSGEGAVKWLLLSIILVMGMMSQNIIPIHIAFIPMIVPPLLLVFNRLKIDRRLIACVITFGLVTTYMFLPYGFGAIFLNEILLGNIHSAAPQLDVKNINVMAAMAIPALGMLAGLLLAFVHYRKPRLYQSNNADTAGNADAANRPQPSAYRSLAAAAAIAVCFAIQLMYEDSLVLGAMLGFAVFMMLGVINRDKANDVFGEGIKMMAMVGFIMIAAQGFAAVMNATGHIQPLVESSMAIFGNSKGMAALAMLVVGLLVTMGIGSSFSTLPIIAAIYVPLCVGLGFSPLATVAIVGTAGALGDAGSPASDSTLGPTMGLNADGQHDHIRDSVIPTFIHYNIPLLIAGWIAAMVL

SEQ ID NO: 12223 - protein, 82 aa, Neisseria meningitidis; identical to SEQ ID NO: 2338

SEQ ID NO: 12224 - protein, 330 aa, Neisseria meningitidis; identical to SEQ ID NO: 3493

SEQ ID NO: 12225 - protein, 336 aa, Neisseria meningitidis; identical to SEQ ID NO: 9366

SEQ ID NO: 12226 - protein, 125 aa, Neisseria meningitidis; identical to SEQ ID NO: 592

SEQ ID NO: 12227 - protein, 358 aa, Neisseria meningitidis; identical to SEQ ID NO: 96

SEQ ID NO: 12228 - protein, 637 aa, Neisseria meningitidis; identical to SEQ ID NO: 2162

SEQ ID NO: 12229 - protein, 354 aa, Neisseria meningitidis; identical to SEQ ID NO: 3126

SEQ ID NO: 12230 - protein, 445 aa, Neisseria meningitidis; identical to SEQ ID NO: 2190

SEQ ID NO: 12231 - protein, 544 aa, Neisseria meningitidis; identical to SEQ ID NO: 2758

SEQ ID NO: 12232 - protein, 324 aa, Neisseria meningitidis
MTEYPGIGSPLFYGVFFAAVLVMIALDMFSLKKNGSHKVGIKEALAWSGLWVAVSCLFAGWLYFELAGNPGYGAAVAKEKVLEFFTGYILEKSLAVDNIFVFLMIFGYFKVAPQFQHRVLLYGVLGALVLRTVMIFVGAALVRQFEWILYLFGAFLLYTGIHMMKPEGDEEGDLANSRLLNAVKKVVPVGTEFHGEKFFTVENGKKIATPLFLVLVMIELSDVVFAVDSIPAVFAVTTDPFIVLTSNIFAILGLRAMYFLLSDVAERFIFLKYGLAFVLSFIGVKMLVMHWVHIPISVSLSVVFGALGASILTSLIYTKKQPDK

SEQ ID NO: 12233 - protein, 295 aa, Neisseria meningitidis; identical to SEQ ID NO: 3063

SEQ ID NO: 12234 - protein, 239 aa, Neisseria meningitidis; identical to SEQ ID NO: 7937

SEQ ID NO: 12235 - protein, 359 aa, Neisseria meningitidis
MNIQNIRTLLDTVAVPNTARTLGGEKAVRSVEQRSDGIHIALHFGFPVAHIASETADRIQEILMPLTGDTHIHLSMDTEIGTHKVQPGVTTIKGVKNIIAVASGKGGVGKSTTTANLAAAMARMGARVGVLDADLYGPSQPTMLGVDDRKPDQKNQKLIPVESSDGIQVMSIGFLVDTGQAVVWRGPMVSQALQQLMFQSEWDEVDYLFIDLPPGTGDIQLTLSQRIPVTGSVIVTTPQDIALIDARKAVDMFRKVNIPILGVLENMSVHICTNCGHSEALFGTDGGKDLAARLNVPLLGQLPLSLPVREAMDGGTPAQLFDEHPAIARIYTDAAFQIALGIADKGKDFSSRFPKIVVE

SEQ ID NO: 12236 - protein, 424 aa, Neisseria meningitidis; identical to SEQ ID NO: 3090

SEQ ID NO: 12237 - protein, 208 aa, Neisseria meningitidis; identical to SEQ ID NO: 2803

SEQ ID NO: 12238 - protein, 184 aa, Neisseria meningitidis
MKKIIASALIATFALAACQDDTQARFEQQQKQIEALQQQLAQQADDTVYQLTPEAVKDTIPAEAQANGNNGQPVTGKDGQQYIYDQSTGSWLLQSLVGAAAGAFIGNALANKFTRAGNQDSPVARRARAAYHQSARPNARTSRDLNTRSLRAKQQAAQAQRYRPTTRPPANYRRPAMRGFGRRR

SEQ ID NO: 12239 - protein, 284 aa, Neisseria meningitidis; identical to SEQ ID NO: 1030

SEQ ID NO: 12240 - protein, 179 aa, Neisseria meningitidis; identical to SEQ ID NO: 8483

SEQ ID NO: 12241 - protein, 334 aa, Neisseria meningitidis; identical to SEQ ID NO: 2103

SEQ ID NO: 12242 - protein, 289 aa, Neisseria meningitidis; identical to SEQ ID NO: 2976

SEQ ID NO: 12243 - protein, 239 aa, Neisseria meningitidis; identical to SEQ ID NO: 3265

SEQ ID NO: 12244 - protein, 239 aa, Neisseria meningitidis; identical to SEQ ID NO: 11311

SEQ ID NO: 12245 - protein, 471 aa, Neisseria meningitidis
LSRLQKAAQQILIVRGYLTSQAIIQPQNMDSGILKLRVSAGEIGDIRYEEKRDGKSAEGSISAFNNKFPLYRNKILNLRDVEQGLENLRRLPSVKTDIQIIPSEEEGKSDLQIKWQQNKPIRFSIGIDDAGGKTTGKYQGNVALSFDNPLGLSDLFYVSYGRGLAHKTDLTDATGTETESGSRSYSVHYSVPVKKWLFSFNHNGHRYHEATEGYSVNYDYNGKQYQSSLAAERMLWRNRFHKTSVGMKLWTRQTYKYIDDAEIEVQRRRSAGWEAELRHRAYLNRWQLDGKLSYKRGTGMRQSMPAPEENGGGTIPGTSRMKIITAGLDAAAPFMLGKQQFFYATAIQAQWNKTPLVAQDKLSIGSRYTVRGFDGEQSLFGERGFYWQNTLTWYFHPNHQFYLGADYGRVSGESAQYVSGKQLMGAVVGFRGGHKVGGMFAYDLFAGKPLHKPKGFQTTNTVYGFNLNYSF

SEQ ID NO: 12246 - protein, 313 aa, Neisseria meningitidis; identical to SEQ ID NO: 2172

SEQ ID NO: 12247 - protein, 423 aa, Neisseria meningitidis; identical to SEQ ID NO: 3498

SEQ ID NO: 12248 - protein, 219 aa, Neisseria meningitidis; identical to SEQ ID NO: 8069

SEQ ID NO: 12249 - protein, 160 aa, Neisseria meningitidis; identical to SEQ ID NO: 515

SEQ ID NO: 12250 - protein, 238 aa, Neisseria meningitidis; identical to SEQ ID NO: 2994

SEQ ID NO: 12251 - protein, 208 aa, Neisseria meningitidis; identical to SEQ ID NO: 1121

SEQ ID NO: 12252 - protein, 242 aa, Neisseria meningitidis
MLLGVNIDHIATVRNARGTTYPSPVEAALVAETHGADLITMHLREDRRHIKDADVFAVKNAIRTRLNLEMALTEEMLENALKVMPEDVCIVPEKRQEITTEGGLDVLAQQEKIAEFTKILTDAGIRVSLFIDADDRQIQAAYDVGAPVVELHTGAYADARSHAEQLKQFERLQNGAHFAGDLGLVVNAGHGLTIHNVTPIAQILAIRELNIGHSLIAQALFLGLPEAVRQMKEAMFRARLLP

SEQ ID NO: 12253 - protein, 81 aa, Neisseria meningitidis; identical to SEQ ID NO: 2079

SEQ ID NO: 12254 - protein, 269 aa, Neisseria meningitidis; identical to SEQ ID NO: 3572

SEQ ID NO: 12255 - protein, 104 aa, Neisseria meningitidis; identical to SEQ ID NO: 7344

SEQ ID NO: 12256 - protein, 185 aa, Neisseria meningitidis
MINDIQKTAEGKMQRSVEVLKENLAKVRTGRAHTGLLDQVEVEYWGSMVPVSQVANVTLLDARTIGVKPFESNMAAKVEKAIRDSNLGLNPAAVGDLIRVPMPMLTEERRKDLIKVVRGEAEEGRVSIRNVRRDANDHIKKLLKDKEISEDEARRGEEAVQKLTDKYITEADKLLTAKEEDLMAI

SEQ ID NO: 12257 - protein, 369 aa, Neisseria meningitidis
LEAQLGAPIEDYAPPKHWTRKQLRSMGRVSYLCVDAAEQALTDAGLLGDESITDGRMGVACGSSSGSTKDIGDVGELLLTGTSRNFSANTYVRMMPHTTAANIGIFFGLKGRIIPTSSACSSGSQGIGYAYEAIKYGLTDMMLAGGGEEFFSSEVYVFDSLYAASRRNGEPEKTPRPYDANRDGLVIGEGAGIFVLEELEHAKRRGAIIYAELVGYGANSDAYHISTPRPDAQGAILAFQTALQHAGLAPEDIGWINLHGTGTHHNDNMESRAVAAVFGNNTPCTSTKPQTGHTLGAAGAIEAAFAWGIADRQSNPEGKLPPRLWDGQNDPDLPAINLTGSGSRWETEKHIAASSSFAFGGSNCVLIIG

SEQ ID NO: 12258 - protein, 572 aa, Neisseria meningitidis; identical to SEQ ID NO: 2842

SEQ ID NO: 12259 - protein, 206 aa, Neisseria meningitidis
MTKLYAEIAKMETQDDGTVKVWGYASSEEIDSDGEVIAAAAMKAAIPDYMKFGAGREMHGSNAAGTAIEINVEDDGITFFGAHIIDPVAVAKVKTGVYKGFSIGGSVTARDDLNKSQITGLKLTEISLVERPANPDAVFTCFKADKSAEAVNNDTEHNTAYFSHFPSKQKSTDGGRCPFLYRFPYFLAAGRAGFAGPFGAGAPTEA

SEQ ID NO: 12260 - protein, 113 aa, Neisseria meningitidis; identical to SEQ ID NO: 1729

SEQ ID NO: 12261 - protein, 152 aa, Neisseria meningitidis; identical to SEQ ID NO: 1697

SEQ ID NO: 12262 - protein, 179 aa, Neisseria meningitidis; identical to SEQ ID NO: 8483

SEQ ID NO: 12263 - protein, 395 aa, Neisseria meningitidis; identical to SEQ ID NO: 3616

SEQ ID NO: 12264 - protein, 421 aa, Neisseria meningitidis
MFSFFRRKKKQETPAPEEAQVQETAAKAESEVTQIVENIKEEVESLTESVKGQVESAVETVSGAVEQVKEAVAEMLSEAEEAAEKAAEQVEAAKEAIAETVGEAVGQVQEAVATTEEHKLGWAARLKQGLTKSRDKMAKSLAGVFGGGQIDEDLYEELETVLITSDMGMEATEYLMKDVRDRVSLKGLKDGNELRGALKEALYDLIKPLEKPLVLPETKEPFVIMLAGINGAGKTTSIGKLAKYFQAQGKSVLLAAGDTFRAAAREQLQAWGERNNVTVISQTTGDSAAVCFDAVQAAKARGIDIVLADTAGRLPTQLHLMEEIKKVKRVLQKAMPDAPHEIIVVLDANIGQNAVNQVKAFDDALGLTGLIVTKLDGTAKGGILAALASDRPVPVRYIGVGESIDDLRPFDARAFVDALLD

SEQ ID NO: 12265 - protein, 256 aa, Neisseria meningitidis; identical to SEQ ID NO: 3311

SEQ ID NO: 12266 - protein, 658 aa, Neisseria meningitidis; identical to SEQ ID NO: 8968

SEQ ID NO: 12267 - protein, 376 aa, Neisseria meningitidis; identical to SEQ ID NO: 8696

SEQ ID NO: 12268 - protein, 80 aa, Neisseria meningitidis; identical to SEQ ID NO: 3196

SEQ ID NO: 12269 - protein, 140 aa, Neisseria meningitidis; identical to SEQ ID NO: 8657

SEQ ID NO: 12270 - protein, 182 aa, Neisseria meningitidis; identical to SEQ ID NO: 2877

SEQ ID NO: 12271 - protein, 397 aa, Neisseria meningitidis; identical to SEQ ID NO: 2969

SEQ ID NO: 12272 - protein, 192 aa, Neisseria meningitidis; identical to SEQ ID NO: 746

SEQ ID NO: 12273 - protein, 167 aa, Neisseria meningitidis; identical to SEQ ID NO: 2861

SEQ ID NO: 12274 - protein, 103 aa, Neisseria meningitidis; identical to SEQ ID NO: 3104

SEQ ID NO: 12275 - protein, 296 aa, Neisseria meningitidis; identical to SEQ ID NO: 2838

SEQ ID NO: 12276 - protein, 1619 aa, Neisseria meningitidis
LDGDGIETVATKGFAGALFDHRNQGIRTATGWVSADDGLLVRDLNGNGIIDNGAELFGDNTKLADGSFAKHGYAALAELDSNGDNIINAADAAFQSLRVWQDLNQDGISQANELRTLEELGIQSLDLAYKDVNKNLGNGNTLAQQGSYTKTDGTTAKMGDLLLAADNLHSRFKDKVELTAEQAKAANLAGIGRLRDLREAAALSGDLANMLKAYSAAETKEAQLALLDNLIHKWAETDSNWGKKSPMRLSTDWTQTANEGIALTPSQVAQLKKNALVSLSDKAKAAIDAARDRIAVLDAYTGQDSSTLYYMSEEDALNIVKVTNDTYDHLAKNIYQNLLFQTRLQPYLNQISFKMENDTFTLDFSGLVQAFNHVKETNPQKAFVDLAEMLAYGELRFWYEGRRLMADYVEEAKKAGKFEDYQKVLGQETVALLAKTSGTQADDILQNVGFGHNKNVSLYGNDGNDTLIGGAGNDYLEGGSGSDTYVFGKGFGQDTVYNYDYATGRKDIIRFTDGITADMLTFTREGNHLLIKAKDGSGQVTVQSYFQNDGSGAYRIDEIHFDNGKVLDVATVKKLVQQSTDGSDRLYAYQSGNTLNGGLGDDYLYGADGDDLLNGDAGNDSIYSGNGNDTLDGGEGNDALYGYNGNDVLNGAEGNDHLNGEDGNDTLIGGAGNDYLEGGSGSDTYVFGKGFGQDTVYNYDYATGRKDIIRFTDGITADMLTFTREGNHLLIKAKDGSGQVTVQSYFQNDGSGAYRIDEIHFDNGKVLDVATVKKLVQQSTDGSDRLYAYQSGNTLNGGLGDDYLYGADGDDLLNGDAGNDSIYSGNGNDTLDGGEGNDALYGYNGNDVLNGGEGNDHLNGEDGNDTLIGGAGNDYLEGGSGSDTYVFGKGFGQDTVYNYDYATGRKDIIRFTDGITADMLTFTREGNHLLIKAKDGSGQVTVQSYFQNDGSGAYRIDEIHFDNGKVLDVATVKKLVQQSTDGSDRLYAYQSGNTLNGGLGDDYLYGADGDDLLNGDAGNDSIYSGNGNDTLNGGEGNDALYGYNGNDVLNGGEGNDHLNGEDGNDTLIGGAGNDYLEGGSGSDTYVFGKGFGQDTVYNYDYATGRKDIIRFTDGITADMLTFTREGNHLLIKAKDGSGQVTVQSYFQNDGSGAYRIDEIHFDNGKVLDVATVKKLVQQSTDGSDRLYAYQSGNTLNGGLGDDYLYGADGDDLLNGDAGNDSIYSGNGNDTLDGGEGNDALYGYNGNDVLNGAEGNDHLNGEDGNDTLIGGAGNDYLEGGSGSDTYVFGKGFGQDTVYNYDYATGRKDIIRFTDGITADMLTFTREGNHLLIKAKDGSGQVTVQSYFQNDGSGAYRIDEIHFDNGKVLDVATVKKLVQQSTDGSDRLYAYQSGSTLNGGLGDDYLYGADGDDLLNGDAGNDSIYSGNGNDTLDGGEGNDALYGYNGNDVLNGGEGNDHLNGEDGNDTLIGGAGNDYLEGGSGSDTYVFGKGFGQDTVYNYHVDKNSDTMHFKGFKAADVHFIRSGSDLVLSASEQDNVRISGFFYGENHRVDTFVFDDAAISNPDFAKYINAGNNLVQSMSVFGSKYCCDRRKCGCQYTIRTAAVIGNAICIRSLITFMA

SEQ ID NO: 12277 - protein, 88 aa, Neisseria meningitidis; identical to SEQ ID NO: 2853

SEQ ID NO: 12278 - protein, 1071 aa, Neisseria meningitidis; identical to SEQ ID NO: 2463

SEQ ID NO: 12279 - protein, 135 aa, Neisseria meningitidis; identical to SEQ ID NO: 3544

SEQ ID NO: 12280 - protein, 73 aa, Neisseria meningitidis; identical to SEQ ID NO: 3916

SEQ ID NO: 12281 - protein, 251 aa, Neisseria meningitidis; identical to SEQ ID NO: 2955

SEQ ID NO: 12282 - protein, 1003 aa, Neisseria meningitidis; identical to SEQ ID NO: 1932

SEQ ID NO: 12283 - protein, 304 aa, Neisseria meningitidis; identical to SEQ ID NO: 3720

SEQ ID NO: 12284 - protein, 160 aa, Neisseria meningitidis; identical to SEQ ID NO: 182

SEQ ID NO: 12285 - protein, 457 aa, Neisseria meningitidis
MSNPFSSLGLGTELVSALTAQGYENPTPIQAAAIPKALAGHDLLAAAQTGTGKTAAFMLPSLERLKRYATASTSPAMHPVRMLVLTPTRELADQIDQNVQSYIKNLPLRHTVLFGGMNMDKQTADLRAGCEIVVATVGRLLDHVKQKNISLNKVEIVVLDEADRMLDMGFIDDIRKIMQMLPKQRQTLLFSATFSAPIRKLAQDFMNAPETVEVAAQNTTNANVEQHIIAVDTIQKRNLLERLIVDLHMNQVIVFCKTKQSVDRVTRELVRRNLSAQAIHGDRSQQSRLETLNAFKDGSLRVLVATDIAARGLDIAELPFVINYEMPAQPEDYVHRIGRTGRAGADGVAISLMDESEQKMFESIKELTGNKLLIERIEGFEPQWWEQGGAKPEKPEMREPRQRNRYESAKAQREKNTRPETTANDAGAACGKIAGRSRRSRREHRTCALLQPRYGVK

SEQ ID NO: 12286 - protein, 179 aa, Neisseria meningitidis; identical to SEQ ID NO: 8483

SEQ ID NO: 12287 - protein, 116 aa, Neisseria meningitidis; identical to SEQ ID NO: 840

SEQ ID NO: 12288 - protein, 485 aa, Neisseria meningitidis
MHKILPIAHVLSRLGMLFSFILLIPAALSYAFSDGAYTAFATTATVTLSGSYIVRLATLRFRRELRPRDGFTLVLMLWLAFAAMAAMPMYLYFPNMGFTDAFFESMSGLTTTGATVIPHVDGLAPSVNFWRHMLNWLGGMGIIVLAVAILPMLGVGGTQLFKAEIPGIDKESKMSPRISQVAKKLWFGYTLITILAAACLHFAGMGWFDAVCHAMATLSLGGFSTHDASIAYYNSPLIEAVIIVFTIVGGINFANHFAALNSRSLKTYWKDEECRTMLLLLSGSILAAALYLWHTGYYAGFTESLRYTAFNFVSIGLANGLANTDFAQWPLLISLWMFFLANILANSGSTGGGIKTIRALVLFKFSLREMMVLLHPKAVRTVKISGKAIPDRLALTVMSFIFIYFMTVVLFSFLLMASGMEFTTAFTAVIACITNAGPGLGEVGPAGNYAGLDVMQKWICVTAMLLGRLEIFTVFILFTPAYWKK

SEQ ID NO: 12289 - protein, 807 aa, Neisseria meningitidis
LATLPLRDVVVYPHMVLPLFVGRPKSIAALENAITREEPVFLLAQTDAAVEEPVAADLYQTGTVAQVLQVLKLPDGTVKVLVEGLYRGRVLTIEDTGGLFVSHIEAVVEEDTGGNTDLEAVRRTLLAQFEQYAKLNKKIPAEIIGSINGIAENSRLTDTVAAHLQLKLTQRQQILEISEIGKRMEFLLAQLESELDIMQAEKRIRGRVKRQMEKSQREYYLNEQIKAIHKELGEEDENGELDALEAGIKKAGMSKEAEEKCLSELKKLKMMPPMSAESTVVRNYIDTLLELPWKKKSRVSKDIAKAGLVLDADHYGLEKVKERILEYLAVQKRMDKLKGPILCLVGPPGVGKTSLGESIAKATGRKYVRMALGGVRDESEIRGHRRTYIGSMPGKILQNMAKAGVKNPLFLLDEIDKLGSDFRGDPASALLEVLDPEQNNKFADHYAEVDYDLSDVMFIATSNSLNIPTPLLDRMEIIRLSGYTEDEKINIAMQYLVPKQMKRNGVKEGELAIEESAVRDIIRYYTREAGVRSLDREIAKICRKVVMQITLDEDKKRLSETKKTSKAKPKAVKVNEKNLHDYLGVRRFDYGVAESENRIGQVTGLAWTEVGGELLTVEAAALPGKGVIQCTGQLGDVMKESVSAAWSVVRSRAESVGLAPDFYEKKDIHVHVPEGATPKDGPSAGIAMTLAMVSAFTKIPVRADVAMTGEITLRGEVLPIGGLKEKLLAALRGGIKHVLIPKDNLKDLEEIPENVKTGLTIHPVKWIDEVLALGLESQPEPWAEPSGAEAAAESASKPKPRSRATKH

SEQ ID NO: 12290 - protein, 558 aa, Neisseria meningitidis; identical to SEQ ID NO: 1615

SEQ ID NO: 12291 - protein, 273 aa, Neisseria meningitidis
MDFLIVLKALMMGLVEGFTEFLPISSTGHLIVFGNLIDFHSNHKVFEIAIQLGAVLAVVFEYRQRFSNVLHGLGKDRKANRFVLNLAIAFIPAAVMGLLFGKQIKEYLFNPLSVAVMLVLGGFFILWVEKRQSRAEPKIADVDALRPIDALMIGIAQVFALIPGTSRSGSTIMGGMLWGIERKTATEFSFFLAVPMMVAATAYDVLKHYRFFTLHDVGLILIGFIAAFVSGLVAVKALLKFVSKKNYIPFAYYRIVFGIVIIILWLSGWISWE

SEQ ID NO: 12292 - protein, 405 aa, Neisseria meningitidis; identical to SEQ ID NO: 163

SEQ ID NO: 12293 - protein, 215 aa, Neisseria meningitidis; identical to SEQ ID NO: 709

SEQ ID NO: 12294 - protein, 217 aa, Neisseria meningitidis
MKITHCKLKKKVQKELLRFFVLEVTARSAADILGIHPNSAALFYRKIRTVINHHLALAADEVFEGPVEQDESDFGGRRKGRRGRGAAGKVVVFGILKHNGRVYTVIVDNAKSETLLPVIKKKIMPDSIVYTDSLSSCDKLDVSGFIHYRINHSKEFADRQNHINGIENFWNQAKRVLRKYNGIDRKSFPLFLKECEFRFNFGTPSQQLKILRDWCGI

SEQ ID NO: 12295 - protein, 376 aa, Neisseria meningitidis; identical to SEQ ID NO: 2312

SEQ ID NO: 12296 - protein, 458 aa, Neisseria meningitidis; identical to SEQ ID NO: 3358

SEQ ID NO: 12297 - protein, 416 aa, Neisseria meningitidis; identical to SEQ ID NO: 2246

SEQ ID NO: 12298 - protein, 71 aa, Neisseria meningitidis; identical to SEQ ID NO: 2650

SEQ ID NO: 12299 - protein, 75 aa, Neisseria meningitidis; identical to SEQ ID NO: 3903

SEQ ID NO: 12300 - protein, 794 aa, Neisseria meningitidis
MADNYVIWFENLRMTDVERVGGKNASLGEMISQLTEKGVRVPGGFATTADAYRAFLAHNGLSERISAALAKLDVEDVAELARVGKEIRQWILDTPFPEQLDAEIEAAWNKMVADAGGADISVAVRSSATAEDLPDASFAGQQETFLNINGLDNVKEAMRHVFASLYNDRAISYRVHKGFEHDIVALSAGVQRMVRSDSGASGVMFTLDTESGYDQVVFVTSSYGLGENVVQGAVNPDEFYVFKPTLKAGKPAILRKTMGSKHIKMIFTDKAEAGKSVTNVDVPEEDRNRFSITDEEITELAHYALTIEKHYGRPMDIEWGRDGLDGKLYILQARPETVKSQEEGNRNLRRFAINGDKTVLCEGRAIGQKVGQGKVRLIKDASEMDSVEAGDVLVTDMTDPDWEPVMKRASAIVTNRGGRTCHAAIIARELGIPAVVGCGNATELLKNGQEVTVSCAEGDTGFIYAGLLDVQITDVALDNMPKAPVKVMMNVGNPELAFSFANLPSEGIGLARMEFIINRQIGIHPKALLEFDKQDDELKAEITRRIAGYASPVDFYVDKIAEGVATLAASVYPRKTIVRMSDFKSNEYANLVGGNVYEPHEENPMLGFRGAARYVADNFKDCFALECKALKRVRDEMGLTNVEIMIPFVRTLGEAEAVVKALKENGLERGKNGLRLIMMCELPSNAVLAEQFLQYFDGFSIGSNDMTQLTLGLDRDSGLVSESFDERNPAVKVMLHLAISACRKQNKYVGICGQGPSDHPDFAKWLVEEGIESVSLNPDTVIETWLYLANELNK

SEQ ID NO: 12301 - protein, 84 aa, Neisseria meningitidis; identical to SEQ ID NO: 3171

SEQ ID NO: 12302 - protein, 293 aa, Neisseria meningitidis; identical to SEQ ID NO: 9178

SEQ ID NO: 12303 - protein, 151 aa, Neisseria meningitidis
LDKQIDDHTHTHFDGKAQVAEQIKGIGSITTATLMVMLPELGRLSHKRIASLVGIAPHPRESGETKFKSRCFGGRSAVRKALYMATVAATRFEPLIRDFYQRLPSEGKPYKVAVTACMRKLLTISNARMRDYFAENDTAENDTAENGIRTA

SEQ ID NO: 12304 - protein, 558 aa, Neisseria meningitidis; identical to SEQ ID NO: 2720

SEQ ID NO: 12305 - protein, 434 aa, Neisseria meningitidis; identical to SEQ ID NO: 2219

SEQ ID NO: 12306 - protein, 370 aa, Neisseria meningitidis; identical to SEQ ID NO: 3173

SEQ ID NO: 12307 - protein, 553 aa, Neisseria meningitidis
MLTYTPPDARPPAKTHEKPWLLLLMAFAWLWPGVFSHDLWNPAEPAVYTAVEALAGSPTPLVAHLFGQTDFGIPPVYLWVAAAFKHLLSPWAADPYDAARFAGVFFAVVGLTSCGFAGFNFLGRHHGRSVVLILIGCIGLIPVAHFLNPAAAAFAAAGLVLHGYSLARRRVIAASFLLGTGWTLMSLAAAYPAAFALMLPLPVLMFFRPWQSRRLMLTAVASLAFALPLMTVYPLLLAKTQPALFAQWLDYHVFGTFGGVRHVQTAFSLFYYLKNLLWFALPALPLAVWTVCRTRLFSTDWGILGVVWMVAVLVLLAANPQRFQDNLVWLLPPLALFGAAQLDSLRRGAAAFVNWFGIMAFGLFAVFLWTGFFAMNYGWPAKLAERAAYFSPYYVPDIDPIPMAVAVLFTPLWLWAITRKNIRGRQAVTNWAAGVTLTWALLMTLFLPWLDAAKSHAPVVRSMEASLSPELKRELSDGIECIGIGGGDLHTRIVWTQYGTLPHRVGDVQCRYRIVRLPQNADAPQGWQTVWQGARPRNKDSKFALIRKIGENI

SEQ ID NO: 12308 - protein, 307 aa, Neisseria meningitidis; identical to SEQ ID NO: 983

SEQ ID NO: 12309 - protein, 215 aa, Neisseria meningitidis; identical to SEQ ID NO: 3110

SEQ ID NO: 12310 - protein, 100 aa, Neisseria meningitidis; identical to SEQ ID NO: 3450

SEQ ID NO: 12311 - protein, 44 aa, Neisseria meningitidis; identical to SEQ ID NO: 6328

SEQ ID NO: 12312 - protein, 445 aa, Neisseria meningitidis
MLPSGRSSKKAESKTVIPAERHNIRAEMLSFAAENVIRRLKEAGFQAYVVGGAVRDLLLGIEPKDFDVATDAMPEQVHKLFRRSRIVGRRFQIVHVMNGAEIIEVTTFRGGAKVHQNAHGRIMKDNTYGSIEEDAMRRDFTCNALYYDPEKEEILDFHNGIADVAARRLVMIGDAAERYQEDPVRILRAIRLSGKLGFELSEETAAPIAESICRLKHEPVARLFDEIMKLLFSGHARECLKRLNGFDIPDDIHPLLNALRVSDGIAGKMTVLALKNTDERLRADKSVSVGFVLAALMWPELERHWKSNLQQGLKPVPALSDAINTMRETVERGWGVPQRFSATMREIWMFQPQFENRKGARPHKLFAQARFRATYDFLLLRAETGNADRALAEWWTAFQTASQEQRTEMTKNEAAARHEKNEGQAKKRRRRRRKPKPKVVGTDWE

SEQ ID NO: 12313 - protein, 335 aa, Neisseria meningitidis
MSTFFQQTAQAMIAKHIDRFPLLKLDQVIDWQPIEQYLNRQRTRYLRDHRGRPAYPLLSMFKAVLLGQWHSLSDPELEHSLITRIDFNLFCRFDELSIPDYSTLCRYRNWLAQDNTLSELLELINRQLTEKNLKIEKASAAVIDATIIQTAGSEQRQAIEVDEEGQVSGQTTLSKDKNARWTKKNSLYKLGYKQHTRTDAEGYIEKLYITPTNAHECTHLSPLLEGLPKGTTVYADKGYDSKENRQHLKEHRLQNGIMRKACRNRPLTETQTKRNRYLSKTRYVVEQSFGTLHRKFRYARAAYFGLIKVSAQSHLKAMCLNLLKAANRLSAPAAA

SEQ ID NO: 12314 - protein, 332 aa, Neisseria meningitidis; identical to SEQ ID NO: 3650

SEQ ID NO: 12315 - protein, 321 aa, Neisseria meningitidis; identical to SEQ ID NO: 2168

SEQ ID NO: 12316 - protein, 206 aa, Neisseria meningitidis
MAQFFAIHPDNPQERLIKQAVEIVNKGGVVVYPTDSCYALGCKLGDKAAMERILSIRKIDLKHHLTLMCADLSELGTYAKIDNVQFRQLKAATPGPYTFILQATKEVPARTLHPKRKTIGLRIPDNAIAQALLGELGEPLLSCTLMLPEDGEPLTDPYEIRERLEHAVDLVIDGGWCGTEPTTVVDMTDGTELVRRGCGDTAVFGL

SEQ ID NO: 12317 - protein, 55 aa, Neisseria meningitidis; identical to SEQ ID NO: 2625

SEQ ID NO: 12318 - protein, 823 aa, Neisseria meningitidis; identical to SEQ ID NO: 3509

SEQ ID NO: 12319 - protein, 421 aa, Neisseria meningitidis
MSTNNPTQPTRRTLFKTALAAGVGGAIGGYLGGKGLGETAERTAESQHSPQAYPCYGKNQAGIVTPQQAFSIMCAFDVTAQNAKQLENLFRTLTARIEFLTQGGEYQDGDDKLPPAGSGILGKAFNPDGLTVTVGVGSSLFDGRFGLKDKKPVHLQEMRDFPNDKLQKSWCDGDLSLQICAFTPETCQAALRDIIKHTVQTAVIRWSIDGWQPKSEPGAMAARNLLGFRDGTGNPKVSDPKTADEVLWTGVAANSLDEPEWAKNGSYQAVRLIRHFVEFWDRTPLQEQTDIFGRRKYSGAPMDGKKEADQPDFAKDPEGNTTPKDSHIRLANPRDPEFLKKHRLFRRAYSYSRGLASSGQLDVGLVFICYQANLADGFIFVQNLLNGEPLEEYISPFGGGYFFVLPGVEKGGFLGQGLLGV

SEQ ID NO: 12320 - protein, 197 aa, Neisseria meningitidis; identical to SEQ ID NO: 2603

SEQ ID NO: 12321 - protein, 400 aa, Neisseria meningitidis; identical to SEQ ID NO: 2692

SEQ ID NO: 12322 - protein, 216 aa, Neisseria meningitidis; identical to SEQ ID NO: 2506

SEQ ID NO: 12323 - protein, 81 aa, Neisseria meningitidis; identical to SEQ ID NO: 1361

SEQ ID NO: 12324 - protein, 155 aa, Neisseria meningitidis
MQIDNISDEQVVIVRMSCYLKKDEIFKNIERYGYQSSDIKKISPPFPLNILPVPKPYYFYLYDTHLNQIYDLAWSCNDFLMFEIFILDRESIKYIDKDKLFKSRETLYSNFKSIKNQCKNYFFCGFDFDAPYFKSGVSQVADYNFVPDAFSLFFI

SEQ ID NO: 12325 - protein, 188 aa, Neisseria meningitidis
MCAVQVGGPWLSLSEDVVCVPRDMSMSAENMALADVSADMLLFPHTLEGGVPSQILSEAHRILKPCGRLMLTGFNPYSLWGFSRWFDGERLPEKRFCLPLPELKRQLADVGFDIEFGKFMVYLPPVSSLGQIRFWRFMEKAGDRWWPQCAAVYGLVLVKRAAGVTPLPAWDGYLGGKALAAGAARIAD

SEQ ID NO: 12326 - protein, 321 aa, Neisseria meningitidis; identical to SEQ ID NO: 2168

SEQ ID NO: 12327 - protein, 51 aa, Neisseria meningitidis; identical to SEQ ID NO: 5732

SEQ ID NO: 12328 - protein, 52 aa, Neisseria meningitidis; identical to SEQ ID NO: 2321

SEQ ID NO: 12329 - protein, 168 aa, Neisseria meningitidis; identical to SEQ ID NO: 2360

SEQ ID NO: 12330 - protein, 317 aa, Neisseria meningitidis; identical to SEQ ID NO: 3631

SEQ ID NO: 12331 - protein, 332 aa, Neisseria meningitidis; identical to SEQ ID NO: 2762

SEQ ID NO: 12332 - protein, 192 aa, Neisseria meningitidis; identical to SEQ ID NO: 9025

SEQ ID NO: 12333 - protein, 1161 aa, Neisseria meningitidis; identical to SEQ ID NO: 2685

SEQ ID NO: 12334 - protein, 562 aa, Neisseria meningitidis
MLNKDQFADNHFIRTFIEEDLKSGKHETIQTRFPPEPNGYLHIGHAKSICLNFGLAYIYDGLCNLRFDDTNPEKENDEYVNAIKEDVEWLGFHWAGEPRFASNYFDQLYDYAVGLVKDGKAYVDDLTPEEMREYRGTLTEAGKNSPYRDRSIEENLDLFTRMKNGEFPDGSKTLRLKIDMASGNINMRDPVIYRIRRAHHHNTGDKWCIYPMYDYTHCISDAIEGITHSLCTLEFEAHRPLYDWVLDNIPAPHATRPRQYEFSRLELLYTITSKRKLNQLVVEKHVSGWDDPRMPTISGMRRRGYTPEGLRLFAKRAGISKSENIVDMSVLEGAIREELENSAPRLMAVLNPLKVTLTNFETGRTQSRRAAFHPNHEEMGEREVPISQTIYIEADDFAENPPKGFKRLIPGGEVRLRHGYVIKCDEVVKDEAGNVVELKCSIDHDTLGKNPEGRKVKGVIHWVSAEHAAEIKVRLYDRLFTVERPDAVRGEDGEYLPFTDFLNPESVKEITAYAEPAAKDLPAESRWQFERIGYFVTDRKDHGKDTPVFNRTVTLKDSWQPK

SEQ ID NO: 12335 - protein, 123 aa, Neisseria meningitidis; identical to SEQ ID NO: 3099

SEQ ID NO: 12336 - protein, 170 aa, Neisseria meningitidis; identical to SEQ ID NO: 2052

SEQ ID NO: 12337 - protein, 154 aa, Neisseria meningitidis; identical to SEQ ID NO: 1849

SEQ ID NO: 12338 - protein, 280 aa, Neisseria meningitidis; identical to SEQ ID NO: 3261

SEQ ID NO: 12339 - protein, 215 aa, Neisseria meningitidis; identical to SEQ ID NO: 2727

SEQ ID NO: 12340 - protein, 251 aa, Neisseria meningitidis; identical to SEQ ID NO: 3399

SEQ ID NO: 12341 - protein, 467 aa, Neisseria meningitidis
MDTTLKTTLTSVAAAFALSACTMIPQYEQPKVEVAETFKNDTADSGIRAVDLGWHDYFADPRLQKLIDIALERNTSLRTAVLNSEIYRKQYMIERNNLLPTLAANANDSRQGSLSGGNVSSSYKVGLGAASYELDLFGRVRSSSEAALQGYFASTANRDAAHLSLIATVAKAYFNERYAEEAMSLAQRVLKTREETYKLSELRYKAGVISAVALRQQEALIESAKADYAHAARSREQARNALATLINQPIPEDLPAGLPLDKQFFVEKLPAGLSSEVLLDRPDIRAAEHALKQANANIGAARAAFFPSIRLTGTVGTGSAELGGLFKSGTGVWSFAPSITLPIFTWGTNKANLDVAKLRQQAQIVAYESAVQSAFQDVANALAAREQLDKAYDALSKQSRASKEALRLVGLRYKHGVSGALDLLDAERSSYSAEGAALSAQLTRAENLADLYKALGGGLKRDTQTDK

SEQ ID NO: 12342 - protein, 334 aa, Neisseria meningitidis
MSTFFRQTAQAMIAKHIDCFPLLKLDQVIDWQPIEQYLNRQRTRYLRDHRGRPAYPLLSMFKAVLLGQWHSLSVPELEHSLITRIDFNLFCRFDELSIPDYSTLCRYRNWLAQDDTLSELLELINRQLTEKGLKIEKASAVVGATIIQTAGSKQRQAIEVDEEGQVSGQTTPSKDSDARWIKKNGLYKLGYKQHTRTDAEGYIEKLHITPANAHECKHLPPLLEGVPRGTTVYADKGYDSAENRQHLEEHQLQDGIMRKACRNRPLTEAQTKRNRYLSKTRYVVEQSFGTLHRKFRYARSTYFGLIKVSAQSHLKAMCLNLLKAANRLSAPAAA

SEQ ID NO: 12343 - protein, 432 aa, Neisseria meningitidis; identical to SEQ ID NO: 2024

SEQ ID NO: 12344 - protein, 180 aa, Neisseria meningitidis; identical to SEQ ID NO: 2298

SEQ ID NO: 12345 - protein, 224 aa, Neisseria meningitidis
VQADLAYAAERITHDYPQATGANNTSTVSDYFRNIRAHSIHPRVSVGYDFGDWRIAADYASYRKWKESNSSTKKVTEEIKDNYKETKTEHQGNGSFHAASSLGLSAIYDFKLNDKFKPYIGARVAYGHVRHQVNSVDKETITLISKPKGNSPGGGRVVSSLPSKPPYHESNSISSLGLGVIAGVGFDITPKLTLDTGYRYHNWGRLKNTRFKTHEVSLGMRYHF

SEQ ID NO: 12346 - protein, 129 aa, Neisseria meningitidis; identical to SEQ ID NO: 322

SEQ ID NO: 12347 - protein, 447 aa, Neisseria meningitidis; identical to SEQ ID NO: 2570

SEQ ID NO: 12348 - protein, 377 aa, Neisseria meningitidis
MFKKFKPVLLSFFALVFAFWLGTGIAYEINPRWFLSDTATEVPENPNAFVAKLARLFRNADRAVVIVKESMRTEESLAETVDDGPLQSEKDYLALAIRLSRLKEKAKWFHVTEQEHGEEVWLDYYIGEGGLVAVSLLQRSPEAFVNAEYLYRNDRPFSVNVYGGTAHGENYETTGEYRVVWQPDGSVFDAAGRGKIGEDVYEHCLGCYQMAQVYLAKYRDVANDEQKVWDFREESNRIASDSRDYVFYQNMRELMPRGMKANSLVVGYDADGLPQKVYWSFDNGKKRQSFEYYLKNGNLFIAQSSTVALKADGVTADIQTYHAQQTWYLDGGRIIREEKQGDRLPDFPLNLENLEKEVRRYAEAAARRSGGRRDLSH

SEQ ID NO: 12349 - protein, 415 aa, Neisseria meningitidis; identical to SEQ ID NO: 2944

SEQ ID NO: 12350 - protein, 140 aa, Neisseria meningitidis; identical to SEQ ID NO: 2533

SEQ ID NO: 12351 - protein, 406 aa, Neisseria meningitidis
LIGFIYIVLKIFGIGIMATHGDEVKIQNRQEADSAKAKRKRRLTALTLLFALAAAAAGSAFFLWWQHEEETEDAYVAGRVVQVTPQKGGTVRKVLHDDTDAVKKGDVLAVLDDDNDVLAYERAKNELVQAVRQNRRQNAATSQAGAQVALRRADLARAQDDLRRRSALAESGAVSAEELAHARAAVSQAQAAVKAALAEESSARAALGGQVSLREQPAVQTAIGRLKDAWLNLQRTQIRASADGQVAKRSVQVGQQVAAGAPLMAVVPLSDVWVDANFKETQLRHMKIGQPAELVSDLYGKQIVYRGRVAGFSAGTGSAFSLIPAQNATGNWIKVVQRVPVRIVLNREDVDRHPLRIGLSMTVKVDTSAAGAPVSKTPGAALPEMESTDWSEVDRTVDEILGQSAP

SEQ ID NO: 12352 - protein, 169 aa, Neisseria meningitidis; identical to SEQ ID NO: 219

SEQ ID NO: 12353 - protein, 76 aa, Neisseria meningitidis; identical to SEQ ID NO: 374

SEQ ID NO: 12354 - protein, 133 aa, Neisseria meningitidis
VKREWFVIDAQDKVLGRVAAEVASRLRGKHKPEYTPHVDTGDYIIVINADKLRVTGAKFEDKKYFRHSGFPGGIYERTFREMQEQFPGRALEQAVKGMLPKGPLGYAMIKKLKVYAGAEHAHAAQQPKVLELK

SEQ ID NO: 12355 - protein, 470 aa, Neisseria meningitidis; identical to SEQ ID NO: 2364

SEQ ID NO: 12356 - protein, 503 aa, Neisseria meningitidis; identical to SEQ ID NO: 3463

SEQ ID NO: 12357 - protein, 399 aa, Neisseria meningitidis
MSDQLILVLNCGSSSLKGAVIDRKSGSVVLSCLGERLTTPEAVITFNKDGNKRQVPLSGRNCHAGAVGMLLNELEKHGLHDRIEAIGHRIAHGGEKYSESVLIDQAVMDELNACIPLAPLHNPANISGILAAQEHFPGLSNVGVMDTSFHQTMPERAYTYAVPRELRKKYAFRRYGFHGTSMRYVAPEAARILGKPLEDIRMIIAHLGNGASITAIKNGKSVDTSMGFTPIEGLVMGTRCGDIDPGVYSYLTSHAGMDVAQVDEMLNKKSGLLGISELSNDCRTLEIAADEGHEGARLALEVMTYRLAKYIASMAVACGGVDALVFTGGIGENSRNIRAKTVSYLDFLGLHIDTKANMDKRYGNSGIISPTDSSPAVLVVPTNEELMIACDTAELVGIL

SEQ ID NO: 12358 - protein, 144 aa, Neisseria meningitidis; identical to SEQ ID NO: 1499

SEQ ID NO: 12359 - protein, 264 aa, Neisseria meningitidis; identical to SEQ ID NO: 9300

SEQ ID NO: 12360 - protein, 472 aa, Neisseria meningitidis; identical to SEQ ID NO: 4196

SEQ ID NO: 12361 - protein, 201 aa, Neisseria meningitidis; identical to SEQ ID NO: 9086

SEQ ID NO: 12362 - protein, 322 aa, Neisseria meningitidis; identical to SEQ ID NO: 3279

SEQ ID NO: 12363 - protein, 1277 aa, Neisseria meningitidis
MTTTTAPQRIREIPYNYTSYTDREIVIRLLGDEAWQILQDLRGQRKTGRSARMLFEVLGDIWVVVRNPYLVDDLLEHPKRRTALVREMRHRLNEIRKRRDDNRQVDVLVAAADKAVGRFDGSFDETRQKRQQILERLSKITKPHNIMFDGLARVTHVTDATDWRVEYPFVVVNPDTEAEIAPLVCALIELDLVIIPRGGGTGYTGGAIPLDAMSAVINTEKLDKHNGVEFVELAGLDGKHPIIRCGAGVVTRRVEETAHQAGLVFAVDPTSADASCVGGNVAMNAGGKKAVLWGTALDNLAYWQMVNPQGEWLRIERVRHNFGKIHDEETAVFDVHTLDSDGLNIVKTERLEIPGHKFRKVGLGKDVTDKFLSGLPGVQKEGTDGIITGVAFVLHKMPKYTRTVCMEFFGTVATATPSIVEIRDFLLAHESVRLAGLEHLDWRYVRAVGYATKAAGKGRPKMVLLADVVSDDEAAVQAAAEHICELARARDGEGFIAVSPEARKTFWLDRSRTAAIAKHTNAFKINEDVVIPLERLGEYSDGIERINIELSIQNKLKLCAALEQYLSGKLPIDKMGTDLPTAELLGERGKHALAHVSAVKARWDWLLANLDTPLADYKTRYGAAVHAAPEAKDDESCFIAFRDFRLRVSVKADVMKPLSEIFSGKTDTKIIQGLGKIHAKTVRSRVFVALHMHAGDGNVHTNIPVNSDDAEMLQTAYRSVERIMKIARSLNGVISGEHGIGITKLEFLSDEEMQPFWNYKNQVDPKHTFNRHKLMKGSDLRNAYTPSFELLGAESLIMEKSDLGTIADSVKDCLRCGKCKPVCSTHVPRANLLYSPRNKILGVGLLTEAFLYEEQTRRGVSVKHFEELMDIGDHCTVCHRCVKPCPVNIDFGDVTVAVRNYLADSGHKRFAPAAAMGMAFLNATGPKTIKALRAAMIQTGFPAQNFAYKIGKLLPIGTKKQKAEPKATVGKAPIKEQVIHFINRPLPKSVPAKTPRSLLGIEDGKSIPIIRNPAAPEDAEAVFYFPGCGSERLFSQIGLAVQAMLWHVGVQTVLPPGYMCCGYPQDAGGNKAKAEEMSTNNRVAFHRMANTLNYLDIKTVVVSCGTCYDQLEKYRFEEIFPGCRIIDIHEYLLEKGVKLDGVQGQQYLYHDPCHTPIKTMNATQMASSLMGQKVVLSDRCCGESGMFAVKRPDIATQVKFRKQEEIEKNLKELPQGEPVKMLTSCPACLQGLSRYTDDNNMPADYIVIEMAKHILGENWLDEFVKKANNGGVEKVLL

SEQ ID NO: 12364 - protein, 434 aa, Neisseria meningitidis; identical to SEQ ID NO: 1155

SEQ ID NO: 12365 - protein, 198 aa, Neisseria meningitidis
MRKQNTLTGIPTSDGQRGFALFIVLMVMIVVAFLVVTAAQSYNTEQRISANESDRKLALSLAEAALREGELQVLDLEYDTDSKVTFSENCGKGLCTAVNVRTNNTGNEEAFDNIVVQGNPTVEAVKRFCPANSTDLCIDKKGMEYKKGTRSVSKPPRYIIEYLGVKNGENVYRVTAKAWGKNANTVVVLQSYVSNNDE

SEQ ID NO: 12366 - protein, 404 aa, Neisseria meningitidis; identical to SEQ ID NO: 9479

SEQ ID NO: 12367 - protein, 383 aa, Neisseria meningitidis; identical to SEQ ID NO: 3357

SEQ ID NO: 12368 - protein, 1392 aa, Neisseria meningitidis; identical to SEQ ID NO: 2806

SEQ ID NO: 12369 - protein, 619 aa, Neisseria meningitidis; identical to SEQ ID NO: 1938

SEQ ID NO: 12370 - protein, 335 aa, Neisseria meningitidis
MSTFFQQTAQAMIAKHIDRFPLLKLDQVIDWQPIEQYLNRQRTRYLRDHRGRPAYPLLSMFKAVLLGQWHSLSDPELEHSLITRIDFNLFCRFDELSIPDYSTLCRYRNWLAQDNTLSELLELINRQLTEKNLKIEKASAAVIDATIIQTAGSEQRQAIEVDEEGQVSGQTTLSKDKNARWTKKNSLYKLGYKQHTRTDAEGYIEKLYITPTNAHECTHLSPLLEGLPKGTTVYADKGYDSKENRQHLKEHRLQNGIMRKACRNRPLTETQTKRNRYLSKTRYVVEQSFGTLHRKFRYARAAYFGLIKVSAQSHLKAMCLNLLKAANRLSVPAAA

SEQ ID NO: 12371 - protein, 209 aa, Neisseria meningitidis; identical to SEQ ID NO: 1305

SEQ ID NO: 12372 - protein, 321 aa, Neisseria meningitidis
MSYTQLTQGERYHIQYLSRHCTVTEIAKQLNRHKSTISREIRRHRTQGQQYSAEKAQRQSQTIKQRKRQPYKLDSQLIQHIDTLIRRKLSPEQVCAYLCKHHRITLHHSTIYRYLRQDKSNGSTLWQHLRICSKPYRKRYGSTWTRGKVPNRVGIENRPAIVDQKSRIGDWEADTIVGKGQKSALLTLVERVTRYTIICKLDSLKAEDTARAAVRALKAHKDRVHTITMDNGKEFYQHTKITKALKAETYFCRPYHSWEKGLNENTNGLIRQYFPKQTDFRNISDREIRRVQDELNHRPRKTLGYETPSVLFLNLFQPLIH

SEQ ID NO: 12373 - protein, 176 aa, Neisseria meningitidis; identical to SEQ ID NO: 1829

SEQ ID NO: 12374 - protein, 467 aa, Neisseria meningitidis; identical to SEQ ID NO: 8430

SEQ ID NO: 12375 - protein, 225 aa, Neisseria meningitidis; identical to SEQ ID NO: 2094

SEQ ID NO: 12376 - protein, 245 aa, Neisseria meningitidis; identical to SEQ ID NO: 2457

SEQ ID NO: 12377 - protein, 42 aa, Neisseria meningitidis
MDFRFHAGYSLLRRRYKSIFSDLPFLVILPDGVKNTVATLAA

SEQ ID NO: 12378 - protein, 330 aa, Neisseria meningitidis; identical to SEQ ID NO: 2676

SEQ ID NO: 12379 - protein, 118 aa, Neisseria meningitidis; identical to SEQ ID NO: 2954

SEQ ID NO: 12380 - protein, 123 aa, Neisseria meningitidis; identical to SEQ ID NO: 575

SEQ ID NO: 12381 - protein, 238 aa, Neisseria meningitidis; identical to SEQ ID NO: 3469

SEQ ID NO: 12382 - protein, 106 aa, Neisseria meningitidis; identical to SEQ ID NO: 5695

SEQ ID NO: 12383 - protein, 252 aa, Neisseria meningitidis; identical to SEQ ID NO: 2652

SEQ ID NO: 12384 - protein, 304 aa, Neisseria meningitidis; identical to SEQ ID NO: 3328

SEQ ID NO: 12385 - protein, 531 aa, Neisseria meningitidis; identical to SEQ ID NO: 3351

SEQ ID NO: 12386 - protein, 141 aa, Neisseria meningitidis; identical to SEQ ID NO: 3635

SEQ ID NO: 12387 - protein, 39 aa, Neisseria meningitidis; identical to SEQ ID NO: 2231

SEQ ID NO: 12388 - protein, 604 aa, Neisseria meningitidis
MPAETTVSGAHPTAKLPIYILPCFLWIGIVPFTFALRLQPSPDFYHDAAAAAGLIVLLFLTAGKKLFDVKIPPISFLLFAMAAFWYLQARLMNLIYPGMNDIVSWIFILLAVSAWACKSLVAHYGQERIVTLLAWSLLIGSLLQSCIVVIQFAGWEDTPMLQNIIVYSGQGVIGHIGQRNNLGHYLMWGILAAAYLNGQRKIPPALGAICLIMQTAVLGLVNSRTILTYIAAIALILPFWYFRSDKSNRRTMLGIAAAVFLTALFQFSMNTILETFTGIRYETAVERVANGGFTDLPRQIEWNKALAAFQSAPIFGHGWNSFAQQTFLINAEQHNIHDNLLSNLFTHSHNIVLQLLAEMGISGTLLVAATLLTGIARLLKHPLTPASLFLICTLAVSMCHSMLEYPLWYVYFLIPFGLMLFLSPAEASDGIAFKKAANLGILTASAAIFAGLLHLDWTYTRLVNAFSPATDDSAKTLNRKINELRYISANSPMLSFYADFSLVNFALPEYPETQTWAEEATLKALKYRPYSATYRIALYLMRQGKVAEAKQWMRATQSYYPYLMPRYADEIRKLPVWAPLLPELLKDCKAFAAAPGHPEAKPCK

SEQ ID NO: 12389 - protein, 346 aa, Neisseria meningitidis; identical to SEQ ID NO: 2509

SEQ ID NO: 12390 - protein, 172 aa, Neisseria meningitidis; identical to SEQ ID NO: 3384

SEQ ID NO: 12391 - protein, 259 aa, Neisseria meningitidis; identical to SEQ ID NO: 3194

SEQ ID NO: 12392 - protein, 382 aa, Neisseria meningitidis
MPLPLPSPEARQSSLKLQTLIAEKIGKHGNWIPFSRFMELVLYAPQYGYYTGGSHKIGNTGDFITAPTLTSLFAQTLARQLQELLSQTAGNIYEFGAGTGQLAADLLGSISDGISRYYIIEISPELAARQKNLIQARAPEASQKVVHLTTLPEAFDGIIIGNEVLDAMPVEIVRKDEGGSFEHVGVCTDNGRFAYSARPLHDPSLSTSASLYFPQTDYPYTSELHPQQYAFIRTLASRLEHGCMIFIDYGFDAAQYYHPQRNQGTLIGHYRHHVIHNPFDFIGLADLTAHVNFTDIAQAGTDAGLDLIGYLPQSHFLLNLGITELLAQTGKTNSAAYIREAAAVQKLIDQHEMGELFKVIAFGKNIGIDWAGFRFGDICHKL

SEQ ID NO: 12393 - protein, 300 aa, Neisseria meningitidis
MDSLMTLLSVLIPMFAGFFIRVPKPYLPALDKVLSVLVYAVLLLIGVSLSRVEDLGSRLDDMALTVLWLFVCTVGANLLALAVLGKLFPWRIKGKGKGVSVGVSGSVGQLGCVLLGFASGKLMRDIWMPSENAGMYCLMLLVLLIGVQLKSSGVSLRQVLVNRRGIRLSVWFMLSSLSGGLLFAASADGVSWVKGLAMASGFGWYSLSGLVMTEAYGAVWGSIALLNDLARELFALAFIPLLMKRFPDAAVGVGGATSVDFTLPVIRGAGGLEAVPVAVSFGVVVNIAAPFLMVVFSALG

SEQ ID NO: 12394 - protein, 513 aa, Neisseria meningitidis; identical to SEQ ID NO: 2287

SEQ ID NO: 12395 - protein, 628 aa, Neisseria meningitidis; identical to SEQ ID NO: 2792

SEQ ID NO: 12396 - protein, 143 aa, Neisseria meningitidis
MDIQTILEKTLPGLGYELVDFELTAQGTLRVFIDKEGGITVEDCATVSNHLSRVFMVEDIDYKNLEISSPGLDRPLKKAADFVRFAGQNAKIKTRLPIDGQKNFIGKIEGCENDTVTISFDGKTVQIELGNIDKARLRPEFKF

SEQ ID NO: 12397 - protein, 321 aa, Neisseria meningitidis; identical to SEQ ID NO: 3510

SEQ ID NO: 12398 - protein, 340 aa, Neisseria meningitidis
LSYRDAGVDIDAGDQLVENIKPFAKRTMRPEVLGDLGGFGALVEIGKKYKNPVLVSGTDGVGTKLKLAFDWDKHDTVGIDLVAMSVNDILVQGAEPLFFLDYFACGKLDVPRATDVIKGIAQGCEESGCALIGGETAEMPGMYPVGEYDLAGFAVGVVEKENVITGRSIGAGDVVLGLASNGAHSNGYSLIRKIIERDNPDLDAEFDNGKTLREAVIAPTRLYVKPILAALEKFTIKGMAHITGGGITENVPRVLPENTVAQIDAKSWELPKLFQWLQKAGNVETQEMYRTFNCGIGMVVIVAAEDADAVQGLLGEQGETVYRLGLIRERQGDEHQTQVA

SEQ ID NO: 12399 - protein, 431 aa, Neisseria meningitidis; identical to SEQ ID NO: 3355

SEQ ID NO: 12400 - protein, 222 aa, Neisseria meningitidis; identical to SEQ ID NO: 3618

SEQ ID NO: 12401 - protein, 508 aa, Neisseria meningitidis; identical to SEQ ID NO: 3876

SEQ ID NO: 12402 - protein, 245 aa, Neisseria meningitidis; identical to SEQ ID NO: 2914

SEQ ID NO: 12403 - protein, 169 aa, Neisseria meningitidis; identical to SEQ ID NO: 2049

SEQ ID NO: 12404 - protein, 290 aa, Neisseria meningitidis; identical to SEQ ID NO: 1941

SEQ ID NO: 12405 - protein, 305 aa, Neisseria meningitidis; identical to SEQ ID NO: 2940

SEQ ID NO: 12406 - protein, 300 aa, Neisseria meningitidis
MKGFTIIEFLVAGMLSMIVLMAVGSSYFTSRKLNDAANERLSAQQDLRNAATLIVRDARMAGGFGCFNMSEHPATDVVSDVVQKNRLFSLNLKRNSTNKLIPITESSNINYPNFFQVDSALIFQYGIDDVNASTATTVVSSCAAISKPGKQIPTLEDAKKELKILDQDKEQNGNIARQRHVVNAYAVGRIADEEGLFRFQLDDKGKWGNPQLLVKKVRRMKVRYIYVSGCPEDDDAGKEETFKYTDKFDSSTNAVTPAGVEVLLSSGTDTKIAASSDNHIYAYRIDATIRGGNVCANRTL

SEQ ID NO: 12407 - protein, 207 aa, Neisseria meningitidis; identical to SEQ ID NO: 1132

SEQ ID NO: 12408 - protein, 162 aa, Neisseria meningitidis; identical to SEQ ID NO: 911

SEQ ID NO: 12409 - protein, 159 aa, Neisseria meningitidis; identical to SEQ ID NO: 3107

SEQ ID NO: 12410 - protein, 522 aa, Neisseria meningitidis; identical to SEQ ID NO: 2643

SEQ ID NO: 12411 - protein, 280 aa, Neisseria meningitidis; identical to SEQ ID NO: 3973

SEQ ID NO: 12412 - protein, 242 aa, Neisseria meningitidis; identical to SEQ ID NO: 1952

SEQ ID NO: 12413 - protein, 207 aa, Neisseria meningitidis; identical to SEQ ID NO: 4832

SEQ ID NO: 12414 - protein, 283 aa, Neisseria meningitidis; identical to SEQ ID NO: 3299

SEQ ID NO: 12415 - protein, 92 aa, Neisseria meningitidis; identical to SEQ ID NO: 419

SEQ ID NO: 12416 - protein, 188 aa, Neisseria meningitidis; identical to SEQ ID NO: 2501

SEQ ID NO: 12417 - protein, 212 aa, Neisseria meningitidis; identical to SEQ ID NO: 3536

SEQ ID NO: 12418 - protein, 211 aa, Neisseria meningitidis
MIVSIDVDAQKTFTPLCPDELPVNEGHLIVEELNAQAALADLRVMTKDAHHMVAKWLVDNPVDMLKPTGLPDADLTWVAHAMVGTRGYELLDGLPSAKEYDYCVWKGVDPELHPYGACFHDIEEKLSTGLIEWLRCQNTDTVIIGGLATDYCVKTTVLQLLKGGNWQVIVNEAACRGIAPDTIETAWQEMSSAGAVILKNVEEIKKYINNQ

SEQ ID NO: 12419 - protein, 485 aa, Neisseria meningitidis; identical to SEQ ID NO: 2279

SEQ ID NO: 12420 - protein, 124 aa, Neisseria meningitidis; identical to SEQ ID NO: 2713

SEQ ID NO: 12421 - protein, 665 aa, Neisseria meningitidis; identical to SEQ ID NO: 3070

SEQ ID NO: 12422 - protein, 446 aa, Neisseria meningitidis
MNKQPLSLAVVGHTNTGKTSLLRTLLRDSGFGEVRNAPSTTRHVEEAAISDGADTLVFLYDTPGLEDAGGVLEWLENHTDNRSDGIERLQQFLGSHGAHHDFNQEAKVLRQVLQSDMAMYVIDAREPVLDKYRDELIILSWCAKPVMPVFNFTGGQPPESWTTMLARRNLHVFAGFDTVAFDFEGELRLWENLATMLPERSTLDRLTAMRRREWQRLDGEARREIADFLLDAAAFRQEVDENEDTATVLQTMQAEIRQLERQMQQRLFALYRFYHSEIDGGDWMPQAFRQDPFDSELLKQYGIRTGTGAATGALIGLGLDIATLGGSLGLGTAIGGFLGGILPNTRTISDKLSGRQTLHTDPETLTLLAARALDLLHVLQTRGHAAQSDIELHSRKAPWDAARLPPELNKARSHWKWSSLNTHRPETSHAERREYAEKLGIRLAGK

SEQ ID NO: 12423 - protein, 162 aa, Neisseria meningitidis; identical to SEQ ID NO: 2816

SEQ ID NO: 12424 - protein, 267 aa, Neisseria meningitidis; identical to SEQ ID NO: 2269

SEQ ID NO: 12425 - protein, 140 aa, Neisseria meningitidis; identical to SEQ ID NO: 1135

SEQ ID NO: 12426 - protein, 979 aa, Neisseria meningitidis
MSGFNYEKNQPHQMRAVSAVLGVFDGATPKYRTADENPELLFAAKQYANNILKVQSQNGIDGRFPDRSDDQNILDISMETGTGKTYTYTQTMFELHRWLGVFKFIVVVPTLSIKAGTQQFLQSKALAEHFEQDFGGDYEGVRLKTYVVESAKKNKGKKSNAPITIEQFVKAENKKEIHVLLINAGMVNSSSMNDTGDKALKDLFDNPVDALAAVRPFMIVDEPHKFPTRDSAKTWGNIKRLKPQYILRYGATFNDEYYNLLYRLTAVDAFNDGLVKGVRVFQEEMQGGMDAAVKLVSSDGKEAKFELNEKDKKQTFKLAKGEDLAQIHPAISDLKIDKMNKTVVVLSNGLELKTGAVINPYSYSQTVQDAMMQRAVAEHFKLERALLAERAPQPKIKPLTLFFIDDIAGYRSGNELSGSLKDKFESWIRAEAARRLKTESDPFYRDYLQKTLDDVSACHGGYFSKDNTDSDDRIEQEINEILHDKEKLLSLDNPRRFIFSKWTLREGWDNPNVFQICKLRSSGSTTSKLQEVGRGLRLPVNELMARVRDVPYKLNYFVDSSEKDFVKQLVGEINDNSFQEEISKKFTEELKQKILQKYPDIKPLVLVNQLFSDGIIDDNENFAEDGYDKLKAAYPEAFPKGLDKGKVSNAKDEGKDTIIMREGKYEELKALWELIHHKAVLQYKIKDEAEFVDLFTAYLRENAAKFPQAGIRTAVNEAYINNGLMLSRRIDSFEDEDFIRFNTMTYRELLEKLAQTAKIRMQTLHQAFYRVRDELNIGDFLNMQTIAQIKNGFNRFLLHHSFHKFELDYRLVGSKIHPTKFTDKDGKPRAVKKADLGRFEDTEHRPAAGYLFDEIFYDSDIEHENVANNQIEGVTVFTKIPRNSIKIPVAGGGTYSPDFAYIVKTKSGEILNFVIEAKGTDGAEDLRKSEERKIKHAEKLFAEISKEIKVVFKTQFDGERIAELIGQNMPAGGHSENGH

SEQ ID NO: 12427 - protein, 375 aa, Neisseria meningitidis
MLECTINYCSGEIMSQTIDELLIPHRNAIDTIDAEILRLLNERAQHAHAIGELKGTGAVYRPEREVAVLRRIQDLNKGPLPDESVARLFREVMSECLAVERPLTIAYLGPQGTFTQQAAIKHFGHAAHTMACPTIDNCFKQVETRQADYLVAPVENSTEGSVGRTLDLLAVTALQACGEVVLRIHHNLLRKNNGSTEGIAKVFSHAQALAQCNDWLGRHLPNAERIAVSSNAEAARLVAESDDGTVAAIAGRTAAEIYGLDMVAECIEDEPNNTTRFLVMGHHETGASSSDKTSLAVSAPNRAGAVASLLQPLTESGISMTKFESRPSKSVLWEYLFFIDIEGHRRDAQIQTALERLGERASFVKVIGSYPTAVL

SEQ ID NO: 12428 - protein, 249 aa, Neisseria meningitidis; identical to SEQ ID NO: 2811

SEQ ID NO: 12429 - protein, 337 aa, Neisseria meningitidis; identical to SEQ ID NO: 2516

SEQ ID NO: 12430 - protein, 659 aa, Neisseria meningitidis
MSQLANAIRFLSADAVQKANSGHPGAPMGMAEMAETLWTKFLNHNPANPKFYNRDRFVLSNGHASMLLYSLLHLTGYNLSIEDLKNFRQLHSKTPGHPEYGYTDGVETTTGPLGQGIANAVGMALAEKILAAEFNKDGLNIVDHYTYVFMGDGCLMEGVSHEACSLAGTLGLGKLIVLYDDNNISIDGKVDGWFTENIPQRFESYGWHVVPNVNGHDTAAIQAAIEAARAETGKPSIICCKTLIGKGSANKEGSHKTHGAPLGADEIEATRKHLGWTYPAFEIPQEIYDAWNAKEKGAKLEAEWDKLFAQYQAKYPAEAAEFVRRMDKKLPENFDGYVQTALKEVCAKAETVATRKASQNSIEILAKELPELVGGSADLTPSNLTDWSNSVSVTRDKGGNYIHYGVREFGMGAIINGLVLHGGVKPFGATFLMFSEYERNALRMAALMKINPVFVFTHDSIGLGEDGPTHQPIEQTATLRLIPNMDVWRPCDTAESLVAWAEAVKAADHPSCLIFSRQNLKFQARSEQQLDDIKRGGYIISEAQGNAQAVIIATGSEVELALEAQKALAAQNIAVRVVSMPSTNVFDRQDAAYQAAVLPESLPRIAVEAGHADGWYKYVGLNGAVVGINRFGESAPADLLFKAFGFTVDNVVDTVKSVL

SEQ ID NO: 12431 - protein, 336 aa, Neisseria meningitidis; identical to SEQ ID NO: 1943

SEQ ID NO: 12432 - protein, 207 aa, Neisseria meningitidis; identical to SEQ ID NO: 243

SEQ ID NO: 12433 - protein, 338 aa, Neisseria meningitidis
MYRKLIALPFALLLAACGREEPPKALECANPAVLQGIRGNIQETLTQEARSFAREDGRQFVDADKIIAAAYGLAFSLEHASETQEGGRTFCIADLNITVPSETLADAKANSPLLYGETALSDIVRQKTGGNVEFKDGVLTAAVRFLPVKDGQTAFVDNTVGMAAQTLSAALLPYGVKSIVMIDGKAVKKEDAVRIFSGKAREEEPSKPTPEDILEHNAAGGDAGVPQAAEGAPEPEILHPDDGERADTVTVSRGEVEEARVQNQRAESEITKLWGGLDTDVQKELVGEQRKWAQEKISNCRQAAAQADRQEYAEYLKLQCDTRMTRERIQYLRGYSID

SEQ ID NO: 12434 - protein, 161 aa, Neisseria meningitidis
MFVNEKDLYAALFAGLVFLTLPFALSVHDALAFAFGRTGLLVSVSDGGFGRRGGWDGTVWFVFGVFAFLNVVVSAGLTKLAYKKMMRRHSRYALFLSGVAACAAAAVAWIFELLFGSEALGGLRGEAVLEYAFAVWLVSMLTLPKRLTRAPVQPVVFHRKK

SEQ ID NO: 12435 - protein, 470 aa, Neisseria meningitidis; identical to SEQ ID NO: 8949

SEQ ID NO: 12436 - protein, 324 aa, Neisseria meningitidis; identical to SEQ ID NO: 766

SEQ ID NO: 12437 - protein, 43 aa, Neisseria meningitidis
MSTFFQQTAQAMIAKHIDRFPLLKLDQVIDWQPIEQRYDHLCR

SEQ ID NO: 12438 - protein, 177 aa, Neisseria meningitidis; identical to SEQ ID NO: 3550

SEQ ID NO: 12439 - protein, 181 aa, Neisseria meningitidis; identical to SEQ ID NO: 2012

SEQ ID NO: 12440 - protein, 291 aa, Neisseria meningitidis; identical to SEQ ID NO: 8637

SEQ ID NO: 12441 - protein, 163 aa, Neisseria meningitidis; identical to SEQ ID NO: 793

SEQ ID NO: 12442 - protein, 463 aa, Neisseria meningitidis; identical to SEQ ID NO: 736

SEQ ID NO: 12443 - protein, 603 aa, Neisseria meningitidis; identical to SEQ ID NO: 3231

SEQ ID NO: 12444 - protein, 100 aa, Neisseria meningitidis; identical to SEQ ID NO: 2893

SEQ ID NO: 12445 - protein, 205 aa, Neisseria meningitidis; identical to SEQ ID NO: 3317

SEQ ID NO: 12446 - protein, 675 aa, Neisseria meningitidis; identical to SEQ ID NO: 3344

SEQ ID NO: 12447 - protein, 255 aa, Neisseria meningitidis; identical to SEQ ID NO: 3148

SEQ ID NO: 12448 - protein, 354 aa, Neisseria meningitidis; identical to SEQ ID NO: 3291

SEQ ID NO: 12449 - protein, 352 aa, Neisseria meningitidis; identical to SEQ ID NO: 1807

SEQ ID NO: 12450 - protein, 78 aa, Neisseria meningitidis; identical to SEQ ID NO: 1246

SEQ ID NO: 12451 - protein, 419 aa, Neisseria meningitidis
MHVSELQTLHISKLLELAEEHGIENANRFRKQDLVFAIVRQMMKKGEGFTCSGTLEILPDGFGFLRSADTSYLAGPDDIYVSPTQIRRFNLHTGDTIEGSVRVPKDNERYFALVRLDTINGDHPEVCRHKILFENLTPLFPTEQLKLERDLKSEENLTGRAIDLISPIGKGQRALLVAPPKSGKTVMLQNIAHAVTSNYPEVELIVLLIDERPEEVTEMSRSVRGEVVSSTFDEPAQRHVQVAEMVLEKAKRMVEHKKDVVILLDSITRLARAYNTVVPTSGKILTGGVDANALHRPKRFFGAARNVEEGGSLTIIATALVETGSRMDDVIYEEFKGTGNMELHLDRRMAEKRLFPAININKSGTRREELLVPNDQLQRMWLLRKFLHPMDEIEAAEFLIGKIKASKNNDDFFELMRGK

SEQ ID NO: 12452 - protein, 41 aa, Neisseria meningitidis; identical to SEQ ID NO: 2201

SEQ ID NO: 12453 - protein, 381 aa, Neisseria meningitidis
MTETRSLELAKELIARPSVTPDDQNCQKLLAERLHKIGFAAEELHFGDTKNIWLRRGTKVPVVCFAGHTDVVPTGPVEKWDSPPFEPTERDGRLYGRGAADMKTSIACFVTACERFVAEHPDHQGSIALLITSDEEGDALDGTTKVVDVLKARGELIDYCIVGEPTAVGKLGDMIKNGRRGSLSGNLTVKGKQGHIAYPHLAINPVHTFAPALLELTQEVWDEGNEYFPPTSFQISNINGGTGATNVIPGELNVKFNFRFSTESTEAGLKQRVHAILDKHGVQYDLQWSCSGQPFLTHAGKLTDVARAAIAEICGVETELSTTGGTSDGRFIKAIAKELIELGSSNATIHQINENVRLDDIPKLSAVYEGILARLLAGNAV

SEQ ID NO: 12454 - protein, 335 aa, Neisseria meningitidis; identical to SEQ ID NO: 9914

SEQ ID NO: 12455 - protein, 355 aa, Neisseria meningitidis; identical to SEQ ID NO: 1236

SEQ ID NO: 12456 - protein, 157 aa, Neisseria meningitidis; identical to SEQ ID NO: 3112

SEQ ID NO: 12457 - protein, 566 aa, Neisseria meningitidis; identical to SEQ ID NO: 3398

SEQ ID NO: 12458 - protein, 92 aa, Neisseria meningitidis
MYYQVGNKCLEKHQAENLYFSLVVPRIKENGQIVRPEYNGSLWKMSDGQPLRLLLAECSLKDNLQSGLETGWIVFGVMASVYFVSLLKKVLK

SEQ ID NO: 12459 - protein, 183 aa, Neisseria meningitidis
MKAYLALISAAVIGLAACSQEPAAPAAEATPAAEAPASEAPAAEAAPADAAEAPAAGNCAATVESNDNMQFNTKDIQVSKACKEFTITLKHTGTQPKTSMGHNIVIGKTEDMDGIFKDGVGAADTDYVKPDDARVVAHTKLIGGGEESSLTLDPAKLADGDYKFACTFPGHGALMNGKITLVD

SEQ ID NO: 12460 - protein, 70 aa, Neisseria meningitidis
LKICGIRRKRKPVMYLTVVFFVSVRLLSSKRRAKTGFGSAFYRIFFYLSVWYWYFFISTRRGLRRNNAAG

SEQ ID NO: 12461 - protein, 105 aa, Neisseria meningitidis; identical to SEQ ID NO: 3278

SEQ ID NO: 12462 - protein, 299 aa, Neisseria meningitidis; identical to SEQ ID NO: 1992

SEQ ID NO: 12463 - protein, 220 aa, Neisseria meningitidis; identical to SEQ ID NO: 2583

SEQ ID NO: 12464 - protein, 247 aa, Neisseria meningitidis; identical to SEQ ID NO: 3793

SEQ ID NO: 12465 - protein, 614 aa, Neisseria meningitidis
MLPNRFKMLTVLTATLIAGQVSAAGGGAGDMKQPKEVGKVFRKQQRYSEEEIKNERARLAAVGERVNQIFTLLGGETALQKGQAGTALATYMLMLERTKSPEVAERALEMAVSLNAFEQAEMIYQKWRQIEPIPGKAQKRAGWLRNVLRERGNQHLDGLEEVLAQADEGQNRRVFLLLAQAAVQQDGLAQKASKAVRRAALKYEHLPEAAVADVVFSVQGREKEKAIGALQRLAKLDTEILPPTLMTLRLTARKYPEILDGFFEQTDTQNLSAVWQEMEIMNLVSLHRLDDAYARLNVLLERNPNADLYIQAAILAANRKEGASVIDGYAEKAYGRGTEEQRSRAALTAAMMYADRRDYTKVRQWLKKVSAPEYLFDKGVLAAAAAVELDGGRAALRQIGRVRKLPEQQGRYFTADNLSKIQMLALSKLPDKREALRGLDKIIEKPPAGSNTELQAEALVQRSVVYDRLGKRKKMISDLEKAFRLAPDNAQIMNNLGYSLLSDSKRLDEGFALLQTAYQINPDDTAVNDSIGWAYYLKGDAESALPYLRYSFENDPEPEVAAHLGEVLWALGERDQAVDVWTQAAHLTGDKKIWRETLKRHGIALPQPSRKPRK

SEQ ID NO: 12466 - protein, 246 aa, Neisseria meningitidis; identical to SEQ ID NO: 3525

SEQ ID NO: 12467 - protein, 636 aa, Neisseria meningitidis
MTLETLIALPRNIKKICFLIHDFLMIFIAFWFTQSLKADYSDEWFDFANWQSFLLTALLTITLFIRMGLYRAVTRFVSFRILSTALAGSIVSAVLFFLNTLIFEERLRLALPIVYFLLLFVSVTGSRMVLRGLLSEHPKKQMIPVIIYGAGRSGRQLLEAVKQMREYSAAAFVDDDPKLWHTVIYDLAVYQPDAIAFLIERYGVEKILLAIPGATQEQRRRIINKLEAYPCEVLTIPGMKDLMDGKISIGTLKKISVSDLLGRDSVAPDDRLMSADIEGKTVMVTGAGGSIGSELCRQIIRRRPEKLLLFELSEFALYAIEKELRETCIQKRLDTEILPFLGSVQNRTLLEHVMTAFSVATVYHAAAYKHVPMVEFNTVEGIRNNIFGTLECALAATTSGVRTFVLISTDKAVRPTNTMGASKRMAELCLQALAAEPGQKTRFSMVRFGNVLGSSGSVVPLFEKQIAEGGPLTLTHPEITRYFMTIPEAAQLVIQAGAMGTGGDVFVLDMGESVKIIDLARQMITLSGLKPNTPEQPDGDIEILITGLRPGEKLYEELLIGDNVRKTAHPRIMTADEAMLPWHELSALLDRIRAACDRYDQQAIRTLLINAPTGFAPSDGICDLLWVRETHRKNAV

SEQ ID NO: 12468 - protein, 404 aa, Neisseria meningitidis; identical to SEQ ID NO: 2764

SEQ ID NO: 12469 - protein, 240 aa, Neisseria meningitidis; identical to SEQ ID NO: 3621

SEQ ID NO: 12470 - protein, 428 aa, Neisseria meningitidis
MIYIVLFLAAVLAVVAYNMYQENQYRKKVRDQFGHSDKDALLNSKTSHVRDGKPSGGSVMMPKPQPAVKKTAKLQDPAMRNLQEQDAVYIAKQKQAKASPFKTEIETALEESGIIGNSAHTVSEPQTGHSAPKPADAPAKPAPVPQTPAKPLITLKELSKVELPWFDVRFDFISYIALTEAKELHALPRLSNRCRYQIVGCTMDDHFQIAEPIPGIRYQAFIVGIQAVSRNGLASQEELSAFNRQVDAFAQSMGGQTLHTDLAAFIEVASALDAFCARVDQTIAIHLVSPTSISGVELRSAVTGVGFVLEDDGAFHYTDTSGSTMFSICSLNNEPFTNALLDNQSYKGFSMLLDIPHSPAGEKTFDDLFMDLAVRLSGQLNLNLVNDKMEEVSTQWLKDVRTYVLARQSEMLKVGIEPGGKTALRLFS

SEQ ID NO: 12471 - protein, 468 aa, Neisseria meningitidis; identical to SEQ ID NO: 2240

SEQ ID NO: 12472 - protein, 512 aa, Neisseria meningitidis; identical to SEQ ID NO: 2077

SEQ ID NO: 12473 - protein, 130 aa, Neisseria meningitidis; identical to SEQ ID NO: 425

SEQ ID NO: 12474 - protein, 181 aa, Neisseria meningitidis
MKHYALLISFLALSACSQGSEDLNEWTAQTRREAKAEIIPFQAPTLPVAPVYSPPQLTGPNAFDFRRMETDKKGENAPDTKRIKETLEKFSLENMRYVGILKSGQKVSGFIEAEGYVYTVGVGNYLGQNYGRIESITDDSIVLNELIEDSTGNWVSRKAELLLNSSDKNTEQAAAPAAEQN

SEQ ID NO: 12475 - protein, 1421 aa, Neisseria meningitidis; identical to SEQ ID NO: 2458

SEQ ID NO: 12476 - protein, 512 aa, Neisseria meningitidis; identical to SEQ ID NO: 3339

SEQ ID NO: 12477 - protein, 58 aa, Neisseria meningitidis; identical to SEQ ID NO: 903

SEQ ID NO: 12478 - protein, 61 aa, Neisseria meningitidis; identical to SEQ ID NO: 965

SEQ ID NO: 12479 - protein, 126 aa, Neisseria meningitidis; identical to SEQ ID NO: 3371

SEQ ID NO: 12480 - protein, 269 aa, Neisseria meningitidis
MHALPRYAVFGNPVAHSKSPQIHQQFALQEGVDIEYERICADIGGFAQAVSTFFGTGGCGANVTVPFKQEAFHLADEHSDRALAAGAVNTLILLKNGKLRGDNTDGIGLANDITQVKNIAIEGKTILLLGAGGAVRGVIPVLKGHRPARIVVANRTHAKAEELARLFGIEAVPMADVNGGFDIIINGTSGGLSGQLPAVSPEIFLGCRLAYDMVYGDAAQEFLNFAQSNGAAEVSDGLGMLVGQAAASYALWRGFTPDIRPVIEYMKAM

SEQ ID NO: 12481 - protein, 185 aa, Neisseria meningitidis
MENNKAKSDDNSVSIEFIQDFITASTDVINLSYENFRKNFYTQMSTDSTNYAAKHESLGKSVQRELQKTQSQLRQVVRKMQSKYNINNKARVAEISLLRQMQSQFSRKDVNKNLGNGNTLAQQGSYTKKDGTTAQAGDSLLAADNLHSLLTDKMLSISHVRENTISPFVLGCLKQITMNVSHYLK

SEQ ID NO: 12482 - protein, 181 aa, Neisseria meningitidis; identical to SEQ ID NO: 3612

SEQ ID NO: 12483 - protein, 593 aa, Neisseria meningitidis
MPYFALFDDAVSGRAKRYQNHVESRFFRPEELDALDGALQKGWQKGLHSVLFADYEFGLPLTGVESERGGNLALHWFADCTDTDAASWLARHSDDLPAGISTPQSSVSETDYLDRIRQIHEAIRRGDTYQINYTTRLHLQAYGNPVSLYRRLRQPVPYAVLSHLPDAEGQSAWTLCFSPELFLKIGSDGTISTEPMKGTAPILGDGQDERRAAELQADPKNRAENVMIVDLLRNDLGKIAQTGTVCVPEPFKVSRFGSVWQMTSTIQAQALPHTSFADILRAAFPCGSITGAPKKMSMQIIESLEAEARGLYTGSIGYLNPCSGGLGFEGTFNVVIRTLSLTPLSDGIYQGVYGVGSGIVIDSDPAAEYRECGWKARFLNELRPDFGIFETLRAENGRCTLLDRHLCRLKTSAQALNLPLPDGCENQIKQYIADLPDGAFRVKALLASDGISLSRAVLNRLTDKQRVIISPTILPAQNYLRRFKTTCRTVFDQAWQTAETQGAFDSLFFNSDGILLEGGRSNVFVKHRGQWLTPSLDLDILNGIMRQAVLDEPQKYLQTNQVIETHITQKTLQEAEEIRLSNALRGVFAAALA

SEQ ID NO: 12484 - protein, 199 aa, Neisseria meningitidis; identical to SEQ ID NO: 2043

SEQ ID NO: 12485 - protein, 197 aa, Neisseria meningitidis; identical to SEQ ID NO: 2517

SEQ ID NO: 12486 - protein, 363 aa, Neisseria meningitidis
MSHISPIPEILADIKVGKMVIITDAEDRENEGDLLMAAQFVTPEAINFMIKHARGLVCLPMDGEMVEKLGLPMMTQKNGAQYGTNFTVSIEAAHGITTGISAADRALTIQTAVSPTAKPEDIVQPGHIFPLRAQKGGVLVRAGHTEAGVDLAQMNGLIPAAVICEIINDDGTMARMPELMKFAEEHKLKIGTITDLIEYRSRTESLLEDMGNAPVQTPWGEFQQHVYVDKLSGETHLALVKGTPAADTETLVRVHEPFSVMDFIQANPRHSWSLPKALERIQQAESGVVILLHRAEDGASLLDRTLPKGANQAYKWDSKSYGIGAQILVGLNVKKLRVLGQPSSFTGLTGFGLEVVGFEEAEK

SEQ ID NO: 12487 - protein, 628 aa, Neisseria meningitidis
MPSEAVFQMIDMNTENRSPEQFDIPLFLKNLPKLPGVYRFFDEGGKVLYVGKAVNLKRRVSGYFQKNDHSPRIALMVKQVHHIETTITRSEAEALILENNLIKALSPKYNILFRDDKSYPYLMLSGHQYPQMAYYRGTLKKPNQYFGPYPNSNAVRDSIQVLQKVFMLRTCEDSVFEHRDRPCLLYQIKRCSAPCVGHISEEDYHDSVREASTFLNGKTDELTRTLQHKMQTAAANLQFEEAARYRDQIQALGIMQSNQFIDSKNPNNPNDIDLLALAVSDGLVCVHWVSIRGGRHVGDKSFFPDTKNDPEPNGQDYAEAFVAQHYLGKSKPDIIISNFPVPDALKEALEGEHGKQMQFVTKTIGERKVWLKMAEQNAQMAIAQRCLQQSSQQHRIDELAKILNMNSDDLNRLECFDISHTQGEATIASCVVYDEQNIQPSQYRRYNITTAKPGDDYAAMREVLTRRYGKMQEAEANGETVKWPDVVLIDGGKGQIGVAVSVWEELGLHIPLVGIAKGPERKAGMEELILPFTGEVFRLPPNSPALHLLQTVRDESHRFAITGHRKKRDKARVTSSLSDIPGVGSKRRQALLTRFGGLRGVIAASREDLEQVEGISKALAETIYNHLH

SEQ ID NO: 12488 - protein, 78 aa, Neisseria meningitidis; identical to SEQ ID NO: 3902

SEQ ID NO: 12489 - protein, 1210 aa, Neisseria meningitidis
LDGDGIETVATKGFAGALFDHRNQGIRTATGWVSADDGLLVRDLNGNGIIDNGAELFGDNTKLADGSFAKHGYAALAELDSNGDNIINAADAAFQSLRVWQDLNQDGISQANELRTLEELGIQSLDLAYKDVNKNLGNGNTLAQQGSYTKTDGTTAKMGDLLLAADNLHSRFKDKVELTAEQAKAANLAGIGRLRDLREAAALSGDLANMLKAYSAAETKEAQLALLDNLIHKWAETDSNWGKKSPMRLSTDWTQTANEGIALTPSQVAQLKKNALVSLSDKAKAAIDAARDRIAVLDAYTGQDSSTLYYMSEEDALNIVKVTNDTYDHLAKNIYQNLLFQTRLQPYLNQISFKMENDTFTLDFSGLVQAFNHVKETNPQKAFVDLAEMLAYGELRSWYEGRRLMADYVEEAKKAGKFEDYQKVLGQETVALLAKTSGTQADDILQNVGFGHNKNVSLYGNDGNDTLIGGAGNDYLEGGSGSDTYVFGKGFGQDTVYNYDYATGRKDIIRFTDGITADMLTFTREGNHLLIKAKDGSGQVTVQSYFQNDGSGAYRIDEIHFDNGKVLDVATVKKLVQQSTDGSDRLYAYQSGNTLNGGLGDDYLYGADGDDLLNGDAGNDSIYSGNGNDTLDGGEGNDALYGYNGNDVLNGAEGNDHLNGEDGNDTLIGGAGNDYLEGGSGSDTYVFGKGFGQDTVYNYDYATGRKDIIRFTDGITADMLTFTREGNHLLIKAKDGSGQVTVQSYFQNDGSGAYRIDEIHFDNGKVLDVATVKKLVQQSTDGSDRLYAYQSGNTLNGGLGDDYLYGADGDDLLNGDAGNDSIYSGNGNDTLDGGEGNDALYGYNGNDVLNGAEGNDHLNGEDGNDTLIGGAGNDYLEGGSGSDTYVFGKGFGQDTVYNYDYATGRKDIIRFTDGITADMLTFTREGNHLLIKAKDDSGQVTVQSYFQNDGSGAYRIDEIHFDNGKVLDVATVKELVQQSTDGSDRLYAYQSGNTLNGGLGDDYLYGADGDDLLNGDAGNDSIYSGNGNDTLDGGEGNDALYGYNGNDALNGGEGNDHLNGEDGNDTLIGGAGNDYLEGGSGSDTYVFGKGFGQDTVYNYHVDKNSDTMHFKGFKAADVHFIRSGSDLVLSASEQDNVRISGFFYGENHRVDTFVFDDAAISNPDFAKYINAGNNLVQSMSVFGSNTAATGGNVDANIQSVQQPLLVTPSA

SEQ ID NO: 12490 - protein, 477 aa, Neisseria meningitidis; identical to SEQ ID NO: 3524

SEQ ID NO: 12491 - protein, 119 aa, Neisseria meningitidis; identical to SEQ ID NO: 3366

SEQ ID NO: 12492 - protein, 260 aa, Neisseria meningitidis; identical to SEQ ID NO: 485

SEQ ID NO: 12493 - protein, 106 aa, Neisseria meningitidis; identical to SEQ ID NO: 2510

SEQ ID NO: 12494 - protein, 123 aa, Neisseria meningitidis; identical to SEQ ID NO: 1296

SEQ ID NO: 12495 - protein, 130 aa, Neisseria meningitidis; identical to SEQ ID NO: 9443

SEQ ID NO: 12496 - protein, 198 aa, Neisseria meningitidis
MNINTSENKDAVAEHTGQWLEKAVIGLNLCPFAKAPHVKNLVRIAISEAKHLDSFLEDLDEELQRLGNTPATELETTLLVHPTLFPDFDVFNDMLDIADAAVIENGLEGIVQIAPFHPQFRFQNTEPDDIGNYTNRSPYPTLHLIREDSIAKAAQAFPDASAIFERNIALLEKMGHEGWAKLGITSCPYPHNKKNISK

SEQ ID NO: 12497 - protein, 103 aa, Neisseria meningitidis; identical to SEQ ID NO: 2548

SEQ ID NO: 12498 - protein, 318 aa, Neisseria meningitidis
MNIIGLDISKDTIDATLHKTNGSIHYIKFKNNDDGLKQFRLWIKGNRIRKVYIGMEATGIYYEKAADMLSSYYTVYVINPLKIKDYGKSRFNRTKTDKADSNLIADYIKRHQDTLIPYQIPKNKALQKLINLKNQLQQQQKQIKNRLHSTEEDFIRNIHQDLIDTIQDKMEQVKIAISEQIKKQTDYNHYRNLQTIPSIGKDTASVLYAQLTEKHFKTANQFVSYAGLSPAIIQSGTSVRGRGRLSRYGNRRLKSTLYMPALCAYRFNAFPKLINNLKKAGKPKMVIIVAIMRKLAKLAYYIVKTGQPYDAERHRLNQ

SEQ ID NO: 12499 - protein, 54 aa, Neisseria meningitidis; identical to SEQ ID NO: 2207

SEQ ID NO: 12500 - protein, 308 aa, Neisseria meningitidis; identical to SEQ ID NO: 1981

SEQ ID NO: 12501 - protein, 502 aa, Neisseria meningitidis; identical to SEQ ID NO: 3626

SEQ ID NO: 12502 - protein, 962 aa, Neisseria meningitidis
MSNTTVEQFAAELKRPVEDLLKQLKEAGVSKNSGSDSLTLDDKQLLNAYLTKKNGSNGGTISIRRTKTEVSTVDGVKVETRKRGRTVNIPSAEELAAQVKAAQTQAAPVRPEQTAEDAAKARAEAATRAEARAKAEAEAAKLKAAKAGNKAKPAAQKPTEAKAETAPVAAETKPAEESKAEKAQADKIPSKKPAEPKEKAAKPKHERNGKGKDAKKPAKPAAPAAPQPVVSAEEQAQRDEEARRAAALRAHQEALLKEKQERQARREAMKQQAEQQAKAAQEAKTGRQRPAKPAEKPQAAAPAVENKPVNPAKAKKEDRRNRDDEGQGRNAKGKGGKGGRDRNNARNGDDERVRGGKKGKKLKLEPNQHAFQAPTEPVVHEVLVPETITVADLAHKMAVKGVEVVKALMKMGMMVTINQSIDQDTALIVVEELGHIGKPAAADDPEAFLDEGAEAVEAEALPRPPVVTVMGHVDHGKTSLLDYIRRTKVVQGEAGGITQHIGAYHVETPRGVITFLDTPGHEAFTAMRARGAKATDIVILVVAADDGVMPQTIEAIAHAKAAGVPMVVAVNKIDKEAANPERIRQELTAHEVVPDEWGGDVQFIDVSAKKGLNIDALLEAVLLEAEVLELTAPVDAPAKGIIVEARLDKGRGAVATLLVQSGTLKKGDMLLAGTAFGKIRAMVDENGKSITEAGPSIPVEILGLSDVPNAGEDAMVLADEKKAREIALFRQGKYRDVRLAKQQAAKLENMFNNMGETQAQSLSVIIKADVQGSYEALAGSLKKLSTDEVKVNVLHSGVGGITESDVNLAIASGAFIIGFNVRADASSRKLAENENVEIRYYNIIYDAIDDVKAAMSGMLSPEEKEQVTGTVEIRQVISVSKVGNIAGCMVTDGVVKRDSHVRLIRNNVVIHTGELASLKRYKDDVKEVRMGFECGLMLKGYNEIMEGDQLECFDIVEVARSL

SEQ ID NO: 12503 - protein, 465 aa, Neisseria meningitidis; identical to SEQ ID NO: 1096

SEQ ID NO: 12504 - protein, 67 aa, Neisseria meningitidis; identical to SEQ ID NO: 3464

SEQ ID NO: 12505 - protein, 179 aa, Neisseria meningitidis; identical to SEQ ID NO: 8483

SEQ ID NO: 12506 - protein, 472 aa, Neisseria meningitidis
VKPLRRLTNLLAACAVAAAAFGQPALAADLAQDPFITDNAQRQHYEPGGKYHLFGDPRGSVSDRTGQINVIQDYTHQMGNLLIQQANINGTIGYHTRFSGHGHEEHAPFDNHAADSASKEQGNVDEGFTVYRLNWEGHEHHPADAYDGPKGGNYPKPTGARDEYTYHVNGTARSIKLNPTDTRSIRQRISDNYSNLGSNFSDRADEANRKMFEHNAKLDRWGNSMEFINGVAAGALNPFISAGEALGIGDILYGTRYAIDKAAMRNIAPLPTEGKFAVIGGLGSVAGFEKNTREAVDRWIQENPNAAETVEAVFNVAAAAKVAKLAKAAKPGKAAVSGDFSDSYKHNTASRLSQSVDGEMFQTRNVDFKAKSIGTKIHDGAQGKHISGHRNYIEGKSTLNQNINPQELLNGIHSGAYPVISKGARGNPVVDFGYPIGSDGKSGLSTNFGTIHSGKNGVHIVPANPKTIKKVQ

SEQ ID NO: 12507 - protein, 95 aa, Neisseria meningitidis; identical to SEQ ID NO: 3586

SEQ ID NO: 12508 - protein, 200 aa, Neisseria meningitidis; identical to SEQ ID NO: 321

SEQ ID NO: 12509 - protein, 343 aa, Neisseria meningitidis
MGIKVAINGYGRIGRQVLRAIYDYQIQDQLQIVAVNASGSLETNAHLTKFDTVHGRFEADVSHDGGNLIVNGDKIPFFSTRNPAELPWKELGVDLVMECTGAFTSKEKAKVHLESGAKKVLISAPGGDDVDATVVYGVNDSILTADMTVVSNASCTTNCLSPVAKVLSESVGIVKGAMTTIHALTNDQTVTDVRHKDLRRARSGVENMIPTKTGAAKAVGLVLPELKDKLDGLAIRVPTVNVSLVDLNFQAARDTTIEEINALMKAASEAGALKGVLGYNTLPLVSMDFNHTTEASHFDATLTKVVDGNMIKVFAWYDNEWGFSCQMLNTARRMFGLEVRPLK

SEQ ID NO: 12510 - protein, 69 aa, Neisseria meningitidis; identical to SEQ ID NO: 2096

SEQ ID NO: 12511 - protein, 96 aa, Neisseria meningitidis; identical to SEQ ID NO: 3537

SEQ ID NO: 12512 - protein, 228 aa, Neisseria meningitidis
MYAFTAAQQQKALFWLVLFHILIIAASNYLVQFPFQIFGIHTTWGAFSFPFIFLATDLTVRIFGSHLARRIIFWVMFPALLLSYVFSVLFHNGSWTGLGALSEFNTFVGRIALASFAAYALGQILDIFVFNKLRRLKAWWIAPTASTVIGNALDTLVFFAVAFYASSDGFMAANWQGIALVDYLFKLTVCGLFFLPAYGVILNLLTKKLTTLQTKQAQDRPAPSLQNP

SEQ ID NO: 12513 - protein, 187 aa, Neisseria meningitidis; identical to SEQ ID NO: 2456

SEQ ID NO: 12514 - protein, 114 aa, Neisseria meningitidis; identical to SEQ ID NO: 1818

SEQ ID NO: 12515 - protein, 237 aa, Neisseria meningitidis; identical to SEQ ID NO: 10560

SEQ ID NO: 12516 - protein, 84 aa, Neisseria meningitidis; identical to SEQ ID NO: 3897

SEQ ID NO: 12517 - protein, 150 aa, Neisseria meningitidis; identical to SEQ ID NO: 3538

SEQ ID NO: 12518 - protein, 249 aa, Neisseria meningitidis; identical to SEQ ID NO: 467

SEQ ID NO: 12519 - protein, 351 aa, Neisseria meningitidis; identical to SEQ ID NO: 5145

SEQ ID NO: 12520 - protein, 449 aa, Neisseria meningitidis; identical to SEQ ID NO: 481

SEQ ID NO: 12521 - protein, 262 aa, Neisseria meningitidis; identical to SEQ ID NO: 6514

SEQ ID NO: 12522 - protein, 217 aa, Neisseria meningitidis; identical to SEQ ID NO: 9583

SEQ ID NO: 12523 - protein, 119 aa, Neisseria meningitidis; identical to SEQ ID NO: 3147

SEQ ID NO: 12524 - protein, 182 aa, Neisseria meningitidis; identical to SEQ ID NO: 125

SEQ ID NO: 12525 - protein, 404 aa, Neisseria meningitidis; identical to SEQ ID NO: 756

SEQ ID NO: 12526 - protein, 286 aa, Neisseria meningitidis; identical to SEQ ID NO: 2687

SEQ ID NO: 12527 - protein, 488 aa, Neisseria meningitidis; identical to SEQ ID NO: 3695

SEQ ID NO: 12528 - protein, 547 aa, Neisseria meningitidis
MNAFTRAWYALERHYQDTRHVLLRDRFACEPDRFERMHERLDGMLFDYSKNRLGEDTLQLLCNLADAADLEGKMRALRTGAKVNNSEGRAALHTALRLPDGAGAVYADGRDVLPEIRRELNRALKFAHSLDDGSYQGTTGKRITDFVHIGIGGSDLGPAMCVQALEPFRRHIAVHFAANADPACLDEVLCRLTPETTVFCVASKSFKTPETLLNAEAVKAWYRGAGFSESETARHFCAVSADTAAAAAFGIAAERVFAMYDWVGGRYSVWSPVGLPVMVAVGGARFRELLAGAHAMDSHFFHTPPRRNIPVLMALIAVWYNNFQHADGQTAVPYSHNLRLLPVWLNQLDMESLGKSRASDGSPAVCKTGGIVFGGEGVNCQHAYFQLLHQGTRLIPCDFIVPVTAQGVEDGRSRFTVANAFAQAEALMKGKTLDEARAELADLPEAERERLAPHKEFPGNRPSNSILLDRLTPYNLGMLMAAYEHKTFVQGVIWDINPFDQWGVEYGKQLAKTIIGELEGGTSVHDASTEGLMAFYRECRLKGGGAA

SEQ ID NO: 12529 - protein, 426 aa, Neisseria meningitidis; identical to SEQ ID NO: 3050

SEQ ID NO: 12530 - protein, 421 aa, Neisseria meningitidis; identical to SEQ ID NO: 3252

SEQ ID NO: 12531 - protein, 691 aa, Neisseria meningitidis; identical to SEQ ID NO: 2651

SEQ ID NO: 12532 - protein, 373 aa, Neisseria meningitidis; identical to SEQ ID NO: 306

SEQ ID NO: 12533 - protein, 429 aa, Neisseria meningitidis; identical to SEQ ID NO: 2821

SEQ ID NO: 12534 - protein, 170 aa, Neisseria meningitidis; identical to SEQ ID NO: 1929

SEQ ID NO: 12535 - protein, 215 aa, Neisseria meningitidis; identical to SEQ ID NO: 1509

SEQ ID NO: 12536 - protein, 716 aa, Neisseria meningitidis
MLTDLEKNAIRDHYQNIGKNLPGFRPRASQREMIAAVANAFSRTLAREEGGEPPKREGESIAVIEGPTGVGKSLAYLLAGGIMAQTRGKRLIVSSATVALQEQLVDRDLPFLVEKSGLELSFALAKGRGRYLCPYKLYQLTQNNAQQNLTGFETPEVLWDSKPKPEELKLLRDIADEFSARRFNGDRDTWPEKIDDAIWLKVTNDRHGCLKTACPNRPECPFYLARDVLETVDVVVANHDLLLADISMGGGVILPAPENSFYCIDEAHHLPKKALSRFAAEHSWNIAVWTLEKLPQMTGKIAALTDKAELANLADETAASLLDSLHEWQFHLAEEPSLSLEVSENDRRTNSEPTWLWEDGKIPEGLETTVSNTAIAARSLLKHVIGLNDALSAARREKEQDSALLDRLTGEFGLFIARIEQISAVWDLLSTVPLEGEEPLAKWITRRADDKNDYIFNASPISSASHLANSLWRRAAGAVLTSATLQSLGNFNLILRQTGLQWLPETTTLALKSPFDFEKQGELYIPPIYASPKDPEAHTAAIIEWLPKLISPTEAIGTLVLFSSRKQMQDVALRLPGDYLPLLLVQGELPKAVLLQKHHRAIEEGKASIIFGLDSFAEGLDLPGTACVQVIIAKLPFAMPDNPIEKTQNRWIEQRGGNPFIEITVPEAGIKLIQAVGRLIRTEQDYGRVTILDNRIKTQRYGQQLLAGLPPFKRIG

SEQ ID NO: 12537 - protein, 129 aa, Neisseria meningitidis; identical to SEQ ID NO: 2271

SEQ ID NO: 12538 - protein, 861 aa, Neisseria meningitidis; identical to SEQ ID NO: 8200

SEQ ID NO: 12539 - protein, 166 aa, Neisseria meningitidis
MNAMPQTAAQNETLHTCSIIVDDAQDFSPMLLDAGRDDTLISESMIPQIRTVAALIAAERHDFSRSSPAEFTDAADFFAARILVLGVRRFHLDVSLLQILKTANSRARRFAEKHRLFFTPAQAELSLNKHKNRRLLTVETEHEVENKGNPVANSLAFVRKLHPLPL

SEQ ID NO: 12540 - protein, 473 aa, Neisseria meningitidis; identical to SEQ ID NO: 2148

SEQ ID NO: 12541 - protein, 291 aa, Neisseria meningitidis; identical to SEQ ID NO: 2469

SEQ ID NO: 12542 - protein, 391 aa, Neisseria meningitidis; identical to SEQ ID NO: 2334

SEQ ID NO: 12543 - protein, 852 aa, Neisseria meningitidis; identical to SEQ ID NO: 3382

SEQ ID NO: 12544 - protein, 380 aa, Neisseria meningitidis; identical to SEQ ID NO: 2973

SEQ ID NO: 12545 - protein, 73 aa, Neisseria meningitidis; identical to SEQ ID NO: 9598

SEQ ID NO: 12546 - protein, 100 aa, Neisseria meningitidis; identical to SEQ ID NO: 1023

SEQ ID NO: 12547 - protein, 427 aa, Neisseria meningitidis
VIRISGKNLLPMAEALCGKTPKPRVATYADFTDADGQAIDSGLLLFFAAPASFTGEDVIELQGHGGPVVMDMLLNRCLELGARLAEPGEFTKRAFLNDKLDLAQAEGVADLIDASSRSAARLALRSLKGDFSRRIHGLVEDLITLRMLVEATLDFPEEDIDFLEAADARGKLDGLRRAVDDVLANAQQGAILREGLNVVLVGAPNVGKSSLLNALAGDEVAIVTDIAGTTRDAVRERILIDGVPVHIVDTAGLRETDDVVERIGIERSRKAVSEADVALVLVDPREGVNDKTRAILDALPPELKRIEIHSKSDLHAHAAGGFGTGAETVIALSAKTGDGLDALKRTLLREAGWQGEGEGLFLARTRHVNALKAAQEELSLAALCGNHQIELFAEHLRLAQVACGEITGEFTADDLLGVIFSRFCIGK

SEQ ID NO: 12548 - protein, 384 aa, Neisseria meningitidis; identical to SEQ ID NO: 9078

SEQ ID NO: 12549 - protein, 282 aa, Neisseria meningitidis; identical to SEQ ID NO: 1327

SEQ ID NO: 12550 - protein, 611 aa, Neisseria meningitidis; identical to SEQ ID NO: 3111

SEQ ID NO: 12551 - protein, 287 aa, Neisseria meningitidis; identical to SEQ ID NO: 3303

SEQ ID NO: 12552 - protein, 162 aa, Neisseria meningitidis; identical to SEQ ID NO: 9363

SEQ ID NO: 12553 - protein, 59 aa, Neisseria meningitidis; identical to SEQ ID NO: 642

SEQ ID NO: 12554 - protein, 195 aa, Neisseria meningitidis; identical to SEQ ID NO: 1987

SEQ ID NO: 12555 - protein, 76 aa, Neisseria meningitidis; identical to SEQ ID NO: 3053

SEQ ID NO: 12556 - protein, 215 aa, Neisseria meningitidis; identical to SEQ ID NO: 4487

SEQ ID NO: 12557 - protein, 194 aa, Neisseria meningitidis; identical to SEQ ID NO: 666

SEQ ID NO: 12558 - protein, 125 aa, Neisseria meningitidis; identical to SEQ ID NO: 4559

SEQ ID NO: 12559 - protein, 464 aa, Neisseria meningitidis
MTVKTRFAPSPTGYLHIGGVRTALFSWAFARHHKGEFLLRIEDTDLARSTAESVNIILDGMKWVGLDYDNAGNVVYQTRRFDRYKEVIAELLEKGDAYYCYCSKEELEAMREKAEKEGTATYDRRWRPEAGKTLPEIPAGVQPVVRFKTPLDGVTKWADLVKGEISIPNEALDDLIIARADGTPTYNFCVVVDDYDMGVTHVIRGDDHVNNTPKQINILKAIGATLPEYGHLPMILNEQGKKISKRSGDTVAITDFGAMGILPEAMLNYLARLGWAHGDDEFFTMEQFIEWFDLKDVSPSPSRMDLKKLYWINGEHIKITPNGKLAELVKPRLALRDIHETEKPALEDVLALVKDRAQDLNTLADECLYFYVKQTPTEADVQKHWDDEAAARMLRFAERLEGLEDWNAEAIHDLFKPFCDEEGIKMGKLGMPLRLAVCGTAKTPSVDAVLALIGKEEVLKRIRA

SEQ ID NO: 12560 - protein, 306 aa, Neisseria meningitidis
MRIRLGRHNAPDFPHGAAVTIGNFDGVHLGHKHILQKLRLEADTRGLPVVTVVFEPQPKEFFALRTGRMPPCRISPLRTKLELLEGTGCVDAVWVLRFDQNFSEISAQGFIDRLLRQTLNTRYLLVGDDFRFGAGREGCFELLAQQPDMQTERTPSVIVEDIRTSSTAVRQALSDGNLAYAKKLLGHDYVLSGRVVHGRKLGRTLNAPTANIRLPRHRYALGGVFVVEADGAFGTRRGVASFGFNPTVDSGCSQKLEVHLFDFQGDLYGQRLNVRFLHKLRDEEKFDGMAELKRQIAADMEAAKCW

SEQ ID NO: 12561 - protein, 255 aa, Neisseria meningitidis; identical to SEQ ID NO: 3233

SEQ ID NO: 12562 - protein, 46 aa, Neisseria meningitidis; identical to SEQ ID NO: 9631

SEQ ID NO: 12563 - protein, 43 aa, Neisseria meningitidis; identical to SEQ ID NO: 2679

SEQ ID NO: 12564 - protein, 179 aa, Neisseria meningitidis; identical to SEQ ID NO: 8483

SEQ ID NO: 12565 - protein, 279 aa, Neisseria meningitidis
MTATAAAIDRLLPQTQCRECGYDGCLPYAQAVATGEAYNLCAPGGEAVVRDLAALLGKPLVAPAKTQAKALARIDETACIGCTACIRACPADAIMGAGKLMHTVIADECTGCGLCVAPCPVDCIHMQPVADTVLPRARRFSLSADSRFAAAEHARARYLKRNERKQREADERKAMLAEREAAVRNARPQTPDTPKKPTFNPADLIAKAMAKAQTQQDRLAAADNRKDYQAKQIAEARERAELRRAQRDMKYGSDSEKAAALEYLKQYKAKQEAAQNTAS

SEQ ID NO: 12566 - protein, 201 aa, Neisseria meningitidis; identical to SEQ ID NO: 2357

SEQ ID NO: 12567 - protein, 312 aa, Neisseria meningitidis
MSIHTLKRLPSSLLLGLCLSLPSAHLFADNDILGQFLEQNMLTSSDPIEIFAESTIHPTNTQAITGGLILSSQSALVVNNKTGQILYQKNADRIMPIASISKLMSAMVVLDANLDMNETVTITPDEIDRLKGTGSRLAIGTALTRKELLHLSLMSSENRATHALGRTYPGGMGAFVAAMNRKAQSLGMYGSRFYEPTGLNFQNVSTAKDLSLMVNAAAQYPQIRTNSTSNYASVQTKNGQQNYKNSNALVREGMWNIELQKTGYIREAGRSMVVKANIQNQPVTIVLLNSPTSATRVNDARKIESWMLQQRS

SEQ ID NO: 12568 - protein, 272 aa, Neisseria meningitidis
MKGMDKLRYQQDFLNIRPIFTAGEQEYLTGLSDRLPLSVLTGSVRNIEEIGIDFVYSSAKLEGNTYNQYDTQALLKLGQTAGGKLYSDAVMLINLRESYRHLLSGLDSPEPFDWLDFLKTTHSLISENLLEKGSGGVVRRDSVTISGTDYTPLSNPQSLDTELKWLLQEAPKIENPFDRAVYLHNNLAYLQYFKDCNKRTARNCMTLSLMRSGFFPCVFSPDSYPAYAEAVVAYYETGDYGLFKKYFISAYENTVNKYGPQPDMDISRNFSL

SEQ ID NO: 12569 - protein, 336 aa, Neisseria meningitidis; identical to SEQ ID NO: 2187

SEQ ID NO: 12570 - protein, 179 aa, Neisseria meningitidis; identical to SEQ ID NO: 8483

SEQ ID NO: 12571 - protein, 160 aa, Neisseria meningitidis; identical to SEQ ID NO: 3806

SEQ ID NO: 12572 - protein, 630 aa, Neisseria meningitidis; identical to SEQ ID NO: 3023

SEQ ID NO: 12573 - protein, 451 aa, Neisseria meningitidis
MSDFFHSDVLSVSELNAFAKSLLENHLAGLWIAGEVSNLTRAASGHYYFSLKDSRAQVRCAMFKGAAARLAKPLKEGDHIEVSGKISIYEARGEFQITVNEVRLKGLGQLYEAYERLKAQLQAEGAFAAERKKPLPTRPQCIGIVTSLAAAALRDVVTTLKRRAPEIPVIVYPTPVQGAGSELQIAQAIKTASQRAECDVLIVCRGGGSIEDLWAFNEEPVVRAIEACTVPVVSGVGHETDFTLADFVADVRAPTPTGAAELVSPNRQESLHRLAQAQGRLKTVLEQRYFDASQKLDWLARQIRHPRQKLDEQRASIGKLAQTLSYSMKQNLRAHTARFERQTQALQHYRPDVSVCKNNIVRLQTALPAAFSQLLTHRRQSLTAQAALLEAVSPQHILERGFSVVKNTRGQVIRNADVLKQGQKLHITFADGETDVRVSKEQGQQDLFDCI

SEQ ID NO: 12574 - protein, 259 aa, Neisseria meningitidis; identical to SEQ ID NO: 2605

SEQ ID NO: 12575 - protein, 39 aa, Neisseria meningitidis
LAVKEKLQNSDFSTEPLVKNIIHVLEYAIKNEKTVIFHF

SEQ ID NO: 12576 - protein, 286 aa, Neisseria meningitidis; identical to SEQ ID NO: 148

SEQ ID NO: 12577 - protein, 128 aa, Neisseria meningitidis; identical to SEQ ID NO: 605

SEQ ID NO: 12578 - protein, 397 aa, Neisseria meningitidis; identical to SEQ ID NO: 759

SEQ ID NO: 12579 - protein, 171 aa, Neisseria meningitidis
MYTCTSCGEKHEDMPAIGFTAPDPYNQLSEEERIAYQAECDSDFCIIRYPDQTDRFIRAVLPIPIIGHEETLEYGVWVSVSEKSFNDYQSHFHDNPENAVYFGMICNRLPSYESDTFGLHCNVVTQPDGQRPLLQLHQSGGHPLVRDFYHGIEYAEAQARIGAVSESDCSG

SEQ ID NO: 12580 - protein, 196 aa, Neisseria meningitidis
MLLFIDNYDSFTYNIVQYFAELGQEVAVRRNDDITLEEIEALNPQYLVIGPGPCSPKEAGISVAAMRHFAGRLPIMGVCLGHQTIGEAFGGRIVRAKTLMHGKVSPVSHSGKGMFKGLPNPVTCTRYHSLVIDRNTMPECLEVTAWTEDGEIMGVRHKEYAVEGVQFHPEALLTEHGHDMLNNFLIEFQNFKPQKI

SEQ ID NO: 12581 - protein, 476 aa, Neisseria meningitidis; identical to SEQ ID NO: 2184

SEQ ID NO: 12582 - protein, 43 aa, Neisseria meningitidis
MHIYDFYLPEGEYLFEISDNSEYIPLYDEINNSIRIVVNARIQ

SEQ ID NO: 12583 - protein, 456 aa, Neisseria meningitidis
MPQNTLNIVILAAGKGTRMYSKMPKVLHEIGGETMLGRVIDTAAALNPQNICVVVGHGKEQVLDTVKRDVVWVEQTEQLGTGHAVKTALPHLAAEGRTLVLYGDVPLIDVETLETLLEAAGNEVGLLTDVPADPSGLGRIIRDGSGSVTAIVEEKDADTAQKAVKETNTGILVLPNAKLENWLNSLSSNNAQGEYYLTDLIAKAVADGIKVHPVQVRASHLAAGVNNKRQLAELERIFQTGQAQELLKAGVTLHDPARFDLRGRLKHGQDVVIDVNCIFEGEVEIGDNVEIGANCVIKNAKIGANSKIAPFSHLEDCEVGENNRIGPYARLRPQARLADDVHVGNFVEIKNAAIGKGTKANHLTYIGDAEVGSKTNFGAGTIIANYDGVHKHKTVIGDEVRIGSNCVLVAPVTLGNKVTTGAGSTITRNIEDNKLALARARQTVIEGWVRPEKDKQ

SEQ ID NO: 12584 - protein, 324 aa, Neisseria meningitidis
MPSEKNIGFMAGSSRPLWVAFALLLVSCVLFMTLNVKGDWDFVLHLRLTKLAALLMVAYAVGVSTQLFQTLTNNPILTPSILGFDSLYVFLQTLLVFTFGGVGYASLPLTGKFGFELVVMMGGSLLLFYTLIKQGGRDLPRMILIGVIFGILFRSLSSLLSRMIDPEEFTAAQANMFAGFNTVHSELLGIGALILLVSAAVVWRERYRLDVHLLGRDQAINLGINYTRNTLWLLLWIAALVATATAVVGPVSFFGLLAASLANHFSPSVRHSVRLPMTVCVGGILLVGGQTVFEHFLGMKAVLSVVVEFAGGLVFLYLVLKHKK

SEQ ID NO: 12585 - protein, 478 aa, Neisseria meningitidis; identical to SEQ ID NO: 2080

SEQ ID NO: 12586 - protein, 56 aa, Neisseria meningitidis
LPIIRKKVKPDGIVYTDTFRSYDVLDISEFSHLRKFNGIPKEHLGLHLKKCQWHFK

SEQ ID NO: 12587 - protein, 291 aa, Neisseria meningitidis; identical to SEQ ID NO: 2264

SEQ ID NO: 12588 - protein, 365 aa, Neisseria meningitidis; identical to SEQ ID NO: 3268

SEQ ID NO: 12589 - protein, 230 aa, Neisseria meningitidis
VQADLAYAAERITHDYPKPTGTDKDKISTVSDYFRNIRAHSIHPRVSVGYDFGGWRIAADYASYRKWNNNKYSVNTKVLQEKNGNRKELKTENQENGTFHAASSLGLSAIYDFKLNDKFDKFKPYIGARVAYGHVKHQVHSVKKETTTVFTAPTQGAQKGGVIPEATISKPAYHESHSISSLGLGVIAGVGFDITPKLTLDTGYRYHNWGRLKNTRFKTHEVSLGMRYRF

SEQ ID NO: 12590 - protein, 420 aa, Neisseria meningitidis; identical to SEQ ID NO: 2546

SEQ ID NO: 12591 - protein, 52 aa, Neisseria meningitidis
MKTFEKTWSAQYRDMEISVRNFWNLERTGAEVYINGRRVYHNEAEMASASLR

SEQ ID NO: 12592 - protein, 321 aa, Neisseria meningitidis; identical to SEQ ID NO: 2168

SEQ ID NO: 12593 - protein, 405 aa, Neisseria meningitidis; identical to SEQ ID NO: 11122

SEQ ID NO: 12594 - protein, 469 aa, Neisseria meningitidis
MNFPKTAASLLLLLASLAAHALDTGRIPQNEIAVYVQELDSGKVIIDHRSDVPVNPASTMKLVTAFAAFKTFGSNYRWATEFKSNGTVNDGTLDGNLYWAGSGDPVFNQENLLDAQKQLREQGILNITGHLMLDHSLWGEVGSPDHFEADSGSPFMTPPNPTMLSAGMVMVRAERNAAGSTDILTDPPLPHIFAQNNLKITASQAACPSVKKLMRASFSDNTLKLRGNIPESCLGKPVGVRMFALDELIRQSFTNHWLLGGGRISDGIGIADTPEGAQTLAVAHAKPMKEILTDMNKRSDNLIARSVFLKLGGDGKLPAVSEQAASAVRRELAVSGIDIADLVLENGSGLSRKERVTARMMAQMLETAYFSPFAQDFIDTLPIAGTDGTLRNRFKQSGGLLRLKTGTLNNVRALAGYWLGDKPMAVVVIINSGRAVSLLPDLDNFVAKNIISGGDGWLDAKLMCKERRA

SEQ ID NO: 12595 - protein, 416 aa, Neisseria meningitidis
MFVPLAMLAGMFSYYETFHETEALQDDLLRQAALYVAPDSKPETLPEGDGDTRILVQMPQQEDPVVSLPAHLADGLHTLQADGDDDYYRVYIRTTEQGRIAVMQENEYREDLAADAARQSVLPLLAALPLMILLTVWITHKAMRPVRKLSQSLEQRRINDLSALSVDNIPSEIRGFVTAINLLLKRADEDIRHRQRFVADAAHELRTPMTALSLQAERLNNMSLPPDAARQSAVLQQSIRRNKHLLEQLLALARSQSDETPLAKTTFGLQSRFRQVLQELMPLALEKRQDIGVAVGGDVEIFADETEIYTLVKTFVDNAIRYTPSEGRIDLGFTDEGKYLAVWVEDNGNGIPESERARVLDPFYRILGTEQQGTGLGLSIADTLAKKYGGHLELTDSRRFGHGLLIRALLDKETLK

SEQ ID NO: 12596 - protein, 451 aa, Neisseria meningitidis; identical to SEQ ID NO: 2532

SEQ ID NO: 12597 - protein, 83 aa, Neisseria meningitidis; identical to SEQ ID NO: 3011

SEQ ID NO: 12598 - protein, 164 aa, Neisseria meningitidis; identical to SEQ ID NO: 3532

SEQ ID NO: 12599 - protein, 459 aa, Neisseria meningitidis; identical to SEQ ID NO: 2963

SEQ ID NO: 12600 - protein, 414 aa, Neisseria meningitidis
MSNENRTCSFCGKSKSHVKHLIEGENAFICDECVSNCIEILHEDGNDGTPPESAGGEPEESGKLPTPAEIVANLNDHVIGQEQAKKALAVSVYNHYKRLRHPKAGANVELSKSNILLIGPTGSGKTLLAQSLARKLDVPFVMADATTLTEAGYVGEDVEQIITKLLGKCDFDVEKAQRGIVYIDEIDKISRKGDNPSITRDVSGEGVQQALLKLIEGTVASVPPQGGRKHPNQEFINVDTTNILFICGGAFAGLEKVIRQRTEKGGIGFGASVHSKDENADITKLFGIVEPEDLIKFGLIPELIGRLPVIATLEELDEDALINILTEPKNALVKQYQALFGMENVELEFEEGALRSIARQAMERKTGARGLRSIVERCLLDTMYRLPDLKGLKKVVVGKAVIEEGREPELVFES

SEQ ID NO: 12601 - protein, 460 aa, Neisseria meningitidis; identical to SEQ ID NO: 3274

SEQ ID NO: 12602 - protein, 797 aa, Neisseria meningitidis; identical to SEQ ID NO: 4593

SEQ ID NO: 12603 - protein, 226 aa, Neisseria meningitidis; identical to SEQ ID NO: 1990

SEQ ID NO: 12604 - protein, 433 aa, Neisseria meningitidis; identical to SEQ ID NO: 2404

SEQ ID NO: 12605 - protein, 207 aa, Neisseria meningitidis; identical to SEQ ID NO: 2101

SEQ ID NO: 12606 - protein, 187 aa, Neisseria meningitidis
VTAEGRDKNAVNAEFVKKFNNFTRKSKNGSFKTELVSRSAMPRYQYTNGRRIQTGWEERAEFKVEGRDFDALNRFIADVQADAALEYTDFHVSRERRNEVIDQVSKDAVLRFKARAEKLAGVLGASGYKIVKLNLGHIGSHIAGGGAAQAKMLRAMPMAASVNMEGADSAAPGVEEISISVNGTVQF

SEQ ID NO: 12607 - protein, 309 aa, Neisseria meningitidis; identical to SEQ ID NO: 2250

SEQ ID NO: 12608 - protein, 473 aa, Neisseria meningitidis
MDTKEILGYAAGSIGSAVLAVIILPLLSWYFPADDIGRIVLMQTAAGLTVSVLCLGLDQAYVREYYAAADKDTLFKTLFLPPLLSAAAIAALLLSRPSLPSEILFSLDDAAAGIGLVLFELSFLPIRFLLLVLRMEGRALAFSSAQLVSKLAILLLLPLTVGLLHFPANTAVLTAVYALANLAAAAFLLFQNRCRLKAVRRAPFSSAVLHRGLRYGIPIALSSIAYWGLASADRLFLKKYAGLEQLGVYSMGISFGGAALLFQSIFSTVWTPYIFRAIEENAPPARLSATAESASALLAAAVCLTGIFSPLASLLLPENYAAVRFIVVSCMLPPLFCTLVEISGIGLNVVRKTRPIALATLGALAANLLLLGLAVPSGGARGAAVACAASFWLFFVFKTESSCRLWQPLKRLPLYMHTLFCLASSAAYTCFGTPANYPLFAGVWAAYLAGCILRHRKDLHKLFHYLKKQGFPL

SEQ ID NO: 12609 - protein, 492 aa, Neisseria meningitidis; identical to SEQ ID NO: 3239

SEQ ID NO: 12610 - protein, 274 aa, Neisseria meningitidis; identical to SEQ ID NO: 3305

SEQ ID NO: 12611 - protein, 244 aa, Neisseria meningitidis; identical to SEQ ID NO: 1832

SEQ ID NO: 12612 - protein, 278 aa, Neisseria meningitidis; identical to SEQ ID NO: 2132

SEQ ID NO: 12613 - protein, 98 aa, Neisseria meningitidis; identical to SEQ ID NO: 2341

SEQ ID NO: 12614 - protein, 944 aa, Neisseria meningitidis; identical to SEQ ID NO: 2324

SEQ ID NO: 12615 - protein, 916 aa, Neisseria meningitidis; identical to SEQ ID NO: 1114

SEQ ID NO: 12616 - protein, 524 aa, Neisseria meningitidis; identical to SEQ ID NO: 2756

SEQ ID NO: 12617 - protein, 51 aa, Neisseria meningitidis; identical to SEQ ID NO: 1872

SEQ ID NO: 12618 - protein, 447 aa, Neisseria meningitidis; identical to SEQ ID NO: 2854

SEQ ID NO: 12619 - protein, 278 aa, Neisseria meningitidis
MQIIHTIQELRAWRKNAGTVAFVPTMGNLHEGHLALVREAKKRADNVVVSIFVNRLQFGQGEDFDKYPRTLQQDADKLEAEGVAVVFAPDEKELYPNVEQRYNVEPPNLQNELCGKFRPGHFRGVATVVSKLFNIVAPDVACFGKKDYQQLAVIKGLTEDLNFDVEIVPVDTGRTEDGLALSSRNQYLSAAERDEAPRLYRELKAVAESLAQGSLDYAGLERQAADHLTAAGWVVDYVEIRRADTLEVARAGDKKLVVLAAARLGTTRLIDNLEIKLP

SEQ ID NO: 12620 - protein, 415 aa, Neisseria meningitidis; identical to SEQ ID NO: 2921

SEQ ID NO: 12621 - protein, 528 aa, Neisseria meningitidis; identical to SEQ ID NO: 2150

SEQ ID NO: 12622 - protein, 143 aa, Neisseria meningitidis; identical to SEQ ID NO: 2619

SEQ ID NO: 12623 - protein, 223 aa, Neisseria meningitidis; identical to SEQ ID NO: 3079

SEQ ID NO: 12624 - protein, 183 aa, Neisseria meningitidis; identical to SEQ ID NO: 1316

SEQ ID NO: 12625 - protein, 659 aa, Neisseria meningitidis
MPKILQQTTLHRFFRANTHHPISPSVLQQAGDLIRWLCFSDGISDFRPCRLKPQNPIGGTVMNTVSNYLSALREAMKAQGLDALVIPSADPHLSEYLPEHWQARRELSGFTGSVGTFVLTTDEAGVWVDSRYWEQAAKQLAGSGIELQKSGQVPPYNEWLAANLPENAAVGIPSDMVSLTGKRTLAQSLTAKNIRIEHPDDLLDQVWTSRPAIPAETVFIHDPAYVSETAAEKLARVRAVMAEKGADYHLVSSLDDIAWLTNLRGSDVPFNPVFVSFLLIGKDNAVLFTEQCRLNAEAAAALQTAGITVEPYAQVADKLAQIGGALLIEPNKTAVSTLVRLPESVRLIEGTNPSTLFKSCKSEADIARIREAMEHDGAALCGFFAEFEDIIGNGGSLTEIDVDTMLYRHRSVRPGFVSLSFDTIAGFNANGALPHYSATPESHSTISGNGLLLIDSGAQYKGGTTDITRVVPVGTPTAEQKRDNTLVLKAHIALAEAVFPENIPSPLIDAICRKPLWQAQCDYGHGTGHGVGYFLNVHEGPQRIAFAAPATPETAMKKGMVTSIEPGLYRPGKWGIRIENLAANQAVAAPQETEFGSFLCFETLTLCPIDTRLMDTALMTDGEIDWVNRYHAEVRRRLEPLTEGAAKAWLIKRTEPLAR

SEQ ID NO: 12626 - protein, 403 aa, Neisseria meningitidis; identical to SEQ ID NO: 3534

SEQ ID NO: 12627 - protein, 321 aa, Neisseria meningitidis; identical to SEQ ID NO: 2168

SEQ ID NO: 12628 - protein, 617 aa, Neisseria meningitidis
MNRYPLWKYLLIVFTIAVAAVYSLPNLFGETPAVQVSTNRQAIIINEQTQSKVDAALQNAGIQTDGMFVVDNSLKVRFKDTETQLKARDVIENTLGEGYITALNLLADSPEWMAKIKANPMFLGLDLRGGVHFTMQVDMKAAMQKTFERYSGDIRRELRREKIRSGTVRQAGNSLTVPLQDAGDVQKALPQLRKLFPEATLNSDGSNIVLTLSEEAVNKVRSDAVKQNITTLHNRVNELGVAEPVIQQSGADRIVVQLPGVQDTAKAKDIIGRTATLELRMVEDDPAKLREALEGNVPSGYELLSSGGDRPETLLISKQVELTGDNINDAQPSFDQMGAPAVSLSLDSAGGSIFGELTAANVGKRMAMVLIDQGKSEVVTAPVIRTAITGGRVEISGSMTTAEANDTSLLLRAGSLAAPMQIVEERTIGPSLGKENIEKGFHSTLWGFAIVAAFMVVYYRLMGFFSTIALSANILFLIGILSAMQATLTLPGMAALALTLGMAIDSNVLINERIREELRAGVPPQQAINLGFQHAWATIVDSNLTSLIAGIALLVFGSGPVRGFAVVHCLGILTSMYSSVVVFRALVNLWYGRRRKLQNISIGSVWKPKAEMAGGKE

SEQ ID NO: 12629 - protein, 477 aa, Neisseria meningitidis; identical to SEQ ID NO: 3214

SEQ ID NO: 12630 - protein, 88 aa, Neisseria meningitidis; identical to SEQ ID NO: 255

SEQ ID NO: 12631 - protein, 418 aa, Neisseria meningitidis; identical to SEQ ID NO: 1968

SEQ ID NO: 12632 - protein, 179 aa, Neisseria meningitidis; identical to SEQ ID NO: 8483

SEQ ID NO: 12633 - protein, 515 aa, Neisseria meningitidis; identical to SEQ ID NO: 11687

SEQ ID NO: 12634 - protein, 107 aa, Neisseria meningitidis; identical to SEQ ID NO: 2467

SEQ ID NO: 12635 - protein, 332 aa, Neisseria meningitidis; identical to SEQ ID NO: 9339

SEQ ID NO: 12636 - protein, 190 aa, Neisseria meningitidis; identical to SEQ ID NO: 917

SEQ ID NO: 12637 - protein, 183 aa, Neisseria meningitidis; identical to SEQ ID NO: 2421

SEQ ID NO: 12638 - protein, 310 aa, Neisseria meningitidis; identical to SEQ ID NO: 2133

SEQ ID NO: 12639 - protein, 341 aa, Neisseria meningitidis; identical to SEQ ID NO: 3492

SEQ ID NO: 12640 - protein, 258 aa, Neisseria meningitidis; identical to SEQ ID NO: 3248

SEQ ID NO: 12641 - protein, 387 aa, Neisseria meningitidis
VHINFSMEYKEFNENYLYKKPFIFKNALDVSSISWKEINELYQRADPTDWQFKFRKGEIIPKEAYVESFNDVGRIRHRFNKTAVYQYLQDGATMVYNRIDNEPFVDTIAKQVAQFAQAQTVVSGYLAFGSSSSYRNHWDTRDVFAVQLIGKKHWTISAPNFDMPLYMQQAKDMPHITPSKTVDMEVILEAGDILYIPRGWWHNPMPMNCETFHLAIGTFPPNGYNYMEWLMKKIPDIQSIRQNFIDWEHDQKNIDNAAQAVTEMMKNQENYQAFIQDFLGNQRVNTAFNMQIFGNLDNDRLPENSTIKLNSLDNRTIKQGYIIANGIKTNLDNDSQTILQWIADKHSVKLTQLYEFCQNQNINLEKVEKLVFDLTMIDVLECLTDER

SEQ ID NO: 12642 - protein, 328 aa, Neisseria meningitidis; identical to SEQ ID NO: 372

SEQ ID NO: 12643 - protein, 161 aa, Neisseria meningitidis; identical to SEQ ID NO: 3482

SEQ ID NO: 12644 - protein, 295 aa, Neisseria meningitidis; identical to SEQ ID NO: 2981

SEQ ID NO: 12645 - protein, 248 aa, Neisseria meningitidis; identical to SEQ ID NO: 3755

SEQ ID NO: 12646 - protein, 526 aa, Neisseria meningitidis; identical to SEQ ID NO: 2237

SEQ ID NO: 12647 - protein, 239 aa, Neisseria meningitidis; identical to SEQ ID NO: 3210

SEQ ID NO: 12648 - protein, 590 aa, Neisseria meningitidis; identical to SEQ ID NO: 2102

SEQ ID NO: 12649 - protein, 174 aa, Neisseria meningitidis; identical to SEQ ID NO: 10732

SEQ ID NO: 12650 - protein, 369 aa, Neisseria meningitidis
MFSDTDISMMENALRLAALGRFSTSPNPRVGCVIAHGSQIVGQGFHVKAGEPHAEVHALHQAGEMAKGATAFVTLEPCSHYGRTPPCAEALLRSGVTRVVAAMRDPNPLVAGKGLALLESAGIKTECGLLENKARELNRGFLSSIERRRPFVRLKCAVSLDGKTALSDGSSFWITGEDARADVQVLRAESCAVLTGIGTVLADNPQLNVRAFPTLRQPARIVLDSRLRLPLDSHLLTDGQSPTYIATLERNEDRLHPYREHAHIRILMPSETAGGKIDLNHLMRLLADEGFGEIMVEAGSELTSAFLAEDLADEIVLYRSPKILGSGKDLLSLPENRAALSAPPLWTPVSSEILGHDIKTVFRKNDNAF

SEQ ID NO: 12651 - protein, 79 aa, Neisseria meningitidis; identical to SEQ ID NO: 3404

SEQ ID NO: 12652 - protein, 109 aa, Neisseria meningitidis; identical to SEQ ID NO: 899

SEQ ID NO: 12653 - protein, 154 aa, Neisseria meningitidis; identical to SEQ ID NO: 4442

SEQ ID NO: 12654 - protein, 684 aa, Neisseria meningitidis; identical to SEQ ID NO: 2642

SEQ ID NO: 12655 - protein, 103 aa, Neisseria meningitidis; identical to SEQ ID NO: 3283

SEQ ID NO: 12656 - protein, 77 aa, Neisseria meningitidis; identical to SEQ ID NO: 3505

SEQ ID NO: 12657 - protein, 259 aa, Neisseria meningitidis; identical to SEQ ID NO: 8690

SEQ ID NO: 12658 - protein, 199 aa, Neisseria meningitidis; identical to SEQ ID NO: 3615

SEQ ID NO: 12659 - protein, 284 aa, Neisseria meningitidis
MFYQILALIIWSSSFIAAKYVYGGIDPALMVGVRLLIAALPALPACRRHVGKIPREEWKPLLIAAFVNYVLTLLLQFVGLKYTSAASASVIVGLEPLLMVFVGHFFFNDKARAYHWICGAAAFAGVALLMAGGAEEGGEVGWFGCLLVLLAGAGFCAAMRPTQRLIARIGAPAFTSVSIAAASLMCLPFSLALAQSYTVDWNVGMVLSLLYLGLGCGWYAYWLWNKGMSRVPANVSGLLISLEPVVGVLLAVLILGEHLSPVSALGVFVVIAATLVAGRLSHQK

SEQ ID NO: 12660 - protein, 199 aa, Neisseria meningitidis; identical to SEQ ID NO: 1276

SEQ ID NO: 12661 - protein, 230 aa, Neisseria meningitidis; identical to SEQ ID NO: 2468

SEQ ID NO: 12662 - protein, 367 aa, Neisseria meningitidis; identical to SEQ ID NO: 1944

SEQ ID NO: 12663 - protein, 288 aa, Neisseria meningitidis; identical to SEQ ID NO: 2832

SEQ ID NO: 12664 - protein, 203 aa, Neisseria meningitidis; identical to SEQ ID NO: 3558

SEQ ID NO: 12665 - protein, 178 aa, Neisseria meningitidis; identical to SEQ ID NO: 2748

SEQ ID NO: 12666 - protein, 127 aa, Neisseria meningitidis; identical to SEQ ID NO: 9364

SEQ ID NO: 12667 - protein, 365 aa, Neisseria meningitidis; identical to SEQ ID NO: 11

SEQ ID NO: 12668 - protein, 214 aa, Neisseria meningitidis; identical to SEQ ID NO: 909

SEQ ID NO: 12669 - protein, 334 aa, Neisseria meningitidis
MSGAAAALLAGIILYFKSDKKRQENGEWSSGLEYAYILTAVGVFAALSLFMSFTAVFLIFVVLCGTAWGVYKYRLKTHPEISESSHFGDYFGSFFPTVLVLFLIRSFIAEPFQIPSSSMRPGLIKGDFILVGKFSYGLRVPVLNNIFIPTGKIERGDVVVFNYPLQPEMTYIKRIVGIPGDVVEYRDKILTVNGKPTSDIPNGTYRYPDDTDPSEIHNTDMFHSGLDGKSFNILKKEGQPAVSLPVLGKYTSDIMSENGYSIEQSGLEHCQYADDGSGFVCKVPEGRYFAMGDNRDNSADSRYWGFVDDKLVVGKAMFILMNFGDFGRAGTAIR

SEQ ID NO: 12670 - protein, 324 aa, Neisseria meningitidis
MDTLTQFLPEHLQQNQLPEALGGVLLSVVSACTEINAKVRLGALAGVLGMAGTGNIQGEDQKKLDVIANNIMIDTLKANPAVAGLASEEEDSFVSAGENGRYLVLFDPLDGSSNIDVNISVGTIFSILEKPEGALATESFLQTGRQQLAAGYVLYGPQTQLVFTFGHGVYMFTLNAENEFVLTKEKPKVPESTKEFAINMSNRRHWLPPVQQYIDELLAGETGTRGKNYNMRWVASMVAEIHRILMRGGVFMYPQDKRDPSKPGKLRLMYEANPMALILEQAGASASNARQDILGIRPESLHQRVAVIMGSSEEVDYLNRLHSK

SEQ ID NO: 12671 - protein, 160 aa, Neisseria meningitidis
MGYIKGVFGIKGWLKIAANTEYSDSLLDYPEWHLVKDGKTVSVTLEAGKVVNSELQVKFEGINDRDLAFSLRGYTIEIPREAFAPTEEDEYYWTDLVGMTVVNKDHTVLGKVSNLMETGANDVLMIDGEHGQILIPFVSQYIETVDTGSKIITADWGLDY

SEQ ID NO: 12672 - protein, 160 aa, Neisseria meningitidis; identical to SEQ ID NO: 4185

SEQ ID NO: 12673 - protein, 737 aa, Neisseria meningitidis; identical to SEQ ID NO: 2232

SEQ ID NO: 12674 - protein, 208 aa, Neisseria meningitidis; identical to SEQ ID NO: 3590

SEQ ID NO: 12675 - protein, 154 aa, Neisseria meningitidis; identical to SEQ ID NO: 1733

SEQ ID NO: 12676 - protein, 248 aa, Neisseria meningitidis; identical to SEQ ID NO: 2041

SEQ ID NO: 12677 - protein, 307 aa, Neisseria meningitidis; identical to SEQ ID NO: 9941

SEQ ID NO: 12678 - protein, 431 aa, Neisseria meningitidis
MIRPDFQEYLPSYYFSSVNPHTVYPKLQCRLKTDTCIIGGGLSGLCTALPLAEQGHETVVLEAARIGFGASGRSGGQVISDYACGMEEIEKQVGLEQAQWFWQQSLQAIELVDERVRKHTIDCDWQRGYATVAVRPQHWEELQQWHEHAQRHYGASHYQLWDNTELKQQLDSDMYQGAQFDPLSGHLHPLNYTLGIARAAAEAGTKIFEHSPMIRIEPYQNGWLVYTPEGSVECKNLVYAVNTYAGLNPIFRPLERKAIAVSTFIIATEPLGARAKGLIRNNMAVCDNRHILDYYRLSADGRLLFGGKDNEFIDNPARMTELVRQDMLKVFPQLADVKIEYSWGGECDITANLVPHFGRLAPNVFYTQGYSGHGMAITGIAGLAVAEAILGDECRLKPFERLRQPNIILQPFLRKLGSFLGSKYYQWKDSR

SEQ ID NO: 12679 - protein, 126 aa, Neisseria meningitidis
MADNGERIQIPVLENPDIREINHFFSVSNFEKKTGVLVFRIIPEPEFGNTELTVYFEKGYYLPMIQTILEGGDIEVKNLKTENYSGNTMEIWGDSYPIEHISKNISTIQNIISEFMIQKQTPAPII

SEQ ID NO: 12680 - protein, 313 aa, Neisseria meningitidis; identical to SEQ ID NO: 3575

SEQ ID NO: 12681 - protein, 112 aa, Neisseria meningitidis; identical to SEQ ID NO: 191

SEQ ID NO: 12682 - protein, 644 aa, Neisseria meningitidis; identical to SEQ ID NO: 2592

SEQ ID NO: 12683 - protein, 475 aa, Neisseria meningitidis; identical to SEQ ID NO: 2942

SEQ ID NO: 12684 - protein, 275 aa, Neisseria meningitidis; identical to SEQ ID NO: 2739

SEQ ID NO: 12685 - protein, 241 aa, Neisseria meningitidis
MSIIVENLTVSYRRRPAVHHVDITFEEHSMWAVFGPNGAGKSTFLKSLMGLQPIDTGSIRLDGLTRQNIAYLPQQSDIDRSQPMTVFDLAAMGLWYEIGFFRGINAVQKQRVHESLERVGMRQFAGRQIAHLSNGQFQRVLFARMLVQNAKFLLLDEPFNAVDARTTYELLDVLQKCHCGGHAIIAVLHDYEQVRAYFPNTLLLAREKIAAGATETILTEPYLAQANAKMQQQESPEWCAS

SEQ ID NO: 12686 - protein, 547 aa, Neisseria meningitidis; identical to SEQ ID NO: 3624

SEQ ID NO: 12687 - protein, 154 aa, Neisseria meningitidis; identical to SEQ ID NO: 3531

SEQ ID NO: 12688 - protein, 196 aa, Neisseria meningitidis; identical to SEQ ID NO: 2946

SEQ ID NO: 12689 - protein, 285 aa, Neisseria meningitidis; identical to SEQ ID NO: 2591

SEQ ID NO: 12690 - protein, 307 aa, Neisseria meningitidis; identical to SEQ ID NO: 2261

SEQ ID NO: 12691 - protein, 341 aa, Neisseria meningitidis; identical to SEQ ID NO: 3579

SEQ ID NO: 12692 - protein, 156 aa, Neisseria meningitidis; identical to SEQ ID NO: 2826

SEQ ID NO: 12693 - protein, 347 aa, Neisseria meningitidis; identical to SEQ ID NO: 3191

SEQ ID NO: 12694 - protein, 218 aa, Neisseria meningitidis
VNKRLFCSRNGLRYYLLGGFCLSVFPLLLVFTSSVWAVYRTGGQVLPPYVRADAALVLGAAAWDKRPSPVFRERINHAIALYQSRRVGKIVFTGGRTKKGYMTEAEVGRRYALKQGVPARNILFENTSRNTYENLNNIRPVLRANGIASVVIVSDPYHLARAAEMAEDLGVRVYMSATPTTRFDAGNKKKIFMLQEGYALSLYRLEKWGSRFLGWLSD

SEQ ID NO: 12695 - protein, 87 aa, Neisseria meningitidis; identical to SEQ ID NO: 932

SEQ ID NO: 12696 - protein, 96 aa, Neisseria meningitidis; identical to SEQ ID NO: 4744

SEQ ID NO: 12697 - protein, 505 aa, Neisseria meningitidis; identical to SEQ ID NO: 2005

SEQ ID NO: 12698 - protein, 725 aa, Neisseria meningitidis; identical to SEQ ID NO: 2772

SEQ ID NO: 12699 - protein, 128 aa, Neisseria meningitidis; identical to SEQ ID NO: 9112

SEQ ID NO: 12700 - protein, 113 aa, Neisseria meningitidis; identical to SEQ ID NO: 118

SEQ ID NO: 12701 - protein, 335 aa, Neisseria meningitidis; identical to SEQ ID NO: 3108

SEQ ID NO: 12702 - protein, 203 aa, Neisseria meningitidis; identical to SEQ ID NO: 352

SEQ ID NO: 12703 - protein, 48 aa, Neisseria meningitidis
LRHTRLTDGTSYKGRLKPQIRFQTTSGNKHKAIRKEQKQCRILAKWPY

SEQ ID NO: 12704 - protein, 120 aa, Neisseria meningitidis
MASSNVNKEIKDKKLSLWAKRQDGSVKWFCGQPVTRNDTAKDDTVAADTDTAKKIDTKHLPSTCRDDSSTGCIETPRADFKHFQKISRYRVLPESRHMAEKLRHSRAGGNLGLSAQKLIG

SEQ ID NO: 12705 - protein, 758 aa, Neisseria meningitidis; identical to SEQ ID NO: 2629

SEQ ID NO: 12706 - protein, 318 aa, Neisseria meningitidis; identical to SEQ ID NO: 3073

SEQ ID NO: 12707 - protein, 430 aa, Neisseria meningitidis; identical to SEQ ID NO: 2800

SEQ ID NO: 12708 - protein, 376 aa, Neisseria meningitidis; identical to SEQ ID NO: 2367

SEQ ID NO: 12709 - protein, 150 aa, Neisseria meningitidis; identical to SEQ ID NO: 2445

SEQ ID NO: 12710 - protein, 228 aa, Neisseria meningitidis; identical to SEQ ID NO: 2578

SEQ ID NO: 12711 - protein, 280 aa, Neisseria meningitidis; identical to SEQ ID NO: 4013

SEQ ID NO: 12712 - protein, 153 aa, Neisseria meningitidis; identical to SEQ ID NO: 2505

SEQ ID NO: 12713 - protein, 195 aa, Neisseria meningitidis; identical to SEQ ID NO: 2804

SEQ ID NO: 12714 - protein, 263 aa, Neisseria meningitidis; identical to SEQ ID NO: 2672

SEQ ID NO: 12715 - protein, 271 aa, Neisseria meningitidis; identical to SEQ ID NO: 1333

SEQ ID NO: 12716 - protein, 459 aa, Neisseria meningitidis; identical to SEQ ID NO: 2259

SEQ ID NO: 12717 - protein, 61 aa, Neisseria meningitidis; identical to SEQ ID NO: 1125

SEQ ID NO: 12718 - protein, 129 aa, Neisseria meningitidis; identical to SEQ ID NO: 2209

SEQ ID NO: 12719 - protein, 250 aa, Neisseria meningitidis; identical to SEQ ID NO: 2637

SEQ ID NO: 12720 - protein, 900 aa, Neisseria meningitidis; identical to SEQ ID NO: 8958

SEQ ID NO: 12721 - protein, 386 aa, Neisseria meningitidis
LRSEQVDLKSIGLMALIGLPFTWKFLWSPLMDAVRLPVLGRRRGWMLLTQAGLLAALAVYAFLNPRNHLPLIAGLSVLVAFFSASQDIVLDAFRREILSDEELGLGNSVHVNAYRIAALIPGSLSLVLADRMPWSEVFVITSLFMLPGLLMTLFLASEPVLPPAVPKTLKQTVVEPFKEFFTRKGIASAVCVLLFIFLYKLGDSMATALATPFYLDMGFSKTDIGLIAKNAGLWPAVAAGILGGVWMLKIGVNKALWLFGAVQAVTVLGFVWLAGFGPFDTVGTGERLMLAAVIGAEAVGVGLGTAAFVSYMARETNPAFTATQLALFTSLSAVPRTVINSFAGYLIEWLGYVPFFQLCFALALPGMLLLLKVAPWNGEKTQDAGR

SEQ ID NO: 12722 - protein, 287 aa, Neisseria meningitidis; identical to SEQ ID NO: 11456

SEQ ID NO: 12723 - protein, 212 aa, Neisseria meningitidis; identical to SEQ ID NO: 3448

SEQ ID NO: 12724 - protein, 179 aa, Neisseria meningitidis; identical to SEQ ID NO: 8483

SEQ ID NO: 12725 - protein, 178 aa, Neisseria meningitidis; identical to SEQ ID NO: 5654

SEQ ID NO: 12726 - protein, 263 aa, Neisseria meningitidis; identical to SEQ ID NO: 2040

SEQ ID NO: 12727 - protein, 196 aa, Neisseria meningitidis; identical to SEQ ID NO: 1629

SEQ ID NO: 12728 - protein, 307 aa, Neisseria meningitidis; identical to SEQ ID NO: 3458

SEQ ID NO: 12729 - protein, 379 aa, Neisseria meningitidis
MSQNASVGIVTPQKIPFEMPLVLENGKTLPRFDLMIETYGELNAEKNNAVLICHALSGNHHVAGRHSAEDKYTGWWDNMVGPGKPIDTERFFVVGLNNLGGCDGSSGPLSINPETGREYGADFPVVTVKDWVKSQAALADYLGIGQWAAVVGGSLGGMQALQWAISYPERVRHALVIASAPKLSTQNIAFNDVARQAILTDPDFNEGHYRSHNTVPARGLRIARMMGHITYLAEDGLGKKFGRDLRSNGYQYGYGVEFEVESYLRYQGDKFVGRFDANTYLLMTKALDYFDPAADFGNSLTRAVQDVQAKFFVASFSTDWRFAPERSHELVKALIAAQKSVQYIEVKSAHGHDAFLMEDEAYMRAVAAYMNNVYKECQQ

SEQ ID NO: 12730 - protein, 228 aa, Neisseria meningitidis; identical to SEQ ID NO: 2819

SEQ ID NO: 12731 - protein, 50 aa, Neisseria meningitidis; identical to SEQ ID NO: 2715

SEQ ID NO: 12732 - protein, 1552 aa, Neisseria meningitidis; identical to SEQ ID NO: 2502

SEQ ID NO: 12733 - protein, 302 aa, Neisseria meningitidis; identical to SEQ ID NO: 1790

SEQ ID NO: 12734 - protein, 924 aa, Neisseria meningitidis; identical to SEQ ID NO: 2343

SEQ ID NO: 12735 - protein, 371 aa, Neisseria meningitidis; identical to SEQ ID NO: 3159

SEQ ID NO: 12736 - protein, 558 aa, Neisseria meningitidis
MSFKTDAEIAQSSTMRPIGEIAAKLGLNADNIEPYGHYKAKINPAEAFKLPQKQGRLILVTAINPTPAGEGKTTVTIGLADALRHIGKDAVIALREPSLGPVFGVKGGAAGGGYAQVLPMEDINLHFTGDFHAIGAANNLLAAMLDNHIYQGNELDIDPKRVLWRRVVDMNDRQLRNIIDGMGKPVDGVMRPDGFDITVASEVMAVFCLAKDISDLKERLGNILVAYAKDGSPVYAKDLKAHGAMAVLLKDAIKPNLVQTIEGTPAFVHGGPFANIAHGCNSVTATRLAKHLADYAVTEAGFGADLGAEKFCDIKCRLAGLKPDAAVVVATVRALKYNGGVERANLGEENLEALAKGLPNLLKHISNLKNVFGLPVVVALNRFVSDSDAELAMIEKACAEHGVEVSLTEVWGKGGAGGADLAHKVVNAIENQPNNFNFAYDVELSIKDKIRAIAQKVYGAEDVDFSAEASAEIASLEKLGLDKMSICMAKTQYSLSDNAKLLGCPEGFRIAVRGITVSAGAGFIVALCGNMMKMPGLPKVPAAEKIDVDEHGVIHGLF

SEQ ID NO: 12737 - protein, 798 aa, Neisseria meningitidis; identical to SEQ ID NO: 2881

SEQ ID NO: 12738 - protein, 230 aa, Neisseria meningitidis; identical to SEQ ID NO: 3169

SEQ ID NO: 12739 - protein, 188 aa, Neisseria meningitidis; identical to SEQ ID NO: 9104

SEQ ID NO: 12740 - protein, 414 aa, Neisseria meningitidis; identical to SEQ ID NO: 8661

SEQ ID NO: 12741 - protein, 335 aa, Neisseria meningitidis; identical to SEQ ID NO: 2291

SEQ ID NO: 12742 - protein, 581 aa, Neisseria meningitidis; identical to SEQ ID NO: 3637

SEQ ID NO: 12743 - protein, 51 aa, Neisseria meningitidis; identical to SEQ ID NO: 3530

SEQ ID NO: 12744 - protein, 384 aa, Neisseria meningitidis; identical to SEQ ID NO: 4520

SEQ ID NO: 12745 - protein, 269 aa, Neisseria meningitidis; identical to SEQ ID NO: 2402

SEQ ID NO: 12746 - protein, 248 aa, Neisseria meningitidis; identical to SEQ ID NO: 8507

SEQ ID NO: 12747 - protein, 392 aa, Neisseria meningitidis; identical to SEQ ID NO: 3046

SEQ ID NO: 12748 - protein, 160 aa, Neisseria meningitidis; identical to SEQ ID NO: 2526

SEQ ID NO: 12749 - protein, 402 aa, Neisseria meningitidis; identical to SEQ ID NO: 136

SEQ ID NO: 12750 - protein, 222 aa, Neisseria meningitidis; identical to SEQ ID NO: 7986

SEQ ID NO: 12751 - protein, 114 aa, Neisseria meningitidis
LLDDKKLGISARKLIENPRNAIFVSAASIWEISIKQNKGLLKLPEEFFDVLQEEDFEMLPIGLFHAKQAGSLLEIHKDPFDRMLIAQTQAEGFELMTVDEYIPQYGIRVVNASS

SEQ ID NO: 12752 - protein, 350 aa, Neisseria meningitidis
MWKEILLNYGIFLLELLTVFGAIALIVLAIVQSKKQSESGSVVLTDFSENYKKQRQSFEAFFLSGEEAKHQEKEEKKKEKAEAKAEKKRLKEGGEKSSETQKSRLFVLDFDGDLYAHAVESLRHEITAVLLIAKPEDEVLLRLESPGGVVHGYGLAASQLRRLRERNIPLIVAVDKVAASGGYMMACVADKIVSAPFAIVGSVGVVAEVPNIHRLLKKHDIDVDVMTAGEFKRTVTFMGENTEKGKQKFRQELEETHQLFKQFVSENRPQLDIEEVATGEHWFGRQALALNLIDEISTSDDLLLKAFENKQVIEVKYQEKQSLIQRIGLQAEASVEKLFAKLVNRRADVM

SEQ ID NO: 12753 - protein, 125 aa, Neisseria meningitidis; identical to SEQ ID NO: 3172

SEQ ID NO: 12754 - protein, 218 aa, Neisseria meningitidis; identical to SEQ ID NO: 3416

SEQ ID NO: 12755 - protein, 268 aa, Neisseria meningitidis; identical to SEQ ID NO: 2873

SEQ ID NO: 12756 - protein, 258 aa, Neisseria meningitidis; identical to SEQ ID NO: 2774

SEQ ID NO: 12757 - protein, 127 aa, Neisseria meningitidis; identical to SEQ ID NO: 2622

SEQ ID NO: 12758 - protein, 260 aa, Neisseria meningitidis; identical to SEQ ID NO: 2560

SEQ ID NO: 12759 - protein, 127 aa, Neisseria meningitidis; identical to SEQ ID NO: 430

SEQ ID NO: 12760 - protein, 242 aa, Neisseria meningitidis; identical to SEQ ID NO: 107

SEQ ID NO: 12761 - protein, 171 aa, Neisseria meningitidis; identical to SEQ ID NO: 2512

SEQ ID NO: 12762 - protein, 163 aa, Neisseria meningitidis; identical to SEQ ID NO: 2144

SEQ ID NO: 12763 - protein, 296 aa, Neisseria meningitidis
LALLAAMTWGTLPIAVRQVLKFVDAPTLVWVRFTVAAAVLFVLLALGGRLPKRRDFSWCSFRLLLLGVAGISANFVLIAQGLHYISPTTTQVLWQISPFTMIVVGVLVFKDRMTAAQKIGLVLLLAGLLMFFNDKFGELSGLGAYAKGVLLCAAGSMAWVCYAVAQKLLSAQFGPQQILLLIYAASAAVFLPFAEPAHIGSLDGTLAWVCFAYCCLNTLIGYGSFGEALKHWEASKVSAVTTLLPVFTVIFSLLGHYVMPDTFAAPDMNGLGYVGALVVVGGAVTAAVGDRLFKRR

SEQ ID NO: 12764 - protein, 206 aa, Neisseria meningitidis
MLTPKSCDLFNIPFFQFSQLKKYQPESIPQIKADYKENWQIWQQLIQQVAAELGAPFAPPHIERWCNGWQVRAHFFAYFKYAQYKNSAAILSILLNRRRLSVSLDWHCYKADVSPITLPDYNRWLDNFDTEKYAAFDMWHGAESEYDDYRTVAQQNESDRKLQNDEDFFCIGKHIERDDLGRQDVAKWIAETVEDLLPLYEACHGA

SEQ ID NO: 12765 - protein, 366 aa, Neisseria meningitidis
METQLYIGIMSGTSMDGADAVLVRMDGGKWLGAEGHAFTPYPDRLRRQLLDLQDTGADELHRSRILSQELSRLYAQTAAELLCSQNLAPSDITALGCHGQTVRHAPEHGYSIQLADLPLLAELTQIFTVGDFRSRDLAAGGQGAPLVPAFHKALFRDDKETRVVLNIGGIANISVLPSDAPAFGFDTGPGNMLMDAWTQAHWQLPYDKNGAKAAQGNILPQLLDRLLAHPYFAQPHPKSTGRELFALNWLETYLDGGENRYDVLRTLSRFTAQTVCDAVSHAAADARQMYICGGGIRNPVLMADLAEYFGTRVSLRSTAELKLDPQWVEAAAFAWLAACWINRIPGSSHKATGASKPCILGAGYYY

SEQ ID NO: 12766 - protein, 257 aa, Neisseria meningitidis; identical to SEQ ID NO: 2825

SEQ ID NO: 12767 - protein, 233 aa, Neisseria meningitidis; identical to SEQ ID NO: 6431

SEQ ID NO: 12768 - protein, 227 aa, Neisseria meningitidis; identical to SEQ ID NO: 2059

SEQ ID NO: 12769 - protein, 500 aa, Neisseria meningitidis; identical to SEQ ID NO: 3641

SEQ ID NO: 12770 - protein, 517 aa, Neisseria meningitidis
MNRTYANFYEMLAAACRKNGNGTAVFDGKEKTAYRALKQEAEAVAAYLQNIGVKFGDTVALAVSNSTEFITAYFAVSAIGAVAVPMNTFLKNSEYAYILNDCKARFLFASAGLSKELAGLKAQTPVEKIIWTDKSRPAGEMAEGDAFFEDVRRFPEKPDLGRQPRINDLAHIIYTSGTTGHPKGALISYANLFANLNGIERIFKISKRDRFIVFLPMFHSFTLTAMVLLPIYMACSIILVKSVFPFSNVLKQALLKRATVFLGIPAIYTAMSKAKIPWYFRWFNRIRLFISGGAPLAEQTILDFKAKFPRAKLLEGYGLSEASPVVAVNTPERQKARSVGIPLPGLEAKAVDEELVEVPRGEVGELIVRGGSVMRGYLNMPAATDETIVNGWLKTGDFVTIDEDGFIFIVDRKKDLIISKGQNVYPREIEEEIYKLDAVEAAAVIGVKDRYADEEIVAFVQLKEGMDLGENEIRRHLCTVLANFKIPKQIHFKDGLPRNATGKVLKRVLKEQFDGNK

SEQ ID NO: 12771 - protein, 90 aa, Neisseria meningitidis; identical to SEQ ID NO: 1115

SEQ ID NO: 12772 - protein, 122 aa, Neisseria meningitidis
LVVYFYPKDSTPGCTTEGLDFNARLEQFEALGYTVVGISRDGVKAHQNFCAKQGFRFELLSDKDETVCRLFDVIKLKKLYGKESLGIERSTFVLNKDGEIAHEWRKVKVAGHAQEVLETLSR

SEQ ID NO: 12773 - protein, 209 aa, Neisseria meningitidis; identical to SEQ ID NO: 3318

SEQ ID NO: 12774 - protein, 296 aa, Neisseria meningitidis; identical to SEQ ID NO: 2814

SEQ ID NO: 12775 - protein, 197 aa, Neisseria meningitidis; identical to SEQ ID NO: 2243

SEQ ID NO: 12776 - protein, 258 aa, Neisseria meningitidis; identical to SEQ ID NO: 2504

SEQ ID NO: 12777 - protein, 321 aa, Neisseria meningitidis
MLRLTALTLCTVLALGACSPQNSDSAPQAKEQAVSAAQTEGASVTVKTARGDAKVPQNPERIAVYDLGMLDTLNKLGVKTGLSVNKNLLPYLDEYFKTTKPAGTLFEPDYEALNAYKPQLIIIGSRAAKAFDKLNEIAPTIEMTADTANLKESAKERIDALAQIFGKQAEADKLKAEIDASFEAAKTAAQGKGKGLVILVNGGKMSAFGPSSRLGGWLHKDIGVPAVDESIKEGSHGQPVSFEYLKEKNPDWLFVLDRSAAIGEEGQAAKDVLDNPLVAETTAWKKGQVVYLVPETYLAAGGAQELLNASKQVADAFNAAK

SEQ ID NO: 12778 - protein, 524 aa, Neisseria meningitidis
MKKSFLTLVLYSSLLTASEIAYRFVFGIETLPAAKIAETFALTFVIAALYLFARYKVTRLLIAVFFAFSIIANNVHYAVYQSWMTGINYWLMLKEVTEVGSAGASMLDKLWLPVLWGVLEVMLFCSLAKFRRKTHFSADILFAFLMLMIFVRSFDTKQEHGISPKPTYSRIKANYFSFGYFVGRVLPYQLFDLSRIPAFKQPAPSKIGQGSVQNIVLIMGESESAAHLKLFGYGRETSPFLTQLSQADFKPIVKQSYSAGFMTAVSLPSFFNVIPHANGLEQISGGDTNMFRLAKEQGYETYFYSAQAENQMAILNLIGKKWIDHLIQPTQLGYGNGDNMPDEKLLPLFDKINLQQGRHFIVLHQRGSHAPYGALLQPQDKVFGEADIVDKYDNTIHKTDQMIQTVFEQLQKQPDGNWLFAYTSDHGQYVRQDIYNQGTVQPDSYIVPLVLYSPNKAVQQAANQAFAPCEIAFHQQLSTFLIHTLGYDMPVSGCRESSVTGNLITGDAGSLNIRDGKAEYVYPQ

SEQ ID NO: 12779 - protein, 876 aa, Neisseria meningitidis; identical to SEQ ID NO: 2451

SEQ ID NO: 12780 - protein, 145 aa, Neisseria meningitidis; identical to SEQ ID NO: 2247

SEQ ID NO: 12781 - protein, 344 aa, Neisseria meningitidis; identical to SEQ ID NO: 10896

SEQ ID NO: 12782 - protein, 197 aa, Neisseria meningitidis; identical to SEQ ID NO: 3523

SEQ ID NO: 12783 - protein, 257 aa, Neisseria meningitidis; identical to SEQ ID NO: 3393

SEQ ID NO: 12784 - protein, 701 aa, Neisseria meningitidis
LTLYAVEELNYDKLDSQKRRRFLGISYSKAHDTTTQVMKTALPSRVVAESANLQSGWDTKLQGTQFETTLGGATIRAGVGEQARADAKIILEGIKSSIHTETVSSSKSALWQKQAGRGSNIETLQLPSFTGPVAPVLSAPGGYIVDIPKGNLKTQIETLTKQPEYAYLKQLQVAKNINWNQVQLAYDKWDYKQEGMTPAAAAVVVIVVTVLTYGALSAPAAAGTAGAAGAGAGGAAAGTAAGTGVAAGTAATTGVAAGTSAAAITTAAGKAALASLASQAAVSLINNKGDINHTLKELGKSSTVRQAATAAVTAGVLQGISGLNTQAAEAVSKHFHSPAAGKLTANLINSTAAASVHTAINGGSLKDNLGDAALGAIVSTVHGEVASKIKFNLSEDYIAHKIAHAIAGCAAAVANKGKCRDGAIGAAVGEMVGETLLDGRDVGKLSPQERQKVIAYSQIIAGSAVALVKGDVNTAANAATVAVENNSLLARRRVNIRWTPRQELEHEYAILEIQAITNQIRRLDPKFNGIAIMRNPREPWTRHDVQTYRQYYNQLRESRGIPVLPIYRMRINNGNEFNRIMSSKYPYNELYVANPKSVTGHFRVDSYNPATREIISRKFTQFSQIQESTGIGYIKEAVRKYSPGAVISNVPSTPASLRGRKLTGKLILEVPAQVNPIPQSVLRAAQEENVIIRDTTGRIYK

SEQ ID NO: 12785 - protein, 374 aa, Neisseria meningitidis; identical to SEQ ID NO: 2337

SEQ ID NO: 12786 - protein, 238 aa, Neisseria meningitidis; identical to SEQ ID NO: 8951

SEQ ID NO: 12787 - protein, 405 aa, Neisseria meningitidis; identical to SEQ ID NO: 3566

SEQ ID NO: 12788 - protein, 701 aa, Neisseria meningitidis; identical to SEQ ID NO: 1407

SEQ ID NO: 12789 - protein, 317 aa, Neisseria meningitidis; identical to SEQ ID NO: 2057

SEQ ID NO: 12790 - protein, 190 aa, Neisseria meningitidis
MDNHAEAHWQNGWLQSIRHTPSPNFSPRETGETVSLIVLHNISLPPFEYGTDAVEKLFANRLDPDGHPFFSLIHTLRVSSHFLIKRDGETVQFVSCDNMAYHAGVSSFRGREKCNAFSIGIELEGCDFEPFTEAQYRSLEALLDAICRRYPITAVTGHQDIAPGRKTDPGHFFDWRRIRGKGFPVDRNAV

SEQ ID NO: 12791 - protein, 144 aa, Neisseria meningitidis; identical to SEQ ID NO: 2747

SEQ ID NO: 12792 - protein, 299 aa, Neisseria meningitidis; identical to SEQ ID NO: 167

SEQ ID NO: 12793 - protein, 159 aa, Neisseria meningitidis; identical to SEQ ID NO: 3392

SEQ ID NO: 12794 - protein, 630 aa, Neisseria meningitidis; identical to SEQ ID NO: 2275

SEQ ID NO: 12795 - protein, 97 aa, Neisseria meningitidis; identical to SEQ ID NO: 1934

SEQ ID NO: 12796 - protein, 494 aa, Neisseria meningitidis; identical to SEQ ID NO: 2766

SEQ ID NO: 12797 - protein, 394 aa, Neisseria meningitidis
MAKEKFERSKPHVNVGTIGHVDHGKTTLTAALTTILAKKFGGAVKAYDQIDNAPEEKARGITINTSHVEYETETRHYAHVDCPGHADYVKNMITGAAQMDGAILVCSAADGPMPQTREHILLARQVGVPYIIVFMNKCDMVDDAELLELVEMEIRDLLSSYDFPGDDCPIVQGSALKALEGDAAYEEKIFELAAALDSYIPTPERAVDKPFLLPIEDVFSISGRGTVVTGRVERGIIHVGDEIEIVGLKETQKTTCTGVEMFRKLLDEGQAGDNVGVLLRGTKREDVERGQVLAKPGTITPHTKFKAEVYVLSKEEGGRHTPFFANYRPQFYFRTTDVTGAVTLEEGVEMVMPGENVTITVELIAPIAMEEGLRFAIREGGRTVGAGVVSSVIA

SEQ ID NO: 12798 - protein, 122 aa, Neisseria meningitidis; identical to SEQ ID NO: 3130

SEQ ID NO: 12799 - protein, 262 aa, Neisseria meningitidis; identical to SEQ ID NO: 3346

SEQ ID NO: 12800 - protein, 225 aa, Neisseria meningitidis; identical to SEQ ID NO: 1002

SEQ ID NO: 12801 - protein, 56 aa, Neisseria meningitidis; identical to SEQ ID NO: 2971

SEQ ID NO: 12802 - protein, 582 aa, Neisseria meningitidis; identical to SEQ ID NO: 6919

SEQ ID NO: 12803 - protein, 203 aa, Neisseria meningitidis
MKNNDCFRLKNPQSGMALIEVLVAMLVLTIGILALLSVQLRTVASVREAETQTIVSQITQNLMEGMLMNPTIDSDSNKKNYNLYMGNHTLSAVDGDFQVDAIKTKTQLAEAQLKRFSYELKNALPDAAAIHYAVCKDSSGVAPTLSAGSTFSSNCDASANGDTLIKVLWVNDSAGDSDINRTDLETNGNNIVYTYQARVGGRE

SEQ ID NO: 12804 - protein, 319 aa, Neisseria meningitidis; identical to SEQ ID NO: 2892

SEQ ID NO: 12805 - protein, 328 aa, Neisseria meningitidis; identical to SEQ ID NO: 2206

SEQ ID NO: 12806 - protein, 401 aa, Neisseria meningitidis; identical to SEQ ID NO: 2387

SEQ ID NO: 12807 - protein, 385 aa, Neisseria meningitidis; identical to SEQ ID NO: 3222

SEQ ID NO: 12808 - protein, 390 aa, Neisseria meningitidis
MNITIVAPYCSLPSEPYFNRFWYLAERLSQSHDVLLITSRFRHYDKSFRRHEDAAATSNGRLRVKLLDEPGYRKNVSLARVASHRVFVRNLARWLHSPQAAEQDIVYSAYPLMATNLLLGKHKARLGYKLIVDVQDVWPESFSSVVPFLKKVPHKLLPFARRADRAYRCADALVAVSQTYLDRTKEANPDVPAEAVCIGADFAAIASAPAKDFGNSTTRFFYFGTLSHSYDVDTACRGIQKLLDSGKNVELHIMGGGPDLEKLKQHENRAIKFYGYLPYADMISIAKGCDIAVNAIHSHAMQSVTNKLSDYMALQKPILNSQTNAEVLSLLNLLPHENYRSGDVDSFVQAAKDILKRKNDPVQSDEIVRRFRRDISYRKIVNLIERLANE

SEQ ID NO: 12809 - protein, 384 aa, Neisseria meningitidis; identical to SEQ ID NO: 2745

SEQ ID NO: 12810 - protein, 451 aa, Neisseria meningitidis; identical to SEQ ID NO: 2767

SEQ ID NO: 12811 - protein, 1454 aa, Neisseria meningitidis; identical to SEQ ID NO: 8488

SEQ ID NO: 12812 - protein, 945 aa, Neisseria meningitidis; identical to SEQ ID NO: 3263

SEQ ID NO: 12813 - protein, 315 aa, Neisseria meningitidis; identical to SEQ ID NO: 2810

SEQ ID NO: 12814 - protein, 288 aa, Neisseria meningitidis
MKGIILAGGSGTRLYPITRGVSKQLLPVYDKPMIYYPLSVLMLAGIRDILVITAPEDNASFKRLLGDGSDFGISISYAVQPSPDGLAQAFIIGEEFIGNDNVCLVLGDNIFYGQSFTQTLKQAAAQTHGATVFAYQVKNPERFGVVEFNENFRAVSIEEKPQRPKSDWAVTGLYFYDNRAVEFAKQLKPSARGELEISDLNQMYLEDGSLSVQILGRGFAWLDTGTHESLHEAASFVQTVQNIQNLHIACLEEIAWRNGWLSDEKLEELARPMAKNQYGQYLLRLLKK

SEQ ID NO: 12815 - protein, 89 aa, Neisseria meningitidis; identical to SEQ ID NO: 9425

SEQ ID NO: 12816 - protein, 171 aa, Neisseria meningitidis; identical to SEQ ID NO: 2424

SEQ ID NO: 12817 - protein, 409 aa, Neisseria meningitidis; identical to SEQ ID NO: 2282

SEQ ID NO: 12818 - protein, 171 aa, Neisseria meningitidis; identical to SEQ ID NO: 2741

SEQ ID NO: 12819 - protein, 185 aa, Neisseria meningitidis; identical to SEQ ID NO: 313

SEQ ID NO: 12820 - protein, 194 aa, Neisseria meningitidis; identical to SEQ ID NO: 2828

SEQ ID NO: 12821 - protein, 915 aa, Neisseria meningitidis
MQQQHLFRLNILCLSLMTALPVYAENVQAGQAQEKQLDTIQVKAKKQKTRRDNEVTGLGKLVKTADTLSKEQVLDIRDLTRYDPGIAVVEQGRGASSGYSIRGMDKNRVSLTVDGLAQIQSYTAQAALGGTRTAGSSGAINEIEYENVKAVEISKGSNSVEQGSGALAGSVAFQTKTADDVIGEGRQWGIQSKTAYSGKNRGLTQSIALAGRIGGAEALLIHTGRRAGEIRAHEDAGRGVQSFNRLVPVEDTNQYANFIVEEECESGSYETCKANPKKDVVGKDERQTVSTRDYTGPNRFLADPLSYESRSWLFRPGFRFENKRHYIGGILERTQQTFDTRDMTVPAFLTKAVFDANKKQAGSLSGNGKYAGNHKYGGLFTNGENGALVGAEYGTGVFYDETHTKSRYGLEYVYTNADKDTWADYARLSYDRQGIGLDNHFQQTHCSADGSDKNCRPSADKPFSYYKSDRVIYGESHRLLQAAFKKSFDTAKIRHNLSVNLGFDRFGSNLRHQDYYFQNAKRAYSLKTPPKNGNKNISPNGSTNNPYWVSIGGGNVVTGQICRLGNNTYTDCTPRSINGKSYYAAVRDNVRLGRWADVGAGLRYDYRSTHSDDGSVSTGTHRTLSWNAGIVLKPADWLDLTYRTSTGFRLPSFAEMYGWRAGVQSKAVKIDPEKSFNKEAGIVFKGDFGNLEASWFNNAYRDLIVRGYEAQIKNGKEEAKGDPAYLNAQSARITGINILGKIDWNGVWDKLPEGWYSTFAYNRVRVRDIKKRADRTDIQSHLFDAIQPSRYVVGLGYDQPEGKWGVNGMLTYSKAKEITELLGSRALLNGNSRNTKATARRTRPWYIVDVSGYYTIKKHFTLRAGVYNLLNHRYVTWENVRQTAGGAVNQHKNVGVYNRYAAPGRNYTFSLEMKF

SEQ ID NO: 12822 - protein, 231 aa, Neisseria meningitidis; identical to SEQ ID NO: 1993

SEQ ID NO: 12823 - protein, 211 aa, Neisseria meningitidis
MSETENQALTFAKRLKADTTAVHDSVDNLVMSVQPFVSKENYIKFLKLQSVFHKAVDHIYKDAELNKAIPELEYMARYDAVTQDLKDLGEEPYKFDKELPYETGNKAIGWLYCAEGSNLGAAFLFKHAQKLDYNGEHGARHLAPHPDGRGKHWRAFVEHLNALGLSPEAEAEAIQGAREAFAFYKVVLRETFGLAADAEAPEGMMPKHRKE

SEQ ID NO: 12824 - protein, 187 aa, Neisseria meningitidis; identical to SEQ ID NO: 3051

SEQ ID NO: 12825 - protein, 56 aa, Neisseria meningitidis
MAQYMCGPCGWIYDEEHGDPEHGIAPGTKFEDIPDDWKCPECGVDKEDFYLLDFVI

SEQ ID NO: 12826 - protein, 736 aa, Neisseria meningitidis
MKTDIQTELTQALLSHEKVWANEEKTILAKNILLDLVEKTDPTIIGLLLNNDELKRHFFVEVNGVLVFKLQDLRFFLDKHSVNNSYTKYANRIGLTDGNRFLKDNSDIVLDFPFKDCVLNGGQSTEEGEEIYFKRSNSQPASQPASQPASQPASQPASQPASQLYTKLTRKRQEIFFNQTLAFDEIDRLFDAKAFSKFSRHTADGKQAVGEIKRHSDGTPAENLIIKGNNLIALHSLATQFKGKVKLIYIDPPYYFVKKKQQDSFGYNTNFKLSTWLTFMKNRLSIAKELLTDDGIIVISIDDDGNAYLKILLDEIFGFENFIGNLPTIMNLKGNNDEYAFAGTHEYTLVFAKNKDKSTFYEFPIDEDNFLEKWEEDEIGFYKKGAPMRATGTEDKREDRPEMFYPFLVKNNTVSTITDEEFSQIYNKDLEVFNDDFIQKLKEKYENLGYNFILPIADKQWGRWRWGYSIKNKARLQTDIIVSQSKNGISLYKKQRPELDDLPTKKPKTIFYKPEYSSGNGTEQMKNLFGEKAFKNPKPEELIQDFITITTNESDIVLDYHLGSGTTAAVAHKMNRQYIGIEQMDYIETLAVERLKKVIDGEQGGISKAVNWQGGGEFVYAELAPFNETAKQQILACEDSDGIKTLFEGLCERYFLKYNVSVNEFSQIIQEPEFQSLALDEQKQMVLEMLDLNQMYVSLSEMDDEQFAGCLNDDDKALSREFYQSAKNQAEKKDGE

SEQ ID NO: 12827 - protein, 134 aa, Neisseria meningitidis; identical to SEQ ID NO: 4298

SEQ ID NO: 12828 - protein, 148 aa, Neisseria meningitidis; identical to SEQ ID NO: 2018

SEQ ID NO: 12829 - protein, 258 aa, Neisseria meningitidis; identical to SEQ ID NO: 3186

SEQ ID NO: 12830 - protein, 633 aa, Neisseria meningitidis; identical to SEQ ID NO: 2852

SEQ ID NO: 12831 - protein, 906 aa, Neisseria meningitidis
MGVMLYHHSYAEDAGRAGSEAQIQVLEDVHVKAKRVPKDKKVFTDARAVSTRQDIFKSSENLDNIVRSIPGAFTQQDKSSGIVSLNIRGDSGFGRVNTMVDGITQTFYSTSTDAGRAGGSSQFGASVDSNFIAGLDVVKGSFSGSAGINSLAGSANLRTLGVDDVVQGNNTYGLLLKGLTGTNSTKGNAMAAIGARKWLESGASVGVLYGHSRRSVAQNYRVGGGGQHIGNFGAEYLERRKQRYFVQEGALKFNSDSGKWERDLQRQQWKYKPYKNYNNQELQKYIEEHDKSWRENLAPQYDITPIDPSSLKQQSAGNLFKLEYDGVFNKYTAQFRDLNTKIGSRKIINRNYQFNYGLSLNSYANLNLTAAYNSGRQKYPKGSKFTGWGLLKDFETYNNAKILDLNNTATFRLPRETELQTTLGFNYFHNEYGKNRFPEELGLFFDGPDQDNGLYSYLGRFKGDKGLLPQKSTIVQPAGSQYFNTFYFDAALKKDIYRLNYSTNTVGYRFGGEYTGYYGSDDEFKRAFGENSPTYKKHCNPSCGLYEPVLKKYGKKRANNHSVSISADFGDYFMPFAGYSRTHRMPNIQEMYFSQIGDSGVHTALKPERANTWQFGFNTYKKGLLKQDDTLGLKLVGYRSRIDNYIHNVYGKWWDLNGNIPSWVSSTGLAYTIQHRNFKDKVHKHGFELELNYDYGRFFTNLSYAYQKSTQPTNFSDASESPNNASKEDQLKQGYGLSRVSALPRDYGRLEVGTRWLGNKLTLGGAMRYFGKSIRATAEERYIDGTNGGNTSNFRQLGKRSIKQTETLARQPLIFDFYAAYEPKKNLIFRAEVKNLFDRRYIDPLDAGNDAATQRYYSSFDPKDKDEDVTCNADGLCNGKYGGTSKSVLTNFARGRTFLMTMSYKF

SEQ ID NO: 12832 - protein, 967 aa, Neisseria meningitidis
LGQQNNFISFDNTDTLVSQQSGTAVFGTATYLPPYGKVSGFDADGLEKRNNAVDWIRTTRIALAGYRYDNVVCRSTTDCPKLVYKTRFSFDNPDLAKTGVGLDKHTEPSRDNSPIYKLKDHPWLGVSFNLGAEGTAKNGKTINKLVSSFNEKNSNNNLVYTTEGRDISLGDWQRETTAMAYYLNAKLHLLDKKGIKDIAQGKTVDLGTLRPRVETTGRSWLNFWAKWDIKDNGQIPVKLGLPEVKAGRCINKANPNPKAQALSPALTAPALWFGAGQDGKAEMYSASVSTYPDSSSSRIFLQNLKRKNDPNKPGRYSLADLSASDIQSKEPTFTSRQTIIRLDGGVQQIKLDKSNEATGLNGNDGKNDTFGIVSEGSFTTDVNEWKKVLLPWTVRGSADDGRFKSINQESSKYSQRYRIRENGNNSKRDLGDIVNSPIVAVGEYLATSANDGMVHIFKQSGRDKRSYNLKLSYIPGTMPRQYFDNDTSALKDSTLAKELRTFAEKGYVGDRYGVDGGFVLRRITDDQDKQKHFFMFGAMGLGGRGAYALDLTKADSNNPTAVSLFDVKNGNNGKNSNNSNNSVQLGYTVGTPQIGKTHNGKYAAFLASGYATKDINNGDNKTALYVYDLESNNGTPIAKIEVPNGKGGLSSPTLVDKDLDGTVDIAYAGDRGGSMYRFDLSGNNPTSWSARAIFSGNKPITSAPAISQLKDKRVVIFGTGSDLSEEDVDSKEIQHVYGIFDNDTDTGTAQDGQGKGLLEQKLEKDKDGKTLFLSDYKRSDGSGDKGWVVKLEAGQRVTVKPTVVLRTAFVTIHKYTGNDKCGAETAILGINTADGGKLTKKSARPIVPADNTAVAQYSGHKQTAKGKSIPIGCMEKNNGIVCPNGYVYDKPVNVRYLDEKKTDGFSTTADGDAGGSGTFKEGKKPARNNRCFSGKGVRTLLMNDLDSLDITGPTCGMKRISWREVFY

SEQ ID NO: 12833 - protein, 96 aa, Neisseria meningitidis; identical to SEQ ID NO: 3273

SEQ ID NO: 12834 - protein, 687 aa, Neisseria meningitidis; identical to SEQ ID NO: 2239

SEQ ID NO: 12835 - protein, 618 aa, Neisseria meningitidis; identical to SEQ ID NO: 1958

SEQ ID NO: 12836 - protein, 133 aa, Neisseria meningitidis; identical to SEQ ID NO: 2156

SEQ ID NO: 12837 - protein, 216 aa, Neisseria meningitidis; identical to SEQ ID NO: 3431

SEQ ID NO: 12838 - protein, 220 aa, Neisseria meningitidis
MIQAVLFDLDGTLADTALDLGGALNTLLARHGLPAKSMDEIRTQASHGAAGLIKLGAGITPDHPDYARWRTEYLEEYDRRYAQDTELFDGVNELIAELNQRGIKWGIITNKPMRFTDKLVPKLGFIIPPAVVVSGDTCGEPKPSIKPMLYACGQIHADPQHTLYVGDAERDIQAGRNAGMKTVLAEWGYISDEDDTGSWQADFHIRTPLDLLECLDKIQP

SEQ ID NO: 12839 - protein, 151 aa, Neisseria meningitidis; identical to SEQ ID NO: 4206

SEQ ID NO: 12840 - protein, 105 aa, Neisseria meningitidis; identical to SEQ ID NO: 2941

SEQ ID NO: 12841 - protein, 659 aa, Neisseria meningitidis
MHPIETPDKTFHDGDGVSELGTILPAWWLNQVQSELLAVLTAAGIQPDKSQPNQLLAALNRLAVVTTGNQEIGGQKTFTAQTQFQSGIHLSANQTNWNGGHKAYIGADADNAHIVFGDDTLRLHGANNRISYNNHDIFHKANKPRFAEDIEGKPNTLSGYGIGNFKVETFRGDLNTLKTDGIYSLSTAVGSSNLPVENTACHIQVIAGTKHGWCRQLGYPAYTSDVYERHQTSSANDNWSAWKKLNSDGIPVGAIVSFPKAVRNPAGYLKANGTTFAQNTFPDLYRALGNSNRLPDLSRTDIGMTAWFPSDQIPTGWLAFDDIRTRVTETAYPELYRLLTGKYGSIQNVPQAEDRFIRNAGNGLAVGTKQEDEIKRHVHKVFSHWTNHTDAAALGYEDHNERQRSALVSTWTDGDLNDNGFLTPRPDSKMATGGDENRPKALVLKLCIKAADTLGEAVFWIKSHGETINVGALDAGTLAQNLQDKADRAHTHTAAQIQGLDEKISTAVAAQFTRQTIGGVDIVRFPDGTMIQTGSYRFTRSGGPIENEVVFPVAFADGNVKCFVSERHSGRVTGDRRQHNWLFIRAKNHAAAIITNWYEGSCDWMAIGKAASGNAASSPIVPEIPETNEEPQRESGRTSTGPRNRRRRRRDGLLEALQD

SEQ ID NO: 12842 - protein, 219 aa, Neisseria meningitidis; identical to SEQ ID NO: 2874

SEQ ID NO: 12843 - protein, 470 aa, Neisseria meningitidis
MLLLPLLASAAYAEETPREPDLRSRPEFRLHEAEAKPIDREKVPGQVREKGKVLQIDGETLLKNPELLSRAMYSAVVSNNIAGIRVILPIYLQQAQQDKMLALYAQGILAQADGRVKEAISHYRELIAAQPDAPAVRMRLAAALFENRQNEAAADQFDRLKAENLPPQLMEQVELYRKALRERDAWKVNGGFSVTREHNINQAPKRQQYGKWTFPKQVDGTAVNYRLGAEKKWSLKNGWYTTAGGDVSGRVYPGNKKFNDMTAGVSGGIGFADRRKDAGLAVFHERRTYGNDAYSYTNGARLYFNRWQTPKWQTLSSAEWGRLKNTRRARSDNTHLQISNSLVFYRNARQYWMGGLDFYRERNPADRGDNFNRYGLRFAWGQEWGGSGLSSLLRLGAAKRHYEKPGFFSGFKGERRRDKELNTSLSLWHRALHFKGITPRLTLSHRETRSNDVFNEYEKNRAFVEFNKTF

SEQ ID NO: 12844 - protein, 414 aa, Neisseria meningitidis; identical to SEQ ID NO: 2028

SEQ ID NO: 12845 - protein, 389 aa, Neisseria meningitidis
MPQIKIPAVYYRGGTSKGVFFKRSDLPEAAREAGSARDKILLRVLGSPDPYGKQIDGLGNASSSTSKAVILDKSERADHDVDYLFGQVSIDKPFVDWSGNCGNLTAAVGAFAIEQGLVDKGKIPSDGICTVKIWQKNIGKTIIAHVPMQNGAVLETGDFELDGVTFPAAEVQIEFLDPADGEGSMFPTGNLVDEIDVPNIGRLKATLINAGIPTVFLNAADLGYTGQELQDDINNDAAALEKFETIRAYGALKMGLISDVSEAATRAHTPKVAFVAPAADYTASSGKTVQAADIDLLVRALSMGKLHHAMMGTASVAIATAAAVPGTLVNLAAGGGARKEVRFGHPSGTLRVGAAAECQDGQWTATKAVMSRSARVMMEGWVRVPEDCF

SEQ ID NO: 12846 - protein, 37 aa, Neisseria meningitidis
MEWNIFSDWKWDWEIQVGYCNGFYPCLHRACRLKMPS

SEQ ID NO: 12847 - protein, 64 aa, Neisseria meningitidis; identical to SEQ ID NO: 2003

SEQ ID NO: 12848 - protein, 67 aa, Neisseria meningitidis; identical to SEQ ID NO: 11709

SEQ ID NO: 12849 - protein, 216 aa, Neisseria meningitidis; identical to SEQ ID NO: 2708

SEQ ID NO: 12850 - protein, 753 aa, Neisseria meningitidis; identical to SEQ ID NO: 2818

SEQ ID NO: 12851 - protein, 306 aa, Neisseria meningitidis; identical to SEQ ID NO: 3963

SEQ ID NO: 12852 - protein, 329 aa, Neisseria meningitidis; identical to SEQ ID NO: 247

SEQ ID NO: 12853 - protein, 321 aa, Neisseria meningitidis; identical to SEQ ID NO: 2168

SEQ ID NO: 12854 - protein, 189 aa, Neisseria meningitidis; identical to SEQ ID NO: 2163

SEQ ID NO: 12855 - protein, 269 aa, Neisseria meningitidis
MIQDTRPLIRVVAGILLDSDGNYLLSSRPEGKPYAGYWEFAGGKVEAGETDFQALQREFEEELGIRILAATPWLTKIHSYEHARVCLKFLWVNPGQWTGEPQSREGQAWSWQKAGDFTVAPMLPANGALLRSLSVPRRLYGSLKTGLHGENSMGAYRVLPLGSAEESGANVLMEAAQWQDRPEHADSVWMMVQTREQWRQAQEKGADVVVWRVCNDVQAQEAAEALRQGVSVPLVLAANGQTVARYGKLWLGLGAHVVVRDETIGKNHE

SEQ ID NO: 12856 - protein, 268 aa, Neisseria meningitidis; identical to SEQ ID NO: 3321

SEQ ID NO: 12857 - protein, 83 aa, Neisseria meningitidis; identical to SEQ ID NO: 925

SEQ ID NO: 12858 - protein, 277 aa, Neisseria meningitidis; identical to SEQ ID NO: 2920

SEQ ID NO: 12859 - protein, 525 aa, Neisseria meningitidis
MSKAVKRLFDIIASASGLIVLSPVFLILAYLIRKNLGSPVFFIQERPGKDGKPFKMVKFRSMRDALDSDGIPLPDSERLTPFGKKLRAASLDELPELWNVLKGDMSLVGPRPLLMQYLPLYDNFQNRRHEMKPGITGWAQVNGRNALSWDEKFACDVWYIDHYSFWLDMKILFLTVRKVFIKEGISAEGEATMPYFTGNQTNEKNNILILSAGRRVELVQDFQTEAARFSDGISVFATDLNPRMSSACHVSDGSFEVPPISADSYIDSIFNLAVRENIGLIIPTIDTELQKLADERERFEAASVHIVVSDSDFIAQCRDKRKTATLFARYGIRSPEIYDRKKLVFPCFAKPYDGSRAIGAKRIDTPADLTPEVLADTKLMFCQFIDIENKFSEFTVDMYYDRQCRLKCAIPRKRLEVRSGEISKGVTCKNSLYQTLLEKMAVLQGARGCITAQFFYNEETGEFYGVEINPRFGGGFPLTYAAGGNYPSRLMREYLGDEEIPFSDDWENNLIMLRYDAKVLVHEND

SEQ ID NO: 12860 - protein, 140 aa, Neisseria meningitidis; identical to SEQ ID NO: 1122

SEQ ID NO: 12861 - protein, 210 aa, Neisseria meningitidis; identical to SEQ ID NO: 3262

SEQ ID NO: 12862 - protein, 179 aa, Neisseria meningitidis; identical to SEQ ID NO: 2726

SEQ ID NO: 12863 - protein, 107 aa, Neisseria meningitidis; identical to SEQ ID NO: 2106

SEQ ID NO: 12864 - protein, 680 aa, Neisseria meningitidis; identical to SEQ ID NO: 3072

SEQ ID NO: 12865 - protein, 210 aa, Neisseria meningitidis; identical to SEQ ID NO: 5679

SEQ ID NO: 12866 - protein, 1033 aa, Neisseria meningitidis
VQSQGMRRYLNTCLARDLGVAANLSFSLPAGLTWKLMKKLIPGIPELSPFAPEVMRWRLLDLFRSEAFRNTAEFEDVRNVLQDYLGSGESADYQLAGQLADIFDQYLVYRPQWIDAWQQGRRLGLGDDEIWQSKLWRYLDDGRQSAPHRVALWEKLLESLSSDKLPERYFVFGISTMAPMYLQLLHKLSEHCDVFVFALNPSGMYWGNVIEAAQILKGGGDPDLTQAGHPLLASLGKQGRDFFDFLNEMEIEEETPVFEEGSRDTLLHALQTDIQNLDMPSEKAGNINTDDGSIRIVSAHSPLRELQILKDKLLKILHEHPDWQPHDIAVLTPNIESYTPFIEAVFGQAQPGAQALPYSVSDVKISRRQPLFHALSCLFDLLESRFEVDKVLVLLETAPVLRRFGLTEDDLPLLHDMVADLNVHWGLDGEMRGGTDQLFTWKQAVERMILGWMLPEGGNPMWQDVSAWYADVNQTALFGRFAALLETLSDIVRIWRQPATIGEWVARCRDLLETLFQAEADDQKSVQNLENEWVKWQAETELAQFSRQLPQQTVIRHIRRFLDSESEAGFLRGGITFCSMVPMRSLPFKVICLLGLNDGDFPRNTKAAVFDLIAKHPAKGDRARRDDDRYLFLEALISAREILYLSYIGRDIRKDEELAPSSLLGELIDTVAAMTGTNSRQLAQNWIEQHPLQAFSRRYFQEGGRSDGIFGTRTDYAAALGQTPEPPQPFFDQPVENAEPVAEIGQDEFIRFWRNPVKVWLQQQLAWSEPHIGEAWEPAEPFEPQHADQIAKTYIEARREGRDFSQTAARIGAESLLPSGELGRLWQQDFQTAAKQIDTAVLNSPKLPPLSYAIPSDGQILKGSLGNLYRCGQVFYAYGKPNAPQRIAFLLEHLIFCAVMPSETETRQTFIVQSGETEILAEIAQDRALQLLSEWMAFFNIGQNRPLPFFAKTSLAAAEAFAQKQDWEAALKKAQTAYHGNKVSKGQKDYTEVALVFGNASQNPLEQPLFENLVRLLADTFAAAEKKEEAGEA

SEQ ID NO: 12867 - protein, 375 aa, Neisseria meningitidis
MNTSQRNRLVSRWLNSYERYRYRRLIHAVRLGGAVLFATASARLLHLQHGEWIGMTVFVVLGMLQFQGAIYSKAVERMLGTVIGLGAGLGVLWLNQHYFHGNLLFYLTVGTASALAGWAAVGKNGYVPMLAGLTMCMLIGDNGSEWFDSGLMRAMNVLIGAAIAIAAAKLLPLKSTLMWRFMLADNLTDCSKMIAEISNGRRMTRERLEENMAKMRQINARMVKSRSHLAATSGESRISPAMMEAMQHAHRKIVNTTELLLTTAAKLQAPKLNSGEIRLLDRHFTQLQTDLQQTVALINGRHARRIRIDTAINPELEALAEHLHYQWQGFLWLSTNMRQEISALVILLQRTRRKWLDAHERQHLRQSLLETREHG

SEQ ID NO: 12868 - protein, 398 aa, Neisseria meningitidis
MQNYLTPNFAFAPMIPERASGSRVWDTKGREYIDFSGGIAVNALGHCHPALVDALNAQMHKLWHISNIYTTRPAQELAQKLVANSFADKVFFCNSGSEANEAALKLARKYARDRFGGGKSEIVACINSFHGRTLFTVSVGGQPKYSKDYAPLPQGITHVPFNDIAALEAAVGEQTCAVIIEPIQGESGILPATAEYLQTARRLCDRHNALLILDEVQTGMGHTGRLFAYEHYGVVPDILSSAKALGCGFPIGAMLATETIAAAFQPGTHGSTFGGNPMACAVGSRAFDIINTPETLNHVREQGQKLQTALLDLGRKTGLFSQVRGMGLLLGCVLDEAYRGRASEITAAALKHGVMILVAGADVLRFAPSLLLNDEDMAEGLRRLEHALTEFAATSDNP

SEQ ID NO: 12869 - protein, 161 aa, Neisseria meningitidis; identical to SEQ ID NO: 1189

SEQ ID NO: 12870 - protein, 498 aa, Neisseria meningitidis
MFSNYLLSLAIWIPIAAGVLVLSTGKDSRAPLARVLAFMGALAGFLVTLPLFTGFDRLSGGYQFTEFHEWIPLLKINYALGVDGISVLFIILNAFITLLVVLAGWEVIQKRPAQYMAAFLMMSGLINGAFAAQDAILFYVFFEGMLIPLYLIIGVWGGPRRVYASVKLFLYTLMGSLLMLVAMVYLYYQTGSFSIVDFQNIKQIPLGVQQLLFVAFFLSFAVKVPMFPVHTWLPDAHVEAPTGGSMVLAAITLKLGAYGFLRFILPIMPDAARYFAPVIIVLSLIAVIYIGMVALVQTDMKKLVAYSSISHMGFVTLGMFLFVDGQLDDWALKGAIIQMISHGFVSAAMFMCIGVMYDRLHTRNIADYGGVVNVMPKFAAFMMLFGMANAGLPATSGFVGEFMVIMGAVKVNFWVGALAAMTLIYGASYTLWMYKRVIFGAIHNPHVAEMKDINCREFAILAILAVVVLGMGLYPNAFIEVVHQAANDLIAHVAQSKI

SEQ ID NO: 12871 - protein, 365 aa, Neisseria meningitidis; identical to SEQ ID NO: 2620

SEQ ID NO: 12872 - protein, 81 aa, Neisseria meningitidis; identical to SEQ ID NO: 2565

SEQ ID NO: 12873 - protein, 92 aa, Neisseria meningitidis; identical to SEQ ID NO: 32

SEQ ID NO: 12874 - protein, 446 aa, Neisseria meningitidis
MLNPSRKLVELIRILDEGGFIFSGDPVQATEALRRVDGSTEEKIIRRAEMIDRNRMLRDTLERVRAGSFWLWVAAATFAFFTGFSGTYLLMDNQGLNFFLVLAGVLGMNTLMLAVWLAMLFLRVKVGRFFSSPATWFRGKDPVNQAVLRLYADEWRQPSVRWKIGATSHSLWLCTLLGMLVSVLLLLLVRQYTFNWESTLLGDSSSVRLVEMLAWLPAKLGFPVPDARAVIEGRLNGNIADARAWSGLLVGSIACYGILPRLLAWAVCKILLKTSENGLDLEKPYYQAVIRRWQNKITDADTRRETVSAVSPKIVLNDAPKWAVMLETEWQDGEWFEGRLAQEWLDKGVAANREQVAALETELKQKPAQLLIGVRAQTVPDRGVLRQIVRLSEAAQGGAVVQLLAEQGLSDDLSEKLEHWRNALTECGAAWLEPDRAAQEGRLKDQ

SEQ ID NO: 12875 - protein, 188 aa, Neisseria meningitidis; identical to SEQ ID NO: 2033

SEQ ID NO: 12876 - protein, 213 aa, Neisseria meningitidis; identical to SEQ ID NO: 8153

SEQ ID NO: 12877 - protein, 196 aa, Neisseria meningitidis; identical to SEQ ID NO: 2662

SEQ ID NO: 12878 - protein, 539 aa, Neisseria meningitidis; identical to SEQ ID NO: 2149

SEQ ID NO: 12879 - protein, 273 aa, Neisseria meningitidis; identical to SEQ ID NO: 2680

SEQ ID NO: 12880 - protein, 351 aa, Neisseria meningitidis; identical to SEQ ID NO: 3732

SEQ ID NO: 12881 - protein, 395 aa, Neisseria meningitidis
MTEDERFAWLQLAFTPYIGAESFLLLMRRFGSAQNALSAPAEQVAPAVRHKQAAEAWRNAEKRALARQAAEAALEWEMRDGCRLMLLQDEDFPEMLTQGLTAPPVLFLRGNVRLLHKPSAAIVGSRHATPQAMRIAKDFGKSLGGQNIPVVSGMASGIDTAAHQGALEAEGGTIAVWGTGIDRIYPPSNKNLAYEIAEKGLIVSEFPIGTRPYAGNFPRRNRLIAALSQVTLVVEAALESGSLITAGLAAEMGREVMAVPGSIDNPHSKGCHKLIKDGAKLVECLDDILNECPGLLQNTGASSYSINKDTPDTGRRAVQTAYAPPPAAKMPSEGAAGGTAVGGILDKMGFDPIHPDVLAGQLAMPAADLYAALLELELDGSVAAMPGGRYQRIRT

SEQ ID NO: 12882 - protein, 170 aa, Neisseria meningitidis; identical to SEQ ID NO: 1571

SEQ ID NO: 12883 - protein, 227 aa, Neisseria meningitidis; identical to SEQ ID NO: 94

SEQ ID NO: 12884 - protein, 389 aa, Neisseria meningitidis
MDNELWIILLPIILLPVFFAMGWFAARVDMKTVLKQAKSIPSGFYKSLDALVDRNSGRAARELAEVIDQQPQSYDLNLTLGKLYRQRGENDKAINMHQTLLDSPDTTGAKRARVLFELAQNYQSAGLVDRAEQIFLGLQDGKMAREARQHLLNIYQQDRDWEKAVETARLLSHDEQTYQFEIAQFYCELAQAALFKSNFDAARFNVGKALEANKKCTRANMILGDIEHRQGNFPAAVEAYAAIEQQNHAYLSMVGEKLYEAYAAQGKPEEGLNRLTGYMQTFPELDLINVVYEKSLLLKGEKEAAQTAVELVRRKPDLNGVYRLLGLKLSDMNPAWKADADMMRSVIGRQLQRSVMYRCRNCHFKSQVFFWHCPACNKWQTFTPNKIEV

SEQ ID NO: 12885 - protein, 92 aa, Neisseria meningitidis; identical to SEQ ID NO: 2722

SEQ ID NO: 12886 - protein, 281 aa, Neisseria meningitidis; identical to SEQ ID NO: 8149

SEQ ID NO: 12887 - protein, 179 aa, Neisseria meningitidis; identical to SEQ ID NO: 8483

SEQ ID NO: 12888 - protein, 158 aa, Neisseria meningitidis; identical to SEQ ID NO: 5652

SEQ ID NO: 12889 - protein, 275 aa, Neisseria meningitidis
MPELPEVETTLRGIAPHIEGKTVEAVVLRQLKLRWQINPDLGEILSGRQVLSCGRRAKYLIVRFQTGILLIHLGMSGSLRIFTPSDGRIGRPDRHDHVDIVFSDGTVMRYRDPRKFGAILWYEGIEEHHPLLEKLGPEPLSEAFCADYLYVRLKAQKRAVKLALMDNAVVVGVGNIYANESLFRAGISPHRPANRLKKKECALLVETVKAVLRRAIETGGSTLRDFVDSDGKSGYFQQEYTVYGRHNQPCPQCGGLVVKETLGQRGTFYCPNCQK

SEQ ID NO: 12890 - protein, 119 aa, Neisseria meningitidis
LEFSMNRTKTCKECGEIKPITAFPKNGFDRKTGLQKYAPRCRRCHNVYQQDLLYKRREKEFEQKQAVMAALMDAEREKEEAAKARSIAQSLVLAKAACPILHIGLWTEPLFIPQGMLQI

SEQ ID NO: 12891 - protein, 2026 aa, Neisseria meningitidis
MNKGLHRIIFSKKHSTMVAVAETANSQGKGKQAGSSVSVSLKTSGDLCGKLKTTLKTLVCSLVSLSMVLPAHAQITTDKSAPKNQQVVILKTNTGAPLVNIQTPNGRGLSHNRYTQFDVDAKGAVLNNDRNNNPFLAKGSAQLILNEVRGAASKLNGIVTVGGQKADVIIANPNGITVNGGGFKNVGRGILTTGAPQIGKDGALTGFDVRQGTLTVGAAGWNDKGGADYTEILARAVALQGKLQGKNLAVSTGPQKVDYASGEISAGTAAGTKPTIALDTAALGGMYADSITLIANEKGVGVKNAGTLEAAKQLIVTSSGRIENSGRIATTADGTEASPNYLSIETTEKGAAGTFISNGGRIESKGLLVIETGEDISLRNGAVVQNNGSRPATTVLNAGHNLVIESKTNVNNAKGSANLSAGGRTTINDATIQAGSSVYSSTKGDTELGENTRIIAENVTVLSNGSIGSAAVIEAKDTAHIESGKPLSLETSTVASNIRLNNGNIKGGKQVVLMADGDIQAKASNLNASGNLYIHAGKDLDLNADKDLSTQSISLRADNTALISSNGNTLTAEKNLDIQAGSLSVRQSNLQSSGGNVQMSATKGNISLNQSWINASQNIDTAALQGNIISDGLTAVAEVGRVSLLANGNVDFNGLNTLIAEGDINAGSVGKGRLKMDNTDIYASAGDVKLVAGGQLDLGNGTVNGGHISLDSNKGSMVVQDVHLNARASLKVDADQTLTINNSKLNSGHNTQINTNHGHMTLNQLDAHSRRHMSISAQGKGKGKDSGQILQNDQQNSKSTLAADGVLSLNSSALQVLDNTTLRGGAINIKAGGGIIKRGYIDWETQDTATMRSAELKPLSGMMSIESGGDNPLTVEPGNRIVSAGDLAVNHNGTFQISARAGNNGNPSAQTASVSAKGNIGIVAGEVDIDAANIAAGKDLALVATKGNISLNSIRNTFSNYQLKTDKHNITQQLTDVEQELSKLTSDPKYRKAQDLPQMLRRKYKRRDKVFGDSEARLRGLRAEINAADEAWAELQSPVKALLERKQLLQQALLTVSQPGSGHENQGSTLSGQNIKLLAAGGIRIQGSKVAATQQANIQAAGFLPAPAAEELQEGRLQSAIDISGVFDTFEYGQQGSDKYGYAIFSRPSEISGKTGVTLSAPNANENSRISLSAANIEAENGKIKLQSYGDQSYYAGQGELYTLERRSYKTGKWYNRKHITEVKEHKNAKPDAVNLSASQGIDIKSGGNIDAYATAFDAPKGSINIEAGRKLTLYAVEELNYDKLDSQKRRRFLGISYSKAHDTTTQVMKTALPSRVVAESANLQSGWDTKLQGTQFETTLGGATIRAGVGEQARADAKIILEGIKSSIHTETVSSSKSALWQKQAGRGSNIETLQLPSFTGPVAPVLSAPGGYIVDIPKGNLKTEIEKLSKQPEYAYLKQLQTAKNVDWKQVQLAYDKWDYKQEGLTGAGAAIVVIIVTALTYGYGAAAAGSVTAAGSSTAAAATTTAAATTTVSTAAAMQTAALASLYSQAAVAIINNKGDVGKALKDLGTSDTVKQIVTSALTAGALNQMGADIAQLNSKVRTELFSSTGNQTIANLGGRLATNLSNAGISAGINTAVNGGSLKDNLGNAALGALVNSFQGEAASKIKTTFSDDYVAKQFAHALAGCVSGLVQGKCKDGAIGAAVGEIVAESILGGRNPATLSDAEKHKVISYSKIIAGSVAALNGGDVNTEANAAEVAVVNNALNFDSTPTNAKKHQPQKPDKTALEKIIQSIMPAHAAGAMTNPQDKDAAIWISNIRNGITGPIVITSYGVYAAGWTAPLIGTAGKAAISTCMANPSGCTVMVTQAAEAGAGIATGAVTVGNAWEAPVGALSKAKAAKQAIPTQTVKELDGLLQESKNIGAVNTRINIANSTTRYTPMRQTGQPVSAGFEHVLEGHFHRPIANNRSVFTISPNELKVILQSNKVVSSPVSMTPDGQYMRTVDVGKVIGTTSIKEGGQPTTTIKVFTDKSGNLITTYPVKGN

SEQ ID NO: 12892 - protein, 311 aa, Neisseria meningitidis; identical to SEQ ID NO: 3220

SEQ ID NO: 12893 - protein, 405 aa, Neisseria meningitidis
MKHFPSKVLTTAILATFCSGALAATNDDDVKKAATVAIAAAYNNGQEINGFKAGETIYDIDEDGTITKKDATAADVEADDFKGLGLKKVVTNLTKTVNENKQNVDAKVKAAESEIEKLTTKLADTDAALADTDAALDATTNALNKLGENITTFAEETKTNIVKIDEKLEAVADTVDKHAEAFNDIADSLDETNTKADEAVKTANEAKQTAEETKQNVDAKVKAAETAAGKAEAAAGTANTAADKAEAVAAKVTDIKADIATNKDNIAKKANSADVYTREESDSKFVRIDGLNATTEKLDTRLASAEKSIADHDTRLNGLDKTVSDLRKETRQGLAEQAALSGLFQPYNVGRFNVTAAVGGYKSESAVAIGTGFRFTENFAAKAGVAVGTSSGSSAAYHVGVNYEW

SEQ ID NO: 12894 - protein, 212 aa, Neisseria meningitidis; identical to SEQ ID NO: 2786

SEQ ID NO: 12895 - protein, 379 aa, Neisseria meningitidis
MKKTLVAAAILSLALTACGGGSDTAAQTPSAKPEAGQSGKLNIYNWSDYVDPETVAAFEKETGIKTRSDYYDSNETLEAKVLTGKSGYDLTAPSIANVGRQIKAGAYQKIDKAQIPHYGNIDKDLLKMMEAVDPGNEYAVPYFWGINTLAINTQQVKKALGTDKLPENEWDLVFKPEYTAKLKSCGISYFDSAIEQIPLALHYLGKDPNSENPEDIKAAVDMMKAVRGDVKRFSSSGYIDDMAAGNLCAAIGYGGDLNIAKTRAEEAANGVEIKVLTPKTGVGVWVDSFMIPRDAQNVANAHRYIDYTLRPEVAAKNGSFVTYAPASRPARELMDEKYTSDASIFPNKELMEKSFIVSPKSAESAKLGVKLWQGLKAGK

SEQ ID NO: 12896 - protein, 181 aa, Neisseria meningitidis; identical to SEQ ID NO: 9829

SEQ ID NO: 12897 - protein, 368 aa, Neisseria meningitidis
MSLYPIYNFSAGPAVLPEAVLETARQEMLDYNGTGFPVMAMSHRSEMFLSILHHAEQDLRQLLKVPDNYKILFLQGGATTQFNMAAMNLAHGFRTADAVVTGNWSRIAYEQMSRLTDTEIRLAAHGGEQFDYLDLPPVETWDVAPDSAFVHFAVNETVNGLQYREVPRLSEGMPPLVCDMSSEILSREFDVADYGLIYAGAQKNIGPAGVTVVIVREDLLERCPNDIPDVFNYRSHLNREGMYNTPSTYAIYMSGLVFRWLQAQGGVKKIEAVNRLKAQTLYETIDGSGGFYINRIRPNARSKMNVVFQTGDEELDRRFVLEAELQGLCLLKGYKSVGGMRASIYNAMPLEGVRALADFMRDFQRRYG

SEQ ID NO: 12898 - protein, 706 aa, Neisseria meningitidis; identical to SEQ ID NO: 3651

SEQ ID NO: 12899 - protein, 56 aa, Neisseria meningitidis; identical to SEQ ID NO: 2455

SEQ ID NO: 12900 - protein, 351 aa, Neisseria meningitidis; identical to SEQ ID NO: 2371

SEQ ID NO: 12901 - protein, 74 aa, Neisseria meningitidis; identical to SEQ ID NO: 2956

SEQ ID NO: 12902 - protein, 335 aa, Neisseria meningitidis
MSTFFRQTAQAMIAKHIDRFPLLKLDRVIDWQPIEQYLNRQKTRYLRDHRGRPAYPLLSMFKAVLLGQWHSLSDPELEHSLITRIDFNLFCRFDELSIPDYSTLCRYRNWLAQDDTLSELLELINRQLTEKGLKVEKASAAVIDATIIQTAGSTQRQAIEVDEEGQISGQTTPSKDSDARWIKKNGLYKLGYKQHTRTDAEGYIEKLHITPANAHECKHLSPLLEGLPEGTTVYADKGYDSAENRQHLEEHQLLDGIMRKACRNRPLSEVQTKRNRYLSKTRYVVEQSFGTLHRKFRYARSTYFGLIKVSAQSHLKAMCLNLLKAANRLSAPAAA

SEQ ID NO: 12903 - protein, 165 aa, Neisseria meningitidis; identical to SEQ ID NO: 3132

SEQ ID NO: 12904 - protein, 1144 aa, Neisseria meningitidis; identical to SEQ ID NO: 10241

SEQ ID NO: 12905 - protein, 46 aa, Neisseria meningitidis
VVLGISEEDGIIYGYTILLFDIKYCIYIDKKYIIPTGKKFSRDDFY

SEQ ID NO: 12906 - protein, 193 aa, Neisseria meningitidis; identical to SEQ ID NO: 519

SEQ ID NO: 12907 - protein, 394 aa, Neisseria meningitidis; identical to SEQ ID NO: 2992

SEQ ID NO: 12908 - protein, 233 aa, Neisseria meningitidis; identical to SEQ ID NO: 2788

SEQ ID NO: 12909 - protein, 95 aa, Neisseria meningitidis; identical to SEQ ID NO: 3028

SEQ ID NO: 12910 - protein, 186 aa, Neisseria meningitidis; identical to SEQ ID NO: 3582

SEQ ID NO: 12911 - protein, 463 aa, Neisseria meningitidis
MLLVMRAKQGKKTPKRKSQGVGNTQGQTPGSNDSDWVDQIGQSVSDGTQPDWSWNESAETASAAVSAQEVDPLTEYQVYKQFGYQGKAAESLAAYLDGIPDGEAKPENLIRELLDINLEVGDVDVLADNLQKYGKLIPSELLAKYIEQALQRDSNHLRIRVLAEEGLGWGTQEIEKRAEGGPATAASASPPPDAGGKAYEAEEIKRIPIVRGKKDVSGISQEEIGAIAGLVRADQGAKILKDKVSYETASKQYDRAIQTSEKPANLIIDALKLDYQHADIDRFAGHLWKLYQTLGNYGRQVKERMLGWGYSLGYHEVFDDLEKGPNDRQIKDIGMGHGYLPKNIQKFKSQHRDLVLQDSSLINTGSSPADDAVKEVESLLMYGQIEAAMDVLEQAVLKYPDESQLYITLIDIYERTEDWDRLGQFLRVLRERADRLPEEVVMLMSRLLQRMNQNIKKIKRYGK

SEQ ID NO: 12912 - protein, 252 aa, Neisseria meningitidis; identical to SEQ ID NO: 2844

SEQ ID NO: 12913 - protein, 321 aa, Neisseria meningitidis; identical to SEQ ID NO: 2168

SEQ ID NO: 12914 - protein, 312 aa, Neisseria meningitidis; identical to SEQ ID NO: 2391

SEQ ID NO: 12915 - protein, 140 aa, Neisseria meningitidis; identical to SEQ ID NO: 662

SEQ ID NO: 12916 - protein, 89 aa, Neisseria meningitidis; identical to SEQ ID NO: 1367

SEQ ID NO: 12917 - protein, 142 aa, Neisseria meningitidis; identical to SEQ ID NO: 4400

SEQ ID NO: 12918 - protein, 187 aa, Neisseria meningitidis; identical to SEQ ID NO: 508

SEQ ID NO: 12919 - protein, 764 aa, Neisseria meningitidis
MRREAKMAQTTLKPIVLSILLISTPILAQAHETEQSVDLDEVTVVGKSRPRATSGLLHTSTASDKILSGDTLRQKAVNLGDALDGVPGIHASQYGGGASAPVIRGQTGRRIKVLNHHGETGDMADFSPDHAIMVDTALSQQVEILRGPVTLLYSSGNVAGLVDVADGKIPEKMPENGVSGELGLRLSSGNLEKLTSGGINIGLGKNFVLHTEGLYRKSGDYAVPRYRNLKRLPDSHADSQTGSIELSWVGEKGFIGAAYSDRRDQYGLPAHSHEYDDCHADIIWQKSLINKRYLQLYPHLLTEEDIDYDNPGLSCGFHDDDDAHAHAHNGKPWIDLRNKRYELRAEWKQPFPGFEALRVHLNRNDYRHDEKAGDAVENFFNNQTQNARIELRHQPIGRLKGSWGVQYLGQKSSALSATSEAVKQPMLLDNKVQHYSFFGVEQANWDNFTLEGGVRVEKQKASIRYDKALIDRENYYNHPLPDLGAHRQTARSFALSGNWYFTPQHKLSLTASHQERLPSTQELYAHGKHVATNTFEVGNKHLNKERSNNIELALGYEGDRWQYNLALYRNRFGNYIYAQTLNDGRGPKSIEDDSEMKLVRYNQSGADFYGAEGEIYFKPTPRYRIGVSGDYVRGRLKNLPSLPGREDAYGNRPLIAQADQNAPRVPAARLGVHLKASLTDRIDANLDYYRVFAQNKLARYETRTPGHHMLNLGANYRRNTRYGEWNWYVKADNLLNQSVYAHSSFLSDTPQMGRSFTGGVNVKF

SEQ ID NO: 12920 - protein, 65 aa, Neisseria meningitidis; identical to SEQ ID NO: 127

SEQ ID NO: 12921 - protein, 71 aa, Neisseria meningitidis; identical to SEQ ID NO: 3375

SEQ ID NO: 12922 - protein, 678 aa, Neisseria meningitidis
MTDNALLHLGEEPRFDQIKTEDIKPSLQTAIAEAREQIAAIKAQTHTGWANTVEPLTGITERVGRIWGVVSHLNSVADTPELRAVYNELMPEITVFFTEIGQDIELYNRFKTIKNSPEFDTLSPAQKTKLNHDLRDFVLSGAELPPEQQAELAKLQTEGAQLSAKFSQNVLDATDAFGIYFDDAAPLAGIPEDALAMFAAAAQSEGKTGYKIGLQIPHYLAVIQYADNRELREQIYRAYVTRASELSDGGKFDNTANIDRTLANALQTAKLLGFKNYAELSLATKMADTPEQVLNFLHDLARRAKPYAEKDLAEVKAFARESLNLADLQPWDLGYASEKLREAKYAFSETEVKKYFPVGKVLNGLFAQIKKLYGIGFTEKTVPVWHKDVRYFELQQNGETIGGVYMDLYAREGKRGGAWMNDYKGRRRFSDGTLQLPTAYLVCNFAPPVGGREARLSHDEILILFHETGHGLHHLLTQVDELGVSGINGVEWDAVELPSQFMENFVWEYDVLAQMSAHEETGVPLPKELFDKMLAAKNFQRGMFLVRQMEFALFDMMIYSEDDEGRLKNWQQVLDSVRKKVAVIQPPEYNRFALSFGHIFAGGYSAGYYSYAWAEVLSADAYAAFEESDDVAATGKRFWQEILAVGGSRSAAESFKAFRGREPSIDALLRHSGFDNAA

SEQ ID NO: 12923 - protein, 111 aa, Neisseria meningitidis; identical to SEQ ID NO: 873

SEQ ID NO: 12924 - protein, 241 aa, Neisseria meningitidis; identical to SEQ ID NO: 3559

SEQ ID NO: 12925 - protein, 444 aa, Neisseria meningitidis; identical to SEQ ID NO: 2522

SEQ ID NO: 12926 - protein, 174 aa, Neisseria meningitidis
MKKALAALIALALPAAALAEGASGFYVQADAAHAKASSSLGSAKGFSPRISAGYRINDLRFAVDYTRYKNYKAPSTDFKLYSIGASAIYDFDTQSPVKPYLGARLSLNRASVDLGGSDSFSQTSTGLGVLAGVSYAVTPNVDLDAGYRYNYIGKVNTVKNVRSGELSAGMRVKF

SEQ ID NO: 12927 - protein, 445 aa, Neisseria meningitidis; identical to SEQ ID NO: 2990

SEQ ID NO: 12928 - protein, 672 aa, Neisseria meningitidis; identical to SEQ ID NO: 9125

SEQ ID NO: 12929 - protein, 495 aa, Neisseria meningitidis; identical to SEQ ID NO: 2837

SEQ ID NO: 12930 - protein, 174 aa, Neisseria meningitidis; identical to SEQ ID NO: 3281

SEQ ID NO: 12931 - protein, 242 aa, Neisseria meningitidis; identical to SEQ ID NO: 201

SEQ ID NO: 12932 - protein, 675 aa, Neisseria meningitidis; identical to SEQ ID NO: 3019

SEQ ID NO: 12933 - protein, 513 aa, Neisseria meningitidis; identical to SEQ ID NO: 3645

SEQ ID NO: 12934 - protein, 202 aa, Neisseria meningitidis; identical to SEQ ID NO: 597

SEQ ID NO: 12935 - protein, 437 aa, Neisseria meningitidis; identical to SEQ ID NO: 1149

SEQ ID NO: 12936 - protein, 71 aa, Neisseria meningitidis; identical to SEQ ID NO: 1977

SEQ ID NO: 12937 - protein, 85 aa, Neisseria meningitidis; identical to SEQ ID NO: 1948

SEQ ID NO: 12938 - protein, 407 aa, Neisseria meningitidis
MSAQSQNNHTSPLVVLTTLFFMMGFITCMNDILIPHLKEIFDLSYVQAMLIQFCFFTAYAVMSIPMGAFVGKVGYKNGVIGGFLLTAVGCLLFYPAAGSHSYAVFLGALFILASGVTLLQVAGNPYVTLLAKPGKESATLTLVQAFNALGTTIAPQIGAFLILADATQTVSKAEQISSVQIPYLGLAGLLIILAVFVKMIRLPDARKIAAEESAHNHDGKTSVWQYKHLVFGTAGIFCYVGAEVSIGSLMVNVLGYLKGLDHASAAHYLSFYWGGAMVGRFLGSAVMAKFAPNRYLAFNASAAVVLLAVAMATGSGNADVAMWSLLAIGFFNSIMFPTIFSLATKGLGKFTNAASGVLCTAIVGGAVVPVVQGWVADTYTLMSSFVVSVICYLYIVFFAVYGYRADK

SEQ ID NO: 12939 - protein, 122 aa, Neisseria meningitidis; identical to SEQ ID NO: 218

SEQ ID NO: 12940 - protein, 366 aa, Neisseria meningitidis; identical to SEQ ID NO: 8931

SEQ ID NO: 12941 - protein, 92 aa, Neisseria meningitidis; identical to SEQ ID NO: 2038

SEQ ID NO: 12942 - protein, 810 aa, Neisseria meningitidis
MPIPFKPVLAAAAIAQAFPAFAADPAPQSAQTLNEITVTGTHKTQKLGEEKIRRKTLDKLLVNDEHDLVRYDPGISVVEGGRAGSNGFTIRGVDKDRVAINVDGLAQAESRSSEAFQELFGAYGNFNANRNTSEPENFSEVTITKGADSLKSGSGALGGAVNYQTKSASDYVSEDKPYHLGIKGGSVGKNSQKFSSITAAGRLFGLDALLVYTRRFGKETKNRSTEGDVEIKNDGYVYNPTDTGGPSKYLTYVATGVARSQPDPQEWVNKSTLFKLGYNFNDQNRIGWIFEDSRTDRFTNELSNLWTGTTTSAATGDYRHRQDVSYRRRSGVEYKNELEHGPWDSLKLRYDKQRIDMNTWTWDIPKNYDKRGINGEVYHSFRHIRQNTAQWTADFEKQLDFSKAVWAAQYGLGGGKGDNANSDYSYFAKLYDPKILASNQAKITMLIENRSKYKFAYWNNAFHLGGNDRFRLNAGIRYDKNSSSAKDDPKYTTAIRGQIPHLGSERAHAGFSYGTGFDWRFTKHLHLLAKYSTGFRAPTSDETWLLFPHPDFYLKANPNLKAEKAKNWELGLAGSGKAGNFKLSGFKTKYRDFIELTYMGVSSDDKNNPRYAPLSDGTALVSSPVWQNQNRSAAWVKGIEFNGTWNLDSIGLPKGLHTGLNVSYIKGKATQNNGKETPINALSPWTAVYSLGYDAPSKRWGINAYATRTAAKKPSDTVHSNDDLNNPWPYAKHSKAYTLFDLSAYLNIGKQVTLRAAAYNITNKQYYTWESLRSIREFGTVNRVDNKTHAGIQRFTSPGRSYNFTIEAKF

SEQ ID NO: 12943 - protein, 143 aa, Neisseria meningitidis; identical to SEQ ID NO: 2432

SEQ ID NO: 12944 - protein, 392 aa, Neisseria meningitidis; identical to SEQ ID NO: 276

SEQ ID NO: 12945 - protein, 216 aa, Neisseria meningitidis
MTGFEHTVTFDFQGIKMVIPYGYLARYTQDNATKWLSDTPGQDAYSINLIEISVYYKKTDQGWVLEPYNQQNKAHFIQFLRDGLDSVDDIVIRKDACSLSTTMGERLLTYGVKKMPSAYPEYEAYEDKRHIPENPYFHEFYYIKKGENPAIITHRNYHRYGENDYSTSVGSCINGFTVRYYPFIREKQQLTQQELVGYHQQVEQLVQSFVNNPSKK

SEQ ID NO: 12946 - protein, 160 aa, Neisseria meningitidis; identical to SEQ ID NO: 1377

SEQ ID NO: 12947 - protein, 244 aa, Neisseria meningitidis; identical to SEQ ID NO: 3264

SEQ ID NO: 12948 - protein, 56 aa, Neisseria meningitidis; identical to SEQ ID NO: 326

SEQ ID NO: 12949 - protein, 101 aa, Neisseria meningitidis
MNIEQVHIEVMNARLTVNTPAEEKDTLLQAVGMLNGKAEAIREGGRVADSEKIVIMAALNVVHDLLKTSLNGGDLAIGDFARKIADMDNACQKALSRLAQE

SEQ ID NO: 12950 - protein, 93 aa, Neisseria meningitidis
VLCHQARDLFSAGSVANSAEDYRGGNYVEKSLKLIEHEIEKAALEMDDALIVEYWGESVPTEKRLEYWIKMLDDLADGWIPSESLFNGRYKAK

SEQ ID NO: 12951 - protein, 93 aa, Neisseria meningitidis; identical to SEQ ID NO: 2977

SEQ ID NO: 12952 - protein, 177 aa, Neisseria meningitidis; identical to SEQ ID NO: 1513

SEQ ID NO: 12953 - protein, 520 aa, Neisseria meningitidis
LFEVMKKPLISVAAALLGVALGTPYYLGVKAEESLTQQQKILQETGFLTVESHQYERGWFTSMETTVIRLKPELLNNARKYLPDNLKTVLEQSVTLVNHITHGPFAGGFGTQAHIETEFKYAPETEKVLERFFGKQAPVSLANTVYFNGSGKMEVSVPAFDYEELSGIRLHWEGLTGKTVYQKGFKSYRNSYDAPLFKIKLADKGDAAFEKAHFDSETSDGINPLALGSSNLTLEKFSLEWKEGVDYNVKLNELVNLVTDLQIGAFINPNGSIAPSKIEVGKLAFSTKTGESGSFINSEGQFRFDTLVYGNEKYGPLDIHIAAEHLDASALTVLKRKFAQISAKKMTEEQIRNDLIAAVKGEASGLFTNNPVLDIKTFRFTQPSGKIDVGGKIMFKDMKKEDLNQLGLMLKKTEADIRMSIPQKMLEDLAVSQAGNIFSVNAEDEAEGRASLDDINETLRLMVDSTVQSMAREKYLTLNGDQIDTAISLKNNQLKLNGKTLQNEPEPDFDEGGMVSEPQQ

SEQ ID NO: 12954 - protein, 74 aa, Neisseria meningitidis; identical to SEQ ID NO: 9990

SEQ ID NO: 12955 - protein, 74 aa, Neisseria meningitidis; identical to SEQ ID NO: 444

SEQ ID NO: 12956 - protein, 163 aa, Neisseria meningitidis
MSTETKNYITPAGWQALKDELYQLVNKERPEIVQIVNWAAGNGDRSENGNYLYGKRRMREIDRRIRFLTKRLESAVVVDPELREATDQVFFGATVGLLRGDGREQTVKIVGIDEIDTAQNKISWISPLARCLIKAREGDEVVLNTPEGREEIEILSVEYIKID

SEQ ID NO: 12957 - protein, 265 aa, Neisseria meningitidis; identical to SEQ ID NO: 1691

SEQ ID NO: 12958 - protein, 210 aa, Neisseria meningitidis; identical to SEQ ID NO: 2480

SEQ ID NO: 12959 - protein, 217 aa, Neisseria meningitidis
MKITHCKLKKKVQKELLRFFALEITARSAADILGIHPNSAALFYRKIRTVINHHLALAADEVFEGPVEQDESDFGGRRKGRRGRGAAGKVVVFGILKRNRRVYTVVVDNAKSETLLPVIKKKIMPDSIVYTDSLSSYDKLDVSGLIHHRINHSKEFADRQNHINGIENFWNQAKRVLRKYNGIDRKSFPLFLKECEFRFNFGTPSQQLKILRDWCGI

SEQ ID NO: 12960 - protein, 412 aa, Neisseria meningitidis
MAFYAFKAMRAAALAAAVALVLSSCGKGGDAAQGGQPAGREAPAPVVGVVTVHPQTVALTVELPGRLESLRTADVRAQVGGIIQKRLFQEGSYVRAGQPLYQIDSSTYEANLESARAQLATAQATLAKADADLARYKPLVAAEAVSRQEYDAAVTAKRSAEAGVKAAQAAIKSAGINLNRSRITAPISGFIGQSKVSEGTLLNAGDTTVLATIRQTNPMYVNVTQSASEVMKLRRQIAEGKLLAADGVIAVGIKFDDGTVYPEKGRLLFADPVVNESTGQITLRAAVPNDQNILMPGLYVRVLMDQVAVDNAFVVPQQAVTRGAKDTVMIVNAQGGMEPREVTVAQQQGTNWIVTSGLKDGDKVVVEGISIASITGAKKVTPKEWAPSENQAAAPQSGVQTASEAKTASEAE

SEQ ID NO: 12961 - protein, 640 aa, Neisseria meningitidis; identical to SEQ ID NO: 2073

SEQ ID NO: 12962 - protein, 61 aa, Neisseria meningitidis; identical to SEQ ID NO: 2069

SEQ ID NO: 12963 - protein, 146 aa, Neisseria meningitidis
LDKQIDDHTHTHFDGKAQVAEQIKGIGSITTATLMAMLPELGRLSHKRIASLAGIAPHPRESGETKFKSRCFGGRSAVRKALYMATVAATRFEPLIRDFYQRLPSEGKPYKVAVTACMRKLLTISNARMRDYFAENDTAENGIRTA

SEQ ID NO: 12964 - protein, 167 aa, Neisseria meningitidis; identical to SEQ ID NO: 2196

SEQ ID NO: 12965 - protein, 395 aa, Neisseria meningitidis; identical to SEQ ID NO: 2182

SEQ ID NO: 12966 - protein, 275 aa, Neisseria meningitidis
MQNHVISLASAAERRAHIADTFGRHGIPFQFFDALMPSERLEQAMAELVPGLSAHPYLSSVEKACFMSHVVLWKQALDEGVPYVAVFEDDVLLGEGAEKFLDEDAWLQERFDKDSAFIVRLETMFMHVLTSPSGVADYCGRAFPLLESEHWGTAGYIISRKAMRFFLDRFAVLPSEGLHPVDLMMFSDFFDREGVPVCQLNPALCAQELHYAKFHDQNSALGSLIEHDRLLNRKQQRRDSPANTFKHRLIRALTKISREREKRRQRREQFIVPFQ

SEQ ID NO: 12967 - protein, 310 aa, Neisseria meningitidis; identical to SEQ ID NO: 2585

SEQ ID NO: 12968 - protein, 136 aa, Neisseria meningitidis; identical to SEQ ID NO: 1274

SEQ ID NO: 12969 - protein, 264 aa, Neisseria meningitidis; identical to SEQ ID NO: 3548

SEQ ID NO: 12970 - protein, 757 aa, Neisseria meningitidis
MNITQILSQELSATTAQINAAIELLDDGATVPFIARYRKEATGGLDDTQLRRLAERLQYLRELEERKAVVLKSIEEQGKLSDDLRAQIEAADNKTALEDLYLPYKPKRRTKAQIAREHGLQPLADVLLAEQSQDVEAAAQGYLNENVPDAKAALDGARAILMEQFAEDAELIGTLRDKLWNEAEIHAQVVGGKETEGEKFSDYFDHREPVRTMPGHRALAVLRGRNEGVLNIALKYRPDDTPITQQSEYEQIIARRFKVSDGHKWLRDTVRLTWRAKIFLSLELEALNRLKEAADTDAITVFARNLKDLLLAAPAGRLTTLGLDPGYKNGVKCAVVDDTGKLLDTVIVYLHQENNMLATLSRLIKQHGVKLIAIGNGTASRETDKIAGELVREMSKMGLHKIVVSEAGASIYSASELAAREFPDLDVSLRGAVSIARRLQDPLAELVKIDPKSIGVGQYQHDVNQNQLAKSLDAVVEDCVNAVGVDVNTASAPLLARISGLNQTLAQNIVAYRDENGAFDSRKKLLKVPRLGEKTFEQAAGFLRINGGKEPLDASAVHPEAYPVVAKMLAQQGISAAELIGNRERVKQIKASDFTDERFGLPTILDILSELEKPGRDPRGEFQTASFAEGIHEISDLQVGMILEGVVSNVANFGAFVDIGVHQDGLVHISALSNKFVQDPREVVKAGDVVKVKVLEVDAARKRIALTMRLDDEPGGAKHKMPSENRSRERTAGRKPQRNDRAPANSAMADAFAKLKR

SEQ ID NO: 12971 - protein, 141 aa, Neisseria meningitidis; identical to SEQ ID NO: 7

SEQ ID NO: 12972 - protein, 369 aa, Neisseria meningitidis; identical to SEQ ID NO: 2878

SEQ ID NO: 12973 - protein, 128 aa, Neisseria meningitidis; identical to SEQ ID NO: 1074

SEQ ID NO: 12974 - protein, 279 aa, Neisseria meningitidis; identical to SEQ ID NO: 3315

SEQ ID NO: 12975 - protein, 505 aa, Neisseria meningitidis; identical to SEQ ID NO: 2655

SEQ ID NO: 12976 - protein, 325 aa, Neisseria meningitidis; identical to SEQ ID NO: 3564

SEQ ID NO: 12977 - protein, 1375 aa, Neisseria meningitidis; identical to SEQ ID NO: 3642

SEQ ID NO: 12978 - protein, 165 aa, Neisseria meningitidis; identical to SEQ ID NO: 2055

SEQ ID NO: 12979 - protein, 259 aa, Neisseria meningitidis; identical to SEQ ID NO: 2688

SEQ ID NO: 12980 - protein, 417 aa, Neisseria meningitidis; identical to SEQ ID NO: 4024

SEQ ID NO: 12981 - protein, 270 aa, Neisseria meningitidis
MSVGHYENFPVGSLILPRRLRKPIHAVYAFARTADDMADEGSMPSEARLAGLEGLQRELDVLASGGRSAHPLIARLDAEAVVPFGLDLQPFYDLLSAFSQDVVKTRYGNFGELADYCRRSANPVGRIMLALYGKTDAVCVAQSDGICTALQLVNFWQDVAVDWQKGRVYIPQDDLLKFGVSEGQIAEGRADAAFQRLMAYECRRAFRMLKAGSPLARELKGRIGLELRMIVLGAQLILQKLDACRYDVFAQRPVLDKKDWLIMLKRALWK

SEQ ID NO: 12982 - protein, 69 aa, Neisseria meningitidis; identical to SEQ ID NO: 5143

SEQ ID NO: 12983 - protein, 420 aa, Neisseria meningitidis
MSNTQKQLALAKAAKKSVNTADTEEKNRALLAMADSLEAAAADILAANRQDLEAAAGKIPESMTDRLLLDGKRICAMADGIRAVAALPDPVGEILETSTLPNGLEIVKKRVAMGVIGIIYESRPNVTSDAAALALKSGSAVVLRSGKDAFQSARAIVAALKTGLAQTRIDPDALQLIEDTGREGSYEMMRAKDYLDLLIPRGGAGLIRAVVENAVVPVIETGTGIVHIYVDKDADLEKAIRIVRNAKTSRPSVCNSMEVLLVHEDIAADFLPKLERLLVRDRIEAGLPPVRFRLDPQAARHIGGEAAGADDFDTEFLDYILAVKTVASVEEAVGHIETHGTHHSDGIVTENRHAADYFTTHIDSAAVYINASTRFTDGGEFGLGCEMGISTQKLHARGPMGLKELTSYKYIVQGTGQVRE

SEQ ID NO: 12984 - protein, 213 aa, Neisseria meningitidis; identical to SEQ ID NO: 2602

SEQ ID NO: 12985 - protein, 61 aa, Neisseria meningitidis; identical to SEQ ID NO: 2615

SEQ ID NO: 12986 - protein, 511 aa, Neisseria meningitidis; identical to SEQ ID NO: 3843

SEQ ID NO: 12987 - protein, 837 aa, Neisseria meningitidis
LKNNRQIKLIAASVAVAASFQAHAGLGGLNIQSNLDEPFSGSITVTGEEAKALLGGGSVTVSEKGLTAKVHKLGDKAVIAVSSEQAVRDPVLVFRIGAGAQVREYTAILDPVGYSPKTKSALSDGKTHRKTAPTAESQENQNAKALRKTDKKDSANAAVKPAYNGKTHTVRKGETVKQIAAAIRPKHLTLEQVADALLKANPNVSAHGRLRAGSVLHIPNLNRIKAEQPKPQTAKPKAETASMPSEPSKQATVEKPVEKPEAKVAAPEAKAEKPAVRPEPVPAANTAASETAAESAPQEAAASAIDTPTDETGNAVSEPVEQVSAEEETESGLFGGSYTLLLAGGGAALIALLLLLRLAQSKRARRTEESVPEEEPDLDDAADDGIEITFAEVETPATPEPAPKNDVNDTLALDGESEEELSAKQTFDVETDTPSNRIDLDFDSLAAAQNGILSGALTQDEETQKRADADWNAIESTDSVYEPETFNPYNPVEIVIDTPEPESVAQTAENKPETVDTDFSDNLPSNNHIGTEETASAKPASPSGLAGFLKASSPETILEKTVAEVQTPEELHDFLKVYETDAVAETAPETPDFNAAADDLSALLQPAEAPSVEENITETVAETPDFNATADDLSALLQPSEVPAVEENAAEIVADDLSALLQPAEAPAVEENVTETVAETPDFNATADDLSALLQPSEVPAVEENAAETVADDLSALLQPAEAPAVEENAAEITLETPDSNTSEADALPDFLKDGEEETVDWSIYLSEENIPNNADTSFPSESVGSDAPSEAKYDLAEMYLEIGDRDAAAETVQKLLEEAEGDVLKRAQALAQELGI

SEQ ID NO: 12988 - protein, 79 aa, Neisseria meningitidis; identical to SEQ ID NO: 831

SEQ ID NO: 12989 - protein, 270 aa, Neisseria meningitidis
MDKIRVAAVQMVSGVSPETNVAAMKRLVARAAEQGADWVLLPEYWVLMGANDTDKLALAEPLGGGRFQTALSETAKECGVVLFGGTVPLQSSEAGKVMNTLLVYGRDGVRTGLYHKMHLFGFSGLGERYAEADTISAGREVPHLSAEGVSVAAGICYDVRFPEFFRRQLPFDVLMLPAAFTHTTGKAHWELLLRARAVENQCYVVAAAQGGLHENGRRTFGHSMIVDPWGDVLDVLPEGEGVVTADIDANRLNSVRNRLPALKYRVLDAV

SEQ ID NO: 12990 - protein, 328 aa, Neisseria meningitidis; identical to SEQ ID NO: 2126

SEQ ID NO: 12991 - protein, 179 aa, Neisseria meningitidis; identical to SEQ ID NO: 8483

SEQ ID NO: 12992 - protein, 236 aa, Neisseria meningitidis; identical to SEQ ID NO: 2130

SEQ ID NO: 12993 - protein, 244 aa, Neisseria meningitidis; identical to SEQ ID NO: 3420

SEQ ID NO: 12994 - protein, 175 aa, Neisseria meningitidis; identical to SEQ ID NO: 5

SEQ ID NO: 12995 - protein, 299 aa, Neisseria meningitidis; identical to SEQ ID NO: 3610

SEQ ID NO: 12996 - protein, 722 aa, Neisseria meningitidis
MGQFMSVFRINMTAATVLAALSSSVFAAQTADLETVHIKGQRSYNAIATEKNGDYSSFAATVGTKIPASLREIPQSVSIITNQQVKDRNVDTFDQLARKTPGLRVLSNDDGRSSVYARGYEYSEYNIDGLPAQMQSINGTLPNLFAFDRVEVMRGPSGLFDSSGEMGGIVNLVCKRPAKAFQGHAAAGFGTHKQYKAEADVSGSLNSDGSVRGRVMAQTVGASPRPAEKNNRHETFYAAADWDINPDTVLGAGYLYQQRHLAPYNGLPADANNKLPSLPQHVFVGADWNKFKMNSHDVFADLKHYFGNGGYGKVGMRYSDRDADSNYAFAGSKLGMKTLAGRPGCNTADDKACAVGLGTEIKQKALAFDASYSRPFRLGNTANEFVIGADYNRFRSTNEQGRTTLYARGGLALNEFRSIPQVDLIANARKGVRGYSHTVATENLDEFGIYGKSTFHPADGLSLIGGGRLGHYKIESGEGKTLHKASKTKFTGYAGAVYDLNDNNSLYLSLSQLYTPQTNLDADGKLLKPRQGNQFEVGYKGSYMDDRLNARVSFYRMKDKNAAAPLNPNNKKTRYAALGKRVMEGVETEISGAVTPKWQIHAGYSYLHSQIKTASNSRDDGIFLLMPKHSANLWTTYQVTPELTIGGGVNAMSGITSSAGMHAGGYATFDAMAAYRFTPKLKLQINADNIFNRHYYARVGGANTFNIPGSERSLTANLRYSF

SEQ ID NO: 12997 - protein, 306 aa, Neisseria meningitidis; identical to SEQ ID NO: 1708

SEQ ID NO: 12998 - protein, 546 aa, Neisseria meningitidis; identical to SEQ ID NO: 2636

SEQ ID NO: 12999 - protein, 66 aa, Neisseria meningitidis; identical to SEQ ID NO: 3561

SEQ ID NO: 13000 - protein, 201 aa, Neisseria meningitidis; identical to SEQ ID NO: 2430

SEQ ID NO: 13001 - protein, 473 aa, Neisseria meningitidis; identical to SEQ ID NO: 9090

SEQ ID NO: 13002 - protein, 469 aa, Neisseria meningitidis; identical to SEQ ID NO: 3473

SEQ ID NO: 13003 - protein, 71 aa, Neisseria meningitidis; identical to SEQ ID NO: 3926

SEQ ID NO: 13004 - protein, 268 aa, Neisseria meningitidis; identical to SEQ ID NO: 8872

SEQ ID NO: 13005 - protein, 305 aa, Neisseria meningitidis; identical to SEQ ID NO: 2256

SEQ ID NO: 13006 - protein, 123 aa, Neisseria meningitidis; identical to SEQ ID NO: 130

SEQ ID NO: 13007 - protein, 413 aa, Neisseria meningitidis; identical to SEQ ID NO: 9110

SEQ ID NO: 13008 - protein, 177 aa, Neisseria meningitidis; identical to SEQ ID NO: 3350

SEQ ID NO: 13009 - protein, 138 aa, Neisseria meningitidis; identical to SEQ ID NO: 2205

SEQ ID NO: 13010 - protein, 88 aa, Neisseria meningitidis; identical to SEQ ID NO: 1100

SEQ ID NO: 13011 - protein, 375 aa, Neisseria meningitidis; identical to SEQ ID NO: 1664

SEQ ID NO: 13012 - protein, 240 aa, Neisseria meningitidis; identical to SEQ ID NO: 1969

SEQ ID NO: 13013 - protein, 661 aa, Neisseria meningitidis; identical to SEQ ID NO: 1085

SEQ ID NO: 13014 - protein, 118 aa, Neisseria meningitidis; identical to SEQ ID NO: 2492

SEQ ID NO: 13015 - protein, 291 aa, Neisseria meningitidis; identical to SEQ ID NO: 6524

SEQ ID NO: 13016 - protein, 97 aa, Neisseria meningitidis; identical to SEQ ID NO: 177

SEQ ID NO: 13017 - protein, 279 aa, Neisseria meningitidis; identical to SEQ ID NO: 343

SEQ ID NO: 13018 - protein, 948 aa, Neisseria meningitidis
MCNHHPKHSHGNDTIRIRGARTHNLKNVDLDIPRHKLVVVTGLSGSGKSSLAFDTLYAEGQRRYVESLSAYARQFLQMMDKPDVDLIEGLSPAISIEQKSTSHNPRSTVGTVTEIHDYLRLLYARVGTPYCPEHKLPLSSQTVSQMVDAVLKLPEDTRVMILAPAVRERKGEFVDFFADLQAQGFARVRVDGEVYQLDEVPKLEKNIKHNIDVVIDRVKVKADIKQRLAESFETALRHGNERALAMEMDSGEEHWFSARFACPVCSYSLPELEPRLFSFNNPMGSCPTCDGLGNTNFFDPEKVVAHPELSLASGAIDGWDKRNQFYFQMIQSLARHYGFDVQAAWETLPAKIKKVVLHGSGKEVIDFTYLSERGTTFNRSHAFEGIIPNLERRYRETDSETVREKLREYQNHRACPSCGGARLRKEARYVYVSGEPLHEVSAWPLTKTHRFFETLDLDGNKKQIAEKILKEITERLGFLINVGLDYLNLSRSAETLSGGEAQRIRLASQIGSGLTGVMYVLDEPSIGLHQRDNDRLLATLKRLRDLGNSVIVVEHDEDAIREADFVVDMGPGAGEHGGNVLIADTPENVAKCENSVTGQYLSGKKSIAVPSERTPVNPGRMLVLKGARGNNLKNVTLELPLGLITCITGVSGSGKSTLINDTLAKITARELNRAQEEPAPYDDIRGLEHLDKVINVDQSPIGRTPRSNPATYTGLFTPIRELFASVPLSRERGYNVGRFSFNVKGGRCEACQGDGVIKVEMHFLPDVYVPCEVCHGKRYNRETLEIQYKGKNISQVLDMTVEEACEFFDAVPTVSRKLQTLMDVGLGYIRLGQSATTLSGGEAQRVKLALELSKRDTGRTLYILDEPTTGLHFADIALLLEVIGRLKGKGNSIVIIEHNLDVIKTADWIVDLGPEGGDGGGRIIASGSPEEVAKVKGSYTGKYLKNIL

SEQ ID NO: 13019 - protein, 249 aa, Neisseria meningitidis; identical to SEQ ID NO: 2006

SEQ ID NO: 13020 - protein, 83 aa, Neisseria meningitidis; identical to SEQ ID NO: 5347

SEQ ID NO: 13021 - protein, 77 aa, Neisseria meningitidis
MEATVYLEDNEYIALCDLLKLAGLAESGGQAKAFIAEGLVLRNGETETRKTAKIRGGEVIEFDGARLEIADGYDPEE

SEQ ID NO: 13022 - protein, 377 aa, Neisseria meningitidis; identical to SEQ ID NO: 10962

SEQ ID NO: 13023 - protein, 66 aa, Neisseria meningitidis; identical to SEQ ID NO: 3365

SEQ ID NO: 13024 - protein, 371 aa, Neisseria meningitidis; identical to SEQ ID NO: 2339

SEQ ID NO: 13025 - protein, 313 aa, Neisseria meningitidis
MKILLLLIPLVLTACGTLTGIPAHGGGKRFAVEQELVAASSRAAVKEMDLSALKGRKAALYVSVMGDQGSGNISGGRYSIDALIRGGYHNNPESATQYSYPAYDTTATTKSDALSSVTTSTSLLNAPAAALTRNSGRKGERSAGLSVNGMGDYRNETLLANPRDVSFLTNLIQTVFYLRGIEVVPPEYADTDVFVTVDVFGTVRSRTELHLYNAETLKAQTKLEYFAVDRDSRKLLIAPKTAAYESQYQEQYALWMGPYSVGKTVKASDRLMVDFSDITPYGDTTAQNRPDFKQNNGKNPDVGNEVIRRRKGG

SEQ ID NO: 13026 - protein, 253 aa, Neisseria meningitidis; identical to SEQ ID NO: 3373

SEQ ID NO: 13027 - protein, 298 aa, Neisseria meningitidis; identical to SEQ ID NO: 3584

SEQ ID NO: 13028 - protein, 165 aa, Neisseria meningitidis; identical to SEQ ID NO: 3578

SEQ ID NO: 13029 - protein, 105 aa, Neisseria meningitidis; identical to SEQ ID NO: 895

SEQ ID NO: 13030 - protein, 203 aa, Neisseria meningitidis; identical to SEQ ID NO: 3861

SEQ ID NO: 13031 - protein, 93 aa, Neisseria meningitidis; identical to SEQ ID NO: 8307

SEQ ID NO: 13032 - protein, 291 aa, Neisseria meningitidis; identical to SEQ ID NO: 10079

SEQ ID NO: 13033 - protein, 363 aa, Neisseria meningitidis; identical to SEQ ID NO: 6903

SEQ ID NO: 13034 - protein, 200 aa, Neisseria meningitidis; identical to SEQ ID NO: 2775

SEQ ID NO: 13035 - protein, 492 aa, Neisseria meningitidis
MKYKDLRDFIVMLEQQGKLKRVAHPVSPHLEMTEIADRVLRAEGSALLFENPIKPDGTRYDYPVLANLFGTPERVAMGMGADSVSKLREIGQTLAYLKEPEPPKGIKDAFSKLPLLKDIWSMAPNVVKNAPCQEIVWEGENVDLYKLPIQHCWPEDVAPLVTWGLTVTRGPHKKRQNLGIYRQQLIGKNKLIMRWLSHRGGALDYQEFRKLNPDTSYPVSVVLGCDPATILGAVTPVPDTLSEYQFAGLLRGSRTELVKCIGNDLQVPARAEIVLEGVIHPNETALEGPYGDHTGYYNEQDYFPVFTVERITMRENPIYHSTYTGKPPDEPAVLGVALNEVFVPLLQKQFPEITDFYLPPEGCSYRMAVVSMKKQYAGHAKRVMMGCWSFLRQFMYTKFIIVVDDDVNVRDWKEVIWAVTTRMDPVRDTVLVENTPIDYLDFASPVSGLGGKMGLDATNKWPGETDREWGRVIKKDPAVTAKIDGIWEELGL

SEQ ID NO: 13036 - protein, 436 aa, Neisseria meningitidis; identical to SEQ ID NO: 2274

SEQ ID NO: 13037 - protein, 279 aa, Neisseria meningitidis; identical to SEQ ID NO: 2847

SEQ ID NO: 13038 - protein, 163 aa, Neisseria meningitidis; identical to SEQ ID NO: 9476

SEQ ID NO: 13039 - protein, 241 aa, Neisseria meningitidis
LLDHDNGFFDNSNQRPKSETIGTAWRNEDGSGKTFYVGRKKNSRFVRVYEKGRQLGDKESKWVRFEIQFNYGDIEIPLDILINQGSYFCGAFPICRKFKNMPVPERFDQRKKTLNLTFEHKLHYAKNAVGKLVNFMIEMGFDNSEIVESLKADSGFPKGLEPEKYALEMLRDGLKHGFIHEQPDIDLEIELDELGVIAFKNSDKFDREKRLFSPDYDVEKERKYQEYLSKVYHQNVDYDYF

SEQ ID NO: 13040 - protein, 233 aa, Neisseria meningitidis; identical to SEQ ID NO: 3952

SEQ ID NO: 13041 - protein, 383 aa, Neisseria meningitidis; identical to SEQ ID NO: 2081

SEQ ID NO: 13042 - protein, 231 aa, Neisseria meningitidis; identical to SEQ ID NO: 2473

SEQ ID NO: 13043 - protein, 284 aa, Neisseria meningitidis; identical to SEQ ID NO: 3207

SEQ ID NO: 13044 - protein, 322 aa, Neisseria meningitidis; identical to SEQ ID NO: 2415

SEQ ID NO: 13045 - protein, 354 aa, Neisseria meningitidis; identical to SEQ ID NO: 3286

SEQ ID NO: 13046 - protein, 106 aa, Neisseria meningitidis; identical to SEQ ID NO: 3331

SEQ ID NO: 13047 - protein, 484 aa, Neisseria meningitidis; identical to SEQ ID NO: 8676

SEQ ID NO: 13048 - protein, 268 aa, Neisseria meningitidis; identical to SEQ ID NO: 8867

SEQ ID NO: 13049 - protein, 948 aa, Neisseria meningitidis; identical to SEQ ID NO: 2444

SEQ ID NO: 13050 - protein, 240 aa, Neisseria meningitidis; identical to SEQ ID NO: 2932

SEQ ID NO: 13051 - protein, 329 aa, Neisseria meningitidis; identical to SEQ ID NO: 2335

SEQ ID NO: 13052 - protein, 237 aa, Neisseria meningitidis
LRLYESGQVNIPADFLLAAVQLGVDIQFVFTGIHSANLNAVSDDLNKKLDDAIGKSNVENQINGNVSNAVIASSGSVVHQINTQNHVIRTRVDSKPGKEHITLEQASKLQQLVKQVAAAEEIAKRSPKSIRAIWASLNAHCKVPSYKLIALSDYDKAETYLRKWLGRLSNTATSKNNDPDWRKKKYAYIKLNVKQLELEDWLKSYLEKNFSVESLTELSDEDLQKTYAAVSTKKRKK

SEQ ID NO: 13053 - protein, 280 aa, Neisseria meningitidis; identical to SEQ ID NO: 431

SEQ ID NO: 13054 - protein, 149 aa, Neisseria meningitidis
MSIYAVAHIVHLYCAIAFVGGVFFEVLVLSVLHTGLVSCEARREVENAMSYRAVRVMPFVVGLLFASGIVMAANRYLSILGEPFATSFGTMLTLKILLAFSVLAHFAIAVVKMARSTLTVGWSKYIHTVVFTHMLLIVFLAKAMFYISW

SEQ ID NO: 13055 - protein, 152 aa, Neisseria meningitidis; identical to SEQ ID NO: 3595

SEQ ID NO: 13056 - protein, 56 aa, Neisseria meningitidis; identical to SEQ ID NO: 2834

SEQ ID NO: 13057 - protein, 261 aa, Neisseria meningitidis; identical to SEQ ID NO: 6261

SEQ ID NO: 13058 - protein, 380 aa, Neisseria meningitidis; identical to SEQ ID NO: 3197

SEQ ID NO: 13059 - protein, 92 aa, Neisseria meningitidis; identical to SEQ ID NO: 2199

SEQ ID NO: 13060 - protein, 577 aa, Neisseria meningitidis
LRTRPNIILSEIQNGSFSFRDFYTRRIKRIYPAFIAAVSLASVIASQIFLYEDFNQMRKTIELSTVFLSNIYLGFRLGYFDLSANENPVLHIWSLAVEEQYYLLYPLLLIFCYKKTKSLRVLRNISIILFLILTATSFLPSRFYTDILNQPNTYYLSTLRFPELLAGSLLAVYGQTQNGRRQTASGKRQLLSLLCFGALLACLFVIDKHNPFIPGMTLLLPCLLTALLIRSMQYGTLPTRILSASPIVFVGKISYSLYLYHWIFIAFAHYITGDKQLGLPAVSAVAALTAGFSLLSYYLIEQPLRKRKMTFKKAFFCLYLAPSLILVGYNLYARGILKQEHLRPLPGAPLAAENHFPETVLTLGDSHAGHLRGFLDYVGSREGWKAKILSLDSECLVWVDTTLADNPLCRKYRDEVEKAEAVFIAQFYDLRMGGQPVPRFEAQSFLIPGFQARFRETVKRIAAVKPVYVFANNTSISRSPLREEKLKRFAANQYLRPIQAMGDIGKSNQAVFDLVKDIPNVHWVDAQKYLPKNTVEIHGRYLYGDQDHLTYFGSYYMGREFHKHERLLKSSRDGALQ

SEQ ID NO: 13061 - protein, 99 aa, Neisseria meningitidis; identical to SEQ ID NO: 3406

SEQ ID NO: 13062 - protein, 139 aa, Neisseria meningitidis
MNLVKLLANNWQPIAIIALVGTLLAVSHHQGYKSAFAKQQAVIDKMEKDKAQALLLSAQNYARELEQARAEAKKYEVKAHAVGMALAKKQAEVSRLKTENKKEIENVLTQDRKNAGGGCIDGFGHHGLQLYKRALGYGN

SEQ ID NO: 13063 - protein, 265 aa, Neisseria meningitidis
MDTAQKQRWAITLSYDGSRFYGWQKQADGVPTVQAALETALAQIAGEAVSTTVAGRTDTGVHATAQVVHFDTTAVRPQQAWIRGVNAHLPEGIAVLHARQVALEFHARFDAYGRHYRYLLESSPVRSPLLKNRAGWTHLKLDIGPMRQAATYLIGEQDFSSFRAAECQAKSPIKTIYRANLTQSAGLVRLDLHGNAFLHHMVRNIMGALVYVGSGRLSVEGFAALIQERSRLKAPPTFMPDGLYLTGVDYPEAYGIIRPQIPEWL

SEQ ID NO: 13064 - protein, 64 aa, Neisseria meningitidis; identical to SEQ ID NO: 3483

SEQ ID NO: 13065 - protein, 208 aa, Neisseria meningitidis; identical to SEQ ID NO: 3160

SEQ ID NO: 13066 - protein, 155 aa, Neisseria meningitidis; identical to SEQ ID NO: 1336

SEQ ID NO: 13067 - protein, 193 aa, Neisseria meningitidis; identical to SEQ ID NO: 1322

SEQ ID NO: 13068 - protein, 313 aa, Neisseria meningitidis; identical to SEQ ID NO: 8154

SEQ ID NO: 13069 - protein, 433 aa, Neisseria meningitidis; identical to SEQ ID NO: 68

SEQ ID NO: 13070 - protein, 154 aa, Neisseria meningitidis; identical to SEQ ID NO: 1226

SEQ ID NO: 13071 - protein, 207 aa, Neisseria meningitidis; identical to SEQ ID NO: 1335

SEQ ID NO: 13072 - protein, 283 aa, Neisseria meningitidis; identical to SEQ ID NO: 3502

SEQ ID NO: 13073 - protein, 223 aa, Neisseria meningitidis; identical to SEQ ID NO: 2385

SEQ ID NO: 13074 - protein, 243 aa, Neisseria meningitidis; identical to SEQ ID NO: 2896

SEQ ID NO: 13075 - protein, 258 aa, Neisseria meningitidis; identical to SEQ ID NO: 3585

SEQ ID NO: 13076 - protein, 361 aa, Neisseria meningitidis
MKKSLIALTLAALPVAAMADVTLYGTIKAGVEVSRVKDAGTYKAQGGKSKTATQIADFGSKIGFKGQEDLGNGMKAIWQLEQKASIAGTNSGWGNRQSFIGLKGGFGTVRVGNLNTVLKDSGDNVNAWESGSNTEDVLGLGTIGRVESREISVRYDSPVFAGFSGSVQYVPRDNANDVDKYKHMKSSRESYHAGLKYENAGFFGQYAGSFAKYADLKDNAERVAVNTANAHPVKDYQVHRVVAGYDANDLYVSVAGQYEAAKNNTGTVGKQGKKHEQTQVAATAAYRFGNVTPRVSYAHGFKAKVNGVKDANYQYDQVIVGADYDFSKRTSALVSAGWLKQGKGAGKVEQTASMVGLSHKF

SEQ ID NO: 13077 - protein, 394 aa, Neisseria meningitidis; identical to SEQ ID NO: 1253

SEQ ID NO: 13078 - protein, 222 aa, Neisseria meningitidis
MLPSKYEDNALQIKEKSTERTAPFFVLEVTARSAADILGIHPNSAALFYRKIRTVINHHLVLAADEVFEGPVEPDESDFGGRRKGRRGRGAAGKVVVFGILKRNGRVYTVVVDNAKSETLLPVIKKKIMPDSIVYTDSLSSCDKLDVSGFIHYRINHSKEFADRQNHINGIENFWNQAKRVLRKYNGIDRKSFPLFLKECEFRFNFGTPSRQLKILQDWCGI

SEQ ID NO: 13079 - protein, 405 aa, Neisseria meningitidis; identical to SEQ ID NO: 157

SEQ ID NO: 13080 - protein, 257 aa, Neisseria meningitidis; identical to SEQ ID NO: 2923

SEQ ID NO: 13081 - protein, 336 aa, Neisseria meningitidis; identical to SEQ ID NO: 11671

SEQ ID NO: 13082 - protein, 60 aa, Neisseria meningitidis; identical to SEQ ID NO: 2288

SEQ ID NO: 13083 - protein, 322 aa, Neisseria meningitidis
MTAKPFSLNLTNLLLLAVLFAVSLSVGVADFRWSDVFSLSDSQQVMFISRLPRTFAIVLTGASMAVAGMIMQILMRNRFVEPSMAGAGQSAALGLLLMSLLLPAAPLPVKMSVAAVAALIGMLVFMMLIRRLPPTAQLMVPLVGIIFGGVVEAVATFIAYENEMLQMLGVWQQGDFSSVLLGRYELLWITGGLAVFAYLIADRLTILGLGETVSVNLGLNRTAVLWSGLIIVALITSLVIVTVGNIPFVGLVVPNIISRLIGDRLRQSLPAVALLGASLVLLCDIVGRVIVFPFEIPVSTVFGVLGTALFLWLLLRKPAHAV

SEQ ID NO: 13084 - protein, 157 aa, Neisseria meningitidis
MKKQITAAVMMLSMIAPAMANGLDNQAFEKYVFHTQADAPMQLAELSQKEMKETEGAFLPIVAGALMGGAISAWANHGISKIKTGQFASTRSTLAATAGGMIGGGYSSAMLRGAGITTSVFARSAWKGGNAIPNAVIRANGAALNQSSSAAMGKHRR

SEQ ID NO: 13085 - protein, 75 aa, Neisseria meningitidis; identical to SEQ ID NO: 1870

SEQ ID NO: 13086 - protein, 542 aa, Neisseria meningitidis; identical to SEQ ID NO: 2483

SEQ ID NO: 13087 - protein, 458 aa, Neisseria meningitidis; identical to SEQ ID NO: 2678

SEQ ID NO: 13088 - protein, 60 aa, Neisseria meningitidis; identical to SEQ ID NO: 2489

SEQ ID NO: 13089 - protein, 169 aa, Neisseria meningitidis
MNPFETKSVTFAEPIEMLYACHGKVRRFCGQVAMLSDYIAENGCNQIVLQTIRQIARYFNVAAPLHHEDEEENFFPLLLQYAPQAQESVDELLRQHVSLYGNWDAVAAEFAKLEADNAYVPDEEAFKRFVAGYDVHLAIEEPLFDMGNTFIPKEKLTEIGEIMAARRRK

SEQ ID NO: 13090 - protein, 107 aa, Neisseria meningitidis; identical to SEQ ID NO: 2314

SEQ ID NO: 13091 - protein, 218 aa, Neisseria meningitidis; identical to SEQ ID NO: 3549

SEQ ID NO: 13092 - protein, 343 aa, Neisseria meningitidis; identical to SEQ ID NO: 614

SEQ ID NO: 13093 - protein, 89 aa, Neisseria meningitidis; identical to SEQ ID NO: 494

SEQ ID NO: 13094 - protein, 436 aa, Neisseria meningitidis; identical to SEQ ID NO: 1523

SEQ ID NO: 13095 - protein, 46 aa, Neisseria meningitidis
MDTLLKIIIALSFSGAEALAVWLFITAADAVLRRFPKPSHYRRVKK

SEQ ID NO: 13096 - protein, 154 aa, Neisseria meningitidis
MKCPFCAHPDTRVADSRLMDERNAVRRRRYCPNCGKRFGTLETAELKMPAVIGPDKKRSPFNAQRLRNDLTAAARKSALTPEQIDETVRLTEHRLYTSGQRDIPSAALADMVLKELLRQDTEAAVRFAALHKRFDNPADFASWLAQAVKTGGKA

SEQ ID NO: 13097 - protein, 307 aa, Neisseria meningitidis
MKKRNNPLPLLNGVKPSYLVLPHEKQFYGLPLLHFLCIRFPFVGEDDWRRRLNSGFVVGSDGAALDEHSLFEPGKVVFYYRETSRESEPRIPFEEKILHIDEHLIVVDKPHFLPVIPSGRFLRETLLTRLRLRPELQHLNVEDITPLHRLDKDTAGVMLLSHNPATRGAYQTMFQNKTVWKTYEALAPTRTDLPYPIDVVSRLVRGEKFFTTQEAEGEPNAHTTVELIENRGEFSLYRLTPHTGKKHQLRVHMMGLGMPLLNDALYPVPSEAGSEDYRKPLKLLAKKIAFADPLSGRERVFCSRFCL

SEQ ID NO: 13098 - protein, 332 aa, Neisseria meningitidis; identical to SEQ ID NO: 2171

SEQ ID NO: 13099 - protein, 242 aa, Neisseria meningitidis; identical to SEQ ID NO: 3540

SEQ ID NO: 13100 - protein, 489 aa, Neisseria meningitidis; identical to SEQ ID NO: 2475

SEQ ID NO: 13101 - protein, 377 aa, Neisseria meningitidis; identical to SEQ ID NO: 2530

SEQ ID NO: 13102 - protein, 308 aa, Neisseria meningitidis
MSEMKKTKVHLISGFLGTGKTTALKSLMAQKDPNEKWVIIVNEFGEIGIDGAVLSDNGIPVAEIAGGCLCCTAGPQMGVTVQKMLRDAKPDRLMIEASGLAHAASVIDELKAKPLDSLLEIGAVFTVVNPRQFINPDYAQQALYKDQIGICDVLVASKTDLCTPEQLAEFHDKAAKLFPPKAKVVEVQNAQLDIRWLDIPVIEKSRYRLKALPDNTMGFQSQGFTFPAGRDFDGEKLTNFFNDLPKMTEGLVRAKGVFQVLGTWVWLNWVDGQWGANQVSWRRDSRFELIAKSFDADLIEQKLKDALE

SEQ ID NO: 13103 - protein, 433 aa, Neisseria meningitidis; identical to SEQ ID NO: 2952

SEQ ID NO: 13104 - protein, 284 aa, Neisseria meningitidis; identical to SEQ ID NO: 2008

SEQ ID NO: 13105 - protein, 360 aa, Neisseria meningitidis; identical to SEQ ID NO: 2477

SEQ ID NO: 13106 - protein, 389 aa, Neisseria meningitidis; identical to SEQ ID NO: 2683

SEQ ID NO: 13107 - protein, 245 aa, Neisseria meningitidis; identical to SEQ ID NO: 428

SEQ ID NO: 13108 - protein, 272 aa, Neisseria meningitidis; identical to SEQ ID NO: 1395

SEQ ID NO: 13109 - protein, 261 aa, Neisseria meningitidis; identical to SEQ ID NO: 1996

SEQ ID NO: 13110 - protein, 119 aa, Neisseria meningitidis; identical to SEQ ID NO: 3189

SEQ ID NO: 13111 - protein, 768 aa, Neisseria meningitidis
MAKNLLIVESPSKAKTLKKYLGGDFEILASYGHVRDLVPKSGAVDPDNGFAMKYQLISRNGKHVDAIVAGAKEAENIYLATDPDREGEAISWHLLEILKSKRGLKNIKPQRVVFHEITKNAVLDAVAHPREIEMDLVDAQQARRALDYLVGFNLSPLLWKKIRRGLSAGRVQSPALRLICERENEIRAFEAQEYWTVHLDSHKGRSKFTAKLAQYNGAKLEQFDLSNEAAQADVLKELEGKEAVVTAIEKKKRSRNPAAPFTTSTMQQDAVRKLGFTTDRTMRTAQQLYEGIDVGQGAIGLITYMRTDSVNLADEALTEIRHYIENKIGKEYLPSAAKQYKTKSKNAQEAHEAIRPTSVYRTPESVKPFLSADQFKLYQMIWQRTVACQMTPAKFDQTTVDITVGKGVFRVTGQVQTFAGFLSVYEESSDDEEGEDSKKLPEMSEGDKLPVDKLYGEQHFTTPPPRYNEATLVKALEEYGIGRPSTYASIISTLKDREYVTLEQKRFMPTDTGDIVNKFLTEHFAQYVDYHFTAKLEDQLDEIADGKRQWIPLMDKFWKPFIKQVEEKEGIERAKFTTQELDETCPKCGEHKLQIKFGKMGRFVACAGYPECSYTRNVNETAEEAAERIAKAEAEQAELDGRECPKCGGRLVYKYSRTGSKFIGCANYPKCKHVEPLEKPKDTGVQCPQCKKGNLVERKSRYGKLFYSCSTYPDCNYATWNPPVAESCPKCAWPVLTIKTTKRWGVEKVCPQKECGWKEQIEPPAPKE

SEQ ID NO: 13112 - protein, 321 aa, Neisseria meningitidis; identical to SEQ ID NO: 2913

SEQ ID NO: 13113 - protein, 130 aa, Neisseria meningitidis
MPTSTKPYILRALCEWCSDNSLTPHILVWVNEHTRVPMQYVRDNEIMLNIGATATQNLQIDNDWISFSARFSGQAHDIWIPVGHVLSLFARETGEGMGFELEAYRPDTPPENTSAETAPRPAKKGLKLVK

SEQ ID NO: 13114 - protein, 386 aa, Neisseria meningitidis; identical to SEQ ID NO: 2901

SEQ ID NO: 13115 - protein, 334 aa, Neisseria meningitidis; identical to SEQ ID NO: 12342

SEQ ID NO: 13116 - protein, 117 aa, Neisseria meningitidis; identical to SEQ ID NO: 3386

SEQ ID NO: 13117 - protein, 65 aa, Neisseria meningitidis; identical to SEQ ID NO: 127

SEQ ID NO: 13118 - protein, 148 aa, Neisseria meningitidis; identical to SEQ ID NO: 2500

SEQ ID NO: 13119 - protein, 259 aa, Neisseria meningitidis; identical to SEQ ID NO: 3243

SEQ ID NO: 13120 - protein, 201 aa, Neisseria meningitidis
LNTLYLGSNSPRRMEILTQLGYWVVKLPADIDETVRQNEDPARYVQRMAEEKNRTALPLFCETNGAMPNFPLITADTCVVSDGIILGKPRSQAEAIEFLNRLSGKQHTVLTAVCIRYRGKTSSRVQTNRVVFKPLSSEEISAYVQSGEPMDKAGAYAVQGIGGIFIQSIEGSFSGIMGLPVYETVSMLQDLGYRTPPFIRA

SEQ ID NO: 13121 - protein, 534 aa, Neisseria meningitidis
VPSDKQNMPNKKKKAAFARAATENGVPDVSNIKNSYDDLMYESKAFSQTAINALEARARMMGLQPAPAANAKVLELGCSMGGNIITQALYYPDAEFVGIDLSGRQVAQGNAIIEKMGLKNVRLEEKDILTVDESFGKFDYIIVHGIWSWVPDAVKDKIFSICRNNLTEHGIAYISYNVYPGWKRQEQLREIMYFAGRDVLEEPLEARTRKGLDALKALAEILENDKGLDGGGKLPAIQKILNHNFYYIAHEYMEAFNDPIYVNGFIEWANRHRLAYIGDADLHASFVSWMAEHTRERILALAGGDYIAKEFYSDILSDRQFRRSLLCREEVGDTVRRDESVAVEVIESLNFRPARGETINFDENDTLLSGIRDVMKTGEPFKTEDVAENLARRFPGLTFDRMKINSQLLLQTILGRFSVSSDNAGKQFFEDHKTYVPARFTDYAAAFVEHGAEAFVRPANRYNESTPSFGYGHLYIMRQLSRPTSKQALIETVAENLNIVSTTPDGLTFHPPAEVYVEEILADLADRHFLVSAD

SEQ ID NO: 13122 - protein, 228 aa, Neisseria meningitidis
MFDFGLGELVFVGIIALIVLGPERLPEAARTAGRLIGRLQRFVGSVKQEFDTQIELEELRKAKQEFEAAAAQVRDSLKETGTDMQNSLHDISDGLKPWEKLPEQRTPADFGVDENGNPFPDAANTLSDGISDVMPSERSYASAETLGNDGQTGSTAEPAETDQDRAWREYLTASAAAPVVQTVEVSYIDTAVETPVPHTTSLRKQAISRKRGLRPKHRAKPKLRVRKS

SEQ ID NO: 13123 - protein, 258 aa, Neisseria meningitidis; identical to SEQ ID NO: 1434

SEQ ID NO: 13124 - protein, 262 aa, Neisseria meningitidis; identical to SEQ ID NO: 3749

SEQ ID NO: 13125 - protein, 417 aa, Neisseria meningitidis
VDKLKISANGPLNGEITVSGAKNAALPLMCAGLLTSGTLRLKNVPMLADVKTTQKLLQGMGARVLTDNISEFEINGGTVNNTCAPYELVRTMRASILVLGPTLARFGEAQVSLPGGCAIGSRPVDQHLKGLEAMGAEIVIEHGYVKAKGKLKGTRVAMDVVTVGGTENLLMAATLAEGTTVLENCAIEPEVVDLAECLVKMGAKISGIGTSTMIVEGADELHGCEHSVVPDRIEAGTFLCAVAITGGRVVLRNAAPKTMEVVLDKLVEAGAVIEAGDDWIAIDMRQRPKAVDIRTVVHPGFPTDMQAQFMALNAVAEGSCRVVETIFENRFMHVPELNRMGANITTEGNTAFVQGVEQLSGAVVKATDLRASASLVIAGLAARGETVVEQIYHLDRGYENIEKKLGSVGAKIERVSG

SEQ ID NO: 13126 - protein, 157 aa, Neisseria meningitidis; identical to SEQ ID NO: 8970

SEQ ID NO: 13127 - protein, 559 aa, Neisseria meningitidis; identical to SEQ ID NO: 8735

SEQ ID NO: 13128 - protein, 311 aa, Neisseria meningitidis; identical to SEQ ID NO: 8181

SEQ ID NO: 13129 - protein, 68 aa, Neisseria meningitidis; identical to SEQ ID NO: 531

SEQ ID NO: 13130 - protein, 168 aa, Neisseria meningitidis
MTALFYLPFPWFAEETINLTAAVIFAVAALTDWFDGFLARLWKQTSDFGAFLDPVADKLMVAVSLLLLVKLDRTYVLFAMIIIGREITISALREWMAQMGKRNSVAVATVGKFKTAAQMLAIFLLLLNIPDFYGFNLVVIGNVLMFIASLLTVWSMLYYLKMAWKEIA

SEQ ID NO: 13131 - protein, 273 aa, Neisseria meningitidis; identical to SEQ ID NO: 8820

SEQ ID NO: 13132 - protein, 152 aa, Neisseria meningitidis
MKAIQKGFTLIELMIVIAIVGILAAVALPAYQDYTARAQMSEALTLAEGQKSAVVEYYSDNGTFPANNTSAGIAASSTITGKYVSSVAVTAEASGNASIAKITAKMKKNGVNKDISEKTLVLVGKQNSGSFSWTCQKGDVDEKFLPSSCRAK

SEQ ID NO: 13133 - protein, 101 aa, Neisseria meningitidis; identical to SEQ ID NO: 2399

SEQ ID NO: 13134 - protein, 296 aa, Neisseria meningitidis; identical to SEQ ID NO: 2263

SEQ ID NO: 13135 - protein, 55 aa, Neisseria meningitidis; identical to SEQ ID NO: 1895

SEQ ID NO: 13136 - protein, 69 aa, Neisseria meningitidis; identical to SEQ ID NO: 3057

SEQ ID NO: 13137 - protein, 348 aa, Neisseria meningitidis; identical to SEQ ID NO: 7414

SEQ ID NO: 13138 - protein, 424 aa, Neisseria meningitidis; identical to SEQ ID NO: 2529

SEQ ID NO: 13139 - protein, 626 aa, Neisseria meningitidis; identical to SEQ ID NO: 2278

SEQ ID NO: 13140 - protein, 126 aa, Neisseria meningitidis
MKQTVKWLAAALIALGLNQAVWADDVSDFRENLQAAAQGNAAAQYNLGAMYAEGQGVRQDYVEAVRWFRKAADQGLAQAQFNLGAMYYKGHGVRQDRALAQEWLGKACQNGNQDGCDNDQRLKAGY

SEQ ID NO: 13141 - protein, 110 aa, Neisseria meningitidis; identical to SEQ ID NO: 7667

SEQ ID NO: 13142 - protein, 598 aa, Neisseria meningitidis
MNKIYRIIWNSALNAWVVVSELTRNHTKRASATVATAVLATLLFATVQANATDDDDLYLEPVQRTAVVLSFRSDKEGTGEKEGTEDSNWAVYFDEKRVLKAGAITLKAGDNLKIKQNTNENTNENTNDSSFTYSLKKDLTDLTSVETEKLSFGANGNKVNITSDTKGLNFAKETAGTNGDPTVHLNGIGSTLTDTLLNTGATTNVTNDNVTDDEKKRAASVKDVLNAGWNIKGVKPGTTASDNVDFVRTYDTVEFLSADTKTTTVNVESKDNGKRTEVKIGAKTSVIKEKDGKLVTGKGKGENGSSTDEGEGLVTAKEVIDAVNKAGWRMKTTTANGQTGQADKFETVTSGTKVTFASGNGTTATVSKDDQGNITVKYDVNVGDALNVNQLQNSGWNLDSKAVAGSSGKVISGNVSPSKGKMDETVNINAGNNIEITRNGKNIDIATSMTPQFSSVSLGAGADAPTLSVDDEGALNVGSKDANKPVRITNVAPGVKEGDVTNVAQLKGVAQNLNNRIDNVDGNARAGIAQAIATAGLAQAYLPGKSMMAIGGGTYRGEAGYAIGYSSISDTGNWVIKGTASGNSRGHFGTSASVGYQW

SEQ ID NO: 13143 - protein, 896 aa, Neisseria meningitidis
MSDNRLDTARRHSLFLARQLDNGKLKPEIFLPMLDKVLTEADFQAFADWDKIRAEENEEELARQLRGLRRYVVSQIIVRDINRISDLNEVTRTITLFADFAVNTALDFAYAYYRDMYGTPIGRYTKSPQHLSVVAMGKAGGHELNVSSDIDLIFTYPESGDTDGRRERGNQEFFTKVGQKLIALLNDITADGQVFRVDMRLRPDGDSGALVLSETALEQYLITQGREWERYAWCKGRVVTPYPNGIKSLVRPFVFRKYLDYSAYEAMRKLHRQISSEVSKKGMADNIKLGAGGIREVEFIAQIFQMIRGGQMRALQLKGTQETLKKLAETGIMPSENVETLLAAYRFLRDVEHRLQYWDDQQTQTLPTSPEQRQLLAESMGFDSYSAFSDGLNIHRNKVNQLFNEILSEPEEQTQDNSEWQWAWQEKPDEEERLGRLKEYGFDAETIATRLDQIRNGHKYRHLSAHAQPRFDAIVPLFVQAAAEQNNPTDTLMRLLDFLENISRRSAYLAFLNEHPQTLAQLAQIMGQSSWVAAYLNKYPILLDELISAQLLDTAFDWQALAAALSDDLKACGGDTEAQMDTLRRFQHAQVFRLAVQDLAGLWTVESLSDQLSALADTILAAALLCAWADMPKKHRDTPQFAIVGYGKLGGKELGYASDLDLVYLYDDPHPDAGDVYSRLARRLTNWLSTATGAGSLYETDLRLRPNGDAGFLAHSIAAFEKYQRENAWTWEHQSLTRARFICGTSEIQTAFDRIRTEILTAERDQTALAGEIIEMREKMFPTHPPADSNVKYARGGVVDVEFIVQYLILAHARQYPQLLDNYGNIALLNISADCGLIDKTLAGQSRTAYRFYRRQQHNTKLRDAAKTEVTGELLAHYGNVRKLWREVFGEEAATV

SEQ ID NO: 13144 - protein, 812 aa, Neisseria meningitidis; identical to SEQ ID NO: 8626

SEQ ID NO: 13145 - protein, 168 aa, Neisseria meningitidis; identical to SEQ ID NO: 2380

SEQ ID NO: 13146 - protein, 596 aa, Neisseria meningitidis; identical to SEQ ID NO: 3153

SEQ ID NO: 13147 - protein, 336 aa, Neisseria meningitidis
MLPFLPEPSLSYTQQNRTAVLLLNLGTPDAPTAQAVRPYLKSFLTDRRVVELPKWLWYPILHGLVLTLRPKKSAHAYEKIWFKEGSPLEVYTARQAAALAERMPDLIVRHAMTYGNPSVADVLSELKAQGAGRLLVIPMYPQYAASSSGAAVDKVCEQLLLQRNQMSVRTVSRFYDDTGYIDAMKNHILRYWAEHGRGKKLMLSFHGVPQKHYDLGDPYPDECRHTAKLLAEALELTEDQYVVSFQSQFGRAKWVTPSTQDLFGKLPKQGVTELDVFCPGFLADCLETLEEIALMGREQFYEAGGKSYRYIPCLNDNPDWIDALVALAEENLGGWR

SEQ ID NO: 13148 - protein, 808 aa, Neisseria meningitidis; identical to SEQ ID NO: 2836

SEQ ID NO: 13149 - protein, 324 aa, Neisseria meningitidis; identical to SEQ ID NO: 2011

SEQ ID NO: 13150 - protein, 621 aa, Neisseria meningitidis; identical to SEQ ID NO: 3145

SEQ ID NO: 13151 - protein, 273 aa, Neisseria meningitidis; identical to SEQ ID NO: 221

SEQ ID NO: 13152 - protein, 419 aa, Neisseria meningitidis; identical to SEQ ID NO: 1950

SEQ ID NO: 13153 - protein, 433 aa, Neisseria meningitidis; identical to SEQ ID NO: 8831

SEQ ID NO: 13154 - protein, 441 aa, Neisseria meningitidis
MKKYLFRAALYGIAAAILAACQSKSIQTFPQPDTSVINGPDRPVGIPDPAGTTVGGGGAVYTVVPHLSLPHWAAQDFAKSLQSFRLGCANLKNRQGWQDVCAQAFQTPVHSFQAKQFFERYFTPWQVAGNGSLAGTVTGYYESVLKGDDRRTAQARFPIYGIPDDFISVPLPAGLRSGKALVRIRQTGKNSGTIDNTGGTHTADLSRFPITARTTAIKGRFEGSRFLPYHTRNQINGGALDGKAPILGYAEDPVELFFMHIQGSGRLKTPSGKYIRIGYADKNEHPYVSIGRYMADKGYLKLGQTSMQGIKAYMRQNPQRLAEVLGQNPSYIFFRELAGSSNDGPVGALGTPLMGEYAGAVDRHYITLGAPLFVATAHPVTRKALNRLIMAQDTGSAIKGAVRVDYFWGYGDEAGELAGKQKTTGYVWQLLPNGMKPEYRP

SEQ ID NO: 13155 - protein, 422 aa, Neisseria meningitidis
MSSEALAKETLNPFEIARKQVKTACDRLKTDPAVYEILKSPTRVLEVNFPVKLDDGTVKTFTGYRSQHNNAVGPYKGGVRFHPGVNLDEVKALSIWMTIKCCVAGIPYGGGKGGITLDPRDYSEAELERIARAYSEAISPLIGEKIDIPAPDVNTNGKIMSWMVDAYENVVKHSAPGVFTGKPVEFGGSLARTEATGYGVNLAAVQALEKLGKDVKGATYAIQGFGNVGYHTGYYAHQSGAKVVAVSTVDVAIYNENGLDMEALFKEFQEKGFITNEAGYGKEITNAELLALDVDVLAPCALENQLTSENAGKVRAKIVVEGANGPTTPEADVILRQNGVLVVPDILANCGGVVVSYFEWVQNLQGYYWEFDEVQEKETVVLRRAFRDIWNLAQEYDVDLRTASYMMSIRRVEKAMKLRGWY

SEQ ID NO: 13156 - protein, 348 aa, Neisseria meningitidis
MIPATYTLSQITARLGGEWRGEDISVTTVRPLADAQAEHISFLANPKYKAEVHDSSAGAVIVSAKAADGFEGRNLIVADDPYLYFAKVARLFSPVVKARGGIHPTAVVEPGATVPASCEIGANVYIGANTVLGEGCRILANAVVQHDCKLGDEVVLHPNAVVYYGCTLGRRVEIHSGAVIGADGFGLAFAGDSWFKIPQTGAVTLGDDVEIGSNTNIDRGAMSDTTVGNGTKIDNQVQIGHNCKIGSHTVIAAKTGISGSVTIGSYCIIGGGVGTVGHIEIADKTTIGGGTSVTHSITESGKHLAGIFPMSTHKEWARNAVYIHRLSEMNKRLKTLEQQLSDTGQDSK

SEQ ID NO: 13157 - protein, 270 aa, Neisseria meningitidis; identical to SEQ ID NO: 2943

SEQ ID NO: 13158 - protein, 39 aa, Neisseria meningitidis; identical to SEQ ID NO: 2061

SEQ ID NO: 13159 - protein, 290 aa, Neisseria meningitidis; identical to SEQ ID NO: 2418

SEQ ID NO: 13160 - protein, 181 aa, Neisseria meningitidis
LILAVALGGLSAWLGRISEVEIEEVRLNPDEPQYTMDGLDGRRFDEQGYLKEHLSAKGAKQFPESSDIHFDSPHLVFFQEGRLLYEVGSDEAVYHTENKQVLFKNNVVLTKTADGKRQAGKVEAEKLHVDTESQYAQTDTPVSFQYGASHGQAGGMTYDHKTGMLNFSSKVKATIYDTKDM

SEQ ID NO: 13161 - protein, 99 aa, Neisseria meningitidis; identical to SEQ ID NO: 1110

SEQ ID NO: 13162 - protein, 311 aa, Neisseria meningitidis; identical to SEQ ID NO: 5677

SEQ ID NO: 13163 - protein, 231 aa, Neisseria meningitidis; identical to SEQ ID NO: 2520

SEQ ID NO: 13164 - protein, 199 aa, Neisseria meningitidis; identical to SEQ ID NO: 2002

SEQ ID NO: 13165 - protein, 575 aa, Neisseria meningitidis; identical to SEQ ID NO: 2951

SEQ ID NO: 13166 - protein, 480 aa, Neisseria meningitidis; identical to SEQ ID NO: 3560

SEQ ID NO: 13167 - protein, 485 aa, Neisseria meningitidis; identical to SEQ ID NO: 3359

SEQ ID NO: 13168 - protein, 314 aa, Neisseria meningitidis; identical to SEQ ID NO: 3488

SEQ ID NO: 13169 - protein, 431 aa, Neisseria meningitidis; identical to SEQ ID NO: 8095

SEQ ID NO: 13170 - protein, 225 aa, Neisseria meningitidis; identical to SEQ ID NO: 3326

SEQ ID NO: 13171 - protein, 111 aa, Neisseria meningitidis; identical to SEQ ID NO: 233

SEQ ID NO: 13172 - protein, 214 aa, Neisseria meningitidis; identical to SEQ ID NO: 5138

SEQ ID NO: 13173 - protein, 250 aa, Neisseria meningitidis
MITLLSLNNLPSKWDEIRYWLETQVFECEVMPYPNLTEHEAKQFERDFWDNIGCAPEEYVRIRRAIRLLEARYPDSLNELVCAAIATPLGEMLAVFGNKGLCLLEFVGQKHLEQEIAAVQKALRGRFVFREDERTQLLRQELDLYFKGRLKTFATPLEQIGTEFQKQAWDALLAIPYGETRSYKEQAQRLGNPKAVRAVAAANGQNKVSILIPCHRVIGSDGKLTGYAGGLNRKQFLLALERGEVQTALF

SEQ ID NO: 13174 - protein, 271 aa, Neisseria meningitidis; identical to SEQ ID NO: 3345

SEQ ID NO: 13175 - protein, 92 aa, Neisseria meningitidis; identical to SEQ ID NO: 2137

SEQ ID NO: 13176 - protein, 129 aa, Neisseria meningitidis; identical to SEQ ID NO: 3613

SEQ ID NO: 13177 - protein, 230 aa, Neisseria meningitidis; identical to SEQ ID NO: 1058

SEQ ID NO: 13178 - protein, 287 aa, Neisseria meningitidis; identical to SEQ ID NO: 2947

SEQ ID NO: 13179 - protein, 864 aa, Neisseria meningitidis; identical to SEQ ID NO: 3503

SEQ ID NO: 13180 - protein, 110 aa, Neisseria meningitidis; identical to SEQ ID NO: 3419

SEQ ID NO: 13181 - protein, 148 aa, Neisseria meningitidis; identical to SEQ ID NO: 1300

SEQ ID NO: 13182 - protein, 315 aa, Neisseria meningitidis
MEFFIILLAAVAVFGFKSFVVIPQQEVHVVERLGRFHRALTAGLNILIPFIDRVAYRHSLKEIPLDVPSQVCITRDNTQLTVDGIIYFQVTDPKLASYGSSNYIMAITQLAQTTLRSVIGRMELDKTFEERDEINSTVVAALDEAAGAWGVKVLRYEIKDLVPPQEILRSMQAQITAEREKRARIAESEGRKIEQINLASGQREAEIQQSEGEAQAAVNASNAEKIARINRAKGEAESLRLVAEANAEAIRQIAAALQTQGGADAVNLKIAEQYVAAFNNLAKESNTLIMPANVADIGSLISAGMKIIDSSKTAK

SEQ ID NO: 13183 - protein, 192 aa, Neisseria meningitidis; identical to SEQ ID NO: 2909

SEQ ID NO: 13184 - protein, 151 aa, Neisseria meningitidis; identical to SEQ ID NO: 6340

SEQ ID NO: 13185 - protein, 436 aa, Neisseria meningitidis; identical to SEQ ID NO: 3674

SEQ ID NO: 13186 - protein, 45 aa, Neisseria meningitidis; identical to SEQ ID NO: 645

SEQ ID NO: 13187 - protein, 145 aa, Neisseria meningitidis; identical to SEQ ID NO: 2822

SEQ ID NO: 13188 - protein, 91 aa, Neisseria meningitidis; identical to SEQ ID NO: 5612

SEQ ID NO: 13189 - protein, 377 aa, Neisseria meningitidis; identical to SEQ ID NO: 2272

SEQ ID NO: 13190 - protein, 117 aa, Neisseria meningitidis; identical to SEQ ID NO: 1331

SEQ ID NO: 13191 - protein, 208 aa, Neisseria meningitidis; identical to SEQ ID NO: 2728

SEQ ID NO: 13192 - protein, 227 aa, Neisseria meningitidis
MLTKKEFEKFLDEVCTVLRQEAKNAPFKSQDIFENRVRALCIAKIPAYADIVINPEPVPQIFPDVPIGEYGVEVKFTLKDTWRSVANSIQEKNKADGVQHIYVVFGKMGGIPDVKWQLYEDSVIHVRTSHVPRFEVEIESDRPSLFEGFGISYAEFADLDMHEKMEYIRKYARNRLKEGERLWWIEDIDAVDSHDLPLEVRLYTSLPQEEKIRLRAEAALGRVLNLT

SEQ ID NO: 13193 - protein, 147 aa, Neisseria meningitidis; identical to SEQ ID NO: 2707

SEQ ID NO: 13194 - protein, 147 aa, Neisseria meningitidis; identical to SEQ ID NO: 2189

SEQ ID NO: 13195 - protein, 331 aa, Neisseria meningitidis; identical to SEQ ID NO: 2336

SEQ ID NO: 13196 - protein, 352 aa, Neisseria meningitidis; identical to SEQ ID NO: 2780

SEQ ID NO: 13197 - protein, 157 aa, Neisseria meningitidis; identical to SEQ ID NO: 2384

SEQ ID NO: 13198 - protein, 266 aa, Neisseria meningitidis; identical to SEQ ID NO: 8298

SEQ ID NO: 13199 - protein, 356 aa, Neisseria meningitidis; identical to SEQ ID NO: 6679

SEQ ID NO: 13200 - protein, 63 aa, Neisseria meningitidis; identical to SEQ ID NO: 1437

SEQ ID NO: 13201 - protein, 173 aa, Neisseria meningitidis; identical to SEQ ID NO: 2574

SEQ ID NO: 13202 - protein, 141 aa, Neisseria meningitidis
LWLLRALTAKLPQQRYAALFITLFFAAVLVFGRHDSMYWYPVLVNLMMLAVFGGSLFAGQTVIERLARLQQPDLPEKAVRYTRRVTQVWCVFFIANGTLAALLARLGRYDWWAVYTGVIAYVLMGMLFAGEWLYRKLVLKV

SEQ ID NO: 13203 - protein, 1320 aa, Neisseria meningitidis
MSVVLPLRGVTALSDFRVEKLLQKAAALDLPEVKLSSEFWYFVGSEKALDAATVEKLQALLAAQSVEQTPKAREGLHLFLVTPRLGTISPWASKATNIAENCGLAGIERIERSMAVWLEGALTDEQKQQWAALLHDRMTESVLPDFQTASKLFHHLESETFSGVDVLGGGKEALVKANTEMGLALSADEIDYLVENYQALQRNPSDVELMMFAQANSEHCRHKIFNADFILNGEKQPKSLFGMIRDTHNAHPEGTVVAYKDNSSVIEGAKIERFYPDAAENQGYRFHEEDTHIIMKVETHNHPTAIAPFAGAATGAGGEIRDEGATGKGSRPKAGLTGFTVSNLNIPGLKQPWEQDYGKPEHISSPLDIMIEGPIGGAAFNNEFGRPNLLGYFRTFEEKFDGQVRGYHKPIMIAGGLGSIQAQQTHKDEIPEGALLIQLGGPGMLIGLGGGAASSMDTGTNDASLDFNSVQRGNPEIERRAQEVIDRCWQLGGKNPIISIHDVGAGGLSNAFPELVNDAGRGAVFKLREVPLEEHGLTPLQIWCNESQERYVLSILEKDLDTFRAICERERCPFAVVGTATDDGHLKVRDDLFANNPVDLPLNVLLGKPPKTTRTDKTVTPSKKPFHADDIDITEAAYRVLRLPAVAAKNFLITIGDRSVGGMTHRDQMVGKYQTPVADCAVTMMGFNTYRGEAMSMGEKPTVALFDAPASGRMCVGEAITNIAAVNIGDIGNIKLSANWMAACGNEGEDEKLYRTVEAVSKACQALDLSIPVGKDSLSMKTVWQDGEEKKSVVSPLSLIISAFAPVKDVRKTVTPELKNVEDSVLLFIDLGFGKARMGGSAFGQVYNNMSGDAPDLDDTSRLKAFYNVIQQLVAEDKLLAYHDRSDGGLFAVLVEMAFAGRCGLDIDLNLLLAQTFITNHTALSQSLRTEEVKALAEWQETIARTLFNEELGAVIQVRKQDVADIINLFYQQQLHHNVFEIGTLTDENTLIIRDGQTHLISDNLIKLQQTWQETSHQIQRLRDNPACADSEFALIGDNGRSALFANLKFDVNEDIAAPFINSGAKPKIAILREQGVNGQIEMAAAFTRAGFDAYDVHMSDLMAGRIHLADFKMLAACGGFSYGDVLGAGEGWAKSILFHPALRDQFAAFFADPDTLTLGVCNGCQMVSNLAEIIPGTAGWPKFKRNLSEQFEARLSMVHVPKSASLILNEMQGSSLPVVVSHGEGRADFALHGGNISADLGIALQYVDGQNQVTQTYPLNPNGSPQGIAGITNADGRVTIMMPHPERVYRAAQMSWKPEGWTELSGWYRLFAGARKALG

SEQ ID NO: 13204 - protein, 508 aa, Neisseria meningitidis
MNPMYITFAIYLVAVLLIGLAAYFSTRNFDDYILGGRSLGPFVTAMSAGASDMSGWLLMGLPGAIYLSGLNEAWIAIGLLVGAYFNWLLVAGRLRVHTEYANNALTLPDYFFHRFGAGGHLMKVVSALIILFFFTIYCASGIVAGATLFQSLFEGMTYNQAMWLGAGATIAYTFLGGFLAVSWTDTLQASLMIFALILTPVMVYLGLGGAEQMSAAIQSVAAGTGKEYGSLFAGTTVIGIISTAAWGLGYFGQPHILARFMAAESAKSLVSARRIGMTWMALCLAGAVAVGYFGIAYFGANPDKVSSMSGNHERIFIALSTLLFNPWIAGIILSAILAAVMSTLSCQLLVCSSAITEDFYKGFLRKNAQQSELVWVGRLMVLAIAVISILIASDPNSKVLGLVSYAWAGFGAAFGPIVILSVLWKRITAYGALSGMVAGALTVVVWAEWVKKPAQAAGESGLLTMYEIVPGFIVCLIIAVLVSLFNKEPSREIQERFEKADADYRAAR

SEQ ID NO: 13205 - protein, 186 aa, Neisseria meningitidis; identical to SEQ ID NO: 2093

SEQ ID NO: 13206 - protein, 283 aa, Neisseria meningitidis
MTLLGIKLKQTQQLNQRLQQSLRVLQMSGIELEREVENWLSDNPLLERKDTDEFSDAEFSHYTAPARQIGGDEGEDMLSNIAGEQDFKQYLHAQVCEHPLSDQEAACVHILIDFLDEQGYLTDSIEDILDHTPLEWMLDEAMLQHALTALKKFDPAGVAAADLNESLILQIERSGECAAKPAALHIVRNALDSIDGNRSQTLARIKKHLPQTDSGTLEAALDLIASLNPFPAAGFASSTPTPYSDEALANLLAFRGMEVSRRTIAKYRESLEIPAAHKRKTAE

SEQ ID NO: 13207 - protein, 100 aa, Neisseria meningitidis; identical to SEQ ID NO: 3521

SEQ ID NO: 13208 - protein, 119 aa, Neisseria meningitidis; identical to SEQ ID NO: 2176

SEQ ID NO: 13209 - protein, 525 aa, Neisseria meningitidis; identical to SEQ ID NO: 8126

SEQ ID NO: 13210 - protein, 330 aa, Neisseria meningitidis; identical to SEQ ID NO: 9010

SEQ ID NO: 13211 - protein, 295 aa, Neisseria meningitidis; identical to SEQ ID NO: 4693

SEQ ID NO: 13212 - protein, 468 aa, Neisseria meningitidis; identical to SEQ ID NO: 2817

SEQ ID NO: 13213 - protein, 150 aa, Neisseria meningitidis; identical to SEQ ID NO: 2229

SEQ ID NO: 13214 - protein, 71 aa, Neisseria meningitidis; identical to SEQ ID NO: 6205

SEQ ID NO: 13215 - protein, 167 aa, Neisseria meningitidis; identical to SEQ ID NO: 189

SEQ ID NO: 13216 - protein, 388 aa, Neisseria meningitidis; identical to SEQ ID NO: 3092

SEQ ID NO: 13217 - protein, 102 aa, Neisseria meningitidis; identical to SEQ ID NO: 254

SEQ ID NO: 13218 - protein, 72 aa, Neisseria meningitidis; identical to SEQ ID NO: 202

SEQ ID NO: 13219 - protein, 218 aa, Neisseria meningitidis; identical to SEQ ID NO: 5912

SEQ ID NO: 13220 - protein, 322 aa, Neisseria meningitidis
MKLTLALPSLNLDEDEIRIPLCLPAFNKILQYGSLHRQSCTASAFYARYLWCGRLAERAAQSLNMPSETVALATPVWQKMGMHQANVLTAEYLNVGTDEAERLCRDLSAFYGDIPWRFVPVLPELWLVSLPCAYRWGAKPVLDLGGLLGADDQPDGEDALEWLRVQTEIQMWLAAHPVNHNRKKRGLPELNGLWLWDSLHGSSQGGTLFADTVWSRFHPDRRALPDNFRAYEETAAYLPDTHHILFMDDLRLTALTGDRERYAAILQQWEERWFAPLYEAVRIGKIKRLDIATDGQHGGTLTFKPADRWKFWRGAKTFDGIW

SEQ ID NO: 13221 - protein, 288 aa, Neisseria meningitidis; identical to SEQ ID NO: 12814

SEQ ID NO: 13222 - protein, 89 aa, Neisseria meningitidis; identical to SEQ ID NO: 2412

SEQ ID NO: 13223 - protein, 358 aa, Neisseria meningitidis; identical to SEQ ID NO: 8668

SEQ ID NO: 13224 - protein, 205 aa, Neisseria meningitidis
MFTGIVQGLGKLTAIHRPSEAFHTYVVELPQEAADNLQRGASVANNGCCLTITEIEGNRVSFDLMAETLAKTNLGLLKEGDCVNIERAARFGDEIGGHVMSGHIMATVPIVEIERDGYNRTVWFSLPHELKPYILTKGFVGLDGCSLTIGKVEDSRFNVHLIPETLERTLFGSRKVGDRINIEIDPNTQAIVDTVERLMAQRYAK

SEQ ID NO: 13225 - protein, 503 aa, Neisseria meningitidis
MSEQNHPQTEPQLDENQIIALRREKLHNIRQQRNAYPNDFKRDSFAADLHTQYGEIGKEELDPQGIPVKIAGRMMLKRQMGKASFATIQDVSGQIQLYLNNKGVSQEILDDFNHWDLGDIVGAEGTLFKTNHGELTVRVSGIRLLSKSLRPLPDKHKGLSDQETKYRQRYVDLIANGESRNTFIKRSQIIQSVRNFMVGEHYLEVETPMMHPIPGGATAKPFVTHHNALDIPLYLRIAPELYLKRLVVGGLERVFEINRSFRNEGMSVRHNPEFTMIEFYEAFSDYERMMQMAEDIIRNASRTVNGTANITYNGKEVDLESPFERLTILEAIKKYNPHYTDEQLNDAEWLKKEIVKHGESLPPSPGIGSLQLALFEGCAEGKLWNPTFIIDYPVEVSPLARASDTKQGLTERFELFVVGRELANGYSELNDPEDQAERFKSQVAQKDAGDDEAMHYDADYIRAMEFGLPPTGGCGIGIDRLVMLLTDSQTIRDVILFPQMRPE

SEQ ID NO: 13226 - protein, 544 aa, Neisseria meningitidis
MIKPNLRPKLGSSALIAFLSLYSSLVLNYAFFAKVVELHPFNGTGADIFLYTMPVVLFFLSNFVFHVIALPFVHKVLIPLILVISAAVSYQEIFFNIYFNKSMLNNVLQTTAAESARLITPGYVLWIVCLGVLPALAYIAVKVKYRVWYKEFLTRLVLAAVSFLCALGIAMLQYQDYASFFRNNKSVTHLIVPSNFIGAGVSKYKDWKRSNIPYTQLDMAVVQNRPAGSLRRFVVLVVGETTRAANWGLNGYSRQTTPLLAARGDEIVNFPQVRSCGTSTAHSLPCMFSTFDRTDYDEIKAEHQDNLLDIVQRAGVEVTWLENDSGCKGVCGKVPNTDVTSLNLPEYCRNGECLDNILLTKFDEVLNKNDKDAVLILHTIGSHGPTYYERYTEAERKFTPTCDTNEINKCTRATLVNTYDNTVLYVDQFIDKVIRKLENRDDLESVVHYVSDHGESLGENGMYLHAAPYAIAPSGQTHIPMVMWFSKAFRQHGGIDFQCLKQKAAENEYSHDHYFSTVLGLMDISNSQTYRKEMDILAACRRPR

SEQ ID NO: 13227 - protein, 162 aa, Neisseria meningitidis; identical to SEQ ID NO: 2867

SEQ ID NO: 13228 - protein, 218 aa, Neisseria meningitidis; identical to SEQ ID NO: 6313

SEQ ID NO: 13229 - protein, 240 aa, Neisseria meningitidis; identical to SEQ ID NO: 2593

SEQ ID NO: 13230 - protein, 356 aa, Neisseria meningitidis; identical to SEQ ID NO: 2047

SEQ ID NO: 13231 - protein, 357 aa, Neisseria meningitidis; identical to SEQ ID NO: 3038

SEQ ID NO: 13232 - protein, 98 aa, Neisseria meningitidis; identical to SEQ ID NO: 2571

SEQ ID NO: 13233 - protein, 371 aa, Neisseria meningitidis; identical to SEQ ID NO: 2579

SEQ ID NO: 13234 - protein, 287 aa, Neisseria meningitidis; identical to SEQ ID NO: 3310

SEQ ID NO: 13235 - protein, 160 aa, Neisseria meningitidis; identical to SEQ ID NO: 1762

SEQ ID NO: 13236 - protein, 168 aa, Neisseria meningitidis; identical to SEQ ID NO: 2519

SEQ ID NO: 13237 - protein, 129 aa, Neisseria meningitidis; identical to SEQ ID NO: 3332

SEQ ID NO: 13238 - protein, 169 aa, Neisseria meningitidis
MKKKLLSGIKFAVQTALVFLLVSLFLDWIRKPEEPAGAAGRPLTLLSGQRLTLGQFSRDKAVLVYFWGSWCGVCRYQSPIIDDLAADGVPVVGVAVRSGSASEVAAYMAKRGLGFPTANDEDGGLARSWRIVATPAVVLVKNGKMVHYTTGISSYWGLRARIFQADVFG

SEQ ID NO: 13239 - protein, 240 aa, Neisseria meningitidis; identical to SEQ ID NO: 3202

SEQ ID NO: 13240 - protein, 253 aa, Neisseria meningitidis; identical to SEQ ID NO: 265

SEQ ID NO: 13241 - protein, 256 aa, Neisseria meningitidis
VSETQNEQPVQPLVEHLIELRRRLMWTVVGILVCFFGMMPFAQQLYTFIADPLMANLPKDTSMIATDVIAPFFVPVKVTLMAAFLISLPHTLYQIWAFVAPALYQNEKRLITPLVLSSVSLFFIGMAFAYFLVFPVIFKFLASVTPVGVNMATDIDKYLSFILGMFVAFGTTFEVPIVVILLTKISVVTTGQLKRARPYVIVGAFVIAAIITPPDVISQTLLAIPLILLYEAGIWFGRFFTPRSEQDGDIQPPATT

SEQ ID NO: 13242 - protein, 230 aa, Neisseria meningitidis; identical to SEQ ID NO: 3035

SEQ ID NO: 13243 - protein, 267 aa, Neisseria meningitidis
MNPAPKNLLFSSLLFSSLLFSSAAQAASEDSGRGPYYVQADLAYAAERITHDYPKPTGTDKDKISTVSDYFRNIRAHSIHPRVSVGYDFGGWRIAADYASYRKWNNNKYSVNTKVLQEKNGNRKELKTENQENGTFHAASSLGLSAIYDFKLNDKFDKFKPYIGARVAYGHVKHQVHSVKKETTTVFTAPTQGAQKGGVIPEATISKPAYHESHSISSLGLGVIAGVGFDITPKLTLDTGYRYHNWGRLKNTRFKTHEVSLGMRYRF

SEQ ID NO: 13244 - protein, 232 aa, Neisseria meningitidis; identical to SEQ ID NO: 1935

SEQ ID NO: 13245 - protein, 363 aa, Neisseria meningitidis; identical to SEQ ID NO: 2781

SEQ ID NO: 13246 - protein, 107 aa, Neisseria meningitidis; identical to SEQ ID NO: 1793

SEQ ID NO: 13247 - protein, 498 aa, Neisseria meningitidis
MSLALVYSRALSGMNAPLVEVEAHLANGLPHFNIVGLPDTEVKESRDRVRAAIIQSGFEFPAKKITVNLAPADLPKESGRFDLPIAIGILAASGQVAPEKLAEYEFAGELALSGLLRPVRGALAMAWQGMQAKRAFVLPEENAGQAAVMRGITVYGARSLGEVAAHLNGIEPLAQTECQVPQMPSENTKLPDLVDVKGQHTARLALEIAAAGGHSLLMMGPPGTGKSMLSQRLPGILPPLTEDELVEVWALRSLLPNHQQQLDSNRPFRSPHHSASAAAMVGGGSDPRPGEISLAHHGVLFLDELPEFDRKVLEVLREPLENGEIHISRAARQAVYPAKFQLVAAMNPCPCGYLGHPVKPCRCTPESVARYRSKISGPLLDRIDLTIEVPSLSAAELMQQEAGESSASVLERVIAARDKQYARQGKVNAALSVSELDSQARIQKEAQEALGNLLEKLSLSARSFHRIMRVARTLADLAGDEEVGRSHVMKAVGFRRAL

SEQ ID NO: 13248 - protein, 186 aa, Neisseria meningitidis; identical to SEQ ID NO: 2604

SEQ ID NO: 13249 - protein, 95 aa, Neisseria meningitidis
LEKKIEPQDLMDDVYRAFDSVGNILNFRIVEKEQKGFWVSTKIKTVVFDSADMSSDDLFLKCLQSSYKAYFETEPAGLDKRQLMKTLIQKCGFSC

SEQ ID NO: 13250 - protein, 426 aa, Neisseria meningitidis
MENSLKEAALKFHELPVPGKISVTPTKSLATDKDLALAYSPGVAAPCMEIHADPQNAYKYTAKGNLVAVISNGTAVLGLGDIGALAGKPVMEGKGVLFKKFAGVDVFDIEIDEKDPQKLVDIIAALEPTFGGINLEDIKAPECFYIERELRKRCKIPVFHDDQHGTAIITAAAVLNALRFTGRKIEEATLVCSGAGAAAIACLNQLLDLGLKRENVTVCDSKGVIYQTREDKDRMDESKKFYAVEDNGQRVLADAVKGKDIFLGLSGANLLTPEMLNTMNEKPIVFAMANPNPEILPPLAKETRPDVVIGTGRSDFPNQVNNVLCFPFIFRGALDVGATTINEEMKRACVYALADLAMEEVTEEVVAAYGKKFEFGAEYLIPTPFDSRLLPRVATAAAKAAMESGVATRPIADLEAYAAKLSEWKL

SEQ ID NO: 13251 - protein, 262 aa, Neisseria meningitidis; identical to SEQ ID NO: 2198

SEQ ID NO: 13252 - protein, 85 aa, Neisseria meningitidis; identical to SEQ ID NO: 9765

SEQ ID NO: 13253 - protein, 231 aa, Neisseria meningitidis
MKAMILAAGRGERMRPLTDTTPKPLLDVAGKPLIGWHLCRLKQAGFTEIVINHAWLGRQIEDALGDGSAYGVNIAYSPEPAGGLETAGGIAQALPLLGGQPFLVVNGDVLTDIDFTAAFQTASSLPEHISAHLWLVENPPHNPDGDFSLLPDGSVRPEVNGGNGLTFSGVGIYRPEMFDGIEAGSVAKLAPVLRGEMRQNRVSGQKHTGLWLDVGTVCRLKEAQALAGAWK

SEQ ID NO: 13254 - protein, 248 aa, Neisseria meningitidis; identical to SEQ ID NO: 2452

SEQ ID NO: 13255 - protein, 145 aa, Neisseria meningitidis; identical to SEQ ID NO: 2729

SEQ ID NO: 13256 - protein, 147 aa, Neisseria meningitidis; identical to SEQ ID NO: 10578

SEQ ID NO: 13257 - protein, 141 aa, Neisseria meningitidis; identical to SEQ ID NO: 26

SEQ ID NO: 13258 - protein, 261 aa, Neisseria meningitidis; identical to SEQ ID NO: 3244

SEQ ID NO: 13259 - protein, 612 aa, Neisseria meningitidis; identical to SEQ ID NO: 3627

SEQ ID NO: 13260 - protein, 444 aa, Neisseria meningitidis
MAKKYFGTDGVRGEVGQFPITPDFVLKLGYAAGQVLVQHDTDQKPTVLIGKDTRISGYMLEAALVAGFTAAGVNVVQTGPLPTPGVAYLTRALRLSAGVMISASHNAYSDNGIKFFAEGGVKLSDEIELEIEAKIDEEMKTQPSARLGRARRISGADDRYIEFCKSTFPSHSDLRGLKLVIDTANGAGYGVAPKVFHELGAQVVSIGDEPNGYNINEKCGATYTKTLQAAVLQHEADYGIALDGDGDRLMMVDKNGKVYDGDSLIYVIAKARAREGINIGGVVGTVMTNMAMEIALKEQGVDFCRAKVGDRYVLAQLNQRSWLIGGEASGHILCMDKHNTGDGIISALQVLAALQTLNQDLATVCADWQPYPQTMINVRIQKGQKWQEASKDVLAEVEKELEGKGRVVLRASGTEPVVRVMVEARQADWARDGAERIASAIGSL

SEQ ID NO: 13261 - protein, 114 aa, Neisseria meningitidis; identical to SEQ ID NO: 3430

SEQ ID NO: 13262 - protein, 415 aa, Neisseria meningitidis; identical to SEQ ID NO: 4267

SEQ ID NO: 13263 - protein, 296 aa, Neisseria meningitidis; identical to SEQ ID NO: 2254

SEQ ID NO: 13264 - protein, 219 aa, Neisseria meningitidis; identical to SEQ ID NO: 2417

SEQ ID NO: 13265 - protein, 110 aa, Neisseria meningitidis; identical to SEQ ID NO: 8460

SEQ ID NO: 13266 - protein, 608 aa, Neisseria meningitidis; identical to SEQ ID NO: 2327

SEQ ID NO: 13267 - protein, 459 aa, Neisseria meningitidis; identical to SEQ ID NO: 2487

SEQ ID NO: 13268 - protein, 241 aa, Neisseria meningitidis; identical to SEQ ID NO: 2221

SEQ ID NO: 13269 - protein, 345 aa, Neisseria meningitidis; identical to SEQ ID NO: 2886

SEQ ID NO: 13270 - protein, 53 aa, Neisseria meningitidis
MAYFGGFVRALFDLGVFERGGVKGREKWFSRVWWRSEVLCLMCGGIFSVKLIL

SEQ ID NO: 13271 - protein, 210 aa, Neisseria meningitidis; identical to SEQ ID NO: 48

SEQ ID NO: 13272 - protein, 70 aa, Neisseria meningitidis; identical to SEQ ID NO: 232

SEQ ID NO: 13273 - protein, 291 aa, Neisseria meningitidis; identical to SEQ ID NO: 2244

SEQ ID NO: 13274 - protein, 245 aa, Neisseria meningitidis; identical to SEQ ID NO: 3451

SEQ ID NO: 13275 - protein, 693 aa, Neisseria meningitidis
MIYGSMPSEKLTIFQTAFVMQVNIQIPCMLYRRGSVKPPLFEAPRLLPSFTDPVVPKLSAPGGYIVDIPKGNLKTEIEKLSKQPEYAYLKQLQTAKNVDWKQVQLAYDKWDYKQEGLTGAGAAIVVIIVTALTYGYGAAAAGSVTAAGSSTAAAATTTAAATTTVSTAAAMQTAALASLYSQAAVAIINNKGDVGKALKDLGTSDTVKQIVTSALTAGALNQMGADIAQLNSKVRTELFSSTGNQTIANLGGRLATNLSNAGISAGINTAVNGGSLKDNLGNAALGALVNSFQGEAASKIKTTFSDDYVAKQFAHALAGCVSGLVQGKCKDGAIGAAVGEIVAESILGGRNPATLSDAEKHKVISYSKIIAGSVAALNGGDVNTEANAAEVAVVNNALNFDSTPTNAKKHQPQKPDKTALEKIIQSIMPAHAAGAMTNPQDKDAAIWISNIRNGITGPIVITSYGVYAAGWTAPLIGTAGKAAISTCMANPSGCTVMVTQAAEAGAGIATGAVTVGNAWEAPVGALSKAKAAKQAAPKETINNLANLAKAEQQILFRIAQRDTQLDAWKTGFNNRVRKGAGLLDASNIPITINGKTIKPVQAISLKGAPVYSGVSEQEIFALYRQMTGQNPNFRVLPDGRLANGIISTGEWAGTKIALRNFSKTENSTQARWTLDLQNPPSFIKGTKLELKFQ

SEQ ID NO: 13276 - protein, 66 aa, Neisseria meningitidis; identical to SEQ ID NO: 421

SEQ ID NO: 13277 - protein, 289 aa, Neisseria meningitidis; identical to SEQ ID NO: 2681

SEQ ID NO: 13278 - protein, 862 aa, Neisseria meningitidis
MKNQYSKSLHGVFYLAFYDKIHAFFAEQLFQLIINMNKKPTYISLFSSAGVGCYGFKTNGFECVATNELLEKRLKIQKYNQKCRFDSGYIAGDITLPETQAKLFAEIRRWNTEIDVVIATPPCQGMSVANHKKNNEMARNSLVVESIKIVREVQPKFFIFENVKAFLNTPCTDTDHQEKPIEEAIWSNLGGHYNILSNVLNFKDYGANSSRTRTLVIGVRKDIHHITPYDIFPKQTPPKTLRTLLADLPPLMQMGEISDDDIYHSYREFDRRMLPWIAQLKEGESAFQNTDPARIPHQIKNGEIIYNQNKNGDKYARWFLDREGPCIHTRNDILASQNTIHPTENRVFSVRELMRMMSIPPSFKWTAQDEKQLNALSFDEKKTFLKKEELNIRHCIGESVPTAVLANVAQNIQAALQQSELSMTEIQNLIKRENLSLADNLYRFIEQHFDTYPFSRLLQIAEYANAARSETAAYFTRIDIAFGLVNALPDFKKKKNLRILEPSVGIGNFIPLLAKKYADKEKVIFDLVDIDSNSLNLLSLLLKKLNLGSKFEFNIIHQDFLTATLPENYDLVIGNPPYGKVKASDKNLALYRKNATNKDTQNIFSFFIDKALTLSKTVALVVPKSVINAPEFQITRQQLITANINRIIDYGEKAFKGVKIETIAFIADQTDKDNQHITIESHIQETLIQNCKNYFFSDNFPYWLIYRNSEFDQIAQKLEFNVFQSFRDRQITKAHTQNSGNVRVLKSRNIGNNEIIDIEGYDSYVDSVAPFSVGKFINRKNVVMIPNLTYKPRAAFLPENSIADGSVALLTMKKHEKILTQRDLAYYATPEFEQFYRVARNYGSRSMNIDNHSVFFFGLLKD

SEQ ID NO: 13279 - protein, 296 aa, Neisseria meningitidis; identical to SEQ ID NO: 337

SEQ ID NO: 13280 - protein, 125 aa, Neisseria meningitidis; identical to SEQ ID NO: 2523

SEQ ID NO: 13281 - protein, 462 aa, Neisseria meningitidis
MSTRTEHDTMGNVEVPSEAYWGAQTQRSRNNFKIGGETLPQPLIYALALVKKAAAATNVSLGRIKPEQADLITQAADDVLNGKLDGQFPLVVWQTGSGTQSNMNMNEVLANRANEIAGTGLAAYQPVHPNDHVNHAQSTNDAFPTAIHVAAAIEINRHLIPAVKALRDTLDKKAQAFAPIVKIGRTHLQDATPLTLGQEFSGYVSQLDHGLGRLNDALKDLYELALGGTAVGTGLNSHPEYAEKAAAKLAELSGLPFVSAPNKFEALGGRDAAVAASGALKTLAASLNKIANDIRWLASGPRCGLGEIKIPENEPGSSIMPGKVNPTQCEAMTMVCCQVFGNDVTIGMAGASGNFELNVYMPVIAYNLLQSIRLLGDACNSFNEHCAIGIEPVPEKIDYFLHHSLMLVTALNRKIGYENAAKVAKTAYKNNKSLRETAVELGLLTGEEFDELVVPADMVHPR

SEQ ID NO: 13282 - protein, 418 aa, Neisseria meningitidis; identical to SEQ ID NO: 2076

SEQ ID NO: 13283 - protein, 347 aa, Neisseria meningitidis
MQITDLLAFGAKNKASDLHLSSGISPMIRVHGDMRRINLPEMSAEEVGNMVTSVMNDHQRKIYQQNLEVDFSFELPNVARFRVNAFNIGRGPAAVFRTIPSTVLSLEELKAPSIFQKIAESPRGMVLVTGPTGSGKSTTLAAMINYINETQPAHILTIEDPIEFVHQSKKSLINQRELHQHTLSFANALRSALREDPDVILVGEMRDPETIGLALTAAETGHLVFGTLHTTGAAKTVDRIVDVFPVGEKEMVRSMLSESLTAVISQNLLKTHDGNGRVASHEILIANPAVRNLIRENKITQINSVLQTGQASGMQTMDQSLQSLVRQGLIAPEVARRRAQNSESMSF

SEQ ID NO: 13284 - protein, 462 aa, Neisseria meningitidis; identical to SEQ ID NO: 2557

SEQ ID NO: 13285 - protein, 53 aa, Neisseria meningitidis
LRIAGKYGGIRISGGAKGNARYSTKPPIAADAAFRTAPLAPLSHLPYLFGTYL

SEQ ID NO: 13286 - protein, 331 aa, Neisseria meningitidis; identical to SEQ ID NO: 2682

SEQ ID NO: 13287 - protein, 144 aa, Neisseria meningitidis; identical to SEQ ID NO: 9600

SEQ ID NO: 13288 - protein, 309 aa, Neisseria meningitidis; identical to SEQ ID NO: 3414

SEQ ID NO: 13289 - protein, 354 aa, Neisseria meningitidis; identical to SEQ ID NO: 2253

SEQ ID NO: 13290 - protein, 344 aa, Neisseria meningitidis; identical to SEQ ID NO: 2104

SEQ ID NO: 13291 - protein, 671 aa, Neisseria meningitidis
MMKLNPQQLEAVRYLGGPLLVLAGAGSGKTGVITQKIKYLIVNVGYLPHTVAAITFTNKAAAEMQERVAKMLHKSQTRGLTICTFHSLGMKILREEANHIGYKKNFSILDSTDSAKIIGELLGGTGKEAVFKAQHQISLWKNDLKTPEDVVQTASNIWEQQTARVYASYQETLQSYQAVDFDDLIRLPAVLLQQNSEVRNKWQRRLRYLLVDECQDTNTCQFTLMKLLTGAEGMFTTVGDDDQSIYAWRGANMENLRKMQENYPQMKVIKLEQNYRSTARILKIANKVIENNPKLFTKKLWSKLGEGEPVKVVACQNEQHEADWVVSQIVKQKLIGGDKTQYADFAVLYRGKHQARIFEEALRGARIPYRLSGGQSFFDKAEIKDVLSYVRLLANPNDDPAFLRAVTTPKRGIGDVTLGKLNTYAHEHECSLYEAAQNEEALATLNNTNRQHLQAFMDMFGSYRAKAETGEAGEFINSLLEEIDYENHLMQNEEGKAGEIKWRNVSDLVSWFARKGGEDGKNIIELAQTVALMTLLEGKDEEETDAVSLSTLHAAKGLEYPYVFLVGCEEGVLPHNDSIEEGNVEEERRLMYVGITRAKRQLTLTHCVKRKKQGTWQFPEPSRFIDEMPQEDLKILGRKGGEPIVSKEEGRRNLADIIGRLDSMKKGNPSD

SEQ ID NO: 13292 - protein, 179 aa, Neisseria meningitidis; identical to SEQ ID NO: 8483

SEQ ID NO: 13293 - protein, 360 aa, Neisseria meningitidis; identical to SEQ ID NO: 1598

SEQ ID NO: 13294 - protein, 268 aa, Neisseria meningitidis
MQNHVISLASAAERRAHIADTFGRHGIPFQFFDALMPSERLEQAMAELVPGLSAHPYLSSVEKACFMSHVVLWKQALDEGVPYVAVFEDDVLLGEGAEKFLDEDAWLQERFDKDSAFIVRLETMFMHVLTSPSGVADYCGRAFPLLESEHWGTAGYIISRKAMRFFLDRFAVLPSERLKAVDWMLFSSFLDKGGMTVCQLTPALCVQSETLPSQLKNGRQESYRNRRSPKVLLKRALGKIGREIERARERKRQKKLEKHLGRHVVPFE

SEQ ID NO: 13295 - protein, 369 aa, Neisseria meningitidis; identical to SEQ ID NO: 8556

SEQ ID NO: 13296 - protein, 157 aa, Neisseria meningitidis; identical to SEQ ID NO: 2553

SEQ ID NO: 13297 - protein, 234 aa, Neisseria meningitidis; identical to SEQ ID NO: 6533

SEQ ID NO: 13298 - protein, 305 aa, Neisseria meningitidis
MSIIHYLSLHVESARTALKQLLRQPFGTLLTLIMLAVAMTLPLFMYLGIQSGQSVLGKLNESPQITIYMETAAAQSDSDTVRSLLARDKRLDNIRFIGKEDGLEELQSNLDQNLISMLDGNPLPDVFIVTPDPATTPAQMQAIYRDITKLPMVESASMDTEWVQTLYQINEFIRKILWFLSLTLGMAFVLVAHNTIRLQILSRKEEIEITKLLGAPASFIRRPFLYQAMWQSILSAAVSLGLCGWLLSAVRPLVDAIFKPYGLNIGWRFFYPEEIVLVFGFVIALGVFGAWLATTQHLLGFKAKK

SEQ ID NO: 13299 - protein, 136 aa, Neisseria meningitidis; identical to SEQ ID NO: 8184

SEQ ID NO: 13300 - protein, 268 aa, Neisseria meningitidis; identical to SEQ ID NO: 3556

SEQ ID NO: 13301 - protein, 112 aa, Neisseria meningitidis; identical to SEQ ID NO: 3481

SEQ ID NO: 13302 - protein, 86 aa, Neisseria meningitidis; identical to SEQ ID NO: 7137

SEQ ID NO: 13303 - protein, 753 aa, Neisseria meningitidis; identical to SEQ ID NO: 3095

SEQ ID NO: 13304 - protein, 508 aa, Neisseria meningitidis; identical to SEQ ID NO: 3491

SEQ ID NO: 13305 - protein, 289 aa, Neisseria meningitidis; identical to SEQ ID NO: 11624

SEQ ID NO: 13306 - protein, 181 aa, Neisseria meningitidis; identical to SEQ ID NO: 2183

SEQ ID NO: 13307 - protein, 475 aa, Neisseria meningitidis; identical to SEQ ID NO: 3427

SEQ ID NO: 13308 - protein, 304 aa, Neisseria meningitidis; identical to SEQ ID NO: 3139

SEQ ID NO: 13309 - protein, 344 aa, Neisseria meningitidis; identical to SEQ ID NO: 3499

SEQ ID NO: 13310 - protein, 465 aa, Neisseria meningitidis; identical to SEQ ID NO: 3472

SEQ ID NO: 13311 - protein, 392 aa, Neisseria meningitidis; identical to SEQ ID NO: 633

SEQ ID NO: 13312 - protein, 179 aa, Neisseria meningitidis; identical to SEQ ID NO: 8483

SEQ ID NO: 13313 - protein, 315 aa, Neisseria meningitidis
MNILSKISSFIGKTFSLWAALFAAAAFFAPDTFKWAGPYIPWLLGIIMFGMGLTLKPSDFDILFKHPKAVIIGVIAQFAIMPATAWLLSKLLNLPAEIAVGVILVGCCPGGTASNVMTYLARGNVALSVAVTSVSTLISPLLTPAIFLMLAGEMLEIQAGSMLMSIVKMVLLPIVLGLIVHKVLGSKTEKLTDALPLVSVAAIVLIIGAVVGASKGKIMESGLLIFAVVALHNGIGYLLGFFAAKWTGLPYDAQKTLAIKVGMQNSGLAAALAAAHFAAAPVVAVPGALFNVWHNISGSLLATYWAAKAGKHKKP

SEQ ID NO: 13314 - protein, 158 aa, Neisseria meningitidis; identical to SEQ ID NO: 3516

SEQ ID NO: 13315 - protein, 218 aa, Neisseria meningitidis; identical to SEQ ID NO: 3206

SEQ ID NO: 13316 - protein, 67 aa, Neisseria meningitidis
MLDKVEALLTVGGKHWNYAHAMARRMFGKDKVEYLDDTQLHKLVAALQIAENRKTEKAGGDDGVRKS

SEQ ID NO: 13317 - protein, 158 aa, Neisseria meningitidis; identical to SEQ ID NO: 871

SEQ ID NO: 13318 - protein, 313 aa, Neisseria meningitidis; identical to SEQ ID NO: 3869

SEQ ID NO: 13319 - protein, 395 aa, Neisseria meningitidis
MAEICLITGTPGSGKTLKMVSMMANDEMFKPDENGIRRKVFTNIKGLKIPHTYIETDAKKLPKSTDEQLSAHDMYEWIKKPENIGSIVIVDEAQDVWPARSAGSKIPENVQWLNTHRHQGIDIFVLTQGSKLLDQNLRTLVRKHYHIASNKMGMRTLLEWKICADDPVKMASSAFSSIYTLDKKVYDLYESAEVHTVNKVKRSKWFYTLPVIILLIPVFVGLSYKMLSSYGKKQEEPAAQESAATEHQAVFQDKTEGEPVNNGNLTADMFVPTLSEKPESKPIYNGVRQVRTFEYIAGCVEGGRTGCTCYSHQGTALKEITKEMCKDYARNGLPFNPYKEESQGRDVQQSEQHHSDRPQVATLGGKPWQNLMYDNWQERGKPFEGIGGGVVGSAN

SEQ ID NO: 13320 - protein, 500 aa, Neisseria meningitidis; identical to SEQ ID NO: 3604

SEQ ID NO: 13321 - protein, 158 aa, Neisseria meningitidis; identical to SEQ ID NO: 2471

SEQ ID NO: 13322 - protein, 213 aa, Neisseria meningitidis; identical to SEQ ID NO: 2882

SEQ ID NO: 13323 - protein, 79 aa, Neisseria meningitidis; identical to SEQ ID NO: 1083

SEQ ID NO: 13324 - protein, 292 aa, Neisseria meningitidis
LNRHKSTISREIRRHRTQGQQYSAEKAQRQSQTIKQRKRQPYKLDSQLIQHIDTLIRRKLSPEQVCAYLCKHHRITLHHSTIYRYLRQDKSNGSTLWQHLRICSKPYRKRYGSTWTRGKVPNRVGIENRPAIVDQKSRIGDWEADTIVGKGQKSALLTLVERVTRYTIICKLDSLKAEDTARAAVRALKAHKDRVHTITMDNGKEFYQHTKITKALKAETYFCRPYHSWEKGLNENTNGLIRQYFPKQTDFRNISDREIRRVQDELNHRPRKTLGYETPSVLFLNLFQPLIH

SEQ ID NO: 13325 - protein, 705 aa, Neisseria meningitidis
MRRFLPIAAICAVVLLYGLTAATGSTSSLADYFWWIVAFSAMLLLVLSAVLARYVILLLKDRRDGVFGSQIAKRLSGMFTLVAVLPGVFLFGVSAQFINGTINSWFGNDTHEALERSLNLSKSALNLAADNALGNAIPVQIDLISTASLSGNMGRVLEHYANGFTQLSLYNAASGKIEKSINPHKLDQPFPDKARWEKIQQAGSVRDLESIGGVLYAQGWLSAGTHNGRDYALFFRQPVPKGVAEDAVLIEKARAKYAELSYSKKGLQTFFLATLLIASLLSIFLALVMALYFARRFVEPVLSLAEGAKAVAQGDFSQTRPVLRNDEFGRLTKLFNHMTEQLSIAKEADERNRRREEAARHYLECVLEGLTTGVVVFDEQGCLKTFNKAAEQILGMPLTPLWGSSRHGWHGVSAQQSLLAEVFAAIGAAAGTDKPVHVKYAAPDDAKILLGKATVLPEDNGNGVVMVIDDITVLIHAQKEAAWGEVAKRLAHEIRNPLTPIQLSAERLAWKLGGKLDEQDAQILTRSTDTIVKQVAALKEMVEAFRNYARSPSLKLENQDLNALIGDVLALYEAGPCRFAAELAGEPLMVAADTTAMRQVLHNIFKNAAEAAEEADVPEVRVKSEAGQDGRIVLTVCDNGKGFGREMLHNAFEPYVTDKPAGTGLGLPVVKKIIEEHGGRISLSNQDAGGACVRIILPKTVKTYA

SEQ ID NO: 13326 - protein, 277 aa, Neisseria meningitidis; identical to SEQ ID NO: 3602

SEQ ID NO: 13327 - protein, 670 aa, Neisseria meningitidis
LACLVSVLGFHGFYTDLRHLRARFSLSLKGATLADLVRFANSMNLTARAVRLDLDELANLRVPCILHWDLNHFVVLHEVHRNHIMIMNPASGWQKVRMEEVSRCFTGVALELFPNTQFEEKHETRKIRVLPMLRGVVGLKRSLFQLLLLAAVLQVFALASPFFMQWVIDHAIVSADRDLLLTLALGFGLLMIVQQLVSLLQTWAGMYLSTSLNIQWKANVFSHLMDLPISYFAKRHLGDVVSRFGSVDSIQSTLTSTFFVLVINSILAVFTLGLMYLYSPSLMAVVLVVLLIYIGIRWVAYYPLRHATEENIVHAAKQSSYFMETIRGIQTVKLFDKNTQRHAAWLNLFIDTINTGLTTQKLSALFGFANSLLFGIANILIVYFGAVSVLNGGFTVGALMAFMSYKSQFESKAGSLIDQFVQIKMLGLHAERLADIVLEETENEQNNDFSLPKNLEHFDIQIENVSFSYAENEPYILQNFSLIIKQGTAIAFAGHSGCGKSTLIQILTGSLKPESGHVLLGGHDIHALPPAFIRTWSASVMQNDVLFTGSIAENISFFDDTPNMEKIAFCAQMANIHHEIVAMPMAYETLIGDMGSALSGGQKQRIVLARALYREPKILFLDEASSHLDINNERVINDNLRQLNITKIMVAHRQETLNTADSVVYLDKVA

SEQ ID NO: 13328 - protein, 386 aa, Neisseria meningitidis; identical to SEQ ID NO: 3047

SEQ ID NO: 13329 - protein, 102 aa, Neisseria meningitidis; identical to SEQ ID NO: 427

SEQ ID NO: 13330 - protein, 93 aa, Neisseria meningitidis; identical to SEQ ID NO: 2125

SEQ ID NO: 13331 - protein, 133 aa, Neisseria meningitidis; identical to SEQ ID NO: 2967

SEQ ID NO: 13332 - protein, 658 aa, Neisseria meningitidis
MSKLKTIALTASGLSVCPGFLYAQNTSSHQIGLAIMRLNSSILDLPPTKQYFQSGSLWSELRQGFRMGEVNPELVRRHESKFIASHSYFNRVINRSRPYMYHIANEVKKRNMPAEAALLPFIESAFVTKAKSHVGASGLWQFMPATGRHYGLEKTPVYDGRHDVYAATDAALNYLQYLYGLFGDWPLAFAAYNWGEGNVGRAINRARAQGLEPTYENLRMPNETRNYVPKLLAVRNIIAAPQSFGMNISDIDNKPYFQAIEPDRPLDNEAIARLAGITQSELLALNPAFNVPAFIPKSKRKLLLPVASVQTFQSNYLNAAPDSLFSWEVYTPAAKTSLSDISTATGMSIADIKRLNNLNGNLVNAGRSILVAKNGKTLQTASESVVSIDIDNTPDTYRSNMPAGTVNVGIARIRPAAAQTADITVAPLPQKTVRTEPDPLVRIAEPALATAAAQPQTEKQTAMPSETQTATLAQIIPQNDMQAADELMQLVARNNLRRQAEETISAVIGTPDTVAEHNISSSPQHTVAADGKRRARLETRVAKAADGEAEISPLHASIHRVVEGDTLFNIAKRYNVSVADLIVANNIKGNTIQKGQVLRLAQAAPAQTRIEKVSYTARKGDTFKSIAARFNIHIDDIRRLNPNLNTINPGQRVKLIGS

SEQ ID NO: 13333 - protein, 205 aa, Neisseria meningitidis; identical to SEQ ID NO: 2331

SEQ ID NO: 13334 - protein, 522 aa, Neisseria meningitidis; identical to SEQ ID NO: 968

SEQ ID NO: 13335 - protein, 139 aa, Neisseria meningitidis; identical to SEQ ID NO: 2531

SEQ ID NO: 13336 - protein, 316 aa, Neisseria meningitidis; identical to SEQ ID NO: 3819

SEQ ID NO: 13337 - protein, 930 aa, Neisseria meningitidis
MSNRPTLLLVDGSSYLYRAYHAMGQNLTAPDGAPTGALYGVLNMLRRLRSEYPHDYCAVVFDAKGKNFRHQMFEEYKATRPPMPDDLRPQAEALPDLVRLTGWPVLVIGQVEADDVIGTLAKQGAEHGLRVIVSTGDKDMAQLVDERVTLVNTMSSETLDIEGVKAKFGVRPDQIRDYLALMGDKVDNVPGVEKCGPKTAVKWLEAYGSLAGVMEHASEIKGKVGENLQAALPQLPLSYDLVTIKTDVDLHAELSDGIESLRRTTPKWAQLVVDFKRWGFRTWLKEAESNMNTGSTDDLFGSDSIGEQAALNAEMPFEKQAEKATAPEKLDYQAVTTEAQFAALLDKLSRADTIGIDTETTSLDAMNASLVGISIAFQAGEAVYIPVGHSLTAAPEQLDLQDVLGRLKPHLGNPALKKIGQNLKYDQHVFANYGIALNGIAGDAMLASYIIESHLGHGLDELSERWLGLETITYESLCGKGAKQIGFADVAIGQATEYAAQDADFALRLEAHLRAQMDEKQLEMYEKMELPVAQVLFEMERNGVQIDRAELARQSAELGAELMKLEQQAYAAADQPFNLNSPKQLQEILFDKMGIPTKGLKKTAKGGISTNEAVLEQLAPDYPLPKIILQNRSLAKLKSTYTDKLPEMISPKDGRVHTTYAQAVAITGRLASNNPNLQNIPIRTAEGRRVRRAFTAPQGSVIVSADYSQIELRIMAHLSGDKTLIAAFQNGEDVHRRTAAEVFGTAPENVSSEQRRYAKTINFGLIYGMGQYGLAKSLGIDNLSAKNFIDRYFARYPGVAEYMQRTKEQAAAQGYVETLFGRRLYLPDIRNKNANARAGAERAAINAPMQGTASDLIKRAMIDVRNCLSDGIGSKLVMQVHDELVLEVVETELDFVKEKLPQIMAKVDGGLLDVPLVAEVGVGENWEEAH

SEQ ID NO: 13338 - protein, 287 aa, Neisseria meningitidis
MNKFSQSGKGLSGFFFGLILATVIIAGILFYLNQTGQNAFKIPALSKQPAETEILKPKNQPKEDIQPEPVDQNALSEPDAAKEAEQSNAEKAADKQPVADKADEVEEKAGEPEREKSDGQAVRKKVLTEEREQTVREKAQKKDAETVKKQAVKPSKETEKKAPKEEKKAEKEKVAPKPTPEQILNSGSIEKARSAAAKEVQKMKTSDKAEATHYLQMGAYADRRSAEGQRAKLAILGIYSKVVGYQAGHKTLYRVQSGNMSADAVKKMQDELKKHEVASLIRSIESK

SEQ ID NO: 13339 - protein, 142 aa, Neisseria meningitidis; identical to SEQ ID NO: 2573

SEQ ID NO: 13340 - protein, 627 aa, Neisseria meningitidis
LAISENGQTKVIENAEGARTTPSVIAYLDGGEILVGAPAKRQAVTNAKNTIYAAKRLIGHKFEDKEVQRDIESMPFEIIKANNGDAWVKAQGKELSPPQISAEVLRKMKEAAEAYLGEKVTEAVITVPAYFNDSQRQATKDAGRIAGLDVKRIINEPTAAALAFGMDKGDNKDRKVAVYDLGGGTFDISIIEIANLDGDKQFEVLATNGDTFLGGEDFDQRLIDHIIAEFKKEQGIDLKQDVMALQRLKEAAEKAKIELSSGQQTEINLPYITMDATGPKHLAMKITRAKFESLVEDLIARSIEPCRTALKDAGLSTGDIDDVILVGGQSRMPKVQEAVKDFFGKEPRKDVNPDEAVAVGAAIQGEVLSGGRSDVLLLDVTPLSLGIETMGGVMTKLIQKNTTIPTKASQVFSTAEDNQSAVTIHVLQGERERASANKSLGQFNLGDIAPAPRGMPQIEVTFDIDANGILHVSAKDKGTGKAANITIQGSSGLSEEEIERMVKDAEANAEEDKKLTELVASRNQAEALIHSVKKSLADYGDKLDAAEKEKIEAALKEAEEAVKGDDKAAIDAKTEALGAASQKLGEMVYAQAQAEAQAGESEQANASAKKDDDVVDADFEEVKDDKK

SEQ ID NO: 13341 - protein, 294 aa, Neisseria meningitidis
MSSGNIHIHSMTGFANAAAECGSKRINLDLRAVNHRFLDIQIRMPDDLRYLESGIREKISSHIARGKVECKIQIQDAENGSQSLELNRDLVGQLAEINQTLRKHHDLAKLGVADILRFPGVLASQRENTEELAKSITELTEKALKDFTAARKREGKKLGEHLLQRLEAMEEIIDALSELFPTLLETHKEKIRARLVEAVGSIDNDRLQQEFALFIQKSDIDEEFSRLRTHIAEVRRIVTEHKGSSGKRLDFLMQELNREANTLGSKSIATECTQASVELKVLIEQMREQVQNIE

SEQ ID NO: 13342 - protein, 106 aa, Neisseria meningitidis; identical to SEQ ID NO: 853

SEQ ID NO: 13343 - protein, 297 aa, Neisseria meningitidis; identical to SEQ ID NO: 2791

SEQ ID NO: 13344 - protein, 505 aa, Neisseria meningitidis
MLYFRYGFLVVWCAAGVSAAYGADAPAILDDKALSQVWRSVSDKWAESDWKVENDAPRVVDGDFLLAHPKMLEHSLRDALNGNQADLIASLADLYAKLPDYDAVLYGRARALLAKLAGRPAEAVARYRELHGENAADERILLDLAAAEFDDFRLKSAERHFAEAEKLDLPAPVLENVGRFRKKAEGLTGWRFSGGISPAVNRNANNAAPQYCWQNGGRQICSVSRAERAAGLNYEIEAEKLTALADNHYLLFRSNIGGTSYYFSKKSAYDDGFGRAYLGWQYKNARQTAGILPFYQVQLSGSDGFDAKTKRVNNRRLPPYMLAHGVGVQLSHTYRPNPGWQFSVALEHYRQRYREQDRAEYNNGRQDGFYVSSAKRLGESATVFGGWQFVRFVPKRETVGGAVNNAAYRRNGVYAGWAQEWRQLGGLNSRVSASYARRNYKGVAAFSTEAQRNREWNVSLALSHDKLSYKGIVPALNYRFGRTESNVPYAKRRNSEVFVSADWRF

SEQ ID NO: 13345 - protein, 346 aa, Neisseria meningitidis; identical to SEQ ID NO: 2673

SEQ ID NO: 13346 - protein, 159 aa, Neisseria meningitidis
MSKHTYPITPAVRVLRENGIEFEPFTYAYEEHGGTAQFARLFGKDEHLVIKTIVLQDENGKGLIVLMHGDKQISTRNLARHLGAKHIEPATPVQANKWTGYLVGGTTPFGIRTKLDIYVEQSVMDLETIYINGGKRGFIIGIRPRDLNILNPKTIQAAV

SEQ ID NO: 13347 - protein, 874 aa, Neisseria meningitidis; identical to SEQ ID NO: 3254

SEQ ID NO: 13348 - protein, 342 aa, Neisseria meningitidis
MKYKALSLLPLVAALAACAGGGGVAEPHVPVSIPTATPLTGEVKLTDDNSKIENINTANTGNTSGISIQQREYKVNNYGVESTAKAFIFKTPGGAQYTLSSYADPIVPSYSSPDFKIPDRHAGQRLADGSRIFICCSDSGATNQAEITKQDYMKFGAWIGPNGEIDLFAGGFPVGKTPASSSYYGSSTPETQGKGKITYQVWGIRVRNGQFVTSSYTPPKNSGYYSSTPTNTPVLSFITANFNTHKLSGEIIGNSDYGPNVKIENATIDGLSFSGDATSGGKNGKLEGKFFGKFNGYRDTETSIGGKITFDGDRSLDTVFGGVSYKKELENNTDTSTTHLTK

SEQ ID NO: 13349 - protein, 453 aa, Neisseria meningitidis
MIIDVKVPMLSESVSEGTLLEWKKKVGEAVARDEILIDIETDKVVLEVPSPQAGVLVEIVAQDGETVVADQVLARIDTAATAAAEAPAAATAAAEAPAAATAAAEAPAAATAAAEAPAAATAAAEAPAAATAAAEAPAAATAAAEAPAAAPAEAAPAAAPAAAQNNAAMPAAAKLAAESGVDVNALQGSGRDGRVLKEDVQNAAAKPAAAAAPAVALPAGARPEERVPMSRLRARVAERLLASQQENAILTTFNEVNMKPIMDLRAKYKEKFEKEHGVKLGFMSFFVKAAVAALKKYPVVNASVDGKDIVYHGYFDIGIAIGSPRGLVVPILRDADQMSIADIEQAIVDYAKKAKDGKIAIEDLTGGTFSITNGGTFGSMMSTPIINPPQSAILGMHATKERAVVENGQVVVRPMMYLALSYDHRIIDGREAVLTLVAIKDALEDPARLLLDL

SEQ ID NO: 13350 - protein, 142 aa, Neisseria meningitidis; identical to SEQ ID NO: 2751

SEQ ID NO: 13351 - protein, 350 aa, Neisseria meningitidis; identical to SEQ ID NO: 2257

SEQ ID NO: 13352 - protein, 382 aa, Neisseria meningitidis; identical to SEQ ID NO: 2860

SEQ ID NO: 13353 - protein, 166 aa, Neisseria meningitidis; identical to SEQ ID NO: 987

SEQ ID NO: 13354 - protein, 169 aa, Neisseria meningitidis; identical to SEQ ID NO: 111

SEQ ID NO: 13355 - protein, 405 aa, Neisseria meningitidis
MALIVHKYGGTSVGSPERIKNVAKRVAKARAEGHDIVVVVSAMSGETNRLVALAHEMQEHPDPRELDVVLSTGEQVTIGLLAMALKDIGVDAKSYTGWQVALKTDTAHTKARIESIDDEKMRADLTAGKVVIVAGFQGISSEGDISTLGRGGSDTSAVALAAALKADECQIYTDVDGVYTTDPRVVPEARRMDTVTFEEMIELASLGSKVLQIRSVEFAGKYKVRLRVLSSLQDGGNGTLITFEEDDNMERAAVTGIAFDKNQARINVRGVPDKPGVAYQILGAVADANIEVDMIIQNVGSEGTTDFSFTVPRGDYKQTLEILSERQDSIGAASIDGDDTVCKVSAVGLGMRSHVGVAAKIFRTLAEEGINIQMISTSEIKVSVLIDEKYMELATRVLHKAFNLG

SEQ ID NO: 13356 - protein, 276 aa, Neisseria meningitidis
MAHYAIGDIQGCFDELTSLLGKIGFNHGTDTLWLTGDIVNRGPKSLETLQFCIRHENSVQIVLGNHDLHLLAVGCGEGAPKRSDTIEPILKHPDGKKMLDWLRAQPLLIREGSRVMVHAGILPQWRIAKAESLAREAEAELRGKKYVKFFSKMYGNKPAAWDEGLEGYARLRFIVNAFTRMRALTFKNELDFDYKSTVKKMPPYLRPWFKAPDRQNLDRTIIFGHWSSLGYTNADNVISLDTGALWGGQLTAVNLETEEITQVQAAGGIDWKSFAK

SEQ ID NO: 13357 - protein, 157 aa, Neisseria meningitidis; identical to SEQ ID NO: 7285

SEQ ID NO: 13358 - protein, 108 aa, Neisseria meningitidis; identical to SEQ ID NO: 3002

SEQ ID NO: 13359 - protein, 132 aa, Neisseria meningitidis; identical to SEQ ID NO: 1178

SEQ ID NO: 13360 - protein, 367 aa, Neisseria meningitidis; identical to SEQ ID NO: 8815

SEQ ID NO: 13361 - protein, 423 aa, Neisseria meningitidis; identical to SEQ ID NO: 3402

SEQ ID NO: 13362 - protein, 201 aa, Neisseria meningitidis; identical to SEQ ID NO: 3643

SEQ ID NO: 13363 - protein, 375 aa, Neisseria meningitidis
MSNWKPDIPYNDLPPLPPKQDIESKTILKRCIAARASLARLKQAAELIPNQAMLINTLPVMEARASSEIENIVTTTDKLFQSLQMDTERQDPATKEALQYRTALFAGYESLTSRPLCTQTAIMVCNAIKHPYEMAIRKTGGTALKGGNSGNVVYTPPEGEETIRGKLANWERFIHESGDLDPLIIMAAAHYQFEAIHPFTDGNGRTGRILNSLLLIEKGLLDLPILYLSRYIIENRADYYRLLLGVTERQDWESWIIYILDGVADTADWTVSKIDAIRRLFEQTRQHIRTHAQGIYTHELVNLLFEQPYTRIANLEAAGIAKRQTASKYLKELSDIGVLQEIAIGRDKLFIHPRLMELLRGEGNSFTSFQSLVKA

SEQ ID NO: 13364 - protein, 428 aa, Neisseria meningitidis; identical to SEQ ID NO: 3581

SEQ ID NO: 13365 - protein, 166 aa, Neisseria meningitidis; identical to SEQ ID NO: 1240

SEQ ID NO: 13366 - protein, 308 aa, Neisseria meningitidis; identical to SEQ ID NO: 3596

SEQ ID NO: 13367 - protein, 159 aa, Neisseria meningitidis; identical to SEQ ID NO: 929

SEQ ID NO: 13368 - protein, 305 aa, Neisseria meningitidis; identical to SEQ ID NO: 10870

SEQ ID NO: 13369 - protein, 265 aa, Neisseria meningitidis; identical to SEQ ID NO: 5097

SEQ ID NO: 13370 - protein, 72 aa, Neisseria meningitidis; identical to SEQ ID NO: 1579

SEQ ID NO: 13371 - protein, 203 aa, Neisseria meningitidis
MITTYKTITSSTQAEFKDKGSRFIAFAYPIRTLADVKKYLDPLKEEHHKARHWCYAYRLGVDGMQFRANDDGEPSGSAGRPILGQIDSVGITDVLVVVVRYFGGTLLGVPGLIHAYKEATAQALAVAEVVEKNIEKTVWLKCEYPFLNEAIRIAKQYQADILERDLQLDCRLTVSLSLVNYEACVAAWKNTRQIEVNTEKPFE

SEQ ID NO: 13372 - protein, 481 aa, Neisseria meningitidis; identical to SEQ ID NO: 2394

SEQ ID NO: 13373 - protein, 157 aa, Neisseria meningitidis; identical to SEQ ID NO: 8174

SEQ ID NO: 13374 - protein, 156 aa, Neisseria meningitidis; identical to SEQ ID NO: 681

SEQ ID NO: 13375 - protein, 93 aa, Neisseria meningitidis; identical to SEQ ID NO: 2128

SEQ ID NO: 13376 - protein, 249 aa, Neisseria meningitidis; identical to SEQ ID NO: 2511

SEQ ID NO: 13377 - protein, 227 aa, Neisseria meningitidis; identical to SEQ ID NO: 2422

SEQ ID NO: 13378 - protein, 363 aa, Neisseria meningitidis; identical to SEQ ID NO: 10115

SEQ ID NO: 13379 - protein, 674 aa, Neisseria meningitidis; identical to SEQ ID NO: 3812

SEQ ID NO: 13380 - protein, 179 aa, Neisseria meningitidis; identical to SEQ ID NO: 8483

SEQ ID NO: 13381 - protein, 442 aa, Neisseria meningitidis; identical to SEQ ID NO: 2771

SEQ ID NO: 13382 - protein, 482 aa, Neisseria meningitidis
MKGDIGVIGLAVMGQNLILNMNDCGFKVVAYNRTIGKVDEFLNGAAKGTDIVGAYSLQDLVDKLAKPRKIMMMVRAGSVVDDFIEQLLPLLEEGDIIIDGGNANYPDTTRRTHYLAEKGILFVGAGVSGGEEGARHGPSIMPGGDERAWEAVKPIFQAIAAKTPQGEPCCDWVGRDGAGHFVKMVHNGIEYGDMQLICEAYQFMKDGLGLSYDEMHRVFAEWNKTELDSYLIEITAAILGYKDEGGEPLVEKILDTAGQKGTGKWTGINALDLGIPLTLISEAVFARCVSSFKEQRVQTGKLFARTVTPVEGGKQEWVEALRQALLASKIISYAQGFMLIREAGESYGWDLDYGNTALLWREGCIIRSAFLSNIRDAYENNPDLVFLGADPYFKNILENCLPTWRKVVAKAVECGIPMPCMASAITFLDGYTTERLPANLLQAQRDYFGAHTYERTDKPRGEFFHTNWTGKGGDTASTTYDI

SEQ ID NO: 13383 - protein, 164 aa, Neisseria meningitidis; identical to SEQ ID NO: 9552

SEQ ID NO: 13384 - protein, 43 aa, Neisseria meningitidis; identical to SEQ ID NO: 2340

SEQ ID NO: 13385 - protein, 168 aa, Neisseria meningitidis
MDFFDFFAQGKYKKIATEQGLDRKYFIFHYIVCNLSAISSFCLMKVIHSYTILCLLIMIIGIAFGFILRNRVLSIVKNKQKFLSDMFPLEMPFFSRVYKIPILARFLNRGMKWLYLQNFFCLVMICFSISLILNEERGWMPYFICYWFGLCYPANTYYVFLSRDYKHI

SEQ ID NO: 13386 - protein, 272 aa, Neisseria meningitidis; identical to SEQ ID NO: 2586

SEQ ID NO: 13387 - protein, 121 aa, Neisseria meningitidis; identical to SEQ ID NO: 4117

SEQ ID NO: 13388 - protein, 287 aa, Neisseria meningitidis
MELNEFLDKAYAVLRRLDAVLPPEPGHTDWNALAFRWQSAGKKGFLEHLPDPHTFPLARLAGVGRQTELLVRNTEQFIAGRPANNVLMSGARGTGKSSLVKALLHEYADKGLRLIEVDKSDLIGLPYLLTLLKERPEKFIVFCDDLSFESGDETYKALKTALDGGLSQRCANVLVYATSNRRHLMPEYFDENAGTTGMRGEVHQKEAVEEKISLSDRFGLWLSFYPFDQNDYLAAVQNWLEDFGVPYDETAQMAALQWAQTRGSRSGRSAWQFACDWAGRLPEQRAP

SEQ ID NO: 13389 - protein, 752 aa, Neisseria meningitidis; identical to SEQ ID NO: 2486

SEQ ID NO: 13390 - protein, 443 aa, Neisseria meningitidis; identical to SEQ ID NO: 2037

SEQ ID NO: 13391 - protein, 426 aa, Neisseria meningitidis
LKDCFPQGLNGKKTAVALSGGLDSVVLLHLLVRAGKRAGFVPEALHIHHGLSPRADDWADFCQNYCDMLGVGLETVKVCVEKNGLGIEAAARQKRYAAFAEKGFDILALAHHRDDQIETFMLAVARGGGLRALAAMPAVRPFGEKGIIWRPLLPFSRQDIWDYAQKHGLPNIEDESNTDTAYLRNRFRHRILPELSAQIPHFGRHVLNNVRALQEDLALLDEVVVQDCRWVCGAGYFDTARWLTFSPRRKTHILRHFLKENGIPVPNQNALADIARVLTEAKTGRWNLQGFELHHYAGRLFVFRQEKTDKLRFLKDRQISGNLREILTGQGFVLKRHPFGLPEHLLEQDGILRTVAASDTLAVGGIHKNVKKILQGKRVLPVLRPIWPLVADSGNRPLALANCCADFQYSVSDGILPVHPDFPILF

SEQ ID NO: 13392 - protein, 289 aa, Neisseria meningitidis
MKRIFLPALPAILPLSTYADLPLTIEDIMTDKGKWKLETSLTYLNSENNRAELAAPVYIQTGATSFIPIPTEIQENGSNTDMLVGTLGLRYGLTGNTDIYGSGSYLWHEERKLDGNSKTRNKRMSDVSLGISHTFLKDDKNPALISFLESTVYEKSRNKASSGKSWLIGATTYKAIDPIVLSLTAAYRINGSKTLSDGIRYKSGNYLLLNPNISFAANDRISLTGGIQWLGRQPDRTDGKRESSRNTSTYAHFGAGFGFTKTTALNASARFNVSGQSSSELKFGVQHTF

SEQ ID NO: 13393 - protein, 587 aa, Neisseria meningitidis; identical to SEQ ID NO: 9279

SEQ ID NO: 13394 - protein, 704 aa, Neisseria meningitidis
MDLLSVFHKYRLKYAVAVLTILLLAAVGLHASVYRTFTPENIRSRLQQSIAHTHRKISFDADIQRRLLPRPTVILKNLTITEPGGDQTAVSVQETKIGLSWKNLWSDQIQIEKWVVSSAELALTRDGKGVWNIQDLIDSQKRQASVNRIIVENSTVRLNFLQEQLILKEINLNLQSPDSSGQPFESSGILVWGKLSVPWKSRGLFLSDGIGTPKISPFHFEASTSLDGHGITISTTGSPSVRFNAGGADAAGLGLRADTSFRNLHLTAQIPALALRNNSIKIETVNGAFTAGGEYAQWDGSFKLDKANLHSGIANIGNAEISGSFKTPRHQTNFSLNSPLVWTENKGLDAPRLYVSTLQDTVNRLPQPRFISRLDGSLSVPNLQNWNAELNGTFDRQTVAAKFRYTHEDAPHLEAAVALQKLNLTPYLDDVRQQNGKIFPDTLAKLSGDIEAHLKIGKVQLPGLQLDDMETYLHADKGHIALSRFKSGLYGGHTEGGISIANTRPATYRLQQNASNIQIQPLLQDLFGFHSFSGNGDAVIDLTAGGETRKELIRSLQGSLSLNISNGAWHGIDMDNILKNGISGKTADNAAPSTPFHRFTLNSEISDGISRHIDTELFSDSLYVTSNGYTNLDTQELSEDVLIRNAVHPKNKPIPLKITGTVDKPSITVDYGRLTGGINSRKEKQKILEDTLLEQWQWLKPKEP

SEQ ID NO: 13395 - protein, 119 aa, Neisseria meningitidis; identical to SEQ ID NO: 3183

SEQ ID NO: 13396 - protein, 284 aa, Neisseria meningitidis; identical to SEQ ID NO: 506

SEQ ID NO: 13397 - protein, 176 aa, Neisseria meningitidis; identical to SEQ ID NO: 3632

SEQ ID NO: 13398 - protein, 563 aa, Neisseria meningitidis; identical to SEQ ID NO: 2966

SEQ ID NO: 13399 - protein, 151 aa, Neisseria meningitidis; identical to SEQ ID NO: 4906

SEQ ID NO: 13400 - protein, 205 aa, Neisseria meningitidis; identical to SEQ ID NO: 8862

SEQ ID NO: 13401 - protein, 209 aa, Neisseria meningitidis; identical to SEQ ID NO: 1847

SEQ ID NO: 13402 - protein, 111 aa, Neisseria meningitidis; identical to SEQ ID NO: 7069

SEQ ID NO: 13403 - protein, 279 aa, Neisseria meningitidis; identical to SEQ ID NO: 2627

SEQ ID NO: 13404 - protein, 332 aa, Neisseria meningitidis
VIASRLSGNISSAIQEHKDGKVNINRFQNILADLYSLGGLGSTLIEKNGNMQSWGIPLAIAGDIIAATAIATGDTGTISTEEFYNFDNWKGFGYELFEDWSRWVYDWLPDGWNLWKELDRNRSGQYHIYDPLALDLDGDGIETVAAKGFAGSLFDHTNNGIRTATGWVSADDGLLVRDLNGNGIIDNGAELFGDNTKLADGSFAKHGYAALAELDSNGDNIINAADAAFQSLRVWQDLNQDGISQTNELRTLEELGIQSLDLAYKDVNKNLGNGNTLAQQGSYTKTNGTTAKMGDLLLAADNLHSRFTNKMLSISHVRENTISPFVLGCLNK

SEQ ID NO: 13405 - protein, 392 aa, Neisseria meningitidis
MAFLKLTEQNVQGKTVLIRADMNVPFKDGKISDDTRIRASLASIQYCMDNGASVIVMIHLGRPTEGEFHPEDDVAPVAAHLGGLLGKDVKVLNDWRENKPALNAGDVVMLQNVRINKGEKKNDLELGKAYASLCDVFVNDAFGTAHRAQASTEAVAQAAPVACAGVLMAGELDALGKALKQPARPMVAIVAGSKVSTKLTILESLADKVDQLIVGGGIANTFLLAEGKAIGKSLAEHDLVEESKKIMAKMAAKGGSVPLPTDVVVAKAFAADAEAVVKDIADVAEDDMILDIGPKSAAELAELLKAAGTVVWNGPVGVFEFDQFAGGTKALAEAIAQSKAFSIAGGGDTLAAIAKFGVTDQIGYISTGGGAFLEFLEGKELPAVAALEKRGA

SEQ ID NO: 13406 - protein, 447 aa, Neisseria meningitidis; identical to SEQ ID NO: 2839

SEQ ID NO: 13407 - protein, 225 aa, Neisseria meningitidis; identical to SEQ ID NO: 11744

SEQ ID NO: 13408 - protein, 468 aa, Neisseria meningitidis
MKNRVTNIHFVGIGGVGMSGIAEVLHNLGFKVSGSDQARNAATEHLGSLGIQVYPGHTAEHVNGADVVVTSTAVKKENPEVVAALEQQIPVIPRALMLAELMRFRDGIAIAGTHGKTTTTSLTASILGAAGLDPTFVIGGKLNAAGTNARLGKGEYIVAEADESDASFLHLTPIMSVVTNIDEDHMDTYGHSVEKLHQAFIDFIHRMPFYGKAFLCIDSEHVRAILPKVSKPYATYGLDDTADIYATDIENVGAQMKFTVHVQMKGHEQGSFEVVLNMPGRHNVLNALAAIGVALEVGASVEAIQKGLLGFEGVGRRFQKYGDIKLPNGGTALLVDDYGHHPVEMAATLAAARGAYPEKRLVLAFQPHRYTRTRDLFEDFTKVLNTVDALVLTEVYAAGEEPIAAADSRALARAIRVLGKLEPIYCENVADLPEMLLNVLQDGDIVLNMGAGSINRVPAALLELSKQI

SEQ ID NO: 13409 - protein, 51 aa, Neisseria meningitidis; identical to SEQ ID NO: 1536

SEQ ID NO: 13410 - protein, 436 aa, Neisseria meningitidis
MPSESKPVSRIVTDSRDIRAGDVFFALAGGRFDAHDFVEDVLAAGAAAVVVSREDCVAMDGALKVDDTLTALQMLAKAWRENVNPFVFGITGSGGKTTVKEMLAAVLRRRFGDNAVLATAGNFNNHIGLPLTLLKLNEKHRYAVIEMGMNHFGELAVLTQIAKPDAALVNNAMRAHVGCGFDGVGDIAKAKSEIYQGLCSDGMALIPQEDANMAVFKTATLNLNTRTFGIDSGDVHAENIVLKPLSCEFDLVCGNECAAVVLPVPGRHNVHNAAAAAALSLAAGLSLNDVAEGLKGFSNIKGRLNVKSGIKGATLIDDTYNANPDSMKAAVDVLARMPAPRIFVMGDMGELGEDEAAAMHAEVGAYARDQGIEAAYFVGDNSVEAAEKFGADGLWFAAKDPLIQVLRHDLPERATVLVKGSRFMEMEEVVEALEDK

SEQ ID NO: 13411 - protein, 327 aa, Neisseria meningitidis
MSEIKTDDPKRGIKLRGADKTARIPIKVVPLQEKLKKPEWIRAKLPSRKFFEIKDILREQKMHTVCEEASCPNIGECFSKGTATFMIMGDICTRRCPFCDVGHGRPNMLDPDEPRNLAESVKAMNLRYVVITSVDRDDLRDGGAQHFADCIKAIRETSPNTKIEILVPDFRGRLDIALKILAETPPDVMNHNLETHPSLYRKARPGANYQHSLDLLKRYKEMMPHIPTKSGIMVGLGETDEDVREIMRDMRAHNIEMITIGQYLQPSDGHLPVLRYVTPEQFKIFEKEAYELGFTNAAIGAMVRSSYHADEQAAEALRESHGGCGHH

SEQ ID NO: 13412 - protein, 254 aa, Neisseria meningitidis; identical to SEQ ID NO: 8744

SEQ ID NO: 13413 - protein, 238 aa, Neisseria meningitidis; identical to SEQ ID NO: 3066

SEQ ID NO: 13414 - protein, 174 aa, Neisseria meningitidis; identical to SEQ ID NO: 2580

SEQ ID NO: 13415 - protein, 246 aa, Neisseria meningitidis; identical to SEQ ID NO: 2993

SEQ ID NO: 13416 - protein, 950 aa, Neisseria meningitidis; identical to SEQ ID NO: 11115

SEQ ID NO: 13417 - protein, 544 aa, Neisseria meningitidis; identical to SEQ ID NO: 3972

SEQ ID NO: 13418 - protein, 87 aa, Neisseria meningitidis; identical to SEQ ID NO: 205

SEQ ID NO: 13419 - protein, 388 aa, Neisseria meningitidis; identical to SEQ ID NO: 2320

SEQ ID NO: 13420 - protein, 589 aa, Neisseria meningitidis; identical to SEQ ID NO: 2665

SEQ ID NO: 13421 - protein, 176 aa, Neisseria meningitidis; identical to SEQ ID NO: 3131

SEQ ID NO: 13422 - protein, 364 aa, Neisseria meningitidis; identical to SEQ ID NO: 1930

SEQ ID NO: 13423 - protein, 265 aa, Neisseria meningitidis; identical to SEQ ID NO: 572

SEQ ID NO: 13424 - protein, 160 aa, Neisseria meningitidis; identical to SEQ ID NO: 1608

SEQ ID NO: 13425 - protein, 177 aa, Neisseria meningitidis; identical to SEQ ID NO: 1613

SEQ ID NO: 13426 - protein, 397 aa, Neisseria meningitidis; identical to SEQ ID NO: 2572

SEQ ID NO: 13427 - protein, 114 aa, Neisseria meningitidis; identical to SEQ ID NO: 3465

SEQ ID NO: 13428 - protein, 366 aa, Neisseria meningitidis; identical to SEQ ID NO: 3055

SEQ ID NO: 13429 - protein, 615 aa, Neisseria meningitidis; identical to SEQ ID NO: 5697

SEQ ID NO: 13430 - protein, 218 aa, Neisseria meningitidis; identical to SEQ ID NO: 2968

SEQ ID NO: 13431 - protein, 504 aa, Neisseria meningitidis
MTTSKCPVTHLTMNNGAPVADNQNSLTAGPRGPLLAQDLWLNEKLADFVREVIPERRMHAKGSGAFGTFTVTHDITKYTRAKIFSEVGKKTEMFARFTTVAGERGAADAERDIRGFALKFYTEEGNWDVVGNNTPVFFLRDPRKFPDLNKAVKRDPRTNMRSATNNWDFWTLLPEALHQVTIVMSDRGIPAGYRHMHGFGSHTYSFWNEAGERFWVKFHFRSQQGIKNLTNEEAAKIIADDRESHQRDLYEAIERGEFPKWTMYIQVMPEADAEKVPYHPFDLTKVWPKKDYPLIEVGEFELNRNPENFFADVEQSAFAPSNLVPGVGASPDKMLQARLFNYADAQRYRLGVNFRQIPVNRPRCPVHSNQRDGQGRADGNYGSLPHYEPNSFGQWQQQPDFAEPPLKINGDAAHWDYRQDDDDYFSQPRALFNLMNDAQKQALFGNTAAAMGDAPDFIKYRHIRNCYRCDPAYGEGVAKALGLTVEDAQAARATDPALGQPGLL

SEQ ID NO: 13432 - protein, 89 aa, Neisseria meningitidis; identical to SEQ ID NO: 3378

SEQ ID NO: 13433 - protein, 214 aa, Neisseria meningitidis; identical to SEQ ID NO: 3176

SEQ ID NO: 13434 - protein, 107 aa, Neisseria meningitidis; identical to SEQ ID NO: 564

SEQ ID NO: 13435 - protein, 109 aa, Neisseria meningitidis; identical to SEQ ID NO: 2743

SEQ ID NO: 13436 - protein, 133 aa, Neisseria meningitidis; identical to SEQ ID NO: 2851

SEQ ID NO: 13437 - protein, 102 aa, Neisseria meningitidis; identical to SEQ ID NO: 1826

SEQ ID NO: 13438 - protein, 316 aa, Neisseria meningitidis; identical to SEQ ID NO: 5301

SEQ ID NO: 13439 - protein, 716 aa, Neisseria meningitidis
MKTPLLKPLLITSLPVFASVFTTASIVWQLGEPKLAMPFVLGIIAGGLVDLDNRLTGRLKNIIATVALFTLSSLTAQSTLGTGLPFILAMTLMTFGFTILGAVGLKYRTFAFGALAVATYTTLTYTPETYWLTNPFMILCGTVLYSTAIILFQIILPHRPVQESVANAYDALGGYLEAKADFFDPDEAAWIGNRHIDLAMSNTGVITAFNQCRSALFYRLRGKHRHPRTAKMLRYYFAAQDIHERISSAHVDYQEMSEKFKNTDIIFRIHRLLEMQGQACRNTAQALRASKDYVYSKRLGRAIEGCRQSLRLLSDGNDSPDIRHLRRLLDNLGSVDQQFRQLQHNGLQAENDRMGDTRIAALETGSLKNTWQAIRPQLNLESGVFRHAVRLSLVVAAACTIVEALNLNLGYWILLTALFVCQPNYTATKSRVRQRIAGTVLGVIVGSLVPYFTPSIETKLWIVIASTTLFFMTRTYKYSFSTFFITIQALTSLSLAGLDVYAAMPVRIIDTIIGASLAWAAVSYLWPDWKYLTLERTAALAVCSNGAYLEKITERLKSGETGDDVEYRATRRRAHEHTAALSSTLSDMSSEPAKFADSLQPGFTLLKTGYALTGYISALGAYRSEMHEECSPDFTAQFHLAAEHTAHIFQHLPETEPDDFQTALDTLRGELDTLRTHSSGTQSHILLQQLQLIARQLEPYYRAYRQIPHRQPQNAA

SEQ ID NO: 13440 - protein, 351 aa, Neisseria meningitidis; identical to SEQ ID NO: 2484

SEQ ID NO: 13441 - protein, 318 aa, Neisseria meningitidis; identical to SEQ ID NO: 3574

SEQ ID NO: 13442 - protein, 163 aa, Neisseria meningitidis; identical to SEQ ID NO: 3672

SEQ ID NO: 13443 - protein, 320 aa, Neisseria meningitidis; identical to SEQ ID NO: 913

SEQ ID NO: 13444 - protein, 148 aa, Neisseria meningitidis; identical to SEQ ID NO: 3068

SEQ ID NO: 13445 - protein, 199 aa, Neisseria meningitidis; identical to SEQ ID NO: 2856

SEQ ID NO: 13446 - protein, 153 aa, Neisseria meningitidis; identical to SEQ ID NO: 750

SEQ ID NO: 13447 - protein, 163 aa, Neisseria meningitidis; identical to SEQ ID NO: 2144

SEQ ID NO: 13448 - protein, 417 aa, Neisseria meningitidis; identical to SEQ ID NO: 3141

SEQ ID NO: 13449 - protein, 140 aa, Neisseria meningitidis
MEWVSLFSDPQRDDDSLITLKDEKITVKNYIVPWWKKGENFRKLELITPGKNDNGNLTVNGIYGIQSFADPQLGYTPELSVKSNNDILFKNNLQSVDVKPHSGNIHLDAKGKIQFNLNVPNVDGVQDVASGKKYRQTIVP

SEQ ID NO: 13450 - protein, 249 aa, Neisseria meningitidis; identical to SEQ ID NO: 2888

SEQ ID NO: 13451 - protein, 94 aa, Neisseria meningitidis; identical to SEQ ID NO: 2694

SEQ ID NO: 13452 - protein, 216 aa, Neisseria meningitidis
MISVEHVSKRYLTRQGWRTVLHDISFKMEKGEKIGILGRNGAGKSTLIRLISGVEPPTTGEIKRTMSISWPLAFSGAFQGSLTGMDNLRFICRIYNVDIDYVKNFTEEFSELGQYLYEPVKRYSSGMKARLAFALSLAVEFDCYLIDEVIAVGDSRFADKCKYELFEKRKDRSIILVSHSHSAMKQYCDNAMVLEKGHMHQFEDMDKAYEYYNSLP

SEQ ID NO: 13453 - protein, 455 aa, Neisseria meningitidis
MPDLHTEFSRLLPADEIAELSPTLLKDQRNRFTSAPDIILQPRSVESVQTIMRFCYEHRIPVTPQGGNTGLCGAAVSENGVLLNLSKLNRIRSINLSDNCITVEAGSVLQTVQQAAEASNRLFPLSLASEGSCQIGGNIACNAGGLNVLRYGTMRDLVIGLEVVLPNGERVSHLHPLHKNTTGYDLRHLFIGSEGTLGIITAATLKLFARPSDKATAWVGIPDIESAVRLLTETQAHFAERLCSFELIGRFAAELSSEFSKFPLPTHSEWHILLELTDSLPDSNLDDRLVEFLYKKGFTDSVLAQSEQERIHMWALRENISASQRKLGTSIKHDIAVPIGRVADFVRRCAKDLEQNFKGIQIVCFGHLGDGSLHYNTFLPEILSNEVYRYENDINDAVYRNVLACNGTIAAEHGIGIIKKQWLDKVRTPAEIALMKSIKQHLDPYNIMNPGKLLP

SEQ ID NO: 13454 - protein, 204 aa, Neisseria meningitidis
MNFTRLLNQVLSTVQKKGNTFSDSPLNSFGGGALVAGVASMLLNGKNRKTITKIGSTAALGYLAYRGYQMWQQNKGRATVTQSDFQPAGETEETYSRTVLRTMIAAAASDGMIDEAERRTIEQESGTDPETAAWLAAEYRLPASIGDIAAAVGNDEALAAEAYLAARLVCADLSRKETVFLARLSQALKLDDNLVESLERQLGF

SEQ ID NO: 13455 - protein, 144 aa, Neisseria meningitidis; identical to SEQ ID NO: 3188

SEQ ID NO: 13456 - protein, 107 aa, Neisseria meningitidis; identical to SEQ ID NO: 2236

SEQ ID NO: 13457 - protein, 205 aa, Neisseria meningitidis
MVIAAIMAMIALPNMSQWIASRRIASHAERIANLLRFSRGEAVRLNLPVYICPVQVKKGGTVNNKCDSGKKGQGMLAFGDKNGNKGYDNDTADVLLRSVVLNDDINDKRINYAFNHIAFGQTQPTTDRVVWTFNQNGTFGYTKDQHLTKQSSFFYSDGYIQIVLTDARAVSDADKKFRSAVVLIDSSGRVEVCPRNDRRTVCQYK

SEQ ID NO: 13458 - protein, 298 aa, Neisseria meningitidis; identical to SEQ ID NO: 2777

SEQ ID NO: 13459 - protein, 307 aa, Neisseria meningitidis; identical to SEQ ID NO: 2891

SEQ ID NO: 13460 - protein, 288 aa, Neisseria meningitidis; identical to SEQ ID NO: 464

SEQ ID NO: 13461 - protein, 444 aa, Neisseria meningitidis
MSPEHSAQLQAFEAKILSNHAKIEAWFRTQWSVHRPPFYGSVDIRNAGYKISSIDMNLFPGGFNNLNPNFIPLAAVAAQDAVQRACETAKSVLIIPENHTRNTFYLQNVYALGEILCSAGYEVRLGSLNPEVTEPTEFETALGDKILLEPLLRTRDRVHLADGFSPCVVLLNNDLSAGIPDILKGISQTVLPPLHGGWTTRRKTNHFGAYNQVAAEFAKLIGIDEWQINPYFEKIGGLDFQGREGEDALAEAVERVLAKIQAKYDESGITDKPFVIVKADAGTYGMGVMSVKSADEVRGLNRKNRNKMAKVKEGLEVSEVIVQEGIYTYETLNSAVCEPVVYMMDRFVIGGFFRVHEGRGADENLNAGGMVFVPLSNSIPTGNGDNSQEAPEACKRVFEQWDSLGMPRSEKDCDVDNEHNRLYVYGVMARLSLLAASIELEETA

SEQ ID NO: 13462 - protein, 310 aa, Neisseria meningitidis; identical to SEQ ID NO: 2407

SEQ ID NO: 13463 - protein, 248 aa, Neisseria meningitidis; identical to SEQ ID NO: 639

SEQ ID NO: 13464 - protein, 103 aa, Neisseria meningitidis; identical to SEQ ID NO: 2880

SEQ ID NO: 13465 - protein, 210 aa, Neisseria meningitidis; identical to SEQ ID NO: 3436

SEQ ID NO: 13466 - protein, 252 aa, Neisseria meningitidis; identical to SEQ ID NO: 3275

SEQ ID NO: 13467 - protein, 107 aa, Neisseria meningitidis; identical to SEQ ID NO: 2524

SEQ ID NO: 13468 - protein, 204 aa, Neisseria meningitidis; identical to SEQ ID NO: 504

SEQ ID NO: 13469 - protein, 185 aa, Neisseria meningitidis; identical to SEQ ID NO: 9285

SEQ ID NO: 13470 - protein, 260 aa, Neisseria meningitidis; identical to SEQ ID NO: 2536

SEQ ID NO: 13471 - protein, 148 aa, Neisseria meningitidis; identical to SEQ ID NO: 2737

SEQ ID NO: 13472 - protein, 97 aa, Neisseria meningitidis; identical to SEQ ID NO: 2609

SEQ ID NO: 13473 - protein, 82 aa, Neisseria meningitidis
MLTPEQVKAMIEDVAKCEHIKVEGDGHHFFAVIVSSEFEGKARLARHRLIKDGLKAQLESNELHALSISVAATPAEWAAKAQ

SEQ ID NO: 13474 - protein, 301 aa, Neisseria meningitidis; identical to SEQ ID NO: 2409

SEQ ID NO: 13475 - protein, 123 aa, Neisseria meningitidis; identical to SEQ ID NO: 3577

SEQ ID NO: 13476 - protein, 397 aa, Neisseria meningitidis; identical to SEQ ID NO: 2408

SEQ ID NO: 13477 - protein, 189 aa, Neisseria meningitidis; identical to SEQ ID NO: 8960

SEQ ID NO: 13478 - protein, 172 aa, Neisseria meningitidis
MTTHFVVMGVCGCGKTTAALSLQKHLGQCPYAEGDEFHTQANRDKMGAGIPLTDEDRYPWLGNLRDWMTQQAQNGANHTIVTCSALKRGYRDILRGAEGKAAFIHLSPPQDVNLERMMSRKGHYMKAGMLDSQLEILEELGEGEYGVKIANPGTPEAVEADILNWVASENLL

SEQ ID NO: 13479 - protein, 115 aa, Neisseria meningitidis; identical to SEQ ID NO: 3528

SEQ ID NO: 13480 - protein, 357 aa, Neisseria meningitidis
MRPFCVGATVLAILGALVFFISPGVVVLHRQIFLELMLPAAYGGFLTAALLDWTGFSGNLKPATTLMAVLLLVAAVLLPFLPQLAAFFVAAYWLVLLLFCAWLIWLARNTDNFALLMLLAAFTVFQTAYAATGDLNLLRAQVHLNMAAVMFVSIRVSVLLGAEALKECRLKDPVFIPNIVYKNIAITFLLLHTAAELWLPAQTAGFTALAVGFILLAKLRELHHHELLRKHYVRTYYLLQLFAAAGYLWTGAAKLQNLPASAPLHLITLGGMMGGVMMVWLTAGLWHSGFTKLDYPKLCRIAVPILFAAAVSRTVLMNVNPIFFITVPAILTVAVFVLYLFTFVPIFQANAFTGDPE

SEQ ID NO: 13481 - protein, 127 aa, Neisseria meningitidis; identical to SEQ ID NO: 1080

SEQ ID NO: 13482 - protein, 213 aa, Neisseria meningitidis; identical to SEQ ID NO: 6185

SEQ ID NO: 13483 - protein, 201 aa, Neisseria meningitidis; identical to SEQ ID NO: 3151

SEQ ID NO: 13484 - protein, 195 aa, Neisseria meningitidis; identical to SEQ ID NO: 3348

SEQ ID NO: 13485 - protein, 389 aa, Neisseria meningitidis; identical to SEQ ID NO: 3056

SEQ ID NO: 13486 - protein, 99 aa, Neisseria meningitidis; identical to SEQ ID NO: 2699

SEQ ID NO: 13487 - protein, 436 aa, Neisseria meningitidis; identical to SEQ ID NO: 3947

SEQ ID NO: 13488 - protein, 412 aa, Neisseria meningitidis; identical to SEQ ID NO: 2406

SEQ ID NO: 13489 - protein, 69 aa, Neisseria meningitidis; identical to SEQ ID NO: 3128

SEQ ID NO: 13490 - protein, 517 aa, Neisseria meningitidis; identical to SEQ ID NO: 3152

SEQ ID NO: 13491 - protein, 179 aa, Neisseria meningitidis; identical to SEQ ID NO: 8483

SEQ ID NO: 13492 - protein, 94 aa, Neisseria meningitidis; identical to SEQ ID NO: 2111

SEQ ID NO: 13493 - protein, 570 aa, Neisseria meningitidis; identical to SEQ ID NO: 3199

SEQ ID NO: 13494 - protein, 398 aa, Neisseria meningitidis; identical to SEQ ID NO: 3512

SEQ ID NO: 13495 - protein, 107 aa, Neisseria meningitidis; identical to SEQ ID NO: 150

SEQ ID NO: 13496 - protein, 115 aa, Neisseria meningitidis; identical to SEQ ID NO: 2034

SEQ ID NO: 13497 - protein, 76 aa, Neisseria meningitidis; identical to SEQ ID NO: 3372

SEQ ID NO: 13498 - protein, 291 aa, Neisseria meningitidis; identical to SEQ ID NO: 3301

SEQ ID NO: 13499 - protein, 227 aa, Neisseria meningitidis; identical to SEQ ID NO: 1151

SEQ ID NO: 13500 - protein, 259 aa, Neisseria meningitidis; identical to SEQ ID NO: 2978

SEQ ID NO: 13501 - protein, 163 aa, Neisseria meningitidis; identical to SEQ ID NO: 684

SEQ ID NO: 13502 - protein, 115 aa, Neisseria meningitidis
MYEPPDEFGTEYYESPDSNLLISVEKNKIISIFCYQELYFMGVNIIGLNFEDFKQLFHHPKSYGVDKYYLSNESYPTYVYEFDEIGVQAWEAKGKIVTIIAGGKDNYSTEPYYDE

SEQ ID NO: 13503 - protein, 352 aa, Neisseria meningitidis; identical to SEQ ID NO: 3267

SEQ ID NO: 13504 - protein, 273 aa, Neisseria meningitidis; identical to SEQ ID NO: 3211

SEQ ID NO: 13505 - protein, 224 aa, Neisseria meningitidis; identical to SEQ ID NO: 2297

SEQ ID NO: 13506 - protein, 867 aa, Neisseria meningitidis; identical to SEQ ID NO: 3625

SEQ ID NO: 13507 - protein, 319 aa, Neisseria meningitidis; identical to SEQ ID NO: 3269

SEQ ID NO: 13508 - protein, 153 aa, Neisseria meningitidis
MSDFSPISRFLADEAATLDLGAAWSSRLNAPLVIYLEGDLGAGKTTLTRGILRGLGHQGAVKSPTYAIVESYPLERFTLHHFDLYRFSFPEEWEDAGLDELFAANSVCLIEWPQQGGEFTPPADITATLTHDGGGRKCLLTAHTERGRESLPL

SEQ ID NO: 13509 - protein, 98 aa, Neisseria meningitidis; identical to SEQ ID NO: 2991

SEQ ID NO: 13510 - protein, 613 aa, Neisseria meningitidis; identical to SEQ ID NO: 3756

SEQ ID NO: 13511 - protein, 149 aa, Neisseria meningitidis; identical to SEQ ID NO: 2323

SEQ ID NO: 13512 - protein, 658 aa, Neisseria meningitidis
MEYMDLKSLLNFGLPNMPRTVIGLRKKAQRDGWQTRRRQGKGGGVEYALPAEIRAAIMKRQSDELAEKMPKTLPQVRPGTAMSAQALAEAAKLLNEKQRSVADARCAVVAAVLGIKYEYDCSAKAAVAQFLGLLAEGKLDAVTLGNLEKANDRSRSAKVGERTLDGWISAYLKAENATERLVALAPKTTKAVKPIESYGWLPMFMQFHSIPSEPKLAHSYRRFVQWAEAENMPVNDVPSLSMVRRVWGKLPLIMQERGRKTGAAYKSLLPYVKRDWGALKPNDVWIGDGHSFKAKVAHPVHGRPFKPEVTVIIDGCTRFVVGFSVSLAESCVAVSDALRIGVKHFGLPIIYYSDNGGGQIGKTIDHEITGITSRLGIRHETGIAGNPQGRGIIERWWKDNLIEMARQYETFTGAGMDSSTKNLMYRKMESAFNALEKGKDLTEEQQKYLKKLPSWSRFIADVAKCIDEYNNRPHGELPRHPDGGHYSPKAYREMRLEQDGIAPDMLSAEELATMFMPQEVRKVQRGWLDLFNNSYFSTELAEYHKDEVRVSYDLSDASAVNVFDMDGKFITKAQADGNTREAFPTARIDQLAEKRRKGKIKRAENAIKLANAEVNPALEQAAAWDELGHLGGNDIEAEYAVLPKTGTDDFVLFEADRS

SEQ ID NO: 13513 - protein, 68 aa, Neisseria meningitidis; identical to SEQ ID NO: 3446

SEQ ID NO: 13514 - protein, 109 aa, Neisseria meningitidis; identical to SEQ ID NO: 10877

SEQ ID NO: 13515 - protein, 179 aa, Neisseria meningitidis; identical to SEQ ID NO: 8483

SEQ ID NO: 13516 - protein, 208 aa, Neisseria meningitidis; identical to SEQ ID NO: 9498

SEQ ID NO: 13517 - protein, 488 aa, Neisseria meningitidis; identical to SEQ ID NO: 2117

SEQ ID NO: 13518 - protein, 384 aa, Neisseria meningitidis; identical to SEQ ID NO: 3611

SEQ ID NO: 13519 - protein, 239 aa, Neisseria meningitidis; identical to SEQ ID NO: 940

SEQ ID NO: 13520 - protein, 135 aa, Neisseria meningitidis
MEIRAIKYTAMAALLAFTVAGCRLAGWYECSSLSGWCKPRKPAAIDFWDIGGESPPSLEDYEIPLSDGNRSVRANEYESAQQSYFYRKIRKFEACGLDWRTRDGKPLIETFKQEGFDCLKKQGLRRNGLSERVRW

SEQ ID NO: 13521 - protein, 407 aa, Neisseria meningitidis; identical to SEQ ID NO: 3034

SEQ ID NO: 13522 - protein, 262 aa, Neisseria meningitidis; identical to SEQ ID NO: 256

SEQ ID NO: 13523 - protein, 177 aa, Neisseria meningitidis; identical to SEQ ID NO: 3295

SEQ ID NO: 13524 - protein, 430 aa, Neisseria meningitidis
MAVFPLSAKHRKYALRALAVSIILVSAAYIALTERTERVRPQRVEQNLPPLSWGGSGVQTAYWVQEAVQPGDSLADVLARSGMARDEIARITEKYGGEADLRHLRADQSVHVLVGGDGGAREVQFFTDEDGERNLVALEKKGGIWRRSASEADMKVLPTLRSVVVKTSARGSLARAEVPVEIRESLSGIFAGRFSLDGLKEGDAVRLIYDSLYFHGQQVAAGDILAAEVVKGGTRHQAFYYRSDKEGGGGGNYYDEDGRVLQEKGGFNIEPLVYTRISSPFGYRMHPILHTWRLHTGIDYAAPQGTPVRASADGVITFKGRKGGYGNAVMIRHANGVETLYAHLSAFSQAQGNVRGGEVIGFVGSTGRSTGPHLHYEARINGQPVNPVSVALPTPELTQADKAAFAAQKQKADALLARLRGIPVTVSQSD

SEQ ID NO: 13525 - protein, 246 aa, Neisseria meningitidis; identical to SEQ ID NO: 2558

SEQ ID NO: 13526 - protein, 637 aa, Neisseria meningitidis
MLNITLPDGSVRQYESPVTVAQIAASIGAGLAKAAVAGRVNGKLVDACDPIVEDSAVQIITPKDQEGIEIIRHSCAHLVGHAVKQLYPNAKMVIGPVIEEGFYYDIATEKPFTPEDVAAIEARMKELIAQDYDVVKIMTPRAEAIKIFQERGEEYKLRLIDDMPEVEAMGMYHHQEYVDMCRGPHVPNTRFLKNFKLTKLAGAYWRGDSNNEMLQRIYGTAWATKDELKAYIQRIEEAEKRDHRKLGKQLDLFHLQDEAPGMVFWHPKGWALWQVIEQHMRKELNAAGYKEVKTPQIMDKTFWEKSGHWDNYKDNMFVTSSEKREYAVKPMNCPGHVQIFNNGLRSYRDLPMRLAEFGSCHRNEPSGALHGLMRVRGFVQDDAHIFCTEDQIVSEARAFNELLVRIYKQFGFHDVSVKLSLRPEKRAGSDDVWDKAEQGLREALTACGVEWGELPGEGAFYGPKIEYHVKDALGRSWQCGTLQLDFVLPERLDAEYVTENNDRARPVMLHRAILGSLERFIGILIENHAGSFPLWLAPVQLVIMNITENQADYCREVAAKLQAAGFRVELDLRNEKIGYKIRDNSQYRFPYQIVVGDKEKQENKVAVRRKAEDLGSLDLDDFIAQLQQEITDALVNH

SEQ ID NO: 13527 - protein, 113 aa, Neisseria meningitidis; identical to SEQ ID NO: 995

SEQ ID NO: 13528 - protein, 144 aa, Neisseria meningitidis; identical to SEQ ID NO: 3606

SEQ ID NO: 13529 - protein, 146 aa, Neisseria meningitidis
MPKATFYTHVAQVPIFTCRLIARAIRDGGRILVWSDSFGRLQELDKMLWQYEAESFIPHEIWEMEEAMPSEPSVLLACGGNLPRIPEGMTVLNLSDGFWNTAPVLPARVLEIVGNSLEDLADARERFTAYRRSGFAIEHHGMEGKA

SEQ ID NO: 13530 - protein, 685 aa, Neisseria meningitidis
MPEQNRILCRELSLLAFNRRVLAQAEDKNVPLLERLRFLCIVSSNLDEFFEVRMAWLKRENKLHPRRRLDNGKMPSETIADVTEAARSLIRHQYDLFNNVLQPELARESIHFYRRRNWTGAQKKWIEDYFDRELLPILTPIGLDPSHPFPRPLNKSLNFAVELDGTDAFGRPSGMAIVQAPRILPRVVPLPSELCGGGHGFVFLSSILHAHVGKLFPGMNVKGCHQFRLTRDSDLTVDEEDLQNLRAAIQNELHDREYGDGVRLEVADTCPAYIRDFLLAQFKLTAAELYQVKGPVNLVRLNAVPDLVNRPDLKFPTHTPGRLKALGKTASIFDLVRQSPILLHHPYQSFDPVVEMMREAAADPDVLAVKMTIYRTGTRSELVRALMKAALAGKQVTVVVELMARFDEANNVNWAKQLEEAGAHVVYGVFGYKVHAKMALVIRREDGVLKRYAHLGTGNYHQGTSRIYTDFGIITADEQITADVNTLFMEITGLGKPGRLNKLYQSPFTLHKMVIDRIARETEHAKAGKPARITAKMNSLIEPTVIEALYRASAAGVQIDLIVRGMCTLRPGVKGLSENIRVRSIIGRQLEHARVYCFHNNGADDTFISSADWMGRNFFRRIETAAPIAAPELKKRVIREGLEMALADNTHAWLMQPDGGYIRAAPAEGESEADLQNDLWTLLGG

SEQ ID NO: 13531 - protein, 423 aa, Neisseria meningitidis
MFQWLYDVLWLLAPIWIRRYLDKRSGSAPAYRAHRDERFGKPYPNPVTGAVWIHAVSVGETRAAQPLIRELRQRFPDAPLLMTQMTPTGRETAQVLFPDAQCRYLPYDKKTWVRQFLREHRPMFGILMETEIWPNLMTECRKSGVPLFLANARLSEKSLNGYLKVRRLIRPAAASLTGCLAQTEADAARLAKLGAASVQVCGNTKYDLMPSEQMKTLAGQFEKRIGDRQVAVCGSTRVYRGEDEAEKLLAAWQQYRGDALLVVVPRHPEHFQTVFETAKRFGFKVQRRSDGLPVEPDTQVWIGDSMGELYAYYLCADVAFVGGSLVDSGCQNIIEPLSCGVPTIFGFSTYNFSEACWHALASGAAVQVESADAWREAVEKTLSSKGGGMQMQVRVDGFIAQHRGAGARIAEAVREAVCGHRGR

SEQ ID NO: 13532 - protein, 859 aa, Neisseria meningitidis
MRYDKLTAKFQQALAEAQSLALAADGSYLEAGFVLKALLDDQNSGAAALLAHAGVNVPQVKQRLQQHLNSLPKVSGQGGDILPSRELQAVLNLMDKAATKRGDAYIASELFLLALVQQNDAAGKILKEAGATEQNINAAIDAVRGGQNVNDANAEDQRDALKKYTLDLTQRARDGKLDPVIGRDDEIRRAIQVLQRRTKNNPVLIGEPGVGKTAIVEGLAQRIVNGEVPESLRNKRLLVLDLAALIAGAKYRGEFEERLKGVLNDLAKDDGNTLIFIDEIHTLVGAGKTDGAMDAGNMLKPALARGELHCIGATTLDEYRQYIEKDAALERRFQKVLVGEPSVEDTIAILRGLQERYEIHHGIDITDPAIVAAAELSDRYITDRFLPDKAIDLIDEAASRVKMEKETKPEAMDKIDRRLIQLRMEKAHVEKEKDDASKKRLELIDEEIDGLEKEYADLDEIWKAEKAISDGAANIKKQIDEVKIKIEQAKRQGDLALASKLMYEDLEHLEKQRAAAERADTDSTKPANKLLRNNVGAEEIAEVVSRMTGIPVSKMMEGERDKLLKMEEVLHRRVVGQDEAVRAVSDAIRRSRSGLADPNKPYGSFLFLGPTGVGKTELCKALAGFLFDSEDHLIRIDMSEYMEKHAVARLIGAPPGYVGYEEGGYLTEQVRRKPYSVILLDEVEKAHPDVFNILLQVLDDGRLTDGQGRTVDFKNTVIVMTSNIGSQHIQQMGIQDYEAVKEVVMEDVKEHFRPEMINRIDEVVVFHGLDQDNIRNIAKIQLKGLEKRLEKQNLRLTVSDAALDIIAKAGFDPIYGARPLKRAIQSEIENPLAKALLAGNYAPESEIRVEADGDRLKFA

SEQ ID NO: 13533 - protein, 1067 aa, Neisseria meningitidis; identical to SEQ ID NO: 8915

SEQ ID NO: 13534 - protein, 127 aa, Neisseria meningitidis; identical to SEQ ID NO: 2146

SEQ ID NO: 13535 - protein, 297 aa, Neisseria meningitidis
MIIVMSRRAAEADIAGVVAFIRSRGLREHISHGDERTVIGAIGDDRVLSVREVQTLPEVEKAVRILDTWKTVSRENRAEDSRVAAKGVAFGGGETVCIAAEPSVWRNADAVFLDPFFTSANLYDTSSADEGRGRCRRLAEQTASAHDAGKPVLVRVRNVRHVEAALNAGADILYLGGGLMSDLAVLNEAGNLNIPLVLCKDKHHSAEDWLNAAEYVVSRGNRHLILGESGVLNHTKGHPYRLDVESIVKVRQISHLPVIANITGLWNRDMPQEILYGLAKAAGACGIVGTCFEKSGG

SEQ ID NO: 13536 - protein, 349 aa, Neisseria meningitidis; identical to SEQ ID NO: 261

SEQ ID NO: 13537 - protein, 237 aa, Neisseria meningitidis; identical to SEQ ID NO: 2588

SEQ ID NO: 13538 - protein, 359 aa, Neisseria meningitidis; identical to SEQ ID NO: 2157

SEQ ID NO: 13539 - protein, 40 aa, Neisseria meningitidis
MKKGRLKLLFQTTFFNGCFKSKYLCRRPHQHFFTSEGKNP

SEQ ID NO: 13540 - protein, 188 aa, Neisseria meningitidis; identical to SEQ ID NO: 7019

SEQ ID NO: 13541 - protein, 741 aa, Neisseria meningitidis; identical to SEQ ID NO: 2220

SEQ ID NO: 13542 - protein, 242 aa, Neisseria meningitidis; identical to SEQ ID NO: 624

SEQ ID NO: 13543 - protein, 154 aa, Neisseria meningitidis; identical to SEQ ID NO: 9513

SEQ ID NO: 13544 - protein, 317 aa, Neisseria meningitidis
MGFLIGLSRNLTRFTALVILLASAVAFIGPASFAWVKGDVQVLVLGIIMLGMGMTLGREDYRILAQRPLDVFIGAAAQYTVMPLLAIGIAKLFDLSPGLTLGLVLVGTCPGGVSSNIMSFLAKGDVAFSVGMTTVSTVLAPAVTPLWMTCLVGQTVDMDGWGMFRFMLLVTLLPVVLGSAANILLHGKHWFENVRAVMPGVAVLAFACIVGGVASVHGHRFAESALVMVLAIAVHNIAGYVSGYYAAALFGMDTAKKRTLAIEVGVQNAGLATGLSAKFFPGNPESAVAAAVACVWHSVSGTVLGNLFALWDKRRDA

SEQ ID NO: 13545 - protein, 604 aa, Neisseria meningitidis; identical to SEQ ID NO: 2344

SEQ ID NO: 13546 - protein, 367 aa, Neisseria meningitidis; identical to SEQ ID NO: 3396

SEQ ID NO: 13547 - protein, 729 aa, Neisseria meningitidis
MIYHRIAVNVPLSDGLLTYSHSDPLPPGTRVLVPFRNKTVVGMVWETDIAPDMDTARILSIQTTFLDEPPLPESWRDLLSFTSRYYHYPTGQAVFAALPQGLKETRAVEMPQPPLFYALNEAGRAQTPPPARFNKKAALWDALLSGGMTMAALKQVNAQAAKLIEDWTEQGWIETAEAAKPVLRSCHGQASHAGFVLNAGQRQASDEIQTALGRFQPFLLYGITGSGKTEVYFDAMAKVLAQGRQVLFLLPEINLTPQLLKRVENRFADVPTAVLHSQMAAGRRTQDYLRAMLGQAKLVIGTRLAVFTPMDDVGLIVVDEEHDGSFKQDNELRYHARDLAVWRAKQGGCPIILGSATPSLESWHKAQSGAYRLLQLTERAHTAAQLPQVDILNVGRLKLDNGFSPQALQLLKQNFEAGGMSLVYLNRRGFAPALFCGDCGYTFGCPNCSAKMVLHQRVRQLRCHHCDHREPIPFKCPDCGNQDLTAVGHGTQRVEETLRAFLPKAAVVRVDRDSTAHKNDWADLYRRIADNEIDILVGTQMLAKGHDFARLNLVIVLNADGSLYSADFRAPERLFAELMQVSGRAGRADKPGKVLIQTQLPEHPVFAAVKAQNYAVFAENELNERQMFAMPPFGFQTAVRADAPRVADAMEFLNAAKETLAPLLPESVSQFGAAPMLMVRLAERERAQIFLESTSRQDLHRAVSLWVQVLQQNRDGKIRWSVDVDPQEA

SEQ ID NO: 13548 - protein, 179 aa, Neisseria meningitidis; identical to SEQ ID NO: 8483

SEQ ID NO: 13549 - protein, 410 aa, Neisseria meningitidis
MPSAHYPEMSEKLMAVLMAMLVTLMPFSIDAYLPAIPEMAQSLNADVHRIEQSLSLFMFGTAFGQVVGGSVSDIKGRKPVALTGLAVYCLAVAAIVFASSAEQLLNLRVVQAFGAGMTVVIVGAMVRDYYSGRKAAQMFALIGIILMVVPLVAPMVGALLQGLGGWQAIFVFLAAYSLVLLGLVQYFLPKPAVGGKIGRDVFGLVAGRFKRVLKTRAAMGYLFFQAFSFGSMFAFLTESSFVYQQLYRVTPHQYAWAFALNIITMMFFNRITAWRLKTGAHPQSILLWGIVVQFAANLSQLAAVLFFGLPPFWLLVACVMFSVGTQGLVGANTQACFMSYFKEEGGSANAVLGVFQSLIGAGVGMAATFLHNGSATVMAVTMTASTSCGIALLWLCSHRAWKENEQSEYL

SEQ ID NO: 13550 - protein, 557 aa, Neisseria meningitidis
MLLTLSLRDFVIVENLNLDFQSGFTVLTGETGAGKSITLDAIGLLLGDKADYSQVRSGAKEAQLSALFDISHLPVLKAELYEQGLLNDGEEELSIRRIIDAKGKSRSFINNQAATLAQLKAVGSQLIDIHGQNAHHSLNQEAAQRELLDAFAGSRAQAETVRQLYQNWANSKKALQEAQEQAENIALEQERLEWQFNELNQLDIKQGEWEALSQSHDSLAHSAELLQAAEEVGSKIDGDNGIQRHIYQCQKLLANLQNIEPRFAESLNMLASIEAELGEISANMRDVAGRSDINPNELAAQEQRMGELMGMARKYRIEPEELPAKLAEIEERLQSLQAAADLDALEHNVAHNFAEYQEAAHILSAMRHQAAERLSGETTEHMQHLAMKGARFDIVLLPSSPTAHGLEQVQFQVAANKGNPPRPLNKVASGGELARISLALQVVASQYTQVPTLIFDEVDTGIGGGVAEMVGKALRALGRKHQVLAVTHLPQVASCGENHWRVRKHSEGEQTVSEISILDEIQRVEEVARMLGGEVITDTTRQHAAELLQLASKNSLF

SEQ ID NO: 13551 - protein, 102 aa, Neisseria meningitidis
MVERYKTMIAEANGKIHRLEDWGRRQLAYPINKIHKAHYVLMNIETTPEVVEELETAFRFNDAVLRHLTIKTKHAVTEASPMLGGEKAKNLLSGASEEAVAQ

SEQ ID NO: 13552 - protein, 521 aa, Neisseria meningitidis; identical to SEQ ID NO: 1978

SEQ ID NO: 13553 - protein, 125 aa, Neisseria meningitidis
MLVMAAIGIGMTVLVYGIVAVIVKLDDLGMLLMRRPQTFSRSLGQMLTAFMPCFMRGLSVVGTLAMFLIGGVLVAHNLGLLHDFLHAQHWDAGWAEYFANLVVGLLSGSIACAPALPLMNRFGRH

SEQ ID NO: 13554 - protein, 274 aa, Neisseria meningitidis
MNCNTPTDIMFSFEGFRRRGGITDHHADGFGIGFFEGKGVRLFHDDKPSANSPVADLVRAYQIKSENVIAHIRKASQGQTSLANTHPFMREMWGGYWLFAHNGHLIDFFPEQGEFFHPVGTTDSERAFCHILNRLRTRFAARPDDDTLFDAIAGLTHEIRKFGLFNFMLSDGIALFAHASTLLHYIVRQAPFGKARLLDDDVMVDFAEVTTPSDRVAVIATLPLTRDESWSQLAVDELVMFREGNIVRHDRPENPVYMSAEEGLEIARAAGVAV

SEQ ID NO: 13555 - protein, 223 aa, Neisseria meningitidis; identical to SEQ ID NO: 1391

SEQ ID NO: 13556 - protein, 157 aa, Neisseria meningitidis
MEQKGFTLIEMMIVVAILGIISVIAIPSYQSYIEKGYQSQLYTEMVGINNISKQFILKNPLDDNQTIKNKLEIFVSGYKMNPKIAEKYNVSVHFVNKEKPRAYSLVGVPKTGTGYTLSVWMNSVGDGYKCRDAASARAYSETLSADAGCEAFSNRKK

SEQ ID NO: 13557 - protein, 166 aa, Neisseria meningitidis
MADLQKTFQTSFRDAMASCAAGVHVITTDGAAGRYGITMTAVTPVTDEPPTVMLCINRSARIIPILSENGSLCINTLADEHQDVAEHFAGLTGLSPEERFAYHIWHRGKTGQLEIEGALAHLHGHIVGKHEIGTHFVFYVRLDEIKNCGCKRPALLYFRRQFRFLD

SEQ ID NO: 13558 - protein, 121 aa, Neisseria meningitidis; identical to SEQ ID NO: 1865

SEQ ID NO: 13559 - protein, 473 aa, Neisseria meningitidis; identical to SEQ ID NO: 1953

SEQ ID NO: 13560 - protein, 1096 aa, Neisseria meningitidis; identical to SEQ ID NO: 2100

SEQ ID NO: 13561 - protein, 187 aa, Neisseria meningitidis; identical to SEQ ID NO: 3115

SEQ ID NO: 13562 - protein, 71 aa, Neisseria meningitidis; identical to SEQ ID NO: 2068

SEQ ID NO: 13563 - protein, 259 aa, Neisseria meningitidis; identical to SEQ ID NO: 9036

SEQ ID NO: 13564 - protein, 468 aa, Neisseria meningitidis
MNDYTAMPSEDREIGALSLPPHSMEAEQSVLGGLMLENPAWDRIADVVSGEDFYRHEHRLIFRSIAKLINESRPADVITVQEDLQRNEELEAAGGFEYLITLAQNTPSAANIRRYAEIVRERSIMRQLAEVGTEIARSAYNPQGRDAGQLLDEAENKVFQIAESTAKSKQGFLEMPDLLKEVVQRIDMLYSRDNPDEVTGVPTGFIDLDKKTSGLQPGDLIIVAGRPSMGKTAFSINIAEHVAVEGKLPVAVFSMEMGGAQLVMRMLGSVGRLDQSVLKTGRLEDEHWGRLNEAVVKLSDAPVYIDETPGLTALELRARARRLARQFNNKLGLIVIDYLQLMAGSGRSDNRASELGEISRSLKALAKELQVPIIALSQLSRTVESRTDKRPMMSDLRESGAIEQDADLIMFMYRDEYYNQDSPMKGLAECIIGKHRNGPVGKIFLTWTGQFTKFDNAAYIPEEAKIED

SEQ ID NO: 13565 - protein, 796 aa, Neisseria meningitidis; identical to SEQ ID NO: 2155

SEQ ID NO: 13566 - protein, 60 aa, Neisseria meningitidis; identical to SEQ ID NO: 3237

SEQ ID NO: 13567 - protein, 221 aa, Neisseria meningitidis; identical to SEQ ID NO: 2270

SEQ ID NO: 13568 - protein, 127 aa, Neisseria meningitidis; identical to SEQ ID NO: 2779

SEQ ID NO: 13569 - protein, 650 aa, Neisseria meningitidis; identical to SEQ ID NO: 2346

SEQ ID NO: 13570 - protein, 247 aa, Neisseria meningitidis
MLIIRNLIYWLILCSTLIFLFPFMLLASPFRDGAHKMARVWVKILNLSLKHIVGLKYRIIGAENIPDRPAVICAKHQSGWETLALQDIFPPQVYVAKRELFKIPFFGWGLKLVKTIGIDRNNRREANEQLIKQGLARKNEGYWITIFPEGTRLAPGKRGKYKLGGARMAKMFEMDIVPVALNSGEFWPKNSFLKYPGEITVVICPAIPHASGSEAELMGKCEHLIETQQPLISGAGPFAAKMPSETA

SEQ ID NO: 13571 - protein, 410 aa, Neisseria meningitidis; identical to SEQ ID NO: 257

SEQ ID NO: 13572 - protein, 477 aa, Neisseria meningitidis
MNEYSQLIKHPDISLSPISDSIGIGNPATGEILAYVRNTGSDKLKNLIQKAAAAQKLWAAKTALERADILWRWYFLVKENKEALARLMTMEQGKSLTESRGEIDYAASFVRWFAEEARRIDGDVLTSVKASQKLVVLKQPVGVTAAITPWNFPSAMIARKAAPALAVGCAMIVKPASLTPLSAYALVVLAYEAGVPQDLLPVVSGRASEIGREFATNPIIRKISFTGSTEVGAKIFADSAADIKKLSLELGGNAPFIVFDDADLDKAVEGALASKFRNSGQTCVCTNRVYAQSGIYDEFCRKLSEKVAELKLGNGLEDGVNQGPLIEEKAVEKVEQHIADALAKGAVCLTGGKRSALGGTFFEPTVLSGVTAQMAVAREETFGPLCPVFRFETEVEVIEAANNTEYGLAAYLFTADTARQWRVGEALEYGMVGINTGLISNEAAPFGGVKRSGLGREGSKYGADEYLELKYLCMDVG

SEQ ID NO: 13573 - protein, 625 aa, Neisseria meningitidis
MSQALPYRPDIDTLRAAAVLSVIVFHIEKNWLPGGFLGVDIFFVISGFLMTAILLREMSGGGRFSLKAFYIRRIKRILPAFFAVLAATLAGGFFLFTKDDFFLLWKSALTALGFASNLYFARGKDYFDPAQEEKPLLHIWSLSVEEQFYFVFPILLLLVARKSPRVQFGFLAALCALSLAASFMPSAFDKYYLPHLRACEMLVGSLTAVWMRYRQQRNLAVGRCCAAAGALFSACILSACLFAYSEQTAYFPGPAALIPCLAVAALIYFNHYEHPLKKFFQWKITVAAGLISYSLYLWHWPILAFMRYIGPDNLPPYSPAAAVVLILLLSLFSYHCIEKPFKKWQGSFAQSVLWIYALPMLILGAGSFFAMRLPFMAQYDRLGLTRSNTSCHNNTGKQCLWGDTEKQPELLVLGDSHADHYKTFFDAVGKKEKWAATMVSADACAYVEGYASRVFQNWAACRAVYRYAEEHLPRYSKVVLAMRWGSQMPENSRSLAYDAGFFQKFDRMLHKLSSEKQAVYLMADNLASSYNVQRAYILSSRIPGYRQALRPDDESTLKANARIRELAAKYPNVYIIDAAAYIPADFQIGGLPVYSDTDHINPYGGTELAKRFSEKQRFLNTRHNH

SEQ ID NO: 13574 - protein, 232 aa, Neisseria meningitidis; identical to SEQ ID NO: 2345

SEQ ID NO: 13575 - protein, 330 aa, Neisseria meningitidis; identical to SEQ ID NO: 3133

SEQ ID NO: 13576 - protein, 60 aa, Neisseria meningitidis; identical to SEQ ID NO: 3547

SEQ ID NO: 13577 - protein, 300 aa, Neisseria meningitidis; identical to SEQ ID NO: 2507

SEQ ID NO: 13578 - protein, 41 aa, Neisseria meningitidis; identical to SEQ ID NO: 6310

SEQ ID NO: 13579 - protein, 655 aa, Neisseria meningitidis
VGNTFKSILVWVALGIGLMAAFNALDGKKEDNGQIEYSQFIQQVNNGEVSGVNIEGSVVSGYLIKGERTDKSTFFTNAPLDDNLIKTLLDKNIRVKVTPEEKPSALAALFYSLLPVLLLIGAWFYFMRMQTGGGGKGGAFSFGKSRARLLDKDANKVTFADVAGCDEAKEEVQEIVDYLKAPNRYQSLGGRVPRGILLAGSPGTGKTLLAKAIAGEAGVPFFSISGSDFVEMFVGVGASRVRDMFEQAKKNAPCIIFIDEIDAVGRQRGAGLGGGNDEREQTLNQLLVEMDGFESNQTVIVIAATNRPDVLDPALQRPGRFDRQVVVPLPDIRGREQILNVHSKKVPLDKSVDLLSLARGTPGFSGADLANLVNEAALFAGRRNKVKVDQSDFEDAKDKIYMGPERRSMVMHEDEKRATAYHESGHAIVAESLPFTDPVHKVTIMPRGRALGLTWQLPERDRISMYKDQMLSQLSILFGGRIAEDIFVGRISTGASNDFERATQMAREMVTRYGMSDKMGVMVYAENEGEVFLGRSVTRSQNISEKTQQDIDAEIRRILDEQYQVAYKILDENRDKMETMCKALMEWETIDRDQVLEIMAGKQPSPPKDYSHNLRENADAAEDNAPHAPAREETEAPAPADTASSESEQRPENKA

SEQ ID NO: 13580 - protein, 119 aa, Neisseria meningitidis; identical to SEQ ID NO: 2983

SEQ ID NO: 13581 - protein, 418 aa, Neisseria meningitidis
MKVLVLGAGVAGVSSAWYLAEAGHEVTVIDRAEGVAMETSFANAGQLSYGYTTPWAAPGIPTKALKWLFTSHPPLLFRPDGSLYQIEWLWQMLQNCTAAHYQTNKERMVRISEYSREMFRRFEAQTGMNFEERKKGTLQIFRQTKEVEAAEQDIAVLERYGVPYRRLKPEECAEFEPALARVTAKIAGGLHLPADATGDCHLFTENLYKLCQEKGVQFHFNQTISRIDHNGLRIKAVETETGRFEADAVVCALGCFSRTVLAQLDLNLPIYPVKGYSLTLPVTNSDGAPVSTVLDESYKVAITRFDNRIRVGGMAELSGYEIKLPEKRRETLALVVNDLFPEGGDLSQASFWSGLRPMTPDSTPLIGRTRFENLFLNTGHGTLGWTMSLGSAKLTADIVSGKDTEIRSDDLSLSRYQA

SEQ ID NO: 13582 - protein, 141 aa, Neisseria meningitidis
MPSEHAAYADLMASSAKRLLCAKAILFSSAVRTGAAVGNIFFDGFADGGDFGDGAQYGFATFNAVDAASDSAGGIAGATVLEIVEDEDFEGDLGSWADSVKMVRSSDGITVVPMPSETAAVQAFVPDGKIGYNIGHQCPTY

SEQ ID NO: 13583 - protein, 122 aa, Neisseria meningitidis
LNNIPVEIRLLKNRTVLVLTYGDEPKNLPAEFLRVYSPSAEVRGHGVGQDVLQTGKADVQITDLQPVGQYALKISFSDGHDSSLYDWAYLHRLAYGYDAMWQEYLDKLAAAGASRFEKQSDC

SEQ ID NO: 13584 - protein, 222 aa, Neisseria meningitidis; identical to SEQ ID NO: 197

SEQ ID NO: 13585 - protein, 497 aa, Neisseria meningitidis; identical to SEQ ID NO: 1619

SEQ ID NO: 13586 - protein, 170 aa, Neisseria meningitidis
VISAFQTAGTAMTDNLIQIATPILTVIGVFVAAYGIMRNTENAKKRATIDMIMAERNNAALQEAITIVNGLAKTDGCILATYTSDTSDKKKDREAILTVLNQREFVCAGVLGGALHEKMYKDFEYSMLLRDWDNLSSFIFEIRRIRSAPTAFQEFEAVARKWKKKPLKTK

SEQ ID NO: 13587 - protein, 471 aa, Neisseria meningitidis; identical to SEQ ID NO: 7428

SEQ ID NO: 13588 - protein, 222 aa, Neisseria meningitidis; identical to SEQ ID NO: 3106

SEQ ID NO: 13589 - protein, 90 aa, Neisseria meningitidis; identical to SEQ ID NO: 2702

SEQ ID NO: 13590 - protein, 290 aa, Neisseria meningitidis; identical to SEQ ID NO: 8768

SEQ ID NO: 13591 - protein, 275 aa, Neisseria meningitidis
MKLDIYALLERALLSGDPDEKGRLTDEAFAAVQNADGAEANAPPADFPRAGRPDKPVLVAPSQLTPRKMNTTEGYAAMLHAIAHIEFNAVNLALDAAYRFRTLPFQFVRDWVKVAKEEVYHFRLMRDRLRAFGFDYGSFEAHNHLWDMAYKTAYDPLLRMALVPRVLEARGLDVTPGIRAKVAQRGDSETCGVLDIIYSDEVGHVAIGNHWYQHLCRERGLEPIALFRSLIARYDMFIFRGYVNIEAREKAGFSRFELDMLEDFEQSLKQGKKVV

SEQ ID NO: 13592 - protein, 320 aa, Neisseria meningitidis; identical to SEQ ID NO: 2835

SEQ ID NO: 13593 - protein, 319 aa, Neisseria meningitidis
MSHHHEHHHHAHAHTHTANKKVLRVSFIIIAAFMLLEAFGGWLTHSLALLSDAGHMFSDAFSLGVALWAFKLGEKETTLQKTFGYKRFEILTAMFNGLSLVVIAVLIFYEAVKRLLYPPEIATLGMLVISVVGLLVNIGVAVYMLKNSDTEANVNMRGAYLHVLSDLLGSIGAIAAAVLMMAFGWKWADPLASVFVAALVGRSGWSLLKQTLHILMEGAPENIHTDDLLAIIRNTDGVKSVHDLHAWTITSNINVLSCHIVVDGSMTVAESEQIAYRIEHELSHKNIGHCTIQIESEHHPHKNEILCSPYAEAHHSHSH

SEQ ID NO: 13594 - protein, 427 aa, Neisseria meningitidis; identical to SEQ ID NO: 146

SEQ ID NO: 13595 - protein, 402 aa, Neisseria meningitidis
LFAKKEKRFIFEGRHSASDKLVNGEVSAFTEEEARKKLAKRGIRPLQITRVKTSSKRKITQEDITVFTRQLSTMIKAGLPLMQAFEIVARGHGNPSMTEMLMEIRGEVEQGSSLSRAFSNHPKYFDRFYCNLVAAGETGGVLESLLDKLAIYKEKTQAIRKKVKTALTYPVSVIAVAIGLVFVMMIFVLPAFKEVYANMGAELPALTQTVMDMSDFFVSYGWMVLIALGFAIYGFLKLKARSIKIQRRMDAILLRMPIFGDIVRKGTIARWGRTTATLIAAGVPLVDVLDSTAGAAGNLIYEEATREIRTRVIQGLSMTSGMRATELFPNMMLQMSSIGEESGSLDDMLNKAAEFYEDEVDNAVGRLSAMMEPIIIVILGLVIGTLLVAMYLPLFNLGNVVA

SEQ ID NO: 13596 - protein, 361 aa, Neisseria meningitidis; identical to SEQ ID NO: 2308

SEQ ID NO: 13597 - protein, 336 aa, Neisseria meningitidis; identical to SEQ ID NO: 3061

SEQ ID NO: 13598 - protein, 742 aa, Neisseria meningitidis
MRSAVLFIYFFLLNIFLFQPAVIHIQSNYILFMSIVSAPLPALSALIILAHYHGIAANPADIQHEFCTSAQSDLNETQWLLAAKSLGLKAKVVRQPIKRLAMATLPALVWCDDGNHFILAKTDGEGEHAQFLIQDLVTNKSAVLSFAEFSNRYSGKLILVASRASVLGSLAKFDFTWFIPAVIKYRRLFFEVLVVSVVLQLFALITPLFFQVVMDKVLVHRGFSTLDVVSVALLVVSLFEIVLGGLRTYLFAHTTSRIDVELGARLFRHLLSLPLSYFEHRRVGDTVARVRELEQIRNFLTGQALTSVLDLAFSFIFLAVMWYYSSTLTWLVLASLPAYAFWSAFISPILRTRLNDKFARNADNQSFLVESITAVGTVKAMAVEPQMTQRWDNQLAAYVASGFRVTKLAVVGQQGVQLIQKLVTVATLWIGARLVIEGKLTVGQLIAFNMLSGQVAAPVIRLAQLWQDFQQVGISVARLGDILNAPTENASSHLALPDIRGEITFEHVDFRYKADGRLILQDLNLRIRAGEVLGIVGRSGSGKSTLTKLVQRLYVPEQGRVLVDGNDLALAAPAWLRRQVGVVLQENVLLNRSIRDNIALTDTGMPLERIIEAAKLAGAHEFIMELPEGYGTVVGEQGAGLSGGQRQRIAIARALITNPRILIFDEATSALDYESERAIMQNMQAICANRTVLIIAHRLSTVKTAHRIIAMDKGRIVEAGTQQELLAKPNGYYRYLYDLQNG

SEQ ID NO: 13599 - protein, 533 aa, Neisseria meningitidis; identical to SEQ ID NO: 3462

SEQ ID NO: 13600 - protein, 67 aa, Neisseria meningitidis; identical to SEQ ID NO: 86

SEQ ID NO: 13601 - protein, 252 aa, Neisseria meningitidis; identical to SEQ ID NO: 2885

SEQ ID NO: 13602 - protein, 590 aa, Neisseria meningitidis; identical to SEQ ID NO: 3520

SEQ ID NO: 13603 - protein, 518 aa, Neisseria meningitidis; identical to SEQ ID NO: 9387

SEQ ID NO: 13604 - protein, 149 aa, Neisseria meningitidis; identical to SEQ ID NO: 2383

SEQ ID NO: 13605 - protein, 77 aa, Neisseria meningitidis; identical to SEQ ID NO: 3246

SEQ ID NO: 13606 - protein, 333 aa, Neisseria meningitidis; identical to SEQ ID NO: 7659

SEQ ID NO: 13607 - protein, 124 aa, Neisseria meningitidis; identical to SEQ ID NO: 2472

SEQ ID NO: 13608 - protein, 144 aa, Neisseria meningitidis; identical to SEQ ID NO: 8878

SEQ ID NO: 13609 - protein, 221 aa, Neisseria meningitidis
VDNMMKFKYVFLLACVVVSLSYRLNAAPMFNDNPVVYGKIKVQSWKARRDFNIVKQDLDFSCGAASVATLLNNFYGQTLTEEEVLKKLDKEQMRASFEDMRRIMPDLGFEAKGYALSFEQLAQLKIPVIVYLKYRKDDHFSVLRGIDGNTVLLADPSLGHVSMSRAQFLDAWQTREGNLAGKILAVVPKKAETISNKLFFTHHPKRQTEFAVGQIRQARAE

SEQ ID NO: 13610 - protein, 239 aa, Neisseria meningitidis; identical to SEQ ID NO: 2696

SEQ ID NO: 13611 - protein, 380 aa, Neisseria meningitidis; identical to SEQ ID NO: 314

SEQ ID NO: 13612 - protein, 256 aa, Neisseria meningitidis; identical to SEQ ID NO: 3040

SEQ ID NO: 13613 - protein, 206 aa, Neisseria meningitidis; identical to SEQ ID NO: 1164

SEQ ID NO: 13614 - protein, 425 aa, Neisseria meningitidis
MRSSDILIVDDEIGIRDLLSEILQDEGYSVALAENAEEARKLRHQVRPAMVLLDIWMPDCDGITLLKEWAKNGQLNMPVVMMSGHASIDTAVEATKIGALDFLEKPISLQKLLSAVENALKHGAAKIETGPVFDKLGNSAAIQEMNREVGAAVKRASPVLLTGEAGSPFETVARYFHKNGTPWVSPARVEYLIDMPMELLQKAEGGVLYVGDIAQYSRNIQAGIAFIVGKAERCRVRVVASGSRAAGSDGIACEEKLAELLSESVVRIPPLRMQHEDIPFLIQGIACNVAESQKIAPAAFSEEALAALTRYDWPGNFDQLQSVVATLLLEADGQEIGAAAVSSLLGQNVPAEGAEDMVGGFNFNLPLRELREEVERRYFEYHIAQEGQNMSKVAQKVGLERTHLYRKLKQLGIGVSRRAGEKTEE

SEQ ID NO: 13615 - protein, 331 aa, Neisseria meningitidis
MKTSIRYALLAAALTAATPALADITVYNGQHKEAAQAVADAFTRATGIKVKLNSAKGDQLAGQIKEEGSRSPADVFYSEQIPALATLSAANLLEPLPASTINETRGKGVPVAAKKDWVALSGRSRVVVYDTRKLSEKDLEKSVLNYATPKWKNRIGYAPTSGAFLEQVVAIVKLKGEAAALKWLKGLKEYGKPYAKNSVALQAVENGEIDAALINNYYWHAFAREKGVQNVHTRLNFVRHRDPGALITYSGAAVLKSSQNKDEAKKFVAFLASKEGQRALTAVRAEYPLNPHVVSTFNLEPIAKLEAPQVSATTVSEKEHATRLLEQAGMK

SEQ ID NO: 13616 - protein, 328 aa, Neisseria meningitidis
MKLSIQKFMMLFAAAISLLQIPISHANGLDARLRDDMQAKHYEPGGKYHLFGDGRGSVKNRVYAVQTFDATAVGPILPITHERTGFEGVIGYETHFSGHGHEVHSPFDHHDSKSTSDFSGGVDGGFTVYQLHRTGSEIHPEDGYDGPQGSDYPPPGGARDIYSYYVKGTSTKTKTNIVPQAPFSDRWLKENAGAASGFFSRADEAGKLIWESDPNKNWWANRMDDVRGIVQGAVNPFLMGFQGLGVGAITDSAVNPVTYAAARKTLQGIHNLGNLSPEAQLAAATALQDSAFAVKDGINSAKQWADAHPNITATAQTALAIAEAATTV

SEQ ID NO: 13617 - protein, 99 aa, Neisseria meningitidis; identical to SEQ ID NO: 10131

SEQ ID NO: 13618 - protein, 192 aa, Neisseria meningitidis; identical to SEQ ID NO: 2562

SEQ ID NO: 13619 - protein, 372 aa, Neisseria meningitidis; identical to SEQ ID NO: 3260

SEQ ID NO: 13620 - protein, 97 aa, Neisseria meningitidis; identical to SEQ ID NO: 2695

SEQ ID NO: 13621 - protein, 41 aa, Neisseria meningitidis; identical to SEQ ID NO: 9208

SEQ ID NO: 13622 - protein, 149 aa, Neisseria meningitidis; identical to SEQ ID NO: 3543

SEQ ID NO: 13623 - protein, 116 aa, Neisseria meningitidis; identical to SEQ ID NO: 3501

SEQ ID NO: 13624 - protein, 148 aa, Neisseria meningitidis; identical to SEQ ID NO: 4019

SEQ ID NO: 13625 - protein, 266 aa, Neisseria meningitidis; identical to SEQ ID NO: 2607

SEQ ID NO: 13626 - protein, 240 aa, Neisseria meningitidis; identical to SEQ ID NO: 9167

SEQ ID NO: 13627 - protein, 284 aa, Neisseria meningitidis; identical to SEQ ID NO: 3000

SEQ ID NO: 13628 - protein, 398 aa, Neisseria meningitidis; identical to SEQ ID NO: 3453

SEQ ID NO: 13629 - protein, 159 aa, Neisseria meningitidis; identical to SEQ ID NO: 2265

SEQ ID NO: 13630 - protein, 212 aa, Neisseria meningitidis; identical to SEQ ID NO: 2568

SEQ ID NO: 13631 - protein, 308 aa, Neisseria meningitidis; identical to SEQ ID NO: 3803

SEQ ID NO: 13632 - protein, 229 aa, Neisseria meningitidis; identical to SEQ ID NO: 3551

SEQ ID NO: 13633 - protein, 312 aa, Neisseria meningitidis; identical to SEQ ID NO: 8564

SEQ ID NO: 13634 - protein, 110 aa, Neisseria meningitidis
MSRCCLKRLQTASAVSAFSGGVLEVVRLCCRRLSVLFNPSVMLFVPDCPVGGAVGFFQYEMLCPFFWQGRLQTGSNLAYDVFMSAGRLNGRRNPRTAAVFLPCFAPLPYN

SEQ ID NO: 13635 - protein, 236 aa, Neisseria meningitidis; identical to SEQ ID NO: 2671

SEQ ID NO: 13636 - protein, 642 aa, Neisseria meningitidis; identical to SEQ ID NO: 2342

SEQ ID NO: 13637 - protein, 318 aa, Neisseria meningitidis; identical to SEQ ID NO: 3065

SEQ ID NO: 13638 - protein, 245 aa, Neisseria meningitidis; identical to SEQ ID NO: 3123

SEQ ID NO: 13639 - protein, 123 aa, Neisseria meningitidis; identical to SEQ ID NO: 2701

SEQ ID NO: 13640 - protein, 228 aa, Neisseria meningitidis; identical to SEQ ID NO: 445

SEQ ID NO: 13641 - protein, 219 aa, Neisseria meningitidis; identical to SEQ ID NO: 3570

SEQ ID NO: 13642 - protein, 103 aa, Neisseria meningitidis; identical to SEQ ID NO: 392

SEQ ID NO: 13643 - protein, 250 aa, Neisseria meningitidis; identical to SEQ ID NO: 3444

SEQ ID NO: 13644 - protein, 83 aa, Neisseria meningitidis; identical to SEQ ID NO: 2525

SEQ ID NO: 13645 - protein, 313 aa, Neisseria meningitidis; identical to SEQ ID NO: 2333

SEQ ID NO: 13646 - protein, 868 aa, Neisseria meningitidis; identical to SEQ ID NO: 11442

SEQ ID NO: 13647 - protein, 376 aa, Neisseria meningitidis; identical to SEQ ID NO: 2865

SEQ ID NO: 13648 - protein, 148 aa, Neisseria meningitidis
MNFSFAPLFLVTLILLGVVSNNNSITISATILLLMQQTALIQFVPLVEKHGLNLGIILLTIGVLSPLVSGKAQVPPVAEFLNFKMISAVFIGIFVAWLAGRGVPLMGQQPVLITGLLIGTVIGVAFMGGIPVGPLIAAGILSFVVGKG

SEQ ID NO: 13649 - protein, 268 aa, Neisseria meningitidis; identical to SEQ ID NO: 8566

SEQ ID NO: 13650 - protein, 287 aa, Neisseria meningitidis; identical to SEQ ID NO: 7964

SEQ ID NO: 13651 - protein, 156 aa, Neisseria meningitidis; identical to SEQ ID NO: 2613

SEQ ID NO: 13652 - protein, 167 aa, Neisseria meningitidis; identical to SEQ ID NO: 2666

SEQ ID NO: 13653 - protein, 122 aa, Neisseria meningitidis; identical to SEQ ID NO: 6911

SEQ ID NO: 13654 - protein, 107 aa, Neisseria meningitidis; identical to SEQ ID NO: 178

SEQ ID NO: 13655 - protein, 283 aa, Neisseria meningitidis; identical to SEQ ID NO: 3657

SEQ ID NO: 13656 - protein, 214 aa, Neisseria meningitidis
VTRPAKINTYTRIIDASLALFNEEGERNISTNHIAAHLGISPGNLYYHFRNKDEIIVQLFKRYSEALLAYLNEAVLPSDVEDSINYMAGIYDVMWEYRFLFSDVNTLLARSAELLGEHNTFTQAKVSPLLVNLLTQLNGLNVINADQTAMNDLAVNMWMVTKYWFDFDSSLRGRTKLTEDSKARGIRRTLSLLRPYLLPEHREKYDRKIGNGNP

SEQ ID NO: 13657 - protein, 1201 aa, Neisseria meningitidis
MFHFAFPAQTALRQAITDAYRRNEIEAVQDMLQRAQMSDEERNAASELARRLVTQVRAGRTKAGGVDALMHEFSLSSEEGIALMCLAEALLRIPDNATRDRLIADKISDGNWKSHLNNSPSLFVNAAAWGLLITGKLTATNDKQMSSALSRLISKGGAPLIRQGVNYAMRLLGKQFVTGQTIEEALQNGKEREKMGYRFSFDMLGEAAYTQADADRYYRDYVEAIHAIGKDAAGQGVYEGNGISVKLSAIHPRYSRAQHGRVMGELLPRLKELFLLGKKYDIGINIDAEEANRLELSLDLMEALVSDPDLAGYKGIGFVVQAYQKRCPFVIDYLIDLARRNNQKLMIRLVKGAYWDSEIKWAQVDGLNGYPTYTRKVHTDISYLACARKLLSAQDAVFPQFATHNAYTLGAIYQMGKGKDFEHQCLHGMGETLYDQVVGPQNLGRRVRVYAPVGTHETLLAYLVRRLLENGANSSFVNQIVDENISIDTLIRSPFDTIAEQGIHLHNALPLPRDLYGKCRLNSQGVDLSNENVLQQLQEQMNKAAAQDFHAASIVNGKARDVGEAQPIKNPADHDDIVGTVSFADAALAQEAVGAAVAAFPEWSATPAAERAACLRRFADLLEQHTPALMMLAVREAGKTLNNAIAEVREAVDFCRYYANEAEHTLPQDTKAVGAIVAISPWNFPLAIFTGEVVSALAAGNTVIAKPAEQTSLIAGYAVSLMHEAGIPTSALQLVLGAGDVGAALTNDARIGGVIFTGSTEVARLINKALAKRNDNPVLIAETGGQNAMIVDSTALAEQVCADVLNSAFDSAGQRCSALRILCVQEDVADRMLDMIKGAMDELVVGKPIQLTTDVGPVIDAEAQQNLLNHINKMKGVAKSYHEVKTAADVDSKKSTFVRPILFELNNLNELQREVFGPVLHVVRYRADELDSVIDQINSKGYALTHGVHSRIEGTVRHIRSRIEAGNVYVNRNIVGAVVGVQPFGGHGLSGTGPKAGGSFYLQKLTRAGEWVAPTLSQIGQADEAALKRLEALVHKLPFNAEEKKAAAAALGHARIRTLRRAETVLTGPTGERNSISWHAPKRVWIHGGSTVQAFAALTELAASGIQAVVEPDSPLASYTADLEGLLLVNGKPETVGISHVAALSPLNSARKQELAAHDGALIRILPSENGLDILQVFEEISCSVNTTAAGGNASLMAVAD

SEQ ID NO: 13658 - protein, 512 aa, Neisseria meningitidis
MVSKLDKYWQHPALYWPLLILFAAATPFTFAPYYHFWLMPLIFGAFVRLIELRPRFAVSSAYLFGLTAYTTQFYWIHTALHDVSGLPDLYAVPLTFLLPAYLALYPALCFWLWKKFTLPRGIKIGLVLPILWTLTEFARERFLTGFGWGAIGYSQITPDSPLAGFAPLGGIHMVTLATAFLGVWLVLASDNTARSGKRLLPIILIAALLAAGYTARQTDFTRPDGSRSTVALLQGNIDQTLKWREDQVIPTIQKYYEQVGKTTADIVILPETAIPVMRQNLPENILVKFAEQAQNNGSALAVGISQYTSDGNGYENAVINLTGYQENNQDGIPYYAKNHLVPFGEYKPLPFLTTPLYKMMNMPLSDFRKGGGKQSALLMKNQKIAFNICYEDGFGDELIAAAKDATLLANASNMAWYGKSNAMYQHLQQSQARAMELGRYMVRATNTGATAIISPKGNIIAQAQPDTETVLEGHIKGYVGETPYMKTGSSWWLMGILTLAALILFIFRNKEH

SEQ ID NO: 13659 - protein, 475 aa, Neisseria meningitidis
MYINGRFENDFNGEWRDVLNPSTEEAIAREPKGGRADVDRAVAAARAAQPAWERLPAVERGAYLRKIAQGIRERADELTDTIVAEGGKTKDLARVEVMFTADYLDYQAEWARRYEGEIIQSDRPRENILLFKRPLGVIAGILPWNFPFFLIARKMGPALVTGNTIVVKPSSVTPINCHIFAEIVDAVGLPAGVFNVVNGPGAEIGNALSAHPQVDMVSLTGSVEAGRQVMEAASANITKVSLELGGKAPAIVLKDADLDLAVKSILASRVGNTGQICNCAERVYVHSSLKDAFIEKMTAAMKGVRYGNPAEAEAGALEMGPLIEERAVKAVAEKVERAVKQGAKLVCGGKRAEGRGYFFEPTLLTDTDNSMDIMKEETFGPVLPVSAFDTLDQVIALANDCEFGLTSSVYTTNLNEAFYVTRRLQFGETYINRENFEAMQGFHAGWKKSGIGGADGKHGLEEYLQTQVVYLETDI

SEQ ID NO: 13660 - protein, 710 aa, Neisseria meningitidis
MAYQVLARKWRPKTFADLVGQEHVVKALQNALDEGRLHHAYLLTGTRGVGKTTIARILAKSLNCENAQHGEPCGVCQSCTQIDAGRYVDLLEIDAASNTGIDNIREILENAQYAPTAGKYKVYIIDEVHMLSKSAFNAMLKTLEEPPEHVKFILATTDPHKVPVTVLSRCLQFVLRNMTAQQVADHLAHVLDSEKIAYEPAALQLLGRAAAGSMRDALSLLDQAIALGSGKVAENDVRQMIGAVDKQYLYELLTGIINQDGAALTAKAQEMAACAVGFDNALGELAILLQHLALIQAVPNALAHDDPDSDILHRLAQTISGEQIQLYYQIAVHGKRDLSLAPDEYAGFMMTLLRMLAFAPLAATSCDANAVIENTELQSPSAQTAEKETAAKKPQPRPEAETAQTSVQTASAAAMPSEGKTAEPVTNQENNDVPPWEDAPDEAQTAAGTTAQTSAKSIQTASEAETPPENQVSKNKAADNVTDAPLSEVPSENPIQATPNDEAVETETFAHEAPAEPFYGYGFPDNDCPVEDGAEIPPPDWEHAAPADTAGGGADEEAEAGGIGGNNTPSAPPPEFSTENWAAIVRHFARKLGAAQMPAQHSAWTEYHPDTGLMVLAMTAEARATADKKRLDKIRDTLAQAYGLQLTLQTQDWRDEAGRETPAMQDKRVQAEDRQKAQALLEADPAAQKILQAFGAQWQPESLELAANRP

SEQ ID NO: 13661 - protein, 241 aa, Neisseria meningitidis; identical to SEQ ID NO: 7122

SEQ ID NO: 13662 - protein, 320 aa, Neisseria meningitidis; identical to SEQ ID NO: 1339

SEQ ID NO: 13663 - protein, 193 aa, Neisseria meningitidis; identical to SEQ ID NO: 1600

SEQ ID NO: 13664 - protein, 406 aa, Neisseria meningitidis; identical to SEQ ID NO: 3097

SEQ ID NO: 13665 - protein, 220 aa, Neisseria meningitidis; identical to SEQ ID NO: 5269

SEQ ID NO: 13666 - protein, 89 aa, Neisseria meningitidis; identical to SEQ ID NO: 1473

SEQ ID NO: 13667 - protein, 489 aa, Neisseria meningitidis
LALALAIITRRVLLSLGIGILVGVAFLVGGNPVDGLTHLKDMVVGLAWSDGDWSLGKPKILVFLILLGIFTSLLTYSGSNQAFADWAKRHIKNRRGAKMLTACLVFVTFIDDYFHSLAVGAIARPVTDKFKVSRAKLAYILDSTAAPMCVLMPVSSWGASIIATLAGLLVTYKITEYTPMGTFVAMSLMNYYALFALIMVFVVAWFSFDIGSMARFEQAALNEAHDETAVSDGSRGRVYALIIPVLALIASTVSAMIYTGAQASETFSILGAFENTDVNTSLVFGGTCGVLAVVLCTLGTIKTADYPKAVWQGAKSMFGAIAILILAWLISTVVGEMHTGDYLSTLVAGNIHPGFLPVILFLLASVMAFATGTSWGTFGIMLPIAAAMAVKVDPSLIIPCMSAVMAGAVCGDHCSPISDTTILSSTGARCNHIDHVTSQLPYALTVAAAAASGYLALGLTKSALLGFGTTGIVLAVLIFLLKDKKRANA

SEQ ID NO: 13668 - protein, 140 aa, Neisseria meningitidis; identical to SEQ ID NO: 3245

SEQ ID NO: 13669 - protein, 64 aa, Neisseria meningitidis; identical to SEQ ID NO: 9896

SEQ ID NO: 13670 - protein, 419 aa, Neisseria meningitidis; identical to SEQ ID NO: 3085

SEQ ID NO: 13671 - protein, 213 aa, Neisseria meningitidis; identical to SEQ ID NO: 2765

SEQ ID NO: 13672 - protein, 553 aa, Neisseria meningitidis
MTESITRDSMQYDVVIVGAGPSGLSAAIKLKQLAEQNGREISVCVVEKGSEAGAHSLAGAVIDPIALNELIPDWKEKGAPLTRTVTQDKVLFLTEKKAFNLPITPNFDNHGNYIVSLGEVVRWLAEQAENMGVEIYPGFAAAEVLYHEDGSVKGIATGNMGIGKDGEPTDSFQPGMELWAQQTLFAEGCRGSLSKQIIERFKLDQNSQPQTYGLGIKEVWEVPSEQHQPGLVVHSAGWPLDSKTYGGAFVYHFDDNKVAVGFVVGLDYQNPYLSPFEEFQRFKTHPEIRKTFEGGRRIAYGARSLIEGGLQSLPKLSFKGGILVGDAAGFLNMPRIKGIHTAMKSAMLAAEAVFPLLENLEEVEGFDSGKEAADYQQRFEQSWLYQELYAARNVRPSFKWGVYLGSLYTGIDQMIFRGKAPWTLKHHGKDNEQLKKAAACKPIAYPKPDGVLTFDRLSSVFLANLAHEENQPDHLVLNNPQTMINVNYKEYASPETRYCPAGVYEIIEENGNPRLQINAANCVHCKTCDIKDPTQNITWICPEGASGPNYGGM

SEQ ID NO: 13673 - protein, 415 aa, Neisseria meningitidis; identical to SEQ ID NO: 846

SEQ ID NO: 13674 - protein, 89 aa, Neisseria meningitidis
LRKEAFLYIVGHHVIFCGHGFLSASTVASYLSLLSNKLRENNPDIVQFNIEFKAVGNCDKLSLIQQHGVKSILLDASAYQLSRNRRIRI

SEQ ID NO: 13675 - protein, 469 aa, Neisseria meningitidis; identical to SEQ ID NO: 2725

SEQ ID NO: 13676 - protein, 188 aa, Neisseria meningitidis; identical to SEQ ID NO: 2228

SEQ ID NO: 13677 - protein, 109 aa, Neisseria meningitidis; identical to SEQ ID NO: 4604

SEQ ID NO: 13678 - protein, 99 aa, Neisseria meningitidis; identical to SEQ ID NO: 2699

SEQ ID NO: 13679 - protein, 96 aa, Neisseria meningitidis; identical to SEQ ID NO: 1976

SEQ ID NO: 13680 - protein, 332 aa, Neisseria meningitidis; identical to SEQ ID NO: 3187

SEQ ID NO: 13681 - protein, 77 aa, Neisseria meningitidis; identical to SEQ ID NO: 707

SEQ ID NO: 13682 - protein, 160 aa, Neisseria meningitidis
MKYLNLAAITLGATFAAHTASADELAGWKDGAAQSLQSLKAPVRIVNLWATWCGPCRKEMPAMSKWYKAQKKGSVDMVGIALDTSDNIGNFLKQTPVSYPIWRYTGANSRNFMKTYGNTVGVLPFTVVEAPKCGYRQTITGEVNEKSLTEAVKLAHSKCR

SEQ ID NO: 13683 - protein, 333 aa, Neisseria meningitidis; identical to SEQ ID NO: 2645

SEQ ID NO: 13684 - protein, 93 aa, Neisseria meningitidis
MKTLVLLLLSFSTTTAFAAYGLGLGQAPKYPADFRAYGYVYSGRQGWVLKTEADAIKLDTLFKRFVYRPSAANQNPVGQRSDGIPANHTKEKP

SEQ ID NO: 13685 - protein, 787 aa, Neisseria meningitidis
MQFSYSWLKTQADTELSADKLEHLLTMSGLEVEEAETAAPAFTGVVIAEVKSVEKHPDADRLNVTQVDAGTGGLVQIVCGAPNVKAGIKVPCSLPGAVLPGNFKIKPTKMRGVVSDGMLCSTDELGLPDDGVNGLHILPEDAPVGTNIREYLDLDDTLFTLKITPNRADCLSIKGIAREVSALTGCAFRQPEIHTAPITGSRKQPVQINAPADCGRFISRVIENVNAKAATPDWMKQRLERSGIRSISALVDIGNYVMLEIGQPMHVFDADKLSGSLHIRRAREGETLECLNEKTVSLSENTLVVADEKGVLSLAGLMGGAASAVSDGTQNIVLEAAWFAPEIIAGKSRQYGFGSDSSFRFERGVDYRLQADAMERATELVLQICGGAAGEMVEAQGKLPEAKQVGLRLDRLKTVLGVDIPAEQVETILQHLGLQPEKTAEGFRVTAPSFRFDIEIEADLIEEIGRVYGYENIPDDYTSGRLKMLELPETRRSRFAVYNEMAARGYREVVSYAFVDEQWEQDFAANADPIRLQNPLAAQYAVMRSTLIGGLVEILQNNLNRKQNRVRVFEIARVFGKGSDGRFVQNERIGGLWYGAAMPEQWGGKTRNADFYDIKADVENLLKNKAVEFVKTGYPALHPGRAANIVSDGKVIGFVGELHPKWLQKYDLPQAPLVFEIDMAAVLECGKTRYRAVSKFQPVRRDLAFVMPEAMSHDDLLLVLKGAANKLVQEISVFDVYRGMGLPEGMKSVAVKVILQDMENTLTDEAVEPLIGKLIGAATAAGARLRS

SEQ ID NO: 13686 - protein, 463 aa, Neisseria meningitidis; identical to SEQ ID NO: 2284

SEQ ID NO: 13687 - protein, 356 aa, Neisseria meningitidis
MNLISRYIIRQMAVMAVYALLAFLALYSFFEILYETGNLGKGSYGIWEMLGYTALKMPARAYELMPLAVLIGGLVSLSQLAAGSELTVIKASGMSTKKLLLILSQFGFIFAIATVALGEWVAPTLSQKAENIKAAAINGKISTGNTDIWLKEKNSIINVREMLPDHTLLGIKIWARNDKNELAEAVEADSAVLNSDGSWQLKNIRRSTLGEDKVEVSIAAEENWPISVKRNLMDVLLVKPDQMSVGELTTYIRHLQNNSQNTRIYAIAWWRKLVYPAAAWVMALVAFAFTPQTTRHGNMGLKLFGGICLGLLFHLAGRFFGFTSQLYGIPPFLAGALPTIAFALLAVWLIRKQEKR

SEQ ID NO: 13688 - protein, 456 aa, Neisseria meningitidis; identical to SEQ ID NO: 8567

SEQ ID NO: 13689 - protein, 221 aa, Neisseria meningitidis; identical to SEQ ID NO: 3647

SEQ ID NO: 13690 - protein, 178 aa, Neisseria meningitidis; identical to SEQ ID NO: 2084

SEQ ID NO: 13691 - protein, 137 aa, Neisseria meningitidis; identical to SEQ ID NO: 5394

SEQ ID NO: 13692 - protein, 178 aa, Neisseria meningitidis; identical to SEQ ID NO: 1831

SEQ ID NO: 13693 - protein, 183 aa, Neisseria meningitidis; identical to SEQ ID NO: 2161

SEQ ID NO: 13694 - protein, 354 aa, Neisseria meningitidis; identical to SEQ ID NO: 2527

SEQ ID NO: 13695 - protein, 233 aa, Neisseria meningitidis; identical to SEQ ID NO: 3223

SEQ ID NO: 13696 - protein, 91 aa, Neisseria meningitidis; identical to SEQ ID NO: 4054

SEQ ID NO: 13697 - protein, 123 aa, Neisseria meningitidis; identical to SEQ ID NO: 3249

SEQ ID NO: 13698 - protein, 436 aa, Neisseria meningitidis; identical to SEQ ID NO: 3761

SEQ ID NO: 13699 - protein, 591 aa, Neisseria meningitidis; identical to SEQ ID NO: 3154

SEQ ID NO: 13700 - protein, 131 aa, Neisseria meningitidis; identical to SEQ ID NO: 3391

SEQ ID NO: 13701 - protein, 195 aa, Neisseria meningitidis; identical to SEQ ID NO: 2216

SEQ ID NO: 13702 - protein, 68 aa, Neisseria meningitidis; identical to SEQ ID NO: 3041

SEQ ID NO: 13703 - protein, 87 aa, Neisseria meningitidis
LRPGGSWLALKALPLCLPLSGILKKKIYTYQYSSMLVLIYFAEAVMRLFDAYPAEQICAALSAVFSIIFFISCLSFVKQYKETNNAR

SEQ ID NO: 13704 - protein, 735 aa, Neisseria meningitidis; identical to SEQ ID NO: 2989

SEQ ID NO: 13705 - protein, 188 aa, Neisseria meningitidis; identical to SEQ ID NO: 2794

SEQ ID NO: 13706 - protein, 428 aa, Neisseria meningitidis; identical to SEQ ID NO: 3383

SEQ ID NO: 13707 - protein, 316 aa, Neisseria meningitidis; identical to SEQ ID NO: 6852

SEQ ID NO: 13708 - protein, 484 aa, Neisseria meningitidis; identical to SEQ ID NO: 2894

SEQ ID NO: 13709 - protein, 57 aa, Neisseria meningitidis; identical to SEQ ID NO: 2122

SEQ ID NO: 13710 - protein, 187 aa, Neisseria meningitidis; identical to SEQ ID NO: 784

SEQ ID NO: 13711 - protein, 172 aa, Neisseria meningitidis; identical to SEQ ID NO: 601

SEQ ID NO: 13712 - protein, 255 aa, Neisseria meningitidis
MQTRILSAVLLAFSTAAFAGGAFTLQFDNPSEDGGFTQNQLLSAPYGFGCSGGNASPALSWKNPPAGTKSFVLTVYDKDAPTGLGWMHRVVADIPADVHRRNATSLQLSRCANIADRTGLDALGGRRHSRRCPPPQRGLAAIKPLRQHRRRPVRSHIGGNQFADLPHQVDAFVHGKTDAVMLQPRQHAAKRGLRRIVRHFFIRQHRRRIIKRRAHPPGVRQLHRIAHCLRRPVLCGEPFYGFLFKSNPLRLIEAV

SEQ ID NO: 13713 - protein, 141 aa, Neisseria meningitidis; identical to SEQ ID NO: 3723

SEQ ID NO: 13714 - protein, 124 aa, Neisseria meningitidis; identical to SEQ ID NO: 2410

SEQ ID NO: 13715 - protein, 60 aa, Neisseria meningitidis
VLFARKPAASRIGLSGLGGMFFKMLQFRTVCGRRIQIFPLDTDFQIWTLQNKHCWTGFLS

SEQ ID NO: 13716 - protein, 144 aa, Neisseria meningitidis; identical to SEQ ID NO: 4260

SEQ ID NO: 13717 - protein, 186 aa, Neisseria meningitidis; identical to SEQ ID NO: 104

SEQ ID NO: 13718 - protein, 86 aa, Neisseria meningitidis
LTKAVRRKNVQPPKICYAFRTPSAYGQYLADAGFDYLSFANNHSNDFGAQGITATAASGSSFTYSIALKPLPITRPKLRKIPPSPR

SEQ ID NO: 13719 - protein, 138 aa, Neisseria meningitidis; identical to SEQ ID NO: 489

SEQ ID NO: 13720 - protein, 101 aa, Neisseria meningitidis; identical to SEQ ID NO: 1251

SEQ ID NO: 13721 - protein, 144 aa, Neisseria meningitidis; identical to SEQ ID NO: 6

SEQ ID NO: 13722 - protein, 109 aa, Neisseria meningitidis; identical to SEQ ID NO: 1560

SEQ ID NO: 13723 - protein, 122 aa, Neisseria meningitidis; identical to SEQ ID NO: 848

SEQ ID NO: 13724 - protein, 56 aa, Neisseria meningitidis; identical to SEQ ID NO: 6169

SEQ ID NO: 13725 - protein, 150 aa, Neisseria meningitidis
LVMYVVKSANDGGNSLFLSSSDIVNQLSKTETGKKHLKTLTGNLYPFKTPASFDKKQGVRWGNILSVNTQMIRFRSDCIYKGIEENRNKVSKEMVLALDYLVNVIKNASDIQEFSAQDDGLIIIDNVNGLHARTDYTDKNRHYIRARITV

SEQ ID NO: 13726 - protein, 72 aa, Neisseria meningitidis; identical to SEQ ID NO: 113

SEQ ID NO: 13727 - protein, 37 aa, Neisseria meningitidis; identical to SEQ ID NO: 6771

SEQ ID NO: 13728 - protein, 58 aa, Neisseria meningitidis; identical to SEQ ID NO: 2174

SEQ ID NO: 13729 - protein, 45 aa, Neisseria meningitidis; identical to SEQ ID NO: 3752

SEQ ID NO: 13730 - protein, 154 aa, Neisseria meningitidis; identical to SEQ ID NO: 741

SEQ ID NO: 13731 - protein, 111 aa, Neisseria meningitidis
MLDASPPQERGSRRETRSQKKASQITAFFRWLGGLVSNPATGKISHTKLWTNVAAASMTYKFSQTADAPEWLWWAYGALVGGYALIKRGIAAVPQLAEIKKSANAEEWSGN

SEQ ID NO: 13732 - protein, 105 aa, Neisseria meningitidis; identical to SEQ ID NO: 5128

SEQ ID NO: 13733 - protein, 120 aa, Neisseria meningitidis; identical to SEQ ID NO: 1496

SEQ ID NO: 13734 - protein, 101 aa, Neisseria meningitidis; identical to SEQ ID NO: 2735

SEQ ID NO: 13735 - protein, 74 aa, Neisseria meningitidis
MNQKYILSANNNSLIEEIHNTVQRIGYCIVRGLNLNHLDGSRRNKKLFDFLSQLGMLTNHKGDGFKSIFWDIKY

SEQ ID NO: 13736 - protein, 92 aa, Neisseria meningitidis; identical to SEQ ID NO: 1005

SEQ ID NO: 13737 - protein, 130 aa, Neisseria meningitidis; identical to SEQ ID NO: 1661

SEQ ID NO: 13738 - protein, 47 aa, Neisseria meningitidis; identical to SEQ ID NO: 3740

SEQ ID NO: 13739 - protein, 131 aa, Neisseria meningitidis; identical to SEQ ID NO: 1281

SEQ ID NO: 13740 - protein, 96 aa, Neisseria meningitidis; identical to SEQ ID NO: 3692

SEQ ID NO: 13741 - protein, 129 aa, Neisseria meningitidis; identical to SEQ ID NO: 1031

SEQ ID NO: 13742 - protein, 114 aa, Neisseria meningitidis; identical to SEQ ID NO: 53

SEQ ID NO: 13743 - protein, 63 aa, Neisseria meningitidis; identical to SEQ ID NO: 3296

SEQ ID NO: 13744 - protein, 114 aa, Neisseria meningitidis
LRTHFVISNVPSTPNLLRGRQLEGKLILEVPAQVNPIPQSVLRAAQEENVIIRDTTGRIYNRWWFSIRWLCRCTSCKKRTIDTNRENRGRCVSNCKCKHWISMDCQFVRAKRRS

SEQ ID NO: 13745 - protein, 307 aa, Neisseria meningitidis; identical to SEQ ID NO: 3826

SEQ ID NO: 13746 - protein, 142 aa, Neisseria meningitidis; identical to SEQ ID NO: 5523

SEQ ID NO: 13747 - protein, 103 aa, Neisseria meningitidis; identical to SEQ ID NO: 3787

SEQ ID NO: 13748 - protein, 71 aa, Neisseria meningitidis; identical to SEQ ID NO: 1785

SEQ ID NO: 13749 - protein, 104 aa, Neisseria meningitidis; identical to SEQ ID NO: 1772

SEQ ID NO: 13750 - protein, 131 aa, Neisseria meningitidis; identical to SEQ ID NO: 4721

SEQ ID NO: 13751 - protein, 131 aa, Neisseria meningitidis; identical to SEQ ID NO: 3790

SEQ ID NO: 13752 - protein, 500 aa, Neisseria meningitidis
MSREMLQLAEALASEKNVDAEVVFQALEFALSTAAKKKADREHMDVRVQINRDTGEYQTFRRWLIVADEDYTYPDVEKTIEEIQEEIPGTAIQIGEYYEEQLPNEGFGRQAAQTAKQIILQRIRDAEREQNLNEFLAVKEDIVSGTVKRVERHGIIVEVVAGKLDALIPRDQMIPRENFRSGDRIRALFLRVEEIGNIGRKQVILSRTSGDFLVKLYANEVPEIADGMLEIRAVARDPGQRAKVAVKANDQRIDPQGTCIGVRGSRVNAVSNELSGERIDVVLWSPEPAQFVMSALSPAEVSRIVIDEDKHAVDVIVAEDQLALAIGRGGQNVRLASDLTGWQLNIMTSAEADERNAAEDAAIRRLFMDYLNVDEETADVLVQEGFATLEEVAYVPAAELLAIEGFDEEIVDMLRNRARDAILTMAIAAEEKLGEVSDDMRNLEGIDADMLRSLAEAGITTRDDLAELAVDELIEITGVNEETAKAVILTAREHWFTEDK

SEQ ID NO: 13753 - protein, 174 aa, Neisseria meningitidis
MEMKQMLLTVGVAAVLAGCGKDAGGYEGYWREKSDKKEGMIAVKKEKGNYFLNKINVVTGKEESMLLSEKDGALSINTGIGEIPIKLSDDGKELYVERRQYVKTDAAMKDKIIAHQKKCGQTAQAYLDARKALPSNQTYQQHQAAIEQLKRRFEAEFDELEKEIKCNGKPTLLF

SEQ ID NO: 13754 - protein, 105 aa, Neisseria meningitidis; identical to SEQ ID NO: 3792

SEQ ID NO: 13755 - protein, 242 aa, Neisseria meningitidis; identical to SEQ ID NO: 3849

SEQ ID NO: 13756 - protein, 750 aa, Neisseria meningitidis; identical to SEQ ID NO: 3733

SEQ ID NO: 13757 - protein, 105 aa, Neisseria meningitidis; identical to SEQ ID NO: 7739

SEQ ID NO: 13758 - protein, 124 aa, Neisseria meningitidis; identical to SEQ ID NO: 3797

SEQ ID NO: 13759 - protein, 94 aa, Neisseria meningitidis; identical to SEQ ID NO: 387

SEQ ID NO: 13760 - protein, 228 aa, Neisseria meningitidis; identical to SEQ ID NO: 380

SEQ ID NO: 13761 - protein, 117 aa, Neisseria meningitidis; identical to SEQ ID NO: 408

SEQ ID NO: 13762 - protein, 122 aa, Neisseria meningitidis; identical to SEQ ID NO: 3754

SEQ ID NO: 13763 - protein, 438 aa, Neisseria meningitidis
MKAAAAFAAGLDAQAVRIVIDIYGSLALTGYGHGTFDALMLGLEGSLPHDIPLAGIPERLERIRTQHILRLNGQEIRFIPDRDLNILGNQVLPKHPNGLRFTAYASDGTVLNEQVYYSVGGGFVVTEEDFDRQAETEKAVPYPYTSCAELLARCRLNRLDISEVVLANEAALAGCGEAEIRRRAAAVAEVMEGCIKRGLGADGELPGLNVRRRAPHLATKLKVLRETEIVNTQLWPMVYAMAVNEENAAGGRVVTAPTNGAAGIIPAVLHYFRKFNPHATQERVENFLLTAGAIGILYKTNASISGADVGCQGEVGVACSMAAGAYAEVIGGTPKQVENAAEMAMEHHLGLTCDPVGGLVQIPCIERNGIAAEKALKLGTLALLEDGTDKKVSLDEVIRTMLQTGRDMKATYKETSLAGLAATLRKKAVPVSVRVVEC

SEQ ID NO: 13764 - protein, 99 aa, Neisseria meningitidis; identical to SEQ ID NO: 7743

SEQ ID NO: 13765 - protein, 223 aa, Neisseria meningitidis
MMQKHKCLIDFILTVASQIAYADLPLSLEELLTDKGKFKLESSISYINTERNQSEFANPIYVQTSATKIATVMAMMITPVMAQNLDSQVFDSQNVKTIQLSQAEMKETQGEFVPIIAAAAFGGALGAWGYHGANLYNHGKLGTAQGAATAAGIGAATGVAATGLAAAAGGGLAGNLAWRPGIHALGFGANAANNAVNSRKYSGLTKTSTALPRLAVLVFVNPL

SEQ ID NO: 13766 - protein, 221 aa, Neisseria meningitidis; identical to SEQ ID NO: 3662

SEQ ID NO: 13767 - protein, 231 aa, Neisseria meningitidis; identical to SEQ ID NO: 3708

SEQ ID NO: 13768 - protein, 166 aa, Neisseria meningitidis; identical to SEQ ID NO: 1704

SEQ ID NO: 13769 - protein, 156 aa, Neisseria meningitidis; identical to SEQ ID NO: 955

SEQ ID NO: 13770 - protein, 1391 aa, Neisseria meningitidis; identical to SEQ ID NO: 3726

SEQ ID NO: 13771 - protein, 106 aa, Neisseria meningitidis; identical to SEQ ID NO: 3805

SEQ ID NO: 13772 - protein, 92 aa, Neisseria meningitidis; identical to SEQ ID NO: 752

SEQ ID NO: 13773 - protein, 206 aa, Neisseria meningitidis; identical to SEQ ID NO: 1193

SEQ ID NO: 13774 - protein, 237 aa, Neisseria meningitidis; identical to SEQ ID NO: 1707

SEQ ID NO: 13775 - protein, 919 aa, Neisseria meningitidis; identical to SEQ ID NO: 3807

SEQ ID NO: 13776 - protein, 96 aa, Neisseria meningitidis; identical to SEQ ID NO: 3731

SEQ ID NO: 13777 - protein, 307 aa, Neisseria meningitidis; identical to SEQ ID NO: 3808

SEQ ID NO: 13778 - protein, 290 aa, Neisseria meningitidis; identical to SEQ ID NO: 11775

SEQ ID NO: 13779 - protein, 206 aa, Neisseria meningitidis; identical to SEQ ID NO: 1725

SEQ ID NO: 13780 - protein, 483 aa, Neisseria meningitidis; identical to SEQ ID NO: 3810

SEQ ID NO: 13781 - protein, 358 aa, Neisseria meningitidis; identical to SEQ ID NO: 3679

SEQ ID NO: 13782 - protein, 360 aa, Neisseria meningitidis
MMKIKALMIAAALLAAADVHAAPQKAKTASAKAAKAAKAAKVAKVAKVAKVAKVAKVAKVAKVAATAQKEAAPAQQQGGIRFSDGIAAVADNEVITRRRLAEAVAEAKANLPKDAQISESELSRQVLMQLVNQSLIVQAGKRRNIQASEAEIDAVVAKNPALKNLSPAQRRDFADNIIAEKVRQQAVMQNSRVSEAEIDAFLEQAQKQGITLPEGAPLRQYRAQHILIKADSENAAVGAESTIRKIYGEARSGTDFSSLARQYSQDASAGNGGDLGWFADGVMVPAFEEAVHALKPGQVGAPVRTQFGWHIIKLNEVRDAGTPQERIRNSVRQYIFQQKAEQATVNLLRDLHSGAYVDIR

SEQ ID NO: 13783 - protein, 792 aa, Neisseria meningitidis
VLALGLCFGTHCAAADAVAAEETDNPTAGGSVRSVSEPIQPTSLSLGSTCLFCSNESGSPERTEAAVRGSGEASIPEDYTRIVADKVEGQSQVQVRAEGNVVVERNRTTLNTDWADYDQSGDTVTAGDRFALQQDGTLIRGETLTYNLEQQTGEAHNVRMETEQGGRRLQSVSRTAEMLGEGHYKLTETQFNTCSAGDAGWYVKAASVEADREKGIGVAKHAAFVFGGVPLFYTPWADFPLDGNRKSGLLVPSLSADSDGVSLSVPYYFNLAPNLDATFAPGVIGERGAVFDGQVRYLRPDYAGQSDLTWLPHDKKSGRNNRYQAKWQHRHDISDTLQAGVDFNQVSDSGYYRDFYGNKEIAGNVNLNRRVWLDYGGRAAGGSLNAGLSVLKYQTLANQSGYKDKPYALMPRLSADWRKNTGRAQIGVSAQFTRFSHDSRQDGSRLVVYPDIKWDFSNSWGYVRPKLGLHATYYSLNRFGSQEARRVSRTLPIVNIDSGATFERNTRMFGGGVLQTLEPRLFYNYIPAKSQNDLPNFDSSESSFGYGQLFRENLYYGNDRINTANSLSAAVQSRILDGATGEERFRAGIGQKFYFKNDAVMLDGSVGKKPRSRSDWVAFASSGIGSRFILDSSIHYNQNDKRAENYAVGASYRPAQGKVLNARYKYGRNEKIYLKSDGSYFYDKLSQLDLSAQWPLTRNLSAVVRYNYGFEAKKPIEVLAGAEYKSSCGCWGAGVYAQRYVTGENTYKNAVFFSLQLKDLSSVGRNPADRMDVAVPGYIPAHSLSAGRNKRP

SEQ ID NO: 13784 - protein, 149 aa, Neisseria meningitidis; identical to SEQ ID NO: 3816

SEQ ID NO: 13785 - protein, 149 aa, Neisseria meningitidis; identical to SEQ ID NO: 3816

SEQ ID NO: 13786 - protein, 302 aa, Neisseria meningitidis
MVHLFLASIVWLPSRYGRSSIDDSRALSWLFVIVPICCQLLRFSPLFVFAYISLEYRVKIGLFWAYSNGHALVLSATFKGNQTDLILDFFAGSGTTAHAVMQLNAEGQNGNRRYICVQLPEKTAEKSEARKAGYPTIFDITKARIEKAAAKIRVEHPDYTGDSGFKIFQTADNFRQHPDKDFSPEQPDLPLNDELSEEQLQTLLTTWTLYDGAALTTPVEPVRLGSYTAYLCEKRLYLMNAGFTSADLLAFIRKLDDDAAFNPNRVIVFGSNMASAMQHELDQAVRGYANKKEIELNVVIRV

SEQ ID NO: 13787 - protein, 309 aa, Neisseria meningitidis
MHQYYDAVILSVGNGLLKRFFKQNAQLNIASRPLIITLFPGVVFGDQASILSRMGADIVLYNNKHDFRIAEEYKKQYKLSCQNILYGYPIFRHASKGRHGEKIYFIDQVKIPFKKEERIYTLKKLIALAEKYPEKEFTILLRVADKDITVHQDKHSYIELAKQFQLPSNLTIERKSTAQAFQEMGYCLSYSSTMLFEAECKGIPVGVVADLGFSESYANQHFLGSGVLVYFDQIDFTSPKIADPDWLDCYATKKVITTDEFNKLLKQVVPLQHDYQEYLSAVNSIESTKTIFLRKFKKLIRACPQFNLA

SEQ ID NO: 13788 - protein, 387 aa, Neisseria meningitidis; identical to SEQ ID NO: 30

SEQ ID NO: 13789 - protein, 332 aa, Neisseria meningitidis; identical to SEQ ID NO: 9814

SEQ ID NO: 13790 - protein, 704 aa, Neisseria meningitidis; identical to SEQ ID NO: 3750

SEQ ID NO: 13791 - protein, 68 aa, Neisseria meningitidis; identical to SEQ ID NO: 3821

SEQ ID NO: 13792 - protein, 125 aa, Neisseria meningitidis; identical to SEQ ID NO: 9816

SEQ ID NO: 13793 - protein, 125 aa, Neisseria meningitidis; identical to SEQ ID NO: 9817

SEQ ID NO: 13794 - protein, 135 aa, Neisseria meningitidis
MCEFKDFRRNIPCFKEYDENSFIGKWYDDGVWDDEEYWKLENDLIEVRKKYPYPMDIPRDIVIGIGTIIDFLMVQNWKLFEIKASPWLPKSVKINERYERFRVMLRYIFTDLDVEDWKFFYFPIQHSKGRLRRKV

SEQ ID NO: 13795 - protein, 369 aa, Neisseria meningitidis; identical to SEQ ID NO: 9819

SEQ ID NO: 13796 - protein, 213 aa, Neisseria meningitidis
MRCFMIQNVVTSIILYSGTAVDLLIILMLFFAKRKSRKDIINIYLGQFLGSVSLILLSLLFAFVLDYIPSKEILGLLGLIPILLGIKVLLLGDSDGEAIAKEGLRKDNKNLIFLVAMITFASCGADNIGVFVPYFTTLNSANLIVALLTFLVMIYLLVFSAQKLAQVPSVGETLEKYSRWFVAVVYLGLGIYILVENNSFDMLWTVLGQEKIL

SEQ ID NO: 13797 - protein, 180 aa, Neisseria meningitidis; identical to SEQ ID NO: 11795

SEQ ID NO: 13798 - protein, 442 aa, Neisseria meningitidis; identical to SEQ ID NO: 3795

SEQ ID NO: 13799 - protein, 166 aa, Neisseria meningitidis; identical to SEQ ID NO: 3831

SEQ ID NO: 13800 - protein, 399 aa, Neisseria meningitidis; identical to SEQ ID NO: 7800

SEQ ID NO: 13801 - protein, 86 aa, Neisseria meningitidis; identical to SEQ ID NO: 3834

SEQ ID NO: 13802 - protein, 129 aa, Neisseria meningitidis; identical to SEQ ID NO: 7802

SEQ ID NO: 13803 - protein, 149 aa, Neisseria meningitidis
LLIRYIDIAKRNFVIAVSSLSKTKTETNNPKGIAHTIEYLKKHKVALVVTESTGGLEIPAAKAIRRAGIAVIIANPRQTHQFAQSQPLTKTDAKDAKMPAFFAQMTAQKEDSQTMPYQPPTEAEEVLEALVNRRNQSADMRTAEKNRLH

SEQ ID NO: 13804 - protein, 326 aa, Neisseria meningitidis; identical to SEQ ID NO: 3794

SEQ ID NO: 13805 - protein, 65 aa, Neisseria meningitidis; identical to SEQ ID NO: 204

SEQ ID NO: 13806 - protein, 117 aa, Neisseria meningitidis; identical to SEQ ID NO: 3848

SEQ ID NO: 13807 - protein, 71 aa, Neisseria meningitidis
LDAGEFSHFRINHSTHFAERQNHINGIENFWNRAKRHLRKFNGIPKAHFELYLKECEWRFNNSEIKVLVPF

SEQ ID NO: 13808 - protein, 702 aa, Neisseria meningitidis
MKISFHLALLPTLIIASFPVAAADTQDNGEHYTATLPTVSVVGQSDTSVLKGYINYDEAAVTRNGQLIKETPQTIDTLNIKNKNYGTNDLSSILEGNAGIDAAYDMRGESIFLRGFQADASDIYRDGVRESGQVRRSTANIERVEILKGPSSVLYGRTNGGGVINMVSKYANFKQSRNIGAVYGSWANRSLNMDINEVLNKNVAIRLTGEVGRANSFRSGIDSKNVMVSPSITVKLDNGLKWTGQYTYDNVERTPDRSPTKSVYDRFGLPYRMGFAHRNDFVKDKLQVWRSDLEYAFNDKWRAQWQLAHRTAAQDFDHFYAGSENGNLIKRNYAWQQTDNKTLSSNFTLNGDYTIGRFENHLTVGMDYSREHRNPTLGYSRAFTASIDPYDRASWPASGRLQPILTQNRHKADSYGIFVQNIFSATPDLKFVLGGRYDKYTFNSENKLTGSSRQYSGHSFSPNIGAVWNINPVHTLYASYNKGFAPYGGRGGYLSINTSSSAVFNADPEYTRQYETGVKSSWLDDRLSTTLSAYQIERFNIRYRPDEQNDPYTWAVGGKHRSRGVELSAIGQIIPKKLYLRGSLGVMQAKVVEDKENPDRVGIHLNNTSNVTGNLFFRYTPTENLYGEIGVTGTGKRYGYNSRNKEVTTLPGFARVDAMLGWNHKNVNITFAAANLLNQKYWRSDAMPGAPRTYTARVNYSF

SEQ ID NO: 13809 - protein, 273 aa, Neisseria meningitidis
MTFDKWLGLSKLPKNEARMLLQYVSEYTRVQLLTRGGEEMPDEVRQRADRLAQRRLNGEPVAYILGVREFYGRRFTVNPSVLIPRPETEHLVEAVLARLPENGRVWDLGTGSGAVAVTVALERPDAFVRASDISPPALETARKNAADLGARVEFAHGSWFDTDMPSEGKWDIIVSNPPYIENGDKHLSQGDLRFEPQIALTDFSDGLSCIRTLAQGAPDRLAEGGFLLLEHGFDQGAAVRGVLAENGFSGVETLPDLAGLDRVTLGKYMKHLK

SEQ ID NO: 13810 - protein, 303 aa, Neisseria meningitidis; identical to SEQ ID NO: 3747

SEQ ID NO: 13811 - protein, 391 aa, Neisseria meningitidis; identical to SEQ ID NO: 2276

SEQ ID NO: 13812 - protein, 130 aa, Neisseria meningitidis; identical to SEQ ID NO: 4578

SEQ ID NO: 13813 - protein, 154 aa, Neisseria meningitidis
LLYPEKMSGMAGRHPYGVRSGLRRNGLKLWDIHFRMTRFIVARCGLLFATLKGKTMKKMFVLFCMLFSCAFSLAAVNINAASQQELEALPGIGPAKAKAIAEYRAQNGAFKSVDDLTKVKGIGPAVLAKLKDQASVGAPAPKGPAKPALPAAKK

SEQ ID NO: 13814 - protein, 83 aa, Neisseria meningitidis
MRKSRLSQYKQNKLIELFVAGVTARTAAELVGVNKSTAAYYFHRLRLLIYQNSPHLEMFDGEVEADESYFAERQNHINGIGNF

SEQ ID NO: 13815 - protein, 117 aa, Neisseria meningitidis; identical to SEQ ID NO: 3854

SEQ ID NO: 13816 - protein, 90 aa, Neisseria meningitidis; identical to SEQ ID NO: 11808

SEQ ID NO: 13817 - protein, 281 aa, Neisseria meningitidis; identical to SEQ ID NO: 3753

SEQ ID NO: 13818 - protein, 37 aa, Neisseria meningitidis; identical to SEQ ID NO: 970

SEQ ID NO: 13819 - protein, 92 aa, Neisseria meningitidis; identical to SEQ ID NO: 3856

SEQ ID NO: 13820 - protein, 413 aa, Neisseria meningitidis; identical to SEQ ID NO: 9853

SEQ ID NO: 13821 - protein, 380 aa, Neisseria meningitidis
MSIHLDFGISPKTFRQTYLYQKPKLFKGAVRNLEAASWKDINDIYQRADPTAPLFHLRKKGAIVPKEEYVESFDDLGKTRYRFIKSVIYEHMKNGASLLYNHIIVDITSTALPRLAGAHTIVSGYLAFGSDESYKNHWDIRDVYAIQLFGKKRWQLTAPDFPMPLYMQQTKDTDISIPEHIDMDIILEAGDVLYIPRGWWHRPIPLGCETFHLAVGTFPPNGYNYLEWLMKKFPTIESLRHSFSDWEQDRTRINDTAAQIAAMIADPVNYEAFSEDFLGKERTDTAFHLEQFANPNATPLSDDVRLRLNANNLDTLEKGYLIGNGMKISVDELGKKVLEHIGKNEPLLLKNLLVNFNQGKYEEVRKLIYQLIELDFLEIL

SEQ ID NO: 13822 - protein, 168 aa, Neisseria meningitidis; identical to SEQ ID NO: 11207

SEQ ID NO: 13823 - protein, 463 aa, Neisseria meningitidis; identical to SEQ ID NO: 3738

SEQ ID NO: 13824 - protein, 215 aa, Neisseria meningitidis
MDRHFGRRRFLTVAAVAAAGAAVSFLPNPFAADGEKRNGDEKRNENVFFWKGVALGSGAELRLFGVDDRQAADLVNKVLAEVARLEKIVQPLPRQPDQPPEQGRLSDFAVGGFFGTVEPVPRYSRADGRRVRSDSAGVVETVCRLFCRPSRCGNAASSKQREGSPETGRLRQSLVRPNPFCRKGYGFVLERHRASLWINKNQYGVASPLKENDSL

SEQ ID NO: 13825 - protein, 421 aa, Neisseria meningitidis; identical to SEQ ID NO: 11822

SEQ ID NO: 13826 - protein, 548 aa, Neisseria meningitidis; identical to SEQ ID NO: 3866

SEQ ID NO: 13827 - protein, 312 aa, Neisseria meningitidis
MKIVLTTSMAGLGGTETATVRLGRLLKRRGHDIILASSDGPFVGEAQASGIRWQPVDFYRGGLAGYLKSTFAYARMLRREQPDIIDCQMARVVPACALAAKIVSPKTKIIYHSHGLDAATYPKIAKLFDKLGVYIIGNCKHEREKLIRHGFPADRIVYAYNAPPPPPPEFPFRKTEKECAVLGTLSRLDTIRAVHLMLDIFKKMVDRDMPVRLNVAGIGDHGAGVGNNILEAGLYDTPVVTYDMAGISEMVVNGETGYCIPFGDEEAFIAAVDTLVRQPELREAMGKRLHAHVAALCSDDEIYRTTMAAYTM

SEQ ID NO: 13828 - protein, 359 aa, Neisseria meningitidis
MTSANFNINGFGDVKLTPYSPLLGYKAWDSFIGSIQSLSDLIYNVDNNRNKMEITVNNAIQAADSFLSSNWKRQNNKITNTASLLASFDNIFIEMYLEIYEKQENLNLMIFNKQLVIYSLLLVMDYNINNKQRRWLKANSYQLNKLVMMSLILECNPLLFYSMNIKGLWKREAWRIYNEYRFYTKDSKLFCGSYIQQCIRRSIVYIFLSSCKPLERGRRLYWTRDKMGRVTGKMVTRFSPLSKEWDQFPKFEDWLPEFPEWAREWLKLALKRSGKYNVYNPLALDLDGDGIETVAAKGFSGSLFDHTNNGIRTATGWIAAYDGFPVRKLNSNGGIISTTDTIFQSLHTWLDHQPNDTCH

SEQ ID NO: 13829 - protein, 258 aa, Neisseria meningitidis; identical to SEQ ID NO: 5844

SEQ ID NO: 13830 - protein, 292 aa, Neisseria meningitidis
MARRSKTFEEAAAEVEERFGHRGIKLVEFEGTAKPCVINCPKHGNQTCSRYSNMFIGSSWGCPSCGNEQAAKAGIATLRKNHIALEMLKQAVTGMTKQERITTQAYNEMTKSVAGSNSIVLNDVQGDTTINNHHTHTHNHSDADGKALSMRLTPRPLLSDRQAAAFARTGKLTGSFDLFASVVAPSQYTFAVAMPDTSMSPVIEKGDLVVVEPRMRPADEDIVLIELSDKRLVVAHLVIDIAGRMLIYQTGRPSEAFDLPEGSTILGVVLEVKKRFMSAAQARRRVDSDYHP

SEQ ID NO: 13831 - protein, 321 aa, Neisseria meningitidis
MNPAMIERLKAVENQAEAMERGARSAYLKQQAQELGISLATLYRKLEAVSVKPTRKRRSDAGKTELKPEEAKLISAVLVEAMRRNGKRLMSVRQAVEMLRANGKIEAARIDGETGEVIPSVRTAFRPLARHRPHRPVMAHPRRRHEDQTPLYRPTVGLGGRNTPRAAHTDRRQHPPFPRHPPTAQTRPPSDHISIKFAHNAIRRLGYDGSTPGKSKHTMHGFRHLFTNISLTAGKDTLTTDLALGHISRAALQRAGFSSLHHYLTADSYRLQERRELAEWYSRRHRQAYEAAAKTPQNKKPPEKNSDGILPKTLAIKPKRY

SEQ ID NO: 13832 - protein, 185 aa, Neisseria meningitidis; identical to SEQ ID NO: 3675

SEQ ID NO: 13833 - protein, 399 aa, Neisseria meningitidis
MWTGFFSKSGTGIAEERHQNRRACTDVPLLAERNSKHPDRPYGFAKYRQSGLDIYAWHGIYFFPRFPFIDIDCIRWVCAGLKAFKHYIRENGLPDLIHAHRMNYAGILAQKISQKYGIPYVVTEHSSTITRGLIRPHQWQPMEKAAAHASALLAVSRHFAHVLQHKYGCEWQYLPHILGGIFNRPFEQREKNNKPHFVFCTVSHLRRLKGHDVLLTAFARALAQCPQLRLNIGGSGQEEQRLKQQAADLGITHAVTFLGALQPEAVLDLMRNSDAFVLASRTETFGVVYIEALSQGLPVIATRCGGAESIVSDGNGYLVPVDDDDALADALIKMYEHHSDFEPARLRENCLNEFGENAVIGRLIGIFRQAIAEYGKKIRVKYSGLTKIRTRRRSRRQYK

SEQ ID NO: 13834 - protein, 327 aa, Neisseria meningitidis; identical to SEQ ID NO: 294

SEQ ID NO: 13835 - protein, 434 aa, Neisseria meningitidis
MLPTQPNPTQPNPTQPNPTQPNPTQPNPSPYLIDTAGVNTEAIYTSDGITANSTQLEQLKKLFPACFDADGNFLIDRLQAEIAPQTDIGREFYEMNWLGKSYARLLRNLPPETLISEDKTHNAKPENAGSQNLLIRGDNLEVLKHLKNAYTNSVKMIYIDPPYNTGSDGFVYQDDRKFTPAELACLANIDEDEAARILDFTDKGSNSHSAWLTFMYPRLYIARELLKDDGVIFISIDDNEAAQLKLLCDEVFGEGNFIKDLIVNTSEGGGNAKYVVNGHETVLVYAKDITHFDNLKRPKDIRGKKIVINDELYWIQEDAVREQFGKYGNLHYEDIIEIKGIEFKNKIDKDIENNEYILIPKSYGKTIIGKLRKVSDDFSKFHSILNIGNISKNLTKDGIRELEELFETGKGYSPFETPKPLDLLKRLGRVLNLT

SEQ ID NO: 13836 - protein, 77 aa, Neisseria meningitidis; identical to SEQ ID NO: 760

SEQ ID NO: 13837 - protein, 163 aa, Neisseria meningitidis; identical to SEQ ID NO: 3739

SEQ ID NO: 13838 - protein, 453 aa, Neisseria meningitidis
MSSPSNTNRQTSSRLTYILTVAGATVGFGATWRFPYLVGENGGGAYVFLFCIAMLVIGIPMILVENVIGRRKGVNALDAFGGPMNGKPIAKIWKLVGWMGLLGAFGIMAYYMALGGWVISYIVNIIGGNLNISSPIDGVVTKGFFAEHINSPWEIAFYTLLFVAVNQWILVKGVIGGIEKAAKLMPLLFLFLIAMVVRNVTLPGAMEGVAFYLKPDFSKITAELFVFVLGQVFFALSLGFGVMITLSSYLDKNENLVQTAVITAITNTIIAILAGFMIFPSLFSFGVAPDSGPTLVFQSLPIVFSHMWAGSVFAVIFFSLLLIAALTTSLTIYEMLITTIQEKTKIRRTAAITIVLAAIFIFGNIPSILSYGPWKDVSIFGKNIFDAFDYISGNILFMLTALGSALFVGFVMKDEAKEELLYKGNHTTVNIWFAYVKYLVPLVILLIFISNLF

SEQ ID NO: 13839 - protein, 170 aa, Neisseria meningitidis; identical to SEQ ID NO: 7849

SEQ ID NO: 13840 - protein, 467 aa, Neisseria meningitidis; identical to SEQ ID NO: 11848

SEQ ID NO: 13841 - protein, 325 aa, Neisseria meningitidis
MQENPTVWLFDLDNTLHNADAGLFTLINRAMTRYMARRLKLSESAASDLRQDYWHRYGATLAGLQIHHPEIDIAEFLRESHPIDAILTRLHGMPETQNTLSRLKGRKAVFSNGPSFYVRAVVGALGLENRFDALFGTDDFGLLYKPNPQAYLNVCRLLDVPPECCIMVDDSADNLHQAKALGMKTVRFGAKVHDLPFIDASVSDMAQLARYAETLSEHRQNHYNTHTPPKIRKNVMRKTFLILMTAAALLSGCAWETYQDGNGKTAVRQKYPAGTPVYYQDGSYSKNMNYNQYRPERHAVLPNQTGNNADEEHRQHWQKPKFQNR

SEQ ID NO: 13842 - protein, 152 aa, Neisseria meningitidis; identical to SEQ ID NO: 2635

SEQ ID NO: 13843 - protein, 436 aa, Neisseria meningitidis
MKSYFSKYILPVSLFTLPLSLSPSVSAFTLPEAWRAAQQHSADFQASHYQRDAVRARQQQAKAAFLPHVSANASYQRQPPSISSTRETQGWSVQVGQTLFDAAKFAQYRQSRFDTQAAEQRFDAAREELLLKVAESYFNVLLSRDTVAAHAAEKEAYAQQVRQAQALFNKGAATALDIHEAKAGYDNALAQEIAVLAEKQTYENQLNDYTDLDSKQIEAIDTANLLARYLPKLERYSLDEWQRIALSNNHEYRMQQLALQSSGQALRAAQNSRYPTVSAHVGYQNNLYTSSAQNNDYHYRGKGMSVGVQLNLPLYTGGELSGKIHEAEAQYGAAEAQLTATERHIKLAVRQAYTESGAARYQIMAQERVLESSRLKLKSTETGQQYGIRNRLEVIRARQEVAQAEQKLAQARYKFMLAYLRLVKESGLGLETVFAE

SEQ ID NO: 13844 - protein, 346 aa, Neisseria meningitidis; identical to SEQ ID NO: 11817

SEQ ID NO: 13845 - protein, 98 aa, Neisseria meningitidis; identical to SEQ ID NO: 1735

SEQ ID NO: 13846 - protein, 141 aa, Neisseria meningitidis
MYWERGLHMYKASAVVPTGYVRVGNTAPLVGEDTQRYASFWGDGYDVYRQLRWQQISEKQRKAFKKAAKSKKTVMFAGREYGISKQNLSDVWDDFEDAMELKAFPCLSSLFLTKWHKNLYDSGLTKTSTALPRLSSKRTIL

SEQ ID NO: 13847 - protein, 1014 aa, Neisseria meningitidis
MFWIVLIVILLLALAGLFFVRAQSEREWMREVSAWQEKKGEKQAELPEIKDGMPDFPELALMLFHAVKTAVYWLFVGVVRFCRNYLAHESEPDRPVPPASANRADVPTASDGYSDSGNGTEEAETEEAEAAEEEAADTEDIATAVIDNRRIPFDRSIAEGLMPSESEISPVRPVFKEITLEEATRALNSAALRETKKRYIDAFEKNETAVPKVRVSDTPMEGLQIIGLDDPVLQRTYSRMFDADKEAFSESADYGFEPYFEKQHPSAFSAVKAENARNAPFHRHAGQGKGQAEAKSPDVSQGQSVSDGTAVRDARRRVSVNLKEPNKATVSAEARISRLIPESQTVVGKRDVEMPSETENVFTETVSSVGYGGPVYDETADIHIEEPAAPDAWVVEPPEVPKVPMPAIDIPPPPPVSEIYNRTYEPPAEFEQAQRSRIAETDHLADDVLNGGWQEETAAIADDGSEGAAERSSGQYLSETEAFGHDSQAVCPFENVPSERPSCRVSDTEADEGAFQSEETGAVSEHLPTTDLLLPPLFNPGATQTEEELLENSITIEEKLAEFKVKVKVVDSYSGPVITRYEIEPDVGVRGNSVLNLEKDLARSLGVASIRVVETIPGKTCMGLELPNPKRQMIRLSEIFNSPEFAESKSKLTLALGQDITGQPVVTDLGKAPHLLVAGTTGSGKSVGVNAMILSMLFKAAPEDVRMIMIDPKMLELSIYEGIPHLLAPVVTDMKLAANALNWCVNEMEKRYRLMSFMGVRNLAGFNQKIAEAAARGEKIGNPFSLTPDDPEPLEKLPFIVVVVDEFADLMMTAGKKIEELIARLAQKARAAGIHLILATQRPSVDVITGLIKANIPTRIAFQVSSKIDSRTILDQMGAENLLGQGDMLFLPPGTAYPQRVHGAFASDEEVHRVVEYLKQFGEPDYVDDILSGGGSEELPGIGRSGDGETDPMYDEAVSVVLKTRKASISGVQRALRIGYNRAARLIDQMEAEGIVSAPEHNGNRTILVPLDNV

SEQ ID NO: 13848 - protein, 304 aa, Neisseria meningitidis
MEKAEHLNSSRFVNLVKSGGGSYVEGSYRFDTLSNGISIHGGTVTARCDFCSSRLAEPYVSFVLLLEGSLDFGINRCRFQIDADGGKIVLIAVGEEVLFSRYLYRGGKTVKMTIKGMEQWLLRPEYARFAPLLYREPVRIDLPPNLRGLAASCLQAVPKGHLGKTLRREADVLRLLSDLWDTVSDGIGPAVGQTAEADAMPSEDFSRTLNAAFDGGAHQVNRLTDALNISERTLQRRMRDHFGITASEWLHHKQMQHALYLLQNGGKSIGETAYLCGYRHVSSFTQAFRQYFGSTPAETKKENR

SEQ ID NO: 13849 - protein, 119 aa, Neisseria meningitidis; identical to SEQ ID NO: 3614

SEQ ID NO: 13850 - protein, 106 aa, Neisseria meningitidis; identical to SEQ ID NO: 3892

SEQ ID NO: 13851 - protein, 189 aa, Neisseria meningitidis; identical to SEQ ID NO: 9881

SEQ ID NO: 13852 - protein, 90 aa, Neisseria meningitidis; identical to SEQ ID NO: 8272

SEQ ID NO: 13853 - protein, 97 aa, Neisseria meningitidis; identical to SEQ ID NO: 3898

SEQ ID NO: 13854 - protein, 124 aa, Neisseria meningitidis; identical to SEQ ID NO: 1868

SEQ ID NO: 13855 - protein, 78 aa, Neisseria meningitidis; identical to SEQ ID NO: 3900

SEQ ID NO: 13856 - protein, 62 aa, Neisseria meningitidis; identical to SEQ ID NO: 1869

SEQ ID NO: 13857 - protein, 127 aa, Neisseria meningitidis; identical to SEQ ID NO: 3901

SEQ ID NO: 13858 - protein, 66 aa, Neisseria meningitidis; identical to SEQ ID NO: 3905

SEQ ID NO: 13859 - protein, 69 aa, Neisseria meningitidis; identical to SEQ ID NO: 3638

SEQ ID NO: 13860 - protein, 64 aa, Neisseria meningitidis; identical to SEQ ID NO: 3555

SEQ ID NO: 13861 - protein, 160 aa, Neisseria meningitidis; identical to SEQ ID NO: 3906

SEQ ID NO: 13862 - protein, 125 aa, Neisseria meningitidis
MSFGYLIATSQPCELLTKSRGETFSLIMDKMDLWIYFRFCEGNIYTIRKNETESCLTERGGEWLKHIYEFNRGSFIFSYVLLKKRESEENFTEIVLKSIKNNKILTVKVRSGLHFDLRNIYRIEM

SEQ ID NO: 13863 - protein, 80 aa, Neisseria meningitidis; identical to SEQ ID NO: 1154

SEQ ID NO: 13864 - protein, 78 aa, Neisseria meningitidis; identical to SEQ ID NO: 3909

SEQ ID NO: 13865 - protein, 103 aa, Neisseria meningitidis; identical to SEQ ID NO: 1278

SEQ ID NO: 13866 - protein, 98 aa, Neisseria meningitidis
MVCCLRFLTSLKRQTVNQATACVRTAHTLHVDFEVPCNSQVGCVAQPRTRCWVCRLRLAAAETPEEKAKDAAEEAKEEAKDAAEDAKEAAEDAKEEAK

SEQ ID NO: 13867 - protein, 67 aa, Neisseria meningitidis; identical to SEQ ID NO: 10269

SEQ ID NO: 13868 - protein, 68 aa, Neisseria meningitidis; identical to SEQ ID NO: 3910

SEQ ID NO: 13869 - protein, 147 aa, Neisseria meningitidis; identical to SEQ ID NO: 1529

SEQ ID NO: 13870 - protein, 65 aa, Neisseria meningitidis; identical to SEQ ID NO: 3913

SEQ ID NO: 13871 - protein, 131 aa, Neisseria meningitidis; identical to SEQ ID NO: 3914

SEQ ID NO: 13872 - protein, 69 aa, Neisseria meningitidis; identical to SEQ ID NO: 1883

SEQ ID NO: 13873 - protein, 61 aa, Neisseria meningitidis; identical to SEQ ID NO: 9900

SEQ ID NO: 13874 - protein, 40 aa, Neisseria meningitidis; identical to SEQ ID NO: 1884

SEQ ID NO: 13875 - protein, 89 aa, Neisseria meningitidis; identical to SEQ ID NO: 3886

SEQ ID NO: 13876 - protein, 100 aa, Neisseria meningitidis; identical to SEQ ID NO: 1890

SEQ ID NO: 13877 - protein, 70 aa, Neisseria meningitidis; identical to SEQ ID NO: 3527

SEQ ID NO: 13878 - protein, 67 aa, Neisseria meningitidis; identical to SEQ ID NO: 3513

SEQ ID NO: 13879 - protein, 59 aa, Neisseria meningitidis; identical to SEQ ID NO: 1937

SEQ ID NO: 13880 - protein, 707 aa, Neisseria meningitidis; identical to SEQ ID NO: 3919

SEQ ID NO: 13881 - protein, 71 aa, Neisseria meningitidis; identical to SEQ ID NO: 3920

SEQ ID NO: 13882 - protein, 183 aa, Neisseria meningitidis; identical to SEQ ID NO: 3701

SEQ ID NO: 13883 - protein, 111 aa, Neisseria meningitidis
LTEEMMKKQRHILCVGCLYIILKVNVFPNTGWMEASKGMQGMSFSTFGYADAPGYTFSRIGHTLIFLLGKTTGTRTTVSDSSHNVYYVKLYICANGLLRIRPCVTPLTPRH

SEQ ID NO: 13884 - protein, 81 aa, Neisseria meningitidis; identical to SEQ ID NO: 1901

SEQ ID NO: 13885 - protein, 99 aa, Neisseria meningitidis; identical to SEQ ID NO: 3688

SEQ ID NO: 13886 - protein, 137 aa, Neisseria meningitidis; identical to SEQ ID NO: 3923

SEQ ID NO: 13887 - protein, 786 aa, Neisseria meningitidis
MLPIAALVGSIFGNPVLAADEAASETTPVKAEIKAVRVKGQRNVPAAVERVNLNRIKQEMIRDNKDLVRYSTDVGLSDSGRHQKGFAIRGVEGNRVGVSIDGVNLPDSEENSLYARYGNFNSSRLSIDPELVRNIDIVKGADSFNTGSGALGGGVNYQTLQGRDLLLPERQFGVMMKNGYSTRNREWTNTLGFGVSNDRVDAALLYSQRRGHETESAGNRGYPVEGAGKETNIRGSARGIPDPSKHKYHSFLGKIAYQINDNHRIGASLNGQQGHNYTIEESYNLLASYWREADDVNRRRNTNLFYEWTPESDRLSMVKADVDYQKTKVSAVNYKGSFPIEDSSTLTRNYNQKDLDEIYNRSMDTRFKRITLRLDSHPLQLGGGDRLSFKTFASRRDFENLNRDDYYFSGQISRTTSSIQHPVKTTNYGFSLSDQIQWNDVFSSRAGIRYDHTKMTPQELNADCHACDKTPPAPNTYSGWSGFAGLAAQLNQAWRVGYDITSGYRVPNASEVYFTYNHGAGTWLPSPNLKAERSTTHTLSLQGRGEKGTLDANLYQSNYRNFLSEEQKLTTSGTPGCTEENAYYGICSDPYKEKLDWQMKNIDKARIRGIELTGRLNVDKVASFVPEGWKLFGSLGYAKSKLSGDNSLLSTQPLKVIAGIDYESPSEKWGVFSRLTYLGAKKVKDAQYTVYENKGWGTPLQKKVKDYPWLNKSAYVFDMYGFYKPAKNLTLRAGVYNLFNRKYTTWDSLRGLYSYSTTNAVDRDGKGLDRYRAPGRNYAVSLEWKF

SEQ ID NO: 13888 - protein, 1490 aa, Neisseria meningitidis
MRFTHTTPFCSVLSTLGLFAVSPAYSSIVRNDVDYQYFRDFAENKGAFAVGASNISIQDKQGKILGRVLNGIPMPDFRVSNRQTAIATLIHPQYVNSVKHNVGYGSIQFGNDTQNPEEQAYTYRLVSRNPHPDYDYHLPRLNKLVTEISPAALSSVPLLGNGQPKANAYLDTDRFPYFVRLGSGTQQVRKADGTRTRTAPAYQYLTGGTPLKVLGFQNHGLLVGGSLTDQPLNTYAIAGDSGSPLFAFDKHENRWVLAGVLSTYAGFDNFFNKYIVTQPEFIRSTIRQYETRLDVGLTTNELIWRDNGNGDSTLQGLNERITLPIANPSLAPQNDSRHMPSEDAGKTLILSSRFDNKTLMLADNINQGAGALQFDSNFTVVGKNHTWQGAGVIVADGKRVFWQVSNPKGDRLSKLGAGTLIANGQGINQGDISIGEGTVVLAQKAASDGSKQAFNQVGITSGRGTAVLADSQQIKSENLYFGFRGGRLDLNGNNLAFTHIRHADGGAQIVNHNPDQAATLTLTGNPVLSPEHVEWVQWGNRPQGNAAVYEYINPHRNRRTDYFILKPGGNPREFFPLNMENSTSWQFIGNNRQQAAKQVAQAENARPDLITFGGYLGENAQTGKAAPSYSKTNIEWVNGPNTPHKPSPYTNTPTRTGAGVPTITASKKAATPAPTSHGMPTAPKTGNFSDMTGEAAIEKNRHIANAAVYGRPEYRYNGALNLHYRPKRTDSTLLLNGGMNLNGEVLIEGGNMIVSGRPVPHAYDHQAKREPVLENEWTDGSFKAARFTLRNHARLTAGRNTAHLDGDITAYNLSGIDLGFIQGKTPECYRSYHSGSTHCTPNAVLKAENYRALPVTQVRGDITLNDRSELRLGKAHLYGSIRAGKDTAVRMEADSNWTLSQSSHTGALTLDGAQITLNPDFANNTHNNRFNTLTVNGTLDGFGTFRFLTGIVRKQNAPPSNWKGTAAAHSKSTSKTPDKNLKQPNRLHLASIRNTATKARFTLQNGYADLGAYRYILRKNNNGYSLYNPLKEAELQIEATRAEHERNQQAYNQLQATDISRQVQHDSDATRQALQAWQNSQTELARIDSQVQYLSAQLKQTDPLTGILTRAQNLCAAQGYSVDICRQVAKAADTNDLTLFETELDTYIERVEMAESELDKARQGGDAQAVETARHAYLNALNRLSRQIHSLKTDVAGIRMPNLAELISRSANTAVSEQAAYNTGRQQAGRRIDRHLTDPQQQNIWLETGTQQTDYHSGTHRPYQQTTNYAHIGIQTGITDRLSVGTILTDERTNNRFDEGVSARNRSNGAHLFVKGENGALFAAADLGYSNSRTRFTDYDGAAVRRHAWDAGINTGIKIDTGINLRPYAGIRINRSNGNRYVLDGAEINSPAQIQTTWHAGIRLDKTVELGQAKLTPAFSSDYYHTRQNSGSALSVNDRTLLQQAAHGTLHTLQIDAGYKGWNAKLHAAYGKDSNTARHKQAGIKIGYNW

SEQ ID NO: 13889 - protein, 111 aa, Neisseria meningitidis; identical to SEQ ID NO: 3928

SEQ ID NO: 13890 - protein, 337 aa, Neisseria meningitidis; identical to SEQ ID NO: 11829

SEQ ID NO: 13891 - protein, 133 aa, Neisseria meningitidis; identical to SEQ ID NO: 5891

SEQ ID NO: 13892 - protein, 218 aa, Neisseria meningitidis; identical to SEQ ID NO: 3932

SEQ ID NO: 13893 - protein, 358 aa, Neisseria meningitidis
MDLSIVVPIYNVESYLEACLNSIEPILSNENVELILVNDGSKDGSEDICYKYIDKTTNNKQQTTNNKQQTTNNKQQTTNNKQQTTNNKQHRYRTPNIKYIYQDNQGTAEARNTGIKNSNGKYIVFIDSDDFINCQVLLDFLSKDDIDMPDVVFLNAVKYDKGSVSHFGEDYQPEKILNQSKVEVLKGLCRFRKFPGSACNKIIKRELIIKEKLFFEKEVYAEDIEWSMRLFNAATTFSYLDGCYYYYRQGRKDSKTGTVSEKSIKSLLYILEKNAEMEFDRDISSYLYSFLSYEYLVLLFIMTSKNIECDADIKRRAYHLRFMLLKSNKLIYKLIFPIITLFGVDITGRILKAIRGNI

SEQ ID NO: 13894 - protein, 385 aa, Neisseria meningitidis
MKRQALAAMIASLFALAACGGEPAAQAPAASAEAASSAAQTAAETPTGELPVIDAVTTHAPEVPPAIDRDYPAKVRVKMETVENMTMEDGVEYRYWTFDGDVPGRMIRVREGDTVEVEFSNNPSSTVPHNVDFHAATGQGGGAAATFTAPGRTSTFSFKALQPGLYIYHCAVAPVGMHIANGMYGLILVEPKEGLPKVDKESYIVQGDFYTKGKKGAQGLQPFDMDKAVAEQPEYVVFNGHVGAIAGDNALKAKAGETVRMYVGNGGPNLVSSFHVIGEIFDKVYVEGGKLINENVQSTIVPAGGSAIVEFKVDIPGSYTLVDHSIFRAFNKGALGQLKVEGAENPEIMTQKLSDTAYAGNGAAPAASAPAASAPAASASEKSVY

SEQ ID NO: 13895 - protein, 1066 aa, Neisseria meningitidis; identical to SEQ ID NO: 3896

SEQ ID NO: 13896 - protein, 351 aa, Neisseria meningitidis; identical to SEQ ID NO: 3940

SEQ ID NO: 13897 - protein, 266 aa, Neisseria meningitidis; identical to SEQ ID NO: 11909

SEQ ID NO: 13898 - protein, 64 aa, Neisseria meningitidis; identical to SEQ ID NO: 11919

SEQ ID NO: 13899 - protein, 310 aa, Neisseria meningitidis
MDIVFAADDNYAAYLCVAAKSVEAAHPDTEIRFHVLDAGISEANRAAVAANLRGGGYIRFIDVNPEDFAGFPLNIRHISITTYARLKLGEYIADCDKVLYLDIDVLVRDSLKPLWDTDLGDNWLGACIDLFVERQNAYKQKIGMADGEYYFNAGVLLINLKKWRQHDIFKMACEWVEQYKDVMQYQDQDILNGLFKGGVCYANSRFNFMPTNDAFMANRFASRHTDPLYRDRTYTAMPVAVSHYCGPAKPWHRDCTAWGAERFTELAGSLTSVPEEWRGKLAVPHRVFPTKRMLQRWRRKLSARFLRKIY

SEQ ID NO: 13900 - protein, 248 aa, Neisseria meningitidis
MMSEHRVNHEPVFLLASSPWRESSLRVEAFSRRYGRVALLARSARKRQSELRGVLVSFVPVSASWYGSQELKTLHRAEWVGGWRQPQGRALFSGLYVNELVLKLTAREDPMPELYDALAKVMEAVCREANHIADLRRFEWKLLNALGVAPDLHADGTGGDILADKTYRLMPEEAVMPVCRDTDALSHEAGAIVEGQSLIDLREGSFRTAESLQQALKITRLFIRHLLPEGLKSRQVLEQIRQFDRNTA

SEQ ID NO: 13901 - protein, 141 aa, Neisseria meningitidis; identical to SEQ ID NO: 3955

SEQ ID NO: 13902 - protein, 91 aa, Neisseria meningitidis; identical to SEQ ID NO: 3956

SEQ ID NO: 13903 - protein, 465 aa, Neisseria meningitidis; identical to SEQ ID NO: 3957

SEQ ID NO: 13904 - protein, 677 aa, Neisseria meningitidis
MKLEASKQEQKFKKSFIISLFFSILYTSPLLAVDYVYDNSKLTNEQIDRLKKLRDKSSEYWKQETYLLKPTNGSSQNSLKVPALYSKTHQFKNINNSKKISFYDKEYTEDYLVGFARGFGVEKRNGEEEKTLQQYFKDCVNTGNSNNDKCEQPSFENSGPRLIKSDIFALAPQIKNSHINSEILSVGNYIEWLRPTLNKLPSWQEHLYSGLDPFHYIEVTDNSHVIGQTISLDEFRLENSLWEPRWDSDVGELKTTNADIRFNTKSESLLVKEDYAGGARFRFAYDLKDKVSETPVLTFEKNITGTSDIIFENPIDDLKSLDGHQIIKVNGTADKHAFRLSGKHQKGIYTLSLQQRPEGFFTKVQERDDISIYAQQAQAANTLFALRLNDKNSDIFDRTLPRKGLWLRVIDGHSNQWVQGKTAPVEGYRKGVQLGGEVFTWQNESNQLSVGLMSGQAEQRSTFRNPDTDNLTTGNVKGFGAGIYATWHQLQDKQTGAYADSWVQYQRFRHRINTEDATERFTSKGITASIEAGYNALLAEHFTKKGNSLRVYLQPQAQLTYLGVNGKFSDSENAHVNLLGSRQLQTRVGVQAKAQFSLYKNIAIEPFAAVNALYHNKPFGVEIDGERRVINNKTAIESQLGVAVKIKSHLTLQASFNRQTSKYHQAKQGALNLQWTF

SEQ ID NO: 13905 - protein, 706 aa, Neisseria meningitidis
MTLKASKQASKQASKQASKQASKQASSRVNLLTLSVLSLFCTPYVGSDAYDPVKEAEIKNKFILEAAEDRNSHVWRGPCSISFDCFGMFRAQLGSNTRSTKIGDDADFSFSDKPKPGTSHYFSSGKTDQNSSEYGYDEINIQGKNYNSGILAVDNMPVVKKYITDTYGDNLKDAVKKQLQDLYKTRPEAWEENKKRTEEAYIEQLGPKFSILKQKNPDLINKLVEDSVLTPHSNTSQTSLNNIFNKKLHVKIENKSHVAGQVLELTKMTLKDSLWEPRRHSDIHTLETSDNARIRLNTKDEKLTVHKAYQGGADFLFGYDVRESDEPALTFEQNVSGKSNVVLERRPENLKTLDGRKLIAAEKADPNSFAFKQNYRQGLYELLLKQCEGGFCLGVQRLAIPEAEAVLYAQQAYAANTLFGLRAADRGGDVYAADPSRQKLWLRFIGGRSHQNIRGGAAADGRRKGVQIGGEVFVRQNEGSRLAIGVMGGRAGQHASVNGKGGAAGSYLHGYGGGVYAAWHQLRDKQTGAYLDGWLQYQRFKHRINDENRAERYKTKGWTASVEGGYNTLVAEGVVGKGNNVRFYLQPQAQFTYLGVNGGFTDSEGTAVGLLGSGQWQSRAGIRAKTRFALRNGVNLQPFAAFNVLHRSKSFGVEMDGEKQTLAGRTALEGRFGIEAGWKGHMSARIGYGKRTDGDKEAALSLKWLF

SEQ ID NO: 13906 - protein, 433 aa, Neisseria meningitidis
MTESVRLPVARLKPSTVALPGSKSISNRTLLLAALSDNACEIHSLLKSDDTDRMLEALDKLGVQIEYLAEDRLKVHGTGGRFPNRTADLFLGNAGTAFRPLTAALAVLGGDYHLHGVPRMHERPIGDLVDALRIAGTDVEYLGNEHYPPLHIGERQDNGEHVIPIKGNVSSQFLTALLMALPLTGQAFEIRMVGELISKPYIDITLKLMAQFGVQVINEGYRVFKIPADARYHAPEHLHVEGDASSASYFLAAGLIAATPVRVTGIGANSIQGDVAFARELEKIGADVVWGENFVEVSRPKERAVQAFDLDANHIPDAAMTLAIVALATGQTCTLRNIGSWRVKETDRIAAMANELRKLGAKVVEEAEAIHITPPKTLTPDAVIDTYDDHRMAMCFSLVSLLGVPVVINDPKCTHKTFPTYFDVFSSLTETTE

SEQ ID NO: 13907 - protein, 758 aa, Neisseria meningitidis
MTTLHFSGFPRVGAFRELKFAQEKYWRKEISEQELLAVAKDLREKNWKHQAAANADYVAAGDFTFYDHILDLQVATGAIPARFGFDSQNLSLEQFFQLARGNKDQFAIEMTKWFDTNYHYLVPEFHANTEFKANAKHYVQQLQEAQALGLKAKPTVVGPLTFLWVGKEKGAVEFDRLSLLPKLLPVYVEILTALVEAGAEWIQIDEPALTVDLPKEWVEAYKDVYATLSKVSAKILLSTYFGSVAEHAALLKSLPVDGLHIDLVRAPEQLDAFADYDKVLSAGIIDGRNIWRANLNKVLETVEPLQAKLGDRLWISSSCSLLHTPFDLSVEEKLKANKPDLYSWLAFTLQKTQELRVLKAALNEGRDSVAEELAASQAAADSRANSSEIHRADVAKRLADLPANADQRKSPFADRIKAQQAWLNLPLLPTTNIGSFPQTTEIRQARAAFKKGELSAADYEAAMKKEIALVVEEQEKLDLDVLVHGEAERNDMVEYFGELLSGFAFTQYGWVQSYGSRCVKPPIIFGDVSRPEAMTVAWSTYAQSLTKRPMKGMLTGPVTILQWSFVRNDIPRSTVCKQIALALNDEVLDLEKAGIKVIQIDEPAIREGLPLKRADWDAYLNWAGESFRLSSAGCEDSTQIHTHMCYSEFNDILPAIAAMDADVITIETSRSDMELLTAFGEFKYPNDIGPGVYDIHSPRVPTEAEVEHLLRKAIEVVPVERLWVNPDCGLKTRGWKETLEQLQVMMNVTHKLRAELAK

SEQ ID NO: 13908 - protein, 398 aa, Neisseria meningitidis; identical to SEQ ID NO: 5408

SEQ ID NO: 13909 - protein, 626 aa, Neisseria meningitidis
MPYFALFDDAVSGRAKRYQNHVESRFFRPEELDALDGALQSGWQKGLHAVLFADYGFGLPLTGVESERGGNLALHWFADCADTDAASWLARHSDGLPAGISTPQSSVSEADYLDHIRQIHEAIRRGDTYQINYTTRLHLQAYGNPVSLYRRLRQPVPYAVLSHLPDAEGQSAWTLCFSPELFLNIASDGTISTEPMKGTAPILGDGQDERRAAELQADPKNRAENVMIVDLLRNDLGKIAQIGKVCVPEPFKVSRFGSVWQMTSTIQAQALPDTSFADILRAAFPCGSITGAPKKMSMQIIESLETEARGLYTGSIGYLNPCSGGLGFEGTFNVVIRTLSLKPVSASDGIVSGIGGPDSNAQARTAGQGGATPHPFDSNPPYRGVYGVGSGIVIDSDPAAEYRECGWKARFLNELRPDFGIFETLRAENGRCTLLDRHLCRLKTSAQALNLPLPDGCENQIKQYIAHLPDGAFRVKALLASDGISLSRAVLNRLTDKQRVIISPAVLPAQNYLRRFKTTCRTVFDQAWQTAETQGAFDSLFFNSDGILLEGGRSNVFIKHRGQWLTPSLDLDILNGIMRQAVLDEPQKYLQTNQVIETHITQKTLQEAEEIRLSNALRGVFAAALA

SEQ ID NO: 13910 - protein, 129 aa, Neisseria meningitidis
MSKTIIHTDKAPAAIGAYSQAVRAGDTVYMSGQIPLDPATMTVVGNGDFRAEARQVFQNLQAVAEAAGGTLADIVKLNAYLTDLGNFAVFNEVMAEFIAEPFPARAAVGVATLPKGVQVEAEAVLVLNA

SEQ ID NO: 13911 - protein, 318 aa, Neisseria meningitidis
MNIIGLDISKDTIDATLHKTNGSIHYIKFKNNDDGLKQFRLWIKGNRIRKAYIGMEATGIYYEKAADMLSSYYTVYVINPLKIKDYGKSRFNRTKTDKADSNLIADYIKRHQDTLIPYQIPKNKALQKLINLKNQLQQHQKQIKNRLHSTEEDFIRNIHQDLIDTIQDKMEQVKIAISEQIKKQTDNNHYRNLQTIPSIGKDTASVLYAQLTEKHFKTANQFVSYAGLSPAIMQSGTSVRGRGRLSRYGNRRLKSTLYMPALCAYRFNAFPKLINNLKKAGKPKMVIIVAIMRKLAKLAYYIVKTGQPYDAERHRLNQ

SEQ ID NO: 13912 - protein, 78 aa, Neisseria meningitidis; identical to SEQ ID NO: 1011

SEQ ID NO: 13913 - protein, 614 aa, Neisseria meningitidis; identical to SEQ ID NO: 3083

SEQ ID NO: 13914 - protein, 419 aa, Neisseria meningitidis
MSMALAQKLAADSIAAVAEGRNLQDVLAQIRTAHPDLTAQENGALQDIAYGCQRYLGSLKHMLAQMLKKPIDNPQLESLLLAALYQLHYTRNAPHAVVNEAVESIAKIGRGQYRSFANAVLRRFLRERDKLAASCKKDDVAKHNLPLWWVAYLKNHYPKHWHNIAAALQSHPPMTLRVNRRHGNAESYLEKLVAEGIAAKALDEYAVTLEEAVPVNRLPGFSDGIVSVQDFGAQQAAYLLNPKDGERILDACAAPGGKTGHILELADCRVTALDIDAGRLKRVEDNIARLGFQTASAACADARDLAAWYDGKPFDAILADVPCTASGVARRNPDVKWLRRPTDALKTARQQEALLDALWQTLKQGGRMLLATCSVFVEENDGQLQKFLNRHADAEPIESRVLLPNKHQDGFYYALIQKH

SEQ ID NO: 13915 - protein, 741 aa, Neisseria meningitidis
MTQKSTIVYTHTDEAPALATQSLLPIVQAFTRHADIDVKTADISLSGRILAAFPEYLTEAQRVPDALAELGELVKQPDANVIKLPNISASVPQLTAAIKELQSKGFAVPDYPADPQTDEEKAVRERYDRIKGSAVNPVLREGNSDRRAPKAVKNFAKKNPHSMGAWTKDSKTHVATMQSGDFFHNEQSVTVPEATSVSIVFTDKQGNKKELRAPVALKAGEIIDATVMSKKALLAFLAEQVKDAKAKGVLFSLHMKATMMKVSDPIIFGHAVKVFFAPVFEKFGDKLAAAGVNVNNGFGNLLANLDKLDADTRTAVEAEIAAVYAANPDLAMVDSDKGITNLHVPSDVIVDASMPAMIRNSGRMWDKDGKAQDTKAVIPDSSYAGVYQATIDFCREHGAFDPTTMGTVPNVGLMAQAAEEYGSHNKTFEIEADGQVQVIDAAGKVLMQHDVEAGDIWRMCQTKDAPVKDWVQLAVNRARLSNTPAVFWLDENRPHDKSLLAKVKAYLAELDTNGLDIRVLAPEEAAKFSLGRLKNGEDTISVTGNVLRDYLTDLFPILELGTSAKMLSIVPLMNGGGMFETGAGGSAPKHVQQFLEENHLRWDSLGEFLALAVSFEHLAQKTGNAKAQVLADTLDAATEKLLLNDKSPKRKAGELDNRGSHFYLTLYWAQELAAQDKDAELKAAFTPLAAALTADEAKIVAELSAVQGKAADIGGYYAANPEKAAQVMRPSVTFNQALNAL

SEQ ID NO: 13916 - protein, 249 aa, Neisseria meningitidis; identical to SEQ ID NO: 131

SEQ ID NO: 13917 - protein, 384 aa, Neisseria meningitidis
MSIHLDFGISPKTFRQTYLYQKPKLFKGAARNLEAASWKDINEIYQRADPTAPLFYLRKKGAIVPKEEYVESFDALGKTRYRFIKSVIYEHMKNGASLVYNHINNEPFSDHISRQVARFAGAHTIVSGYLAFGSDESYKNHWDTRDVYAIQLFGKKRWQLTAPDFPMPLYMQQTKDTDISIPEHIDMDIILEAGDVLYIPRGWWHRPIPLGCETFHFAVGTFPPNGYNYLEWLMKKFPTIESLRHSFSDWEQDRTRINDTAAQIAAMIADPVNYEAFSEDFLGKERTDTAFHLEQFANPNATLLSDDVRLRLNANNLDTLEKGYLIGNGMKISVDELGKKVLEHIGKNEPLLLKNLLVNFNQGKYEEVRKLIYQLIELDFLEIL

SEQ ID NO: 13918 - protein, 52 aa, Neisseria meningitidis; identical to SEQ ID NO: 6488

SEQ ID NO: 13919 - protein, 343 aa, Neisseria meningitidis; identical to SEQ ID NO: 614

SEQ ID NO: 13920 - protein, 1491 aa, Neisseria meningitidis
MRFTHTIPFYSVLSTLGLFAVSPAYSSIVRSDVDYQYFRDFAENKGAFAVGASNISIQDKQGKILGRVLSGIPMPDFRVSNRQTAIATLVHPQYVNSVKHNVGYGSIQFGNDTQNPEEQAYTYRLVSRNPHPDYDYHLPRLNKLVTEISPAALSSVPLLGNGQPKANAYLDTDRFPYFVRLGSGTQQVRKADGTRTQTAPAYQYLTGGTPLKVLGFQNHGLLVGDSLTDQPLNTYAVAGDSGSPLFAFDKHENRWVLAGVLSTYAGFDSFFNKYIVTQPEFIRSTIRQYETRLDVGLTTNELIWRDNGNGDSTLQGLNERITLPIANPSLAPQNDSRHMPSEDAGKTLILSSRFDNKTLMLADNINQGAGALQFDSNFTVVGKNHTWQGAGVIVADGKRVFWQVSNPKGDRLSKLGAGTLIANGQGINQGDISIGEGTVVLAQKAASDGSKQAFNQVGITSGRGTAVLADSQQIKSENLYFGFRGGRLDLNGNNLAFTHIRHADGGAQIVNHNPDQAATLTLTGNPVLSPEHVEWVQWGNRPQGNAAVYEYINPHRNRRTDYFILKPGGNPREFFPLNMENSTSWQFIGNNRQQAAKQVAQAENARPDLITFGGYLGENAQTGKAAPSYSKTNIEWVNSPNTPHKPSPYTNTPTRTGAGVPTITASKKAATPAPTSHGMPTAPKTGNFSDITGEAAIEKTRHIANAAVYGRPEYRYNGALNLHYRPKRTDSTLLLNGGMNLNGEVLIEGGNMIVSGRPVPHAYDHQAKREPVLENEWTDGSFKAARFTLRNHARLTAGRNTAHLDGDITAYNLSGIDLGFIQGKTPECYRSYHSGSTHCTPNAVLKAENYRALPATQVRGDITLNDRSELRLGKAHLYGSIRAGKDTAVRMEADSNWTLSQSSHTGALTLDGAQITLNPDFANNTHNNRFNTLTVNGTLDGFGTFRFLTGIVRKQNAPPLKLERDSRGAFQIHVKNTGQEPQTTESLALVSLNPKHSHQARFTLQNGYADLGAYRYILRKNNNGYSLYNPLKEAELQIEATRAEHERNQQAYNQLQATDISRQVQHDSDATRQALQAWQNSQTELARIDSQVQYLSAQLKQTDPLTGILTRAQNLCAAQGYSVDICRQVAKAADTNDLTLFETELDTYIERVEMAESELDKARQGGDAQAVETARHAYLNALNRLSRQIHSLKTGVAGIRMPNLAELISRSANTAVSEQAAYNTGRQQAGRRIDRHLTDPQQQNIWLETGTQQTDYHSGTHRPYQQTTNYAHIGIQTGITDRLSVGTILTDERTNNRFDEGVSARNRSNGAHLFVKGENGALFAAADLGYSNSRTRFTDYDGAAVRRHAWDAGINTGIKIDTGINLRPYAGIRINRSNGNRYVLDGAEINSPAQIQTTWHAGIRLDKTVELGQAKLTPAFSSDYYHTRQNSGSALSVNDRTLLQQAAHGTLHTLQIDAGYKGWNAKLHAAYGKDSNTARHKQAGIKIGYNW

SEQ ID NO: 13921 - protein, 349 aa, Neisseria meningitidis; identical to SEQ ID NO: 6518

SEQ ID NO: 13922 - protein, 150 aa, Neisseria meningitidis
  misc_feature 3, 4: 'Xaa' is any amino acid
VCXXDTTTNTKIDTKHLPSTCRDAASAVCTKTPEYYPNHGEWPSDNSAAGVASSSTIKGKYVEKVEVKNGVITAEMKSSGVNKEIQGKKLSLWAKRQDGSVKWFCGQPVTRNAANAKAGTDEVTAATPDTDKINTKHLPSTAPTRKSTPN

SEQ ID NO: 13923 - protein, 285 aa, Neisseria meningitidis
MNYALDALWWKLTSQPVRDLASLLTAPPLWQSGCELSVRELLGEHGFRYLLALDADPTRLTDYLAQRAPFGHRLGIYAEELLAFWFANAPHAELLAHNLTVSGSDGNTQGAADFVARLNGKPYHIELTCKYYGGDTDSPEGMRGFDPKDTLLGKAAKLTAQLGLPHTSDGIRTLRQHGLPLNVKPVSIVRGIGFFPHGFHAFEPPLNPYGWRGIYIQDWAEYGFKRQEVRYHLLDRMAYLAPARVAETETLNATEIRRIDQGLIAVLECRPDGFWHEIERIMKAV

SEQ ID NO: 13924 - protein, 296 aa, Neisseria meningitidis
MNPKSPLFLRLSDRLDVYLRLMRADKPIGALLLLWPTYWALWLASDGIPDLAVLAAFTIGTFLMRSAGCVINDFADRDFDGAVERTKNRPFAQGRVKKKEALLLTAFLCLLAALCLIPLNHLTWLMSLPALFLALTYPFTKRFFPIPQLYLGLAFSFGIPMAFAAVAGNVPPQAWILFAANVLWTLAYDTVYAMADKEDDLKIGIKTSAVTFGRYDIAAVMLCHGGFTLLMAVLGVVIGAAWAYWTAIPIVLLLQYRQYAAIKSRVRQICFETFLANNRIGWVWFTAIFAHTFFAK

SEQ ID NO: 13925 - protein, 477 aa, Neisseria meningitidis; identical to SEQ ID NO: 3214

SEQ ID NO: 13926 - protein, 257 aa, Neisseria meningitidis; identical to SEQ ID NO: 780

SEQ ID NO: 13927 - protein, 237 aa, Neisseria meningitidis
LRRQFAASDACRTGLKEGEIMGLGMEIGKLIVAFLVLINPFSALSLYLDLTNGHSTKERRKVARTAAVAVFAVIAVFALIGGTLLKVLGISVGSFQVGGGILVLLIAISMMNGNDNPAKQNLGAQPETGQVRPARNAGAIAVVPIAIPITIGPGGISTVIIYASAAKTYGDIALIIAAGLVVSAICYAILIVAGKVSRLLGATGLTILNRIMGMMLAAVSVEIIVSGLKTIFPQLAG

SEQ ID NO: 13928 - protein, 55 aa, Neisseria meningitidis
VPEQARARPIQTAMTLCRRFGAGWRHTRRLPRFISHHSSETRNPPGPTCGMKRLS

SEQ ID NO: 13929 - protein, 223 aa, Neisseria meningitidis
MTTQDELKRIAAEKAVEFVPENEYIGIGTGSTINFFIEALGKSGKKIKGAVSTSKKSSELLAQYDIPVVSLNEVSGLAVYIDGADEVNHALQMIKGGGGAHLNEKIVASASEKFICIADESKYVSRLGKFPLPVEVVESARSLVSRKLLAMGGQPELRIGYTTFYGNQIVDVHGLNIDQPLTMEDEINKITGVLENGIFARDAADVLILGTEEGAKVIYPCQG

SEQ ID NO: 13930 - protein, 737 aa, Neisseria meningitidis
MTAISPIQDTQSATLQELREWFDSYCAALPDNDKNLIGTAWLLAQEHYPADAATPYGEPLPDHFLGAAQMVHELDLLPDAVAATLLADIGRYVPDWNLLVSERCNSTVAELVKGVDEVQKLTHFARVDSLATPEERAQQAETMRKMLLAMVTDIRVVLIKLAMRTRTLQFLSNAPDSPEKRAVAKETLDIFAPLANRLGVWQLKWQLEDLGFRHQKPEKYREIALLLDEKRTERLEYIENFLNILRGELKKYNVHFEVAGRPKHIYSIYKKMVKKKLSFDGLFDIRAVRILVDTVPECYTTLGIVHSLWQPIPGEFDDYIANPKGNGYKSLHTVIVGPEDKGVEVQIRTFDMHQFNEFGVAAHWRYKEGGKGDSAYEQKIAWLRQLLDWRENMAESGKEDLAAAFKTELFNDTIYVLTPHGKVLSLPTGATPIDFAYALHSSIGDRCRGAKVEGQIVPLSTPLENGQRVEIITAKEGHPSVNWLYEGWVKSGKAISKIRAYIRQQNADTVREEGRVQIDKQLAKLTPKPNLQELAENLGFKKLDDLYTAVGQGEISNRAIQKACGTLNEPPPVPVSETTIVKQSKIKKGGKNGVLIDGEDGLMTTLAKCCKPAPPDDIVGFVTRDRGISVHRKTCPSFRHLAEQAPEKVLDASWAALQEGQVFAVDIEIRAQDRSGLLRDVSDALARHKLNVTAVQTQSRDLEASMRFTLEVKQVTDLPRVLASLGDVKGVLSVTRL

SEQ ID NO: 13931 - protein, 1457 aa, Neisseria meningitidis; identical to SEQ ID NO: 6987

SEQ ID NO: 13932 - protein, 124 aa, Neisseria meningitidis; identical to SEQ ID NO: 7194

SEQ ID NO: 13933 - protein, 269 aa, Neisseria meningitidis
LNARENVMNPKIVFFDIDDTLYRKYTDTLRPSVKTAVAALRGKGILTALATGRSLATIPEKVRDMMAEAGMDAVVTINGQFALLHGKTVREVPMDAGLMGRVCAHLDGLGMDYAFVGGEGIAVSALSECVCRALKHIASDFFADKDYFSSKPVYQMLVFAEENEMPLWSDIVEREGLKTVRWHEEAVDLLPAGASKTDGIRSVVEALGWEMADVMAFGDGLNDVEMLSEVGFGVAMGNGEQAAKEAAKYVCPSVDEDGVLRGLQDLGVI

SEQ ID NO: 13934 - protein, 311 aa, Neisseria meningitidis
MKANMDIETFLAGERAAGGYRCGFVAIVGRPNVGKSTLMNHLIGQKISITSKKAQTTRNRVTGIYTDDTAQFVFVDTPGFQTDHRNALNDRLNQNVTEALGGVDVVVFVVEAMRFTDADRVVLKQLPKHTPVILVVNKIDKDKAKDRYALEAFVAQVRAEFEFAAAEAVSAKHGLRIANLLELLKPYLPESVPMYPEDMVTDKSARFLAMEIVREKLFRYLGEELPYAMNVEVEQFEEEDGLNRIYIAVLVDKESQKAILIGKGGERLKKISTEARLDMEKLFDTKVFLKVWVKVKSGWADDIRFLRELGL

SEQ ID NO: 13935 - protein, 371 aa, Neisseria meningitidis
MKVGFVGWRGMVGSVLMQRMKEENDFAHIPEAFFFTTSNVGGAAPDFGQAAKTLLDANDVAELAKMDIIVTCQGGDYTKSVFQPLRDSGWNGYWVDAASSLRMKDDAIIVLDPVNRNVIDNGLKNGVKNYIGGNCTVSLMLMALGGLFQNDLVEWATSMTYQAASGAGAKNMRELISGMGAVHAQVADELADPAGSILDIDRKVSDFLRSEDYPKANFGVPLAGSLIPWIDVDLGNGQSKEEWKGGVETNKILGRSDNPTVIDGLCVRIGSMRCHSQALTLKLKKDLPVSEIEAILAGANDWVKVIPNEKEASIHELTPAKVTGTLSVPVGRIRKLEMGGEYISAFTVGDQLLWGAAEPLRRVLRIVLGSL

SEQ ID NO: 13936 - protein, 407 aa, Neisseria meningitidis
VGRRKLWFALAAAGVIGGLVGIVLTELMHFIQHTAYGYGADGAYISFREGVARASEGRRLGVLILCGMLAGGGWWLLKRFGKPQIEIKAALKQPLQGLPFLTTVFHVLLQIITVGLGSPLGREVAPREMTAAFAFAGGRRLGLDEDEMRLLIACASGAGLAAVYNVPLASTLFILEAMLGVWTQQAVAAALLTSVIATAVARIGLGDVQQYHPANLTVNTSLLWFSAVIGPILGVAAVFFQRTAQKFPFIKRDNIKIIPLAVCMFALIGVISVWFPEILGNGKAGNQLTFGGLTDWQHSLGLTAVKWLVVLMALAVGAYGGLITPSMMLGSTIAFAAATAWNSVFPEMSSESAAIVGAAVFLGVSLKMPLTAIAFILELTYAPVALLMPLCTGMAGAVWVAKKMGFK

SEQ ID NO: 13937 - protein, 808 aa, Neisseria meningitidis
MSAQTDPGYFFMPNHIILIGASERPYSLGERVLSNLLSTPFQGKITPVNPRHHTIAGLPAYTSLNKIPGNADLIIAVTLPDSYDTLFKTCRKKQLRHIILIQDWDSLSAAELHTAETAIRKHHGNGLNITACTTAGIQLPSLGLNISTQDGYAAGHTAILTGNAAVSRQIDNILNKLRQGTSRHISLHPGISPITSADWLNRFGHSLHTKTAVLHHNPEEDQRKLFSAIRQFTRHTPLILHITCRTTETDRAVLHCLARHCNFLISFNADDLEAALRAQLSDLPPLSRLDILSDTPAEWLNAHAPKTLALHFPNLPHHIRNGHLTGTPTPSICHDIASRQLARPDTQAVLTILSPSGHEDYKKTARALIRLSEQTAKPLLVSSPFSDGITHFDTPTQAIRTLSYRNTAAALKQAQLDIAPPQPCRLKTPQPQNIKKALEAADPALLAEALHLPPYRHTTHNAVQFQFDSHPIYGNILTVRYAGQTTAALPPFTTQDSLHIAQFAELEDPQTLNQFLHILTTLSDHNLHIGKIILNLNGGQYNTDFDLKAPETQNAPGRKTTSKTVQTLEHAAAKMQSAAQYLKHKNPTAAEFLRHTSEAAAELLGSKTETGAAVPNVLPPYPEAHPKTLSLKNDTTVTITPLLPEDAEAKQQFVRSLSPEARYTRFMTHTNELPAATLARLCNPDYHCEAAWTAKDADSNIVAVVRHSRLNRNECEFGITLAEHMRGSGLAQKMMELIIQTAAQQGYRTMSADILKTNTPMIKLAEKSGFTLKESDTEKNLYRAYLNLAADKTTEKTNKNLHTDHKIT

SEQ ID NO: 13938 - protein, 713 aa, Neisseria meningitidis
MNNPLVNQAAMVLPVFLLSACLGGGGSFDLDSVDTEAPRPAPKYQDVFSEKPKAQKDQGGYGFAMRLKRRNWYPRAEESEVKLNESDWEATGLPTDPKELPKRQKSVIEQVKTDDNSNIYSSPYLTPSNHQNGNAGNATNQPKNEVKDYKEFKYVYSGWFYKHAKQDIDSKNKIVRQGDDGYIFYHGKEPSRQLPASGKVTYKGVWHFVTDTKKGQEFREIIQPSKKQGDRYSGFSGDDNEEYSNKKETILQNGHEGYGFTSNLEVDFGNKKLTGKLIRNNASLNNNTNNDKHTTQYYSLEAQVTGNRFNGKAIATDKPKANETKEHPFVSDSSSLSGGFFGPQGEELGFRFLSNDQKVAVVGSAKTKDKLENGAAASGSTGAAASNGAAGTSSENSKLTTVLDAVELKLGDKEVQKLDNFSNAAQLVVDGIMIPLLPKASESGNNQANQGTNGGTAFTYKTTYTLESDKKDTQAQTVTNGTQTASGTESVNGGQAGTKTYEVEVCCSNLNYLKYGLLTRKTAGNTGEGGNSSPTAAQTAQGAQSMFLQGERTDENKIPTDQNVVYRGSWYGHIANGTSWSGNASDKEGGNRAEFTVNFDKKKINGTLTADNRQAATFTIEGDIEGNGFSGTAKTADSGFDLDQSNNTRTPKAYITNAKVQGGFYGPKAEELGGWFAYSDDKQTKNATDASGNGNSASSATVVFGAKRQQPVR

SEQ ID NO: 13939 - protein, 273 aa, Neisseria meningitidis
MKPYSANPNLTEPRRLRVLLIAAALGFLLLMLVVPLVAVFYEALKGGWDLYLKSLNDPEAWSAIKLTLITALIVVPVNAVLGVAMAWLLTRFDFRGKQLLTTLLDLPFSVSPVVAGLMFVLLFGAHTALGGWLEAQGIQIIFAIPGIILATLFVTFPFVAREIIPLMQAQGDSEEQAALILGASGWQMFWRVTLPNIKWALLYGIILTNARAMGEFGAVSVVSGHIRGETNTVPLLVEIFYNEYNFTGAFALSGVLALLALATLAVQNIITKL

SEQ ID NO: 13940 - protein, 413 aa, Neisseria meningitidis
MQKWQTELYSTPLWLLQTLLIVSAASAVILFLTRKTRCGREFAYILRLCLTPKSAVKVLLLITAMVTLMLTEVRLNVLSTFMSKGLYDSMQDLNASAFWMFAAMNAGVVLIRAFNNVVNDFLDQGLAIKWSERLNEVLTTRWLADKNYYRLQMRRHAPDNIDQRIQQDAQEFIASTIEFVRGMVNSVVTSLEFAVVLWGLAGILTVFGFDIPHGIVWFVYIFVILATFIAMWIGNPLIRYNYENEKLNGDYRYSLIRVRDHAESVAFYNGEQHEHGRLSDRFKAIIRNRWRIARQSVCLSGFNDMFTNGIKLFPIILQAPRLFAGQIKIGDIQQTVQAFARLQNALSFFRMFYNKFTAYRARLERLYGFLLSTEEQHSARQPEISEVSDGIALECKAAAAFARIGGSFCTAEA

SEQ ID NO: 13941 - protein, 91 aa, Neisseria meningitidis; identical to SEQ ID NO: 4054

SEQ ID NO: 13942 - protein, 478 aa, Neisseria meningitidis
LENSLIIGLALAVLLMLLVMRAKQGKKTPKRKSQGVGNTQGQTPGSNDSDWVDQIGQSVSDGTQPDWSWNESAETASAAVSAQEVDPLTEYQVYKQFGYQGKAAESLAAYLDGIPDGEAKPENLIRELLDINLEVGDVDVLADNLQKYGKLIPSELLAKYIEQALQRDSNHLRIRVLAEEGLGWGTQEIEKRAEGGSATAASASPPPDAGGKAYEAEEIKRIPIVRGKKDVSGISQEEIGAIAGLVRADQGAKILKDKVSYETASKQYDRAIQTSEKPANLIIDALKLDYQYADIDRFAGHLWKLYQTLGNYGRQVKERMLGWGYSLGYHEVFDDLEKGPNDRQIKDIGMGHGYLPKNIQKFKSQHRDLVLQDSSLINTGSSPADDAVKEVESLLMYGQIEAAMDVLEQAVLKYPDESQLYITLIDIYERTEDWDRLGQFLRVLRERADRLPEEVVMLMSRLLQRMNQNIKKIKRYGK

SEQ ID NO: 13943 - protein, 130 aa, Neisseria meningitidis; identical to SEQ ID NO: 4345

SEQ ID NO: 13944 - protein, 165 aa, Neisseria meningitidis
MPSESFRAETAAMKPQKSLRARAMDILSRQEVSRIGLKRKLAPHAESEEELENVLNEFAERNWQSDLRYAEAYIRSKSRKHGSLRLKQALAQQGIDEETSRNLLPDRSSEKQAAIAVLRKKFKHPAADLKEKQKQARFLAYRGFDADTVQTALKHAWDENWEDGC

SEQ ID NO: 13945 - protein, 278 aa, Neisseria meningitidis
MLALKTPGVLPGFKLSLGLTVLCLSLLVVLPFAMMAAKAAEIGWSGFWNTITEPNVLAAVWLSLRMSFYAMLTNVVFGTLVAWVLVRYEFPGKGLANALVDLPFALPTAVTGIALATLYAPNGWIGRFFEPLGIKIAFTPVGIWIALVVVSLPFIVRAVQPVLEELSGEYEEAAATLGANRFTTFRRVLLPEITPALLTGAGMMFARATGEYGSVIFIAGNIPMVSEILPLIITGKLEQFDVQGASAVALFMLLVSFVILFALNVMQWALGRRSGAKG

SEQ ID NO: 13946 - protein, 215 aa, Neisseria meningitidis
MKTKFYNHQGGHLILYFAGWGTPPDAVNHLILPENHDLLICYDYQDLNLDFDFSAYRHIRLVAWSMGVWAAERALQGIRLKSATAVNGTGLPCDDNFGIPCAVFKGTLENLTGNTRLKFERRMCGDKASFEDYQQFSARPFDEIHQELTALFAMIGQDRRADLIRWTNALVGSGDKIFMPANQYRYWTARCTVREIDGGHYLFSRFTHWSALWNH

SEQ ID NO: 13947 - protein, 751 aa, Neisseria meningitidis
MGQYKKLWYLLFAVLAVCFTILGYMGSEVYKKAPPYPEQVVSASGKVLMTKDDILAGQSAWQSTGGMEVGSILGHGAYQAPDWTADWLHRELSAWLDLTAQQTYGKKFDEVSPEEQAVLKTRLADEYRNQSRIKEDGSVVISDTRVKAIESILPYYHGVYGDDPALQTTREHFAMKNNTLPSQEAREKLFDFFFWTSWSASTNRPDETFTYTNNWPHEPLINNVPTTENYMWSFTSVVLLLMGIGLLMWGYSFLTKHEEVEVPSEDPISKIQLTPSQKALGKYVFLTVALFVVQVLLGGLTAHYTVEGQGFYGIDEALGFEMSDWFPYALTRTWHIQSAIFWIATGFLTAGLFLAPIVNGGKDPKFQRAGVNFLYIALFIVVGGSYAGNFFALTHILPPELNFWFGHQGYEYLDLGRFWQLLLMVGLLLWLFLMLRCTVSAFKEKGVDKNLLAIFVASMVGVGVFYAPGLFYGEKSPIAVMEYWRWWVVHLWVEGFFEVFATAAFAFVFYNMGFVRRSTATASTLAAAAIFMLGGVPGTLHHLYFSGSTSASMAIGACFSALEVVPLVLLGREAYEHWSYQHLSDWAKRLRWPLMCFVAVAFWNMIGAGVFGFLINPPISLFYIQGLNTSAVHAHAALFGVYGFLALGFVLLVARYLKPNAQFDDKLMTWGFWLLNGGLVGMIAISLLPVGAIQAYASITHGLWYARSEEFLQMEILDTLRWVRTAADLVFIGGAICVAIQATKIVFGRDK

SEQ ID NO: 13948 - protein, 299 aa, Neisseria meningitidis
MKTNSEELTVFVQVVESGSFSRAAEQLAMANSAVSRIVKRLEEKLGVNLLNRTTRQLSLTEEGAQYFRRAQRILQEMAAAETEMLAVHEIPQGVLRVDSAIPMVLHLLAPLAAKFNERYPHIRLSLVSSEGYINLIERKVDIALRAGELDDSGLRARHLFDSRFRVIASPEYLAKHGTPQSTEELAGHQCLGFTEPGSLNTWAVLDAQGNPYKISPHFTASSGEILRSLCLSGCGIACLSDFLVDNDIAEGKLIPLLAEQTSNKTHPFNAVYYSDKAVNLRLRVFLDFLVEELGNNLCG

SEQ ID NO: 13949 - protein, 100 aa, Neisseria meningitidis; identical to SEQ ID NO: 3521

SEQ ID NO: 13950 - protein, 218 aa, Neisseria meningitidis; identical to SEQ ID NO: 5912

SEQ ID NO: 13951 - protein, 222 aa, Neisseria meningitidis; identical to SEQ ID NO: 6339

SEQ ID NO: 13952 - protein, 95 aa, Neisseria meningitidis
MDDLIAAFLGYLSGKYSEGKISRLEISLTAGSTFFAVFFIHELIIFIVDGNKENLWNFITGIMKDLFLFSCSVCLLFYFLLFIAETIGKTINKIK

SEQ ID NO: 13953 - protein, 201 aa, Neisseria meningitidis
LNTLYLGSNSPRRMEILTQLGYRVVKLPADIDETVRQNEDPARYVQRMAEEKNRTALTLFCETNGTMPDFPLITADTCVVSDGIILGKPHSQAEAIEFLNRLSGKQHTVLTAVCIHYRGNAENRVQTNRVVFKPLSSEEISAYVQSGEPMDKAGAYAVQGIGGIFIQSIGGSFSGIMGLPVYETVSMLQDLGYRTPPFIRA

SEQ ID NO: 13954 - protein, 259 aa, Neisseria meningitidis; identical to SEQ ID NO: 2706

SEQ ID NO: 13955 - protein, 231 aa, Neisseria meningitidis
MKAMILAAGRGERMRPLTDTTPKPLLDVAGKPLIGWHLCRLKQAGFTEIVINHAWLGRQIEDALGDGSAYGVNIAYSPEPAGGLETAGGIAQALPLLGDTPFLVVNGDVLTDIDFTAAFQTASSLPEHISAHLWLVENPPHHPDGDFSLLPDGSVQSEVSGGNGLTFSGVGIYRPEMFDGIEAGSVAKLAPVLRGEMRQNRVSGQKHTGLWLDVGTVCRLKEAQALAGAWK

SEQ ID NO: 13956 - protein, 402 aa, Neisseria meningitidis; identical to SEQ ID NO: 2438

SEQ ID NO: 13957 - protein, 553 aa, Neisseria meningitidis
MTDNSPPPNGHAQARVRKNNTLLSAVWLVPLIALIAGGWLWIKEIRNRGPVVTLLMDSAEGIEVNNTVIKVLSIDVGRVTRIKLRDDQKGVEVTAQLNADVSGLIRSDTQFWVVKPRIDQSGVTGLGTLLSGSYIAFTPGKSDEAKDVFQVQDIPPVTAIGQSGLRLNLIGKNDRILNVNSPVLYENFMVGQIESAHFDPSDQSVHYTIFIQSPNDKLIHSASRFWLESGINIETTGSGIKLNSAPLPALLSGAISFDSPKTKNSKNVKSEDSFTLYDSRSEVANLPDDRSLYYTAFFKQSVRGLTVGSPVEYKGLNVGVVSDVPYFDRNDSLHLFENGWIPVRIRIEPSRLEINADEQSKEHWKQQFQTALNKGLTATISSNNLLTGSKMIELNDQPSSSPKLRPHTVYAGDTVIATRGGGLDDLQAKVVDLLDKFDKLPLDKTVAELNGSLAELKSALKSANAALSSIDKLAGNPQTQNIPNELNQTLKELRQTLQGVSPQSPIYGDVQNTLQSLDKTLKDVQPVINTLKEKPNALIFNSSSKDPIPKGSR

SEQ ID NO: 13958 - protein, 279 aa, Neisseria meningitidis; identical to SEQ ID NO: 3315

SEQ ID NO: 13959 - protein, 525 aa, Neisseria meningitidis; identical to SEQ ID NO: 6933

SEQ ID NO: 13960 - protein, 716 aa, Neisseria meningitidis
MLTDLEKNAIRDHYQNIGKNLPGFRPRASQREMIAAVANAFSRTLTREEGGDPPKREGESIAVIEGPTGVGKSLAYLLAGGIMAQTRGKRLIVSSATVALQEQLVDRDLPFLVEKSGLELSFALAKGRGRYLCPYKLYQLTQNNAQQNLTGFETPEVLWDSKPKPEELKLLRDIADEFSARRFNGDRDTWPEKIDDAIWLKVTNDRHGCLKTACPNRPECPFYLARDVLETVDVVVANHDLLLADISMGGGVILPAPENSFYCIDEAHHLPKKALSRFAAEHSWNIAVWTLEKLPQMTGKIAALTDKAELANLADETAASLLDSLHEWQFHLAEEPSLSLGVSENDRRTNSEPTWLWEDGKIPEGLETTVSNTAIAARSLLKHVIGLNDALSAARREKEQDSALLDRLTGEFGLFIARIEQISAVWDLLSTVPLEGEEPLAKWITRRADDKNDYIFNASPISSASHLANSLWRRAAGAVLTSATLQSLGNFNLILRQTGLQWLPETTTLALKSPFDFEKQGELYIPPIYASPKDPEAHTAAIIEWLPKLISPTEAIGTLVLFSSRKQMQDVALRLPGDYLPLLLVQGELPKAVLLQKHHRAIEEGKASIIFGLDSFAEGLDLPGTACVQVIIAKLPFAMPDNPIEKTQNRWIEQRGGNPFIEITVPEAGIKLIQAVGRLIRTEQDYGRVTILDNRIKTQRYGQQLLAGLPPFKRIG

SEQ ID NO: 13961 - protein, 223 aa, Neisseria meningitidis
LKNIDMEKSGIVYLMKTVIKGVYKIGISEVSNFEGRMRHLENNGYANVAGLERILAVKTDNYKEKENLLHEIFSKSRIGDTELFAVDENLVKRLFLSLRGEIVFPKNETAESEFEKSVHERRQEGNAGSGRKQLLDLVRRGHREYPYALPRLLAGAASYKPRKSKIRLFKEAYFGKSGTRLTDEIADVIHIYTCFSRADLEKAYSEYLELFKSESDAEGRKPR

SEQ ID NO: 13962 - protein, 78 aa, Neisseria meningitidis; identical to SEQ ID NO: 1622

SEQ ID NO: 13963 - protein, 68 aa, Neisseria meningitidis; identical to SEQ ID NO: 4044

SEQ ID NO: 13964 - protein, 508 aa, Neisseria meningitidis; identical to SEQ ID NO: 13204

SEQ ID NO: 13965 - protein, 514 aa, Neisseria meningitidis
MCGVLGLVSHEPVNQLLYDGLQMLQHRGQDAAGIATAEGGTFHMHKGKGMVREVFRTRNMRDLTGNAGIAHVRYPTAGNAGSSAEAQPFYVSSPFGIVLAHNGNLTNTAELYENVCNKHLRHVNTSSDSEVLLNVFAHELRREVSKNADPHRLNADNIFNAVAQVHRLVRGAYGVIAMIAGYGMLAFRDPYGIRPLVLGSQTDSEGRKSYAVASESVAFNALTYDLERDIRPGEAVFVGFDGTMIARQCSDRAKLSPCLFEYVYFARPDSVIDGVSVYQSRLDMGVSLAEKIKRELPVDGIDVVMPIPDTSRPSAMELAVHLDKPYREGLIKNRYIGRTFIMPGQATRKKSVRQKLSPMETEFAGKSVLLVDDSIVRGTTSREIVEMVRAAGARKVYIASAAPEVRYPNVYGIDMPTREELIANERSAAEIAAEIGADGIVFQNLSDLEAVVKALNPKIESFDSSCFNGIYQTGDIDDAYLDRLSAEKSGCGGLKIHPSRMEHSISISDAGDEE

SEQ ID NO: 13966 - protein, 227 aa, Neisseria meningitidis
MFDFGLGELVFVGIIALIVLGPERLPEAARTAGRLIGRLQRFVGSVKQEFDTQIELEELRKAKQEFEAAAAQVRDSLKETGTDMQNSLHDISDGLKPWEKLPEQRTPADFGVDENGNPFPDAANTLSDGISDVMPSERSDTSAETLGNDGQIGGTAEPSETDKDRAWREYLTAPSSPAVQTVEVSYIDTAVETPVPHTTSLRKQAISRKRDLRPKSRAKPKLRVRKS

SEQ ID NO: 13967 - protein, 222 aa, Neisseria meningitidis; identical to SEQ ID NO: 4018

SEQ ID NO: 13968 - protein, 349 aa, Neisseria meningitidis; identical to SEQ ID NO: 328

SEQ ID NO: 13969 - protein, 250 aa, Neisseria meningitidis
MTSCEPVNEKTDQKAVSAQQAKEQTSFNNPEPMTGFEHTVTFDFQGTKMVIPYGYLARYTQDNATKWLSDTPGQDAYSINLIEISVYYKKTDQGWVLEPYNQQNKAHFIQFLRDGLDSVDDIVIRKDACSLSTTMGERLLTYGVKKMPSAYPEYEAYEDKRHIPENPYFHEFYYIKKGENPAIITHRNNRINQTEEDSYSTSVGSCINGFTVQYYPFIREKQQLTQQELVGYHQQVEQLVQSFVNNSNKK

SEQ ID NO: 13970 - protein, 168 aa, Neisseria meningitidis
MAHPQEIREKLRRLYVSGEQTLETAALMCEIPQTTARAWKRADKEKGDDWDKMRAAYTLADGGIEDLSRAMLAGFMVQYNSTMTMLQDSSTEDLPPSDRAKLLASLADAFTKTVSANARVMPETSKLATALELIEFLMAFVQEKHPKHLPAFVEVLEPFGVEVEKKFG

SEQ ID NO: 13971 - protein, 161 aa, Neisseria meningitidis
MSNKMEQKGFTLIEMMIVVAILGIISVIAIPSYQSYIEKGYQSQLYTEMVGINNISKQFILKNPLDDNQTIKSKLEIFVSGYKMNPKIAEKYNVSVHFVNKEKPRAYSLVGVPKTGTGYTLSVWMNSVGDGYKCRDKASAEAYSETLSADAGCEAFSNRKK

SEQ ID NO: 13972 - protein, 146 aa, Neisseria meningitidis
  misc_feature 140, 141: 'Xaa' is any amino acid
MHDKTWSGRFNEPVSELVKQYTASIGFDRRLAEWDIQGSLAHAQMLKETGVLDEGDLADIRRGMAEILEEIRSGKIEWSSDLEDVHMNIERRLTDKIGDAGKRLHTGRSRNDQVATDIRLWLRDQITVIQSLIQSLQTAXXTHLIN

SEQ ID NO: 13973 - protein, 494 aa, Neisseria meningitidis
MPYNQAPDFLCADTMHPTYSAVQARLLEANRLSPELLAKSLCIIGAHHVDYADIYCQRTAYESWHLEEGIVKSGSFQINQGVGVRAVSGDKTAFAYADSLCIDSINRSARAVRAIGAAGGKVSAKMPSETRGKPVCSASDPIAGLDSAAKVALLNKVEAIAKAADPRIVQVMAGLTCEYDMVYLARLDGKHAADIRPMVRLNVTVIAKQGERREQGSAGGGGRYDLAYFDENLVRQFVDAAVKQALTNLESRPAPAGEMTVVLGNGWPGVLLHEAVGHGLEGDFNRKETSVFSGRIGERVAAKGVTVVDQGDIAGRRGSLNIDDEGNETRRTVLIEDGILVGYMQDETNARLMGTQSTGNGRRESYASAPMPRMTNTFMENGGYEPEEIIASIDKGIYAVNFGGGQVDITSGKFVFSASEAWWVEGGKLQYPVKGATIIGNGPEVLKHVSMIGNDTALDSGVGVCGKEGQSVPVGVGQPTLRIDAGLTVGGSEI

SEQ ID NO: 13974 - protein, 347 aa, Neisseria meningitidis; identical to SEQ ID NO: 1520

SEQ ID NO: 13975 - protein, 177 aa, Neisseria meningitidis; identical to SEQ ID NO: 6774

SEQ ID NO: 13976 - protein, 86 aa, Neisseria meningitidis; identical to SEQ ID NO: 6575

SEQ ID NO: 13977 - protein, 392 aa, Neisseria meningitidis; identical to SEQ ID NO: 6502

SEQ ID NO: 13978 - protein, 628 aa, Neisseria meningitidis
MPSETVFQVIDMNKETRFPEHFDIPLFLKNLPNLPGVYRFFNESGNVLYVGKAVNLKRRVSGYFQKNDHSPRIALMVKQVHHIETTITRSESEALILENNFIKALSPKYNILFRDDKSYPYLMLSGHQYPQMAYYRGTLKKPNQYFGPYPNSNAVRDSIQVLQKVFMLRTCEDSVFEHRDRPCLLYQIKRCTAPCVGHISEEDYRDSVREAATFLNGKTDELTRTLQHKMQTAAANLQFEEAARYRDQIQALGIMQSNQFIDSKNPNNPNDIDLLALAVSDGLVCVHWVSIRGGRHVGDKSFFPDTKNDPEPNGQDYAEAFVAQHYLGKSKPDIIISNFPVPDALKEALEGEHGKQMQFVTKTIGERKVRLKMAEQNAQMAIAQRRLQQSSQQHRIDELAKILGMDSDGLNRLECFDISHTQGEATIASCVVYDEQNIQPSQYRRYNITTAKPGDDYAAMREVLTRRYGKMQEAEANGETVKWPDAVLIDGGKGQIGVAVSVWEELGLHIPLVGIAKGPERKAGMEELILPFTGEVFRLPPNSPALHLLQTVRDESHRFAITGHRKKRDKARVTSSLSDIPGVGSKRRQALLTRFGGLRGVIAASREDLEKVEGISKALAETIYEHLH

SEQ ID NO: 13979 - protein, 238 aa, Neisseria meningitidis
  misc_feature 2, 3: 'Xaa' is any amino acid
VXXSYDFPGDDCPIVQGSALKALEGDAAYEEKIFELAAALDSYIPTPERAVDKPFLLPIEDVFSISGRGTVVTGRVERGIIHVGDEIEIVGLKETQKTTCTGVEMFRKLLDEGQAGDNVGVLLRGTKREDVERGQVLAKPGTITPHTKFKAEVYVLSKEEGGRHTPFFANYRPQFYFRTTDVTGAVTLEEGVEMVMPGENVTITVELIAPIAMEEGLRFAIREGGRTVGAGVVSSVIA

SEQ ID NO: 13980 - protein, 169 aa, Neisseria meningitidis
MTMILSILSLFFIIRLLFLAVSIKHEKALIAKGATQYGKTNSTVLAAVHTLYYLACFVWVWLSDTAFNGISLIGTLTVMASFVILSLIIKQLGEIWTVKIYILPNHQINRSWLFKTFRHPNYFLNIIPELIGIALLCQAWYVLLIGLPIYLLVLFKRIRQEEQAMATLF

SEQ ID NO: 13981 - protein, 442 aa, Neisseria meningitidis; identical to SEQ ID NO: 6493

SEQ ID NO: 13982 - protein, 433 aa, Neisseria meningitidis
MPSEHQHTSSLLDFDRTHLLHPYTSMTDPLPVYPVKRAEGVFIELADGTRLIDGMSSWWCAIHGYNHPVLNQAVETQMKQMSHVMFGGLTHEPAVELGKLLVGILPQGLDRIFYADSGSVSVEVALKMAVQYQQARGLRAKQNMATVRRGYHGDTWNAMSVCDPETGMHHIFGSALPQRYFVDNLTSRFDDEWDEADLQPVRALFEAHHTDIAAFILEPVVQGAGGMYFYHPQYLRGLRDLCDEFDIVLIFDEIATGFGRTGKMFACEHAEVVPDIMCIGKGLSGGYMTLAAAITSQKVTETISRGEAGVFMHGPTFMANPLACAVACASVKLLLSQDWQANIRRIESILKGRLKAAWDIRGVKDVRVLGAIGVIELDKGVDMARFQADCVAQGIWVRPFGRLVYLMPPYIISDGVLTKLADKTVQILKEHSK

SEQ ID NO: 13983 - protein, 238 aa, Neisseria meningitidis; identical to SEQ ID NO: 945

SEQ ID NO: 13984 - protein, 104 aa, Neisseria meningitidis; identical to SEQ ID NO: 6457

SEQ ID NO: 13985 - protein, 401 aa, Neisseria meningitidis
LKPCDTGGKIAVYPVRETGDSKDFPMIKISTRFDAGSVVVKDLTDPSNIRLALRPDNASDFAQWFYFRLQGAAYQNCIMHFENAAEAAYPKGWEGYQACASYDRRNWFRVPTSYENGVLTVNHTPLSNSVYYAYFEPYSEEQHLNLLGDAQGSGLCRIDDLGSTVQGRDINLLTIGNQVESDLKIWITARQHPGETMAEWFVEGLLGRLLDPQDPTARTLLDRATFYIVPNMNPDGSALGNLRTNAAGANLNREWENPTLEKSPEVFFVREKMLETGVDLFLDIHGDEGLPFVFVAGTEGVPNYNPRISALETQFKTALLNASPDFQDEYGYEKDAPGQANMTLATNWVGNRFNCLAYTLEMPFKDNANLPDDDFGWNGQRSLRLGEAALSAILNVIGDLR

SEQ ID NO: 13986 - protein, 100 aa, Neisseria meningitidis
MGYRVGINCFDTRLQADDYLLSSLPPTVTQDGKIIRPERVGDKWILNGKPVTLSYPECSNFEQIKQGSYVGSTVLILFVVIYGFRLLINFLKDMGKVGTD

SEQ ID NO: 13987 - protein, 521 aa, Neisseria meningitidis; identical to SEQ ID NO: 6486

SEQ ID NO: 13988 - protein, 117 aa, Neisseria meningitidis; identical to SEQ ID NO: 6607

SEQ ID NO: 13989 - protein, 265 aa, Neisseria meningitidis
MLKQRVITAMWLLPLMLGMLFYAPQWLWAAFCGLIALIALWEYARMGGLCKIKTNHYLAATLVFGVVAYAGGWMLPNLVWYVVLAFWLAIMPLWLRFKWRLNGGWQVYAVGWLLVMPFWFALVSLRPHPDDALPLLAVMGLVWVADVCAYFSGKAFGKHKIAPAISPGKSWEGAIGGAVCVAVYMTAVRSAGWLAFDTGWFDTVLIGLVLTVVSVCGDLLESWLKRAAGIKDSSKLLPGHGGVFDRTDSLIAVISVYAAMMSVLN

SEQ ID NO: 13990 - protein, 213 aa, Neisseria meningitidis; identical to SEQ ID NO: 2136

SEQ ID NO: 13991 - protein, 141 aa, Neisseria meningitidis; identical to SEQ ID NO: 6006

SEQ ID NO: 13992 - protein, 558 aa, Neisseria meningitidis; identical to SEQ ID NO: 7512

SEQ ID NO: 13993 - protein, 522 aa, Neisseria meningitidis; identical to SEQ ID NO: 968

SEQ ID NO: 13994 - protein, 1069 aa, Neisseria meningitidis
MFYLYQSNRLETLAALFARIQKVKPLKSVLQPEQIIVQSQGMRRYLNTCLARDLGVAANLSFSLPAGLTWKLMKKLIPGIPELSPFAPEVMRWRLLDLFRSEAFRNTAEFEDVRNVLQDYLGSGESADYQLAGQLADIFDQYLVYRPQWIDAWQQGRILSLGDDEIWQSKLWRYLDDGRQSAPHRVALWEKLLESLSSDKLPERYFVFGISTMAPMYLQLLHKLSEHCDVFVFALNPSGMYWGNVIEAAQILKGGGDPDLTQAGHPLLASLGKQGRDFFDFLNEMEIEGETPVFEEGGRDTLLHALQTDIQNLKMPSENVGSVGTDDGSIRIVSAHSPLRELQILKDKLLKILHEHPDWQPHDIAVLTPNIESYTPFIEAVFGQAQPGAQALPYSVSDVKISRRQPLFHALSCLFDLLESRFEVDKVLVLLETAPVLRRFGLTEDDLPLLHDMVADLNVRWGLDGEMRGGTDQLFTWKQAVERMILGWMLPEGGNPMWQDVSAWYADVNQTAMFGRFAAFLETLSDIVRIWRQPATVDEWVGRCRGLLKTLFQAEADDQKAVQNLENEWVKWQAETELAQFSGQLPPHTVIRHIRRFLDSESEAGFLRGGITFCSMVPMRSLPFKVICLLGLNDGDFPRNTKAAVFDLIAKHPAKGDRARRDDDRYLFLEALISAREILYLSYIGRDIRKDEELAPSSLLGELIDTVAAMTGTNSRQLAQNLIEQHPLQAFSRRYFQEGGRSDGIFGTRTDYAAALGQTPEPPQPFFDQSVENAEPVAEIGQDEFIRFWRNPVKVWLQQQLAWSEPHIGEAWEPAEPFEPQHADQIAETYIEARREGRDFAQTAARIGAESLLPSGELGRLWQQDFQTAAKQIDTAVLNSPKLPPLSYAIPSDGQILKGSLGNLYRCGQVFYAYGKPNAPQRIAFLLEHLIFCAVMPSEAETRQTFIVQSGETEILAEIAQDRALQLLSEWMAFFNIGQNRPLPFFAKTSLAAAEAFAQKQDWEAALKKAQTAYYGNKVSKGQKDYTEVALVFGNASQNPLEQPLFENLARLLADTFAAAEKKEEAGAA

SEQ ID NO: 13995 - protein, 301 aa, Neisseria meningitidis; identical to SEQ ID NO: 2409

SEQ ID NO: 13996 - protein, 300 aa, Neisseria meningitidis; identical to SEQ ID NO: 2507

SEQ ID NO: 13997 - protein, 219 aa, Neisseria meningitidis
MSNQKALVIFSGGQDSTTCLIQAIQIYGRENVQAITFQYGQRHAVELERASWIAQDLGVKQTVLDLSLMRQITHNALMDDTAAIETAENGVPNTFVDGRNALFLLYAAIYAKGQGIRHIIAGVCETDFSGYPDCRDVFVKSMNVTLNLAMDYDFQIHTPLMYLTKAQTWALADEMGALDYIREQTHTCYNGIVGGCRECPSCILRERGLAEYLESKKAV

SEQ ID NO: 13998 - protein, 181 aa, Neisseria meningitidis; identical to SEQ ID NO: 7039

SEQ ID NO: 13999 - protein, 118 aa, Neisseria meningitidis
MLSAYFPVFVFILVGLAAGVLFILLGTILGPKRHYAEKDAPYECGFEAFENARMKFDVRYYLVAILFILFDLEVAFMLPWAVVFKDLGVYGFWSMLVFIVVLTVGFVYEWKKGALEWE

SEQ ID NO: 14000 - protein, 194 aa, Neisseria meningitidis
MISRLTGKLVEKNPPQIVIDVNGVGYEADVSMQTFYNLPPVGESVQLFTQLIIREDAHLLFGFATAEERKTFRQLIKVSGIGAKTALGILSAMTADELAQAVAEEDVKRLSSAPGIGKKTAERMVLELRGKLVAHTVTDGLFAAAPAADETEDIVSTLLALGYSEREAKAAVKGVPEGTDVGEGVRLALKNLLK

SEQ ID NO: 14001 - protein, 498 aa, Neisseria meningitidis; identical to SEQ ID NO: 6669

SEQ ID NO: 14002 - protein, 680 aa, Neisseria meningitidis
MMSPETQKQLKITDVSAKKLDKLNLHTAWDLVLHLPLRYEDETHIMPIKDAPIGVPCQVEGEVIHQEVTFKPRKQLIVQIADGSGSVLFLRFIHFYASHQKQTAVGKRIRAVGEIKHGFYGDEMIHPKIRDAEGGGLAESLTPVYPTVNGLNQPTLRRIIQTALDVTPLHDTLPDALLCRLKLPHLAESLRLLHSPPPSFTIHQLSDGTLPAWQRLKFDELLAQQLSMRLARQKRIGGTAAALGGDGTLTQALRQALPFALTDAQEKVVSEICRDMAQTYPMHRLLQGDVGSGKTIVAALSALTAIESGAQVAVMAPTEILAEQHFIKFKQWLEPLGIEVVRLFGSLRKKAKDEAKAKLADGSVKIAVGTHALFSDGVAFHNLGLTIVDEQHRFGVAQRLALKNKGREVHQLMMSATPIPRTLAMSFFADLDVSVIDELPPGRTPIKTRLVNNVRRAEVEGFVLGTCRKGRQAYWVCPLIEESETLQLQTAAETLARLQTALPELNIGLVHGRMKAAEKAEVMARFSSGGLNVLVATTVIEVGVDVPNAALMVIEHAERMGLAQLHQLRGRVGRGAAESVCVLLFAEPLGELAKARLKVIYEHTDGFEIARQDLNIRGPGEFLGARQSGVPMLRFAKLEEDLHLLEQARETAPMLIEQNPEIVEAHLARWLSGREGYLGV

SEQ ID NO: 14003 - protein, 678 aa, Neisseria meningitidis
MTDNALLHLGEEPRFDQIKTEDIKPALQTAIAEAREQIAAIKAQTHTGWANTVERLTGITERVGRIWGVVSHLNSVADTPELRAVYNELMPEITVFFTEIGQDIELYNRFKTIKNSPEFDTLSPAQKTKLNHDLRDFVLSGAELPPEQQAELAKLQTEGAQLSAKFSQNVLDATDAFGIYFDDAAPLAGIPEDALAMFAAAAQSESKTGYKIGLQIPHYLAVIQYADNRELREQIYRAYVTRASELSDDGKFDNTANIDRTLANALQTAKLLGFKNYAELSLATKMADTPEQVLNFLHDLARRAKPYAEKDLAEVKAFARESLNLADLQPWDLGYASEKLREAKYAFSETEVKKYFPVGKVLNGLFAQIKKLYGIGFTEKTVPVWHKDVRYFELQQNGETIGGVYMDLYAREGKRGGAWMNDYKGRRRFSDGTLQLPTAYLVCNFAPPVGGREARLSHDEILILFHETGHGLHHLLTQVDELGVSGINGVEWDAVELPSQFMENFVWEYDVLAQMSAHEETGVPLPKELFDKMLAAKNFQRGMFLVRQMEFALFDMMIYSEDDEGRLKNWQQVLDSVRKEVAVIQPPEYNRFALSFGHIFAGGYSAGYYSYAWAEVLSADAYAAFEESDDVAATGKRFWQEILAVGGSRSAAESFKAFRGREPRIDALLRHSGFDNAA

SEQ ID NO: 14004 - protein, 329 aa, Neisseria meningitidis
MSTFFQQTAQAMIAKHIDRFPLLKLDQVIDWQPIEQYLNRQKTRYLRDHRGRPAYPLLSMFKAVLLGQWHSLSDPELEHSLITRIDFNLFCRFDELSIPDYSTLCRYRNWLAQDDTLSELLKLINCQLTEKGLKIEKASAAVVDATIIQTAGSKQRQAIEVDEEGQISSQTTPSKDSDARWIKKNGLYKLGYKQHTRTDAEGYIEKLHITPANANECKHLSPLLEGLPEGTTVYADKGYDSAENRQHLEERQLLDGIMRKACRNRPLSETQTKRNRYVVEQSFGTLHRKFRYARAAYFGLIKVSAQSHLKAMCLNLLKAANRLSAPAAA

SEQ ID NO: 14005 - protein, 716 aa, Neisseria meningitidis; identical to SEQ ID NO: 6414

SEQ ID NO: 14006 - protein, 408 aa, Neisseria meningitidis; identical to SEQ ID NO: 1777

SEQ ID NO: 14007 - protein, 157 aa, Neisseria meningitidis
LIDTIQDKMEQVKIAISEQIKKQTDNNHYRNLQTIPSIGKDTASVLYAQLTEKHFKTANQFVSYAGLSPAIMQSGTSVRGRGRLSRYGNRRLKSTLYMPALCAYRFNAFPKLINNLKKAGKPKMVIIVAIMRKLAKLAYYIVKTGQPYDAERHRLNQ

SEQ ID NO: 14008 - protein, 230 aa, Neisseria meningitidis; identical to SEQ ID NO: 675

SEQ ID NO: 14009 - protein, 106 aa, Neisseria meningitidis; identical to SEQ ID NO: 5396

SEQ ID NO: 14010 - protein, 134 aa, Neisseria meningitidis; identical to SEQ ID NO: 1773

SEQ ID NO: 14011 - protein, 245 aa, Neisseria meningitidis; identical to SEQ ID NO: 4045

SEQ ID NO: 14012 - protein, 145 aa, Neisseria meningitidis; identical to SEQ ID NO: 1767

SEQ ID NO: 14013 - protein, 313 aa, Neisseria meningitidis
MKTLLLLIPLVLTACGTLTGIPAHGGGKRFAVEQELVAASSRAAVKEMDLSALKGRKAALYVSVMGDQGSGNISGGRYSIDALIRGGYHNNPESATQYSYPAYDTTATTKADALSSVTTSTSLLNAPAAALTKNSGRKGERSAGLSVNGTGDYRNETLLANPRDVSFLTNLIQTVFYLRGIEVVPPEYADTDVFVTVDVFGTVRSRTELHLYNAETLKAQTKLEYFAVDRDSRKLLIAPKTAAYESQYQEQYALWTGPYKVSKTVKASDRLMVDFSDITPYGDTTAQNRPDFKQNNGKNPDVGNEVIRRRKGG

SEQ ID NO: 14014 - protein, 128 aa, Neisseria meningitidis
MKNVQKGFTLLELMIAVAILGILTLITYPSYKTYIRRVRLSEVKSTLLMNAQNLERYYRQKGTFDNYDQTKLKQNKYFKITLSKSPDHFTLQAAPDPMTNEGETCIVTLNDGGTLSAAGSGQDCPDFD

SEQ ID NO: 14015 - protein, 182 aa, Neisseria meningitidis
MDYNQTVLSHLQKFWKHHDIKGFTWTLGRIVEELPDFQVFQVIPNHEDEPWVYVSSGIGQFLGQEFFIISPFETPEHIETLAMLASASMHYPDQFQLGKTVNIGRPWVEQSSFRHFLISLPYPYGQELEYMDNVRFFWLLPITQTERLFLNTHSVEELETKFDEAGIDYLDINRASTVWQAG

SEQ ID NO: 14016 - protein, 95 aa, Neisseria meningitidis
  misc_feature 89, 90: 'Xaa' is any amino acid
MEKHSLFFRFYRIIPKLTPLIRERFMLQRTLAKSISVTGVGLHSGERVALTLHPAPENSGISFRRTDLDGEMGEQIKLTPYLINDTRLXXTHLIN

SEQ ID NO: 14017 - protein, 1392 aa, Neisseria meningitidis; identical to SEQ ID NO: 8821

SEQ ID NO: 14018 - protein, 356 aa, Neisseria meningitidis
MTKHIAILRGDGIGPEIVAETVRVLDKLIAQGLDAGYEYAPLGGEAYDEYGHPYPEFTQNLCRKADAVLLGAVGSPQYDNLDRPLRPERGLLAIRKDLNLFANLRPAVLYPELANASTLKPEIVAGLNILIVRELTGDIYFGEPRGIRVLENGEREGYNTMKYSESEIRRIAHVAFQSAQKRSKKVCSVGKANVLETTELWREIFEEIGKEYPDVELSHMYVDNAAMQLVRAPKQFDVIATGNIFGDILSDEASMLTGSIGMLPSASLDENGKGLYEPSHGSAPDIAGQNKANPLATILSLAMLLRYSLNDEARAQQVENAVQKVLQQGLRTSDIYEEGTKLVSCSEMGDAVLAAL

SEQ ID NO: 14019 - protein, 71 aa, Neisseria meningitidis; identical to SEQ ID NO: 3925

SEQ ID NO: 14020 - protein, 1505 aa, Neisseria meningitidis
MNEGEVVLTPEQIQTLRGYAFRGDTYGGWRYLANLGDRYADDAAAIVGKDANLNGLNLWMKKGVENLWDDTVGKKTRLEKFDRVALQHFSQYVDLINENNGRLPNTSEIERSYYKAVTENGVSSSAAIDLVINRSLPDMADGYWALGLGIEAERIHNAQAVNNPNGSEWDNRKQLISALDKGFDGSFKEKHFTFLQSVIMDVTKLGVEYTIDGWQKIGGWGNGIINDLYKSVAKREWTGIFEIVNNNIKQFRDLFPNPEGWIDDGHQCFAPWVKETKKRNGKYHVYDPLALDLDGDGIETVATKGFAGSLFDHTNNGIRTATGWVSADDGLLVRDLNGNGIIDNGAELFGDNTKLADGSFAKHGYAALAELDSNGDNIINAADAAFQTLRVWQDLNQDGISQANELRTLEELGIQSLDLAYKDVNKNLGNGNTLAQQGSYTKTDGTTAKMGDLLLAADNLHSRFKDKVELTAEQAKAANLAGIGRLRDLREAAALSGDLANMLKAYSAAETKEAQLALLDNLIHKWAETDSNWGKKSPMRLSTDWTQTANEGIALTPSQVAQLKKNALVSLSDKAKAAIDAARERIAVLDAYTGQDSNTLYYMSEEDALNIVKVTNDTYDHLAKNIYQNLLFQTRLQPYLNQISFKMENDTFTLDFSGLVQAFNHVKETNPQKAFVDLAEMLAYGELRSWYEGRRLMADYVEEAKKAGKFEDYQKVLGQETVALLAKTSGTQADDILQNVGFGHNKNVSLYGNDGNDTLIGGAGNDYLEGGSGSDTYVFGEGFGQDTVYNYDYATGRKDIIRFTDGITADMLTFTREGNHLLIKAKDGSGQVTVQSYFQNDGSGAYRIDEIHFDNGKVLDVATVKELVQQSTDGSDRLYAYQSGNTLNGGLGDDYLYGADGDDLLNGDAGNDSIYSGNGNDTLNGGEGNDALYGYNGNDALNGGEGNDHLNGEDGNDTLIGGAGNDYLEGGSGSDTYVFGKGFGQDTQDTVYNYDYATGRKDIIRFTDGITADMLTFTREGNHLLIKAKDGSGQVTVQSYFQNDGSGAYRIDEIHFDNGKVLDVATVKELVQQSTDGSDRLYAYQSGNTLNGGLGDDYLYGADGDDLLNGDAGNDSIYSGNGNDTLNGGEGNDALYGYNGNDVLNGGEGNDHLNGEDGNDTLIGGAGNDYLEGGSGSDTYVFGKGFGQDAVYNYDYATGRKDIIRFTDGITADMLTFTREGNHLLIKAKDGSGQVTVQSYFQNDGSGAYRIDEIHFDNGKVLDVATVKELVQQSTDGSDRLYAYQSGNTLNGGLGDDYLYGADGDDLLNGDAGNDSIYSGNGNDTLNGGEGNDALYGYNGNDVLNGGEGNDHLNGEDGNDTLIGGAGNDYLEGGSGSDTYVFGKGFGQDTVYNYHVDKNSDTMHFKGFKAADVHFIRSGSDLVLSASEQDNVRISGFFYGENHRVDTFVFDDAAISNPDFAKYINAGNNLVQSMSVFGSNTAATGGNVDANTQSVQQPLLVTPSA

SEQ ID NO: 14021 - protein, 505 aa, Neisseria meningitidis
MVISNPRELEKLKDRIPNLINIIRVAIVFPLMIMHILGLETGSRANLHASWTAWAFYVWLAIACWLIFFSIIHPHWQWQALKIPSFSAVSDITMIGILTYLFGGINSGFGILILPFVGSSCLLSYGRYPLLYASYAAILLILNALADSNINMYPLILDAKTVTNTFVLVTGSYFVAMIASLSVRYIDRAGKLAHENHAAYRRIRGLNQIVLNRVQEAVVIINVEYQTVLFNKKAKDLLPTLEIGQHTALFDPITVLWDKAPSRTFERNIDTPALTARIRAVPMNKEQNKLLILYIRPQSEIQAEALSVKLAALGQLTANIAHEIRNPMSAIRHANDLLRENMEAGAADPFNAKLCKIIDGNVCRIDKMLEDISSLNKRNKTERETIGLIPFWEEFKQEFLLGHPDAAGCIRLDMQGNHLTAYFDPAHLRQIMWNLANNAWRHSRKQPGSISVTIRPAQKNTVCILFADRPKCRNTCSNPFTPRRKTAPASGCMSPANWRTPISAI

SEQ ID NO: 14022 - protein, 74 aa, Neisseria meningitidis; identical to SEQ ID NO: 6276

SEQ ID NO: 14023 - protein, 73 aa, Neisseria meningitidis; identical to SEQ ID NO: 227

SEQ ID NO: 14024 - protein, 467 aa, Neisseria meningitidis
MNNPDLPYRQALECLSQKQYNFTEVRRLLTEAFSAGHPAAAFELAKHLMDADSPYQDREQGMEMLRIAAEQGHPYARYNLAYIQELEGAPPETLIPLYRPLAEEGLPEAQVRLMYLLYASRHFEEALKWAKTSAKNNNPHGQYLLAQYCRYGTPPDFETAHLLYRKAAAQGLAAAHWQLGLQYRFGQGTKVDTAQAVNHLRAAAQQGYIPAYTPLAELILPTAPDEAVHWFQQAAQENDPDAHAALADIYLQGKHPERNYKLALHHAEAAAAERHPEGLRILGDIYRYGLGMTSDKEKALHYYRQAAEAGSLAAYQKLISDSALNHPDQYGGIKDSAIRRQRAERLYQKAQALHYGLQCAPEYAAALKLYTEAAELGHSKAQTNLGSMYYFGQGMTADYNEARKWFEKAAAQKDSMALYNLACIHYNGHGVEPDKEKACRYLQEAINNGYGQKSVLQELLQQWQNAV

SEQ ID NO: 14025 - protein, 92 aa, Neisseria meningitidis; identical to SEQ ID NO: 600

SEQ ID NO: 14026 - protein, 316 aa, Neisseria meningitidis; identical to SEQ ID NO: 5807

SEQ ID NO: 14027 - protein, 128 aa, Neisseria meningitidis; identical to SEQ ID NO: 723

SEQ ID NO: 14028 - protein, 475 aa, Neisseria meningitidis; identical to SEQ ID NO: 3229

SEQ ID NO: 14029 - protein, 178 aa, Neisseria meningitidis; identical to SEQ ID NO: 8890

SEQ ID NO: 14030 - protein, 311 aa, Neisseria meningitidis
MNPKKLVIASRESLLAMWQAKHIQGRLKALYPDCEVEILGMTTRGDQILDKTLSKVGGKGLFVKELEQALYDGRADLAVHSIKDVPMDLPEGFALAAIGERANPFDAFVSNQYTRLEEMPEGAVVGTSSLRREAQLRARYPHLLIKPLRGNVQTRLSKLDNGEYDAIILAAAGLQRLELDGRIRMILSESESLPAAGQGALGIEIAAHREDLYEVLKPLNHGVTNACVTAERALARALGGSCQVPLAAYCTEENGLLTLRGLVGHPDGSVVLRADAQAPAEYADALGRAVAKKLADDGARELIGAVLNTEN

SEQ ID NO: 14031 - protein, 437 aa, Neisseria meningitidis
MMSVTVETLENLERKVVLSLPWSEINAETDKKLKQTQRRAKIDGFRPGKAPLKMIAQMYGASAQNDVINELVQRRFYDVAVAQELKVAGFPRFEGVEEQDDKESFKVAAIFEVFPEVVIGDLSAQEVEKVTASVGDAEVDQTVEILRKQRTRFNHVEREARNGDRVIIDFEGKIDGEPFAGGASKNYAFVLGASQMLPEFEAGVVGMKAGESKDVTVNFPEDYHGKDVAGKTAVFTITLNNVSEATLPEVDADFAKALGIADGDVAKMREEVQKNVSREVERRVNEQTKESVMNALLKAVELKAPVALVNEEAARLANEMKQNFVNQGMADAANLDLPLDMFKEQAERRVSLGLILAKLVDENKLEPTEEQIKAVVANFAESYEDPQEVIDWYYAEPSRLQAPTSLAIESNVVDFVLGKAKVNEKALSFDEVMGAQA

SEQ ID NO: 14032 - protein, 397 aa, Neisseria meningitidis
MNPKHLIAFSALFAATQAEALPVASVSLDTVTVSPSAPYTDTNGLLTDYGNAAASPWMKKLRSVAQGSGETFRILQIGDSHTAGDFFTDSLRKRLQKTWGDGGIGWVYPANVKGQRMAAVRHNGNWQSLTSRNNSGDFPLGGILAHTGSGGSMTLTASDGKTGKQRISLFAKPLLAEQTLTVNGNTVSANGGGWQVLDTRAALPLTIQTEMPWDIGFINIENPAGGITVSAMGINGAQLTHWSKWRADRMNDLAQTGADLVILSYGTNEAFGDNIDIADTEQKWLDTVRQIRDSLPAAGILIIGAPESLKNTLGVCGTRPVRLTEVQQMQRRVARQGQTMFWSWQNAMGGICSMKNWLNQGWAAKDGVHFSAKGYRRAAEMLADSLEELVRAAAIRQ

SEQ ID NO: 14033 - protein, 109 aa, Neisseria meningitidis; identical to SEQ ID NO: 9343

SEQ ID NO: 14034 - protein, 392 aa, Neisseria meningitidis; identical to SEQ ID NO: 7313

SEQ ID NO: 14035 - protein, 300 aa, Neisseria meningitidis; identical to SEQ ID NO: 2153

SEQ ID NO: 14036 - protein, 97 aa, Neisseria meningitidis; identical to SEQ ID NO: 6454

SEQ ID NO: 14037 - protein, 642 aa, Neisseria meningitidis; identical to SEQ ID NO: 7398

SEQ ID NO: 14038 - protein, 210 aa, Neisseria meningitidis
MLNIQNPMFLMLMSDSPQLREFLVRNIDNIANDTEAFINRYDLNRHMIYNTLLMVEGKQLDRLKQRSEKVLAHPTPSKWLQKRLYDYRFFLAFAEQDAEAMKAALEPLFDKKTARMAAKETLSYFDFYLQPQIVTYAKIASMHGFDLGIDHEIAPRDLIVYDPLPADEYQDIFDFMKQYDLSYPYEYLQDWIDYYTFKTDKLVFGNAKRE

SEQ ID NO: 14039 - protein, 238 aa, Neisseria meningitidis; identical to SEQ ID NO: 4111

SEQ ID NO: 14040 - protein, 153 aa, Neisseria meningitidis
MSDLPSISRFLADEAATLDLGAAWSSRLNAPLVIYLEGDLGAGKTTLTRGILRGLGHQGAVKSPTYAIVESYPLERFTLHHFDLYRFTTPEEWEDAGLDELFAANSVCLIEWPQQGGEFTPPADITATLTHDGGGRKCLLTAHTERGRESLPL

SEQ ID NO: 14041 - protein, 307 aa, Neisseria meningitidis
MPSEHPFSDGISTPNPKETMNDTAQITASYGRRYIVRTPDGTTYEASTRKKRVDFACGDRVRISPVNAEQVVIEDFLPRQSLLYRQDAWKTKLIAANVTQLLIVTAAVPSPSVRLLQRALLAAEAAGIRAVIVLNKADLPETALWREKLKFYETLGYPVIETRALENAGSLRPALQGHSNILLGQSGMGKSTLTNALLGSQTARTGDISAALDSGKHTTTHARLYDLNGETQLIDSPGLQEFGLHHLQAADLPRYFPDFRHLVGQCRFHNCTHRAEPGCAFKAAAETRAASPERLAFLQGITDELPG

SEQ ID NO: 14042 - protein, 201 aa, Neisseria meningitidis; identical to SEQ ID NO: 291

SEQ ID NO: 14043 - protein, 216 aa, Neisseria meningitidis; identical to SEQ ID NO: 7775

SEQ ID NO: 14044 - protein, 792 aa, Neisseria meningitidis
VLALGLCFGTHCAAADAVAAEETDNPTAGGSVRSVSEPIQPTSLSLGSTCLFCSNESGSPERTEAAVRGSGEASIPEDYTRIVADKVEGQSQVQVRAEGNVVVERNRTTLNTDWADYDQSGDTVTAGDRFALQQDGTLIRGETLTYNLEQQTGEAHNVRMETEHGGRRLQSVSRTAEMLGEGHYKLTETQFNTCSAGDAGWYVKAASVEADREKGIGVAKHAAFVFGGVPIFYTPWADFPLDGNRKSGLLVPSLSAGSDGVSLSVPYYFNLAPNLDATFAPSVIGERGAVFDGQVRYLRPDYAGQSDLTWLPHDKKSGRNNRYQAKWQHRHDISDTLQAGVDFNQVSDSGYYRDFYGNKEIAGNVNLNRRVWLDYGGRAAGGSLNAGLSVLKYQTLANQSGYKDKPYALMPRLSVEWRKNTGRAQIGVSAQFTRFSHDSRQDGSRLVVYPDIKWDFSNSWGYVRPKLGLHATYYSLNRFGSQEARRVSRTLPIVNIDSGATFERNTRMFGGEVLQTLEPRLFYNYIPAKSQNDLPNFDSSESSFGYGQLFRENLYYGNDRINTANSLSAAVQSRILDGATGEERFRAGIGQKFYFKDDAVMLDGSVGKKPRNRSDWVAFASGSIGSRFILDSSIHYNQNDKRAENYAVGASYRPAQGKVLNARYKYGRNEKIYLKSDGSYFYDKLSQLDLSAQWPLTRNLSAVVRYNYGFEAKKPIEVLAGAEYKSSCGCWGAGVYAQRYVTGENTYKNAVFFSLQLKDLSSVGRNPADRMDVAVPGYITAHSLSAGRNKRP

SEQ ID NO: 14045 - protein, 156 aa, Neisseria meningitidis
MYDVNTHDVRRFFARVWQQRLNPLQLSALEQKALRIIEAHPEYHRYLERIEDHLDTDWLPENGESNPFLHMSLHLSVQEQAGIDQPHGIRAIHDTLCAKRGWLEAEHEMMEALAETLWTAQRYGTGLDVNFYMTRLRKLIGLGAEDQARLNPHEIA

SEQ ID NO: 14046 - protein, 89 aa, Neisseria meningitidis; identical to SEQ ID NO: 1367

SEQ ID NO: 14047 - protein, 77 aa, Neisseria meningitidis; identical to SEQ ID NO: 760

SEQ ID NO: 14048 - protein, 415 aa, Neisseria meningitidis
MLKQTTLLAACASFAALLGGCATQQPAPVIAGNSGMQDAPSSAVYNNPYGATPYSPAPAGDAPYVPPVQSAPVYTPPAYVPPSAPAVSGTYVPSYAPVDINAATHTIVRGDTVYNISKRYHISQDDFRAWNGMTDNTLSIGQIVKVKPAGYAAPKAAAVKSRPAVPAAAQPPVQSAPVDINAATHTIVRGDTVYNISKRYHISQDDFRAWNGMTDNMLSIGQIVKVKPAGYAAPKTSAVESRPAVPAAVQTPVKPAAQPPVQSAPQPAAPAAENKAVPAPAPQSPAASPSGTRSVGGIVWQRPTQGKVVADFGGNNKGVDIAGNAGQPVLAAADGKVVYAGSGLRGYGNLVIIQHNSSFLTAYGHNQKLLVGEGQQVKRGQQVALMGNTDASRTQLHFEVRQNGKPVNPNSYIAF

SEQ ID NO: 14049 - protein, 65 aa, Neisseria meningitidis; identical to SEQ ID NO: 127

SEQ ID NO: 14050 - protein, 420 aa, Neisseria meningitidis; identical to SEQ ID NO: 2546

SEQ ID NO: 14051 - protein, 81 aa, Neisseria meningitidis
MLKSIEFNSHIRNRLAAYLKGRGLDFQTAMREEKGNKEIASIIHGGLPVLVRKLYSEQKMQKFFWEKRDLIADYISRRMQG

SEQ ID NO: 14052 - protein, 163 aa, Neisseria meningitidis; identical to SEQ ID NO: 2563

SEQ ID NO: 14053 - protein, 395 aa, Neisseria meningitidis; identical to SEQ ID NO: 13319

SEQ ID NO: 14054 - protein, 242 aa, Neisseria meningitidis; identical to SEQ ID NO: 6894

SEQ ID NO: 14055 - protein, 121 aa, Neisseria meningitidis; identical to SEQ ID NO: 6750

SEQ ID NO: 14056 - protein, 249 aa, Neisseria meningitidis
MKALVAVKRVVDYNVKVRVKADGSDVDIGNVKMSMNPFDEIAVEEAVRLKEAGKVSEIVAVSLGEKKCEETLRTALAMGADRAIHVETDTKLESLAVAKLLKAVADKENPQIFFLGKQAIDDDANQVAQMLAALLNAAQGTFASKVQIEGDEVQIVREIDGGEETIALKLPAVISADLRLNEPRFVKLPNIMAAKKKPLEKLTPDDLVADISPRLKTVKFAEPKARQAGVKVAGVAELVEKLKNEAKVI

SEQ ID NO: 14057 - protein, 144 aa, Neisseria meningitidis; identical to SEQ ID NO: 2515

SEQ ID NO: 14058 - protein, 399 aa, Neisseria meningitidis
MQAARPSLQCFLFLNERSKTMKKTLVAAAILSLALTACGGGSDTAAHPPSAKPEAGQSGKLNIYNWSDYVDPETVAAFEKETGIKTRSDYYDSNETLEAKVLTGKSGYDLTAPSIANVGRQIKAGAYQKIDKAQIPHYGNIDKDLLKMMEAVDPGNEYAVPYFWGINTLAINTQQVKKALGTDKLPENEWDLVFKPEYTAKLKSCGISYFDSAIEQIPLALHYLGKDPNSENPEDIKAAVDMMKAVRGDVKRFSSSGYIDDMAAGNLCAAIGYGGDLNIAKTRAEEAANGVEIKVLTPKTGVGVWVDSFMIPRDAQNVANAHRYIDYTLLPEVAAKNGSFVTYAPASRPARELMDEKYTSDASIFPNKELMEKSFIVSPKSAESAKLGVKLWQGLKAGK

SEQ ID NO: 14059 - protein, 696 aa, Neisseria meningitidis
MRSMIYGSMPSEKLTIFQTAFVMQVNIQIPCMLYRRGSVKPPLFEAPRLLPSFTDPVVPKLSAPGGYIVDIPKGNLKTEIEKLAKQPEYAYLKQLQTAKNVDWKQVQLAYDKWDYKQEGLTGAGAAIVVIIVTALTYGYGAAAAGSVTAAGSSTAAAATTTAAATTTVSTAAAMQTAALASLYSQAAVAIINNKGDVGKALKDLGTSDTVKQIVTSALTAGALNQMGADIAQLNSKVRTELFSSTGNQTIANLGGRLATNLSNAGISAGINTAVNGGSLKDNLGNAALGALVNSFQGEAASKIKTTFSDDYVAKQFAHALAGCVSGLVQGKCKDGAIGAAVGEIVAESILGGRNPATLSDAEKHKVISYSKIIAGSVAALNGGDVNTAANAAEVAVVNNALNFDSTPTNAKKHQPQKPDKTALEKIIQSIMPAHAAGAMTNPQDKDAAIWISNIRNGITGPIVITSYGVYAAGWTAPLIGTAGKAAISTCMANPSGCTVMVTQAAEAGAGIVTGAVTVGNAWEAPVGALSKAKAAKQAAPKETINNLANLAKAEQQILFRIAQRDTQLDAWKTGFNNRVRKGAGLLDASNIPITINGKTIKPVQAISLKGAPVYSGVSEQEIFALYRQMTGQNPNFRVLPDGRLANGIISTGEWAGTKIALRNFSKTENSTQARWTLDLQNPPSFIKGTKLELKFQ

SEQ ID NO: 14060 - protein, 333 aa, Neisseria meningitidis
MQFPYRNVPASRMRRMRRDDFSRRLMREHTLTADDLIYPVFVLEGSAREEDVPSMPGVKRQSLDRLLFTAEEAVKLGIPMLALFPVVTANKTERAEEAYNPEGLVPAAVRALRERFPELGIMTDVALDPYTVHGQDGLTDENGYVMNDETVEVLVKQALCHAEAGAQVVAPSDMMDGRIGAIREALEDAGHIHTRIMAYSAKYASAFYGPFRDAVGSSGNLGKADKKTYQMDPANTDEALHEVALDIQEGADMVMVKPGLLYLDVVRRVKDEFGVPTYAYQVSGEYAMLQAAVANGWLDGDKVVLESLLAFKRAGADGILTYYAIEAAKMLKR

SEQ ID NO: 14061 - protein, 470 aa, Neisseria meningitidis
LLFEFKENKMIVASRWPLLEKVFLRFGMPVAVVDLESTGGNLYEDRVTEVALVKFEQGRVVRHEWLVNPQKPIPQFVAGLTGISDGMVADAPVFAEIAGELFSVLKGCVLVAHNSRFDYTFLKHEFHRAGIGFSSPALCSVQLSRCLYPQFYKHSLDSIIERLGIVVEDRHRAMADVSALCDYLEYSLSEHGVEEWIRQCFRLMNPKPLPAALPERLREQLYGLPDGMGVLACFDGGGKVNYIGTFERVYSEVSALLDSGKAPFDWCNTEEVRFFPALGRLHAHKVKAELVRHYGVDCYVSAKNLLKTFTTVRFEKGSDGILNAKTADLKNGVTDNPPTGLFANKKAARRALSSWAETYGLCPAAAGILPDGYAEDEPCPVYVSGRCDKACGRSDEQVLAFAHKLPILDWGKMHEVEITETDPLTGEKVVLHGMGGALEMGDGLWYFDKDLPDAFKAKFKTDRKNIKEIG

SEQ ID NO: 14062 - protein, 916 aa, Neisseria meningitidis
MQQQHLFRLNILCLSLMTALPAYAENVQAGQAQEKQLDTIQVKAKKQKTRRDNEVTGLGKLVKTADTLSKEQVLDIRDLTRYDPGIAVVEQGRGASSGYSIRGMDKNRVSLTVDGLAQIQSYTAQAALGGTRTAGSSGAINEIEYENVKAVEISKGSNSVEQGSGALAGSVAFQTKTADDVIGEGRQWGIQSKTAYSGKNRGLTQSIALAGRIGGAEALLIHTGRRAGEIRAHEDAGRGVQSFNRLVPVEDDSKYAYFIVEEECESKNYETCKANPKKDVVGKDERQTVSTRDYTGPNRFLADPLSYESRSWLFRPGFRFENKRHYIGGILEHTQQTFDTRDMTVPAFLTKAVFDENRKYGPIRGNGKYAGNHKYGGLFTNGENGALVGAEYGTGVFYDETHTKSRYGLEYVYTNADKDTWADYARLSYDRQGIGLDNHFQQTHCSADGSDKYCRPSADKPFSYYKSDRVIYGESHRLLQAAFKKSFDTAKIRHNLSVNLGFDRFGSNLRHQDYYYQHANRAYSSKTPPKTGNGGSNASPNGSQDNPYWVSIGGGNVVTGQICRLGNNTYTDCTPRSINGKSYYAAVRDNVRLGRWADVGAGLRYDYRSTHSDDGSVSTGTHRTLSWNAGIVLKPADWLDLTYRTSTGFRLPSFAEMYGWRAGVQSKAVKIDPEKSFNKEAGIVFKGDFGNLEASWFNNAYRDLIVRGYEAQIQNGKETAKGDPAYLNAQSARITGINVLGKIDWNGVWDKLPEGWYSTFAYNRVRVRDIKKRADRTDIQSHLFDAIQPSRYVVGLGYDQPEGKWGVNGMLTYSKAKEITELLGSRALLNGNSRNTKATARRTRPWYIVDVSGYYTIKKHFTLRAGVYNLLNYRYVTWENVRQTAGGAVNQHKNVGVYNRYAAPGRNYTFSLEMKF

SEQ ID NO: 14063 - protein, 61 aa, Neisseria meningitidis; identical to SEQ ID NO: 2615

SEQ ID NO: 14064 - protein, 150 aa, Neisseria meningitidis; identical to SEQ ID NO: 2229

SEQ ID NO: 14065 - protein, 169 aa, Neisseria meningitidis; identical to SEQ ID NO: 6257

SEQ ID NO: 14066 - protein, 69 aa, Neisseria meningitidis; identical to SEQ ID NO: 3128

SEQ ID NO: 14067 - protein, 125 aa, Neisseria meningitidis; identical to SEQ ID NO: 1050

SEQ ID NO: 14068 - protein, 171 aa, Neisseria meningitidis
MYTCTSCGEKHEDMPAIGFTAPDPYNQLSEEERIAYQAECGGDFCIIRYPDQTDRFIRAVLLIPIIGHEETLEYGVWVSVSEKSFNDYQSHFHDNPENVVYFGMICNRLPPYESDTFGLHCNVVTQPDGQRPLLQLHQSGGHPLVRDFYHGIEYAEAQARIGAVSESDCSG

SEQ ID NO: 14069 - protein, 296 aa, Neisseria meningitidis; identical to SEQ ID NO: 7062

SEQ ID NO: 14070 - protein, 544 aa, Neisseria meningitidis
MAAKDVQFGNEVRQKMVNGVNILANAVRVTLGPKGRNVVVDRAFGGPHITKDGVTVAKEIELKDKFENMGAQMVKEVASKTNDVAGDGTTTATVLAQSIVAEGMKYVTAGMNPTDLKRGIDKAVAALVEELKNIAKPCDTSKEIAQVGSISANSDEQVGAIIAEAMEKVGKEGVITVEDGKSLENELDVVEGMQFDRGYLSPYFINDAEKQIAGLDNPFVLLFDKKISNIRDLLPVLEQVAKASRPLLIIAEDVEGEALATLVVNNIRGILKTVAVKAPGFGDRRKAMLQDIAILTGGTVISEEVGLSLEKATLDDLGQAKRIEIGKENTTIIDGFGDAAQIEARVAEIRQQIETATSDYDKEKLQERVAKLAGGVAVIKVGAATEVEMKEKKDRVEDALHATRAAVEEGVVAGGGVALLRARAALENLHTGNADQDAGVQIVLRAVESPLRQIVANAGGEPSVVVNKVLEGKGNYGYNAGSGEYGDMIEMGVLDPAKVTRSALQHAASIAGLMLTTDCMIAEIPEEKPAMPDMGGMGGMGGMM

SEQ ID NO: 14071 - protein, 215 aa, Neisseria meningitidis
MKPLILGLAAVLALSACQVQKAPDFDYTSFKESKPASILVVPPLNESPDVNGTWGVLASTAAPLSEAGYYVFPAAVVEETFKENGLTNAADIHAVRPEKLHQIFGNDAVLYITVTEYGTSYQILDSVTTVSAKARLVDSRNGKELWSGSASIREGSNNSNSGLLGALVSAVVNQIANNLTDRGYQVSKTAAYNLLSPYSHNGILKGPRFVEEQPK

SEQ ID NO: 14072 - protein, 216 aa, Neisseria meningitidis
MPSENTKGTTMTTHHVELRKVTKRFGAQKAVNQVDLVLKAGESVGLAGHNGAGKSTIMKLILGLITPTEGEVMLLGERTGSKAGARLRSQIGYLPETVALHPSLIGIETLDFYAKLKKQPLTQNRGLLERVGISQAAHRRVGTYSKGMRQRLALAQALLGEPKVLLFDEPTTGLDHASRQMFYEVVRELNGRGATVLLSTHALAELDGHADRIIVD

SEQ ID NO: 14073 - protein, 511 aa, Neisseria meningitidis
MNLPIQKFMMLFAAAISLLQIPISHANGLDARLRDDMQAKHYEPGGKYHLFGNARGSVKNRVYAVQTFDATAVGPILPITHERTGFEGIIGYETHFSGHGHEVHSPFDNHDSKSTSDFSGGVDGGFTVYQLHRTGSEIHPEDGYDGPQGSDYPPPGGARDIYSYYVKGTSTKTKSNIVPRAPFSDRWLKENAGAASGFFSRADEAGKLIWESDPNKNWWANRMDDIRGIVQGAVNPFLMGFQGVGIGAITDSAVSPVTDTAAQQTLQGINHLGNLSPEAQLAAATALQDSAFAVKDGINSARQWADAHPNITATAQTALAVAEAAGTVWRGKKVNLNPTKWDWVKNTGYKTPAARPMQTLDGEMAGGNKPAKQATPNGKAGVSTQQSLQNSLVPQKNYTHTTYNGGSAITDGKYITDPLSMVRHKPDASSLDKIDSKSLFKSDVDAEKATLDAARYADKHNLWDSQNKAKVPTNDVVGYTDGKPTHIINIYRRKPNKDGFRPVHGTPGKER

SEQ ID NO: 14074 - protein, 328 aa, Neisseria meningitidis
MQYRIRRENEAPEAKNAGETLWERDIMREVLLSAYQDRRRERMWKNIWRAVSTLILVALIAGIFRKDEAALQLAGNTPHTAVVNLYGEIGNGVEDQVKKLKDGMEAAYKNPQAKAIVIRANSPGGSPVVSNTAFEEIRRLKAQHPGIPVYLVAEDMCASGCYYIAAAADKIYADSSSIVGSIGVIGSSFDATGLMEKIGVKRRVKIAGSNKGMGDPFSPETPEQSKIWEEMLTGIHGEFIKAVKTGRGDRLKFRQYPDVFSGRVYTGADALKVGLVDGLGNIYSVARDVVKAPDVVDYTPKDDFGRILGRRFGAELKASVREALQAVR

SEQ ID NO: 14075 - protein, 203 aa, Neisseria meningitidis; identical to SEQ ID NO: 352

SEQ ID NO: 14076 - protein, 499 aa, Neisseria meningitidis; identical to SEQ ID NO: 12146

SEQ ID NO: 14077 - protein, 674 aa, Neisseria meningitidis; identical to SEQ ID NO: 7403

SEQ ID NO: 14078 - protein, 133 aa, Neisseria meningitidis
MQQHIEKWQHLSREEQKILAEVWGLVQNDNQEVHYEMLKLNAPDEASGEFWFRMAETLSTLPPNRSLDLRMNGGRLATAVSILSVMIEDNPDIPQLWAQKITALNYSGLNLNQYGVASPCRTICTVCGFVALS

SEQ ID NO: 14079 - protein, 463 aa, Neisseria meningitidis
MQLFLDNLKAFFETVSGWVWGSVMLMLLVGTGIVLTVMLKGLQFTMLGYALKQAFVPSKKYEGGEGHEGDISHFAALMTALSATIGTGNIAGVATAVVTGGPGAVFWMWMTAIFGMATKYGEGVLAVKYRVNNSKGEMSGGPMYYIEKGLGKNWKWMAVAFALFGTFASFGIGSSVQSNSVAQAVQTSFGIEPAYTGITLTVLTAVVVLGGIKGIAKAASFIVPAMAVFYVLGGLSIIAINSDALMPAVKLIFSDAFSAQAVAGGAIGTVIRYGVARGVFSNEAGMGSAPIAAAAAKTDHPVRQALVSMTGTFLDTIVVCSITGIVLVMGLLGAGGEFVKPEVSGAALTTVTFQKMLPGIGGWIVTIGLIFFAYSTILGWCYYGEKCAVYVFGEKFAGLYRVGYVSSVMLGTVLSLDLVWLASDTFNGLMALPNLIALLLMAKVIVNETRDFKQKITNGELPH

SEQ ID NO: 14080 - protein, 395 aa, Neisseria meningitidis; identical to SEQ ID NO: 13319

SEQ ID NO: 14081 - protein, 334 aa, Neisseria meningitidis
MSIKVAINGFGRIGRLALRQIEKAHDIEVVAVNDLTPAEMLLHLFKYDSTQGRFQGTAELKDDAIVVNGKEIKVFANPNPEELPWGELGVDVVLECTGFFTNKTKAEAHIRAGARKVVISAPGGNDVKTVVYGVNQDILDGSETVISSASCTTNCLAPMAAVLQKEFGVVEGLMTTIHAYTGDQNTLDAPHRKGDLRRARAAALNIVPNSTGAAKAIGLVIPELNGKLDGSAQRVPVATGSLTELVSVLERPVTKEEINAAMKAAASESYGYNEDQIVSSDVVGIEYGSLFDATQTRVMTVGGKQLVKTVAWYDNEMSYTCQLVRTLEYFAGKI

SEQ ID NO: 14082 - protein, 102 aa, Neisseria meningitidis; identical to SEQ ID NO: 427

SEQ ID NO: 14083 - protein, 431 aa, Neisseria meningitidis
MPAPDLGFALSLPPKKAIEWLESKKVTAESYRNLTASEIAKVYTIARMTDLDMLNDIKTSMVESAKSGQSFDDWRKGILNLLGNKGWLHPNGHNGKDIIDPATGEVFGSPRRLETIYRTNMQTAYNAGQYQGYMANIDARPYWMYDAVGDSRTRPAHSAIDGLVYRYDDPFWATFYPPNGYNCRCSVIALSERDVERQGRIVGQSTADNLVETHKIYNKKGDSYPTTAYKAPDGSLYTADKGFGYNAGRMNYRPDLDKYDRALAHQFAKAEMGGADFKTSFKQLEKEFYEVKQRLNIDGKPDKEQKIKIRNALSRQLKFAAGVLSKEMQELAGMTRATVWLSDDTLVKQVDSREGQNFDDSYYAFLPDMLQNPEHVIRDNRELIFTARYKGSALWAVLKYIKEVDEIYLQSYRISNDKEIAKFMAKKKVLK

SEQ ID NO: 14084 - protein, 169 aa, Neisseria meningitidis; identical to SEQ ID NO: 111

SEQ ID NO: 14085 - protein, 208 aa, Neisseria meningitidis; identical to SEQ ID NO: 1121

SEQ ID NO: 14086 - protein, 348 aa, Neisseria meningitidis
MSDDKSKALAAALAQIEKSFGKGAIMKMDGSQQEENLEVISTGSLGLDLALGVGGLPRGRIVEIFGPESSGKTTLCLEAVAQCQKNGGVCAFVDAEHAFDPVYARKLGVKVEELYLSQPDTGEQALEICDTLVRSGGVDMVVVDSVAALVPKAEIEGDMGDSHVGLQARLMSQALRKLTGHIKKTNTLVVFINQIRMKIGVMFGSPETTTGGNALKFYSSVRLDIRRTGSIKKGEEVLGNETRVKVIKNKVAPPFRQAEFDILYGEGISWEGELIDIGVKNDIINKSGAWYSYNGAKIGQGKDNVRVWLKENPEIADEIDAKIRALNGVEMHITEGTQDETDGERPEE

SEQ ID NO: 14087 - protein, 231 aa, Neisseria meningitidis; identical to SEQ ID NO: 1993

SEQ ID NO: 14088 - protein, 219 aa, Neisseria meningitidis
MDTWHDALGGEKQQPYFQEILNAVRQERLSGQIIYPPAADVFNAFRLTAFDRVKAVILGQDPYHGAGQAHGLAFSVRQGVRIPPSLLNIYKELETDIEGFSIPAHGCLTAWAEQGVLLLNTVLTVRAGQAHSHALLGWERFTDTVIRQLATHRKHLVFMLWGGYAQQKGRLIDSQNHLILTAPHPSPLSAYRGFFGCRHFSQANSYLSRHGIDPINWKL

SEQ ID NO: 14089 - protein, 622 aa, Neisseria meningitidis
MQAVRYRPEIDGLRAVAVLSVIIFHLNNRWLPGGFLGVDIFFVISGFLITGIILSEIQNGSFSFRDFYTRRIKRIYPAFIAAVSLASVIASQIFLYEDFNQMRKTVELSAVFLSNIYLGFQQGYFDLSADENPVLHIWSLAVEEQYYLLYPLLLIFCCKKTKSLRVLRNISIILFLILTATSFLPSGFYTDILNQPNTYYLSTLRFPELLAGSLLAVYGQTQNGRRQTANGKRQLLSSLCFGALLACLFVIDKHNPFIPGMTLLLPCLLTALLIRSMQYGTLPTRILSASPIVFVGKISYSLYLYHWIFIAFAHYITGDKQLGLPAVSAVAALTAGFSLLSYYLIEQPLRKRKMTFKKAFFCLYLAPSLILVGYNLYARGILKQEHLRPLPGAPLAAENHFPETVLTLGDSHAGHLRGFLDYVGSREGWKAKILSLDSECLVWVDEKLADNPLCRKYRDEVEKAEAVFIAQFYDLRMGGQPVPRFEAQSFLIPGFQARFRETVKRIAAVKPVYVFANNTSISRSPLREEKLKRFAANQYLRPIQAMGDIGKSNQAVFDLVKDIPNVHWVDAQKYLPKNTVEIHGCYLYGDQDHLTYFGSYYMGREFHKHERLLKSSRDGALQ

SEQ ID NO: 14090 - protein, 306 aa, Neisseria meningitidis
MRIRLGRHNAPDFPQGAAVTIGNFDGVHLGHKHILQKLRLEADARGLPVVAVIFEPQPKEFFASRTGKTPPCRISPLRTKLELLEGTGCVDAVWVLRFDQNFSEISAQGFIDRLLRQTLNTRYLLVGDDFRFGAGREGCFELLAQQPDMQTERTPSVIVEDIRTSSTAVRQALSDGNLAYAKKLLGHDYVLGGRVVHGRKLGRTLNAPTANIRLPDHRYALGGVFVVDADGAFGTRRGVASFGFNPTVDSGCSQKLEVHLFDFQGDLYGQRLNVRFLHKLRDEEKFDGMEELKRQIEADMEAAKCW

SEQ ID NO: 14091 - protein, 442 aa, Neisseria meningitidis
  misc_feature 2, 3, 4: 'Xaa' is any amino acid
VXXXTQRSRNNFKIGGETLPQPLIYALALVKKAAAATNVSLGRIKPEQADLITQAADDVLNGRLDGQFPLVVWQTGSGTQSNMNMNEVLANRANEIAGTGLAAYQPVHPNDHVNHAQSTNDAFPTAIHVAAAIEINRHLIPAVKALRDTLDKKAQAFAPIVKIGRTHLQDATPLTLGQEFSGYVSQLDHGLGRLNDALKDLYELALGGTAVGTGLNSHPEYAEKAAAKLAELSGLPFVSAPNKFEALGGRDAAVAASGALKTLAASLNKIANDIRWLASGPRCGLGEIKIPENEPGSSIMPGKVNPTQCEAMTMVCCQVFGNDVTIGMAGASGNFELNVYMPVIAYNLLQSIRLLGDACNSFNEHCAVGIEPVPEKIDYFLHHSLMLVTALNRKIGYENAAKVAKTAYKNNKSLRETAVELGLLTGEEFDELVVPADMVHPR

SEQ ID NO: 14092 - protein, 205 aa, Neisseria meningitidis; identical to SEQ ID NO: 6895

SEQ ID NO: 14093 - protein, 283 aa, Neisseria meningitidis
MTLLGIKLKQTQQLNQRLQQSLRVLQMSGIELEREIENWLSDNPLLERKDTDEFSDAGFSHYTAPARQIGGDEGEDMLSNIAGEEDFKQYLHAQVCEHPLSDQESACVHILIDFLDEQGYLTDSIEDILDHTPLEWMLDEAMLKQALTALQKFDPAGVAAADLNESLILQIERSGECAAKPAALHIVRNALDSINGNRSQTLARIKKHLPQTDSGTLEAALDLIASLNPFPAAGFASSTPTPYSDEALANLLAFRGMEVSRRTIAKYRESFEIPAAHKRKTAE

SEQ ID NO: 14094 - protein, 406 aa, Neisseria meningitidis
MAQTHDTRLQKTLLFPSQQGWKSKTFLKPDSHIRLATVFSGIGAVEQAFHRLNLNHTIVFSGDIDPYVKKSYLGNYKLNEDFWHNDITQFDARKFRNQVDILVGGSPCQAFSMVGKRAGLEDTRGTLFYEFARVVDEVQPKIFIYENVKGLLNHDNGKTWKVVKSVFYSLGYDLYFQIMNSKDYGIPQHRERIFVVGFHTPPINGFQFPEKIELEHTMQDFLEDYTDSKYFLREKGAKFVTSSKNRQKRYTQINGEIALCQKANQQFNWHGDFIFQAARESEFDDFIFDVNNVEEKYYLSEKIKNYVLAGGTKNFKTSTETDLPVARPLLQTMHKMHRAGVDNYVTHNRGRIRKLTPRECLRLMGFRDDFKILVSDTQMYRQAGNSIVVDVLIAILKQMDITLYGE

SEQ ID NO: 14095 - protein, 418 aa, Neisseria meningitidis; identical to SEQ ID NO: 7682

SEQ ID NO: 14096 - protein, 318 aa, Neisseria meningitidis; identical to SEQ ID NO: 13911

SEQ ID NO: 14097 - protein, 287 aa, Neisseria meningitidis
MKTFFKTLSAAALALILAACGGQKDSAPAASASAAADNGAEKKEIVFGTTVGDFGDMVKEQIQAELEKKGYTVKLVEFTDYVRPNLALAEGELDINVFQHKPYLDDFKKEHNLDITEVFQVPTAPLGLYPGKLKSLEEVKDGSTVSAPNDPSNFARVLVMLDELGWIKLKDGINPLTASKADIAENLKNIKIVELEAAQLPRSRADVDFAVVNGNYAISSGMKLTEALFQEPSFAYVNWSAVKTADKDSQWLKDVTEAYNSDAFKAYAHKRFEGYKSPAAWNEGAAK

SEQ ID NO: 14098 - protein, 407 aa, Neisseria meningitidis
MSGNASSPSSSSTIGLIWFGAAVSIAEISTGTLLAPLGWQRGLAALLLGHAVGGALFFAAAYIGALTGRSSMESVRLSFGKRGSVLFSVANMLQLAGWTAVMIYAGATVSSALGKVLWDGESFVWWALANGALIVLWLVFGARKTDGLKTVSMLLMLLAVLWLSAEVFSTAGSTAAQVSDGMSFGTAVELSAVMPLSWLPLAADYTRQARRPFAATLTATLAYTLTGCWMYALGLAAALFTGETDVAKILLGAGLGAAGILAVVLSTVTTTFLDAYSAGVSANNISAKLSETPIAVAVAVVGTLLAVLLPVTEYENFLLLIGSVFAPMAAVLIADFFVLKRREEIEGFDFAGLVLWLAGFILYRFLLSSGWESSIGLTAPVMSAVAIATVSVRLFFKKTQSLQRNPS

SEQ ID NO: 14099 - protein, 227 aa, Neisseria meningitidis
MTGFNDAAGVASVSTDIKGKYVQSVTVANGVITAQMASSGVNNEIKGKKLSLWAKRQDGSVKWFCGQPVTRAAKAKDDVTADTTTNTKIDTKHLPSTCRDAASAVCTKTPEYYPNHGEWPSDNSAAGVASSSTIKGKYVEKVEVKNGVITAEMKSSGVNKEIQGKKLSLWAKRQDGSVKWFCGQPVTRNAANAKAGTDEVTAATPDTDKINTKHLPSTAPTRKSTPN

SEQ ID NO: 14100 - protein, 129 aa, Neisseria meningitidis
MWKIIKEDSDDLGFAIKCLFSQSIDLNEFKLWIEQVIRDMPIEDIPFYIFDLADFDVGIGDIGNIVGFAPSSSLPKSKKNALTGIAFLRGIDVYDPPVSKEKALKALEKYPEIYQKFQHFFPFVELPPL

SEQ ID NO: 14101 - protein, 136 aa, Neisseria meningitidis
MKIYNLDNIITSSALSLYKSTWVKLDLISCAKFIIKGTDFTFDWDEGIENWIVFFHKNKVIGYLCAKLPFAILDNEQLKNQLYHKYPHVLTLQIKNIETEKISLNVNICRLTLCPSFHDEHDTLVCSVQDFYVNTV

SEQ ID NO: 14102 - protein, 77 aa, Neisseria meningitidis
MWHIVAIGYLFVAVMYSAAQPSIARALIYLVFWAVLPTVFTVFVVTVRRRNRLMKQQEQAEFEQQRAQRQKDSGTKP

SEQ ID NO: 14103 - protein, 116 aa, Neisseria meningitidis; identical to SEQ ID NO: 4624

SEQ ID NO: 14104 - protein, 408 aa, Neisseria meningitidis
MNTDNLHDILDEMVQVYSQKKQSRSETPAEISAHFHPLLDRLCETAEAQNASDILISKGFPPSLKINSALTPQPQKALTGEETAAIAASTMNAEQSEIFRRDGEINYSVQSRSGTRYRANAYHSQGSAGLVLRRINHVIPQMQELGLPEKLKDLAVAPRGLLIIVGPTGSGKSTTMATMLEHRNKTLPSHIVTIEDPIEFIYKPRRCIFTQREIGVDTINWQTAVQNAMRQSPDVVCIGEVRSRESMEYAMQLAQTGHLCIFTLHANTAPQSLERILNFYPKEQHNQILIDIALNLTGIICQRLALKQDKTGRTAVVDLLINTPAIQDFILKGDLMNISKIMETAKTDGMQTMDQNLFELYRHGIISYEEALRQSVSANNLRLHIQLHKEGKTPELLYDRVNGLNLIS

SEQ ID NO: 14105 - protein, 317 aa, Neisseria meningitidis; identical to SEQ ID NO: 2057

SEQ ID NO: 14106 - protein, 407 aa, Neisseria meningitidis
MKTVVWIVVLFAAAVGLALASGIYTGDVYIVLGQTMLRINLHAFVLGSLIAVVVWYFLFKFIIGVFNIPEKMQRFGSARKGRKAALALNKAGLAYFEGRFEKAELEASRVLVNKEAGDNRTLALMLGAHAAGQMENIELRDRYLAEIAKLPEKQQLSRYLLLAESALNRRDYEAAEANLHAAAKMNANLTRLVRLQLRYAFDRGDALQVLAKTEKLSKAGALGKSEMERYQNWAYRRQLADAADAAALKTCLKRIPDSLKNGELSVSVAEKYERLGLYADAVKWVKQHYPHNRRPELLEAFVESVRFLGEREQQKAIDFADAWLKEQPDNALLLMYLGRLAYGRKLWGKAKGYLEASIALKPSISARLVLAKVFDEIGEPQKAEAQRNLVLEAVSDDERHAALEQHS

SEQ ID NO: 14107 - protein, 392 aa, Neisseria meningitidis
MAFLKLTEQNVQGKTVLIRADMNVPFKDGKISDDTRIRASLASIQYCMDNGASVIVMTHLGRPTEGEFHPEDDVAPVAAHLGGLLGKNVKVLNDWRENKPALNAGDVVMLQNVRINKGEKKNDLELGKAYASLCDVFVNDAFGTAHRAQASTEAVAQAAPVACAGVLMAGELDALGKALKQPARPMVAIVAGSKVSTKLTILESLADKVDQLIVGGGIANTFLLAEGKAIGKSLAEHDLVEESKKIMAKMAAKGGSVPLPTDVVVAKAFAADEEAVVKDIADVAEDEMILDIGPKSAAALADLLKAAGTVVWNGPVGVFEFDQFAGGTKALAEAIAQSKAFSIAGGGDTLAAIAKFGVTEQIGYISTGGGAFLEFLEGKELPAVAALEKRGA

SEQ ID NO: 14108 - protein, 72 aa, Neisseria meningitidis; identical to SEQ ID NO: 1579

SEQ ID NO: 14109 - protein, 161 aa, Neisseria meningitidis; identical to SEQ ID NO: 8432

SEQ ID NO: 14110 - protein, 176 aa, Neisseria meningitidis; identical to SEQ ID NO: 3131

SEQ ID NO: 14111 - protein, 606 aa, Neisseria meningitidis
MPCMNHQSNSGEGVLVAKTYLLTALIMSMTISGCQVIHANQGKVNTHSAVITGADAHTPEHATGLIEQKQVIASDFMVASANPLATQAGYDILKQGGSAADAMVAVQTTLSLVEPQSSGLGGGAFVLYWDNTAKTLTTFDGRETAPMRATPELFLDKDGQPLKFMEAVVGGRSVGTPAIPKLMETIHQRYGVLPWGKLFDTPIRLAKQGFEVSPRLAISVEQNQQHLARYPKTAAYFLPNGVPLQAGSLLKNLEFADSVQALAAQGAKALHTGKYAQNIVSVVQNAKDNPGQLSLQDLSDYQVVERPPVCVTYRIYEVCGMGAPSSGGIAVGQILGILNEFSPNQVGYDAEGLRLLGDASRLAFADRDVYLGDPDFVPVPIRQLISKDYLKHRSQLLEQSDKALPSVSAGDFIHEWVSSQAIELPSTSHISIVDKAGNVLSMTTSIENAFGSTLMANGYLLNNELTDFSFEPIKQGKQVANRVEPGKRPRSSMAPTIVFKAGKPYMAIGSPGGSRIIGYVAKTIVAHSDWNMDIQDAISAPNLLNRFGSYELETGTTALQWQQALNDLGYKTDVRELNSGVQAIIIEPSRLVGGADPRREGRVMGD

SEQ ID NO: 14112 - protein, 165 aa, Neisseria meningitidis
MTALTLPEDIRQQEPSVLLYTLVSAYLEHTAQTGDESLSCLSDDQHTLTAFCYLDSQVEEGGFVQLIASGYGEYIFRNPLADSLRRWKIKAVPKVLDKAKALYEQHGETIETLADGGRDIPSLRKQFPDFEEWDGAYYEAAEQDLPLLAEHIQSNWETFAHIGQA

SEQ ID NO: 14113 - protein, 470 aa, Neisseria meningitidis
  misc_feature 3, 4, 464, 465: 'Xaa' is any amino acid
VCXXCRHPQRQSETEIEKLAKQPEYAYLKQLQTAKNVDWKQVQLAYDKWDYKQEGLTGAGAAIVVIIVTALTYGYGAAAAGSVTAAGSSTAAAATTTAAATTTVSTAAAMQTAALASLYSQAAVAIINNKGDVGKALKDLGTSDTVKQIVTSALTAGALNQMGADIAQLNSKVRTELFSSTGNQTIANLGGRLATNLSNAGISAGINTAVNGGSLKDNLGNAALGALVNSFQGEAASKIKTTFSDDYVAKQFAHALAGCVSGLVQGKCKDGAIGAAVGEIVAESILGGRNPATLSDAEKHKVISYSKIIAGSVAALNGGDVNTAANAAEVAVVNNALNFDSTPTNAKKHQPQKPDKTALEKIIQSIMPAHAAGAMTNPQDKDAAIWISNIRNGITGPIVITSYGVYAAGWTAPLIGTAGKAAISTCMANPSGCTVMVTQAAEAGAGIATGAVTVGNAWEAPVGXXTHLIN

SEQ ID NO: 14114 - protein, 602 aa, Neisseria meningitidis
MRTNYCGLISEQYLDQTVTVKGWVHRRRDHGGVIFIDLRDREGIVQVVIDPDTPEAFAAADSARNEYVLSITGRVRNRPEGTTNDKMISGKIEILAKEIEVLNAAATPPFQIDDENISENVRLTNRVIDLRRPVMQRNLRLRYQVAMGVRRYLDAQGFIDIETPMLTRSTPEGARDYLVPSRVHPGEFFALPQSPQLFKQLLMVAGFDRYYQITKCFRDEDLRADRQPEFTQIDLETSFLNEDEIMDITEGMAKQVFKDALNVDLGDFPRMPYAEAMFYYGSDKPDMRINLKFTELTDLMKTEEFKVFRGAADMKGGRVVALRVPNGAKFSRKEIDEYTKFVGIYGAKGLAYIKVNDVGNLSNGEDSGLQSPIVKFLSENALKEIIERTGAQNGDIIFFGADKTKVVNEAIGALRIKVGLEHGKDNGYFTDEWKPLWVVDFPMFEYDEEADRYVAVHHPFTAPKEGHEDLMVSDPANCLARAYDMVLNGWEIGGGSIRIHRADVQEKVFAALKISPEEQQEKFGFLLDNLKFGAPPHGGLAFGLDRLVTLMTGAESIRDVIAFPKTQRAQCMLTNAPNSVDDKQLRELSLRLRQKVAETKEA

SEQ ID NO: 14115 - protein, 589 aa, Neisseria meningitidis
MTVQTKTKGLAWQEKPLSDNERLKTESNFLRGTILDDLKDPLTGGFKGDNFQLIRFHGMYEQDDRDIRAERAEAKLEPLKFMLLRCRLPGGIIKPSQWIELDKFARENSHYRSIRLTNRQTFQFHGVPKAKLQTMHRLLHKLGLDSIATAADMNRNVLCTSNPIESELHRQAYEYAKKISEHLLPRTRGYLDVWVDGKKVQSSDDFLQEDEPILGKTYLPRKFKTAVVIPPLNDVDCYGNDLDFVAISDGNGQLAGFNVLAGGGLSMEHGNTKTYPNISLELGFVPPEHALKAAEAVVTTQRDFGNRSDRKNARTRYTIQNMGLDNFRAEVERRMGMPFEPIRPFKFTGRGDRIGWVKGIDGNWHLTLFIESGRLVDEGGKQLLTGVLEIAKIHKGDFRITANQNLIVANVPERGKARIEQLARSYGLIHDGVSKLRENAMSCVSFPTCPLAMAEAERVLPDFIGELDKIMAKHGTSDDYIVTRITGCPNGCGRAMLAEIGLVGKAVGRYNLHIGGDREGVRIPRLYKENITLPEILAELDDLIGKWAAERNIGEGFGDFAIRTGIVKPVLNAPVDFWDASKAVAIARA

SEQ ID NO: 14116 - protein, 233 aa, Neisseria meningitidis; identical to SEQ ID NO: 7041

SEQ ID NO: 14117 - protein, 52 aa, Neisseria meningitidis
MELHDRQEMPSERIFRSILRLVGVSSETVKQKFAGVELSYAGKAAGESLYCL

SEQ ID NO: 14118 - protein, 228 aa, Neisseria meningitidis; identical to SEQ ID NO: 445

SEQ ID NO: 14119 - protein, 469 aa, Neisseria meningitidis; identical to SEQ ID NO: 6096

SEQ ID NO: 14120 - protein, 268 aa, Neisseria meningitidis; identical to SEQ ID NO: 9528

SEQ ID NO: 14121 - protein, 304 aa, Neisseria meningitidis; identical to SEQ ID NO: 3720

SEQ ID NO: 14122 - protein, 66 aa, Neisseria meningitidis
MFVCICNAVTDHQIKETIAAGATTMGDLQSQLGVASCCGCCGELAASFLTAHNAQPTVTAVINVQA

SEQ ID NO: 14123 - protein, 188 aa, Neisseria meningitidis
MGFYALLLIALGMSMDAFAVALAKGAAVRMPPRKIAATALVFGTVEALTPLAGWVGGFYAKPFISEWDHWVAFVLLGGLGLKMMREGLSGEAEDVRESKRESLWMTVLTAFGTSIDSMIVGVGLAFMEVNIAFAAAIIGMATTVMVTVGLTAGRALGVLFGKRAEFAGGLVLIAIGTWTLLSHLGLIQ

SEQ ID NO: 14124 - protein, 186 aa, Neisseria meningitidis; identical to SEQ ID NO: 482

SEQ ID NO: 14125 - protein, 257 aa, Neisseria meningitidis; identical to SEQ ID NO: 1404

SEQ ID NO: 14126 - protein, 214 aa, Neisseria meningitidis
MIVLVGLGNKKMKNNDCFRLKNPQSGMALIEVLVAMLVLTIGILALLSVQLRTVASVREAETQTIVSQITQNLMEGMLMNPTIDSDSNKKNYNLYMGNHTLSAVDGDFQVDAIKTKTQLAEAQLKRFSYELKNALPDAAAIHYAVCKDSSGVAPTLSAGSTFSSNCDASANGDTLIKVLWVNDSAGDSDINRTDLETNGNNIVYTYQARVGGRE

SEQ ID NO: 14127 - protein, 186 aa, Neisseria meningitidis; identical to SEQ ID NO: 9825

SEQ ID NO: 14128 - protein, 212 aa, Neisseria meningitidis
MSKLTPREILTAGAVVPVMAIDDLSTAVDLSHALVEGGIPTLEITLRTPVGLDAIRLIAKEVPNAIVGAGTVTNPEQLKAVEDAGAVFAISPGLHESLAKAGHNSGIPLIPGVATPGEIQLALEHGIDTLKLFPAEVVGGKAMLKALYGPYADVRFCPTGGISLATAPDYLALPNVLCVGGSWLTPKEAVKNKDWDTITRLAKEAAALKPKA

SEQ ID NO: 14129 - protein, 115 aa, Neisseria meningitidis
MRLNHKQGEAGEDAALAFLQSQGCTLLARNWHCAYGEIDLIVKNGGMILFVEVKYRKNRQFGGVAYSISPSKLLKLQRSVEYYLQLNRLTNVPCRLDAVLIEGSRPPEWIQNITG

SEQ ID NO: 14130 - protein, 313 aa, Neisseria meningitidis
MAIQWFPGHMNKAKKAIAERAKSVDMVIEMLDARMPASSENPLLAQLSKGKPKLKILNKQDLADPERTKIWLEHYNSRPDTCAIALDSSETGAHGKITQACRAMIPHRQGIDKPLRVLICGIPNVGKSTLINGMIGKKSAKTGNEPGITKAEQRLFLADDFWLYDTPGMLWPKIIVEESGYNLAAGGAVGRNALDEEEVALELLDYLRRHYLPMLQERYQADKDPSSHWDENVWLEWIAKKRGAVLSGGRINYQKAAENILTDFREGKIGRITLETPNQWETWLKKARQKEAELKAIREARKAERKGQKPSEA

SEQ ID NO: 14131 - protein, 240 aa, Neisseria meningitidis; identical to SEQ ID NO: 4968

SEQ ID NO: 14132 - protein, 213 aa, Neisseria meningitidis
LGTCAPPNKASPAAFTENGDSTDKEILMNRLLLLSAAVLLTACGSGETDKIGRASTVFNILGKNDRIEVEGFDDPDVQGVACYISYAKKGGLKEMVNLEEDASDASVSCVQTASSISFDETAVRKPKEVFKHGASFAFKSRQIVRYYDPKRKTFAYLVYSDKIIQGSPKNSLSAVSCFGGGIPQTDGVQADTSGNLLAGACMISNPIENPDKR

SEQ ID NO: 14133 - protein, 415 aa, Neisseria meningitidis
LNTRRVAVTGIGGITAFGRDWQSIQAAFKAEKNAVKYMDWHERFPELEAQLGAPIENYAPPKHWTRKQLRSMGRVSYLCVDAAEQALTDAGLLGDESITDGRMGVACGSSSGSTKDIGDVGELLLTGTSRNFSANTYVRMMPHTTAANIGIFFGLKGRIIPTSSACSSGSQGIGYAYEAIKYGLTDMMLAGGGEEFFSSEVYVFDSLYAASRRNGEPEKTPRPYDANRDGLVIGEGAGIFVLEELEHAKRRGAIIYAELVGYGANSDAYHISTPRPDAQGAILAFQTALQHAGLAPEDIGWINLHGTGTHHNDSMESRAVAAVFGNNTPCTSTKPQTGHTLGAAGAIEAAFAWGIADRQSNPEGKLPPQLWDGQNDPNLPAINLTGSGSRWETEKRITASSSFAFGGSNCVLIIG

SEQ ID NO: 14134 - protein, 479 aa, Neisseria meningitidis
VFYHSKTGDKKSAATDVSAARILTKVNMKPLDLNFICQALKLPMPSESKPVSRIVTDSRDIRAGDVFFALAGGRFDAHDFVEDVLAAGAAAVVVSREDCVAMDGALKVDDTLAALQTLAKVWRENVNPFVFGITGSVGKTTVKEMLAAVLRRRFGDNAVLATAGNFNNHIGLPLTLLKLNEKHRYAVIEMGMNHFGELAVLTQIAKPDAALVNNAMRAHVGCGFDGVGDIAKAKSEIYQGLCSDGMALIPQEDANMAVFKTATLNLNTRTFGIDSGDVHAENIVLKPLSCEFDLVCGDERAAVVLPVPGRHNVHNAAAAAALSLAAGLSLNDVAEGLQGFSNIKGRLNVKSGIKGATLIDDTYNANPDSMKAAIDVLARMPAPRIFVMGDMGELGEDEAAAMHAEVGAYARDQGIEAAYFVGDNSVEAAEKFGADGLWFAAKDPLIQVLRHDLPERATVLVKGSRFMQMEEVVEALEDK

SEQ ID NO: 14135 - protein, 498 aa, Neisseria meningitidis
MTTENQAGSPASGIGTSEQTKAALKAKKTFDPRASVIQIHPEGERIHPKKAEGRFAKLRIAAVLATQFVFYVIPWFNWSGRQAVVFNIPERHFFIFGLSLGVGDLIYLALLLMICAFGLFWWTTIAGRLWCGYSCPQTVYTEIMLWIDNLVEGDRNKRLKLEKSPWNFTKIRIKATKYLLIFLVCAWTGITFAGWFVPIRQFVPDLFTGAAGGGAVFAAAFYGFMTFFFAHIMREKVCLHMCPYARFQSAMFDKDTLIVSYDAERGEPRGARKKTVNKEEAGLGDCINCAMCVQVCPVGIDIRNGLQYQCIGCAACIDACDEIMDKMGYPRGLIRYTTESALEHEYAEKDIKKRLLRPRVAGYGAVLALVIIAFLAGLSTRKMVEVDILKDRGVLVRENAKGWLENAYSLRIINKSEKEQLITASVKGFDEIALTGLPEGGIKVAPRETVTLPVQVSTIPEYADKGSHPIEFTFQYRESGAPDGKPVVLEEDATFIGE

SEQ ID NO: 14136 - protein, 356 aa, Neisseria meningitidis
MAACPNESVKMDISDFDFTLPEKLIAQHPPEVRGSSRLLVALPDMPLQDRVFGDLSDYVGEGDVLVFNNTKVMKARLFGQKDSGGRIEALIERVLDNHTALAHIRSSKSPKPGMGLVFEGGIRAVMVGREGELFCLRFEGGQTVYELLEQNGHLPLPPYIERAADADDDSRYQTVYAKYQGAVAAPTAGLHFTEELLRRLKDKGAVTAEVTLHVGAGTFQPVRVEKIEEHKMHSEWFEVPSETAAAVEAAKARGNKVWAVGTTSMRALESAARATGRLKAGQGDTDIFITPGYRFNVADRLVTNFHLPKSTLLMLVSAFSGMGHIRAAYRYAVEREYRFFSYGDAMVLGRNEGVVR

SEQ ID NO: 14137 - protein, 288 aa, Neisseria meningitidis; identical to SEQ ID NO: 6758

SEQ ID NO: 14138 - protein, 543 aa, Neisseria meningitidis
LKKIKGTQMSIVEIKVPDIGGHENVDIIAVEVKAGDTIAVDDTLITLETDKATMDVPADAAGVVKEVKVKVGDKISEGGVILTVETGAAAAEAAPAAAEAQPAPAAAPVAAGGATVQVAVPDIGGHTDVDVIAVEIKVGDTVAEDDTLITLETDKATMDVPCTAAGVVKAVFLKVGDKVSEGTAIIEVETAGSAAAAPAQAAQAAAPAAAPPPTAAAAPAAAPAPSAPAAAKIDEAAFAKAHAGPSARKLARELGVDLGQVKGTGLKGRIVGDDIKAFVKSVMQGGAAKPAAAGASLGSSLDLLPWPKVDFSKFGNVEVKELSRIKKISGQNLSRNWVVIPHVTVHEEADMTELEEFRKQLNKEWEREGVKLSPLAFIIKASVSALKAFPEFNASLDGDNLVLKNYFNIGFAADTPNGLVVPVIKDVDQKGLKQISQELTELSKKAREGKLKPQEMQGACFTISSLGGIGGTGFTPIVNAPEVAILGVCKSQIKPIWNGKEFAPRLMCPLSLSFDHRVIDGAAGMRFTVFLAKLLKDFRRITL

SEQ ID NO: 14139 - protein, 597 aa, Neisseria meningitidis
MQLDIDRLVAYFGGVNALAEALKQHDPENAATTAAIYKWRTRGSLPLVQLQKLTALAEAQGRPLDLNAFLQKNESLERTEMTQANRVIIFDTTLRDGEQSPGAAMTKEEKIRVARQLEKLGVDIIEAGFAAASPGDFEAVNAIAKTITKSTVCSLSRAIERDIRQAGEAVAPAPKKRIHTFIATSPIHMEYKLKMKPKQVIEAAVKAVKIAREYTDDVEFSCEDALRSEIDFLAEICGAVIEAGATTINIPDTVGYSIPYKTEEFFRELIAKTPNGGKVVWSAHCHNDLGLAVANSLAALKGGARQVECTVNGLGERAGNASVEEIVMALKVRHDLFGLETGIDTTQIVPSSKLVSTITGYPVQPNKAIVGANAFSHESGIHQDGVLKHRETYEIMSAESVGWATNRLSLGKLSGRNAFKTKLADLGIELESEEALNAAFARFKELADKKREIFDEDLHALVSDEMGSMNAESYKFISQKISTETGEEPRADIVFSIKGEEKRASATGSGPVDAIFKAIESVAQSGAALQIYSVNAVTQGTESQGETSVRLARGNRVVNGQGADTDVLVATAKAYLSALSKLEFSAAKPKAQGSGTI

SEQ ID NO: 14140 - protein, 230 aa, Neisseria meningitidis
VQADLAYAAERITHDYPKATGANNTSTVSDYFRNIRAHSIHPRVSVGYDFGDWRIAADYASYRKWNNNKYSVNTKELQRNNNAGNWIELKTENQENGSFHAVSSLGLSAIYDFKLNDKFDKFKPYIGVRVAYGHVKHQVHSVETETKIIFTTPTGGAKVGGTIPNKSMSKPAYHERNSISSVGLGVIAGVGFDITPKLTLDTGYRYHNWGRLENTRFKTHEVSLGMRYHF

SEQ ID NO: 14141 - protein, 58 aa, Neisseria meningitidis; identical to SEQ ID NO: 903

SEQ ID NO: 14142 - protein, 91 aa, Neisseria meningitidis; identical to SEQ ID NO: 5612

SEQ ID NO: 14143 - protein, 65 aa, Neisseria meningitidis; identical to SEQ ID NO: 7687

SEQ ID NO: 14144 - protein, 357 aa, Neisseria meningitidis
MSITIQNLNKHFGAFHALKNINLNVPTGKLVSLLGPSGCGKTTLLRIIAGLENADGGNILFDGQDVTAKHVRERKVGFVFQHYALFRHMNVFDNVAFGLTVLPKSERPSKGQICTKVEELLKLVQLSHLAKSYPHQLSGGQRQRIALARALAVEPKLLLLDEPFGALDAKVRKELRTWLRDIHHNLGVTSILVTHDQEEALEVSDEIVVMNHGKIEQTGSAEAIYRKPENAFVTEFLGETDAFEGRIEKGFWHYNGFAWKLDAQYKWQEQTAIGYIRPHEWQIAAEHETPMICAEIEKVHAVGALTHILVKHGKQDVHITLAGSDAARYPIAEGKELKLIPKQVYVFSQNELIEYSI

SEQ ID NO: 14145 - protein, 637 aa, Neisseria meningitidis
MNPSPLLDLIDSPQDLRRLDKKQLPRLAGELRTFLLESVGQTGGHFASNLGAVELTIALHYVYDTPEDKLVWDVGHQSYPHKILTGRKNQMHTMRQYGGLAGFPKRCESEYDAFGVGHSSTSIGAALGMAAADKLLGSDRRSVAIIGDGAMTAGQAFEALNCAGDMDVDLLVVLNDNEMSISPNVGALPKYLASNVVRDMHGLLSTVKAQTGKVLDKIPGAMEFAQKVEHKIKTLAEEAEHAKQSLSLFENFGFRYTGPVDGHNVENLVDVLKDLRSRKGPQLLHVITKKGNGYKLAENDPVKYHAVAKLPKEGAAQMPSEKEPKPAAKPTYTQVFGKWLCDRAAADSRLVAITPAMREGSGLVEFEQRFPDRYFDVGIAEQHAVTFAGGLACEGMKPVVAIYSTFLQRAYDQLVHDIALQNLPVLFAVDRAGIVGADGPTHAGLYDLSFLRCVPNMIVAAPSDENECRLLLSTCYQADAPAAVRYPRGTGTGAPVSDGMETVEIGKGIIRREGEKTAFIAFGSMVAPALAVAEKLNATVADMRFVKPIDEELIVRLARSHDRIVTLEENAEQGGAGGAVLEVLAKHGICKPVLLLGVADTVTGHGDPKKLLDDLGLSAEAVERRVRAWLSDRDAAN

SEQ ID NO: 14146 - protein, 343 aa, Neisseria meningitidis
MGIKVAINGYGRIGRQVLRAIYDYQIQDQLQIVAVNASGSLETNAHLTKFDTVHGRFEADVSHDGGNLIVNGDKIPFFSTRNPAELPWKELGVDLVMECTGAFTSKEKAKVHLESGAKKVLISAPGGDDVDATVVYGVNDSVLTADMTVVSNASCTTNCLSPVAKVLSESVGIVKGAMTTIHALTNDQTVTDVRHKDLRRARSGVENMIPTKTGAAKAVGLVLPELKGRLDGLAIRVPTVNVSLVDLSFQAARDTTVEEINALMKAASEAGALKGVLGYNTLPLVSMDFNHTTEASHFDATLTKVVDGNMVKVFAWYDNEWGFSCQMLNTARRMFGLEVRPLK

SEQ ID NO: 14147 - protein, 369 aa, Neisseria meningitidis; identical to SEQ ID NO: 6840

SEQ ID NO: 14148 - protein, 146 aa, Neisseria meningitidis; identical to SEQ ID NO: 6802

SEQ ID NO: 14149 - protein, 464 aa, Neisseria meningitidis
MNKQPLSLAVVGHTNTGKTSLLRTLLRDSGFGEVRNAPSTTRHVEEAAISDGADTLVFLYDTPGLEDAGGVLEWLENHTDNRSDGIERLQQFLGSHGAHHDFNQEAKVLRQVLQSDMAMYVIDAREPVLDKYRDELIILSWCAKPVMPVFNFTGGQPPESWTTMLARRNLHVFAGFDTVAFDFEGELRLWENLATMLPERSTLDRLTAMRRREWQRLDGEARREIADFLIDAAAFRQEVDENEDTATVLQTMQAEIRQLERQMQQRLFALYRFYHSEIDGGDWMPQAFRQDPFDSELLKQYGIRTGTGAATGALIGLGLDIATLGGSLGLGTAIGGFLGGILPNTRTISDKLAGRQTLHTDPETLTLLAARALDLLHVLQTRGHAAQSDIELHSRKAPWDAARLPPELNKARSHWKWSSLNTHRPETSRAERAGYVEKLQIRLSGKYSELNLNQDKAASRRQYK

SEQ ID NO: 14150 - protein, 200 aa, Neisseria meningitidis; identical to SEQ ID NO: 321

SEQ ID NO: 14151 - protein, 280 aa, Neisseria meningitidis
MQNHVISLASAAERRAHIADTFGAHDIPFQFFDALMPSEALEQAMAELVPGLSAHPYLSGVEKACFMSHAVLWKQALDEGLPYVAVFEDDVLLGKDAEKFLAEDTWLEERFDKDSAFIVRLETMFAKVIVRPDKVLNYENRSFPLLESEHWGTAGYIISREAMRFFLERFAVLPAEWIKAVDWMMFTYFFDKEGMPVYQVNPALCTQELHYAKFLSKNSMLGSDLEKDREQERRHRRSLKVMFDLKRALGKFGREKKKRMERQRQAELEKAYGRRVISFK

SEQ ID NO: 14152 - protein, 294 aa, Neisseria meningitidis; identical to SEQ ID NO: 4254

SEQ ID NO: 14153 - protein, 199 aa, Neisseria meningitidis; identical to SEQ ID NO: 1022

SEQ ID NO: 14154 - protein, 363 aa, Neisseria meningitidis
MSLKCGIVGLPNVGKSTLFNALTQSGIEAANYPFCTIEPNVGIVEVPDPRMAELAKIVNPQKMQPAIVEFVDIAGLVAGASKGEGLGNQFLANIRETDAIVNVVRCFDDDNIVHVAGKVDPIADIETIGTELALADLASVEKAIVREEKRARSGDKDAQKLVDLCKKLLPHLDEGKPVRSFGLDAEELAMLKPLFLLTAKPAMYVGNVSEDGFENNPHLDRLKELAAKENAPVVAVCAAMESEIAELEEDEKAEFLAEMGLEEPGLNRLIRAGYDLLGLQTYFTAGVKEVRAWTIHKGDTAPQAAGVIHTDFERGFIRAQVISYEDFIALGGEAKAKEAGKMRVEGKEYVVQDGDVMHFLFNV

SEQ ID NO: 14155 - protein, 307 aa, Neisseria meningitidis
MTKTEPNNAQLDWLESESIHIIREVAAECENPALLFSGGKDSVVLLALACKAFRLGSRPVKLPFPLVHIDTGHNYPEVIAFRDAQAAKLNARLIVGRVEDSIAKGTVVLRKETDSRNAAQAVTLLETIEANGFDALMGGARRDEEKARAKERIFSFRDEFGQWDPKAQRPELWSLYNTRLHKGENMRVFPISNWTELDIWQYIARENLELPPIYYSHRREVVRRRGLLVPVTPLTPKMPSETSEILDVRFRTVGDISCTCPVESTASTPTEIIRETAVTDISERSATRLDDQASEAAMEKRKKEGYF

SEQ ID NO: 14156 - protein, 716 aa, Neisseria meningitidis
MKTPLLKPLLITSLPVFASVFTAASIVWQLGEPKLAMPFVLGIIAGGLVDLDNRLTGRLKNIITTVALFTLSSLTAQSTLGTGLPFILAMTLMTFGFTILGAVGLKYRTFAFGALAVATYTTLTYTPETYWLTNPFMILCGTVLYSTAIILFQIILPHRPVQESVANAYDALGGYLEAKADFFDPDEAAWIGNRHIDLAMSNTGVITAFNQCRSALFYRLRGKHRHPRTAKMLRYYFAAQDIHERISSAHVDYQEMSEKFKNTDIIFRIHRLLEMQGQACRNTAQALRASKDYVYSKRLGRAIEGCRQSLRLLSDSNDNPDIRHLRRLLDNLGSVDQQFRQLRHSDSPAENDRMGDTRIAALETGSLKNTWQAIRPQLNLESGVFRHAVRLSLVVAAACTIVEALNLNLGYWILLTALFVCQPNYTATKSRVRQRIAGTVLGVIVGSLVPYFTPSVETKLWIVIASTTLFFMTRTYKYSFSTFFITIQALTSLSLAGLDVYAAMPVRIIDTIIGASLAWAAVSYLWPDWKYLTLERTAALAVCSNGAYLEKITERLKSGETGDDVEYRATRRRAHEHTAALSSTLSDMSSEPAKFADSLQPGFTLLKTGYALTGYISALGAYRSEMHEECSPDFTAQFHLAAEHTAHIFQHLPETEPDDFQTALDTLRGELDTLRTHSSGTQSHILLQQLQLIARQLEPYYRAYRQIPHRQPQNAA

SEQ ID NO: 14157 - protein, 305 aa, Neisseria meningitidis; identical to SEQ ID NO: 5961

SEQ ID NO: 14158 - protein, 367 aa, Neisseria meningitidis
MLILQAERDSLLKPLQAVTGIVERRHTLPILSNVLIEGKGGQTKLLATDLEIQIDTAGPEGGAGDFRITTNAKKFQDILRALPAGALVSLDWDDSRLTLKAGKSRFALQTLPAADFPMMNVGEDISATFSLEQERFKTMLSQVQYSMAVQDIRYYLNGLLMQVEGSQLRLVATDGHRLAYAACAIDADLPRAEVILPRKTVLELFKLLNNPDDPIQIELLDKQVRFQCNGTTIVSKVIDGKFPDFNRVIPLDNDKIFVLSRAELLGALERASILANEKFRGARLFLQPGLLSVVCSNNEQEEAREEIEIAYQGGELEVGFNIGYLMDVLRNIHSDDMQLAFGDANRSTLFTVPNNPNFKYIVMPMRI

SEQ ID NO: 14159 - protein, 204 aa, Neisseria meningitidis
MTQCRLKGQAFRRHTAFRHAAQHRARRVPPRPKPDKQTEKEKGNTMKHILPLIAASALCISTASAHPASEPSTQNETAMTTHTLTSKYSFDETVSRLETAIKSKGMDIFAVIDHQEAAHRNGLTMQPAKVIVFGTPKAGTPLMVKDPAFALQLPLRVLVTETDGKVRAAYTDTRALIAGSRIGFDEVANTLANAEKLIQKTVGE

SEQ ID NO: 14160 - protein, 287 aa, Neisseria meningitidis; identical to SEQ ID NO: 2812

SEQ ID NO: 14161 - protein, 149 aa, Neisseria meningitidis
MSIYAVAHIVHLYCAIAFVGGVFFEVLVLSVLHTGRVSCEARREVEKAMSYRAVRVMPFVVGLLFASGIVMAANRYLSILGEPFATSFGTMLTLKILLAFSVLAHFAIAVVKMARSTLTVGWSKYIHTVVFTHMLLIVFLAKAMFYISW

SEQ ID NO: 14162 - protein, 608 aa, Neisseria meningitidis
LSETDSIMKKLICLFAVFLMLCGRAFALDANDLLPPEKAFVPELAVADDGVNVRFRIADGYYMYQAKIVGKTDPADLLGRPSFSKGEEKEDEFFGRQTVYHHEAQVAFPYAKAVGEPYKLVLTYQGCAEAGVCYPPVDTEFDISGNGTYHPQTDEPASAKDRFLQPSSQNGSGVLPPPKGDEGGDSRFKLSWDTLNANLLAFFLAGLGLSFTACMYPLLPIVSSIVVGDKKAGKARAFVLSVVYVQGLALTYTLVGIVAGLTGALLTVWLQQAWVVLAASALMVVLALSMFGLFNIQLPNAVQSYFQNQSSRLSGGKIVSVFIMGILSALIVGPCVAPPLAFALGYIGQTGDAVLGGLALYTLALGTGVPLIAIGTFGGHILPRAGDWMNAVKYAFGFILLAVAVYLATPHLPYYLVVALYTLLMLVPACMLLVNGRRQKRRPKAVAFALGGILLIGGAWFGWQGANGKTTALHHFLTLNPPAEAGKSSEHGKMFADTAALKAAMDTALKEHPDKPVVLDFYADWCISCKEMAAYTLNQPEVHQAVDMERFFQIDVTANTPEHQALLKEYGLFGPPGVFVVRSDGSRSEPLLGFVKADKFIEWYEQNR

SEQ ID NO: 14163 - protein, 291 aa, Neisseria meningitidis; identical to SEQ ID NO: 7133

SEQ ID NO: 14164 - protein, 299 aa, Neisseria meningitidis
MWFKQISFYPLNKEKLPEADVLADKLAEAEFTHCQGLDWFSEGFAAPVSFSPELVFPADFTLRVALKKEEKVLPAGVIRDILEEKVAEIQNNEARNVGRKEKQELKEQITDDLLPRAFTRSSRTEAVFNTRHGYLLVNNAASAKAENILTKLREALGGLEASLPNTKQSPSSLMTGWLLQGHCEGGFELDSDCELKGTGDIVPVVKVSKQDLTADEVVQHVKNGKTVTQLGLVWREQIAFILTQDFTLKRIQYLDVLQEEAESNGDDAASLAFASQILMAESVSTMLEELVSYLGGWQD

SEQ ID NO: 14165 - protein, 530 aa, Neisseria meningitidis; identical to SEQ ID NO: 11145

SEQ ID NO: 14166 - protein, 263 aa, Neisseria meningitidis
MNVYFLGGGNMAAAVAGGLVKQGGYRIYIANRGAEKRERLEKELGVETSATLPELHSDDVLILAVKPQDMEAACKNICTNGALVLSVAAGLSVGTLSRYLGGSRRIVRVMPNTPGKIGLGVSGMYAEAEVSETDRRIADRIMKSVGLTVWLEDEAQMHSITGISGSGPAYVFYLLDALQNAAIRQGFDMAEARALSLATFKGAVTLAEQTGEDFEKLQKNVTSKGGTTHEAVEAFRRHRVAEAISEGVCACVRRSQEMERQYQ

SEQ ID NO: 14167 - protein, 173 aa, Neisseria meningitidis; identical to SEQ ID NO: 9042

SEQ ID NO: 14168 - protein, 321 aa, Neisseria meningitidis
MSYTQLTQGERYHIQYLSRHCTVTEIAKQLNRHKSTISREIRRHRTQGQQYSAEKAQRQSQTIKQRKRQPYKLDSQLIQHIDTLIRRKLSPEQVCAYLCKHHQITLHHSTIYRYLRQDKSNGSTLWQHLRICSKPYRKRYGSTWTRGKVPNRVGIENRPAIVDQKSRIGDWEADTIVGKGQKSALLTLVERVTRYTIICKLDSLKAEDTARAAVRALKAHKDRVHTITMDNGKEFYQHTKITKALKAETYFCRPYHSWEKGLNENTNGLIRQYFPKQTDFRNISDREIRRVQDELNHRPRKTLGYETPSVLFLNLFQPLVP

SEQ ID NO: 14169 - protein, 440 aa, Neisseria meningitidis
MAETIPAALNMKGMMMFERSVIAMACIFALSACGGGGGGSPDVKSADTLSKPAAPVVAEKETEVKEDAPQAGSQGQGAPSTQGSQDMAAVSAENTGNGGAATTDKPKNEDEGPQNDMPQNSAESANQTGNNQPADSSDSAPASNPAPANGGSNFGRVDLANGVLIDGPSQNITLTHCKGDSCNGDNLLDEEAPSKSEFENLNESERIEKYKKDGKSDKFTNLVATAVQANGTNKYVIIYKDKSTSSARVRRSARSRRSLPAEMPLIPVNQADTLIVDGEAVSLTGHSGNIFAPEGNYRYLTYGAEKLSGGSYALSVQGEPAKGEMLAGTAVYNGEVLHFHTENGRSYPTRGRFAAKVDFGSKSVDGIIDSGDDLHMGTQKFKAAIDGNGFKGTWTENGGGDVSGRFYGPAGEEVAGKYSYRPTDAEKGGFGVFAGKKEQD

SEQ ID NO: 14170 - protein, 675 aa, Neisseria meningitidis
LSLSEFIERRTSFNPMVILTTLFFVCVLAVLVLTVPDQVQMWLDRAKEVIFTEFGWFYVLTFSIFLGFLLILSVSSLGNIRLGRDEDVPEFGFLSWLAMLFAAGMGVGLMFFGVAEPLMHYFSDITAGTPEHRQQQALLHTVFHWGVHAWSVYGTIALALAYFGFRYKLPLALRSCFYPLLKEKISGRFGDAIDIMALLATFFGIITTLGFGASQLGAGLQEMGWIAENSFSVQVLIIAAVMSLAVVSAISGVGKGVKVLSELNLSLAFLLLFFVLAAGPTVYLLSAFGDNIGNYLENLVRLSFKTYAYEREHKPWFESWTVLYWAWWCSWAPFVGLFIARISKGRTIREFVFGVLLIPGLFGVLWFTVFGNTAIWLNDGVAGGMLEKMTSSPETLLFKFFNYLPLPELTSIVSLLVISLFFVTSADSGIYVLNNITSRDKGLSAPRWQAVMWGVLMSAVAVLLMRSGGLGNLQSMTLIVSLPFALLMLIMCFSLWKGLSADKKYFETRVNPTSVFWTGGKWKERLVQIMSQTQEQDILKFLKHTASPAMHELQRELSEEYGLSVRVDKMFHQDEPAIEFVIRKETMRDFMYGIKSVGQDVSDQLINDGNLPHIRHQTTYKPYAYFFDGRVGYDVQYMNKDELIADILKNYERYLMLLDDVGQELMAHEQVELAE

SEQ ID NO: 14171 - protein, 459 aa, Neisseria meningitidis
MFAFKSLLDMPRGEALAVVVALIAAMGYTIISLEWLPHMSIIAAIVVLILYGLVRGLKYNDMQQGMIGALNQGMGAIYLFFFIGLMVSALMMSGAIPTLMYYGFGLISPTYFYFSAFALCSVIGVSIGSSLTTCATVGVAFMGMAAAFQADMAMTAGAIVSGAFFGDKMSPLSDTTGISASIVGIDLFEHIKNMMYTTIPAWLISAALMLWLLPNVAAQDLNSVESFRSQLEATGLVHGYSLIPFALLVILALMRINAVVAMLFTVMVAVAVTYLHSTPDLRQLGAWFYGGYKLEGEAFKDVVKLISRGGLESMFFTQTIVILGMSLGGLLFALGVIPSLLEAIRTFLTNAGRATFSVAMTSVGVNFLIGEQYLSILLSGETFKPVYDRLGLHSRNLSRTLEDAGTVINPLVPWSVCGVFISHALGVPVWEYLPYAFFCYLSLALTLLFGWTGLTLSKK

SEQ ID NO: 14172 - protein, 268 aa, Neisseria meningitidis; identical to SEQ ID NO: 8872

SEQ ID NO: 14173 - protein, 210 aa, Neisseria meningitidis
MRKTKTEALKTKEHLMLAALETFYRKGIARTSLNEIAQAAGVTRGGLYWHFKNKEDLFDALFQRICDDIENCIAQDAKDAEGESWTVFRHTLLHFFERLQSNDIYYKFHNILFLKCEHTEQNAAVIAIARKHQAIWREKITAVLTEAVENQDLADDLDKETAVIFIKSTLDGLIWRWFSSCERFDLGKTAPRIIGIMMDNLENHPDLRRK

SEQ ID NO: 14174 - protein, 143 aa, Neisseria meningitidis; identical to SEQ ID NO: 6042

SEQ ID NO: 14175 - protein, 706 aa, Neisseria meningitidis
MRRFLPIAAICAVVLLYGLTAATGSTSSLADYFWWIVAFSAMLLLVLFAVLARYVILLLKDRRDGVFGSQIAKRLSGMFTLVAVLPGVFLFGVSAQFINGTINSWFGNDTHEALERSLNLSKSALNLAADNALGNAIPVQIDLIGAASLPGDMGRVLEHYAGSGFAQLALYNAASGKIEKSINPHKLDQPFPGKARWEKIQQAGSVRDLESIGGVLYAQGWLSAGTHNGRDYALFFRQPVPKGVAEDAVLIEKARAKYAELSYSKKGLQTFFLATLLIASLLSIFLALVMALYFAHRFVEPVLSLAEGAKAVAQGDFSQTRPVLRNDEFGRLTKLFNHMTEQLSIAKESDERNRRREEAARHYLECVLEGLTTGVVVFDEQGRLKTFNKAAEQILGMPLTPLWGSSRHGWHGVSAQQSLLAEVFAAIGAAAGTDKPVHVKYAAPDDAKILLGKATVLPEDNGNGVVMVIDDITVLIHAQKEAAWGEVAKRLAHEIRNPLTPIQLSAERLAWKLGGKLDEQDAQILTRSTDTIVKQVAALKEMVEAFRNYARSPSLKLENQDLNALIGDVLALYEAGPCRFAAELAGEPLMVAADTTAMRQVLHNIFKNAAEAAEEADVPEVRVKSEAGQDGRIVLTVCDNGKGFGREMLHNAFEPYVTDKPAGTGLGLPVVKKIIEEHGGRISLSNQDAGGACVRIILPKTVKTYA

SEQ ID NO: 14176 - protein, 94 aa, Neisseria meningitidis; identical to SEQ ID NO: 6698

SEQ ID NO: 14177 - protein, 111 aa, Neisseria meningitidis
MPSEALSGLQTAFCFPTVYKLSLFLDRNNDLIYLKRLEDMIMGFWDSAANLAKEAGEGVKRFNERSRKLQNEYQQESSEKLRRVVNSEGFFGNSAQEKAIARKVLKERGEG

SEQ ID NO: 14178 - protein, 414 aa, Neisseria meningitidis
MFVPLAMLAGMFSYYETFHETEALQDDLLRQAALYVAPDSKPETLPEGDGDTRIFVQMPQQEDPVVSLPAHLADGLHTLQADGDDDYYRVYIRTTEQGRIAVMQENEYREDLAADAARQSVLPLLAALPLMILLTVWITHKAMRPVRKLSQSLEQRRINDLSALSVDNIPSEIRGFVTAINLLLKRADEDIRHRQRFVADAAHELRTPMTALSLQAERLNNMSLPPDAARQPAVLQQSIRRNKHLLEQLLALARSQSDETPLTKTTFGLQSRFRQVLQELMPLALEKRQDIGVAVGGDVEVSADETEIYTLIKTFADNAVRYTPPEGRIDLGFTDEGKYLAVWVEDNGNGIPESERARVLDPFYRILGTEQQGPGLSIADTLAKKYGGHLELTDSRRFGHGLLIRALLDKETLK

SEQ ID NO: 14179 - protein, 161 aa, Neisseria meningitidis
MRFFGIGFLVLLFLEIMSIVWVADWLGGGWTLFLMAATFAAGVLMLRHTGLSGLLLAGAAMRNGGRVSVYQMLWPIRYTVAAVCLMSPGFVSSVLAVLLLLPFKGGAVLQAGGAENFFNMNQSGRKEGFSRDDDIIEGEYTVEEPYGGNRSRNAIEHKKDE

SEQ ID NO: 14180 - protein, 175 aa, Neisseria meningitidis; identical to SEQ ID NO: 5147

SEQ ID NO: 14181 - protein, 545 aa, Neisseria meningitidis; identical to SEQ ID NO: 3410

SEQ ID NO: 14182 - protein, 262 aa, Neisseria meningitidis
MNPQDKCWQVHRHLAEYADQRLTLVRNAPKYILLAGADADISRSLLAKRYPQAVFEEYDSRADFLAAAAAARKGGFWQRFTGKGVVQHCQSPIAPLPEACADMLWSNLGLLAAEQILPVLHNWARALKTDGLLFFTCFGRDTFTELKCRLKENGIESRSVMFPDMHDLGDMLAENGFYDPVTDTAKLVLDYKKAETFWADMDTLGVWRAMAWNDENAARSCVGTIFEREGGLGITLETVYGHAVKKLMLPQGENVVQFFPKR

SEQ ID NO: 14183 - protein, 798 aa, Neisseria meningitidis; identical to SEQ ID NO: 6178

SEQ ID NO: 14184 - protein, 758 aa, Neisseria meningitidis
MAQTTLKPIVLSILLISTPILAQAHETEQSVDLDEVTVVGKSRPRATSGLLHTSTASDKILSGDTLRQKAVNLGDALDGVPGIHASQYGGGASAPVIRGQTGRRIKVLNHHGETGDMADFSPDHAIMVDTALSQQVEILRGPVTLLYSSGNVAGLVDVADGKIPEKMPENGVSGELGLRLSSGNLEKLTSGGINIGLGKNFVLHTEGLYRKSGDYAVPRYRNLKRLPDSHADSQTGSIGLSWVGEKGFIGVAYSDRRDQYGLPAHSHEYDDCHADIIWQKSLINKRYLQLYPHLLTEEDIDYDNPGLSCGFHDDDDAHAHTHSGRPWIDLRNKRYELRAEWKQPFPGFEALRVHLNRNDYRHDEKAGDAVENFFNNQTQNARIELRHQPIGRLKGSWGVQYLQQKSSALSAISEAVKQPMLLDNKVQHYSFFGVEQANWDNFTLEGGVRVEKQKASIQYDKALIDRENYYNHPLPDLGAHRQTARSFALSGNWYFTPQHKLSLTASHQERLPSTQELYAHGKHVATNTFEVGNKHLNKERSNNIELALGYEGDRWQYNLALYRNRFGNYIYAQTLNDGRGPKSIEDDSEMKLVRYNQSGADFYGAEGEIYFKPTPRYRIGVSGDYVRGRLKNLPSLPGREDAYGNRPFIAQDDQNAPRVPAARLGFHLKASLTDRIDANLDYYRVFAQNKLARYETRTPGHHMLNLGANYRRNTRYGEWNWYVKADNLLNQSVYAHSSFLSDTPQMGRSFTGGVNVKF

SEQ ID NO: 14185 - protein, 212 aa, Neisseria meningitidis
MKKINVAPENPQYRIVEIFESLQGEGWNTGMPAVFVRLGKCNLACGWCDTDYLTFGMMSLSDILGCLKTYAARNIIITGGEPTIQPHLDMLLDTLKAEGYFLCLETNGLNPAPPQIDYVATSPKACYAAKYEKSCIETADEVRIVADGDVVAFCENMERKIRAHHYYLSPCEQDGAMNIYDTIRQIGILNSRPDASVHWQLSVQTHKWAGIE

SEQ ID NO: 14186 - protein, 320 aa, Neisseria meningitidis
MQYAKISGTGSYLPANRVSNDDLAQKVDTSDEWITARTGIKFRHIAAENEKTSDLAAEAARRALADAKLNINDIDLIIVATATPDMQFPSTATIVQQKLGITNGCPAFDVQAVCAGFMYALTTANAYIKSGMAKNALVIGAETFSRIVDWNDRTTCVLFGDGAGAVVLSAADKPGIIHSKLKADGNYLKLLNVPGQIACGKVSGSPYISMDGPGVFKFAVKMLSKIADDVIEEAGYTAAQIDWIVPHQANRRIIESTAKHLGLSMDKVVLTVQDHGNTSAASIPLALDTGIRSGQIKRGQNLLLEGIGGGFAWGAVLLQY

SEQ ID NO: 14187 - protein, 138 aa, Neisseria meningitidis; identical to SEQ ID NO: 489

SEQ ID NO: 14188 - protein, 382 aa, Neisseria meningitidis
MNTPPFVCWIFCKVIDNFGDIGVSWRLARVLHRELGWQVHLWTDDVSALRALCPDLPDVPCVHQDIHVRTWHSDAADIDTAPVPDVVIETFACDLPENVLHIIRRHKPLWLNWEYLSAEESNERLHLMPSPQEGVQKYFWFMGFSEKSGGLIRERDYCEAVRFDSGALRKRLMLPEKNAPEWLLFGYRSDVWAKWLEMWRQAGSPLTLLLAGAQIIDSLKQNGVIPQDALQNDGDVFQTASVRLVKIPFVPQQDFDKLLHLADCAVIRGEDSFVRAQLAGKPFFWHIYPQDENVHLDKLHAFWDKAHGFYTPETASAHRCLSDDLNGGGALSATQRLECWQILQQHQNGWRQGAEDWSRYLFGQPSASEKLAAFVSKHQKIR

SEQ ID NO: 14189 - protein, 200 aa, Neisseria meningitidis; identical to SEQ ID NO: 7230

SEQ ID NO: 14190 - protein, 288 aa, Neisseria meningitidis; identical to SEQ ID NO: 464

SEQ ID NO: 14191 - protein, 242 aa, Neisseria meningitidis; identical to SEQ ID NO: 4670

SEQ ID NO: 14192 - protein, 431 aa, Neisseria meningitidis
MAQKIQSVKGMNDLLPVEQKDFKLTAAFWQAFEDTVNRWTRAYGYQQIRTPIVEQTGLFVRSIGEETDVVGKEMYTFSDSNDSLSLSLRPEGTASCLRAVVEHNLLYNSPQKLWYMGPMFRRERPQKGRYRQFHQVGIEALGFEGPDIDAEIIAMSADLWEKLGIREYLTLEINSLGNREERAAHRAALVEYLTRYEDKLDEDSKRRLKTNPLRVLDTKNPDLQEICNAAPRLVDYLGEASQNHYARFKAMLDGLGIQYIENPRLVRGLDYYNQTVFEWTTDKLGAQATVCGGGRYDGLIEELGGKPAPSIGFAMGIERLLFLVSEYGSLEVNAAPDVYAMHQGEGADLQVMKYAQALRTQGFNVMQHSGYQSLKAQMKKADNSGARFALIVAQDELANGTVTLKDMNGAHGQQTVAAEDLTHTLQQWKNA

SEQ ID NO: 14193 - protein, 197 aa, Neisseria meningitidis; identical to SEQ ID NO: 763

SEQ ID NO: 14194 - protein, 284 aa, Neisseria meningitidis
MAEITAKMVADLRAATGLGMMECKKALVEAEGNFDKAEEILRIKSGAKAGKLAGRTAAEGVLAYAINGNVGALVEVNCETDFVAKDAGFVEFANFVAKTAAEKKPASVEELSELVEAERKAIIAKLGENMSVRRFQVIDTANQLVAYIHGALATEGVLVEYKGSEDVARKIGMHIVAAKPQCVSEAEVDAETVEKERHIYTEQAIASGKPADIAAKMVEGRIRKFLAEITLNGQAFVMNPDQTVAQFAKENGTEVISFVRYKVGDGIEKAVVDYAAEVAAAAKV

SEQ ID NO: 14195 - protein, 172 aa, Neisseria meningitidis; identical to SEQ ID NO: 1639

SEQ ID NO: 14196 - protein, 321 aa, Neisseria meningitidis
MLRLTALAVCTALALGACSPQNSDSAPQAKEQAVSAAQSESASVTVKTARGDVQIPQNPERIAVYDLGMLDTLSKLGVKTGLSVDKNRLPYLEEYFKTTKPAGTLFEPDYEALNAYKPQLIIIGSRAAKAFDKLNEIAPTIEMTADTANLKESAKERIDALAQIFGKQAEADKLKAEIDASFEAAKTAAQGKGKGLVILVNGGKMSAFGPSSRLGGWLHKDIGVPAVDESIKEGSHGQPVSFEYLKEKNPDWLFVLDRSAAIGEEGQAAKDVLNNPLVAETTAWKKGQVVYLVPETYLAAGGAQELLNASKQVADAFNAAK

SEQ ID NO: 14197 - protein, 234 aa, Neisseria meningitidis; identical to SEQ ID NO: 6533

SEQ ID NO: 14198 - protein, 527 aa, Neisseria meningitidis
MPNKKKKAAFARAATENGVPDVSNIKNSYDDLMYESGAFSQTAINNLEARARLMGLQPAPAANAKVLELGCSMGGNIITQALYYPDAEFVGIDLSGRQVAQGNAIIERMGLENVRLEEKDILTIDESFGKFDYIIVHGIWSWVPDTVKDKIFSICRNNLTEHGIAYISYNVYPGWKRQEQLRDIMQFSSRDVLEEPLEARTRKGLDALKALAEILENDKGLGGGGKLPAIQKILNHNFYYIAHEYMEAFNDPIYVNGFIEWANRHRLAYIGDTDLHASFVSWMAEHTRERILALAGGDYIAKEFYSDILSDRQFRRSLLCREEVGDTVRRDESVSVEVIESLNFRPARGERIDFDENDTLLSGIRDVMKTGEAFKTEDVAENLARRFPGLTFDRMKINSQLLLQTILGRFSVSSDNAGKPFFEDHKTYVPARFTDYVAAFVEHGAEAFVQPANRYNESTPSFGYGHLYIMRQLSRPTSKQALIETVAENLNIVSTTPDGLTFHPPAEVYVEEILADLADRHFLVSVD

SEQ ID NO: 14199 - protein, 165 aa, Neisseria meningitidis
MNNLPVADLLVSAIIAACIVLSAMRGVIAEAGSMAAWVVAFFFAKLFAAPFADIAFASFQPRLFALALSFISLFVIACLIQKILRSLLTGAVSAVGLGFANRILGGVFGALKGILIITLLVILASKTDLPDTEEWRQSYTLPFFVSLSEAVLNHSGGTAETPEDD

SEQ ID NO: 14200 - protein, 1034 aa, Neisseria meningitidis
MNKTLKRQVFRHTALYAAILMFSHTGGGGAQAQTSKYAIIMNERNQLEVKQEGSYSTLREKDRERKFDFNANRGGGGSVFFDNTDTLVSRQSGTAVFGTATYLPPYGKVSGFDANALKERNNAVDWIHTTRAGLAGYAYTNVICRSSDQCPQLVYETKFAFSNKDLANNAGRLDRHSDPSRENSPIYKLKDHPWLGVSFNLGSEGTAKDGKSFNKLVSSFDENNSNQNLVYTTKGHHISLGDWQREHTAMAYYLNAKLHLLDKKGIKDIAQGKTVDLGTLRPRVEAKVRRGGGNLLNFWATWKIEDKGNITVRLDLPEVKAGRCTNAAHPNPKVQALSPALTAPALWFGPVQNGKAQMYSASVSTYPDSSSSRIFLQNLERKTDPGRPGRYSLKPLNEAQIKSKEPSFTSRQTIIRLDGGVHEIKLQGNEVANFNGNDGKNETFGIVSEGSFMPDDSEWKKVLLPWTVRVFADDSKFKEFNKEEKDNKPKYSQKYRSRDTNNGNRNLGDIINSPIVAVGEYLATSANDGMVHIFKKGNGGDERNYSLKLSYIPGTMPRKDIQSQDSTLAKELRAFAEKGYVGDRYGVDGGFVLREVERDGKTRVFMFGAMGFGGRGAYALDLTKADGSDPTAVSLFDVKNGNNGKNSNNSNNSVQLGYTVGTPQIGKTHDGKYAAFLASGYATKDINSTENQTALYVYDLESSGTLIKKIEVPNGKGGLSSPTLVDKDLDGMVDIAYAGDRGGNMYRFDLSGQDPNQWSVRTIFSGNKPITSAPAISQLKDKRVVIFGTGSDLSEEDVLSTDEQHIYGIFDNDTNTGTAQDGQGNGLLEQVLKKDGNTLFLSDYKRSNGSGDKGWVVKLEAGQRVTVKPTVVLRTAFVTIRKYKDNGCGAETAILGINTADGGKLTKKSARPIVPEANTAVAQYSGHKKTANGKSIPIGCMEKDGGTVCPNGYVYDKPVNVRYLDEKKTDGFSTTADGDAGGSGIDPAGKRSGKNNRCFSQKGVRTLLMNDLDSLDITGPTCGMKRISWREVFY

SEQ ID NO: 14201 - protein, 122 aa, Neisseria meningitidis
MKPLKRHPALIGLSCDHHHSLSLCVRLLRTPEERHRDELEPHFSELETHFREEETKFAPIWQNVAPELKQRFEKDHARLRQMMASPEYGNAAWNTAFATTLRDHARFEERELFPAAEPFLPA

SEQ ID NO: 14202 - protein, 87 aa, Neisseria meningitidis
  misc_feature 2, 3, 4: 'Xaa' is any amino acid
VXXXYVQSVEVKNGVITATMLSSGVNKEIQGKKLSLWAKRQDGSVKWFCGLPVQRNANNADDVAADTAKKIDTKHLPSTCRDESTAS

SEQ ID NO: 14203 - protein, 251 aa, Neisseria meningitidis; identical to SEQ ID NO: 2955

SEQ ID NO: 14204 - protein, 239 aa, Neisseria meningitidis; identical to SEQ ID NO: 5111

SEQ ID NO: 14205 - protein, 141 aa, Neisseria meningitidis; identical to SEQ ID NO: 7081

SEQ ID NO: 14206 - protein, 103 aa, Neisseria meningitidis; identical to SEQ ID NO: 2548

SEQ ID NO: 14207 - protein, 354 aa, Neisseria meningitidis
MKAARFYDKGDIRIEDIPEPTVAPGTVGINVAWCGICGTDLHEFMEGPIFIPPCGHPHPISGESAPVTMGHEFSGVVYAVGEGVDDIKVGQHVVVEPYIVHDDVPTGPGSNYHLSKDMNFIGLGGCGGGLSEKIAVKRRWVHPISDKIPLDQAALIEPLSVGHHAYVRSGAKAGDVALVGGAGPIGLLLAAVLKAKGIKVIITELSKARKDKARESGVADYILDPSEVDVVEEVKKLTNGEGVDVAFECTSVNKVLDTLVEACKPAANLVIVSIWSHPATVNVHSVVMKELDVRGTIAYCNDHAETIKLVEEGKINLEPFITQRIKLDELVSEGFERLIHNNESAVKIIVSPNL

SEQ ID NO: 14208 - protein, 183 aa, Neisseria meningitidis
VNYCEFAASLPENTDNPNKHYHDTQYGFPIDSDNGLFERLVLEINQAGLSWTLMLKKRQAFQTAFEGFDIDTVAAFDDTDRERLLADAGIVRNRLKIDAAIFNARQIQALQQEYGSFKNWLDAHHPRSKDEWVKLFKKHFKFVGGEIVGEFLMSTGYLKGAHAESCPVYRETLKYHPKWLDAI

SEQ ID NO: 14209 - protein, 239 aa, Neisseria meningitidis
MLTTPPLAPKTVAALHRLGIRTLEELRQNGSVKAFLLLKASGLTLTKSTLWQLESLLNGTLPQEITQHDKTRLFAELKNHPPVAAFPPQEEMEHFMREALRQAEQSAADGEIPVGAVIVSDGKIIASAHNTCIADCNVSCHAEINALAQAGSEMQNYRLDGCDIYITLEPCAMCASALIQARIRRVIYGAAEPKTGAAGSIVNLFADKRLNTHTAIRGGILQEECRAVLNRFFQNKRKG

SEQ ID NO: 14210 - protein, 222 aa, Neisseria meningitidis
MKNLAIFDLDNTLINTDSDHAWPQYLIKKGLVDAAETEAQNEKFYRDYQNGCLDIDAFLKFHLAPLARYSKEELAEFHREFMAEYIIPRISPMQRMLVQSHQMAGDETLVISSTNEFIITPICHLFGITNIIGTQLETDPDGRYTGNYIGTPSLKEGKITRLNQWLAERGETLESYGKTYFYSDSKNDLPLLSLVNEPVAVNPDAELEQEAKEKGWPVLNFK

SEQ ID NO: 14211 - protein, 98 aa, Neisseria meningitidis
LTVEYFMLLATDGEDVHEARMAARPEHLKRLETLKSEGRLLTAGPNPLPEDSNRVSGSLIVAQFESLDAAEAWAEDDPYVHAGVYSEVLIKPFKAVFK

SEQ ID NO: 14212 - protein, 170 aa, Neisseria meningitidis
  misc_feature 3, 4: 'Xaa' is any amino acid
VCXXQDDTQARLEQQQKQIEALQQQLAQQADDTVYQLTPEAVKDTIPAEAQANGNNGQPVTGKDGQQYIYDQSTGSWLLQSLVGAAAGAFIGNALANKFTRAGNQDSPVARRARAAYHQSARPNARTSRDLNTRSLRAKQQAAQAQRYRPTTRPPANYRRPAMRGFGRRR

SEQ ID NO: 14213 - protein, 119 aa, Neisseria meningitidis; identical to SEQ ID NO: 3147

SEQ ID NO: 14214 - protein, 686 aa, Neisseria meningitidis
MTQTLLIELLTEELPPKALNNLGNHFAASVAEGLEKAQLIAGAAEFTAYASPRRLAVQVKNVKAVQADQKIVKKGPAVANAVKDGAPTKALEGFARGAGAKIEDLTIVHDGKQDVYAYEYVQTGKPLGELLEDIINAAVKKLPIPKVMRWGSSTFTFVRPVHGLIVLHGGDIVNVSVLGLQSGNQTLGHRFLSNGEITIENADSYAEQMRGQGKVVASFAERKAAIQTALEGQARRLNATVAADEALLDEVTALVEYPVVLEAGFEEHFLAVPQECLILTMQQNQKYFPLLDQNGKLMNRFLLVSNLQTADPSHIIQGNERVLRARLSDAEFFYKQDQKATLESRLPKLANVVYHNKIGSQAERIERLQSIAAHIAKALGADAAAAERAARLAKADLVTEMVGEFPELQGTMGKYYARLDGETEEIAEAIEQHYQPRFAGDNLPNGKVATAVALADKLETLVGIWGIGLIPTGDKDPYALRRAALGILRMLMQYGLDVNELIQTAFDSFPKGLLNEKTPSETADFMQARLAVLLQNDYPQDIVAAVLAKQPRRLDDVVAKLQAVAAFKQLPEAAALAAANKRVQNLLKKADAELGAVNESLLQQDEEKALFAAAQGLQPKIAAAVAEGNFQTALSELASVKPQVDAFFDGVMVMAEDAAVKQNRLNLLNRLAEQMNAVADIALLGE

SEQ ID NO: 14215 - protein, 172 aa, Neisseria meningitidis
MTTHFVVMGVCGCGKTTAALSLQKHLGQCPYAEGDEFHTQANRDKMGAGIPLTDEDRYPWLGNLRDWMTKQAQNGANHTIVTCSALKRGYRDILRGAEGKAAFIHLSPPQDINLERMMSRKGHYMKAGMLDSQLEILEELGEGEYGVKIANPGTPEAVEADILNWVASENLL

SEQ ID NO: 14216 - protein, 52 aa, Neisseria meningitidis; identical to SEQ ID NO: 7295

SEQ ID NO: 14217 - protein, 152 aa, Neisseria meningitidis
MPITPPLNIISPKLYPNEQWNESEALGAITWLWYQSPTHRQVPIVEMMTYILPVLKNGQFALFCKGTQPIGYISWAYFDEVAQAHYLESDRHLRDNSDWNCGDNIWLIQWFAPLGHSHQMRSAVRQLFPSTTVRALYHKGSDKGLRILTFKT

SEQ ID NO: 14218 - protein, 269 aa, Neisseria meningitidis
MAKIGDFAAKSMIEIRSKRMITLPSLNNLPSKWDEIRYWLETRVCECGVMPHPNLTECEAGQFDRDFWDNIGCAPEEYVRIRRAIRLLEARYPDSLNELVCAAIATPLGEMLAVFGNKGLCLLEFVGQKHMEQEIAAVQKALRGRFVFREDERTQLLRQELDLYFKGRLKTFATPLEQIGTEFQKQAWDVLLAIPYGETRSYKEQAQRLGNPKAVRAVAAANGQNKVSVLIPCHRVIGSDGKLTGYAGGLNRKQFLLALERGEVQTALF

SEQ ID NO: 14219 - protein, 166 aa, Neisseria meningitidis; identical to SEQ ID NO: 1240

SEQ ID NO: 14220 - protein, 108 aa, Neisseria meningitidis
LGEKIKDGKNQKTVLSREEEQKICNTFTHKQAVEDFSVVVGYDEIKAKNYSLSAGQYFEVKIDYVDISAEEFKQRMAGFSADLDKLFAESAKLEKEIKDRLAMLEFNS

SEQ ID NO: 14221 - protein, 405 aa, Neisseria meningitidis; identical to SEQ ID NO: 8083

SEQ ID NO: 14222 - protein, 313 aa, Neisseria meningitidis
MKTLLLLIPLVLTACGTLTGIPAHGGGKRFAVEQELVAASSRAAVKEMDLSALKGRKAALYVSVMGDQGSGNISGGRYSIDALIRGGYHNNPESATQYSYPAYDTTATTKSDALSSVTTSTSLLNAPAAALTRNSGRKGERSAGLSVNGTGDYRNETLLANPRDVSFLTNLIQTVFYLRGIEVVPPEYADTDVFVTVDVFGTVRSRTELHLYNAETLKAQTKLEYFAVDRDSRKLLIAPKTAAYESQYQEQYALWTGPYKVSKTVKASDRLMVDFSDITPYGDTTAQNRPDFKQNNGKNPDVGNEVIRRRKGG

SEQ ID NO: 14223 - protein, 83 aa, Neisseria meningitidis; identical to SEQ ID NO: 5347

SEQ ID NO: 14224 - protein, 274 aa, Neisseria meningitidis
MIKKTIGGIIPIFTAVFIPASAGAADLMLAQEYKDQEIAGWAMSEKLDGVRAYWDGKHLISRQGYAFTPPKGFTAQFPPYPLDGELYSGRGQFEQISATVRSVSSDWRGIRLHVFDVPKAQGNLYQRLAVATQWLKTHPNAPITIIPQIKVRDRQHAMDFLKQIEAQGGEGVMLRQPESRYSGGRSSQLLKLKSQYDDECTVTRHYEGKGRNAGRLGAVGCKNRYGEFRIGSGFKDKDRDNPPKIGTLITYRYRGFTQKGTPKFATFVRVRTDR

SEQ ID NO: 14225 - protein, 348 aa, Neisseria meningitidis
MKMQAVVVNKNVAGDVEIVEREVRPLEYGEALVEVEYCGVCHTDLHVAAGDYGEKPGRVLGHEGIGLVKEVADGVKNLKVGDRVSIAWLFQSCGSCEYCNTGRETLCRSVLNAGYTADGGMATHCIVNADYAVKVPDGLDPAQASSITCAGVTTYKAIKVSSVRPGQWIAIYGAGGLGNLGVQYAKKVFGAHVVAIDINDDKLAFAKETGADLVVNAAKEDAAKVIQEKTGGAHAAVVTAVSAAAFNSAVNCVRAGGRVVAIGLPPESMDLSIPRLVLDGIEVVGSLVGTRKDLEEAFQFGAEGLVVPKVQLRALDEAPAIFQEMREGKITGRMVIDMKKECGCGHHH

SEQ ID NO: 14226 - protein, 369 aa, Neisseria meningitidis; identical to SEQ ID NO: 7375

SEQ ID NO: 14227 - protein, 262 aa, Neisseria meningitidis; identical to SEQ ID NO: 5957

SEQ ID NO: 14228 - protein, 103 aa, Neisseria meningitidis
MKKSLFAAALLSLVLAACGGEKAAEAPATEAPAAEAPATEAPAAEAPAAEAAATEAPAAEAAATEAPAAEAPAAEAAATEAPAAEAAASEAPAAEAPAAEAAK

SEQ ID NO: 14229 - protein, 433 aa, Neisseria meningitidis
MAIYQSGVIFDQVDTANPDCWTLDEYVKRGGYTALRKILSGNISQTDVIDEVKTSGLRGRGGAGFPTGLKWSFMPRSFPGEKYVVCNTDEGEPGTFKDRDIIMFNPHALIEGMIIAGYAMGAKAGYNYIHGEIFEGYQRFEAALEQARAAGFLGKNILGSDFEFELFAHHGYGAYICGEETALLESLEGKKGQPRFKPPFPASFGLYGKPTTINNTETFSSVPFIIRDGGQAFADKGIPNAGGTKLFCISGHVERPGNYEVPLGTPFAEVLKMAGGMRGGKKLKAVIPGGSSAPVLPADIMMQTNMDYDSISKAGSMLGSGAIIVMDEDVCMVKALERLSYFYYDESCGQCTPCREGTGWLYRIVHRIVEGKGKMEDLDLLDSVGNQMAGRTICALADAAVFPVRSFTKHFRDEFVHYIEHGGPMKEHKWGGW

SEQ ID NO: 14230 - protein, 261 aa, Neisseria meningitidis; identical to SEQ ID NO: 6798

SEQ ID NO: 14231 - protein, 473 aa, Neisseria meningitidis; identical to SEQ ID NO: 1953

SEQ ID NO: 14232 - protein, 604 aa, Neisseria meningitidis; identical to SEQ ID NO: 7653

SEQ ID NO: 14233 - protein, 608 aa, Neisseria meningitidis; identical to SEQ ID NO: 8337

SEQ ID NO: 14234 - protein, 139 aa, Neisseria meningitidis
MKKTFLSAVLLLSAATQTVWADTVFSCKTDNNKYIEVQKINRNLYEYSFGSAAKKEIAIRNSKADLLGRSDRQGIGRARWATMKFQNGEFMYTVDAGFDSMTHTVGSGVLVERRGKEVARVDCTPKTAQANFDDDDFAW

SEQ ID NO: 14235 - protein, 410 aa, Neisseria meningitidis; identical to SEQ ID NO: 446

SEQ ID NO: 14236 - protein, 163 aa, Neisseria meningitidis; identical to SEQ ID NO: 5302

SEQ ID NO: 14237 - protein, 245 aa, Neisseria meningitidis; identical to SEQ ID NO: 428

SEQ ID NO: 14238 - protein, 43 aa, Neisseria meningitidis
LMQINKVMPSEGLSDGILRYFAKVGMTVRVFLTGWIFKVLYRV

SEQ ID NO: 14239 - protein, 502 aa, Neisseria meningitidis
MQTDCDVLIAGNGLAALTLALSLPESFRIVILCKNRLDDTASRHAQGGIAAAWSGEDDIEKHVADTLEAGAGLCDEAAVRAILSQGKPAIEWLLAQGVAFDRNHNGLHLTREGGHTCRRIAHVADYTGEAVMQSLIAQIRRRPNIRVCERQMALDIQTESGAACGLTVLDCRTQETYRIRARHTVLAGGGLGQIYAATTTPPECTGDAIAMAIRAGCAVGNLEFIQFHPTGLARPSENGRTFLISEAVRGEGGILTNQAGERFMPHYDRRAELAPRDIVARAIAAETAKQTQDFVSLDISHQPAAFVRQHFPSIHRHCLSQCGLDITRQAIPVRPVQHYTCGGIQTDPSGRTSLPQLYALGETACTGLHGANRLASNSLLECVVTARLAAQTIADGQAFQTAPPQRPSENPFSEANIFSDGIQNTFSRPALQAFNQRHLGILRNDTGLRRAIAQLRLWKQNQTEPHTVSEYENRNLLECSLAVAQAAYRRRQNIGAHFNSDC

SEQ ID NO: 14240 - protein, 426 aa, Neisseria meningitidis
MKSLFIRLLLLGSAAGVFYHTQNQSLPAGELVYPSAPQIRDGGDALHYLNRIRAQIGLHKLAHAPVLENSARRHARYLTLNPEDGHGEHHPDNPHYTAQKLTERTRLAGYLYNGVHENISTEEEAAESSDSDIRTQQRQVDGLMSAIYHRLSLLDRHTDEAGAAFVRENGKTVLVFNQGNGRFERHCAQGRNQPEAGRKYYRNACHNGAVVYTDEAMPAQELLYTAYPVGSGALPYFHGERPDPVPEYEITGNPASIDFSEAAGKITMKSFKLYQGKNEIRPVRVLTAGNDPNGRLTAYQFALFPLKPLEYGTLYTAVFDYVRNGRRAQAKWQFRTRKPDYPYFEVNGGETLAVRKGEKYFIHWRGRWCLEACTRYTYRQRPGSRLSIGRHEAGGIVFSVDGMAGSRITLAPEGETERGVTLYLQD

SEQ ID NO: 14241 - protein, 416 aa, Neisseria meningitidis
MPSESPSDGIARLRGTKAEKPFAPYFQTRYTCRRCFQPFDYPQPPSLRRRFACQRHCAAVNTKEHIMTVSPVALRRKTECKPHPTARYWKKCDVEALFGLPFLDLIYQAAEIHRQNFNPREIQLSTLLSIKTGGCPEDCAYCPQSAHHNTNLGKEQMMDVDEIVEKAKIAKSRGASRFCMGAAWRGPKPKDVETVSAIIKAVKGLGMETCGTFGMLEEGMAEDLKEAGLDYYNHNLDTDPDRYNDIIHTRQHEDRMDTLGKVRNAGLKVCCGGIVGMNETRAERAGLIASLANLDPQPESVPINRLVKVEGTPLADAEDLDWTEFVRTIAVARITMPQSYVRLSAGRSNMPEAMQAMCFMAGANSIFYGDKLLTTGNPDEDGDRILMEKLNLYPLQFELEGEVAEVEKASGIKVDY

SEQ ID NO: 14242 - protein, 363 aa, Neisseria meningitidis
MNAQTLLTNVAELVKTKLKPIVDDIDRKGYYPEAFMRELGAIGGFGAVGTEAEGGNGLGLATQIAVLREIGKECGATSFSAWCQAACAWYLHQTPNQAVKDKYLADILQGKVLAGTGMSNTVKHLAGIEKHNLQAERADGGYTVNGALPWVSNIGEDHIWANTAQIGGGYIMFITGGQWEGVSLQNCPEFCALEGTRTFSLNFKDVFIPDEDIIAAPEQFADYIQSIKAGFILLQIGIGAGVIDGSLGIIRLANIVNAEVNSYLDDGYDSLKARLDGAWAETERLAGLAWSGTPDNLATLKLREAAAVLALAAAQSAALHSGAKGYLMRSPAQRRVREAMFVAIVTPAIKHLRKEIAAIEAAK

SEQ ID NO: 14243 - protein, 92 aa, Neisseria meningitidis
MPAVNLIRERLQTLDPLVLEIGDESHLHKGHAGNTGGGHYAVLVVSGRFEGVSRLNRQKTVKSLLKDLFSGGMIHALGIRAATPDEYFHTAD

SEQ ID NO: 14244 - protein, 146 aa, Neisseria meningitidis; identical to SEQ ID NO: 2658

SEQ ID NO: 14245 - protein, 258 aa, Neisseria meningitidis; identical to SEQ ID NO: 3585

SEQ ID NO: 14246 - protein, 37 aa, Neisseria meningitidis; identical to SEQ ID NO: 7611

SEQ ID NO: 14247 - protein, 429 aa, Neisseria meningitidis; identical to SEQ ID NO: 2821

SEQ ID NO: 14248 - protein, 157 aa, Neisseria meningitidis
MKKLLAAVMMAGLAGAVSAAGVHVEDGWARTTVEGMKIGGAFMKIHNDEAKQDFLLGGSSPVADRVEVHTHINDNGVMRMREVEGGVPLEAKSVTELKPGSYHVMFMGLKKQLKEGDKIPVTLKFKNAKAQTVQLEVKIAPMPAMNHGHHHGEAHQH

SEQ ID NO: 14249 - protein, 184 aa, Neisseria meningitidis; identical to SEQ ID NO: 7213

SEQ ID NO: 14250 - protein, 169 aa, Neisseria meningitidis
MNPFETQSVTFAEPIEMLYACHGKVRRFCGQVAMLSDYIAENGCNQLVLQTIRQIAQYFNVAAPLHHEDEEENFFPLLLQYAPQAQESVDELLRQHIGLHDNWAAVSAEFAKLEADNAYVPDEEAFKRFVAGYDVHLAIEEPLFDMGKMFIPKEKLTEIGEIMAARRRR

SEQ ID NO: 14251 - protein, 443 aa, Neisseria meningitidis; identical to SEQ ID NO: 5558

SEQ ID NO: 14252 - protein, 120 aa, Neisseria meningitidis; identical to SEQ ID NO: 6941

SEQ ID NO: 14253 - protein, 209 aa, Neisseria meningitidis
MNRHIRQEIFERFRAANPHPTTELNFNSPFELLIAVLLSAQATDVGVNKATAKLFPVADTPQAILDLGLDGVMEYTKTIGLYKTKSKHIMQTCRILLEKYNGEVPEDREALESLPGVGRKTANVVLNTAFGHPVMAVDTHIFRVSNRTKIAPGKDVREVEDKLMRFIPKEFLMDAHHWLILHGRYTCKALKPQCQTCIINDLCEYPAKA

SEQ ID NO: 14254 - protein, 98 aa, Neisseria meningitidis; identical to SEQ ID NO: 1610

SEQ ID NO: 14255 - protein, 259 aa, Neisseria meningitidis; identical to SEQ ID NO: 9318

SEQ ID NO: 14256 - protein, 453 aa, Neisseria meningitidis; identical to SEQ ID NO: 6561

SEQ ID NO: 14257 - protein, 290 aa, Neisseria meningitidis
MSWLDKILPPKIKNRSKDGSSNVPEGLWHKCPSCSATVYSTELQQNNQVCPKCNHHNPLSARQRLNLLLDEDGREEIAGNVKPTDPLKFKDSKKYPDRLSAARKLTGEDDALVVMKGKMNGLPVVVAAFEFRFIGGSMGSVVGERFVQGIRRAVADNCPFVCVAASGGARMQEGVNSLMQMTKTSAALHLLTEKRLPFISVLTDPTMGGVSASFAFLGDVVLAEPNALIGFAGPRVIEQTVRETLPEGFQRAEFLLEKGAIDQIVDRRDMKRRISDLITLLCRQDKVAAA

SEQ ID NO: 14258 - protein, 125 aa, Neisseria meningitidis
MGTLNDIKKILINVGLYQGFDLTDPKVSEEVNHETANMKWIKDYTSDGNWDNEFKEDLKNFLDYMEVCQLALNDKNFKIASNSLFMAMIYAGNLSLIFDSIKTDISTLLSAEYKKNSFSWPSLDE

SEQ ID NO: 14259 - protein, 180 aa, Neisseria meningitidis; identical to SEQ ID NO: 2298

SEQ ID NO: 14260 - protein, 237 aa, Neisseria meningitidis
LRLYESGQVNIPADFLLAAVQLGVDIQFVFTGIHSANLNAVSDDLNKKLDDAIGKSNVENQINGNVSNAVIASSGSVVHQINTQNHVIRTRVDSKPGKEHITLEQASKLQQLVKQVAAAEEIAKRSPKSIRAIWASLNAHCKVPSYKLIALSDYDKAETYLRKWLGRLSNTATSKNNDPDWRKKKYAYIKLNVKQLELEDWLKSYLEKNFAVESLTELSNDDLQKTYAAVSTKKRKK

SEQ ID NO: 14261 - protein, 431 aa, Neisseria meningitidis
LAGVGKLVRLGAKFSTRAVPYVGTALLAHDVYETFKEDIQARGYQYDPETDKFVKGYEYSNCLWYEDERSINRTYGCYGVDSSIMRLMSDYSRFPEVKELMESQMYRLARPFWNWHKEELNKLSSLDWNNFVLNSCTFSWNGGDCVVNKGDDYRNGANFSLIRNPKYKEEMDAKKLEEILSLKVDANPDKYIKATGYPGYSEKVEVAPGTKVNMGPVTDRNGNPVQVVATFGRDSQGNTTVDVQVIPRPDLTPGSAEAPNAQPLPEVSPAENPANNPAPNENPGTRPNPEPDPDLNPDANPDTDGQPGTSPDSPAVPDRPNGRDGKDGGLLCKFFPDILACDRLPEPNPAEDLNLPSETVNVEFKKSGIFQDSAQCPAPVTFTITVLDSSKQFAFSFENACTIAERLRYMLLALAWAVAAFFCIRTVSREV

SEQ ID NO: 14262 - protein, 95 aa, Neisseria meningitidis; identical to SEQ ID NO: 738

SEQ ID NO: 14263 - protein, 488 aa, Neisseria meningitidis; identical to SEQ ID NO: 7474

SEQ ID NO: 14264 - protein, 794 aa, Neisseria meningitidis
MNKNIKSLNLREKDPFLSREKQRYEHPLPSREWIIELLERKGVPSKIESLARELSITEDEYVFFERRLKAMARDGQVLINRRGAVCAADKLDLVKCRVEAHKDGFGFAVPLTPAKDGDFVLYERQMRGIMHGDIVTVRPAGMDRRGRREGTVLDIVERAQSKVVGRFYMDRGVAILEPEDKRLNQSIVLEPDGVARFKPESGQVIVGEIEVYPEQNRPAVAKIIEVLGDYADSGMEIEIAVRKHHLPHQFSEACAKAVKKIPDHVRKSDLKGRVDLRDLPLVTIDGETARDFDDAVFAEKIGRNYRLVVAIADVSHYVRPDDAIDTDAQERSTSVYFPRRVIPMLPENLSNGICSLNPNVERLCMVCDMVITYAGNIKEYRFYPAVMRSHARLTYNQVWKWLSGGIGHPFKAQIDTLYKLFKILQKKRFERGAVEFDSIETQMLFDDNGKIEKIVPVVRNDAHKLIEECMLAANVCAADFLLKNKHTALFRNHLGPTPEKLAALREQLGLLGLQLGGGDNPSPKDYAALAGQFKGRPDAELLQVMMLRSMQQAVYEPHCDGHFGLAYEAYAHFTSPIRRYPDLTVHRAIKAVLNQQTYTPKKSWQALGVHTSFCERRADDASRDVENWLKTYYMRDKVGEVFEGKISGMTSFGIFVTLDGIHIDGLVHISDLGEDYFNFRPEIMAIEGERSGIRFNMGDRVAIKVARADLDDGKIDFVLIAEGSGRGRKVKSSASAKPAGTAGKGKPKTAAGKKTARGGKVRGRGASAAAESGKKAKKPIPIEVQKVKKRKGKS

SEQ ID NO: 14265 - protein, 245 aa, Neisseria meningitidis; identical to SEQ ID NO: 10890

SEQ ID NO: 14266 - protein, 505 aa, Neisseria meningitidis; identical to SEQ ID NO: 2655

SEQ ID NO: 14267 - protein, 273 aa, Neisseria meningitidis
MAVLITGASAGFGEAMCRAFVGAGYRVIGAARRADRLQALADELGALFYPLEMDVSRRESVENALNGIPDEFSDIDCLINNAGLALGLDTADKADFEDWETMIQTNVLGLTFLTRKILPQMVERGGGYVMNLGSIAGNYAYAGSNVYGATKAFVRQFSLNLRAELADKNIRVTNIEPGLCGNTEFSNVRFKGDDERAAGVYEGVEFIRPEDIAETALWLYQRPAHMNVNTIEIMPVAQTFAGMKVIKKAVPEVREDFEKQSMSLFSRIRSWFK

SEQ ID NO: 14268 - protein, 151 aa, Neisseria meningitidis
MHKIPKGTALAFDFGEARIGVAQGDAELGLSHPLSTVTGGSNDEKFAAIAKLVQEWQPRYFVVGLPVHTDGTKHEMTHLSHKFGRRLNGRFNLPVYWVDERLSSVYAESLLSEAQVFGKKRKSVLDQVAAQAILHGFFEGGPAECFNGREG

SEQ ID NO: 14269 - protein, 211 aa, Neisseria meningitidis; identical to SEQ ID NO: 6559

SEQ ID NO: 14270 - protein, 962 aa, Neisseria meningitidis
MSNTTVEQFAAELKRPVEDLLKQLKEAGVSKTGGGDSLTLDDKQLLNAYLTKKNGSNGGTISIRRTKTEVSTVDGVKVETRKRGRTVNIPSAEELAAQVKAAQTQAAPVRPEQTAEDAAKARAEAATRAEARAKAEAEAAKLKAAKAGNKAKPAAQKPTEAKAETAPVAAETKPAEESKAEKAQADKMPSKKPAEPKEKAAKPKHERNGKGKDAKKPAKPAAPAVPQPVVSAEEQAQRDEEARRAAALRAHQEALLKEKQERQARREAMKQQAEQQAKAAQEAKTGRQRPAKPAEKPQAAAPAVENKPVNPAKAKKEDRRNRDDEGQGRNAKGKGGKGGRDRNNARNGDDERVRGGKKGKKLKLEPNQHAFQAPTEPVVHEVLVPETITVADLAHKMAVKGVEVVKALMKMGMMVTINQSIDQDTALIVVEELGHIGKPAAADDPEAFLDEGAEAVEAEALPRPPVVTVMGHVDHGKTSLLDYIRRTKVVQGEAGGITQHIGAYHVETPRGVITFLDTPGHEAFTAMRARGAKATDIVILVVAADDGVMPQTIEAIAHAKAAGVPMVVAVNKIDKEAANPERIRQELTAHEVVPDEWGGDVQFIDVSAKKGLNIDALLEAVLLEAEVLELTAPVDAPAKGIIVEARLDKGRGAVATLLVQSGTLKKGDMLLAGTAFGKIRAMVDENGKSITEAGPSIPVEILGLSDVPNAGEDAMVLADEKKAREIALFRQGKYRDVRLAKQQAAKLENMFNNMGETQAQSLSVIIKADVQGSYEALAGSLKKLSTDEVKVNVLHSGVGGITESDVNLAIASGAFIIGFNVRADASSRKLAENENVEIRYYNIIYDAIDDVKAAMSGMLSPEEKEQVTGTVEIRQVISVSKVGNIAGCMVTDGVVKRDSHVRLIRNNVVIHTGELASLKRYKDDVKEVRMGFECGLMLKGYNEIMEGDQLECFDIVEVARSL

SEQ ID NO: 14271 - protein, 367 aa, Neisseria meningitidis
MSSFIFPDNGFEWRNESLQKPPKGWHYVRESGANGILKAAYQNIATVWQGDFHNAKQVLSAMKKKVRKPAAVRSDADIAALFHAHRMKQAQQSRILNMLAVEIRPGFVLDNKRAPDIRSALLDVYGEADGKPFFLPLNLLLGFMGAHEWHKKGVAVPQLGGSIHVPFGVFSPLRGEYLDLLAHAPSTGFQTAFDIGTGSGVLAAILAKQGIPSVIGTDTNPKAVACARANIARLGFEKQVEIRETDLFPEGFADLIVCNPPWLPAKPTSAVESALYDPESAMLAAFLRDAPKHLNPDGEIRLIISDLAEHLHLRPSDFLDKAFAQAGLRVADMMKTKPKHKKAANPSDPLAFARTRETTFLYRLKKA

SEQ ID NO: 14272 - protein, 249 aa, Neisseria meningitidis; identical to SEQ ID NO: 7278

SEQ ID NO: 14273 - protein, 278 aa, Neisseria meningitidis; identical to SEQ ID NO: 6961

SEQ ID NO: 14274 - protein, 71 aa, Neisseria meningitidis; identical to SEQ ID NO: 1003

SEQ ID NO: 14275 - protein, 979 aa, Neisseria meningitidis; identical to SEQ ID NO: 7212

SEQ ID NO: 14276 - protein, 336 aa, Neisseria meningitidis; identical to SEQ ID NO: 1472

SEQ ID NO: 14277 - protein, 459 aa, Neisseria meningitidis
MLLDLNRFSFSVFLKEVRLLTALALPMLLAQVAQVGIGFIDTVMAGGAGKEDLAAVALGSSAFATVYITFMGIMAALNPMIAQLYGAGKTDEVGETGRQGIWFGLFLGVFGTVLMWAAITPFRNWLTLSDYVEGTMAQYMLFTSLAMPAAMVHRALHAYASSLNRPRLIMLVSFAAFVLNVPLNYIFVYGKFGMPALGGAGCGLATMAVFWFSALALWIYIAKENFFRPFGLTAKFGKPDWAVFKQIWKIGAPIGLSYFLEASAFSFIVFLIAPFGEDYVAAQQVGISLSGILYMIPQSVGSAGTVRIGFSLGRREFSRARYISGVSLVLGWMLAVITVLSLVLFRSPLVSMYNNDPAVLSIAATVLLFAGLFQPADFTQCIASYALRGYKVTKVPMFIHAAAFWGCGLLPGYLLAYRFDMGIYGFWTALIASLTIAAIALVWCLELCSREMVRSHKAV

SEQ ID NO: 14278 - protein, 158 aa, Neisseria meningitidis; identical to SEQ ID NO: 5652

SEQ ID NO: 14279 - protein, 122 aa, Neisseria meningitidis
MRHYEIVFIVHPDQSEQVPAMVERYKTMIAEANGKIHRLEDWGRRQLAYPINKIHKAHYVLMNIETTPEVVEELETAFRFNDAVLRHLAIKTKHAVTEASPMLGGEKAKNLLSGASEEAVAQ

SEQ ID NO: 14280 - protein, 322 aa, Neisseria meningitidis; identical to SEQ ID NO: 7028

SEQ ID NO: 14281 - protein, 768 aa, Neisseria meningitidis
MAKNLLIVESPSKAKTLKKYLGGDFEILASYGHVRDLVPKSGAVDPDNGFAMKYQLISRNSKHVDAIVAGAKEAENIYLATDPDREGEAISWHLLEILKSKRGLKNIKPQRVVFHEITKNAVLDAVAHPREIEMDLVDAQQARRALDYLVGFNLSPLLWKKIRRGLSAGRVQSPALRLICERENEIRAFEAQEYWTVHLDSHKGRSKFTAKLAQYNGAKLEQFDLSNEAAQADVLKELEGKEAVVTAIEKKKRSRNPAAPFTTSTMQQDAVRKLGFTTDRTMRTAQQLYEGIDVGQGAIGLITYMRTDSVNLADEALTEIRHYIENKIGKEYLPSAAKQYKTKSKNAQEAHEAIRPTSVYRTPESVKPFLSADQFKLYQMIWQRTVACQMTPAKFDQTTVDITVGKGVFRVTGQVQTFAGFLSVYEESSDDEEGEDSKKLPEMSEGDKLPVDKLYGEQHFTTPPPRYNEATLVKALEEYGIGRPSTYASIISTLKDREYVTLEQKRFMPTDTGDIVNKFLTEHFAQYVDYHFTAKLEDQLDEIADGKRQWIPLMDKFWKPFIKQVEEKEGIERAKFTTQELDETCPKCGEHKLQIKFGKMGRFVACAGYPECSYTRNVNETAEEAAERIAKAEAEQAELDGRECPKCGGRLVYKYSRTGSKFIGCANYPKCKHVEPLEKPKDTGVQCPQCKKGNLVERKSRYGKLFYSCSTYPDCNYATWNPPVAESCPKCAWPVLTIKTTKRWGVEKVCPQKECGWKEQIEPPAPKE

SEQ ID NO: 14282 - protein, 336 aa, Neisseria meningitidis
MHIGGYFIDNPIALAPMAGITDKPFRRLCREFGAGWAVCEMLTSDPTLRNTRKTLHRSDFVDEGGIVAVQIAGSDPQQMADAARYNVSLGAQLIDINMGCPAKKVCNVQAGSALMQNEPLVAAILEAVVRAAGVPVTLKTRLGWHDDHQNLPVIAKIAEDCGIAALAVHGRTRTQMYKGEARYELIAETKCRLNIPVWVNGDITSPQKAQAVLKQTAADGIMIGRGAQGRPWFFRDLKHYAEHGVLPPALSLAECAAAILNHIRAIHAFYGDTAGVRIARKHIGWYIDEMPDGEQTRREINRLDSAAAQYDMLAGYLERLAEKTDSWACAYRPNAF

SEQ ID NO: 14283 - protein, 187 aa, Neisseria meningitidis
MKKIIFAALAAAAISTASAATYKVDEYHANARFAIDHFNTSTNVGGFYGLTGSVEFDQAKRDGKIDITIPIANLQSGSQHFTDHLKSADIFDAAQYPDIRFVSTKFNFNGKKLVSVDGNLTMHGKTAPVKLKAEKFNCYQSPMLKTEVCGGDFSTTIDRTKWGMDYLVNVGMTKSVRIDIQIEAAKQ

SEQ ID NO: 14284 - protein, 718 aa, Neisseria meningitidis; identical to SEQ ID NO: 6011

SEQ ID NO: 14285 - protein, 395 aa, Neisseria meningitidis; identical to SEQ ID NO: 1105

SEQ ID NO: 14286 - protein, 280 aa, Neisseria meningitidis; identical to SEQ ID NO: 6191

SEQ ID NO: 14287 - protein, 435 aa, Neisseria meningitidis
MKPVNIGLLGLGTVGGGTAAVLRDNAEEISRRLGREVRISAVCDLSEEKARQICPSAAFVKDPFELVARKDVDIVVELFGGTGIAKDAVLKAIENGKHIVTANKKLLAEYGNEIFPLAEEKNVMVQFEAAVAGGIPIIKALREGLAANRIKSIAGIINGTSNFILSEMREKGSAFADVLKEAQALGYAEADPTFDIEGHDAGHKITIMSALAFGTPMNFSACYLEGISKLDSRDIKYAEELGYRIKLLGITRKTGKGIELRVHPTLIPESRLLANVNGVMNAVRVNADMVGETLYYGAGAGALPTASAVVADIIDIARLVEADTAHRVPHLAFQPAQVQAQTILPMDEITSSYYLRVQAKDEPGTLGQIAALLAQENVSIEALIQKGVIDQTTAEIVILTHSTVEKHIKSAIAAIEALDCVEKPITMIRMESLHD

SEQ ID NO: 14288 - protein, 387 aa, Neisseria meningitidis; identical to SEQ ID NO: 30

SEQ ID NO: 14289 - protein, 47 aa, Neisseria meningitidis; identical to SEQ ID NO: 3740

SEQ ID NO: 14290 - protein, 119 aa, Neisseria meningitidis; identical to SEQ ID NO: 121

SEQ ID NO: 14291 - protein, 468 aa, Neisseria meningitidis; identical to SEQ ID NO: 11386

SEQ ID NO: 14292 - protein, 359 aa, Neisseria meningitidis
LPDTRPYPQNPIKNHLLLNAYQLAHNSSQASRKLSSGQLQTEIRGMLEQNHYINLSLALTMSPDAGTYAALLSSVNAVLDCEKEGEVQWFALPVVLVSGCKKERAIEMKLPTEGLFACLQNYPHLRALTQETQWLPYLVHSSDLSAVAPDEWWRAKQNTEAAAQHLRRFAPRPLLLPEGQSVHVVYALGFGSGKVQTALGQNLLQAGLPLMQVWQENLASEGVTLFANPLSPDSPVRALSDGSHTRQRMAMDVFAANAIRAVRMQSPRVGVVAAAKAGGQILFGFNATDGAFEVVPQVFSWQLSFTDNIGVIQQNFLDLMAECRVEHVYLLHNPLGEQESIPSYAEALKREGHNPFFSA

SEQ ID NO: 14293 - protein, 295 aa, Neisseria meningitidis
MYTGRFAPSPTGLLHIGSLLTAVASYADARAHGGKWLIRMEDLDPPREMPGAASHILHTLEAFGFEWDGEVAYQSRRYALYEETLCRLKTAGLVYPCHCSRKDWQTGARRGADGFVYNGRCRNPQQRPAPQGKQPAWRIRVPDRDIGFSDGIVGGYAQNLARDIGDFVLLRADGYWAYQLAVVADDAEQGVTHIVRGQDLLVSTPRQIYLQQCLGVPTPQYAHLPLLTNAQGQKWSKQTLAPALDLNRREQLLRQVFRYLKLPEAPETDRPAELLDWAVAHWDMGKVPKHAITTP

SEQ ID NO: 14294 - protein, 90 aa, Neisseria meningitidis
MKKTGKYLIYAAAFTAFCFAFQENRSEAKQPDITLSASLCEQFNILNAKDMDAEQVALSKECDIIESSHDWEKEYGNLNEQEMLAGIVYE

SEQ ID NO: 14295 - protein, 178 aa, Neisseria meningitidis; identical to SEQ ID NO: 5654

SEQ ID NO: 14296 - protein, 451 aa, Neisseria meningitidis
MSEYTPQTAKQGLPALAKSTIWMLSFGFLGVQTAFTLQSSQMSRIFQTLGADPHNLGWFFILPPLAGMLVQPIVGHYSDRTWKPRLGGRRLPYLLYGTLIAVIVMILMPNSGSFGFGYASLAALSFGALMIALLDVSSNMAMQPFKMMVGDMVNEEQKGYAYGIQSFLANTGAVVAAILPFVFAYIGLANTAEKGVVPQTVVVAFYVGAALLVITSAFTIFKVKEYDPETYARYHGIDVAANQEKANWFELLKTAPKAFWTVTLVQFFCWFAFQYMWTYSAGAIAENVWYTTDASSVGYQEAGNWYGVLAAVQSVAAVICSFILAKVPNQYHKAGYFGCLALGALGFFSIFFIHNQYALILSYTLIGIAWAGIITYPLTIVTNALSGKHMGTYLGLFNGSICMPQIVASLLSFILFPMLGSHQATMFLVAGAVLLLGAFSVFLIKETHGGV

SEQ ID NO: 14297 - protein, 500 aa, Neisseria meningitidis; identical to SEQ ID NO: 11856

SEQ ID NO: 14298 - protein, 362 aa, Neisseria meningitidis; identical to SEQ ID NO: 6713

SEQ ID NO: 14299 - protein, 98 aa, Neisseria meningitidis; identical to SEQ ID NO: 2571

SEQ ID NO: 14300 - protein, 145 aa, Neisseria meningitidis
MVEAKIFILYGAANKGKSTTLNTLFNQICRKFSKFLVFFERHGNGLDFVAVFDHEDQRIGFYSSGDNEYEVRRNLYKLYSHNCDFIFGTSRTRGGSCDAVGCYAELLHGDVNIINWCEKFEPTDEDNERAVKELFKSFKNIINKL

SEQ ID NO: 14301 - protein, 341 aa, Neisseria meningitidis
MGRHFGRRRFLTVAAVAAAGAAVSFLPNPFAADGEKRNGDEKRNENVFFWKGVALGSGAELRLFGVDNRQAADLVNKVLAEVARLEKMFSLYREDSLISRLNRDGYLTSPPADFLELLSLCRDIHALTGGAFDPTVQALWKLYADYFAAHPDAETPPPQNSVDEALKRVGFGKVSFDDREIRFAEKGMGLSLNGIAQGYITDKVVALLKANGVPAALVDMGEIRGFDTNGRRTWNVGIRNPDDEEGVLANITMKDKAFATSGGYGTVMDKAGRFTHLFDPRTGVSTPRYKSISVMADDAAVADALSTAFSIMDLHLIRSVAESRQLKVWLLMPDNTLNEIG

SEQ ID NO: 14302 - protein, 371 aa, Neisseria meningitidis; identical to SEQ ID NO: 8192

SEQ ID NO: 14303 - protein, 312 aa, Neisseria meningitidis; identical to SEQ ID NO: 2391

SEQ ID NO: 14304 - protein, 753 aa, Neisseria meningitidis
MLQIEIDGKQVSVEQGATVIEAAHKLGTYIPHFCYHKKLSIAANCRMCLVNVEKAPKPLPACATPVTDGMIVRTHSAKAREAQEGVMEFLLINHPLDCPTCDQGGECQLQDLAVGYGKTTSRYTEEKRSVVGKDMGPLVSAEEMSRCIHCTRCVRFTEEIAGLQEIAMANRGEHSEIMPFISKAVETELSGNVIDLCPVGALTSKPFRFNARTWELNRRKSVSAHDALGSNLIVQTKDHTVRRVLPLENEAINECWLSDRDRFAYEGLYHESRLKNPKIKQGGEWMDVDWKTALEYVRSAIECIAKDGNQNQVGVWANPMNTVEELYLAKKLADGLGVKNFATRLRQQDKRLSDGLKGAQWLGQSIESLADNEAVLVVGANLRKEQPLLTARLRRAAKDRMALSVLASSKEELFMPLLSQEAVHPDEWAGRLKNLSADAEHAVTASLKNAEKAAVILGAEVQNHPDYAAIYAAAQELADATGAVLGILPQAANSVGADVLNVNSGESVAEMANAPKQAVLLLNVEPEIDTVDGAKAIAALKQAKSVMAFTPFVSETLLDVCDVLLPIAPFTETSGSFINMEGRLQSFHGVVQGFGDSRPMWKVLRVLGNLFDLKGFEYHDTAAILKDALDAESLPSKLDNRNAWTGEGVQTTSDRLVRVGGVGIYHTDSIVRRSAPLQETSHAAVPAARVNPNTLARLGLQDGQTAVAKQNGASVSVAVKADAGLPENVVHLPLHTENAALGALMDTIELAGA

SEQ ID NO: 14305 - protein, 121 aa, Neisseria meningitidis
LYGSHRLLCTQTDGDNAQKKTTTYKEQDPAKVTHYLTQPAEFSDYQRVYLDETGFDRYLFRPYTRSLKGQIVKAQISGKRYQRLSLVSAQVGNRLIAPMVYQNTMIGVFLKRGFSNAYCPH

SEQ ID NO: 14306 - protein, 257 aa, Neisseria meningitidis; identical to SEQ ID NO: 37

SEQ ID NO: 14307 - protein, 188 aa, Neisseria meningitidis
MPSEACWRFRRHILIEKMMTLKTAPLKRRFAAMLYEMLLVGAATCLAALFAGIAAIFLNPVSIAVSALVTSILIMGSWWLYFRANWHGQGQTLAMRTWKIGLCDLNGIQPSLHLLRLRFIWACIFIVFIPMLAYAGLRHLLGISPKDAFGAALIWLILPWGFALLNPDRQFLYDFLAGTRLVAVKGKP

SEQ ID NO: 14308 - protein, 394 aa, Neisseria meningitidis
MGKHILLGVTGSIAAYKSCELVRLLKKQGHSVTVVMSRSATEFVSPLTFQALSGNPVLTDTHGGNGSNGMEHINLTRNADVFLIAPASMNTVAKICNGVADNLLTSLAAARKCPLAIAPAMNVEMWLNPANQRNIAQLVSDGITVYMPGLGEQACGENGMGRMPEPAELLDLLPDLWTPKILRGKKILITAGATFEAIDPVRCITNTSSGKMGVALARACRAAGAEVSLIHGQLQTELPFGISDTVQAVSAEDMHRAVHRLIEKQDAFISVAAVSDYKVKNKSTQKFKKDKNAKPLSIELDENPDILASIASLPNPPFCIGFAAETENVMAYAREKRIKKKIPVIVANDVSIAMGKPTNRITIIGDDGELSFPETSKDEAAMQIVERLAGYLNK

SEQ ID NO: 14309 - protein, 548 aa, Neisseria meningitidis; identical to SEQ ID NO: 3866

SEQ ID NO: 14310 - protein, 263 aa, Neisseria meningitidis
MARHPYRRLRPAKSGFPEVGISEEGNIRSLHLGSDTVQSSMNLDHPSELVLSYSRAMMGWLLFTDALPQHITQIGLGGGSFARWIDTYLPDTRQTAVDINPQVIAIARNLFELPFEGEKFEIIEADGAEYIKVFRHNTDVILVDGFDGEQIIDALVEEPFFRDCRNALSSDGIFVTNWWSGDKRYQRFIERLLNVFEGRVLELPAKSHGNVAVMAFQSSPKEQNIDKLKKRADKLSNAYGLDFHRMLADLKASNPNNGKHFYL

SEQ ID NO: 14311 - protein, 259 aa, Neisseria meningitidis
MKTITETLNLAPKGKNFLTADWPAPANVKTLITTRNGGVSQGAYQSLNLGTHVDDNPEAVRRNREIVQQQVGLPVAYLNQIHSTVVVNAAEALGGTPDADASVDDTGKVACAVMTADCLPVLFCDRAGTAVAAAHAGWRGLAGGVLQNTIAAMKVPPVEMMAYLGPAISADAFEVGQDVFDAFCTPMPEAAAAFEGIGGGKFLADLYALARLILKREGVGGVYGGTHCTVLERDTFFSYRRDGATGRMASLIWLDGNAV

SEQ ID NO: 14312 - protein, 270 aa, Neisseria meningitidis
LTADATRFIIWSSRNDNLQRQMPSERKDMIKFKNVHKHFKDLHVINGVNLEIKKGEVVVVCGPSGSGKSTLIRTVNQLESIESGEIWVDGVNVADPKTDLNKIREEVGFVFQSFNLYPHLTVLENITLAPMKVKGQNAEQAEKKAMELLERVGLAHKKDAFPSQLSGGQQQRVAIARGLAMEPRVMLFDEPTSALDPEMVGEVLKVMKDLAESGMTMMCVTHEMGFAREVADRVIFVDKGQILEDETPEAFFTNPKHERAKQFLQQVMTH

SEQ ID NO: 14313 - protein, 200 aa, Neisseria meningitidis
LVYNFPFTDRFRHMTDLETKRLETQAMLENADLLFDQGQCRAALQKVADEITRDLGGKYPLLLPVMGGAVVFTGQLLPLLRFPLDFDYVHVSRYGDKLEGGAFNWKRMPDAEQIRGRHVVVLDDILDEGHTMSAIQAKLLEMGAASCRAAVFANKLIDKPKPIRADYVGLDVPNRYVFGYGMDAAGCWRNLGEIYALDGK

SEQ ID NO: 14314 - protein, 536 aa, Neisseria meningitidis
MPSEMPSIIYQTAFYPPSLWPLAVKNLFTVSNGHLLVFSSPERHLTQKDPIMKPTIALVGRPNVGKSTLFNRLTRTKDALVHDLPGLTRDRHYGHGKVGSKPYLVIDTGGFEPVVDSGILHEMAKQTLQAVDEADAVVFLVDGRTGLTPQDKIIADRLRQSPRPVYLAVNKGEGGNRAVLAAEFYELALGDPYVISGAHGDGVYYLIEEILENFPEPEVEEADAKHPVFAVIGRPNVGKSTLVNAILGEERVIAFDMAGTTRDSIHIDFEREGKPFTIIDTAGVRRRGKVDEAVEKFSVIKAMQAVEAANVAVLVLDAQQDIADQDATIAGFALEAGRALVVAVNKWDGISEERREQVKRDINRKLYFLDFAKFHFISALKERGIDGLFDSIQAAYNAAMIKMPTPKITRVLQSAIERQQPPRAGLVRPKMRYAHQGGMNPPVIVVHGNSLHAISDSYTRYLTQTFRKAFNLQGTPLRIQYNVSENPYENAEDKPKKKPLRRVSLSNRIEKREDRKEEKNRFKKKTKVSVKKQFSK

SEQ ID NO: 14315 - protein, 310 aa, Neisseria meningitidis; identical to SEQ ID NO: 714

SEQ ID NO: 14316 - protein, 427 aa, Neisseria meningitidis
MTASKSGFIGQIFSRNMLVCIFTGFTSGLPLYFLINLIPAWLRSEQVDLKSIGLMALIGLPFTWKFLWSPLMDAVRLPVLGRRRGWMLLTQAGLLAALAAYAFLNPRNHLPLIAGLSVLVAFFSASQDIVLDAFRREILSDGELGLGNSVHVNAYRVAALIPGSLSLVLADRMPWSEVFVITSLFMLPGLLMTLFLAREPVLPPAVPKTLKQTVVEPFKEFFTRKGIASAVCVLLFIFLYKLGDSMATALATPFYLDMGFSKTDIGLIAKNAGLWPAVAAGILGGVWMLKIGVNKALWLFGSVQAVTVLGFVWLAGFGHFDTVGTSERLMLAAVIGAEAVGVGLGTAAFVSYMARETNPAFTATQLALFTSLSAVPRTVINSFAGYLIEWMGYVPFFRLCFILALPGMLLLLKVAPWNEEKITVINK

SEQ ID NO: 14317 - protein, 267 aa, Neisseria meningitidis
MKKILLTVSLGLALSACATKGTVDKDAQITQDWSVEKLYAEAQDELNSSNYTRAVKLYEILESRFPTSRHARQSQLDTAYAYYKDDEKDKALAAIERFRRLHPQHPNMDYALYLRGLVLFNEDQSFLNKLASQDWSDRDPKANREAYQAFAELVQRFPNSKYAADATARMVKLVDALGGNEISVARYYMKRGAYIAAANRAQKIIGSYQNTRYVEESLAILELAYQKLGKPQLAADTRRVLETNFPKSPFLTHAWQPDDMPWWRYWH

SEQ ID NO: 14318 - protein, 63 aa, Neisseria meningitidis; identical to SEQ ID NO: 7354

SEQ ID NO: 14319 - protein, 316 aa, Neisseria meningitidis
MKLQQLKYALEVYRHNLNVSEAAEALFTSQPGISKQIKLLEEEIGIQIFIRSGKRVVSVSQPGKVVLDIAERILRDVQNIKNIGSEFTGQDSGSLTVATTHTQARYALPLIVADFVKRYPKVNLTIKQGSPAAIAQMVTSGESDLAIVTERIDDHPELGRLSCYDWTHAVIVPNDHPLLECRNPLRIEDLARFPLITYEFAFNAGSSIARAFSKARLEQPDVALAAADTDVLKTYVRLGLGVGLMAKMAYNPDTDGDLQLVDAAHLFEPSPTWIALRSDTYLRGYAYDFIQAFAPHLTREKVDRILYTPISEDFSI

SEQ ID NO: 14320 - protein, 100 aa, Neisseria meningitidis; identical to SEQ ID NO: 1476

SEQ ID NO: 14321 - protein, 354 aa, Neisseria meningitidis
MLVLGIESSCDETGVALYDTERGLRAHCLHTQMAMHAEYGGVVPELASRDHIRRLVPLTEGCLAQAGASYGDIDAVAFTQGPGLGGALLAGSSYANALALALDKPVIPVHHLEGHLLSPLLAEEKPDFPFVALLVSGGHTQIMAVRGIGDYALLGESVDDAAGEAFDKTAKLLGLPYPGGAKLSELAESGRFEAFVFPRPMIHSDDLQMSFSGLKTAVLTAVEKVRAENGADDIPEQTRNDICRAFQDAVVDVLAAKVKKALLQTGFRTVVVAGGVGANRKLRETFGNMTVQIPTPKGKPKHPSEKVSVFFPPTAYCTDNGAMIAFAGAMHLGKGREVGAFNVRPRWPLSEIVK

SEQ ID NO: 14322 - protein, 144 aa, Neisseria meningitidis; identical to SEQ ID NO: 6

SEQ ID NO: 14323 - protein, 166 aa, Neisseria meningitidis
MRKSRLSQYKQNKLIELFVTGVTARTAAELVGVNKNTAAYYFHRLRLLIYQNSPHLEMFDGEVEADESYFGGQRKGKRGRGAAGKVAVFGLLKRNGKVYTVTVPNTQTATLFPIIREQVKPDSIFYTDCYRSYDVLDVREFSHFSFAETSFSYQSQHTFCRTTKPY

SEQ ID NO: 14324 - protein, 553 aa, Neisseria meningitidis
MLTYTPPDARPPAKTHEKPWLLLLMAFAWLWPGVFSHDLWNPAEPAVYTAVEALAGSPTPLVAHLFGQTDFGIPPVYLWVAAAFKHLLSPWAADSYDAARFAGVFFAVVGLTSCGFAGFNFLGRHHGRSVVLILIGCIGLIPTVHFLNPAAAAFAAAGLVLHGYSLARRRVIAASFLLGTGWTLMSLAAAYPAAFALMLPLPVLMFFRPWQSRRLMLTAVASLAFALPLMTVYPLLLAKTQPALFAQWLDDHVFGTFGGVRHVQTAFSLFYYLKNLLWFALPALPLAVWTVCRTRLFSTDWGILGIVWMLAVLVLLAVNPQRFQDNLVWLLPPLALFGAAQLDSLRRGAAAFVNWFGIMAFGLFAVFLWTGFFAMNYGWPAKLAERAAYFSPYYVPDIDPIPMAVAVLFTPLWLWAITRKNIRGRQAVTNWAAGVTLTWALLMTLFLPWLDAAKSHAPVVRSMEASLSPELKRELSDGIECIDIGGGDLHTRIVWTQYGTLPHRVGDVQCRYRIVRLPQNADASQGWQTVWQGARPRNKDSKFALIRKIGENI

SEQ ID NO: 14325 - protein, 230 aa, Neisseria meningitidis; identical to SEQ ID NO: 1269

SEQ ID NO: 14326 - protein, 154 aa, Neisseria meningitidis; identical to SEQ ID NO: 6562

SEQ ID NO: 14327 - protein, 259 aa, Neisseria meningitidis; identical to SEQ ID NO: 331

SEQ ID NO: 14328 - protein, 219 aa, Neisseria meningitidis; identical to SEQ ID NO: 6969

SEQ ID NO: 14329 - protein, 127 aa, Neisseria meningitidis; identical to SEQ ID NO: 1080

SEQ ID NO: 14330 - protein, 406 aa, Neisseria meningitidis; identical to SEQ ID NO: 7984

SEQ ID NO: 14331 - protein, 417 aa, Neisseria meningitidis
MQTYLVGGAVRDYLLGLPVKDRDWVVVGADAQTMLAQGFQPVGKDFPVFLHPETHEEYTLARTERKTAKGYVGFSFHADKDVTLEQDLMRRDLTINAMAQDADGKIIDPFGGQRDLAAGILRHVSPAFAEDPVRILRTARFAARYRFEIAEETIKLMRQMVENGEADALVAERVWQEFAKGLMEKNPRKMIEVLRECGALKVLLPEVNALFGVPQRADYHPEIDSGIHTLMTLQRAADMGLSLPERYAALLHDLGKAKTPSDILPRHHGHDLAGVEPVREVNQRLRAPKHCAELAELVCRWHIIFHQVGQLKSQTILNVLKKTDAFRRPERFQTALNVCIADTQGRLNREHTPYPQRAHWFALLEAANQADSGKIAAECRAQGKAHLIAEQIDRARLAQIAPLQKAFRAAQDKTEKH

SEQ ID NO: 14332 - protein, 229 aa, Neisseria meningitidis
MKRKNIALIPAAGIGARFGADKPKQYVEIGSKTVLEHTLGIFERHEAVDLTVVVVSPEDTFADKVQTAFPQVRVWKNGGQTRAETVRNGVAKLLETGLAAETDNILVHDAARCCLPSEALTRLIEQAGNAAEGGILAIPVADTLKCADGGNISATVERTSLWQAQTPQLFRAGLLHRALAAENLDGITDEASAVEKLGVRPLLIQGDVRNLKLTQPQDAYIVRLLLDAV

SEQ ID NO: 14333 - protein, 106 aa, Neisseria meningitidis
MNFQDYLATFPSIDHLGGLDVQDADGKTVHHIPAVQGKLGSLKLYNALAERFDGKLDKEAAEQGLIWFAEHVADARAHPGKHPNIDLLENVVQSGETLLLKPLAAQ

SEQ ID NO: 14334 - protein, 231 aa, Neisseria meningitidis; identical to SEQ ID NO: 2473

SEQ ID NO: 14335 - protein, 444 aa, Neisseria meningitidis
MAKKYFGTDGVRGEVGQFPITPDFVLKLGYAAGQVLVQHDTDQKPTVLIGKDTRISGYMLEAALVAGFTAAGVNVVQTGPLPTPGVAYLTRALRLSAGVMISASHNAYFDNGIKFFAEGGVKLSDEIELEIEAKIDEEMKTQPSARLGRARRISGADDRYIEFCKSTFPSHSDLRGLNLVIDTANGAGYGVAPKVFHELGAQVVSIGDEPNGYNINEKCGATYTKTLQAAVLQHEADYGIALDGDGDRLMMVDKNGKVYDGDSLIYVIAKARAREGINIGGVVGTVMTNMAMEIALKEQGVDFCRAKVGDRYVLEQLNQRGWLIGGEASGHILCMDKHNTGDGIISALQVLAALQTLNQDLATVCADWQPYPQTMINVRIGKGQNWQEASKGVLAEVEKELEGKGRVVLRASGTEPVVRVMVEARQADWARDGAERIASAIGSL

SEQ ID NO: 14336 - protein, 382 aa, Neisseria meningitidis
MPLPLPSPEARQFSLKLQTLIAEEIGKHGNWIPFSRFMELVLYAPQYGYYTGGSHKIGNTGDFITAPTLTSLFAQTLARQLQELLSQTAGNIYEFGAGTGQLAADLLGSISDGISRYYIIEISPELAARQKNLIQARAPEASQKVVHLTALPEAFDGIIIGNEVLDAMPVEIVRKNEGGSFEHVGVCLDNDRFTYSARPLHDLQLSALASLYFPQTDYPYTSELHPQQYAFIRTLASRLERGGMIFIDYGFDAAQYYHPQRNQGTLIGHYRHHVIHNPFDFIGLADLTAHVNFTDIAQAGTDAGLDLTGYLPQSHFLLNLGITELLAQVGKTDSPAYIREAAAVQKLIDQHEMGELFKVIAFGKNIGIDWAGFRFGDICHKL

SEQ ID NO: 14337 - protein, 131 aa, Neisseria meningitidis; identical to SEQ ID NO: 1281

SEQ ID NO: 14338 - protein, 349 aa, Neisseria meningitidis; identical to SEQ ID NO: 328

SEQ ID NO: 14339 - protein, 206 aa, Neisseria meningitidis; identical to SEQ ID NO: 6659

SEQ ID NO: 14340 - protein, 473 aa, Neisseria meningitidis
MFRRHFCFQMQGKPMAKTLKTLYQCTECGGTSPKWQGKCPHCGEWNTLQESLAAPEPKNARFQSWAADTSTVQSLSAVTAAEVPRNPTGMSELDRVLGGGLVDGAVILLGGDPGIGKSTLLLQTIAKMAQSRKVLYVSGEESAQQVALRAQRLELPTEGVNLLAEIRMEAIQTALKQHQPEVVVIDSIQTMYSDQITSAPGSVSQVRECAAQLTRMAKQMGIAMILVGHVTKDGAIAGPRVLEHMVDTVLYFEGDQHSNYRMIRAIKNRFGAANELGVFAMTENGLKGVSNPSAIFLASYRDDTPGSCVLVTQEGSRPLLVEIQALVDDAHGFTPKRLTVGLEQNRLAMLLAVLNRHGGIACFDQDVFLNAVGGVKIGEPAADLAVILAMLSSFRNRPLPEKMVAFGEIGLSGEVRPVARGQERLKEAEKLGFKRAIVPKANMPRNAKEFPNLKIYGVSSLQEAIDICRDSRE

SEQ ID NO: 14341 - protein, 336 aa, Neisseria meningitidis; identical to SEQ ID NO: 2187

SEQ ID NO: 14342 - protein, 185 aa, Neisseria meningitidis
MDALKLLTNRRSSKKLKPPAPDAAELEQIFQAATQVPDHGNMRPFRFTVIQGEVGLQRFRDVLKQTVAELNFGDDAMKKAEKVGNMSPMVIGVTFAPNRDVPKPKPEWEQMLTAGCAAYALQLAATAQGFDNVWITGMWVNSPLLREAFGCADKDKIIGLMMVGTPTEEVHKPKNTDLEAFVSHW

SEQ ID NO: 14343 - protein, 590 aa, Neisseria meningitidis
MILPARFSDGISLSLRLKLLTGVWVGLAALSVVLTLLLSLRLENAASVIEEAGNLRMQAYRLAYMAGEGSPRSQIDNQVDEFEKSLNRISQSDAIHPLIPSDTPLAYDLIQSMLIIDWQAHILPPLQSYRRPTQVDLYRFAGNIELFLQALENANEKNTWWLRRFQWAIMLMTLVSSVLMLFWHQIWVIRPLQALREGAERIGRRCFDIPVPEGGTPEFKQVGRCFNQMGGRLKILYDDLEGQVAEQTRSLEKQNQNLTLLYQTTRDLHQSYIPQQAAEHFLNRILPAVGADSGRVCLDGGSDVYVSIHHADCGTAASDLGKYHEEIFPIEYQNETLGRLLLSFPNGISLDEDDRILLQTLGRQLGVSLAGAKQEEEKRLLAVLQERNLIAQGLHDSIAQALTFLNLQVQMLETAFAENKREEAAENIGFIKTGVQECYEDVRELLLNFRTKISNKEFPEAVADLFARFTQQTGITVETAWENGSFLPPQEAQLQMIFILQESLSNIRKHARATHVKFTLSEHGGRFTMTIQDNGQGFDTEKIGEPTGSHVGLHIMQERAKRIHAVLEIRSQPQQGTTVSLTGASEESLK

SEQ ID NO: 14344 - protein, 423 aa, Neisseria meningitidis; identical to SEQ ID NO: 7094

SEQ ID NO: 14345 - protein, 210 aa, Neisseria meningitidis
MTLRYEILSVTPFRQNCTLIWDDESGEAVLTDVGGDVPFLLQALANRKLTLTAIWLTHGHLDHAGGVVEMLKTHKVPVLGPHPDDEFLLQSLPQTTAQYGFPVSPAFAPNHWLEEGETLKVGRYAFQVLHIPGHTPGHVVFYCAEAELLIAGDVLFYETIGRTDFPRGNHADLINNIRNKLFALPETVQVVAGHGRMTSIGHEKRHNPFF

SEQ ID NO: 14346 - protein, 144 aa, Neisseria meningitidis
VAKKIIGYIKLQIPAGKANPSPPVGPALGQRGLNIMEFCKAFNAATQGMEPGLPIPVVITAFADKSFTFVMKTPPASILLKKTAGLQKGSSNPLTNKVGKLTRAQLEEIAKTKEPDLTAADLDAAVRTIAGSARSMGLDVEGVV

SEQ ID NO: 14347 - protein, 485 aa, Neisseria meningitidis; identical to SEQ ID NO: 6505

SEQ ID NO: 14348 - protein, 316 aa, Neisseria meningitidis; identical to SEQ ID NO: 5301

SEQ ID NO: 14349 - protein, 229 aa, Neisseria meningitidis; identical to SEQ ID NO: 6103

SEQ ID NO: 14350 - protein, 114 aa, Neisseria meningitidis; identical to SEQ ID NO: 1818

SEQ ID NO: 14351 - protein, 196 aa, Neisseria meningitidis; identical to SEQ ID NO: 1629

SEQ ID NO: 14352 - protein, 809 aa, Neisseria meningitidis
MRFSRFEPKGRLKQQIRFQTTFLSTSHHGNQTKAAHRHIHVGSTAGTTTIRSGGDTTLKGAQLIGKGIQADTRNLHIESVQDTETSQSKQQNGNVQVTVGYGFSASGSYSQSKVKADHASVTEQSGIYAGEDGYQIKVGNHTDLKGGIITSGKSAEDKGKNLFQTATLTASDIQNHSRYEGKSFGIGGSFDLNGGWDGTVTDKQGRPTDRISLAAGYGSDSDSQSSITKSGINTRNIHITDEAGQLARTGRTAKETEARIYTGIDTETADQHTGRLKNSFDKDAVAKEINLQREVTKEFGRNAAQAVAAVADKLGNTQSYERYQEARTLLEAELQNTDSKAEKAAIRASLGQVNAYLAENQSRYDTWKEGGIGRSILHGAAGGLTTGSLGGILAGSGTSLAAPYLDKAAENLGPAGKAAVNALGGAAIGYAAGGNVGTAAVGANVDWNNRQLHPKETQILNKLSKGKSAEEQYRLKAAACALTRCAEGVPDFDPLYKGLKNLQDAGKQFVAEQNVLMRTDAFKYGTWNSLNDIRSSYDRAATKIKGAGNMGLGATTFVGSGAIGGGLCSTGIGCAAGGLIATAGMTGGYTQASEGSRQLFGTYQSDFGKKVVLSLGTPIEYESPLVSDAKNLAVWGLETLITRKLGNLATGVKTSLTPKTADVQRNILSQSEVGIKWGKGIEGQGMPWEDYVGKGLSANARLPKNFKTFDYFDRGTGTAISAKTLDTQTTARLSKPEQLYSTMKGYIDKTANFKSYELSEVPLRADMIKQREIHLAIPAQTNKEQRLQLQRVVEYGKSQNITVKITEIE

SEQ ID NO: 14353 - protein, 344 aa, Neisseria meningitidis; identical to SEQ ID NO: 6064

SEQ ID NO: 14354 - protein, 222 aa, Neisseria meningitidis; identical to SEQ ID NO: 7279

SEQ ID NO: 14355 - protein, 112 aa, Neisseria meningitidis
MNTRIIVSAAFVALALAGCGSINNVTVSDQKLQERAAFALGVSPNAVKISNRSNESIRINFTATVGKRVSQCYVTSVISTIGVTTSDAICLGGGTHKGKSQCNALLKAAGRC

SEQ ID NO: 14356 - protein, 379 aa, Neisseria meningitidis
MSQNASVGIVMPQKIPFEMPLVLENGKTLPRFDLMIETYGELNAEKNNAVLICHALSGNHHVAGRHSAEDKYTGWWDNMVGPGKPIDTERFFVVGLNNLGGCDGSSGPLSINPETGREYGADFPVVTVKDWVKSQAALADYLGIEQWAAVVGGSLGGMQALQWAISYPERVRHALVIASAPKLSTQNIAFNDVARQAILTDPDFNEGHYRSRNTVPARGLRIARMMGHITYLAEDGLGKKFGRDLRSNGYQYGYGVEFEVESYLRYQGDKFVGRFDANTYLLMTKALDYFDPAADFGNSLTRAVQDVQAKFFVASFSTDWRFAPERSHELVKALIAAQKSVQYIEVKSAHGHDAFLMEDEAYMRAVAAYMNNVYKECQQ

SEQ ID NO: 14357 - protein, 139 aa, Neisseria meningitidis
MNLVKLLANNWQPIAIIALVGTLLAVSHHQGYKSAFAKQQAVIDKMERDKAQALLLSAQNYARELELARAEAKKYEVKAHAVGMALAKKQAEVSRLKTENKKEIENVLTQDRKNASGGCIDGFGSHGLQLYNRALGYGN

SEQ ID NO: 14358 - protein, 305 aa, Neisseria meningitidis; identical to SEQ ID NO: 6805

SEQ ID NO: 14359 - protein, 448 aa, Neisseria meningitidis; identical to SEQ ID NO: 5964

SEQ ID NO: 14360 - protein, 159 aa, Neisseria meningitidis; identical to SEQ ID NO: 6605

SEQ ID NO: 14361 - protein, 371 aa, Neisseria meningitidis
MIYQRNLIKELSFTAVGIFVVLLAVLVSTQAINLLGRAADGRVAIDAVLALVGFWVIGMTPLLLVLTAFISTLTVLTRYWRDSEMSVWLSCGLALKQWIRPVMQFAVPFAVLVAVMQLWVIPWAELRSREYAEILKQKQELSLVEAGGFNSLGKRNGRVYFVETFDTESGIMKNLFLREQDKNGGDNIIFAKEGNFSLNDNKRTLELRHGYRYSGTPGRADYNQVSFQKLNLIISTTPKLIDPVSHRRTIPTAQLIGSSNPQHQAELMWRISLTVSVLLLCLLAVPLSYFNPRSGHTYNILIAIGLFLIYQNGLTLLFEAVEDGKIHFWLGLLPMHIIMFVIAIVLLRVRSMPSQPFWQAVGKSLTLKGGK

SEQ ID NO: 14362 - protein, 92 aa, Neisseria meningitidis; identical to SEQ ID NO: 600

SEQ ID NO: 14363 - protein, 188 aa, Neisseria meningitidis; identical to SEQ ID NO: 7019

SEQ ID NO: 14364 - protein, 254 aa, Neisseria meningitidis
MSYTQLTQGERYHIQYLSRHCTVTEIAKQLNRHKSTISREIRRHRTQGQQYSAEKAQRQSQTIKQRKRQPYKLDSQLIQHIDTLIRRKLSPEQVCAYLCKHHQITLHHSTIYRYLRQDKSNGSTLWQHLRICSKPYRKRYGSTWTRGKVPNRVGIENRPAIVDQKSRIGDWEADTIVGKGQKSALLTLVERVTRYTIICKLDSLKAEDTARAAVRALKAHKDRVHTITMDNGKEFYQHTKITKALKAETYFCRP

SEQ ID NO: 14365 - protein, 290 aa, Neisseria meningitidis
LSDEGRHKPTSAPNRVFMMKGMDKLRYQQDFLNIRPIFTAGEQEYLTELSDRLPLSVLTDSVRNIEEIGIDFVYSSAKLEGNTYNQYDTQALLKLGQTAGGKLYSDAVMLINLRESYRHLLSGLDSPEPFDWLDFLKTTHSLISENLLEKGSGGVVRRDSVTISGTDYTPLSNPQSLDTELKWLLQEAPKIENPFDRAVYLHNNLAYLQYFKDCNKRTARNCMTLSLMRSGFFPCVFSPDSYPAYAEAVVAYYETGDYGLFKKYFISAYENTVNKYGPQPDMDIFRNFSL

SEQ ID NO: 14366 - protein, 544 aa, Neisseria meningitidis
MTKFIFVTGGVVSSLGKGIAAASIAAILESRGLNVTMLKLDPYINVDPGTMSPFQHGEVFVTDDGAETDLDLGHYERFIDSTMTRRNSFSTGQVYENVIAKERRGDYLGGTVQVIPHITDEIKRRIHEGAAGYDVAIVEIGGTVGDIESLPFLEAIRQMRSQLGRNNTLFAHLSYVPYIAAAGEIKTKPTQHTVKEMLSIGLQPDILICRMDREMPADERRKIALFCNVEERAIVGSYDVDSIYECPEMLHDQGIDNIITEQLQLNVQQADLTAWKKIVHAVKNPKHTVKIAMVGKYVDLTESYKSLIEALKHAGVHTETDVQITFVDSESIEKNKGDVSMLKDMDAILVPGGFGSRGVEGKIAAVRYARENNVPYLGICLGMQIALIEYARDVAGLKGANSTEFDLKCAAPVVALIDEWQTADGSVETRDESADLGGTMRLGAQEVELKAGSLAAKIYGSEHIRERHRHRYEVNNNYVPTLEQAGLVIGGVSAGRERLVETIELPNHPWFFACQFHPEFTSNPRKGHPLFTAFVKAALNNKKA

SEQ ID NO: 14367 - protein, 81 aa, Neisseria meningitidis; identical to SEQ ID NO: 6821

SEQ ID NO: 14368 - protein, 56 aa, Neisseria meningitidis; identical to SEQ ID NO: 2971

SEQ ID NO: 14369 - protein, 204 aa, Neisseria meningitidis; identical to SEQ ID NO: 13454

SEQ ID NO: 14370 - protein, 49 aa, Neisseria meningitidis
LRQCRLKPRIRLQTASVYQKANNSVWQKKQICFLVNTRLQSATSDFYKG

SEQ ID NO: 14371 - protein, 227 aa, Neisseria meningitidis
MPSEKCSDGISYNLLFAAHNQSVFPIPFRNAYHAPVPNICEQGKKMARLTVHTLETAPEAAKARVEAVLQNNGFIPNLIGVLANAPEALAFYQEVGKLNAANSLTAGEVEVIQIIAARTNQCGFCVAGHTKLATLKKLLSEQSVKAARALAAGEFDDAKLGALAAFTQAVMAKKGAVSDDELKAFFDAGYNQQQAVEVVMGVALATLCNYVNNLAQTEINPELQAYA

SEQ ID NO: 14372 - protein, 492 aa, Neisseria meningitidis
MKYKDLRDFIAMLEQQGKLKRIAHPVSPHLEMTEIADRVLRAEGSALLFENPIKPDGTRYGYPVLANLFGTPERVAMGMGADSVSKLREIGQTLAYLKEPEPPKGIKDAFSKLPLLKDIWSMAPNVVKNAPCQEIVWEGENVDLYKLPIQHCWPEDVAPLVTWGLTVTRGPHKKRQNLGIYRQQLIGKNKLIMRWLSHRGGALDYQEFRKLNPDTPYPVAVVLGCDPATILGAVTPVPDTLSEYQFAGLLRGSRTELVKCIGNDLQVPARAEIVLEGVIHPNETALEGPYGDHTGYYNEQDHFPVFTVERITMRENPIYHSTYTGKPPDEPAVLGVALNEVFVPLLQKQFPEITDFYLPPEGCSYRMAVVSMKKQYAGHAKRVMMGCWSFLRQFMYTKFIIVVDDDVNVRDWKEVIWAVTTRMDPVRDTVLVENTPIDYLDFASPVSGLGGKMGLDATNKWPGETDREWGRVIKKDPAVTAKIDGIWEELGL

SEQ ID NO: 14373 - protein, 251 aa, Neisseria meningitidis
MKFARLLFLCAALAGTQAAAAEMVQIEGGSYRPLYLKKDTGLIKVKPFKLDKYPVTNAEFAEFVNSHPQWQKGRIGSKQAEPAYLKHWMKNGSRSYAPKAGDLKQPVTNVSWFAANAYCAAQGKRLPTIDEWEFAGLASATQKNGSNEPGYNRTILDWYADGDRKDLHDVGKGRPNYWGVYDMHGLIWEWTEDFNSSLLSSGNANAQMFCSGASIGSSDSSNYAAFLRYGIRTSLQSKYVLHNLGFRCTSR

SEQ ID NO: 14374 - protein, 281 aa, Neisseria meningitidis
MLSYRHAFHAGNHADMLKHFTLFLVLQYFNRKDKPYWYIDTHGGAGVYNLEGSEAQKVGEYRQGIALLRQAQNLPAELSDFAAHIQKILPSPELYCGSPWLAQSLTRVGDKLRLFELHPTDFVHLQNNMGEAGLGKRGQVLREDGYKGLISLLPPPPRRAAVLIDPPYEEKQDYWRVTETLKSALKRFESGCYLIWYPCLSREESRKLPEELKKLVPDNYLHAELHVHAPKADGFGMHGSGMFVINPPYLLAEQLAANLPALTRLLAQDEGARYLLDSKIR

SEQ ID NO: 14375 - protein, 269 aa, Neisseria meningitidis
MQGTAMNTILAFDIETVPDVQGIRTLYELPSSLPDDEVVLFAQQKRRAQTGGDFMQHHLHQVVAISCCMRWGQDKVHVGTIGEMDDGEEVVIAKFFELIEKHTPQLVSWNGGGFDLPVLHYRSLIYGINAARYWDMGDGDFGDSRDFKWNNYISRYHQRHCDLMDLLALYQPRANVPLDDMAKLCGFPGKLGMDGSKVWDAFHAGRLKEIRNYCETDAVNTYLMYLRFCLVSGRFDADEYEMEIKRIRNYLSAQTEDKPHWAEFVQAWK

SEQ ID NO: 14376 - protein, 74 aa, Neisseria meningitidis; identical to SEQ ID NO: 2956

SEQ ID NO: 14377 - protein, 1029 aa, Neisseria meningitidis
MNQNHFSLKILTVMLLSAYGGSFADGVVPVSDGNTVSLDTVNVRGSHALLGKTEKTRSYTIDRMSTATGMRIAGKDTPQSVSVITRSRLDDKAVHTLEEAMKNTTGVNVVRDSGLQTRFLSRGFYIDQIGEDGMTVNVAGRSGYTAKIDVSPSTDLAVYDHIEVVRGATGLTQSNSEPGGTVNLIRKRPTASFKHTGELTADHRGSRRAVLDVSGSLNKANTLRGRLVGAEEYKKSFKDRVWGRKHMVYGIAEADAGDSSVLTLGGMYQKSREVPDFSGIILPCENQKTAPFSSTPACNRPLQLPRNTYLGEDWSRLSADKYNLFSGFKHVFDNGWQLNAEVSYTKNESDAKVGQFFLKNEYAAGLSGEDAVGFLTEKNEVIPFEPKDKALEKLKAYRDETAKEYRERKDDFVKNRFDNTAFEQYRSRRAAERKAGFDKCMSDPFALDFICQGSWGDPGVDADKAEFVDKALAKEGIFNNAAQRFPNSLYDSSFNRKATANRRYSYMPLRHTKDDRQWGIKLDLTGTYGLFGREHDFFVGYAYGDEKIRSEYLEIYERRYRVRPNTGATHGVYAGSCQEEPDGDLSSPLVRGHKEPDWQAYDEKGNRTVYAEECRNAKKIKTEPKLDAEGKQVYYYDEYSGSRTPVYVDVYELDEKGNKIQETNPDGTPAFTGFSGTVPVWKTVKVADDHVPALYNYAKYLNTNKTHSLTASTRFNVTGRLHLLGGLHYTRYETSQTKDMPVRYGQPASDFQTASSIRADQDHYTAKMQGHKLTPYAGITYDLTPQQSIYGSYTKIFKQQDNVDVSAKTVLPPLVGTNYEVGWKGAFLQGRLNASFALFYLEQKNRTVVDFGYVPGAGGKQGSFQTVAKPIGKVVSRGAEFELSGELNEDWKVFAGYTYNKSRYKNAAEVNAERLAKNSSADPYNFSNFTPVHIFRFGTSFHIPNTGLTVGGGVSAQSGTSSLYNIRQGGYGLIDGFVRYELGKHAKLSLIGTNLNGRTYFENNYNRTRGANNFYGEPRTVSMKLDWQF

SEQ ID NO: 14378 - protein, 195 aa, Neisseria meningitidis; identical to SEQ ID NO: 7074

SEQ ID NO: 14379 - protein, 140 aa, Neisseria meningitidis; identical to SEQ ID NO: 6541

SEQ ID NO: 14380 - protein, 308 aa, Neisseria meningitidis
MLNVPKGSYDGMKGFTIIEFLVAGMLSMIVLMAVGSSYFTSRKLNDAANERLSAQQDLRNAATLIVRDARMAGGFGCFNMSEHPATDVISDTTQQNSPFPLKRNSTNKLIPITESSNINYQNFFQVGSALIFQYGIDDLDASAETVVVSSCSKIAKPGKKISTLQEAKSALQITNDDKQNGNITRQRHVVNAYAVGRIAGEEGLFRFQLDDKGKWGNPQLLAKKIRHMKVRYIYVSDCPEDDDAGKEETFRYTDKFNSAQDAVTPAGVEVLLSSGTDTKIAASSDNHIYAYRIDATIRGGNVCANRTL

SEQ ID NO: 14381 - protein, 139 aa, Neisseria meningitidis; identical to SEQ ID NO: 921

SEQ ID NO: 14382 - protein, 366 aa, Neisseria meningitidis
MTRIAILGGGLSGRLTALQLAEQGYQIALFDKGCRRGEHAAAYVAAAMLAPAAEAVEATPEVIRLGRQSIPLWRGIRCRLNTHTMMQENGSLIVWHGQDKPLSSEFVRHLKRGGVADDEIVRWHADDIAEREPQLGGRFSDGIYLPTEGQLDGRQILSALADALDELNVPCHWEHECAPEDLQAQYDWLIDCRGYGAKTAWNASAEHGSTLRGIRGEVARVYTPEITLNRPVRLLHPRYPLYIAPKENHVFVIGATQIESESQAPASVRSGLELLSALYAVHPAFGEADILEIATGLRPTLNHHNPEIRYSRKRRLIEINGLFRHGFMISPAVTAAAVRLAVALFDGKDAPERDEESGLAYIRRQD

SEQ ID NO: 14383 - protein, 181 aa, Neisseria meningitidis
MTYEKLYELRQTLRPTTKDGLYTDNEKNREILTVRWSGNTENPKNFSAVAIGINPSKANDERSDKTLTQLARFLDMYGFTNFKMLNIFSSYSTQQTGIRANTQTDFSKFKGCLEDADMIILAWGTDRSAYKDEKNRILEFLKAEKFMEKVFCISETGNSSDTRHPSRISYSYQLVQFEESA

SEQ ID NO: 14384 - protein, 436 aa, Neisseria meningitidis; identical to SEQ ID NO: 1523

SEQ ID NO: 14385 - protein, 185 aa, Neisseria meningitidis; identical to SEQ ID NO: 7373

SEQ ID NO: 14386 - protein, 290 aa, Neisseria meningitidis; identical to SEQ ID NO: 6884

SEQ ID NO: 14387 - protein, 210 aa, Neisseria meningitidis; identical to SEQ ID NO: 5679

SEQ ID NO: 14388 - protein, 469 aa, Neisseria meningitidis
MDTQIKTEAGQQNNRRYLTVWRWHFYAGLLVMPFLTLLAVTGLGMLLFANITGKEGERIHVVPQATVQPLSVQAEAARSAVNPETSSVVQYIAPRADDMVAVFRVNNEGKATMVAVDPYTAKVVSTMPRNQGWYYAMDEIHSDMMLGSTGDYLLETAASLTIIMIISGLYLWWVKRRGIKAMLLPPKGRARSWWRNLHGAFGTWVSLILLLFCLSGIAWAGIWGGKFVQAWSQFPAGKWGVEPNPVSVVPTHGEVLNDGKVKEVPWILELTPMPVSGTTVGKDGINPDEPMTLETVDRFAREIGFKGRYQLNLPKGEDGVWTLSQDSMSYDMISPFADRTVHIDQYSGKILADIRFDDYNPFGKFMAASIALHMGTLGWWSVLANVLFCLAVIFIGISGCVMWWKRRPTGAVGIVPPAQKVKLPVWWMMALPLLAIALLFPTALLAIAVIWLLDTLLLSRIPVLRRWFK

SEQ ID NO: 14389 - protein, 135 aa, Neisseria meningitidis
  misc_feature 3, 4: 'Xaa' is any amino acid
VCXXGAFNRVGASSRFMNRPVIDIDLARTALQDIIAEKHKVITADIIIDAVAKYYRIKISDVLGKKRTRNIARPRQVAMSLTKELTTLSLPSIGDSFGGRDHTTVMHGIRAVAKLREEDPELAQDYEKLLILIQN

SEQ ID NO: 14390 - protein, 402 aa, Neisseria meningitidis
MSEAEYFSHFISNGNGKLLEIPQRRGRQDGVFIDWLSFTLHEDSLLKVSGMPLSFRCRIYVCLSKKLEEILGFGITSRCKSKGNKFYDSMFRLGSEEVDYGEVHYGGQRNTVLIELKGVGCNIANPGWELRLKQFLEDSLRPRITRVDLALDFFDGEYTPEQALLDHDNGFFDNSNMRPKSEMVGTAWRREDGSGKTFYVGRKKNSRFVRVYEKGRQLGDKESKWVRFEIQFNHGDMEIPLDILINQGSYFSGAFPICQKFKNMPNPERFDYRKKVANLTFQHKLRYAKNAVGKLINFMFDMGFDSDEIVRYLKADLGYPKGLEPEKYSLAGLKESLKFGFIHEQPDVDLEVELEELGIIKFKQSDKFDPDKRLFDPHHDVESERQYQLYLDRMYDLHANQN

SEQ ID NO: 14391 - protein, 370 aa, Neisseria meningitidis; identical to SEQ ID NO: 7729

SEQ ID NO: 14392 - protein, 195 aa, Neisseria meningitidis
  misc_feature 3, 4: 'Xaa' is any amino acid
VCXXRWIKKNGLYKLGYKQHTRTDAEGYIEKLHITFANANECKHLSPLLEGLPEGTTVYADKGYDSAENRQHLEERQLLDGIMRKACRNRPLTETQTKRNRYLSKTRYSGLNLNQDKATKQQTVQIVRQGEATPYWFKFNPLYVVEQSFGTLHRKFRYARAAYFGLIKVSAQSHLKAMCLNLLKAANRLSAPAAA

SEQ ID NO: 14393 - protein, 197 aa, Neisseria meningitidis; identical to SEQ ID NO: 1551

SEQ ID NO: 14394 - protein, 114 aa, Neisseria meningitidis; identical to SEQ ID NO: 565

SEQ ID NO: 14395 - protein, 291 aa, Neisseria meningitidis
MSQHSAGARFRQAVKESNPLAVAGCVNAYFARLATQSGFKAIYLSGGGVAACSCGIPDLGITTMEDVLIDARRITDNVDTPLLVDIDVGWGGAFNIVRTIRNFERAGVAAVHIEDQVAQKRCGHRPNKAIVSKDEMVDRIKAAVDARVDENFVIMARTDALAVEGLDAAIERAQACVEAGADMIFPEAMTDLKMYRQFADAVKVPVLANITEFGSTPLYTQSELAENGVSLVLYPLSSFRAASKAALNVYEAIMRDGTQAAVVDTMQTRAELYEHLNYHAFEQKLDKLFQK

SEQ ID NO: 14396 - protein, 225 aa, Neisseria meningitidis; identical to SEQ ID NO: 6348

SEQ ID NO: 14397 - protein, 76 aa, Neisseria meningitidis; identical to SEQ ID NO: 8288

SEQ ID NO: 14398 - protein, 92 aa, Neisseria meningitidis; identical to SEQ ID NO: 600

SEQ ID NO: 14399 - protein, 1975 aa, Neisseria meningitidis
MNKGLHRIIFSKKHSTMVAVAETANSQGKGKQAGSSVSVSLKTSGDLCGKLKTTLKTLVCSLVSLSMVLPAHAQITTDKSAPKNQQVVILKTNTGAPLVNIQTPNGRGLSHNRYTQFDVDNKGAVLNNDRNNNPFLVKGSAQLILNEVRGTASKLNGIVTVGGQKADVIIANPNGITVNGGGFKNVGRGILTTGTPQIGKDGALTGFDVRQGTLTVGTSGWNDKGGADYTEVLARAVALQGKLQGKNLAVSTGAQKVDYASGEISAGTAAGTKPTVALDTAALGGMYADSITLIANEKGVGVKNAGTLEAAKQLIVTSSGRIENSGRIATTADGTEASPTYLSIETTEKGAAGTFISNGGRIESKGLLVIETGEDISLRNGAVVQNNGSRPATTVLNAGHNLVIESKTNVNNAKGPATLSADGRTVIKEASIQTGTTVYSSSKGNAELGNNTRITGADVTVLSNGTISSSAVIDAKDTAHIEAGKPLSLEASTVTSDIRLNGGSIKGGKQLALLADDNITAKTTNLNTPGNLYVHTGKDLNLNVDKDLSAASIHLKSDNAAHITGTSKTLTASKDMGVEAGSLNVTNTNLRTNSGNLHIQAAKGNIQLRNTKLNAAKALETTALQGNIVSDGLHAVSADGHVSLLANGNADFTGHNTLTAKADVNAGSVGKGRLKADNTNITSSSGDITLVAGNGIQLGDGKQRNSINGKHISIKNNGGNADLKNLNVHAKSGALNIHSDRALSIENTKLESTHNTHLNAQHERVTLNQVDAYAHRHLSITGSQIWQNDKLPSANKLVANGVLALNARYSQIADNTTLRAGAINLTAGTALVKRGNINWSTVSTKTLEDNAELKPLAGRLNIEAGSGTLTIEPANRISAHTDLSIKTGGKLLLSAKGGNAGAPSAQVSSLEAKGNIRLVTGETDLRGSKITAGKNLVVATTKGKLNIEAVNNSFSNYFPTQKAAELNQKSKELEQQIAQLKKSSPKSKLIPTLQEERDRLAFYIQAINKEVKGKKPKGKEYLQAKLSAQNIDLISAQGIEISGSDITASKKLNLHAAGVLPKAADSEAAAILIDGITDQYEIGKPTYKSHYDKAALNKPSRLTGRTGVSIHAAAALDDARIIIGASEIKAPSGSIDIKAHSDIVLEAGQNDAYTFLKTKGKSGKIIRKTKFTSTRDHLIMPAPVELTANGITLQAGGNIEANTTRFNAPAGKVTLVAGEELQLLAEEGIHKHELDVQKSRRFIGIKVGKSNYSKNELNETKLPVRVVAQTAATRSGWDTVLEGTEFKTTLAGADIQAGVGEKARVDAKIILKGIVNRIQSEEKLETNSTVWQKQAGRGSTIETLKLPSFESPTPPKLSAPGGYIVDIPKGNLKTEIEKLAKQPEYAYLKQLQTAKNVDWKQVQLAYDKWDYKQEGLTGAGAAIVVIIVTALTYGYGAAAAGSVTAAGSSTAAAATTTAAATTTVSTAAAMQTAALASLYSQAAVAIINNKGDVGKALKDLGTSDTVKQIVTSALTAGALNQMGADIAQLNSKVRTELFSSTGNQTIANLGGRLATNLSNAGISAGINTAVNGGSLKDNLGNAALGALVNSFQGEAASKIKTTFSDDYVAKQFAHALAGCVSGLVQGKCKDGAIGAAVGEIVAESILGGRNPATLSDAEKHKVISYSKIIAGSVAALNGGDVNTAANAAEVAVVNNALNFDSTPTNAKKHQPQKPDKTALEKIIQSIMPAHAAGAMTNPQDKDAAIWISNIRNGITGPIVITSYGVYAADWTAPLIGTAGKAAISTCMANPSGCTVMVTQAAEAGAGIATGAVTVGNAWEAPVGALSKAKAAKQAIPTQTVKELDGLLQESKNIGAVNTRINIANSTTRYTPMRQTGQPVSAGFEHVLEGHFHRPIANNRSVFTISPNELKVILQSNKVVSSPVSMTPDGQYMRTVDVGKVIGTTSIKEGGQPTTTIKVFTDKSGNLITTYPVKGN

SEQ ID NO: 14400 - protein, 91 aa, Neisseria meningitidis
LRGKTKVMTTQMGASRDVSKSTKGWSVGIGLNVGKQFTDSVSLEFDPYRHKTICKSREIVLDGYRTKMGCSKSNEYDFRVTATFYSQLKSK

SEQ ID NO: 14401 - protein, 104 aa, Neisseria meningitidis
  misc_feature 100, 101, 102: 'Xaa' is any amino acid
LLCPEKMSVMAGRHPYGVRSGLRRNGLKLWDIHFRMTRFIVARCGLLFATLKGKTMKKMFVLFCMLFSCAFSLAAVNINAASQQELEALPGIGPAKAKAXXXHT

SEQ ID NO: 14402 - protein, 774 aa, Neisseria meningitidis
VLKTPPTLAAELSGKTGVSISAPYANENSRISLSAANIEAENGKIKIQSYGDQYYYARQSELYTFERRSYKTGKWYNRKHITEVKEHKNAKPDAVNLSASQGIDIKSGGSIDAYATAFDAPKGSINIEAGRKLTLYAVEELNYDKLDSQKRRRFLGISYSKAHDTTTQVMKTALPSRVVAESANLQSGWDTKLQGTQFETTLGGATIRAGVGEQARADAKIILEGIKSSIHTETVSSSKSTLWQKQAGRGSNIETLQLPSFTGPVAPVLTAPGGYIADIPKGNLKTEIEKLSKQPEYAYLKQLQVAKNINWNQVQLAYDRWDYKQEGLTEAGAAIIALAVTVVTSGAGTGAVLGLNGAAAAATDAAFASLASQASVSFINNKGDVGKTLKELGRSSTVKNLVVAAATAGVADKIGASALNNVSDKQWINNLTVNLANAGSAALINTAVNGGSLKDNLEANILAALVNTAHGEAASKIKQLDQHYIVHKIAHAIAGCAAAAANKGKCQDGAIGAAVGEIVGEALVKNTDFSRMSATEIEKAKANITAYAKLVAGATVGVTGGNVDVAANASETAVKNNALDIIWDIGNLVWDGGKWIYAKSIGDKQMAREAAIDFGVDAAAAAVPFVPAGATKISRGGAYVLKAGDEAVDTAKAIQEIQKQTGIKLTYDKVNKVWTTPAGLDYGLDAKHGNRIKHVLAHTIPNPNKPVHSVFNVSRKEVLPLVDEAWRMKGNPLPNDSSVYLVDMKKPIGTKGETKVRIVVQKGTNKIISAYPQK

SEQ ID NO: 14403 - protein, 122 aa, Neisseria meningitidis; identical to SEQ ID NO: 3130

SEQ ID NO: 14404 - protein, 283 aa, Neisseria meningitidis; identical to SEQ ID NO: 11344

SEQ ID NO: 14405 - protein, 752 aa, Neisseria meningitidis
MYTRIMEISPWTLRSAKLEKEHKRLQESLTSLGNGYMGMRGSFEETYSADSHLGTYIAGVWFPDKTRVGWWKNGYPKYFGKAINALNFSKVKIFVDGQEVDLAKNDVTDFSVELDMQHGVLCRSFTVFGVRFDVCKFLSVAQKELAVIRWEAVSVDGKTHQVRIDSIIDADVKNEDSNYEEKFWQVLDKGVSDSLSYIAAQTVTNPFGVEQFIVNAEQTFAGSFKVLGGSQTDWQVSNSFEAEVGGTPETFEKRVIVTTSRDYQGLEAVKTAGRALSEKIAGVAFETLLEAHKAGWLHRWEIADVVIEGNDEAQQGIRFNLFQLFSTYYGEDARLNIGPKGFTGEKYGGATYWDTEAYAVPLYLALAEPEVTRNLLQYRRNQLPQAQHNAREQGLAGALYPMVTFTGIECHNEWEITFEEIHRNGAIPYAIYNYTNYTGDEGYLAKEGLEVLVEVSRFWADRVHFSKRNGKYMIHGVTGPNEYENNINNNWYTNTLAAWVLDYTREALAKYPRPDLNVRAAELEKWADISANMYRPHDEELGVFVQHDGFLDKDIRPVSALSPDDLPLNQKWSWDKILRSPFIKQADVLQGIYFFGDRFNIDEKRRNFDFYEPMTVHESSLSPCIHSILAAELGKEEKAVEMYRRTARLDLDNYNNDTEDGLHITSMTGSWLAIVQGFAQMKTWGGKLSFAPFLPGAWTGYAFHINYRGRLIKVAVGKENVVFTLLKGEPLDLQVYGKDITLDGSHAAALEK

SEQ ID NO: 14406 - protein, 262 aa, Neisseria meningitidis
MMENGKTVPRWRFALKSAGWHLLISLSVAGLAALLVFKVWYPYPYAELTGGLSLYQLVVAVDIVCGPLLTLILASPKKKTKARMVDFSMVGIIQLAALVYGLHSVSLARPVIEAFEKDRINVVTAAEVAVEDLHKAPEGLQSLSWFGIRRIALKEPEDADEKNKTLDLSLKGIEPSMRPDQWLPYSDKEAEEIRKHLKPLKVLADARKTTVADILKQAGLAEGEELYYLPFTSSRQKEWIVITDKEGNTKGYAPIDGFIITP

SEQ ID NO: 14407 - protein, 46 aa, Neisseria meningitidis; identical to SEQ ID NO: 8701

SEQ ID NO: 14408 - protein, 864 aa, Neisseria meningitidis
MSKSAVSPMMQQYLGIKAQHTDKLVFYRMGDFYEMFFDDAVEAAKLLDITLTTRGQVDGEPVKMAGVPFHAAEQYLARLVKLGKSVAICEQVGEVGAGKGPVERKVVRIVTPGTLTDSALLEDKETNRIVAVSPDKKYIGLAWASLQSGEFKTKLTTVDKLDDELARLQAAEILLPDSKNAPQLQTASGVTRLNAWQFAADAGEKLLTEYFGCQDLRGFGLDGKEHAVAIGAAGALLNYIRLTQNLMPQHLDGLSLETDSQYIGMDAATRRNLEITQTLSGKKSPTLMSTLDLCATHMGSRLLALWLHHPLRNRAHIRARQEAVAALESQYKPLQCRLKNIADIERIAARIAVGNARPRDLASLRDSLFELAQIDLSANGSSLLETLKAVFPENLSTAEQLRQAILPEPSVWLKDGNVINHGFHPELDELRRIQNHGDEFLLDLEAKERERTGLSTLKVEFNRVHGFYIELSKTQAEQAPADYQRRQTLKNAERFITPELKAFEDKVLTAQEQALALEKQLFDGVLKNLQTTLPQLQKAAKAAAALDVLSTFSALAKERNFARPEFADYPVIHIENGRHPVVEQQVRHFTANHTDLDHKHRLMLLTGPNMGGKSTYMRQVALIVLLAHTGCFVPADAATIGPFDQIFTRIGASDDLASNRSTFMVEMSETAYILHHATEQSLVLMDEVGRGTSTFDGLALAHAVAEHLLQKNKSFSLFATHYFELTYLPEAHAAAVNMHLSALEQGQDIVFLHQIQPGPAGKSYGIAVAKLAGLPVRALKSAQKHLNGLENQAAANRPQLDIFSTMPSEKGDEPNVGNFVDKSEEKHFEGILAAALEKLDPDSLTPREALSELYRLKDLCKSVS

SEQ ID NO: 14409 - protein, 365 aa, Neisseria meningitidis; identical to SEQ ID NO: 1845

SEQ ID NO: 14410 - protein, 214 aa, Neisseria meningitidis
VTRPAKINTYTRIIDASLALFNEEGERNISTNHIAAHLGISPGNLYYHFRNKDEIIVQLFKRYSEALLEYLNEAVLPSDVEDSINYMAGIYDVMWEYRFLFSDVNTLLARSAELLGEHNTFTQAKVSPLLVNLLTQLNGLNIIQADQTAMNDLAVNMWMVTKYWFDFDSSLRGRTKLTEDSKARGIRRTLSLLRPYLLPEHRKKYDRKIGNGNP

SEQ ID NO: 14411 - protein, 402 aa, Neisseria meningitidis
MAERVRFLSESAIKCRLKTNMPTMGAEMNTRNMRYILLTGLLPMASAFGETALQCAALTDNVTRLACYDRIFAAQLPSSAGQEGQESKAVLNLTETVRSSLDKGEAVIVVEKGRDALPADSAGETADIYTPLSLMYDLDKNDLRGLLGVREHNPMYLMPLWYNNSPNYAPGSPTRGTTVQEKFGQQKRAETKLQVSFKSKIAEDLFKTRADLWFGYTQRSDWQIYNQGRKSAPFRNTDYKPEIFLTQPVKADLPFGGRLRMLGAGFVHQSNGQSRPESRSWNRIYAMAGMEWGKLTVIPRVWVRAFDQSGDKNDNPDIADYMGYGDVKLQYRLNDRQNVYSVLRYNPKTGYGAIEAAYTFPIKGKLKGVVRGFHGYGESLIDYNHKQNGIGIGLMFNDLDGI

SEQ ID NO: 14412 - protein, 225 aa, Neisseria meningitidis; identical to SEQ ID NO: 1002

SEQ ID NO: 14413 - protein, 93 aa, Neisseria meningitidis; identical to SEQ ID NO: 7643

SEQ ID NO: 14414 - protein, 447 aa, Neisseria meningitidis
MIKIKKGLNLPIAGRPEQVIYDGPAITEVALLGEEYAGMRPSMKVKEGDAVKKGQVLFEDKKNPGVVFTAPASGKIAAIHRGEKRVLQSVVIAVEGNDEIEFERYAPEALANLSGEEVRRNLIQSGLWTALRTRPFSKIPAVDAEPFAIFVNAMDTNPLAADPTVIIKEAAEDFRRGLLVLSRLTERKIHVCKAAGADVPSENAANIETHEFGGPHPAGLSGTHIHFIEPVGANKTVWTINYQDVIAIGRLFATGRLNTERVIALGGSQVNEPRLLRTVLGAKVSQITAGELVDADNRVISGSVLNGAITQGAHDYLGRYHNQISVIEEGRSKELFGWVAPQPDKYSITRTTLGHFLKNKLFKFTTAVNGGDRAMVPIGTYERVMPLDILPTLLLRDLIVGDTDSAQALGCLELDEEDLALCSFVCPGKYEYGPLLRKVLETIEKEG

SEQ ID NO: 14415 - protein, 753 aa, Neisseria meningitidis; identical to SEQ ID NO: 14304

SEQ ID NO: 14416 - protein, 601 aa, Neisseria meningitidis
MRKVCASARTRSMIYGSMPSEKLTIFQTAFVMQVNIQIPYILPRCVRAEDTPYACYLKQLQVTKDVNWNQVQLAYDKWDYKQEGLTGAGAAIIALAVTVVTAGAGAGAALGLNGAAAAATDAAFASLASQASVSLINNKGNIGNTLKELGRSSTVKNLMVAVATAGVADKIGASALNNVSDKQWINNLTVNLANAGSAALINTAVNGGSLKDNLEANILAALVNTAHGEAASKIKQLDQHYIVHKIAHAIAGCAAAAANKGKCQDGAIGAAVGEIVGEALVKNTDFSRMSATEIEKSKAKITAYSKLVAGTATAVAGGDVNAAANAAQIAVENNTLYPKCIGAKCDEFQKEQQKWIRENPEEYREVLLLQTGFIPIIGDIQNFVQAQTAADYLFALVGVVPGIGESIQAYKVAKAAKNLQGMKKALDKAATVATAQGYVSKTKIKIGQTELRVTAATDKQLLKTISEGRDTTGKMTEQLFDSLAKQNGFRVLSGGKYGANNGFDHVWQAADGSVVLIVESKQIRNGTVQLNPNGAGGYTQMSEDWIKQVITNLPDNHPTKNILREAVRSGKIKTAVTGVDRQTGKAVILPVKVPSKTNIRR

SEQ ID NO: 14417 - protein, 239 aa, Neisseria meningitidis
MATLSDKTILITGASQGLGEQVAKAYAAAGATVILVARHQKKLEKVYDAIVEAGHPEPFAIRFDLMSAEEKEFNQFAATIAEATQGKLDGIVHCAGYFYALSPLDFQTVAEWVNQYRINTVAPMGLTRALFPLLKQSPDASVIFVGESHGETPKAYWGGFGASKAALNYLCKVAADEWERFGNLRANVLVPGPINSPQRIKSHPGEAKSERKSYGDVLPAFVWWASAESKGRSGEIVYL

SEQ ID NO: 14418 - protein, 352 aa, Neisseria meningitidis
MITPQQAIERLISNNELFYDEMTDLMRQMMSGKVPPEQIAAILTGLRIKVETVSEITAAAAVMREFATKVPLENAEGLVDIVGTGGDGAKTFNISTTSMFVAAAAGAKVAKHGGRSVSSSSGAADVMEQMGANLNLTPEQIAQSISQTGIGFMFAPNHHSAMRHVAPVRRSLGFRSIFNILGPLTNPAGAPNQLLGVFHTDLCGILSRVLQQLGSKHVLVVCGEGGLDEITLTGKTRVAELKDGKISEYDIRPEDFGIETRRNLDEIKVANTQESLLKMNEVLDGKEGAARDIVLLNTAAALYAGNVAASLSDGISAAREAIDSGRAKSKKEEFVGFQPQQRCHFLGKMELG

SEQ ID NO: 14419 - protein, 172 aa, Neisseria meningitidis; identical to SEQ ID NO: 6047

SEQ ID NO: 14420 - protein, 359 aa, Neisseria meningitidis; identical to SEQ ID NO: 2157

SEQ ID NO: 14421 - protein, 451 aa, Neisseria meningitidis; identical to SEQ ID NO: 7557

SEQ ID NO: 14422 - protein, 206 aa, Neisseria meningitidis; identical to SEQ ID NO: 1193

SEQ ID NO: 14423 - protein, 124 aa, Neisseria meningitidis
LAEGQKSAVTEYYLNHGIWPGDNSSAGVASSSTIKGKYVKSVEVKNGVVTATMLSTGVNNEIKGKKLSLWAKRQDGSVKWFCGQPVTRDKAKDDAVTAATGKGTANINTKHLPSTAPTRKSTPN

SEQ ID NO: 14424 - protein, 968 aa, Neisseria meningitidis
LGYNQSFNFSDGIGVSRCEILFEAQCRLKPKYRNNRDQKMTDYSKTVNLLESPFPMRGNLAKREPAWLKSWYEQKRYQKLREIAKGRPKFILHDGPPYANGDIHIGHAVNKILKDIIIRSKTQAGFDAPYVPGWDCHGLPIEVMVEKLHGKDMPKARFRELCREYAAEQVARQKKDFIRLGVLGDWDRPYLTMDFKTEADTVRMLGEIYKSGYLYRGAKPVQFCLDCGSSLAEAEVEYKDKVSPAIDVGYPFKDTAALAAAFGLAGIEGKAFAVIWTTTPWTLPASQAVSAGADVVYQLIDTPKGKLVLAKDLAEDTLKRYGFSDGIAILAETTGDKLENLHMNHPFLERDIPMLNGEHVTTDAGTGLVHTAPAHGLEDYAVCNKYGIELYNPVNAEGRYIGETPRVAGMRVWEANPVILQWLEETGNLLASSKIEHSYAHCWRHKTPLIYRATGQWFVGMDKAGADGKTLRDKAIKAVDDTEFFPSWGRARLEAMIEGRPDWVVSRQRYWGTPMTFFVHKETGELHPNSAELLEKVALKIEEKGIEAWFSLDKSELLSAEDCENYDKLSDTMDVWFDSGSTHYSVVKQREELEWPADLYLEGSDQHRGWFQSSMLTGCASSMGRAPYKQLLTHGFVVDGEGKKMSKSIGNVVAPQEVYNEFGADILRLWAASTDYSGELAISKEILKRVTESYRRIRNTLSFLFANLSDFNPIEDAVQQADMVEIDRYAVVLARQLQERLAGDYYPRYAFHFAVKDIVSFCSEDLGAFYLDILKDRLYTTKADSHARRSAQTALYHITRSLVLLIAPILCFTGEEAWDIIGGGEEDSVLFHTWHEFPTINEKTEAELVKKWTAIREAREAVTAAIEPLRADKTVGSSLQAEAEITAPEEMAGYLNALGEELRFAMLVSKAEVKVGSELAVAAKASDGEKCERCWHYTRDVGAVAGYETVCKRCAENVGGEGETRHYA

SEQ ID NO: 14425 - protein, 274 aa, Neisseria meningitidis; identical to SEQ ID NO: 9480

SEQ ID NO: 14426 - protein, 174 aa, Neisseria meningitidis
MKKALATLIALAIPAAALAEGASGFYVQADAAHAKASSSLGSAKGFSPRISAGYRINDLRFAVDYTRYKNYKAPSTDFKLYSIGASAIYDFDTQSPVKPYLGARLSLNRASVDLGGSDSFSQTSTGLGVLAGVSYAVTPNVDLDAGYRYNYIGKVNTVKNVRSGELSAGVRVKF

SEQ ID NO: 14427 - protein, 364 aa, Neisseria meningitidis
MKTNLLNYDLQGLTRHFADMGEKPFRAKQVMRWMHQSGAQNFNEMTDLAKSLRHKLNEQAGIEIPKLMMSQKSSDGTRKWLLDVGTGNGVETVFIPESDRGTLCISSQVGCALECTFCSTGRQGFNRNLTAAEIIGQLWWANKAMGVTPKNERVISNVVMMGMGEPMANFDNVVTALSIMLDDHGYGLSRRRVTVSTSGMIPQMDRLRDVMPVALAVSLHASNDEVRNQIVPLNKKYPLKELMAACQRYLVKAPRDFITFEYVMLDGINDKAQHARELIELVTDVPCKFNLIPFNPFPNSGYERSSNENIRVFRDILQQAGFVVTVRKTRGDDIDAACGQLAGQVQDKTRRQQKWQQILIGQQG

SEQ ID NO: 14428 - protein, 308 aa, Neisseria meningitidis
LGRPFLVSGGNMIIVMSRRAAEADIAGVVAFIRSRGLREHISHGDERTVIGAIGDDRVLSVREVQTLPEVEKAVRILDTWKTVSRENRAEDSRVAAKGVAFGGGETVRIAAEPSVWRNADAVFLDPFFTSANLYDTSSADEGRGRCRRLAEQTASAHDAGKPVLVRVRNVRHVEAALNAGADILYLGGGLMSDLAVLNEAGNLNIPLVLCKDKHHSAEDWLNAAEYVVSRGNRHLILGESGVLNHTKGHPYRLDVESIVKVRQISHLPVIANITGLWNRDMPQEILYGLAKAAGACGIVGTCFEKSGG

SEQ ID NO: 14429 - protein, 114 aa, Neisseria meningitidis; identical to SEQ ID NO: 402

SEQ ID NO: 14430 - protein, 79 aa, Neisseria meningitidis; identical to SEQ ID NO: 6866

SEQ ID NO: 14431 - protein, 284 aa, Neisseria meningitidis; identical to SEQ ID NO: 10102

SEQ ID NO: 14432 - protein, 279 aa, Neisseria meningitidis; identical to SEQ ID NO: 343

SEQ ID NO: 14433 - protein, 95 aa, Neisseria meningitidis
VFQTALDSRCRLKPLSRMAYTSTIGKNMDEAVFADWALKICLTGLIIFLGFIVWNLGKESKAGKFGIAILFLVLGLGVFGFVFKELLIKFLVLPK

SEQ ID NO: 14434 - protein, 71 aa, Neisseria meningitidis
MTITEEYSIDIRVTAEQGKNDYGYPTERYGCDIINTDGELLVGIEPEYKTPFAAVRQALICLTKDNLKNAA

SEQ ID NO: 14435 - protein, 95 aa, Neisseria meningitidis; identical to SEQ ID NO: 589

SEQ ID NO: 14436 - protein, 322 aa, Neisseria meningitidis; identical to SEQ ID NO: 1760

SEQ ID NO: 14437 - protein, 241 aa, Neisseria meningitidis; identical to SEQ ID NO: 6741

SEQ ID NO: 14438 - protein, 157 aa, Neisseria meningitidis
MTDFSVWETAPFGATVDHILQRYHNVHRAQFEELVPLAQKVAQVHADTFPAEIAELLAYMQNELLMHMMKEERMLFPMINQGVGRGATMPISVMMHEHEEHDRAIARLKELTDNFQAPEGACGSWTRLYVLTKEMVDDLNDHIHLENDILFARVLDS

SEQ ID NO: 14439 - protein, 163 aa, Neisseria meningitidis; identical to SEQ ID NO: 3672

SEQ ID NO: 14440 - protein, 624 aa, Neisseria meningitidis
LHPIFGRNAVCSDGISQTHCPTFKTTLMKNIRNFSIIAHIDHGKSTLADRFIQYCGGLDLREMSTQVLDSMDIEKERGITIKAQTAALNYKARDGQVYQLNLIDTPGHVDFSYEVSRSLSACEGALLVVDASQGVEAQTVANCYTAIDLGVEVVPVLNKIDLPAADPERVEQEIEDIIGIDAVGAVQCSAKSGIGVEDVLEEIVAKVPAPTGDENAPLQAVIVDSWFDNYVGVVMLIRVKNGTIKLKDKVRFMSTKAETQVEQLGVFTPKSVQKQELKAGEVGFLITGVKELGQAKVGDTVTLVANPASEPLPGFQEVQSQVFAGLYPVESHDYEALRDALEKLQLNDASLKFEPEVSQALGFGFRCGFLGLLHLEIVQERLEREFDMDLITTAPTVVYEVVLKSGEKIEVENPSKLPDIGSIETILEPIITATILVPQEYVGNVMTLCNQKRGVQVNMQYMGRQVMLTYDLPMNEVVMDFFDKLKSTSRGYASLDYHFKEFQPSDLIKLDIMVNGEKVDALSLIVHRQSAVHRGRELASKMRELIPRQMFDIAVQAAIGSQIIARENVKALRKNVLAKCYGGDITRKKKLLEKQKAGKRRMKQVGNVEIPQSAFLAILQVSDK

SEQ ID NO: 14441 - protein, 205 aa, Neisseria meningitidis
MVIAAIMAMIALPNMSQWIASRRIASHAERIANLLRFSRGEAVRLNLPVYICPVQVKKDGTANNKCDSGKKGQGMLAFGDKNGNKGYDNDTADVLLRSVVLNDDINDKRINYAFNHIAFGQTQPTTDRVVWTFNQNGTFGYTKDQHLTKQSSFFYSDGYIQIVLTDARAVSDADKKFRSAVVLIDSSGRVEVCPRNDRRTVCQYK

SEQ ID NO: 14442 - protein, 259 aa, Neisseria meningitidis; identical to SEQ ID NO: 1423

SEQ ID NO: 14443 - protein, 375 aa, Neisseria meningitidis
MSNWKPDIPYNDLPPLPPKQDIESKTILKRCIAARASLARLKQAAELIPNQAMLINTLPVMEARASSEIENIVTTTDKLFQSLQMDTERQDPATKEALQYRTALFAGYESLTSRPLCTQTAIIVCNAIKHPYEMAIRKTGGTALKGGNSGNVVYTPPEGEETIRGKLANWERFIHESGDLDPLIIMAAAHYQFEAIHPFTDGNGRTGRILNSLLLIDKGLLDLPILYLSRYIIENRADYYRLLLGVTERQDWESWIIYILDGVADTADWTVAKIDAIRRLFEQTRQHIRTHAQGIYTHELVNLLFEQPYTRIANLEAAGIAKRQTASKYLKELSDIGVLQEIAIGRDKLFIHPRLMELLRGEGNSFTSFQSLVKA

SEQ ID NO: 14444 - protein, 478 aa, Neisseria meningitidis
MPLLSVEFALFFLAFLPIYWGLAKYPSVQNLLLLAAGMGWLYHIGPVFAAIVVLYSSCVYLLGELLRSDRENTRRFWLGCGIAVSLTVLGFFKYFDFFRPLIAQYAGQGGAIDILMPLGLSYYTFQSLAYLVYCFRAPHAARFEWHELLLHLSFFPTVTSGPIIRAAAFKSADGEQAGALAQIRTHQPRSPVRPALAVSLILLGIAKKWWLAGMLAENWVSPVFENPAQFDGWGVLAGVYGYTFQLFLDFSGYSDLVIGMAMLLGFRLPKNFSAPLRAANIRAFWDKWHISLSTWIRDYIYIPLGGSKKGFLRTQFNLMAAMVLSGIWHGYGWNFLIWGALHGTALVLLNTGDRYFGRNALCRLKYLAPLSWFVTFHFVCLSFVVFNTASPDDAGAVFNALFANANGWNAPQQANMLLLASFASVMLLYPYLQRAFDGAVKGLEKIPMWLWFIPVSAVLLLIIVLAPSGIPGFIYANF

SEQ ID NO: 14445 - protein, 242 aa, Neisseria meningitidis
MSQITMRQMIEAGVHFGHQTRFWNPKMAQYIFGARNKIHIVNLEKTLPMFQDAQEAIRRLVANKGTVLFVGTKRQARDIIREEATRAGMPFVDYRWLGGMLTNYKTVKQSIKRLEEKTAALENAAESGFSKKEILEMQRDVEKLERSLGGIKNMKGLPDAIFVIDTGYQKGTLVEAEKLGIPVIAVVDTNNSPDGVKYVIPGNDDSAKAIRLYCRGIADAVLEGKNQALQETVAAAQEAAAE

SEQ ID NO: 14446 - protein, 49 aa, Neisseria meningitidis; identical to SEQ ID NO: 5144

SEQ ID NO: 14447 - protein, 524 aa, Neisseria meningitidis; identical to SEQ ID NO: 2756

SEQ ID NO: 14448 - protein, 79 aa, Neisseria meningitidis
MILNIRKMGNSQGVILPKSLLSQIGAVDSLAVTVEKGNIILSCPTVRRGWAEAAAMLVETEQEHFFSEIENEADKEWIW

SEQ ID NO: 14449 - protein, 181 aa, Neisseria meningitidis; identical to SEQ ID NO: 2183

SEQ ID NO: 14450 - protein, 244 aa, Neisseria meningitidis
MTTRQIILDTETTGLYADGGDRLVEFAGLEMVNRQMTDKNLHLYVHPERDMPEEAARVHGLTIEVLEGKNAPPFAEVGRQIADFLRGAELIIHNAKFDVGFLNMEFRRMGLPTVEELGCTVTDTLAMAREMFPGQKASLDALCNRFSVDRSKRVLHGALIDCELLGEVYLAMTRRQFDLMGAAAEEKMETKPVAHTETKRSGKLKVIRADENELAEHGRYLDGLGEACIWRKTQMPSENGGTEA

SEQ ID NO: 14451 - protein, 121 aa, Neisseria meningitidis
MEKPLLTPPFFLFEDVSLDIFQGLSELEKKIEPQDLMDDVYRAFDSVGNILNFHIVEKEQKGFWVSTKIKTVVFDSADMSSDDLFLKCLQSSYKAYFETEPAGLDKRQLMKTLIQKCGFSC

SEQ ID NO: 14452 - protein, 138 aa, Neisseria meningitidis
MLKHLAFLLPAMMFALPTSAAVLTSYQEPGCTYDGDVGKDGLLSGKGIWRCRDGRGYTGSFKNGKFDGQGVYTVAANREVFLEPFNSDSTKFRNMALSGTFKKGLAHGRFTVSQNGETLFIMKCENGMIKEVKLPKNK

SEQ ID NO: 14453 - protein, 397 aa, Neisseria meningitidis
MFFKHIEAAPADPILGLGEAFKAETRPEKVNLGIGVYKDASGATPLVKAVKEAEKRLLESETTKNYLTIDGVADYNAQTQILLFGKDHEIIASRRAKTAQSLGGTGALRIAAEFAKRQLNAQTIWISNPTWPNHNAIAKAVGIQDKPYRYYDAAKHGLDWDGMIEDLSQAQKGDIVLLHGCCHNPTGIDPTPEQWETLAKLSAEKGWLPLFDFAYQGFGNGLEEDAYGLRVFLKHNTELLIASSYSKNFGMYNERVGAFTLVAEDEETAARAHSQVKTIIRTLYSNPASHGANTIALVLKNDDLKAQWIAELDEMRGRIKAMRQKFVELLKAKGASQNFDFIIEQNGMFSFSGLTPEQVDRLKNEFAIYAVRSGRINVAGITDNNIDYLCESIVKVL

SEQ ID NO: 14454 - protein, 54 aa, Neisseria meningitidis; identical to SEQ ID NO: 6606

SEQ ID NO: 14455 - protein, 311 aa, Neisseria meningitidis; identical to SEQ ID NO: 5677

SEQ ID NO: 14456 - protein, 52 aa, Neisseria meningitidis; identical to SEQ ID NO: 12591

SEQ ID NO: 14457 - protein, 305 aa, Neisseria meningitidis; identical to SEQ ID NO: 13298

SEQ ID NO: 14458 - protein, 592 aa, Neisseria meningitidis
MTVLKPSHWRVLAELADGLPQHVSQLARMADMKPQQLNGFWQQMPAHIRGLLRQHDGYWRLVRPLAVFDAEGLRELGERSGFQTALKHECASSNDEILELARIAPDKAHKTICVTHLQSKGRGRQGRKWSHRLGECLMFSFGWVFDRPQYELGSLSPVAAVACRRALSRLGLKTQIKWPNDLVVGRDKLGGILIETVRTGGKTVAVVGIGINFVLPKEVENAASVQSLFQTASRRGNADAAVLLETLLVELDAVLLQYARDGFAPFVAEYQAANRDHGKAVLLLRDGETVFEGTVKGVDGQGVLHLETAEGKQTVVSGEISLRPDDRPVSVPKRRDSERFLLLDGGNSRLKWAWVENGTFATVGSAPYRDLSPLGAEWAEKADGNVRIVGCAVCGEFKKAQVQEQLARKIEWLPSSAQALGIRNHYRHPEEHGSDRWFNALGSRRFSRNACVVVSCGTAVTVDALTDDGHYLGGTIMPGFHLMKESLAVRTANLNRHAGKRYPFPTTTGNAVASGMMDAVCGSVMMMHGRLKEKTGAGKPVDVIITGGGAAKVAEALPPAFLAENTVRVADNLVIHGLLNLIAAEGGESEHT

SEQ ID NO: 14459 - protein, 286 aa, Neisseria meningitidis
MAKVKGGLGRGLDSLLANGADNSSGDRLTTVAVKDIRPGRYQARVQIDDEALQELADSIKAQGVIQPVIVREHGLSRYELIAGERRWRAAQIAGLTEIPAVIKTISDETALAMGLIENLQRENLNPIEEAQGLKRLADEFGLTHETIAQAVGKSRSAISNSLRLLSLPEPVQEMLYQRRLEMGHARALLTLPVVEQLELAQKAVKNGWSVREVERRSQVALQNKRPEPKKTAAADIGRLNDLLTEKLGVNAEIKTANHKKGRIILHFDTPETFDHILKQLGIDYRP

SEQ ID NO: 14460 - protein, 311 aa, Neisseria meningitidis
MGHNMMTTQKWYEHITNVIIGNTANFNSGCPEAIDYVDERKGVPLAAMRHILMYTEAAASHAYLFEHDLKKFKQYAYVAGKLGILRSVNSTDPEPFFFPCDMLNIQDPMFLMLMSDSPQLREFLVRNIDNIANDTEAFVNRYDLNRHMIYNTLLMVEGKQLDRLKQRSEKVLAHPTPSKWLQKRLYDYRFFLAFAEQDAEAMKAALEPLFDKKTARMAAKETLSYFDFYLQPQIVTYAKIASMHGFDLGIDHEIAPRDLIVYDPLPADEYQDIFDFMKQYDLSYPYEYLQDWIDYYTFKTDKLVFGNAKRE

SEQ ID NO: 14461 - protein, 445 aa, Neisseria meningitidis
MTFQNKKILVAGLGGTGISMIAYLRKNGAEVAAYDAELKPERVSQIGKMFDGLVFYTGRLKDALDNGFDILALSPGISERQPDIEAFKQNGGRVLGDIELLADIVNRRGDKVIAITGSNGKTTVTSLVGYLCIKCGLDTVIAGNIGTPVLEAEWQREGKKADVWVLELSSFQLENTESLRPTAATVLNISEDHLDRYDDLLDYAHTKAKIFRGDGVQVLNSDDVFCRAMKRAGREVKWFSLEHEADFWLERETGRLKQGNEDLIATQDIPLQGLHNAANVMAAVALCEAIGLSREALLEHVKTFQGLPHRVEKIGEKNGVVFIDDSKGTNVGATAAAIAGLQNPLFVILGGMGKGQDFTPLRDALVGKAKGVFLIGVDAPQIRRDLDGCGLNMTDCATLGEAVQTAYAQAEAGDIVLLSPACASFDMFKGYAHRSEVFIEAFKAL

SEQ ID NO: 14462 - protein, 226 aa, Neisseria meningitidis
MTYTITPIGTARSPYKQKFGIARQPGLVSAAKACIELNPKFTADSVRGLEDFDYVWISFIFHGVLDEGWAQMVRPPRLGGKQKMGVFATRSPHRPNHLGLSLLKLERIETGKPVRLYCSGADLLDGTPIVDIKPYIPFVESKPDAASGFVSGKPVELEVVWQENIGAENLSANTKNLISQSIAQDPRPAYQNIPERIYVMNIADYEIRFQIEENRATVIDLSPTPL

SEQ ID NO: 14463 - protein, 465 aa, Neisseria meningitidis; identical to SEQ ID NO: 1096

SEQ ID NO: 14464 - protein, 327 aa, Neisseria meningitidis; identical to SEQ ID NO: 6287

SEQ ID NO: 14465 - protein, 355 aa, Neisseria meningitidis
MRKILVTGGAGFIGSAVVRHIIRNTQDSVVNLDKLTYAGNLESLTDIADNPRYAFEQVDICDRAELDRVFAQHRPDAVMHLAAESHVDRSIGSAGEFIQTNIVGTFNLLEAARAYWQQMPSEQHEAFRFHHISTDEVYGDLSGTDDLFTETTPYAPSSPYSASKASSDHLVRAWLRTYGLPTIVTNCSNNYGPYHFPEKLIPLMILNALDGKPLPVYGDGMQIRDWLFVEDHARALYQVVTEGVVGETYNIGGHNEKANIEVVKTICALLEELAPEKPAGVARYEDLITFVQDRPGHDVRYAVDAAKIRRDLGWLPLETFESGLRKTVQWYLDNKTWWQNVLNGSYRLERLGTGK

SEQ ID NO: 14466 - protein, 196 aa, Neisseria meningitidis
MGLELPLILGTSSVFRREQMERLGIAFQAASPDFDETPMLGESAPQTALRLAEGKARSLAGRFPEALIVGADQVAWCDGRQWGKPMNLANAHKMLMHLSGREIEFYSAVVLLNTVTGRMQRHIDKTVVVMRKLDELHILRYLEREPDAVYCSCALKSEGLGALLIERIESSDPNALIGLPVFRLVDFLKNEGVEVL

SEQ ID NO: 14467 - protein, 153 aa, Neisseria meningitidis
  misc_feature 149, 150, 151: 'Xaa' is any amino acid
MRKILVTGGAGFIGSAVVRHIIRNTQDSVVNLDKLTYAGNLESLTDIADNPRYAFEQVDICDRAELDRVFAQHRPDAVMHLAAESHVDRSIGSAGEFIQTNIVGTFNLLEAARAYWQQMPSEQHEAFRFHHISTDEVYGDLSGTDDLFXXXHT

SEQ ID NO: 14468 - protein, 155 aa, Neisseria meningitidis; identical to SEQ ID NO: 2118

SEQ ID NO: 14469 - protein, 706 aa, Neisseria meningitidis
MFDKHVKTFQYGNHTVTLETGEIARQAAAAVKVSMGDTVVLVAVTTNKEVKEGQDFFPLTVDYLERTYAAGKIPGGFFKREGKQSEKEILTSRLIDRPIRPLFPEGFYHDIQIVAMVVSVDPEIDSDIPAMLGASAALVLSGVPFAGPIGAARVGYVNGVYVLNPTKAELAKSQLDLVVAGTSKAVLMVESEAKILPEDVMLGAVVYGHDQMQVAINAINEFADEVNPELWDWKAPETNEELVAKVRGIAGETIKEAFKIRQKQARSAKLDEAWSAVKEALITEETDTLAANEIKGIFKHLEADVVRSQILDGQPRIDGRDTRTVRPLNIQTSVLPRTHGSALFTRGETQALAVATLGTSRDEQIIDALSGEYTDRFMLHYNFPPYSTGEVGRMGAPKRREIGHGRLAKRALLAVLPKPEDFSYTMRVVSEITESNGSSSMASVCGGCLSLLSAGVPLKAHVAGIAMGLILEGNKFAVLTDILGDEDHLGDMDFKVAGTTEGVTALQMDIKIQGITKEIMQIALAQAKEARLHILDQMKAAVAGPQELSAHAPRLFTMKINQDKIREVIGKGGETIRSITAETGTEINIAEDGTITIAATTQEAGDAAKKRIEQITAEVEVGKVYEGTVVKILDNNVGAIVSVMPGKDGLVHISQIAHERVRNVGDYLQVGQVVNVKALEVDDRGRVRLSIKALLDAPAREENAAE

SEQ ID NO: 14470 - protein, 128 aa, Neisseria meningitidis; identical to SEQ ID NO: 1074

SEQ ID NO: 14471 - protein, 488 aa, Neisseria meningitidis
MMKLGFKPIPLAIAAVLCALVLALPVPDGVKPQAWTLLAMFIGVIAAIIGKAMPLGALSIIAVGLVAVTGVTADKPGAAMSDALSAFANPLIWLIAIAVMISRGLLKTGLGMRIGYLFIAVFGRKTLGIGYSLALSELLLAPVTPSNTARGGGIIHPIMQSIAGSYGSNPAKGTEGKMGKYLALVNYHSNPISSAMFITATAPNPLIVNLIAENLGSSFRLSWGAWAWAMAVPGVVAFFVMPLILYFLYPPEIKETPNAVQFAKDRLREMGKMSADEIIMAVIFGILLLLWADVPALITGNHAFSINATATAFIGLSLLLLSGVLTWDDVLKEKSAWDTIIWFGALIMMAAFLNKLGLIKWFSGVLAESVGGLGVSGTAAGVILVLAYMYAHYMFASTTAHITAMFGAFLAAAVSLNAPAMPTALMMAAASNIMMTLTHYATGTSPVIFGSGYTTMGEWWKAGFIMSVVNFLIFFVIGSIWWKVLGYW

SEQ ID NO: 14472 - protein, 214 aa, Neisseria meningitidis; identical to SEQ ID NO: 909

SEQ ID NO: 14473 - protein, 264 aa, Neisseria meningitidis
MMSEHRVNHEPVFLLASSPWRESSLRVEAFSRRYGRVALLARSARKRQSELRGVLVPFVPVSASWYGSQELKTLHRAEWIGGWPQPQGRALFSGLYVNELMLKLTVREDPLPELYDALAEVMEAVCREANHIADLRRFEWKLLNALGVAPDLHADGTGGDILADKTYRLMPEEAVMPVCEDADALSHEAGAIVEGQSLIDLREGSFRTAESLQQALKITRLFIRHLLPEGLKSRQVLEQIRQFDRKETARETVPTSDGTASNAV

SEQ ID NO: 14474 - protein, 480 aa, Neisseria meningitidis
MKQLAMYINGRFENDFNGEWRDVLNPSTEETIAREPKGGKADVDRAVAAARAAQPAWERLPAVERGAYLRKIAQGIRGRADELTDTIVAEGGKTKDLARVEVMFTADYLDYQAEWARRYEGEIIQSDRPRENILLFKRPLGVIAGILPWNFPFFLIARKMGPALVTGNTIVVKPSSVTPINCHIFAEIVDAVGLPAGVFNVVNGPGAEIGNALSAHPQVDMVSLTGSVEAGRQVMEAASANITKVSLELGGKAPAIVLKDADLDLAVKSILASRVGNTGQICNCAERVYVHSSLKDAFIEKMTAAMKGVRYGNPAEAEAGALEMGPLIEERAVKAVAEKVERAVKQGAKLVCGGKRAEGRGYFFEPTLLTDTDNSMDIMKEETFGPVLPVSAFDTLDQVIALANDCEFGLTSSVYTTNLNEAFYVTRRLQFGETYINRENFEAMQGFHAGWKKSGIGGADGKHGLEEYLQTQVVYLETDI

SEQ ID NO: 14475 - protein, 331 aa, Neisseria meningitidis; identical to SEQ ID NO: 6104

SEQ ID NO: 14476 - protein, 245 aa, Neisseria meningitidis
MKKLSRIVFSTVLLGFSAALPAQTYSVYFNQNGKLTATMSSAAYIRQYSVAEGIAHAQDFYYPSMKKYSEPYIVASTQIKSFVPTLQNGMLILWHFNGQKKMAGGFSKGKPDGEWVNWYPNGKKSAVMPYKNGLSEGTGYRYYRNGGKESEIQFKQNKANGVWKQWYADGNIKTEMVMVNDEPAKILTWDESGRLLSELSIHHHKRNGVVLEWYEDGSKKSEAVYQDDKLVRKTQWDKDGYLIEP

SEQ ID NO: 14477 - protein, 136 aa, Neisseria meningitidis; identical to SEQ ID NO: 1274

SEQ ID NO: 14478 - protein, 358 aa, Neisseria meningitidis
MICRKPIGHTPYFDMNKTICRTAALLISGFSYANTVIPDVSPVAQGQHVFINIPQQRLFLYTDGKLTKVYPVAVGRAMTQTNLGEHKIGAKAYNPVWYIPKSIQKERGDGVKTIAAGPDNPLGPVFVRLGDPKLGLGIHGTNAPASVPGVRSHGCVRMKSPDALEFAKTIASGSPASVIYQMAGLNEDADRNLWLAAFRDPYGKNNLDTASLKKSIGQWAKTQGKTIASDKIDAVLKARTGSAVCLTCGKNGKMKMPLKSLAWIQGSSSYSQAEVIEQTEETNSAEISETRTPEVPDVHTPEAQPHLNTQSDGTPTAYTEPAADSSPQVETPDQAASEPVDVLFSIDVIRQGNLRLGN

SEQ ID NO: 14479 - protein, 581 aa, Neisseria meningitidis
MERQTDEFAQAAARAAIWFLARYAGSGDEVLANCTERLFQALQNGHSFIRLSGGEADALSALAPVVGTSAAPLILEGRRLFLGRMWQLEYDLAAEIKRLAAADTSAPDAAGARQNLAKWFQGTGSEGQRDAAALALLQSFMVITGGPGTGKTTTVAKLLALICGEDENLPNIALAAPTGKAAAHMARALHRAINGFDAPEAVRRHLLKLEGQTVHRLLKLRPPKMQAAFNPVYPLPFDVLVIDEASMLDTALMLQLLKAVKTGARVILLGDENQLPSVGIGAVLSVLSQKTVLDGETHQRLAGFLPEHGFSVSANPPVLAQNTAHLSFSHRFGDNSGIGCLARAAVSGDEGAWALFDRFPDELEHSECSPNARVERLYRAHKAYWQAVKDGNIEAAYAGISDIVVLAAWRQDAEDFNEAYCSHVRRKMNIPEHQAYFAGEPIMIRQNDYALELFNGDIGLIMEDVGRQGSLAAYFADADGFKKVAVSCLPEFEPAFAMTVHKSQGSEYREVWLLPPSAAPSDEGDDALSGLSKELLYTAITRAREKFVFFGGEEAFRQAAATVKTRQTALGSMLERVFSQG

SEQ ID NO: 14480 - protein, 209 aa, Neisseria meningitidis
MAAHLEEQQELDNFKYFWKTTGKWLFAVLILAALGYLGYTVYQNRAASQNQEAAAVLANIVEKAQNKAPQSEINAELTKLQQSYPHSISAAQATLMAAATEFDAQRYDVAEGHLKWVLSNQKDSLIQALAAQRLGVVLLQQKKYDAALAALDTPVEADFAPLLMETKGDVYAAQGKSQEALKNYGQALEKMPQDSVGRELVQMKLDSLK

SEQ ID NO: 14481 - protein, 92 aa, Neisseria meningitidis; identical to SEQ ID NO: 32

SEQ ID NO: 14482 - protein, 309 aa, Neisseria meningitidis
MDSIIELRHLKTLLALEETGSVSLAAKRVFLTQSALSHQIRMLENHYGAPLFERKSTPLRFTPVGERLLRLAHELIPQVAVAERDLARITEGEAGELRIAVECHTCFDWLMPAMGEFRPMWPQVELDIVSGFQADPVGLLLQHRADLAIVSEAEKQNGISFQPLFAYEMVGICAPDHPLAAKNVWTAEDFIGETLITYPVPDEMLDLPKKILIPKNINPPRRHSELTIAIIQLVASRRGIAAFPYWTVMPYLEKGYVVHRQITDDGLQSKLYAAIRTEDTDKSYLNNFCQIIRERGFADLPGLSELEPV

SEQ ID NO: 14483 - protein, 65 aa, Neisseria meningitidis; identical to SEQ ID NO: 127

SEQ ID NO: 14484 - protein, 120 aa, Neisseria meningitidis; identical to SEQ ID NO: 7043

SEQ ID NO: 14485 - protein, 335 aa, Neisseria meningitidis
MSTFFRQTAQAMIAKHIDRFPLLKLDQVIDWQPIEQYLNRQKTRYLRDHRGRPAYPLLSMFKAVLLGQWHSLSDPELEHSLITRIDFNLFCRFDELSIPDYSTLCRYRNWLAQDDTLSELLELINCQLTEKGLKVEKASAAVIDATIIQTAGSKQRQAIEVDEEGQISGQTTPSKDSDARWIKKNGLYKLGYKQHTRTDAEGYIEKLHITPANAHECKHLSPLLEGIAEGTTVYADKGYDSAENRQHLEEHQLQDGIMRKACRNRPLTEAQTKRNRYLSKTRYVVEQSFGTMHRKFRYARAAYFGLSKVSAQSHLKAMCLNLLKAANRLSAPAAA

SEQ ID NO: 14486 - protein, 287 aa, Neisseria meningitidis
MELDEFLDKAYAVLRRLDAVLPPEPGHTDWNALAFRWQSAGKKGFLEHLPDPHTFPLARLAGVGRQTELLVRNTEQFIAGRPANNVLMSGARGTGKSSLVKALLHEYADKGLRLIEVDKSDLIGLPYLLTLLKERPEKFIVFCDDLSFESGDETYKALKTALDGGLSQRCANVLVYATSNRRHLMPEYLDENAGTTGVRGEIHQKEAVEEKVSLSDRFGLWLSFYPFDQNDYLSAVQNWLEDFGVPYDETAQMAALQWAQTRGSRSGRSAWQFACDWAGRLPKQRAL

SEQ ID NO: 14487 - protein, 366 aa, Neisseria meningitidis
METQLYIGIMSGTSMDGADAVLIRMDGGKWLGAEGHAFTPYPDRLRRQLLDLQDTGADELHRSRILSQELSRLYAQTAAELLCSQNLAPSDITALGCHGQTVRHAPEHGYSIQLADLPLLAERTRIFTVGDFRSRDLAAGGQGAPLVPAFHEALFRDEKETRVVLNIGGIANISVLPSDAPAFGFDTGPGNMLMDAWTQAHWQLPYDKNGAKAAQGNILPQLLDRLLAHPYFAQPHPKSTGRELFALNWLETYLDGGENRYDVLRTLSRFTAQTVFDAVSHAAADARQMYICGGGIRNPVLMADLAEYFGTRVSLHSTAELNLDPQWVEAAAFAWLAACWINRIPGSPHKATGASKPCILGAGYYY

SEQ ID NO: 14488 - protein, 526 aa, Neisseria meningitidis
MEPIMAKKNNKTKIQKPEAALQTDVAQITATGRVIAEHPSNFITPQKMRALFEDAESGDIRAQHELFADIEERDSDIAANMGTRKRALLTLNWRVAPPRNATPEEEKLSDQAYEMMDSLPTLEDLIMDLMDAVGHGFSALEVEWVFSDGLYLPRNFIHRPQSWFKWDKDNGLLLRTRENPEGEALWPLGWVVHTQKSRSVQQARNGLFRTLSWLYMFKHYAVHDFAEFLELYGMPIRIGKYGAGATKEEKNTLLRAVAEIGHNAAGIMPEGMEIELHNAASGTMATSNPFLQMADWCEKSAARLILGQTLTSGADGKSSTNALGNIHNEVRRDLLVSDAKQVAQTITSQIIGPFLQINYPNADPNRVPKFEFDTREPKDIAVFADAIPKLVDVGVQIPESWVRDKLVIPDVQEGEAVLVRQVPDNPINRTALAALSAHTVPSKATGRHQEILDGALDDALVEPDFNSQLNPMVRQAVAALNACNSYEEADAALNALYPNLDNAKLRTYMQQALFISDILGQDHARA

SEQ ID NO: 14489 - protein, 168 aa, Neisseria meningitidis; identical to SEQ ID NO: 2380

SEQ ID NO: 14490 - protein, 259 aa, Neisseria meningitidis
MFFVLSPAKNLNEKDPAPVSEFTQPDLLAESDILMQQLRELAPQQIAELMHVSDKIALLNAQRNAEWHTPFTPENAKQAVFMFNGDVYEGMDVNTLDIGQIRYLQNHVRLLSGLYGLLRPLDLIQPYRLEMGTAFANLRGKNLYEFWGDIITNLLNDTLAQAGSNTLVNLASQEYFKSVNTKKLRAQLITPIFKDEKNGKYKIISFYAKRARGLMVRYAAEHHITDPEMLKNFNYEGYAFNDAASNESEWVFMRSEQIK

SEQ ID NO: 14491 - protein, 213 aa, Neisseria meningitidis; identical to SEQ ID NO: 5657

SEQ ID NO: 14492 - protein, 336 aa, Neisseria meningitidis; identical to SEQ ID NO: 7100

SEQ ID NO: 14493 - protein, 296 aa, Neisseria meningitidis; identical to SEQ ID NO: 7271

SEQ ID NO: 14494 - protein, 339 aa, Neisseria meningitidis
MKKILVTGGTGFIGSHTVVSLLKSGHQVVILDNLCNSSINILPRLKTITGQEIPFYQGDIRDREILRRIFAENRIDSVIHFAGLKAVGESVAEPMKYYDNNVSGSLVLAEEMARAGVFSIVFSSSATVYGDPGKVPYTEDMPLGDTTSPYGTSKSMVERILTDIQKADPRWSMILLRYFNPIGAHESGLIGEQPNGIPNNLLPYICQVAAGKLPQLAVFGDDYPTPDGTGMRDYIHVMDLAEGHVAAMQAKSNVAGTHLLNLGSGRASSVLEIIRAFEAASGLTIPYEVKPRRAGDLACFYADPSYAKAQIGWQTQRDLTQMMEDSWRWVSNNPNGYDD

SEQ ID NO: 14495 - protein, 1391 aa, Neisseria meningitidis
MNLLNLFNPLQTAGMEEEFDAIKIGIASPETIRSWSYGEVKKPETINYRTFKPERDGLFCAKIFGPVKDYECLCGKYKRLKFKGVTCEKCGVEVTLSKVRRERMGHIELAAPVAHIWFLKSLPSRLGMVLDMTLRDIERVLYFEAFVVTDPGMTPLQRRQLLTEDDYYNKLDEYGDDFDAKMGAEGIRELLRTLNVAGEIEILRQELESTGSDTKIKKIAKRLKVLEAFHRSGMKLEWMIMDVLPVLPPDLRPLVPLDGGRFATSDLNDLYRRVINRNNRLKRLLELHAPDIIVRNEKRMLQEAVDSLLDNGRRGKAMTGANKRPLKSLADMIKGKGGRFRQNLLGKRVDYSGRSVITVGPYLRLHQCGLPKKMALELFKPFIFHKLEKQGLASTVKAAKKLVEQEVPEVWDILEEVIREHPIMLNRAPTLHRLGIQAFEPILIEGKAIQLHPLVCAAFNADFDGDQMAVHVPLSLEAQMEARTLMLASNNVLSPANGEPIIVPSQDIVLGLYYMTRDRINAKGEGSLFADVKEVHRAYHTKQVELGTKITVRLREWVKNEAGEFEPVVNRYETTVGRALLSEILPKGLPFEYVNKALKKKEISKLINASFRLCGLRDTVIFADHLMYTGFGFAAKGGISIAVDDMEIPKEKAALLAEANAEVKEIEDQYRQGLVTNGERYNKVVDIWGRAGDKIAKAMMDNLSKQKVIDRAGNEVDQESFNSIYMMADSGARGSAAQIKQLSGMRGLMAKPDGSIIETPITSNFREGLTVLQYFIATHGARKGLADTALKTANSGYLTRRLVDVTQDLVVVEDDCGTSDGFVMKAVVQGGDVIEALRDRILGRVTASDVVDPSSGETLVEAGTLLTEKLVDMIDQSGVDEVKVRTPITCKTRHGLCAHCYGRDLARGKLVNAGEAVGVIAAQSIGEPGTQLTMRTFHIGGAASRAAAASQVEAKSNGTARFSSQMRYVANNKGELVVIGRSCEVVIHDDIGRERERHKVPYGAILLVQDGMAIKAGQTLATWDPHTRPMITEHAGMVKFENVEEGVTVAKQTDDVTGLSTLVVIDGKRRSSSASKLLRPTVKLLDENGVEICIPGTSTPVSMAFPVGAVITVREGQEIGKGDVLARIPQASSKTRDITGGLPRVAELFEARVPKDAGMLAEITGTVSFGKETKGKQRLIITDVDGVAYETLISKEKQILVHDGQVVNRGETIVDGAVDPHDILRLQGIEALARYIVQEVQEVYRLQGVKISDKHIEVIIRQMLRRVNIADAGETGFITGEQVERGDVMAANEKALEEGKEPARYENVLLGITKASLSTDSFISAASFQETTRVLTEAAIMGKQDELRGLKENVIVGRLIPAGTGLTYHRSRHQQWQGVEQETAETQVTDE

SEQ ID NO: 14496 - protein, 151 aa, Neisseria meningitidis; identical to SEQ ID NO: 6340

SEQ ID NO: 14497 - protein, 365 aa, Neisseria meningitidis
MKSVRSFIRDDIQAMSAYQIADVPPGFAKLDSMESPVHPFAGHETLLQEWQARLAAAPIHLYPNPSGSGLQEALRSAFDIPDCADIALGNGSDELIQFITMLTAKPGAAMLAAEPSFVMYRHNAALYGMDYVGVPLNGDFTLNLPAVLEAVRKHRPALTFIAYPNNPTGVCFTRAEIEAVIEASDGIVVVDEAYGAFNGDSFLPQAGRIPNLIVLRTLSKIGFAGLRIGYAAGCPEVIGELQKILPPYNMNQLSLTTAKLALRHYGIISANIDSLKNERERMFAELGKICRLNTFPSQANFITIRVPDADLLFDTLKQNRILVKKLHGAHPLLEHCLRITVGSPAQNDAVLNIIRQLYCQPTDFL

SEQ ID NO: 14498 - protein, 107 aa, Neisseria meningitidis; identical to SEQ ID NO: 564

SEQ ID NO: 14499 - protein, 1321 aa, Neisseria meningitidis
MSVVLPLRGVTALSDFRVEKLLQKAAALGLPEVKLSSEFWYFVGSEKALDAATVEKLQALLAAQSVEQTPKAREGLHLFLVTPRLGTISPWASKATNIAENCGLAGIERIERGMAVWLEGALTDEQKRQWAALLHDRMTESVLPDFQTASKLFHHLESETFSTVDVLGGGKEALVKANTEMGLALSADEIDYLVENYQALQRNPSDVELMMFAQANSEHCRHKIFNADFILNGEKQPKSLFGMIRDTHNAHPEGTVVAYKDNSSVIEGAKIERFYPNAAENQGYRFHEEDTHIIMKVETHNHPTAIAPFAGAATGAGGEIRDEGATGKGSRPKAGLTGFTVSNLNIPDLKQPWEQDYGKPEHISSPLDIMIEGPIGGAAFNNEFGRPNLLGYFRTFEEKFDGQVRGYHKPIMIAGGLGSIQAQQTHKDEIPEGALLIQLGGPGMLIGLGGGAASSMDTGTNDASLDFNSVQRGNPEIERRAQEVIDRCWQLGGKNPIISIHDVGAGGLSNAFPELVNDAGRGAVFKLREVPLEEHGLTPLQIWCNESQERYVLSILEKDLDTFRAICERERCPFAVVGTATDDGHLKVRDDLFANNPVDLPLNVLLGKPPKTTRTDKTVTPSKKPFHADDIDITEAAYRVLRLPAVAAKNFLITIGDRSVGGMTHRDQMVGKYQTPVADCAVTMMGFNTYRGEAMSMGEKPAVALFDTPASGRMCVGEAITNIAAVNIGDIGNIKLSANWMAACGNEGEDEKLYRTVEAVSKACQALDLSIPVGKDSLSMKTVWQDGEEKKSVVSPLSLIISAFAPVKDVRKTVTPELKNVEDSVLLFIDLGFGKARMGGSAFGQVYNNMSGDAPDLDDTSRLKAFYNVIQQLVAEDKLLAYHDRSDGGLFAVLVEMAFAGRCGLDIDLNLLLAQTFITNHTALSQSLRTEEVKALAEWQETIARTLFNEELGAVIQVRKQDVADIINLFYQQQLHHNVFEIGTLTDENTLIIRDGQTHLISDNLIKLQQTWQETSHQIQRLRDNPACADSEFALIGDNERSALFANLKFDVNEDIAAPFINSGAKPKIAILREQGVNGQIEMAAAFTRAGFDAYDVHMSDLMAGRFRLADFKMLAACGGFSYGDVLGAGEGWAKSILFHPALRDQFAAFFADPDTLTLGVCNGCQMVSNLAEIIPGAAEAWPKFKRNLSEQFEARLSMVHVPKSASLILNEMQGSSLPVVVSHGEGRADFALHGGNISADLGIALQYVDGQNQITQTYPLNPNGSPQGIAGVTNADGRVTIMMPHPERVYRAAQMSWKPEDWTELSGWYRLFAGARKALG

SEQ ID NO: 14500 - protein, 291 aa, Neisseria meningitidis
MEEGLIDRLLETLWLDRRLSQNTLNGYRRDLEKIARRLSQSGRMLKDADEADLAAAVYVDGEQRSSQARALSACKRLYIWMEREGIRTDNPTRLLKPPKIDKNIPTLITEQQISRLLATPDTDTPHGLRDKALLELMYATGLRVSEAVGLNFGNVDLDRGCITALGKGDKQRMVPMGQESAYWVERYYTEARPLLLKGRNCDALFVSQKKTGISRQLAWMIVKEYASQAGIGHISPHSLRHAFATHLVRHGLDLRVVQDMLGHADLNTTQIYTHVANVWLQGVVKEHHSRN

SEQ ID NO: 14501 - protein, 46 aa, Neisseria meningitidis; identical to SEQ ID NO: 6727

SEQ ID NO: 14502 - protein, 105 aa, Neisseria meningitidis
  misc_feature 99, 100: 'Xaa' is any amino acid
LDGDGIETVATKGFAGSLFDHTNNGIRTATGWVSADDGLLVRDLNGNGIIDNGAELFGDNTKLADGSFAKHGYAALAELDSNGDNIIFAKEGNFSLNDXXTHLIN

SEQ ID NO: 14503 - protein, 79 aa, Neisseria meningitidis; identical to SEQ ID NO: 6866

SEQ ID NO: 14504 - protein, 239 aa, Neisseria meningitidis
LTLTRKTLFLLTAAFGTHSLQTASADAVVKAEKLHASANRSYKVAGKRYTPKNQVAEFTQTGNASWYGGRFHGRKTSGGERYDMNAFTAAHKTLPIPSYVRVTNTKNGKSVIVRVNDRGPFHGNRIIDVSKAAAQKLGFVSQGTAHVKIEQIVPGQSALVAENKDIFIDLKSFGTEHEAQAYLNQAAQNFAASTSSPNLAIEKRRYEYVVKMGPFASQERAAEAEAQARGMIQTVLTAG

SEQ ID NO: 14505 - protein, 340 aa, Neisseria meningitidis; identical to SEQ ID NO: 2046

SEQ ID NO: 14506 - protein, 397 aa, Neisseria meningitidis; identical to SEQ ID NO: 103

SEQ ID NO: 14507 - protein, 245 aa, Neisseria meningitidis
MLSARYLHLHEALGLGPMWLKQAAAVLPPKNTPATPAQARPQTVRAAPIRPSQPHNGQARLETMKALETAAVPTRKPAPETETPLPGLSDGIAPVPAASGITKLAVVSLCPPIEDAVYGQLFHGKAGVLLDNILKAVGLDAAYVHKTSWVKTAAVGNPMPSEQAVANALGQIARELDGCRAPAVLFLGQAFVQPERQTMIETLCGSRPFFIIDHPARLLRQPELKARAWQVLKQLKRALRQGGGS

SEQ ID NO: 14508 - protein, 220 aa, Neisseria meningitidis
MLPKYEDNTLQIKEKSTKRTAPFFVLEVTARSAADILGIHPNSAALFYRKIRTVINHHLALAADEVFEGPVEPDESDFGGRRKGRRGRGAAGKVVVFGILKRNGRVYTVVVDNAKSETLLPVIKKKIMPDSIVYTDSLSSCDKLDVSGFIHYRINHSKEFADRQNHINGIENFWNQAKRVLRKYNGIDRKSFPLFLKECEFRFNFGTPSQQLKILQKCGI

SEQ ID NO: 14509 - protein, 123 aa, Neisseria meningitidis; identical to SEQ ID NO: 1296

SEQ ID NO: 14510 - protein, 417 aa, Neisseria meningitidis; identical to SEQ ID NO: 9265

SEQ ID NO: 14511 - protein, 282 aa, Neisseria meningitidis; identical to SEQ ID NO: 1323

SEQ ID NO: 14512 - protein, 447 aa, Neisseria meningitidis
MFHSVNVFTGETLYRRPAQDYAEFERRLADLKMRGGAFAQLGVTERAARLQKFADRLEAEKERFAEMVCEEVGRCLHECRAEIGKSIELIRYYAHLAPELLAHKTIATQASLSQVRFEPLGVVFAVMPWNYPVWQVLRFAVPAMCAGNACAVKPAPSVARVSQALFDLASDGIPLAGAWLDEAGTLKAVEDTDAMAFTGSTHTGRILAAHAGANLKKTVLELGGSNAFIVMPDADLERAAAEACYSRFRDAGQSCNAAKRIIVTEAAADRFITLFLAECAKLKMGDPKHPDTTLAPLHREDLRDRVHGQVEDAVSNGAVCLTGGKIPQGRGWFYPATVLDRVNPACRVWREEVFGPAALILRAENEEHAIALANDSPFGLGACIYTADTERAWRFAEKIQAGSVFINRHTSSDLRLPFGGVKDSGYGRELSEFGLYEFVNVKTYWQK

SEQ ID NO: 14513 - protein, 107 aa, Neisseria meningitidis; identical to SEQ ID NO: 2314

SEQ ID NO: 14514 - protein, 291 aa, Neisseria meningitidis
MAVGKEILTKIRSVQNTQKITKAMQMVSTSKMRKTQERMRLARPYAEKVRMVMSHLAQTNTDHGIPLLESHREIRRVGFILITSDKGLCGGLNANVLKKFLAQVQEYRNQGIEEEIVCLGSKGLMACQSIGLNVVASAVNLGDTPKMEMLLGPLTELFQRYEKHEIDRIHLVYSGFVNTMCQEPRMEVLLPIGENVIGDSAPKSPFSWEYRYEPTALAVLEYLVRRYLESVVYQALSDNMASEQAARMVAMKAATDNAGNAIKELRLVYNKSRQAAITTELSEIVAGAAAV

SEQ ID NO: 14515 - protein, 887 aa, Neisseria meningitidis
MSTQLHDVDPIETQEWLDALSSVLEYEGGERAQYLLENLVKYCRDKGVRMPHGTTTPYLNTVSVENEKGIPGDQNIEHRIRAFVRWNAAAIVLRAGKKDLELGGHIASFQSAATMYEVGFNHFWKAKGEGEEGDLVFFQGHVAPGIYARAFVEGRLTEDQLNNFRQEVDGHGLPSYPHPHLLPDFWQFPTVSMGLGPIMAIYQARFLKYLESRGLAKTKGRKVWCFCGDGEMDEPESQGAIALAAREGLDNLIFVINCNLQRLDGPVRGNGKIIQELEGNFAGAGWNVVKVIWGRRWDRLLAKDKDGILRQRMEECLDGDYQTYKSKDGAYVREHFFNTPELKALVADMTDEQLWALNRGGHDPQKVYNAYDRAANHADGKPTVILAKTIKGYGMGASGEGQNVAHQAKKMDKASLKQFRDRFDIPVTDEQIESGDLPYLTFAPDTEEYKYLHARRDALGGYLPQRKPTQEVLEVPELSAFDAQLKSSGEREFSTTMAFVRILSTLLKDKKIGKRVVPIVPDESRTFGMEGMFRQYGIWNPKGQQYTPQDKDQLMFYKESVDGQILQEGINEPGAMADWIAAATSYANSNFAMIPFYIYYSMFGFQRIGDLAWAAGDMHARGFLLGGTAGRTTLNGEGLQHEDGHSHSQADLIPNCVSYDPTFQYEVAVIVQDGLRRMYANNEDVFYYITLMNENYTHPDMPEGAEQDILKGMYLLKAGGKGDKKVQLMGSGTILQEVIAGAELLKADFGVEADIWSCPSFNLLHRDAVEVERFNRLHPLEAEKVPFVTSQLQGHDGPVIAATDYIRSYADRIRAYIPNDYHVLGTDGFGRSDSRANLRRFFEVDRYNVAVAALAALAEQGKVSKETVQQAIEKYGIKADSAPSWKR

SEQ ID NO: 14516 - protein, 60 aa, Neisseria meningitidis; identical to SEQ ID NO: 3547

SEQ ID NO: 14517 - protein, 100 aa, Neisseria meningitidis; identical to SEQ ID NO: 1023

SEQ ID NO: 14518 - protein, 332 aa, Neisseria meningitidis; identical to SEQ ID NO: 155

SEQ ID NO: 14519 - protein, 430 aa, Neisseria meningitidis
MQFSAFGEKFTQHSGILQLMDDLGDALKSDKPVNMLGGGNPARIPEIDRAFADIFSKLAAEHAVENIGNYSNPQGDAALIDALTAFLNREYGWNLTADNIALTNGSQNAFFYLFNLFGGKFKLSDGTSAEKAILLPLAPEYIGYADVHIEGQHFVSVKPKIENVEHEGEAGFFKYRVDFDALENLPELKAGKIGAICCSRPTNPTGNVLTDGEMARLDALAREHGIPLIIDNAYGMPFPNIIYSDVTLNWHENIILCFSLSKVGLPGVRTGIIVAAPEVVKAVSSLNAIVNLAPTRFGAAIAAPLLESGEMKRLADQVIRPFYRNQAQTAVSLLKRELGAYPMKIHKPEGAIFLWLWFENLPVSSQTLYEMLKAEGTLIIPGEHFFVGIDTRDYPHAGECIRMSIAQDAQTLEKGIAAIGKTVRKLYDNV

SEQ ID NO: 14520 - protein, 167 aa, Neisseria meningitidis
MDAFDFFMQGNFKKIATEQGLDRKYFIFQYIVCNLSAISSFCLMKIIHTYTILYILIAVIGIINGFLLRSKVLSIVKNKQKFLSDMFPLEMPFFFVEYKIPILARFLNRGMKWLYLPSFFCLVAICFSIYILNEEGGWMPYFACYWFGLCYPVSTYYVFLSRDYKHI

SEQ ID NO: 14521 - protein, 189 aa, Neisseria meningitidis
MVRRLIIGISGASGFQYGVKALELLRAQDIETHLVVSKGAEMARASETDYARDEVYALADFVHPIGNIGACIASGTFKTDGMLVAPCSMRTLASVAHGFGDNLLTRAADVVLKERRRLVLMVRETPLNLAHLDNMKRVTEMGGVVFPPVPAMYRKPQTADDIVAHSVAHALSLFGIDTPDSAEWQGMAD

SEQ ID NO: 14522 - protein, 431 aa, Neisseria meningitidis
MLDIQLLRSNTAAVAERLARRGYDFDTARFDALEERRKSVQVKTEELQASRNSISKQIGALKGQGKHEEAQAAMDQVAQIKTDLEQAAADLEAVQKELDAWLLSIPNLPHEDVPFGKDETENVEVRKVGTPREFDFEIKDHVDLGEPLGLDFEGGAKLSGARFTVMRGQIARLHRALAQFMLDTHTLQHGYTEHYTPYIVDDTTLQGTGQLPKFAEDLFHVTRGGDETKTTQYLIPTAEVTLTNTVADSIIPSEQLPLKLTAHSPCFRSEAGSYGKDTRGLIRQHQFDKVEMVQIVHPEKSYEALEEMVGHAENILKALELPYRVITLCTGDMGFGATKTYDLEVWVPAQNTYREISSCSNCEDFQARRLKARFKDENGKNRLVHTLNGSGLAVGRTLVAVLENHQNADGSINIPAALQPYMGGVAKLEVK

SEQ ID NO: 14523 - protein, 56 aa, Neisseria meningitidis
LRIGNDLFVKRVQRIPGKLLVTSENPRYAPFEIDLSNTQDDIAIIGRVEWYGRSID

SEQ ID NO: 14524 - protein, 196 aa, Neisseria meningitidis; identical to SEQ ID NO: 6860

SEQ ID NO: 14525 - protein, 626 aa, Neisseria meningitidis
MSQALPYRPDIDTLRAAAVLSVIVFHIEKDWLPGGFLGVDIFFVISGFLMTTILHREMSGGGGGFSLKAFYIRRIKRILPAFFAVLAATLAGGFFLFTKDDFFLLWKSALTALGFASNLYFARGKDYFDPAQEEKPLLHIWSLSVEEQFYFVFPILLLLVARKSLRVQFGFLAALCALSLAASFMPSAFDKYYLPHLRACEMLVGSLTAVWMRYRQQRNLAVGRCCAAAGALFSSCILSACLFAYSEQTAYFPGPAALIPCLAVAALIYFNHYEHPLKKFFQWKITVAAGLISYSLYLWHWPILAFMRYIGPDNLPPYSPAAAVVLILLLSLFSYHCIEKPFKKWQGSFAQSVLWIYALPMLILGAGSFFAMRLPFMAQYDRLGLTRSNTSCHNNTGKQCLWGDTEKQPELLVLGDSHADHYKTFFDAVGKKEKWSATMVSADACAYVEGYASRVFQNWAACRAVYRYAEEHLPRYSKVVLAMRWGSQMPENSRSLAYDAGFFQKFDRMLHKLSSEKQAVYLMADNLASSYNVQRAYILSSRIPGYRQALRPDDESTLKANARIRELAAKYPNVYIIDAAAYIPADFQIGGLPVYSDKDHINPYGGTELAKRFSEKQRFLDTRHNH

SEQ ID NO: 14526 - protein, 164 aa, Neisseria meningitidis; identical to SEQ ID NO: 7379

SEQ ID NO: 14527 - protein, 241 aa, Neisseria meningitidis
MRIPLLAPDNYAFPDPAYALAWCDGLVGVSGDLDAGRLLEAYRNGVFPWFSRDGWFFWYAVGPRAVIVPERLHVPRSLAKTLRNGSYRVAVNGCFAEVVAHCAAAARPNQDGTWIAPEFQTAYLKLHEMGHAHSFECHYPDESGETRLAGGFYGVQIGRVFYGESMFALQPDASKIAFACAVPFLADLGVELIDCQQDTEHMRRFGSELLPFADFAERLRMLNAVPLKEEIGRREVACKGL

SEQ ID NO: 14528 - protein, 123 aa, Neisseria meningitidis; identical to SEQ ID NO: 4020

SEQ ID NO: 14529 - protein, 125 aa, Neisseria meningitidis; identical to SEQ ID NO: 13553

SEQ ID NO: 14530 - protein, 140 aa, Neisseria meningitidis; identical to SEQ ID NO: 3297

SEQ ID NO: 14531 - protein, 203 aa, Neisseria meningitidis; identical to SEQ ID NO: 3558

SEQ ID NO: 14532 - protein, 693 aa, Neisseria meningitidis
MKSLKTFLIWGIVVLVGVASFTTLALSRGEQVSAVWMVTAAISVYCIAYRFYSLYIANRVMRLDPNRLTPAERHNDGLDYVPTHKGVLFGHHFAAIAGAGPLVGPVLAAQMGYLPGTLWIIFGVVFAGAVQDMMVLFVSMRRDGKSLGDIVKQELGTVPGVIASIGILMIMVIIMAVLALIVVKALVHSPWGTFTIAATMPIALFMGIYTRYIRPGKIGEISIVGFILLMLAVIYGEDVAKSSIGHWFDLDGIQLTWAIMIYGFVASVLPVWLLLTPRDYLSTFLKIGTIAALALGIVIVNPTLQMPAVTHFIDGSGPVFSGALFPFLFITIACGAVSGFHALISSGTTPKMLENETHVRMIGYGGMLMESFVAIMALAAAASLDPGVYFAMNSPAALIGTDANTAAEVITTKLQFPVDAATLLHTAKEVGENTILSRAGGAPTLAVGMAHIMSRLIPGEAMMAFWYHFALLFEALFILTAVDAGTRVARFMIQDLGSIFYKPFGNTDSIPANLIATFFAVALWGYFLYTGVTDPLGGINSLWPLFGIANQMLAGVALIMCAVVLIKMKRDRYVWVVLVPAVGVLFVTCYAGLQKLFHSDPRISFLAHAGKYSDALAKNEILAPAKDIGEMAQIIFNDKINAGLTILFLSVVVIVAAYGLRTALKARKVGWPTAKEIPAVYRDGKQPEAQSEA

SEQ ID NO: 14533 - protein, 89 aa, Neisseria meningitidis; identical to SEQ ID NO: 494

SEQ ID NO: 14534 - protein, 319 aa, Neisseria meningitidis; identical to SEQ ID NO: 5570

SEQ ID NO: 14535 - protein, 458 aa, Neisseria meningitidis
MKHIHIIGIGGTFMGGLAAIAKEAGFEVSGCDAKMYPPMSTQLEALGIDVYEGFDAAQLDEFKADVYVIGNVAKRGMDVVEAILNLGLPYISGPQWLSENVLHHHWVLGVAGTHGKTTTASMLAWVLEYAGLAPGFLIGGVPENFGVSARLPQTPRQDPNSQSPFFVIEADEYDTAFFDKRSKFVHYRPRTAVLNNLEFDHADIFADLGAIQTQFHYLVRTVPSEGLIVCNGRQQSLQDTLDKGCWTPVEKFGTEHGWQAGEANADGSFDVLLDGKTAGRVKWDLMGRHNRMNALAVIAAARHVGVGIQTACEALGAFKNVKRRMEIKGTANGITVYDDFAHHPTAIETTIQGLRQRVGGARILAVLEPRSNTMKLGTMKSALPVSLKEADQVFCYAGGVDWDVAEALAPLGGRLNVGKDFDAFVAEIVKNAEVGDHILVMSNGGFGGIHGKLLEALR

SEQ ID NO: 14536 - protein, 748 aa, Neisseria meningitidis
LRNFDHTGTQTASRSLNCRLNIKAGITLMQQKIRFQIEGMTCQACASRIEKVLNKKDFVESAGVNFASEEAQVVFDDSKTSVADIAKIIEKTGYGAKEKTEDTLPQPEAEHHIGWRLWLLFTINVPFLIGMAGMMIGRHDWMIPPLWQFALASVVQLWLAIPFYKSAWASIKGGLANMDVLVTIGTVSIYLYSVYMLFFSPHAAYGMAHVYFEVGVMVIGFVSLGKFLEHRTKKSSLNSLGLLLKLTPTQVNVQRNGEWKQLPIDQVQIGDLIRANHGERIAADGIIESGSGWADESHLTGESNPEEKKAGGKVLAGALMTEGSVVYRATQLGSQTQLGDMMNALSEAQGSKAPIARVADKAAAVFVPAVVGIALLTFIVTWLIKGDWTVALMHAVAVLVIACPCALGLATPAAIMVGMGKAVKHGIWFKDAAAMEEAAHVDAVVLDKTGTLTEGSPQVAAVYCVPDSGFDEDALYRIAAAVEQNAAHPLARAIVSAAQARGLDIPAAQNAQTVVGAGITAEVEGVGLVKAGKAEFAELALPKFLDGVWDIASIVAVSVDNKPIGAFALADALKADTAEAIGRLKKHNIDVYIMSGDNQGTVEYVAKQLGIAHAFGNMSPRDKAAEVQKLKAAGKTVAMVGDGINDAPALAAANVSFAMKGGADVAEHTASATLMQHSVNQLADALLVSQATLKNIKQNLFFAFFYNILGIPLAALGFLNPVIAGAAMAASSVSVLSNALRLKRVKID

SEQ ID NO: 14537 - protein, 481 aa, Neisseria meningitidis
MTQYTLKQASVLLQSKQISAVELASAYLAAIAEKNPALNGYITIDQDKTLAEARAADERIAQGNASALTGVPVAYKDIFCQTGWRSACASKMLDNFISPYTATVVQNLLDEGMVTLGRTNMDEFAMGSTNENSFYGAAKNPWNLEHVPGGSSGGSAAVVAARLAPAALGSDTGGSIRQPASHCGITGIKPTYGTVSRFGMVAYASSFDQAGPMAQTAEDCAILLNAMAGFDPKDSTSLEREKEDYTRDLNQPLKGLKIGLPKEYFGEGNSADVLTALQNTIDLLKAQGAELIEVSLPQTKLSIPAYYVLASAEASTNLSRYDGVRYGHRAAQFGDLEEMYGKTRAEGFGSEVKRRIMIGTYVLSHGYYDAYYLKAQKLRRLVADDFQTAFARCDLILAPTAPSAAPKIGADASPVETYLSDIYTIAVNLAGLPALTLPAGFSGGGLPVGVQLVGNYFAEAKILGAAHQIQLNSDWHGKRPE

SEQ ID NO: 14538 - protein, 83 aa, Neisseria meningitidis; identical to SEQ ID NO: 3011

SEQ ID NO: 14539 - protein, 472 aa, Neisseria meningitidis
MSIKNAVKLIEESEARFVDLRFTDTKGKQHHFTVPARIVLEDPEEWFENGQAFDGSSIGGWKGIQASDMQLRPDASTAFVDPFYDDATVVLTCDVIDPADGQGYDRDPRSIARRAEAYLKSSGIGETAYFGPEPEFFVFDGIEFETDMHKTRYEITSESGAWASGLHMDGQNTGHRPTVKGGYAPVAPIDCGQDLRSAMVNILEELGIEVEVHHSEVGTGSQMEIGTRFATLVKRADQTQDMKYVIQNVAHNFGKTATFMPKPIMGDNGSGMHVHQSIWKDGQNLFAGDGYAGLSDTALYYIGGIIKHAKALNAITNPSTNSYKRLVPHFEAPTKLAYSAKNRSASIRIPSVNSSKARRIEARFPDPTANPYLAFAALLMAGLDGIQNKIHPGDPADKNLYDLPPEEDALVPTVCASLEEALAALKADHEFLLRGGVFSKDWIDSYIAFKEEDVRRIRMAPHPLEFEMYYSL

SEQ ID NO: 14540 - protein, 710 aa, Neisseria meningitidis; identical to SEQ ID NO: 9774

SEQ ID NO: 14541 - protein, 159 aa, Neisseria meningitidis; identical to SEQ ID NO: 6511

SEQ ID NO: 14542 - protein, 153 aa, Neisseria meningitidis
MNIIMDSTRKFGILWEKNSECNGFIYGKIQIIIGENIYPKICPYGYFTLNTVFNSLKSSFEEKYYAGGNNGLDFGEQLFDIDKYNSLELYNIFSIDTAYMSGGSNCEIDCLVLEMGYSGEEERLFYSFDNGKNFKEIRYKKGTVESVIFQLNL

SEQ ID NO: 14543 - protein, 404 aa, Neisseria meningitidis; identical to SEQ ID NO: 8856

SEQ ID NO: 14544 - protein, 671 aa, Neisseria meningitidis
MSKSRRSPPLLSRPWFAFFSSMRFAVALLSLLGIASVIGTVLQQNQPQTDYLVKFGPFWAQIFGFLGLYDVYASAWFVVIMMFLVVSTSLCLIRNVPPFWREMKSFREKVKEKSLAAMRHSSLLDVKIAPEVAKRYLEVQGFQGKTVSREGGSVLIAAKKGTMNKWGYIFAHVALIVICLGGLIDSNLLLKLGMLTGRIVPDNQAVYAKDFKPESILSASNLSFRGNVNISEGQSADVVFLNADNGILVQDLPFEVKLKKFHIDFYNTGMPRDFASDIEVTDKATGEKLERTIRVNHPLTLHGITIYQASFADGGSDLTFKAWNLGDASREPVVLKATSIHQFPLEIGKHKYRLEFDQFTSMNVEDMSEGAEREKSLKSTLNDVRAVTQEGKKYTNIGPSIVYRIRDAAGQAVEYKNYMLPVLQEQDYFWITGTRSGLQQQYRWLRIPLDKQLKADTFMALREFLKDGEGRKRLVADATKGAPAEIREQFMLAAENTLNIFAQKGYLGLDEFITSNIPKEQQDKMQGYFYEMLYGVMNAALDETIRRYGLPEWQQDEARNRFLLHSMDAYTGLTEYPAPMLLQLDGFSEVRSSGLQMTRSPGALLVYLGSVLLVLGTVLMFYVREKRAWVLFSDGKIRFAMSSARSERDLQKEFPKHVESLQRLGKDLNHD

SEQ ID NO: 14545 - protein, 258 aa, Neisseria meningitidis
MTLIHPTAVIDPKAELDSGVKVGAYTVIGPNVQIGANTEIGPHAVINGHTSIGENNRIFQFASLGEIPQDKKYRDEPTKLIIGNGNTIREFTTFNLGTVTGIGETRIGDDNWIMAYCHLAHDCVVGNHTIFANNASLAGHVTIGDYVVLGGYTLVFQFCRIGDYAMTAFAAGVHKDVPPYFMASGYRAEPAGLNSEGMRRNGFTAEQISAVKDVYKTLYHRGIPFEEAKADILRRAETQAELAVFRDFFTQSTRGIIR

SEQ ID NO: 14546 - protein, 206 aa, Neisseria meningitidis; identical to SEQ ID NO: 320

SEQ ID NO: 14547 - protein, 552 aa, Neisseria meningitidis
MNLALKLNSRMIHFSLLAMEKLMFRILIISFLFLLSAKSFSADLEIKNGKLMYALSEKYNDNGFKAYKVLGEGGGIHTEYNYKFDKSLNLNVLESSTGARSLEKVPVKVTASVSRAAVLSGVGKLARLGAKLSTRAVPYVGTALLAHDVYETFKEDIQAQGYQYDPETDKFVKGYEYSNCLWYEDKRRINRTYGCYGVDSSIMRLMSDDSRFPEVKELMESQMYRLARPFWNWHKEELNKLSSLDWNNFVLNRCTFNWNGGDCLVNKGDDFRNGADFSLIRNSKYKEEMDAKKLEEILSLKVDANPDKYIKATGYPGYSEKVEVAPGTKVNMGPVTDRNGNPVQVVATFGRDSQGNTTVDVQVIPRPDLTPGSAEAPNAQPLPEVSPAENPANNPNPNENPGTSPNPEPDPDLNPDANPDTDGQPGTRPDSPAVPDRPNGRHRKERKEGEDGGLLCDYFPEILACQEMGKPSDGMFHDISIPQVIDDKTWSSHNFLPSNGVCPQPKTFHVFGRQYQASYEPLCVFAEKIRFAVLLAFIIMSAFVVFGSLKGK

SEQ ID NO: 14548 - protein, 96 aa, Neisseria meningitidis
MAKYFTETGISVREHFDFFGEFVVSPAARSGDLALTYGLRLEAGEEGLSLAELFDKRSDSQEPVEGGRIDIGGFMLTAKEVDGDGNIGSMGLKVPR

SEQ ID NO: 14549 - protein, 356 aa, Neisseria meningitidis
MNLISRYIIRQMAVMAVYALLAFLALYSFFEILYETGNLGKGSYGIWEMLGYTALKMPARAYELMPLAVLIGGLVSLSQLAAGSELTVIKASGMSTKKLLLILSQFGFIFAIATVALGEWVAPTLSQKAENIKAAAINGKISTGNTGLWLKEKNSIINVREMLPDHTLLGIKIWARNDKNELAEAVEADSAVLNSDGSWQLKNIRRSTLGEDKVEVSIAAEENWPISVKRNLMDVLLVKPDQMSVGELTTYIRHLQNNSQNTRIYAIAWWRKLVYPAAAWVMALVAFAFTPQTTRHGNMGLKLFGGICLGLLFHLAGRLFGFTSQLYGIPPFLAGALPTIAFALLAVWLIRKQEKR

SEQ ID NO: 14550 - protein, 307 aa, Neisseria meningitidis
MKKRNNPLPLLNGVKPSYLVLPHEKQFYGLPLLHFLCIRFPFVGADDWRRRLNSGFVVGSDGAALDEHSLFEPGKVMFYYRKTSRESEPRIPFEEKILHIDEHLIVVDKPHFLPVIPSGRFLRETLLTRLRLRPELQHLNVEDITPLHRLDKDTAGVMLLSHNPATRGAYQTMFQNKTVWKTYEALAPTRTDLPYPIDVVSRLVRGEKFFTTQEAEGEPNAHTTVELIENRGEFSLYRLTPHTGKKHQLRVHMMGLGMPLLNDALYPVPSEAGSEDYRKPLKLLAKKIAFADPLSGRERVFCSGFCL

SEQ ID NO: 14551 - protein, 38 aa, Neisseria meningitidis; identical to SEQ ID NO: 6664

SEQ ID NO: 14552 - protein, 451 aa, Neisseria meningitidis
MSIQSGEILETVKMVADQNFDVRTITIGIDLHDCISTDIDVLNQNIYNKITTVGKDLVATAKYLSAKYGVPIVNQRISVTPIAQIAAASKADSYVSVAQTLDKAAKAIGVSFIGGFSALVQKGMSPSDEVLIRSIPEAMKTTDIVCSSINVGSTRAGINMDAVKLAGETIKRTAEITPEGFGCAKIVVFCNAVEDNPFMAGAFHGSGEADAVINVGVSGPGVVKAALENSDATTLTEVAEVVKKTAFKITRVGELIGREASKMLNIPFGILDLSLAPTPAVGDSVARILEEMGLSVCGTHGTTAALALLNDAVKKGGMMASSAVGGLSGAFIPVSEDEGMIAAAEAGVLTLDKLEAMTAVCSVGLDMIAVPGDTPAHTISGIIADEAAIGMINSKTTAVRIIPVTGKTVGDSVEFGGLLGYAPVMPVKEGSCEVFVKRGGRIPAPVQSMKN

SEQ ID NO: 14553 - protein, 304 aa, Neisseria meningitidis; identical to SEQ ID NO: 4332

SEQ ID NO: 14554 - protein, 186 aa, Neisseria meningitidis; identical to SEQ ID NO: 2093

SEQ ID NO: 14555 - protein, 469 aa, Neisseria meningitidis
MTSTFPRRLARKIRQTRRLSRKSIAFLFLLAGSALVALTALFFAHLADFALELNAKLVQQYPWFAWVALPLGLPLIAWLTRKFAPFTAGSGIPQVIASLSLPYGAQKTRLIRLGQTLLKIPLTFLGMLFGVSIGREGPSVQVGAAVMGAWGAWCKKHGLAFKGMQENDLMAAGAAGGLAAAFNAPLAGVIFAIEELGRGIMLRWERQILLGVLASGFIQVAIQGNNPYFSGFNGGVLEHIFLWVALSGLVCGAAGGLFGRLLYRGAAAFAPRKIRGFIRNRPLLLAALMGLLLALLGTFYQGKTYGTGYHEAAQALHGIYEAPFGLAAAKWLATVFSYWAGIPGGIFTPSLTIGAVLGEHIAAIADISQGANIIVLICMAAFLAGATQSPITSAVVVMEMTGGQSLLFWMLIACIFASQVSRQFSPRPFYHASGMRFRQRVLQETAAQTGNASARPQTANSKTGMPSEN

SEQ ID NO: 14556 - protein, 446 aa, Neisseria meningitidis; identical to SEQ ID NO: 11226

SEQ ID NO: 14557 - protein, 107 aa, Neisseria meningitidis; identical to SEQ ID NO: 2524

SEQ ID NO: 14558 - protein, 58 aa, Neisseria meningitidis; identical to SEQ ID NO: 2174

SEQ ID NO: 14559 - protein, 447 aa, Neisseria meningitidis
MNQNHTILQNLPVGQKVGIAFSGGLDTSAALLWMKLKGALPYAYTANLGQPDEDDYNAIPKKAMEYGAENARLIDCRAQLAHEGIAAIQCGAFHVSTGGIAYFNTTPLGRAVTGTMLVSAMKEDDVNIWGDGSTYKGNDIERFYRYGLLTNPALKIYKPWLDQQFIDELGGRHEMSEFLIANGFNYKMSVEKAYSTDSNMLGATHEAKDLEFLNSGIKIVKPIMDVAFWDENVEIKPEEVSVRFEEGVPVALNGKEYADPVELFLEANRIGGRHGLGMSDQIENRIIEAKSRGIYEAPGMALFHIAYERLVTGIHNEDTIEQYRINGLRLGRLLYQGRWFDSQALMLRETAQRWVAKAITGEVTLELRRGNDYSILNTESPNLTYQPERLSMEKVEDAAFTPLDRIGQLTMRNLDITDTRAKLGIYSQSGLLALGEGSVLPQLGNKQ

SEQ ID NO: 14560 - protein, 427 aa, Neisseria meningitidis; identical to SEQ ID NO: 146

SEQ ID NO: 14561 - protein, 99 aa, Neisseria meningitidis; identical to SEQ ID NO: 1110

SEQ ID NO: 14562 - protein, 492 aa, Neisseria meningitidis
MFSKLTPLAETGIPTLSCANAAGRLLHSDSRQIKQGDIFVACPGEYADGRSYIPAAVANGAAFVFWDDDGKFAWNPEWKVPNQGIKDLKHRAGILAAQVYGNVSDGLKFWGVTGTNGKTSITQWLAQAADLLGEKTAIVGTVGNGFWGALEETTHTTPAPVDVQTLLYRFRQQGATVAAMEVSSHGLDQSRVNGVSFRSAIFTNLTRDHLDYHGTMEAYGAIKSRLFYWHGLKHAVINVDDEYGAELAGRLKKDCPDLAVYSYGFSEQADIRIIDFTASSDGIAAVFQTPWGEGKCRTRLLGRFNAQNLAACIALLCANGYPLDNVLDVLAKIRPASGRMDCIMNSGKPLVVVDYAHTPDALEKALATLQEIKPQGAALWCVFGCGGNRDRGKRPLMGAAAVQGADKVVVTSDNPRLENPHDIINDILPAVPAPECVEADRAAAIRYAVEQAAANDIILIAGKGHENYQDVQGVKHRFSDLEIVGQALLTRK

SEQ ID NO: 14563 - protein, 252 aa, Neisseria meningitidis; identical to SEQ ID NO: 7668

SEQ ID NO: 14564 - protein, 101 aa, Neisseria meningitidis; identical to SEQ ID NO: 705

SEQ ID NO: 14565 - protein, 100 aa, Neisseria meningitidis; identical to SEQ ID NO: 2893

SEQ ID NO: 14566 - protein, 942 aa, Neisseria meningitidis
MMDEKLNFSYLFGSNAPYIEELYEAFLENPDAVDEKWKQYFTDLSKQPGTVAVDVAHTPIRESFVTLAKKKIASAVVGGADEAMLKKQVSVLRLISAYRIQGVGAAQLDPLKRIPPRDIEALDPKFHGLSDADMALQFNMGEGDFANRGKLPLSQIISNLKQTYCGHIALEYIYIPNTEERRWVRNYFESVLSTPHYNADQKRRILKEMTAAETLERYLHTKYVGQKRFGVEGGESAIAGLNYLIQNAGKDGVEEVIIGMAHRGRLNVLVNILGKKPGDLFAEFEGRAEIKLPSGDVKYHMGFSSDIATPHGPMHVSLAFNPSHLEIVNPVVEGSARAKQKRLGENGRDKVLPVLIHGDSAFIGLGVNQATFNLSKTRGYTTGGTVHIVINNQIGFTTSDIRDTRSTVHCTDIAKMVSAPVIHVNGDDPERVCFAIQAALDYRKKFHKDIVIDVVCYRKWGHNEGDDPTLTQPMMYKKVSQHPGARALYTEQLIAEGVVTQAEADAYIQAYRDALDKGEHVEQTTLSNFQRTQIDWSKYQGKDWREHIETGLPAADIERLTEKFTAVPEGFALHPTAKRVIEARKAMASGKQAIDWGMAETLAYASLVTKGHGVRISGEDSGRGTFSHRHAVLHDQNREKWDDGTYVPLRHMGEGMGEFLVIDSILNEEAVMAFEYGFACSAPDKLTIWEAQFGDFANGAQVTIDQFLSSGETKWGRLCGLTTILPHGYDGQGPEHSSARVERWLQLCSENNMQVIMPSEASQMFHLLQRQVLGSYRKPLVIFMSKRLLRFKGAMSSLENFTEGSTFRPVIGDTAERASNDSVKRVVLCAGQVYYDLEAGRAERKLEDDVAIVRVEQLYPFPYEEVKAELAKYPNAKSVVWAQEEPKNQGAFYQIRHRIEDVISEEQKLSYAGRPSSASPAVGYSSKHIAQLKQLVEDALAL

SEQ ID NO: 14567 - protein, 195 aa, Neisseria meningitidis; identical to SEQ ID NO: 1424

SEQ ID NO: 14568 - protein, 512 aa, Neisseria meningitidis
MNMLGALAKVGSLTMVSRVLGFVRDTVIARAFGAGMATDAFFVAFKLPNLLRRVFAEGAFAQAFVPILAEYKETRSKEAAEAFIRHVAGMLSFVLVIVTALGILAAPWVIYVSAPGFAQDADKFQLSIDLLRITFPYILLISLSSFVGSVLNSYHKFGIPAFTPTFLNVSFIVFALFFVPYFDPPVTALAWAVFVGGILQLGFQLPWLAKLGFLKLPKLSFKDAAVNRVMKQMAPAILGVSVAQVSLVINTIFASYLQSGSVSWMYYADRMMELPSGVLGAALGTILLPTLSKHSANQDTEQFSALLDWGLRLCMLLTLPAAVGLAVLSFPLVATLFMYREFTLFDAQMTQHALIAYSFGLIGLIMIKVLASGFYARQNIKTPVKIAIFTLICTQLMNLAFIGPLKHVGLSLAIGLGACINAGLLFYLLRRHGIYQPGKGWAAFLAKMLLSLAVMCGGLWAAQAYLPFEWAHAGGMRKAGQLCILIAVGGGLYFASLAALGFRPRHFKRVEN

SEQ ID NO: 14569 - protein, 336 aa, Neisseria meningitidis
MSIKILIISPSWIGDCVMTQPLFRRLKELHPGCTIDVFAPKWSMAVFERMPEVNEILENSFGHGALELKRRWRVGRDLGRRGYDQVIVLPGSLKSAIIALATGIGKRTGYVGESRYFLLNDIRRLDKERLPLMVDRYTALAHQSQEDFDGHSGFPEFSIDERRREISVETFGLNLGKPVLAFCPGAEFGPAKRWPTRHFAELGKHYLAAGWQVWLFGSQKDDEIAEEINRLSDGMCVNLCGKTDLSQAMDLLSLADTVVCNDSGLMHLAAALGRKVVAVYGSSSPTHTPPLSDRAKIVSLHLECSPCFKRECPLGHTDCLNRLYPEKIVQAVEEAV

SEQ ID NO: 14570 - protein, 522 aa, Neisseria meningitidis
MSQTDTQRDGRFLRTVEWLGNMLPHPVTLFIIFIVLLLIASAAGAYFGLSVPDPRPVGAKGRADDGLIHVVSLLDADGLIKILTHTVKNFTGFAPLGTVLVSLLGVGIAEKSGLISALMRLLLTKSPRKLTTFMVVFTGILSNTASELGYVVLIPLSAIIFHSLGRHPLAGLAAAFAGVSGGYSANLFLGTIDPLLAGITQQAAQIIHPDYVVGPEANWFFMVASTFVIALIGYFVTEKIVEPQLGPYQSDLSQEEKDIRHSNEITPLEYKGLIWAGVVFVALSALLAWSIVPADGILRHPETGLVSGSPFLKSIVVFIFLLFALPGIVYGRVTRSLRGEQEVVNAMAESMSTLGLYLVIIFFAAQFVAFFNWTNIGQYIAVKGATFLKEVGLGGSVLFIGFILICAFINLMIGSASAQWAVTAPIFVPMLMLAGYAPEVIQAAYRIGDSVTNIITPMMSYFGLIMATVIKYKKDAGVGTLISMMLPYSAFFLIAWIALFCIWVFVLGLPVGPGAPTFYPAP

SEQ ID NO: 14571 - protein, 122 aa, Neisseria meningitidis; identical to SEQ ID NO: 848

SEQ ID NO: 14572 - protein, 87 aa, Neisseria meningitidis; identical to SEQ ID NO: 1364

SEQ ID NO: 14573 - protein, 322 aa, Neisseria meningitidis
MKLTLAIPSLNLDEDETRIPLCLPAFNKILQYGSLHRQSCTASAFYARYLWCGRLAERAAQSLNMPSEAVALATPVWQKMGMHQANVLTAEYLNVGTDEAERLCRDLSAFYGDIPWRFVPVLPELWLVSLPCAYRWGAKPVLDLGGLLGADDQPDGEDALEWLRVQTEIQMWLAAHPVNHNRKKRGLPELNGLWLWDSLHGSSQGGTLFADTVWSRFHPDRRALPDNFRAYEETAAYLPDTHHILFMDDLRLTALTGDRERYAAILQQWEERWFAPIYEAVRTGKIKRLDITTDGQHGGTLTFKPADRWKFWRGAKTFDGIW

SEQ ID NO: 14574 - protein, 218 aa, Neisseria meningitidis
MNRQKVIAIDGPGASGKGTVAARVAAALGYDYLDTGALYRLTALYAQKQGVGWHDEENVSELAKKLPAVFSGSRILLGGEDVSDGIRTEAIGMGASAVAQLPKVRVALLQRQRDFLTEKGLVADGRDTGSVVFPQAELKIFLTAESKIRAERRAKQIGIPCEGLAFERILSDIEARDEADRNRKVAPLKQQPDALLLDTSRLTIEETVKKVLDWYRKV

SEQ ID NO: 14575 - protein, 272 aa, Neisseria meningitidis; identical to SEQ ID NO: 7451

SEQ ID NO: 14576 - protein, 407 aa, Neisseria meningitidis; identical to SEQ ID NO: 12938

SEQ ID NO: 14577 - protein, 131 aa, Neisseria meningitidis
MPVYFRIPSRKRLHKMNRRQHKKLHLGEFQTLIFGVQGSLHQAEDDAEAFGRFMDELIAYLAANGLEMAGGGDCGDFSCLFQKSGARSLGETEKKAIISWLAGREDVATLHATPLVDGFYGDDGWESYSET

SEQ ID NO: 14578 - protein, 91 aa, Neisseria meningitidis
MNATNWSVYLILCENSAFYCGISPNPQQRLAAHTTGKGAKYTRVFKPVAMRIVAGGMDKGTALKQEIAVKKLTAAQKRKLWEQAEKMPSET

SEQ ID NO: 14579 - protein, 42 aa, Neisseria meningitidis; identical to SEQ ID NO: 9053

SEQ ID NO: 14580 - protein, 106 aa, Neisseria meningitidis; identical to SEQ ID NO: 3331

SEQ ID NO: 14581 - protein, 51 aa, Neisseria meningitidis; identical to SEQ ID NO: 1536

SEQ ID NO: 14582 - protein, 269 aa, Neisseria meningitidis; identical to SEQ ID NO: 1709

SEQ ID NO: 14583 - protein, 162 aa, Neisseria meningitidis
MTALLVILALALIAAGTAGIVYPALPGLALMFAGTWLLAYSGGYQIYGAGVLWTVGLISLAGILADYVAGIWGTKYTGAGKLAVRGALVGSIIGIFFSLPGLILGPFIGAAAGELIDRRNMLQAGKAGLGTLLGLIVGTTFKIGCAVSILFILLVKYIAYLF

SEQ ID NO: 14584 - protein, 163 aa, Neisseria meningitidis
MKYRRFYRNGGTYFFTVVTNKRQKILTDDAVRLALRQAVMAVRERYPFEILAWVLMPDHLHTIWRLPDNDSAYSERWRQIKRHSQYLIGGNLRLWQKRFWEHTIRDEADFSCHFDYLHFNPVKHGYVGQISDWRFSTFHRYVKQGIYPHNWGGGNADFSIGYD

SEQ ID NO: 14585 - protein, 431 aa, Neisseria meningitidis
LLTKQMYLFVACMIFMFVNQYIDIIFRVRAAWNRAEDRYFPSLHKACCKPKIGRVIVQNQGCIMSLYPIYNFSAGPAVLPEAVLETARQEMLDYNGTGFPVMAMSHRSEMFLSILHHAEQDLRQLLKVPDNYKILFLQGGATTQFNMAAMNLAHGFRTADAVVTGNWSRIAYEQMSRLTDTEIRLAAHGGEQFDYLDLPPVETWDVAPDSAFVHFAVNETVNGLQYREVPCLSEGMPPLVCDMSSEILSREFDVADYGLIYAGAQKNIGPAGVTVVIVREDLLERCPNDIPDVFNYRSHLNRDGMYNTPSTYAIYMSGLVFRWLQAQGGVKKIEAVNRLKAQTLYETIDGSGGFYINRIRPNARSKMNVVFQTGDEELDRRFVLEAELQGLCLLKGYKTVGGMRASIYNAMPLEGVRALADFMRDFQRRYG

SEQ ID NO: 14586 - protein, 154 aa, Neisseria meningitidis
MKCPFCAHPDTRVADSRLMEERNAVRRRRHCPNCGKRFGTLETAELKMPAVIGPDKKRSPFNAQRLRNDLTAAARKSALTPEQIDETVRLTEHRLYTSGLRDIPSAELADMVLKELLEHNTEAAVRFAALHKRFDNPADFASWLAQAVKTGGKA

SEQ ID NO: 14587 - protein, 295 aa, Neisseria meningitidis
MQKSKLSWFLKLMLALSLAFLYIPLVVLVIYSFNESKLVTVWGGFSTKWYGALLENDTILEAAWLSLRIAVVSSLAAVVLGTLAGYAMARIKRFRGSTLFAGMISAPMVMPDVITGLSMLLLIIQVQIFLQGSEWLQHLYFDRGFFTIFLGHTTLCMAYITVVIRSRLVELDQSLEEAAMDLGACPLKIFFVITLPLIAPAIASGFLLGITLSLDDLVITSFLSGPGSSTLPQVIFSKIKLGLDPQMNVLATILIGIIGTLVIIVNYWMMRQATKRDREAAEAYRQEKLAAEKAH

SEQ ID NO: 14588 - protein, 215 aa, Neisseria meningitidis
  misc_feature 210, 211: 'Xaa' is any amino acid
MNAAIEHVQAVAFDLDGTLCDSVPDLAAAAEAMLEQLGMKPLPAKVVESYVGDGIGKLVHRVLSNDRDREADSELWEKGFVSYMKYYRDHLSVFTRPYPETATGLALLKSLGIPLAVITNKNEILAVELLKQLGLADYFSLILGGDSLPEKKPSPLPLRHAAEVLGIDVANMVMVGDSRNDIIAAKAAGCLSVGVTFGYGDMTLLSQDDXXHTLN

SEQ ID NO: 14589 - protein, 148 aa, Neisseria meningitidis; identical to SEQ ID NO: 4019

SEQ ID NO: 14590 - protein, 101 aa, Neisseria meningitidis; identical to SEQ ID NO: 2399

SEQ ID NO: 14591 - protein, 944 aa, Neisseria meningitidis
MNRKHTFPLTLTALAVAAAFPSYAANPETATPDAAQTQSLKEVTVRAAKVGRRSKEATGLGKIVKTSETLNKEQVLGIRDLTRYDPGVAVVEQGNGASGGYSIRGVDKNRVAVSVDGVAQIQAFTVQGSLSGYGGRGGSGAINEIEYENISTVEIDKGAGSSDHGSGALGGAVAFRTKEAADLISDGKSWGIQAKTAYGSKNRQFMKSLGAGFSKDGWEGLLIRTERQGRETRPHGDIADGVEYGIDRLDAFRQTYDIQKQNKKAEYFLAEGEREPKPVAKLAGNGNYLKNQLNRWVEERKKNNQPLSAEEEAMVREAQARHENLSAQAYTGGGRILPDPMDYRSGSWLAKLGYRFGGRHYVGGVFEDTKQRYDIRDMTEKQYYGTDEAKKFSDKSGVYDGDDFRDGLYFRPNIEEWKGDKNLVKGIGLKYSRTKFIDEHHRRRRMGLLYRYENEAYSDNWADKAVLSFDKQGVATDNNTLKLNCAVYPAVDKSCRASADKPYSYDSSDRFHYREQHNVLNASFEKSLKNKWTKHHLTLGFGYDASNAISRPEQLSHNAARISESTGFDDNNQDKYRLGKPEVVEGSVCGYIETLRSRKCVPRKINGSNIHISLNDRFSIGKYFDFSLGGRYDRQNFTTREELVRSGRYVNRSWNSGIVFKPSRHFSLSYRASSGFRTPSFQELFGIDIYHDYPKGWQRPALKSEKAANREIGLQWKGDFGFLEISSFRNRYTDMIAVADQKTKLPDSTGRLTEIDIRDYYNAQNMSLQGINILGKIDWNGVYGKLPEGLYTTLAYNRIKPKSVSNRPGLSLRSYALDAVQPSRYVLGFGYDQPEGKWGANIMLTYSKGKNPDELAYLAGDQKRYSTKRASSSWSTADVSAYLNLKKRLTLRAAIYNIGNYRYVTWESLRQTAESTANRHGGDSNYGRYAAPGRNFSLALEMKF

SEQ ID NO: 14592 - protein, 102 aa, Neisseria meningitidis
MNKNIAAALAGALSLSLAAGAVAADKPASNATGVHKSAHGSCGASKSAEGSCGAAGSKAGEGKCGEGKCGATVKKTHKHTKASKAKAKSAEGKCGEGKCGSK

SEQ ID NO: 14593 - protein, 69 aa, Neisseria meningitidis; identical to SEQ ID NO: 7188

SEQ ID NO: 14594 - protein, 528 aa, Neisseria meningitidis; identical to SEQ ID NO: 593

SEQ ID NO: 14595 - protein, 352 aa, Neisseria meningitidis
MRPLNVQIRLGNLRHNYRILKEMHGGKLLAVVKADAYGHGAVRCAFALADLADGFAVATIDEGIRLRESGITHPIVLLEGVFEASEYEAVEQYSLWPAVGNQWQLEALLIRHWKKPVKVWLKMDSGMHRTGFFPHDYASAYAALKQSEYVDSIVKFSHFSCADEPESGMTEIQMEAFDLGTKGLEGEESLANSAAILNVPEARRDWGRAGLALYGISPFGGSDDRLKPVMRLSTRIFGERVLQPHSPIGYGATFYTSKSTRVGLIACGYADGYPRRAPSNSPVAVDGKLTRVIGRVSMDMMTIELDASQEGLGHEVELWGDTVNINTVAEAAGTIPYELMCNIKRAKFTYIE

SEQ ID NO: 14596 - protein, 148 aa, Neisseria meningitidis
MYVVKSANDGGNSLFLSSSDIVNQLSKTETGKKHLKTLTGNLYPFKTPASFDKKQGVRWGNILSVNTQMIRFRSDCIYKGIEENRNKVSKEMVLALDYLVNVIKNASDIQEFSAQDDGLIIIDNVNGLHARTDYTDKNRHYIRARITV

SEQ ID NO: 14597 - protein, 495 aa, Neisseria meningitidis; identical to SEQ ID NO: 2837

SEQ ID NO: 14598 - protein, 275 aa, Neisseria meningitidis; identical to SEQ ID NO: 67

SEQ ID NO: 14599 - protein, 191 aa, Neisseria meningitidis; identical to SEQ ID NO: 1730

SEQ ID NO: 14600 - protein, 196 aa, Neisseria meningitidis
LQGVRCKMPSERGGILLKCAIGKNSRTKMFEQEDEWISKTQMKKQMNGLQDLGMELTKLSNDTLKKIGLDEDLYEAVVTYKKITSNGALKRQAQFIGRLMRDTDPAPIEAFLAKLRGDDAAHNAFLQRVEQARVRLLADDGALTQFMSDFPHADAGKLRTLIRNTKKEQEQNKPPKNFRALFQELKTVMENGDAEI

SEQ ID NO: 14601 - protein, 841 aa, Neisseria meningitidis
MNPNSKHNTNFTNLLKPSDSDIKQFAAQHIRHLTDLLNRYAYEYYTLDAPSVPDAEYDKLFRELEALELNHPEFKLPDSPTQRVGGEPLAGFAEVRHEVPMLSLTNAFSPQDENGVFDHAEMYAFDQRVRDGLDGGNPEYVIEPKFDGLAISLLYRDGVLVQAATRGDGTTGEDVTQNIKTVANIPLRLHGENTPELIEVRGEVLMQKADFAALNKRQAENGQKPFANPRNAAAGSLRQLDSRITAQRKLHFFPYSVARQQGGFVAEEHIQELAYFQALGFSLPNGNFGCFKNIDEVLAFYEQMQQKRPELPYEIDGMVVKVNSLAQQRELGFISRAPRWAIAHKFPAEEALTIVEAIDVQIGRTGAVTPVARLQPVFVGGVTVTNATLHNQDEVSRKDVRVGDTVVVRRAGDVIPEVVRVIFERRPMQETAVAVSDGIGHRQDDLFAETPSANQTQSVPLHKPYRLPTHCPICRSEIEREEGEAVARCSGGMLCQAQRAQGLIHFASRKAMDIDGLGEKQIEQLVAQDLVRHFADLYRLDIPTLQKMKETTDKTVAESDQTPSEGSSVGASGKHKKQPVKWAENILGGIESGKTPELARFLFALGIRHVGERTAKTLAQAFGTLERVRRAPEPVLACLPDIGTVVAHSIAHFFAQAEQQAMIDELLAAGVAPQTQAVTIPPARHAEPQRWIARLPDFKISENKAQALWELAGKNIEGLQNDKALPADWQAWRSEPQNAALLENLKTFFAQMPSEDEAAQGSDGINKAVAGKTFVLTGTLPTLKRDQAQSLIEAAGGKVSGSVSKKTDYVVAGEAAGSKLEKANALGVSILSEAELLTLLG

SEQ ID NO: 14602 - protein, 230 aa, Neisseria meningitidis; identical to SEQ ID NO: 5960

SEQ ID NO: 14603 - protein, 210 aa, Neisseria meningitidis; identical to SEQ ID NO: 6015

SEQ ID NO: 14604 - protein, 104 aa, Neisseria meningitidis; identical to SEQ ID NO: 1772

SEQ ID NO: 14605 - protein, 153 aa, Neisseria meningitidis; identical to SEQ ID NO: 750

SEQ ID NO: 14606 - protein, 315 aa, Neisseria meningitidis; identical to SEQ ID NO: 8207

SEQ ID NO: 14607 - protein, 39 aa, Neisseria meningitidis; identical to SEQ ID NO: 7406

SEQ ID NO: 14608 - protein, 110 aa, Neisseria meningitidis
MLDASPPQERGSRRETRSQKKASQITAFFRWLGGLVSNPATGKISHTKLWANVAAAAMTWKFVQAADAPEWLWWAYGAMVGGYALIKRGIAVVPQLAEVKKSANQEGGRQ

SEQ ID NO: 14609 - protein, 513 aa, Neisseria meningitidis
MKIGIPRESLSGETRVACTPATVALLGKLGFETVVESGAGLAASLDDAAYQTAGATVADKAAVWVCPLIYKVNAPSEQELPLLNEGQTIVSFLWPRQNEALVEALRAKKVNALAMDMVPRISRAQALDALSSMANISGYRAVIEAANAFGRFFTGQITAAGKVPPAQVLVIGAGVAGLAAIGTANSLGAVVRAFDTRLEVAEQIESMGGKFLKLDFPQESGGSGDGYAKVMSDEFIAAEMKLFAEQAKEVDIIITTAAIPGKPAPKLITKEMVESMKSGSVIVDLAAATGGNCELTRPGELSVTGNGVKIIGYTDMANRLAGQSSQLYATNLVNLTKLLSPNKDGEITLDFEDVIIRNMTVTHDGEITFPPPPIQVSAQPQQTPSEKAAPAAKPEPKPVSLWKKLAPAVIAAVLVLWVGAVAPAAFLNHFIVFVLACVIGYYVVWNVSHSLHTPLMSVTNAISGIIVVGALLQISQGNGFVTLLAFIAILIASINIFGGFFVTRRMLNMFRKG

SEQ ID NO: 14610 - protein, 66 aa, Neisseria meningitidis; identical to SEQ ID NO: 2062

SEQ ID NO: 14611 - protein, 335 aa, Neisseria meningitidis
MSTFFRQTAQAMIAKHIDRFPLLKLDQVIDWQPIEQYLNRQKTRYLRDHRGRPAYPLLSMFKAVLLGQWHSLSDPELEHSLITRIDFNLFCRFDELSIPDYSTLCRYRNWLAQDDTLSELLELINCQLTEKGLKVEKASAAVIDATIIQTAGSKQRQAIEVDEEGQISGQTTPSKDSDARWIKKNGLYKLGYKQHTRTDGEGYIEKLHITPANTHECNHLSPLLEGIAEDTTVYADKGYDSKENRQHLKEHRLLDGIMRKAQRNRPLTEAQTKRNRYLSKTRYVVEQSFGTLHRKFRYARAAYFGLIKVSAQSHLKAMCLNLLKAANRLSVPVAA

SEQ ID NO: 14612 - protein, 130 aa, Neisseria meningitidis; identical to SEQ ID NO: 1661

SEQ ID NO: 14613 - protein, 74 aa, Neisseria meningitidis; identical to SEQ ID NO: 3004

SEQ ID NO: 14614 - protein, 129 aa, Neisseria meningitidis
LKAGSRLFAESGKTQTVRNIVVKPTPLKAYNLTVADWHTYFVKGNQAETEGVWVHNSCPPKRTGSSKNEKHGDGGRSQISAESKIAELTNKIIPGMSKNERLKIKQKIKNIAKNANRKTKGEEHGRRGR

SEQ ID NO: 14615 - protein, 422 aa, Neisseria meningitidis
VKPLRRLTNLLAACAVAAAAFGQPALAADLAQDPFITDNAQRQHYEPGGKYHLFGDPRGSVSDRTGKINVIQDYTHQMGNLLIQQAAIQGNLGYTVRFSGHGHEEHAPFDNHAADSASKEQGNVDEGFTVYRLNWEGHEHHPADAYDGPKGGNYPKPTGARDEYTYHVNGTARSIKLNPTDTRDVRQRISDNYSNLGSNFSDRADEANRKMFEHNAKLDRWGNSMEFINGVAAGALNPFISAGEAVDQWMQENPNAAETVEALVNVLPFAKVKNLTKAAKPGKAAVSGDFSDSYKHNTASRLSQSVDGEMFQTRNVDFKAKSIGTKIHDGAQGKHISGHRNYIEGKSTLNQNINPQELLNGIHSGAYPVISKGARGNPVVDFGYPIGSDGKSGLSTNFGTIHSGKNGVHIVPANPKTIKKVQ

SEQ ID NO: 14616 - protein, 222 aa, Neisseria meningitidis
LPSASDGILSHWERQTAIMKTSNFSKRTSAMKTFALILADGQASRMGGEDKGLALLGGKALIDHVIDRVRPQVSHIAISTNRNLEEYARRSPHIFPDARQWQHFGPLSALCTAANDLQLATADWLLVVPCDMPYLPDDLVARFETVSKRTPLCNAYYVETPITMHYNIMYIRPQILQSAIPYLFSGMKTLRSWLQQQRARSVRFEFDGHFADLNTQTDLQEG

SEQ ID NO: 14617 - protein, 113 aa, Neisseria meningitidis
MPKITVLPHTTLCPEGAVIDDAPEGKTVLDVLLDHDIEVDHACEKSCACTTCHVIIRKGFDSLEEPTELEEDLLDQAWGLEADSRLSCQAVVAGEDLIVEIPKYTINHAREEH

SEQ ID NO: 14618 - protein, 280 aa, Neisseria meningitidis; identical to SEQ ID NO: 5019

SEQ ID NO: 14619 - protein, 801 aa, Neisseria meningitidis
MNTKLTKIISGLFVATAAFQTASAGNITDIKVSSLPNKQKIVKVSFDKEIVNPTGFVTSSPARIALDFEQTGISMDQQVLEYADPLLSKISAAQNSSRARLVLNLNKPGQYNTEVRGNKVWIFINESDDTVSAPARPAVKAAPAAPAKQQAAAPSTKSAVSVSEPFTPAKQQAAAPFTESVVSVSAPFSPAKQQAAASAKQQTAAPAKQQAAAPAKQQAAAPAKQQAAAPAKQQAAAPAKQQAAAPAKQQAAAPAKQTNIDFRKDGKNAGIIELAALGFAGQPDISQQHDHIIVTLKNHTLPTTLQRSLDVADFKTPVQKVTLKRLNNDTQLIITTAGNWELVNKSAAPGYFTFQVLPKKQNLESGGVNNAPKTFTGRKISLDFQDVEIRTILQILAKESGMNIVASDSVNGKMTLSLKDVPWDQALDLVMQARNLDMRQQGNIVNIAPRDELLAKDKAFLQAEKDIADLGALYSQNFQLKYKNVEEFRSILRLDNADTTGNRNTLVSGRGSVLIDPATNTLIVTDTRSVIEKFRKLIDELDVPAQQVMIEARIVEAADGFSRDLGVKFGATGKKKLKNDTSAFGWGVNSGFGGDDKWGAETKINLPITAAANSISLVRAISSGALNLELSASESLSKTKTLANPRVLTQNRKEAKIESGYEIPFTVTSIANGGSSTNTELKKAVLGLTVTPNITPDGQIIMTVKINKDSPAQCASGNQTILCISTKNLNTQAMVENGGTLIVGGIYEEDNGNTLTKVPLLGDIPVIGNLFKTRGKKTDRRELLIFITPRIMGTAGNSLRY

SEQ ID NO: 14620 - protein, 197 aa, Neisseria meningitidis
MTTLQERVAAHFAESIRAKQEAEKVLVEPTVQAAELMLQCLMNDGKILACGNGGSAADAQHFAAEMTGRFEKERMELAAVALTTDTSALTAIGNDYGFDHIFSKQVRALGRAGDVLVGISTSGNSANVIEAIKAAHERDMHVIALTGRDGGKIAAILKDTDVLLNVPHPRTARIQENHILLIHAICDCIDSVLLEGM

SEQ ID NO: 14621 - protein, 513 aa, Neisseria meningitidis
LASVNVPGKFDRVEVYDDGRYLGIRGSDDKRRRIWKGVFDRESGRYLTSEAQDLKVRHVSTGASSTGKVSSVVSSSVSRAGVLAGVGKLVRLGAKFSTRAVPYVGTALLAHDVYETFKEDIQARGYQYDPETDKFVKGYEYSNCLWYEDERSINRTYGCYGVDSSIMRLMSDDSRFPEVKELMESQMYRLARPFWNWHKEELNKLSSLDWNNFVLNSCTFSWNGGDCVVNKGDDYRNGANFSLIRNPKYKEEMDAKKLEEILSLKVDANPDKYIKATGYPGYSEKVEVAPGTKVNMGPVTDRNGNPVQVVATFGRDSQGNTTVDVQVIPRPDLTPGSAEAPNAQPLPEVSPAENPANNPAPNENPGTRPNPEPDPDLNPDANPDTDGQPGTSPDSPAVPDRPNGRDGKDGGLLCKFFPDILACDRLPEPNPAEDLNLPSETVNVEFKKSGIFQDSAQCPAPVTFTITVLDSSKQFAFSFENACTIAERLRYMLLALAWAVAAFFCIRTVSREV

SEQ ID NO: 14622 - protein, 119 aa, Neisseria meningitidis; identical to SEQ ID NO: 3183

SEQ ID NO: 14623 - protein, 58 aa, Neisseria meningitidis
  misc_feature 58: 'Xaa' is any amino acid
MNTLQKGFTLIELMIVIAIVGILAAVALPAYQDYTARAQVSEAILLAEGQKSAVTEYX

SEQ ID NO: 14624 - protein, 192 aa, Neisseria meningitidis
MNILLLDGGKAFGHSHGGLNRTLHKKAKEVLTALGHNVQETVIDAGYDVEAEIEKFVWMDAVIWQMPGWWMHEPWTVKKYIDEVLTAGHGKLYQSDGRHSVNPTEGYGTGGLLQGKKHMLSLTWNAPIEAFTREGDFFEGKGVDVLYMHFHKANEFLGMTRLPTFLCNDVVKNPQVEKYLADYQAHLEKVFG

SEQ ID NO: 14625 - protein, 496 aa, Neisseria meningitidis
LSGLPIPKDIARPPETILVNITPQETRVAVLEENNICELHIERNSEHSLVGNIYLGVVRRVLPGMQSAFIDIGLERAAFLHIVDVLEQRRNPEETQRIEHMLFEGQSVLVQVIKDPINTKGARLSTQISLAGRFLVHLPQEDHIGVSQRIEDDAERSSLRERLDKLLPENACRGYIIRTNAENATDEQLQSDIDYLTKVWEHIQEQAKIRPPETLLYQDLPLSLRVLRDMVGCDTQKILVDSTVNHGRMTRFAEQYVHGALGRIELFKGERPLFETHNVEQEISRALQPRVNLNFGSYLIIESTEAMTTIDVNTGGFVGARNFDETIFRTNLEACHTIARELRLRNLGGIIIIDFIDMAQESHREAVLQELAKALAFDRTRVTLHGFTSLGLVELTRKRSRENLNQVLCEPCPSCQGRGRLKTPQTVCYEIQREIVREARRYDAESFRILAAPNVIDLFLDEESQSLAMLIDFIGKPISLAVETAYTQEQYDIVLM

SEQ ID NO: 14626 - protein, 630 aa, Neisseria meningitidis; identical to SEQ ID NO: 5130

SEQ ID NO: 14627 - protein, 421 aa, Neisseria meningitidis
MSEALAKETLNPFEIARKQVKTACDQLKTDPAVYEILKSPTRVLEVNFPVKLDDGTVKTFTGYRSQHNNAVGPYKGGVRFHPGVNLDEVKALSIWMTIKCCVAGIPYGGGKGGVTLDPRDYSEAELERIARAYSEAISPLIGEKIDIPAPDVNTNGKIMSWMVDAYENVVKHSAPGVFTGKPVEFGGSLARTEATGYGVNLAAVQALEKLGKDVKGATYAIQGFGNVGYHTGYYAHQSGAKVVAVSTVDVAIYNENGLDMEALFKEFQEKGFITNEAGYGKEITNAELLALDVDVLAPCALENQLTSENAGKVRAKIVVEGANGPTTPEADVILRQNGVLVVPDILANCGGVVVSYFEWVQNLQGYYWEFDEVQEKETVVLRRAFRDIWNLAQEYDVDLRTASYMMSIRRVEKAMKLRGWY

SEQ ID NO: 14628 - protein, 228 aa, Neisseria meningitidis
MRWILSFSSKKTDKKQHTDLESIGEYALFLLIIVCILNRKFVMPTAFAYNARIPNSDTDAVQTYRKPSYGKRDIMQGNQAVVDYMNELLSGELAARDQYFIHSRLYSEWGYTKLFERLNHEMEEETTHAEDFIRRILMLGGTPKMARAELNIGTDVVSCLKADLQTEYEVRDALKKGIKLCEEAQDYVSRDLMVAQLKDTEEDHAHWLEQQLRLIELIGEGNYYQSQL

SEQ ID NO: 14629 - protein, 233 aa, Neisseria meningitidis
MTEPAAEGGKAAKALKKYLITGILVWLPIAVTVWVVSYIVSASDQLVNLLPKQWRPQYVLGFNIPGLGVIVAIAVLFVTGLFAANVLGRQILAAWDSLLGRIPVVKSIYSSVKKVSESLLSDSSRSFKTPVLVPFPQSGIWTIAFVSGQVSNAVKAALPKDGDYLSVYVPTTPNPTGGYYIMVKKSDVRELDMSVDEALKYVISLGMVIPDDLPVKTLAGPMPPEKADLPEQQ

SEQ ID NO: 14630 - protein, 198 aa, Neisseria meningitidis
MRKQNTLTGIPTSDGQRGFALFIVLMVMIVVAFLVVTAAQSYNTEQRISANESDRKLALSLAEAALREGELQVLDLEYDTDSKVTFSENCGKGLCTAVNVRTNNTGNEEAFDNIVVQGNPTVEAVKRFCPANSTDLCIDKKGMEYKKGTRSVSKMPRYIIEYLGVKNGENVYRVTAKAWGKNANTVVVLQSYVSNNDE

SEQ ID NO: 14631 - protein, 166 aa, Neisseria meningitidis; identical to SEQ ID NO: 1704

SEQ ID NO: 14632 - protein, 84 aa, Neisseria meningitidis; identical to SEQ ID NO: 3171

SEQ ID NO: 14633 - protein, 83 aa, Neisseria meningitidis
LIRTALLAVAAAGIYACQPQSEAAVQVKAENSLTAMRLAVADKQAEIDGLNAQIDAEIRQREAEELKDYRWIHGDAEVPELEK

SEQ ID NO: 14634 - protein, 114 aa, Neisseria meningitidis; identical to SEQ ID NO: 402

SEQ ID NO: 14635 - protein, 488 aa, Neisseria meningitidis
MAEATDVVLVGGGIMSATLGVLLKELEPSWEITLIERLEDVALESSNAWNNAGTGHSALCELNYAPLGANGIIDPARALNIAEQFHVSRQFWATLVAEGKLEDNSFINAVPHMSLVMNEDHCSYLQKRYDAFKTQKLFENMEFSTDRNKISDWAPLMMRGRDENQPVAANYSAEGTDVDFGRLTRQMVKYLQGKGVKTEFNRHVEDIKRESDGAWVLKTADTRNPDGQLTLRTRFLFLGAGGGALTLLQKSGIPEGKGYGGFPVSGLFFRNSNPETAEQHNAKVYGQASVGAPPMSVPHLDTRNVDGKRHLMFGPYAGFRSNFLKQGSLMDLPLSIHMDNLYPMLCAGWANMPLTKYLLGELRKTKEERFASLLEYYPEANPDDWELITAGQRVQIIKKDSEKGGVLQFGTEIVAHADGSLAALLGASPGASTAVPLMIRLMHQCFPERAPSWEGRLKELVPGYGIKLNENPERADEIIAYTAKVLDI

SEQ ID NO: 14636 - protein, 283 aa, Neisseria meningitidis
MARHVWQAGRFEIGLDKPKIMGIVNLTPDSFSDGGAYSQNARTALAHAERLLKEGADILDIGGESTRPGADYVSSEEEWARVEPVLVEVAGWGVPVSLDTRRTVVMEKALALGGIDIINDVAALTDEGAVELLARQADTGICLMHMQGLPENMQINPKYQDVVGEVARYLKTRSEACVAAGIAPQRITLDPGFGFGKTLQHNIALMRHLPELMAETGFPLLIGVSRKRMIGELTGETDAAARVHGSVAAALASVARGAQIVRVHDVKATADALKAWEALGINL

SEQ ID NO: 14637 - protein, 463 aa, Neisseria meningitidis; identical to SEQ ID NO: 6311

SEQ ID NO: 14638 - protein, 254 aa, Neisseria meningitidis
MSYTQLTQGERYHIQYLSRHCTVTEIAKQLNRHKSTISREIRRHRTQGQQYSAEKAQRQSQTIKQRKRQPYKLDSQLIQHIDTLIRRKLSPEQVCAYLCKHHQITLHHSTIYRYLRQDKSNGSTLWQHLRICSKPYRKRYGSTWTRGKVPNRVGIENRPAIVDQKSRIGDWEADTIVGKGQKSALLTLVERVTRYTIICKLDSLKAEDTARAAVRTLKAHKDRVHTITMDNGKEFYQHTKITKALKAETYFCRP

SEQ ID NO: 14639 - protein, 183 aa, Neisseria meningitidis; identical to SEQ ID NO: 1316

SEQ ID NO: 14640 - protein, 161 aa, Neisseria meningitidis; identical to SEQ ID NO: 7269

SEQ ID NO: 14641 - protein, 548 aa, Neisseria meningitidis
MKHLHDLPAWSKLWNHFDDSKTLHMREMFEQDPQRAERYWLQVGGLTLDYSKNRINDETMSLLFELAREAGVPERMRQMFHGEKINTTENRAVLHVALRNRTNSPIVVDGEDVMPKVNRVLQRMGEFAHEVRSGSWLGYTNQVITDVVNIGIGGSDLGPLMMCTALKPFGHPRLNMHFVSNVDGSQLRDVLSKVHPETTLFIIASKTFTTQETLTNALTAREWFLNHAGDEEAVAKHFAAVSTNQKAVAEFGIDTANMFEFWDWVGGRYSLWSAIGLPIMLYLGEENFIEMLNGAHLMDQHFINTPLERNLPVILALIGIWYINYYGGGSHVIAPYDQHLHRLPKFIQQLDMESNGKQVTLDGKAVGHETSPIIWGETGINGQHAFFQLLHQGTHITPIDLIASLEKRSNLPGHHEILLANVFAQAEAFMRGKTPDEVRAELKAQGMDEARIEELVPHKTFSGNRPTNLILMDKVNPRNMGSLIVMYEHKTFVQGIIWGINSFDQWGVELGKQLAKTILGELTGETGPQKHDSSTERLINLYLQTNRK

SEQ ID NO: 14642 - protein, 321 aa, Neisseria meningitidis; identical to SEQ ID NO: 6981

SEQ ID NO: 14643 - protein, 208 aa, Neisseria meningitidis
MTQEHFPSFFNQAPTITVRDPLAAFLGAAQDGILTYRYADAVRLCGHSCPTVAGAYLMVIKGLKALYGEELPERGGIEAAMQGGRDEGTTGVTASVVQLLTGAAPETGFGGIGIQGRFARRNLLSFGAGEINGTLTLRRKDNGKTVAVSINAALQPFAPQMRELMPKAVGGSASAEELERFGQLWQARVKAFLTESADDPQFVIVREV

SEQ ID NO: 14644 - protein, 426 aa, Neisseria meningitidis; identical to SEQ ID NO: 13250

SEQ ID NO: 14645 - protein, 170 aa, Neisseria meningitidis; identical to SEQ ID NO: 1571

SEQ ID NO: 14646 - protein, 344 aa, Neisseria meningitidis; identical to SEQ ID NO: 7515

SEQ ID NO: 14647 - protein, 513 aa, Neisseria meningitidis
MTEIQQRAQLHRQIWKIADEVRGAVDGWDFKQYVLGTLFYRFISENFTDYMQAGDSSIDYAAMPDSIITPEIKDDAVKVKGYFIYPGQLFCNVAAKAHQNEELNTNLKEIFTAIESSASGYPSEQDIKGLFDDFDTTSSRLGSTVADKNKRLAAVLKGVAELDFGSFEDHHIDLFGDAYEYLISNYAANAGKSGGEFFTPQSVSKLIARLAVHGQEKVNKIYDPACGSGSLLLQAKKQFDEHIIEEGFFGQEINHTTYNLARMNMFLHNVNYNQFHIELGDTLTNPKLKDSKPFDAIVSNPPYSINWIGSDDPTLINDDRFAPAGVLAPKSKADFAFILHALNYLSGRGRAAIVSFPGIFYRGGAEQKIRQYLVEGNYVETVIALAPNLFYGTGIAVNILVLSKHKDNTDIQFIDASGFFKKETNNNVLTEEHIADIVKLFADKADVPHIAQNAAQQTVKDNGYNLAVSSYVEPEDTREIIDIKQLNAEIGETVAKIERLRREIDEVIAEIEA

SEQ ID NO: 14648 - protein, 321 aa, Neisseria meningitidis
MSYTQLTQGERYHIQYLSRHCTVTEIAKQLNRHKSTISREIRRHRTQGQQYSAEKAQRQSRTIKQRKRQPYKLDSQLIQHIDTLIRRKLSPEQVCAYLRKHHRITLHHSTIYRYLRQDKSNGSTLWQHLRICSKPYRKRYGSTWTRGKVPNRVGIENRPAIVDQKSRIGDWEADTIVGKGQKSALLTLVERVTRYTIICKLDSLKAEDTARAAVRTLKAHKDRVHTITMDNGKEFYQHTKITKALKAETYFCRPYHSWEKGLNENTNGLIRQYFPKQTDFRNISDREIRRVQDELNHRPRKTLGYETPSVLFLNLFQPLIH

SEQ ID NO: 14649 - protein, 123 aa, Neisseria meningitidis; identical to SEQ ID NO: 5008

SEQ ID NO: 14650 - protein, 766 aa, Neisseria meningitidis; identical to SEQ ID NO: 6920

SEQ ID NO: 14651 - protein, 288 aa, Neisseria meningitidis; identical to SEQ ID NO: 2832

SEQ ID NO: 14652 - protein, 356 aa, Neisseria meningitidis; identical to SEQ ID NO: 4732

SEQ ID NO: 14653 - protein, 360 aa, Neisseria meningitidis; identical to SEQ ID NO: 2503

SEQ ID NO: 14654 - protein, 117 aa, Neisseria meningitidis; identical to SEQ ID NO: 5140

SEQ ID NO: 14655 - protein, 233 aa, Neisseria meningitidis; identical to SEQ ID NO: 6431

SEQ ID NO: 14656 - protein, 236 aa, Neisseria meningitidis; identical to SEQ ID NO: 8610

SEQ ID NO: 14657 - protein, 259 aa, Neisseria meningitidis; identical to SEQ ID NO: 588

SEQ ID NO: 14658 - protein, 183 aa, Neisseria meningitidis
MEFLSLYPWWSFFIILTIILSYIGFCAHLHIQNRAVFFYSYRDVTIIFLTPVILIALSYLIKNKEILSVCILCITLIAFSWAWIITYRSNTKRFFLSLLIVCGKLLLSTIVWAILAISLGLAVITGNSKRKKYERRDRHAERNEKAFIGALLVGFELSRNLLNLCCLHKDFSTPSKNIEVNRS

SEQ ID NO: 14659 - protein, 107 aa, Neisseria meningitidis; identical to SEQ ID NO: 875

SEQ ID NO: 14660 - protein, 220 aa, Neisseria meningitidis; identical to SEQ ID NO: 5269

SEQ ID NO: 14661 - protein, 144 aa, Neisseria meningitidis
MRRALIAKIKIAQKELGLDDGTYRAVLERVTGKRSCADMDVSELESVVADMRSHGFKPKAKGNPHGKPHLRRTSSAAMLDKVEALLTVGGKHWNYAHAMARRMFGKDKVEYLDDTQLHKLVAALQIAENRKTEKASGDDGVRKS

SEQ ID NO: 14662 - protein, 87 aa, Neisseria meningitidis; identical to SEQ ID NO: 932

SEQ ID NO: 14663 - protein, 525 aa, Neisseria meningitidis
MRANPKTQAMPSETISLMKTRSLISLLCLLLCSCSSWLPPLEERTESRHFNTSKPVRLDNILQIRHTPHTNGLSDIYLLNDPHEAFAARAALIESAEHSLDLQYYIWRNDISGRLLFNLMYLAAERGVRVRLLLDDNNTRGLDDLLLALDSHPNIEVRLFNPFVLRKWRALGYLTDFPRLNRRMHNKSFTADNRATILGGRNIGDEYFKVGEDTVFADLDILATGSVVGEVSHDFDRYWASHSAHNATRIIRSGNIGKGLQALGYNDETSRHALLRYRETVEQSPLYQKIQAGRIDWQSVQTRLISDDPAKGLDRDRRKPPIAGRLQDALKQPEKSVYLVSPYFVPTKSGTDALAKLVQDGIDVTVLTNSLQATDVAAVHSGYVKYRKPLLKAGIKLYELQPNHAVPATKDKGLTGSSVTSLHAKTFIVDGKRIFIGSFNLDPRSARLNTEMGVVIESPKIAEQMERTLADTTPEYAYRVTLDRHNRLQWHDPATRKTYPNEPEAKLWKRIAAKILSLLPIESLL

SEQ ID NO: 14664 - protein, 214 aa, Neisseria meningitidis
  misc_feature 209, 210: 'Xaa' is any amino acid
MNTRTEHDTMGNVEVPSEAYWGAQTQRSRNNFKIGGETLPQPLIYALALVKKAAAATNVSLGRIKPEQADLITQAADDVLNGRLDGQFPLVVWQTGSGTQSNMNMNEVLANRANEIAGTGLAAYQPVHPNDHVNHAQSTNDAFPTAIHVAAAIEINRHLIPAVKALRDTLDKKAQAFAPIVKIGRTHLQDATPLTLGQEFSGYVSQLDXXHTLN

SEQ ID NO: 14665 - protein, 242 aa, Neisseria meningitidis
MWDNAEAMERLTRWLLVMMAMLLAASGLVWFYNSNHLPVKQVSLKGNLVYSDKKTLGSLAKEYIHGNILRTDINGAQEAYRRYPWIASVMVRRRFPDTVEVVLTERKPVARWGDHALVDGEGNVFEARLDRPGMPVFRGAEGTSAEMLRRYDEFSTVLAKQGLGIKEMTYTARSAWIVVLDNGITVRLGRENEMKRLRLFTEAWQHLLRKNKNRLSYVDMRYKDGFSVRYAYDGLPEKESEE

SEQ ID NO: 14666 - protein, 104 aa, Neisseria meningitidis; identical to SEQ ID NO: 2048

SEQ ID NO: 14667 - protein, 381 aa, Neisseria meningitidis
MEYKEFNENYLYKKPFIFKNALDVSSISWKEINELYQRADPTDWQFKFRKGEIIPKEAYVESFNDVGRIRHRFNKTAVYQYLQDGATMVYNRIDNEPFVDSIAKQIAQFAQAQTVVSGYLAFGSSPSYRNHWDTRDVFAVQLIGKKHWTVSAPNFDMPLYMQQAKDMPHITPPTTVDMEVILEAGDILYIPRGWWHNPMPMNCETFHLAIGTFPPNGYNYMEWLMKKIPDIQSIRQNFIDWEHDQKNIDNAAQAVTEMMKNQENYQAFIQDFLGNQRVNTAFNMQIFGNLDNDRLPENSTIKLNSLDNRTIKQGYIIANGIKTNLDNDSQTILQWIADKHSVKLTQLYEFCQNQNINLEKVEKLVFDLTMIDVLECLTDER

SEQ ID NO: 14668 - protein, 160 aa, Neisseria meningitidis; identical to SEQ ID NO: 515

SEQ ID NO: 14669 - protein, 127 aa, Neisseria meningitidis; identical to SEQ ID NO: 2622

SEQ ID NO: 14670 - protein, 306 aa, Neisseria meningitidis; identical to SEQ ID NO: 1708

SEQ ID NO: 14671 - protein, 63 aa, Neisseria meningitidis; identical to SEQ ID NO: 980

SEQ ID NO: 14672 - protein, 131 aa, Neisseria meningitidis; identical to SEQ ID NO: 5580

SEQ ID NO: 14673 - protein, 305 aa, Neisseria meningitidis
MNVSVLNFGNTPVSFRQDGFLNATAIASHFGKLPKDYLKSEQTQQYISALAENLSVRRKILTEANQIVIVKRGGSEQGTWLHPKLAIHFARWLNPKFAVWCDEQIEILLNGKISDGIKTVTPKPTRALPDGLTGEQIEAVKKLHNALTKSAPKEAQARIAITLWSAVKSKFGCSYKEVPAEQFPEVLSVMGRVAVENGVLYGEVLDREPLPAPQPALPISGNALYDLAVAVRYGAWAIQMGRDVSLPLKQLGCKQAVTMWTVWAETRSRLKAAANALEALNAHADAEHAAKIRPMLPEIRNLSSV

SEQ ID NO: 14674 - protein, 812 aa, Neisseria meningitidis
MIEKSHKKTAKGRAGSPSPTSARNKKADNGARGNKVSERLKAVKELQKTETKKARPEHVVNLIGDALWLMGLAATLYLAISLISFDMGDPSWSHSSPVVEDVANWGGLFGAYVADVGYYLFGWSFWWWIAAACVMLYKNFRLHAKQTENEAYNHKIAAAALFVLTVFSPVLEYFVLGGKYADSLPVGAGGMVGIRVGAVFAWLLGKSGSLLIILVVLLLSLSLLVQISWLEFLNGAGRAVQNRLSALSGKVMALGKRRPNTKTDGVDTQNTRRMVKEAKNITAKPVALPEGSSSNRKSVAVSVAPPPKIQVSLFEDDEPRQAGEYHKPTLNLLRIPDSEPVSINPAELERTAELIESKLAEFGIGVQVVSATSGPVITRYEIEPAQGVKGSQIVALSKDLARSMSLQSVRIVETIAGKNTMGIELPNDKRQDVMLSEILSSPVFAGAKSKLTVALGKDIAGTPVVGDLAKMPHLLVAGMTGSGKSVGVNGMIMSMLFKATPDEVRFIMIDPKMLELSIYDGIPHLLCPVVTDMREAGQALNWCVAEMEKRYRLLSHAGVRNLEGFNQKVEAAKAAGKPLLNPFSLNPDEPEPLEKLPLIVVVIDELADLMMTERKAVEQQIARLAQKARAAGIHMIVATQRPSVDVVTGLIKANIPTRMAFTVQSKIDSRTILDQMGADELLKYGDSLFLQPGSAEPTRLQGAFVSDDEVHQVVNYVKSQAPADYIEGLLSGEAALETANIVNPNADSDELFDQAVAYVLESKKTSISSLQRQLRIGYNRAANLMEALENAGVVSSTDLNGSRKILAHKDHL

SEQ ID NO: 14675 - protein, 137 aa, Neisseria meningitidis
MIPSYTYAALAFSAFTSATLLPGTSEAAFALFVHRFPEHAYGALLCAGLANGLGSMVSYWMGRLLPSRKMPSEKTLNLMRRFGIWLLAFAWLPVVGDALPLAAGWLRLNPWTSGLMLVIGKTARYAFILWGMQYYAA

SEQ ID NO: 14676 - protein, 131 aa, Neisseria meningitidis
MPSDVGMRLQTAFKRKLNMKKILYFLMFVFSTSVWAGDAEDNLLSIQSGYRALLQKQNNLDGKIIGMQSDLEDALRRLQTAQADIARLEAEIPAAMAQKARQAEELRQIGVRLDHAWNAVYGAGGTKASGN

SEQ ID NO: 14677 - protein, 162 aa, Neisseria meningitidis
VRLRAVLNNGNIGSRTMDVKYEFTLPSSSGADFHSAEHLPLVVYFYPKDSTPGCTTEGLDFNARLEQFEALGYTVVGISRDGVKAHQNFCAKQGFRFELLSDKDETVCRLFDVIKLKKLYGKESLGIERSTFVLNKDGEIAHEWRKVKVAGHAQEVLETLSR

SEQ ID NO: 14678 - protein, 587 aa, Neisseria meningitidis
MGFPVRKFDAVIVGGGGAGLRAALQLSKSGLNCAVLSKVFPTRSHTVAAQGGISASLGNVQEDRWDWHMYDTVKGSDWLGDQDAIEFMCRAAPEAVIELEHMGMPFDRVESGKIYQRPFGGHTAEHGKRAVERACAVADRTGHAMLHTLYQQNVRANTQFFVEWTAQDLIRDENGDVVGVTAMEMETGEVYIFHAKAVMFATGGGGRIYASSTNAYMNTGDGLGICARAGIPLEDMEFWQFHPTGVAGAGVLITEGVRGEGGILLNADGERFMERYAPTVKDLASRDVVSRAMAMEIYEGRGCGKNKDHVLLKIDHIGAEKIMEKLPGIREISIQFAGIDPIKDPIPVVPTTHYMMGGIPTNYHGEVVVPQGDEYEVPVKGLYAAGECACASVHGANRLGTNSLLDLVVFGKAAGDSMIKFIKEQSDWKPLPADAGELTRQRIERLDNQTDGENVDALRRELQRSVQLHAGVFRTDEILSKGVREVMAIAERVKRTEIKDKSKVWNTARIEALELDNLIEVAKATLVSAEARKESRGAHASDDHPERDDENWMKHTLYHSDANTLSYKPVHTKPLSVEYIKPAKRVY

SEQ ID NO: 14679 - protein, 230 aa, Neisseria meningitidis
VQADLAYAAERITHDYPQATGANNTSTVSDYFRNIRAHSIHPRVSVGYDFGGWRIAADYASYRKWNNNKYSVNTKEVERNNTSGNWKELKTENQENGSFHAASSLGLSAIYDFKLNDKFDKFKPYIGVRVAYGHVKHQVHSVKKETTTTFLAPTGDAKVPGKIVEGPFSKPAYHESHSTSSLGLGVIAGVGFDITPKLTLDTGYRYHNWGRLENTRFKTHEVSLGMRYHF

SEQ ID NO: 14680 - protein, 326 aa, Neisseria meningitidis
VQPGLWASDGIFSEWRHSCRRRGSRMGKGGDIVVGNGKKYAAPLLVLGCVVFGLGSLIVRSVPVGSYAIAFWRLLISVFVFWFLARFFRQKFPKNRKTVRYALTAGVFLSFDLALWHESIHAVGPGISTLLNSLQIFFLSAIGVFFFGERLSGLKKAGLISAVAGVAMIAGAEFGYNGNAVWGFVSGLVSGLMLALSMVFVRKTHEIETVALFPSMMILSLGGAVSLVVPALLMDGGALYPTTWKDAGLVLVYGVVMQCFAWAMVAYAIPLLSLSLTGLLLLSEPVAALFIDYFGLGKPIEGVQWAGVALTLSAIYLGSLKQQSEP

SEQ ID NO: 14681 - protein, 233 aa, Neisseria meningitidis; identical to SEQ ID NO: 3223

SEQ ID NO: 14682 - protein, 67 aa, Neisseria meningitidis; identical to SEQ ID NO: 6237

SEQ ID NO: 14683 - protein, 576 aa, Neisseria meningitidis
MCNAPADNFKETAMSASQLLSRLTQTVGEKYIITDPAKTEQYRQGYRFGEGKALAVVRPGSILEMWKILQACVEADVIVITQAANTGLTGGSTPDGNDYDRDIVIVNTMRMNIIQTINDNEQVVCLPGSTLNQLELLLKPLGREPHSVIGSSCIGASVLGGVCNNSGGALVQRGPAYTEMALFAQINEEGRLELVNHLGIDLGDTPEEILTNLQGHHYQNKDIKQDAGKGHDHAYCEHVRQVDEPTAARFNADPARHYEASGCAGKLMVFAVRLDTFPQEKQTAVFYIGTNDINELTDIRRAALGEFESLPVSGEYIHRHAFDIADVYGKDTFYVIKKFGTHQLPKLFDLKARVDRFGKKASFLPKHFSDKVMQFVSKFLPDHLPKSMRDYRNKYEHHLILKMGGKGVDEARAFLKEYFSHHGGAFFECNAEETQAAMLHRFAVASAAIRYRAVHDDEVEDLVALDIALRRDDRDWFEKLPSEIDNKIIHKLYYGHFMCHVFHQDYIIKKGNDCMALEHEMLHLLDQRGAQYPAEHNVGHLYEAKPALKQFYRKLDPTNSFNPGVGKTSKKKNWAE

SEQ ID NO: 14684 - protein, 119 aa, Neisseria meningitidis; identical to SEQ ID NO: 1252

SEQ ID NO: 14685 - protein, 333 aa, Neisseria meningitidis
MIDRQTNEPKQKTRIILAPMQGLVDDVMRDLLTRIGGYDECVSEFVRITHTVHSRSIWLKYVPEIANGNKTFSGTPCTVQLLGSDADNMAANALEAVRFGANKIDLNFGCPAPTVNKHKGGAILLKEPELIFHIVKTLRERLPAHIPLTAKMRLGYEDKSRALECACAIAEGGACGLTVHARTKAEAYEPPAHWEWIRKIRDTVNIPVTANGDVFSLQDYIGIKTISGCNSVMLGRGAVIRPDLARQIKQYENGGPVKDTDFAEVSKWIRQFFELCLTKEANNKYPLARLKQWLGMMKKEFAAAQNLFDRVRTVKDADEVRNILAEFEREMNT

SEQ ID NO: 14686 - protein, 179 aa, Neisseria meningitidis
  misc_feature 2, 3: 'Xaa' is any amino acid
VXXTSSDRRSNCAADGISFISLGTANRDSVGALKQMVEVYGRSGNSILGVETVEASQTGSYGIVETEQLKQFQRITGIVEKPKPEDAPSNLAVVGRYILTPRIFDLLTNLPRGAGNEIQLTDGIAKLLDHEFVLAHPFEGTRYDCGSKLGYLEATVAYGLKHPETGEPFRRLLEKYRTE

SEQ ID NO: 14687 - protein, 236 aa, Neisseria meningitidis; identical to SEQ ID NO: 2671

SEQ ID NO: 14688 - protein, 197 aa, Neisseria meningitidis
MKKIGLFGGTFDPIHNGHLHIARAFADEIGLDAVVFLPTGGPYHKDAASASAADRLAMVELATAEDARFAVSDCDIVREGATYTFDTVQIFRQQFPSAQLWWLMGSDSLMKLHTWKKWQMLVRETNIAVAMRQGDSLHQTPRELHAWLGNALQDGSIRILSAPMHNASSTEIRRAGVSDGIPPAAARYIREHGLYEK

SEQ ID NO: 14689 - protein, 149 aa, Neisseria meningitidis; identical to SEQ ID NO: 4552

SEQ ID NO: 14690 - protein, 234 aa, Neisseria meningitidis
MTSCEPVNEQTSFNNPEPMTGFEHTVTFDFQGTKMVIPYGYLARYTQDNATKWLSDTTGQDAYSINLIEISVYYKKTDQGWVLEPYNQQNKAHFIQFLRDGLDSVDDIVIRKDACHLNQDLGKSLLDLGFKKIPSVYPEYEAYEDKRSIPENPYIHELQYIKKGENPAIITHQNYHRYGENDYSTDIGSCINGFTVQYYPFIREKQQLTQQELVGYHQQVEQLVQSFVNNSSKK

SEQ ID NO: 14691 - protein, 266 aa, Neisseria meningitidis
MKKTIFNITKMDCPSEEQLIRMRLKDVSDIYELQFDIAGRCLTVYHDNQDTTILQVLEPLNFDSHIISTEVIVDKIVFNKPDEHLEKRLLYQVLMINFVFFIIECSVGIFANSMGLIADSLDMLADSFVYILALSAIGMTLAYKKRVAFLAGITQIILALFGVIEVIRRFIGAEQLPNYQLMIGTAFLALIANWLCLYLLSKNQNKEIHIKASMIFTYNDIIINIGVIAAGALTLLTHSSYPDLIIGMIVFVIVLFGARNILKLAK

SEQ ID NO: 14692 - protein, 203 aa, Neisseria meningitidis
VEYWEKRMSEKIILPVLSLGGVRLEPLDVHHETGLREAVCDGEVWKLGVTSAPHPDRVADYIGTALATRLAFAVVDEEAGRVVGTTAYYHFEPQIPRLDIGFTWYAASARRTRINTCCKIMLLDYAFDVLACRCVGWRTDILNLASQRAIERLGAEKDGVLRMHMLRKDGSVRDTVVYSMLREDWCKNREILTGRLAGYGVQV

SEQ ID NO: 14693 - protein, 60 aa, Neisseria meningitidis
MGVLREMAEKLGHKVLPLAPYSPELNPIEKVWANIKRYLQTVLSDYARFDDALLSYFDFN

SEQ ID NO: 14694 - protein, 238 aa, Neisseria meningitidis
MTDTAENQTQNNWQAEHPRSIRSFVLRQSHMTAAQQRAIDTLWGSFGIDYQATPADLDARFGSSRPKILEIGFGMGTATAEIARRLPETDFLAIDVHGPGVGNLLKLIEENHLENIRVMRHDAVEVVENMLQDGSLDGIHIFFPDPWHKKRHHKRRLIQAPFIAKLLPKLKTGGYIHLATDWEEYAQQMLEVLSSFDSLQNTAADYAPTPDYRPETKFEARGKRLGHGVWDLVFKRIG

SEQ ID NO: 14695 - protein, 220 aa, Neisseria meningitidis; identical to SEQ ID NO: 8978

SEQ ID NO: 14696 - protein, 213 aa, Neisseria meningitidis
MPSEKPMNRRTFLLGAGALLLTACGRKSARTHAKIPEGSTVLALGDSLTFGYGANPGESYPAQLQKLTGWNIVNGGVSGDTSAQALSRLPALLARKPKLVLVGIGGNDFLRKVPKEQTRANIAKIIETVQKENIPAVLVGVPHITLGALFGHLSDHPLYEDLSEEYGIPLFGGAWAEILGDNNLKSDQIHANGKGYRKFAEDLNQFLRKQGFR

SEQ ID NO: 14697 - protein, 120 aa, Neisseria meningitidis; identical to SEQ ID NO: 1496

SEQ ID NO: 14698 - protein, 480 aa, Neisseria meningitidis
VNYFPIFANLAGRPVLVVGGGAVAARKISLLLNAGAEVRVAAKHLNAELSALAAENKILWLAEEFRAEHIRTVFLIIAASSDQALNRRVFHLAESCQKPVNVVDDRDHCSFIFPSVIDRNPVQIAVSSSGSAPVLARLLRERLEALLPHSLGDMAEISGRWRDAVKAKLKSVTERRRFWEKQFNGRFAALVKNQQTAQAEQELAKQLEQNYQGGFVSLVGAGPGDAGLLTLKGLQEIQQADVVLYDALVSDGILSLVRRDAERIFVGKRARGDRTPQEDTNALMVRLAREGRRVVRLKGGDPFVFGRGGEELETLARHQIPFSVVPGITAAVGATAYAGIPLTHRDYAQSAVFVTGHRKADAPDIEWQTLARSRQTLVIYMGALKAALIAERLQQHGRSPDTPAAVISQGTLPAQKTATGTLANLAELAETAPNPALIVIGEVVGLHEKLAWFGENGEGENRVGQAYPALGGLNAGQRAA

SEQ ID NO: 14699 - protein, 111 aa, Neisseria meningitidis; identical to SEQ ID NO: 7069

SEQ ID NO: 14700 - protein, 520 aa, Neisseria meningitidis
LFEVMKKPLISVAAALLGVALGTPYYLGVKAEESLTQQQKILQEAGFLTVESHQYERGWFTSTETTVIRLKPELLNNARKYLPDNLKTVLEQPVTLVNHITHGPFAGGFGTQAYIETEFKYAPETEKVLERFFGKQVPVSLANTVYFNGSGKMEVSVPAFDYEELSGIRLHWEGLTGKTVYQKGFKSYRNSYDAPLFKIKLADKGDAAFEKAHFDSETSDGINPLALGSSNLTLEKFSLEWKEGVDYNVKLNELVNLVTDLQIGAFINPNGSIAPSKIEVGKLAFSTKTGESGAFINSEGQFRFDTLVYGDEKYGPLDIHIAAEHLDASALTVLKRKFAQISAKKMTEEQIRNDLIAAVKGEASGLFTNNPVLDIKTFRFTLPSGKIDVGGKIMFKDMKKEDLNQLGLMLKKTEADIRMSIPQKMLEDLAVSQAGNIFSVNAEDEAEGRASLDDINETLRLMVDSTVQSMAREKYLTLNGDQIDTAISLKNNQLKLNGKTLQNEPEPDFDEGGMVSEPQQ

SEQ ID NO: 14701 - protein, 96 aa, Neisseria meningitidis; identical to SEQ ID NO: 6081

SEQ ID NO: 14702 - protein, 290 aa, Neisseria meningitidis
VKGLDYCRQKAEESRSSFLSGFRFLTQEKRDAVTILYAFCRELDDVVDECSNPDVAQATLNWWRGDLDKVFGGAMPEHPVNQALRQVKETFKLPKYELEALIDGMQMDLVQARYGSFEELKLYCHRVAGVVGCLIARILGFSDGKTLQYADKMGLALQLTNIIRDVGEDARRGRIYLPMEEMQRFDVPASVILQCSPTGNFAELMAFQIKRARETYREAVSLLPAADKKAQKVGLVMAAVYYELLNEIDRDGAQNVLKYKIALPSPRKKRIALKTWLFGFKPRPGTPERA

SEQ ID NO: 14703 - protein, 518 aa, Neisseria meningitidis
MDFSWLAEPHTWIGFATLLVLEVVLGIDNLVFVAILANKVQPARRDRARIIGLGLAVVIRIIMLAFMAHIITLTEPLFQIGGLAVSGKDMIMLAGGIFLLYKATTELHERLEGHNRFTVADNQKKHAPFWGVVAQILILDAVFSIDSVITAVAMVDHIVVAMGAVVVAMAVMISASKLLTEFVDRHPTVVMLCLGFLLMIGFSLIAEAFHFHIPKGYLYAAIGFSILIELFNQISQRNSRKNDYIGSSWRKRTAENVLGMMGIRESVLADAGGESGDDAHFEENEKSMIRSVLTLAERPIMGVMIPRRDIERLDISQSREEQYAQLQNTPYSRLLVVGKAGVDEPLGYINKKDLLSQLLETGGLDIQTALRQPLVLPDSTTALGAIELFRQSSADYALVVDEFGAVLGMVTMKDLLETIAGEFPEEFEREEEPAVQGNPDESLTVEGALEYVELASQLNLPQQEEDADFHTVAGLIMEELQTIPDVGDFADFHGWRFEVVEKEGQRIERVKITKLPEE

SEQ ID NO: 14704 - protein, 491 aa, Neisseria meningitidis
MISKQEYQAQAAQDYNRIPLVQELLADLDTPLSLYLKLANRPYTYLLESVVGGERFGRYSFIGLPCSHYLKASGKHVDVYQNGEIVEQHDGNPLPFIEAFHNRFKTPEIPSLPRFTGGLVGYFGYETIYNFEHFAHRLKNTTKAAPLGTPDILLMLSQELAVIDNLSGKIHLVVYADPSQPDGYERARERLEDIRTQLRQSCAIPLSLGSKHTEAVSEFGEEPFKACVDKIKDYIFAGDCMQVVPSQRMSMEFTDSPLALYRALRTLNPSPYLFYYDFGDFHIVGSSPEILVRRERDDVIVRPIAGTRLRGKTPAEDLANEQDLLSDAKEIAEHVMLIDLGRNDVGRISKTGEVKVTDKMVIEKYSHVMHIVSNVEGRLKEGMTNMDILAATFPAGTLSGAPKVRAMEIIEEVEPGKRGIYGGAVGVWGFNNDMDLAIAIRTAVVKNNTLYVQSGAGVVADSDPESEWQETQNKARAVIHAAQMVQEGLDK

SEQ ID NO: 14705 - protein, 461 aa, Neisseria meningitidis; identical to SEQ ID NO: 7704

SEQ ID NO: 14706 - protein, 420 aa, Neisseria meningitidis
MSNTQKQLALAKAAKKSVNTADTEEKNRALFAMADSLEAATADILAANRQDLEAAAGNIPESMTDRLLLDGKRICAMADGIRAVAALPDPVGEILETSTLPNGLEIVKKRVAMGVIGIIYESRPNVTSDAAALALKSGSAVVLRSGKDAFQSARAIVAALKTGLAQTRIDPDALQLIEDTGREGSYEMMRAKDYLDLLIPRGGAGLIRAVVENAVVPVIETGTGIVHIYIDKDADWDKALRIVYNAKTSRPSVCNSMEVLLVHEDIAADFLPKLERLLVRDRIEAGLPPVRFRLDPQAARHIGGEAAGADDFDTEFLDYILAVKTVASVEEAVGHIETHGTHHSDGIVTENRHAADYFTTHIDSAAVYVNASTRFTDGGEFGLGCEMGISTQKLHARGPMGLKELTSYKYIVQGTGQVRE

SEQ ID NO: 14707 - protein, 156 aa, Neisseria meningitidis; identical to SEQ ID NO: 681

SEQ ID NO: 14708 - protein, 307 aa, Neisseria meningitidis
MQYSTLAGQTDNSLVSNNFGFLRLPLNFMPYESQADWVITGVPYDMAVSGRSGARFGPEAIRRASVNLAWEHRRFPWTFDVRERLNIIDCGDLVFSFGDSRDFVEKMEAHAGKLLSSGKRCLSLGGDHFITLPLLRAHARYFGKLALIHFDAHTDTYDNGSEYDHGTMFYTAPKEGLIDPSRSVQIGIRTEHSKKLPFTVLSAPKVNEDSVEETVRKIKETVGNMPVYLTFDIDCLDPSFAPGTGTPVCGGLSSDRALKILRGLTDLDIVGMDVVEVAPSYDQSDITALAGATIALEMLYLQGAKKD

SEQ ID NO: 14709 - protein, 237 aa, Neisseria meningitidis
MLFRKTTAAVLAATLMLNGCTAMMWGMNDPFSQTTAYKHVDKDQIRAFGVVAKDNAQLEKGSLVMMGGKYWFVVNPEDSAKLTGILKAGLDKQFQMVEPNPRFAYQALPVKLESPASQNFSTDDLCLRYDTDRPADIAKLKQLEFEAVELDNRTIYTRCVSAKGKYYATPQKLNADYHFEQSVPADIYYTVTKKHTDKSKLFENIAYTPTTLILDAAGAVLVLPMAALIAAANSSDK

SEQ ID NO: 14710 - protein, 500 aa, Neisseria meningitidis; identical to SEQ ID NO: 6991

SEQ ID NO: 14711 - protein, 235 aa, Neisseria meningitidis; identical to SEQ ID NO: 6978

SEQ ID NO: 14712 - protein, 55 aa, Neisseria meningitidis
VLFGRGGTLQTAYCRRYFGGCGPPEMYLLVLRYFVSNPHMENRLRFGIVPENRQD

SEQ ID NO: 14713 - protein, 321 aa, Neisseria meningitidis; identical to SEQ ID NO: 6981

SEQ ID NO: 14714 - protein, 79 aa, Neisseria meningitidis
MNVWDIWGRMVEIYHKYKKPCLVLAVDFVMGMVFIEPNEELCIGRCYAPMSESPDFANAVAMAVAMICIVWIAVLSMTD

SEQ ID NO: 14715 - protein, 66 aa, Neisseria meningitidis; identical to SEQ ID NO: 3561

SEQ ID NO: 14716 - protein, 274 aa, Neisseria meningitidis
LIQFRFSNTRNHLYMKTKLIKILTPFTVLPLLACGQTPVSNANAEPAAKAESAGKSVAASLKARLEKTYSAQDLKVLSVSETPVKGIYEVVVSGRQIIYTDAEGGYMFVGELINIDTRKNLTEERAADLNKIDFASLPLDKAIKEVRGNGKLKVAVFSDPDCPFCKRLEHEFEKMTDVTVYSFMMPIAGLHPDAARKAQILWCQPDRAKAWTDWMRKGKFPVGGSICDNPVAETTSLGEQFGFNGTPTLVFPNGRSQSGYSPMPQLEEIIRKNQ

SEQ ID NO: 14717 - protein, 177 aa, Neisseria meningitidis; identical to SEQ ID NO: 8138

SEQ ID NO: 14718 - protein, 37 aa, Neisseria meningitidis
LRGNADNGRQLYFEAQRSSMHTMRQTWQVNMGVRSMF

SEQ ID NO: 14719 - protein, 237 aa, Neisseria meningitidis; identical to SEQ ID NO: 6806

SEQ ID NO: 14720 - protein, 217 aa, Neisseria meningitidis
MKFKYVFLLACVAVSLSYRLNAAPMFNDNPVVYGKIKVQSWKERRDFNIVKQDLDFSCGAASVATLLNNFYGQTLTEEEVLKKLDKEQMRASFEDMRRIMPDLGFEAKGYALSFEQLAQLKIPVIVYLKYRKDDHFSVLRGIDGNTVLLADPSLGHVSMSRAQFLEAWQTREGNLAGKILAVVPKKAETISNKLFFTHHPKRQTEFAVEQIRQARAE

SEQ ID NO: 14721 - protein, 284 aa, Neisseria meningitidis; identical to SEQ ID NO: 6849

SEQ ID NO: 14722 - protein, 134 aa, Neisseria meningitidis
MNTTRLPTALILGCLCAAASAADNSIMTKGQKVYESNCVACHGKKGEGRGTMFPPLYRSDFIMKKPQVLLHSMVKGINGTIKVNGKTYNGFMPATAISDADIAAVATYIMNAFDNGGGSVTEKDVKQAKNKKKL

SEQ ID NO: 14723 - protein, 445 aa, Neisseria meningitidis
LLFLYRDGTVLTLDAFEQCLKDCFPQGLNGKKTAVALSGGLDSVVLLHLLVRAGKKGGFIPDALHIHHGLSPRADDWADFCQNYCDMLGVGLETVKVCVEKNGLGIEAAARQKRYAAFAEKGFDVLALAHHRDDQIETFMLAVARGGGLRALAAMPAVRPFGEKGIIWRPLLPFSRQDIWDYAQKHGLPNIEDESNTDTAYLRNRFRHRILPELSAQIPHFGRHVLNNVRALQEDLALLDEVVVQDCRWVCGAGYFDTARWLTFSPRRKTHILRHFLKENGIPVPNQNALADIARVLTEAKTGRWNLQGFELHHYAGRLFVFRLEKTDKLRFLKDRQISGNLREILTGQGFVLERHPFGLPEHLLEQDGILRTVAASDTLAMGGIHKDVKKILQGKRVLPVLRPIWPLVADSGNRPLALANCCADFQYSVSDGILPVHPDFPILF

SEQ ID NO: 14724 - protein, 148 aa, Neisseria meningitidis
VRAFQTALRPSRILNILTVSLHSASLAVCLTWFYGRMMWFGLAALAASYAYSLRITNLKHRHAITAITIDRDGQAEIVSGKEKTAKAAALSGSSMVTPYALFLQWDTGGKTVRHCITHDMADPESYRRLKVWVLWRQPKKTAETDTPS

SEQ ID NO: 14725 - protein, 242 aa, Neisseria meningitidis; identical to SEQ ID NO: 5281

SEQ ID NO: 14726 - protein, 324 aa, Neisseria meningitidis; identical to SEQ ID NO: 4840

SEQ ID NO: 14727 - protein, 504 aa, Neisseria meningitidis
LYFRYGFLVVWCAAGVSAAYGADAPAILDDKALLQVQRSVSDKWAESDWKVENDAPRVVDGDFLLAHPKMLEHSLRDALNGNQADLIASLADLYAKLPDYDAVLYGRARALLAKLAGRPAEAVARYRELHGENAADERILLDLAAAEFDDFRLKSAERHFAEAAKLDLPAPVLENVGRFRKKTEGLTGWRFSGGISPAVNRNANNAAPQYCRQNGGRQICSVSRAERAAGLNYEIEAEKLTALADNHYLLFRSNIGGTSYYFSKKSAYDDGFGRAYLGWQYKNARQTAGILPFYQVQLSGSDGFDAKTKRVNNRRLPPYMLAHGVGVQLSHTYRPNPGWQFSVALEHYRQRYREQDRAEYNNGRQDGFYVSSAKRLGESATVFGGWQFVRFVPKRETVGGAVNNAAYRRNGVYAGWAQEWRQLGGLNSRVSASYARRNYKGVAAFSTEAQRNREWNVSLALSHDKLSYKGIVPALNYRFGRTESNVPYAKRRNSEVFVSADWRF

SEQ ID NO: 14728 - protein, 182 aa, Neisseria meningitidis
VSQNTPIKPWYKHVWPWILMAGPIFVVIASVAMFFVAQQHATDLVTDDYYKDGKHIDIQLHRDEEAIRRHIGVQVLISPDMNAAKVFVGGEFDGKQPLNLLLMHPTRKADDQTVALKPVGSAQNGRAEYEAVFKTLSPTNHWYVRVEDAAGVWRVENKWITSQGNAVDLTPMDKLFNNAGSK

SEQ ID NO: 14729 - protein, 916 aa, Neisseria meningitidis
MTDATIRHDHKFALETLPVSLEDEMRKSYLDYAMSVIVGRALPDVRDGLKPVHRRVLYAMHELKNNWNAAYKKSARIVGDVIGKYHPHGDTAVYDTIVRMAQNFAMRYVLIDGQGNFGSVDGLAAAAMRYTEIRMAKISHEMLADIEEETVNFGPNYDGSEHEPLVLPTRFPTLLVNGSSGIAVGMATNIPPHNLSDTVNACLRLLDAPDTEIDELIDIIQAPDFPTGATIYGLSGVREGYKTGRGRVVMRGKTHIEPIGRNGEREAIVIDEIPYQVNKAKLVEKIGDLVREKTLEGISELRDESDKSGMRVVIELKRNENAEVVLNQLYKLTPLQDSFGINMVVLVDGQPRLLNLKQILSEFLRHRREVVTRRTLFRLKKARHEGHIAEGKAVALSNIDEIIKLIKESPNAAEAKDKLLARPWRSSLVEEMLTRSGLDLEMMRPEGLAANIGLKEQGYYLSEIQADAILRMSLRNLTGLDQEEIVESYKNLMGKIIDFVDILSKPERITQIIRDELEEIKTNYGDERRSEINPFGGDIADEDLIPQREMVVTLTHGGYIKTQPTTDYQAQRRGGRGKQAAATKDEDFIETLFVANTHDYLMCFTNLGKCHWIKVYKLPEGGRNSRGRPINNVIQLEEGEKVSAILAVREFPEDQYVFFATAQGMVKKVQLSAFKNVRAQGIKAIALKEGDYLVGAAQTGGADDIMLFSNLGKAIRFNEYWEKSGNDEAEDADIETEISDGIEDETADSENALPNGKHGVRPSGRGSGGLRGMRLPADGKIVSLITFAPETEESGLQVLTATANGYGKRTPIADYSRKNKGGQGNIAINTGERNGDLVAATLVGETDDLMLITSGGVLIRTKVEQIRETGRAAAGVKLINLDEGETLVSLERVAEDESELSDASVISNVTEPEVEN

SEQ ID NO: 14730 - protein, 103 aa, Neisseria meningitidis; identical to SEQ ID NO: 2233

SEQ ID NO: 14731 - protein, 546 aa, Neisseria meningitidis
LSLPYKRWHYFNLIKNSLQKGCLKQQQTLTATTLKRNTIMTVIKQEDFIQSICDAFQFISYYHPKDYIDALYKAWQKEENPAAKDAMTQILVNSRMCAENNRPICQDTGIATVFLKVGMDVQWDADMSVEEMVNEGVRRAYTWEGNTLRASVLADPAGKRQNTKDNTPAVIHMSIVPGDKVEVTCAAKGGGSENKSKLAMLNPSDNIVDWVLKTIPTMGAGWCPPGILGIGIGGTPEKAVLMAKESLMSHIDIQELQEKAASGAELSTTEALRLELFEKVNALGIGAQGLGGLTTVLDVKILDYPTHAASKPIAMIPNCAATRHVEFELDGSGPVELTPPRVEDWPDLTYSPDNGKRVDVDKLTKEEVASWKTGDVLLLNGKILTGRDAAHKRLVDMLNKGEELPVDFTNRLIYYVGPVDPVGDEVVGPAGPTTATRMDKFTRQMLEQTGLLGMIGKSERGAAACEAIADNKAVYLMAVGGAAYLVAKAIKSSKVLAFPELGMEAIYEFEVKDMPVTVAVDSKGESIHATAPPQWQAKIGIIPVKS

SEQ ID NO: 14732 - protein, 248 aa, Neisseria meningitidis
MSTQDLNGKIALVTGASRGIGAAIADTLAAAGAKVIGTATSESGAAAISERLAQWGSEGRVLNSAEPETIESLIADIEKAFGKLDILVNNAGITRDNLLMRMKEEEWDDIMQVNLKSVFRASKAVLRGMMKQRSGRIINITSVVGVMGNAGQTNYAAAKAGLIGFSKSMAREVGSRGITVNCVAPGFIDTDMTRALPEETRQTFTAQTALGRFGDAQDIADAVLFLASDQAKYITGQTLHVNGGMLMP

SEQ ID NO: 14733 - protein, 558 aa, Neisseria meningitidis
MSFKTDAEIAQSSTMRPIGEIAAKLGLNADNIEPYGHYKAKINPAEAFKLPQKQGRLILVTAINPTPAGEGKTTVTIGLADALRHIGKDAVIALREPSLGPVFGVKGGAAGGGYAQVLPMEDINLHFTGDFHAIGAANNLLAAMLDNHIYQGNELDIDPKRVLWRRVVDMNDRQLRNIIDGMGKPVDGVMRPDGFDITVASEVMAVFCLAKDISDLKERLGNILVAYAKDGSPVYAKDLKAHGAMAVLLKDAIKPNLVQTIEGTPAFVHGGPFANIAHGCNSVTATRLAKHLADYAVTEAGFGADLGAEKFCDIKCRLAGLKPDAAVVVATVRALKYNGGVERANLGEENLEALAKGLPNLLKHISNLKNVFGLPVVVALNRFVSDSDAELAMIEKACAEHGVEVSLTEVWGKGGVGGADLARKVVNAIENQPNNFNFSYDVELSIKDKIRAIAQKVYGAEDVDFSAEASAEIASLEKLGLDKMPICMAKTQYSLSDNAKLLGCPEGFRITVRGITVSAGAGFIVALCGNMMKMPGLPKVPAAEKIDVDEHGVIHGLF

SEQ ID NO: 14734 - protein, 321 aa, Neisseria meningitidis; identical to SEQ ID NO: 14648

SEQ ID NO: 14735 - protein, 140 aa, Neisseria meningitidis
MNKNRKLLLAALLLIAFAAVKLVLLQWWQAQQPQAVAVQCDLTEGCTLPDGSRVRAAAVSTKKPFDIYIEHAPAGTEQVSISFSMKNMDMGFNRYMFERQPSGTWQAVRIRLPICVEGRRDFTADITIGSRTFQTAFTAE

SEQ ID NO: 14736 - protein, 40 aa, Neisseria meningitidis
LSKHYFVSCCTVSDGIGLPRLYQVAREMPRLSHGLSRLQF

SEQ ID NO: 14737 - protein, 1144 aa, Neisseria meningitidis
MTEPTYIPLRLHTEFSITDGMVRIKKLVAKAQEYGLPALGISDLMNEFGLVKFYKACRGAGIKPIGAADVWIGNPNAPDKPFRAMLIIRNDAGYLRLSELLTAAYVGKDRNIHHAELNPEWLENGDNSGLICLSGAHYGEVGVNLLNGNEDAARAAALKYAAWFPDAFYLELQRLPERPEWEACVSGSVKLAEELGLPVVATHPTQFMSSDDFNAHEARVCIAGGWVLTDKKRPRDFTPGQFFIPPETMLERFADLPEALENTVEIAKRCNLHITLGKNFLPLFPTPDGLSRDDYLIKLSNKGLQERMVQLYPDEAERAAKMPEYQERLDFELNIIIQMKFPGYFLIVQDFINWAKTHGCPVGPGRGSGAGSLVAYSLKITDLDPLKYALLFERFLNPERVSMPDFDVDFCQANRGRVIEYVRDKYGAQAVSQIVTFGTMSSKAVIRDVGRVLELPFMLCDKLSKLIPLEANKPLSLEKAMEAEPQIQELIEVEEADELITLAKKLEDLTRGLGMHAGGVLIAPGKISDYSPVYQADESASPVSMYDKGDVEDVGLVKFDFLGLRNLTIIEMAQNNIKNTTGDIIDVGKIPLDDQAAYQIFRDANTTAVFQFESTGMKKMLKTAHTTKFEELIAFVSLYRPGPMDNIPDFVARMKGQEFQYIHPLLEGILAPTYGIMVYQEQVMQAAQIIGGYSLGGADLLRRAMGKKKPEEMVKHREIFAEGAAKQGISREKSDEIFNYMEKFAGYGFNKSHAAAYALISYQTAWLKAHYPAEFMAATMSSELDNTDQLKHFYDDCRANGIEFLPPDINESDYRFTPYPDMKIRYALGAIKGTGEAAVESITAARQSGGKFTGLLDFCERVGKEHMNRRTLEALIRGGAFDSIEPNRAMLLANIDLAMDNADQKAANANQGGLFDMMEDAIEPVRLIDLPRWSESEKLAEEKTVIGFYLSGHPFGPYAQEVRQIAPTKLDRLKPQDSVRLAGFVTAVRTMMGKRGKIAFVSLEDLSGQVEIMVGGQTLENCADCLKADQVLIIESKVSRDDYGGGDGLRILANQVMTLQTARERYARSLSLALAPHHDIGGLVRLLSSHQLPDTPRIPLQLSYANEKASGRLQVPPKWTVTPSSALFGELETLLGSRSVRVNW

SEQ ID NO: 14738 - protein, 377 aa, Neisseria meningitidis
MFKKFKPVLLSFFALVFAFWLGTGIAYEINPRWFLSDTATEIPENPNAFVAKLARLFRNADRAVVIVKESMRTEESLAETVDDGPLQSEKDYLALAIRLSRLKEKAKWFHVTEQEHGKEVWLDYHIGEGGLVAVSLSQRSPEAFVNAEYLYRNDRPFSVNVYGGTAHGENYETTGEYRVVWQPDGSVFDASGRGKIGEDVYEHCLGCYQMAQVYLAKYRDVANDEQKVWDFREESNRIASDSRDSVFYQNMRELMPRGMKANSLVVGYDADGLPQKVYWSFDNGKKRQSFEYYLKNGNLFIAQSSTVALKADGVTADMQTYHAQQTWYLDGGRIVREEKQGDRLPDFPLNLEDLEKEVSRYAEAAARRSGGRRDLSH

SEQ ID NO: 14739 - protein, 242 aa, Neisseria meningitidis; identical to SEQ ID NO: 5117

SEQ ID NO: 14740 - protein, 461 aa, Neisseria meningitidis; identical to SEQ ID NO: 4603

SEQ ID NO: 14741 - protein, 143 aa, Neisseria meningitidis
MMGFEKVEHLLPDTVLDIVDVIGLAATEQLVKAIGGARFKFGKGKVDTERLAILVEAIGEVKTHELLQVYGGEELYVPRCGKALIQLRNHRFYQEFVKLRDIDKESGLMAMTKLCPKYGISSRTGYTIINEMSRPAAQQAALF

SEQ ID NO: 14742 - protein, 1038 aa, Neisseria meningitidis
MNKTWKRQVFRHTALYTAILMFSHTGGGGQAQAQTQTHKYVIVMNGQKLPEVKWGNAYSSLAHKSNEREVTHTSNFRIRKNVSFSFNNTDEVVAEKKDAVVFGAATYLPPYGKVSGFDANKLKERKNAVDWIGTTHPGLIGYSYQNSTCNSSNCPEVAYRTQFTFGNSSLEKKKTDGKLDIYEDKSRDNSPIYKLKDYPWLGVSFNLGGESSFKPKRNNQLVSSFREDVQNNQHKENLVYTTDDYNSKNNRNHQDKHHAVAFYLNAKLHLLDKKQITNIAQGRGFNLGTLRTRIEPTEAWKRQNSNFFNGSWTYEDKGSVSVKLKLPEVKAGRCINANNPNKSTKAPSPALTAPALWFGPVQNGKVQMYSASVSTYPDSSSSRIFLQNLKRKTDTSRPGRYSLADLAKSDIENRQPNFTGRQTVIRLDGGVHEIKLKGNEVEGFKGNNGNDTFGIVKDLGVDPDTNEWKKVLLPWTVRASNDDGQFNTFNKEENNGKPKYSQKYRSRDSSKHERDLGDIVNSPIVAVGGYLATSANDGMVHIFKKGNGVDERNYSLKLSYIPGTMPRKDIQSQDSTLAKELRAFAEKGYVGDRYGVDGGFVLRQVNNLNGQDRVFMFGAMGFGGRGAYALDLTKAENGNPTAVSLFDVKNDDKNNNGVKLGYTVGTPQIGKTHDGKYAAFLASGYATKDINSTENQTALYVYDLESSGTLIKKIEVPNGKGGLSSPTLVDKDLDGMVDIAYAGDRGGNMYRFDLSGQDPNQWSVRTIFSGNKPITSAPAISQLKDKRVVIFGTGSDLSEEDVLSTDEQHIYGIFDNDTNTGTAQDGQGNGLLEQVLKKDGNTLFLSDYKRSNGSGDKGWVVKLEAGQRVTVKPTVVLRTAFVTIRKYKDNGCGAETAILGINTADGGKLTKKSARPIVPEANTAVAQYSGHKKTANGKSIPIGCMEKDGGTVCPNGYVYDKPVNVRYLDEKKTDGFSTTADGDAGGSGIDPAGKRSGKNNRCFSQKGVRTLLMNDLDSLDITGPTCGMKRISWREVFY

SEQ ID NO: 14743 - protein, 159 aa, Neisseria meningitidis; identical to SEQ ID NO: 929

SEQ ID NO: 14744 - protein, 252 aa, Neisseria meningitidis; identical to SEQ ID NO: 3275

SEQ ID NO: 14745 - protein, 260 aa, Neisseria meningitidis
LQKVVRHIAQTEIMPRFLNTPSHRKEDGSMLSEADIAAQTAFAAALPLLIDCPMLGEEMSRQEQSALWEQYSGEKGLWIVDPIDGTNNFVNGLPHFAVSVAFVRNGRAELGVIYNPVSGECFYAERGQGAFLNGTRLPLRLVDKKLNEAIAGVEIKYLRSGKLSSRMSTLAPFGTIRSMGSSTLDWCYLACGRYDVYVHGGQKLWDYAAGALIFEEAGGRLTTLEGDGFWSGEHVFKRSVVAALEPKLFERWVEWIRENQ

SEQ ID NO: 14746 - protein, 110 aa, Neisseria meningitidis; identical to SEQ ID NO: 149

SEQ ID NO: 14747 - protein, 604 aa, Neisseria meningitidis
MPAETTVSGAHPAAKLPIYILPCFLWIGIVPFTFALKLKPSPDFYHDAAAAAGLIVLLFLTAGKKLFDVKIPPISFLLFAMAAFWYLQARLMNLIYPGMNDIVSWIFILLAVSAWACKSLVAHFGQERIVTLFAWSLLIGSLLQSCIVVIQFAGWEDTPLLQNIIVYSGQGVIGHIGQRNNLGHYLMWGILAAAYLNGQRKIPAALGAICLIMQTAVLGLVNSRTILTYIAAIALILPFWYFRSDKSNRRTMLGIAAAVFLTALFQFSMNTILETFTGIRYETAVERVANGGFTDLPRQIEWNKALAAFQSAPIFGHGWNSFAQQTFLINAEQHNIHDNLLSNLFTHSHNIVLQLLAEMGISGTLLVAATLLTGIAGLLKRPLTPASLFLICTLAVSMCHSMLEYPLWYVYFLIPFGLMLFLSPAEASDGIAFKKAANLGILTASAAIFAGLLHLDWTYTRLVNAFSPATDDSAKTLNRKINELRYISANSPMLSFYADFSLVNFALPEYPETQTWAEEATLKSLKYRPHSATYRIALYLMRQGKVAEAKQWMRATQSYYPYLMPRYADEIRKLPVWAPLLPELLKDCKAFAAAPGHPEAKPCK

SEQ ID NO: 14748 - protein, 90 aa, Neisseria meningitidis; identical to SEQ ID NO: 7650

SEQ ID NO: 14749 - protein, 155 aa, Neisseria meningitidis; identical to SEQ ID NO: 6688

SEQ ID NO: 14750 - protein, 107 aa, Neisseria meningitidis
MDNCIFCKIAAKDIPAQTVYEDGEVVCFKDINPAAPVHLLLIPKVHFDSLAHAAPEHQLLLGKMMLKVPEIAKAAGLADGFKTLINTGKGGGQEVFHLHIHIMGTPV

SEQ ID NO: 14751 - protein, 234 aa, Neisseria meningitidis
MLSEGISDGIFRGEMLQFAPFLPTQGNRIMFTGIVQGLGKLTAIHRPSEAFQTYVVELPQEAADNLQRGASVANNGCCLTITEIEGNRVSFDLMAETLAKTNLGLLKEGDCVNIERAARFGDEIGGHVMSGHIMATVPIVEIERDGYNRTVWFSLPHELKPYILTKGFVGLDGCSLTIGKVEDSRFNVHLIPETLERTLFGSRKVGDRINIEIDPNTQAIVDTVERLMAQRYAK

SEQ ID NO: 14752 - protein, 117 aa, Neisseria meningitidis
MGIKNEQIIICKKYNTEIYPVSDVSKIGVAENVKQTGLYPINGLRHRPKGDTNGWYIWAGENFSYDKNFFLPLHTFHLQIWRPEIIPFLTLPPGYRFLIGENGYEDVWFDELLLNDN

SEQ ID NO: 14753 - protein, 712 aa, Neisseria meningitidis
MANGNMKLSLVLTARDDGARRLLADTQRQLDRTAKSRAQLERQSHTYALTGIRSEKQIQREIMLTQAAFNRLARSGKASQNDLARAAVATRNRIRELNAELKQGTGFADKMGKIGRFGAAAVAGGAAAYTVLKPAMDNRKQLDENINRVSRQAFIEDNSKSAAWIATEGAQQIKDLALELVEKNGGTHDKALDLISGMMTTSLNFAQTKNEAQAAYAFALASEGSGEDTAKLIKTLKDGGMSGKDLQLGLEHVLQSGLDGTFEVRDMVRELPSLLPAAQQAGMNGVGGLDYLLSLLQSAANKSGSPAEAATNVQNLLSKTLSPDTIGRLKKMANPNDPKKGVDWIGSVVQGKQNGENAVQVLSRLADAMLVKDKQYQDYKKRAAAGDKTAAEQANMLKGALLAQLLPDLQAKQGLLAATDMTQIREYMASLAGVTLDNGKIAKNNEARMLSAAAQQEQQESLAMLRESLTGTLVDMETSFKKLAAEYPNATLALQALTTAATAASAAMLLTAGGGKGAGFLKDVGSKALGWGKASAGGVAAGATAAGGKLLSWGKSAGSGLMNNPALVKRAGLLGMLLYSESLGDGTLPKGLRGTKTTPEMINRLKNNGIRFEPAPKREQARGGVPQYLAAPSAQPTDKMLSPLFSTQTAAYQAALAQDTAAVTTGLAQVQSAMASASQTINTNVSLNIDGRVIANEVSRYQVAMFGRGAGQ

SEQ ID NO: 14754 - protein, 295 aa, Neisseria meningitidis; identical to SEQ ID NO: 6246

SEQ ID NO: 14755 - protein, 475 aa, Neisseria meningitidis
MFFSALKSFLSRYITVWRNVWAVRDQLEPPKRTAEEQAFLPAHLELTDTPVSAAPKWAARFIMAFALLALLWSWFGKIDIVAAASGKTVSGGRSKTIQPLETVVVKAVHVRDGQHVKQGETLAELEAVGTDSDVVQSEQALQAAQLSKLRYEAVLAALESRTVPHIDMAQARSLGLSDADVQSAQVLAQHQYQAWAAQDAQLQSALRGHQAELQSAKAQEQKLVSVGAIEQQKTADYRRLRADNFISEHAFLEQQSKSVSNWNDLESTRGQMRQIQAAIAQAEQNRVLNTQNLKRDTLDALRQANEQIDQYRGQTDKAKQRQQLMTIQSPADGTVQELATYTVGGVVQAAQKMMVVAPDDDKMDVEVLVLNKDIGFVEQGQDAVVKIESFPYTRYGYLTGKVKSVSHDAVSHEQLGLVYTAVVSLDKHTLNIDGKAVNLTAGMNVTAEIKTGKRRVLDYLLSPLQTKLDESFRER

SEQ ID NO: 14756 - protein, 188 aa, Neisseria meningitidis
MLLQNILPFAHCLLRKALPEGGNALDGTAGNGHDTLFLAQTAGIRGKVWAFDIQPQALSRTRCRLKEARYENVQLILDGHENLKQYVSEPLNAAIFNFGWLPGGDKSLTTHTETSIPALCATLSLLKEGGMLIAVLYPGHENGKQEAEAIEQWAKNLPQEQFAVLRYGFTNRKNNPPYLLAFEKLRQK

SEQ ID NO: 14757 - protein, 369 aa, Neisseria meningitidis
MSNWKPDIPYNDLPPLPPKQDIESKTILKRCIAARASLARLKQAAELIPNQAMLINTLPVMEARASSEIENIVTTTDKLFQSLQMDTERQDPATKEALQYRTALFAGYESLTSRPLCTQTAIMVCNAIKHPYEMAIRKTGGTALKGGNSGNVVYTPPEGEETIRGKLANWERFIHESGDLDPLIIMAAAHYQFEAIHPFTDSNGRTGRILNSLLLIEKGLLDLPILYLSRYIIENRADYYRLLLGVTERQDWESWIIYILDGVADTADWTVSKIDAIRCLFEQTRQHIRTHAQGIYTHELVNLLFEQPYTRIANLEAAGIAKRQTASKYLKELSDIGVLQEIVIGRDKLFIHPRLMELLRGEGNSFTSF

SEQ ID NO: 14758 - protein, 167 aa, Neisseria meningitidis
MSDEFNRFIERVLSHEGGYANHPKDPGGETNWGITKRTAQANGYNGSMRAMTREQAISIYRKAFWERYRADQMPEAVAFQFFDACVNHGYGNAARMLQRAAGVPDDGVIGAVSLKAINSLPENDLLLRFNAERLVFYTKLGTFTSFGKGWVRRVAQNLIHASADNTD

SEQ ID NO: 14759 - protein, 659 aa, Neisseria meningitidis
MSQLANAIRFLSADAVQKANSGHPGAPMGMAEMAETLWTKFLNHNPANPKFYNRDRFVLSNGHASMLLYSLLHLTGYNLSIEDLKNFRQLHSKTPGHPEYGYTDGVETTTGPLGQGIANAVGMALAEKILAAEFNKDGLNIVDHYTYVFMGDGCLMEGVSHEACSLAGTLGLGKLIVLYDDNNISIDGKVDGWFTENIPQRFESYGWHVVPNVNGHDTAAIQAAIEAARAETGKPSIICCKTLIGKGSANKEGSHKTHGAPLGADEIEATRKHLGWTYPAFEIPQEIYDAWNAKEQGAKLEADWNELFAQYQAKYPAEAAEFVRRMDKKLPENFDEYVQTALKEVCAKAETIATRKASQNSIEILAKELPELVGGSADLTPSNLTDWSNSVSVTRDKGGNYIHYGVREFGMGAIMNGLALHGGVKPFGATFLMFSEYERNALRMAALMKINPVFVFTHDSIGLGEDGPTHQPIEQTATLRLIPNMDVWRPCDTAESLVAWAEAVKAADHPSCLIFSRQNLKFQARSEQQLNDIKRGGYIISEAQGNAQAVIIATGSEVELALEAQKALAAQNIAVRVVSMPSTNVFDRQDAAYQATVLPEGLPRIAVEAGHADGWYKYVGLNGAVVGINRFGESAPADLLFKEFGFTVDNVVDTVKSVL

SEQ ID NO: 14760 - protein, 112 aa, Neisseria meningitidis; identical to SEQ ID NO: 6756

SEQ ID NO: 14761 - protein, 57 aa, Neisseria meningitidis
MRIRRALKFDQLILEFPERGDGAWVHIGFRRNSPQRNQILTATKKNGKTVYLPGLHP

SEQ ID NO: 14762 - protein, 248 aa, Neisseria meningitidis; identical to SEQ ID NO: 639

SEQ ID NO: 14763 - protein, 144 aa, Neisseria meningitidis
MQMPSENNPLSMEYQTMSSNIPAELKYVASHEWLRLEEDGIITVGITHHAQELLGDIVFVELPEVGANLAAEEQAGVVESVKAASDVYAPIAGEVVAVNEDLPSAPETANSDPYGAGWFFKLKPANVADYDVLLTAEQYAGEVD

SEQ ID NO: 14764 - protein, 485 aa, Neisseria meningitidis; identical to SEQ ID NO: 12288

SEQ ID NO: 14765 - protein, 79 aa, Neisseria meningitidis; identical to SEQ ID NO: 1083

SEQ ID NO: 14766 - protein, 193 aa, Neisseria meningitidis
MNLRDDLQLIYDRIPEGSRVLDLGCGDGELLAALVEHKKCSGYGIEIDTDSVIAAMSRGVNVIQADLEEGLTAFNDQSFDVIVLSQTIQAMQNTEKILRCLMRVAKQAIVSFPNFGYWRNRVQIALGGHMPVSERMPYHWYDTPNIHWCTLKDFDLLCAKNNIRILERAVMTGNRQVKHFPNLLGSLAFYRVG

SEQ ID NO: 14767 - protein, 98 aa, Neisseria meningitidis; identical to SEQ ID NO: 3727

SEQ ID NO: 14768 - protein, 145 aa, Neisseria meningitidis
MDKTVYLYTDGACKGNPGAGGWGVLMRYGSREKELFGGEAQTTNNRMELTAVIEGLKSLKRRCTVIICTDSQYVKNGMENWIHGWKRNGWKTAAKQPVKNDDLWKELDVLVGQHQVSWTWVKGHAGHAENERADDLANRGAAQFS

SEQ ID NO: 14769 - protein, 121 aa, Neisseria meningitidis
LDYRFGRQYRLLKTDDFSSVFAFRNRRSRDLLQVSRSNGNGLGHPRIGLVVGKKTAKRANERNYMKRVIRDWFRLNKNRLPPQDFVVRVHRKFDRATAKQARAELAQLMFGNPATGCRKQA

SEQ ID NO: 14770 - protein, 483 aa, Neisseria meningitidis
MPSERPRVFRRHQDFFMDTTLKTTLTSVAAAFALSACTMIPQYEQPKVEVAETFKNDTADSGIRAVDLGWHDYFADPRLQKLIDIALERNTSLRTAALNSEIYRKQYMIERNNLLPTLAANANDSRQGSLSGGNVSSSYKVGLGAASYELDLFGRVRSSSEAALQGYFASTANRDAAHLSLIATVAKAYFNERYAEEAMSLAQRVLKTREETYKLSELRYKAGVISAVALRQQEALIESAKADYAHAARSREQARNALATLINQPIPEDLPAGLPLDKQFFVEKLPAGLSSEVLLDRPDIRAAEHALKQANANIGAARAAFFPSIRLTGTVGTGSAELGGLFKSGTGVWSFAPSITLPIFTWGTNKANLDVAKLRQQAQIVAYESAVQSAFQDVANALAAREQLDKAYDALSKQSRASKEALRLVGLRYKHGVSGALDLLDAERSSYAAEGAALSAQLTRAENLADLYKALGGGLKRDTQTDK

SEQ ID NO: 14771 - protein, 148 aa, Neisseria meningitidis
MQHEEGNRQRPQGELLLRTVAMPRDTNPNQDIFGGWIMSQMDLGGGILAAEIARGRIVTVAVQEMNFIRPVKVGNVVCCYGHCVRVGNTSLQLKVDVWVKTLMNDCVTEDRYLVTEAVFTYVAIDAEGNPRPIPKEGNPKLAGLLPTP

SEQ ID NO: 14772 - protein, 125 aa, Neisseria meningitidis; identical to SEQ ID NO: 6097

SEQ ID NO: 14773 - protein, 404 aa, Neisseria meningitidis
MTVKTPVYLDYAATTPVDKRVAEKMIPYLTETFGNPASNSHSFGWEAEEAVEKARADIAALINADSKEIVFTSGATESDNLAIKGAANFYKTKGKHLITVKTEHKAVLDTMRELERQGYEVTYLDVQENGLVDLDVLKAAIREDTILVSVMWVNNEIGVVQDIPAIGEICRERKIIFHVDAAQACGKVPVDVEAAKVDLLSMSGHKVYGPKGIGALYVRRKPRVRLEAQMHGGGHERGFRSGTLPTHQIVGMGEAFRIAKEELEQDMAHYRKLRDIFLKGIEGIEEVYINGDLEHRAPNNLNVSFNFVEGESLIMAVKELAVSSGSACTSASLEPSYVLRALGRNDELAHSSLRITFGRMTTEEEVQFAAELIKSKIGKLRELSPLWEMFKDGIDLNSIEWAAH

SEQ ID NO: 14774 - protein, 291 aa, Neisseria meningitidis
MFQKHLQKASDSVVGGTLYVVATPIGNLADITLRALAVLQKADIICAEDTRVTAQLLSAYGIQGKLVSVREHNERQMADKIVGYLSDGMVVAQVSDAGTPAVCDPGAKLARRVREVGFKVVPVVGASAVMAALSVAGVAGSDFYFNGFVPPKSGERRKLFAKWVRAAFPIVMFETPHRIGATLADMAELFPERRLMLAREITKTFETFLSGTVGEIQTALAADGNQSRGEMVLILYPAQDEKHEGLSESAQNVMKILAAELPTKQAAELAAKITGEGKKALYDLAVSWKNK

SEQ ID NO: 14775 - protein, 143 aa, Neisseria meningitidis; identical to SEQ ID NO: 2432

SEQ ID NO: 14776 - protein, 206 aa, Neisseria meningitidis; identical to SEQ ID NO: 4838

SEQ ID NO: 14777 - protein, 150 aa, Neisseria meningitidis; identical to SEQ ID NO: 3538

SEQ ID NO: 14778 - protein, 179 aa, Neisseria meningitidis; identical to SEQ ID NO: 403

SEQ ID NO: 14779 - protein, 177 aa, Neisseria meningitidis
MPVFASLPPQYMDTLPECPITNTASLLPHSGRMVLIDRITRYGDDFVEAGAQVSPNHILLLDDKLPYTAFIELMAQAVGAYAGIQARKNARSVRLGFLLGTRKLEIFAQSVPIGTHLLATAHMSIQDAGGMGVFDCELRWTDAPETSSETLPSDGILVRASLNVYSPEHPAGTTDAV

SEQ ID NO: 14780 - protein, 109 aa, Neisseria meningitidis; identical to SEQ ID NO: 7275

SEQ ID NO: 14781 - protein, 208 aa, Neisseria meningitidis; identical to SEQ ID NO: 3160

SEQ ID NO: 14782 - protein, 193 aa, Neisseria meningitidis
MKLKTLLLPFASLALCAGAFAAPPSDASLARWLDTQNFDRDIEKNMIEGFNAGFKPYADKAFAEMPEAKKDQAAEAFNRYRENVLKDLITPEVKQAVRNTLLKNAREIYTQEEIDGMIAFYGSPVGQSVVAKNPRLIKKSMSEIAVSWTALSGKIARHHLPAFTEELRRIICGGKNPDAGCKQAGQVGKRHQK

SEQ ID NO: 14783 - protein, 421 aa, Neisseria meningitidis; identical to SEQ ID NO: 4874

SEQ ID NO: 14784 - protein, 65 aa, Neisseria meningitidis; identical to SEQ ID NO: 7172

SEQ ID NO: 14785 - protein, 265 aa, Neisseria meningitidis; identical to SEQ ID NO: 7180

SEQ ID NO: 14786 - protein, 370 aa, Neisseria meningitidis; identical to SEQ ID NO: 6893

SEQ ID NO: 14787 - protein, 67 aa, Neisseria meningitidis; identical to SEQ ID NO: 86

SEQ ID NO: 14788 - protein, 230 aa, Neisseria meningitidis
MKRFTYTLSDGLCIEIELKRSAKKNLILRPVNMQTVSINVPPFFQDHALANWLAANETILRNTLAKTPVHPVSHPNLPEWIWYRGIKTKLDTHSQSHIRITSSEILLPRKETAAQIDHLRRLLNERAREYLLPRLEKHAAETGLTPTATDLSNAKTFWGVCRPHTGIRLNWRLIGAPKYVADYVCIHELCHLRHPDHSPRFWHLVNTLTPHTDNAKSWLKAHGRELFVLG

SEQ ID NO: 14789 - protein, 53 aa, Neisseria meningitidis
MAYFGGFVRALFDLGVFERGSVKGRGKWFSRVWWRSEVLCLMCGGIFSVKLIL

SEQ ID NO: 14790 - protein, 169 aa, Neisseria meningitidis; identical to SEQ ID NO: 5987

SEQ ID NO: 14791 - protein, 482 aa, Neisseria meningitidis
MKGDIGVIGLAVMGQNLILNMNDCGFKVVAYNRTIGKVDEFLNGAAKGTDIVGAYSLQDLVDKLAKPRKIMMMVRAGSVVDDFIEQLLPLLDEEDIIIDGGNANYPDTTRRTHYLAEKGILFVGAGVSGGEEGARHGPSIMPGGDKRAWEAVKPIFQAIAAKTPQGEPCCDWVGRDGAGHFVKMVHNGIEYGDMQLICEAYQFMKDGLGLSYDEMHRVFAAWNKTELDSYLIEITAAILGYKDEGGEPLVEKILDMAGQKGTGKWTGINALDLGIPLTLISEAVFARCVSSFKEQRVQTGKLFARTVTPVEGGKQEWVEALRQALLASKIISYAQGFMLIREAGESYGWDLDYGNTALLWREGCIIRSAFLGNIRDAYENNPDLVFLGGDPYFKNILENCLPAWRKVVAKAVECGIPMPCMASAITFLDGYTTERLPANLLQAQRDYFGAHTYERTDKPRGEFFHTNWTGKGGDTASTTYDI

SEQ ID NO: 14792 - protein, 239 aa, Neisseria meningitidis; identical to SEQ ID NO: 3265

SEQ ID NO: 14793 - protein, 160 aa, Neisseria meningitidis; identical to SEQ ID NO: 4185

SEQ ID NO: 14794 - protein, 77 aa, Neisseria meningitidis; identical to SEQ ID NO: 5942

SEQ ID NO: 14795 - protein, 202 aa, Neisseria meningitidis; identical to SEQ ID NO: 597

SEQ ID NO: 14796 - protein, 262 aa, Neisseria meningitidis; identical to SEQ ID NO: 256

SEQ ID NO: 14797 - protein, 200 aa, Neisseria meningitidis
MFNISAVAVSYLIGSLSFAVIVSKYYGMDDPRTYGSGNPGATNVLRSGKKKAAALTLLGDAAKGLVAVLLARVLQEPLGLSDSAIAAVALAALVGHMWPVFFGFKGGKGVATALGVLLALSPATALVCALIWLVMAFGFKVSSLAALTATIAAPLAALFFMPHTSWIFATLAIAILVLLRHKSNILNLIKGKESKIGEKR

SEQ ID NO: 14798 - protein, 320 aa, Neisseria meningitidis
MQARLLIPILFSVFILSACGTLTGIPSHGGGKRFAVEQELVAASARAAVKDMDLQALHGRKVALYIATMGDQGSGSLTGGRYSIDALIRGEYINSPAVRTDYTYPRYETTAETTSGGLTGLTTSLSTLNAPALSRTQSDGSGSKSSLGLNIGGMGDYRNETLTTNPRDTAFLSHLVQTVFFLRGIDVVSPANADTDVFINIDVFGTIRNRTEMHLYNAETLKAQTKLEYFAVDRTNKKLLIKPKTNAFEAAYKENYALWMGPYKVSKGIKPTEGLMVDFSDIQPYGNHMGNSAPSVETDNSHEGYGYSDEVVRQHRQGQP

SEQ ID NO: 14799 - protein, 289 aa, Neisseria meningitidis; identical to SEQ ID NO: 6858

SEQ ID NO: 14800 - protein, 199 aa, Neisseria meningitidis
  misc_feature 2, 3: 'Xaa' is any amino acid
VXXQRTVGIGVVSPERAMQKGFTGVMLRGSGVEWDVRKTQPYEVYDKMDFDIPVGVNGDCYDRYLCRMEEMRQSVRIIKQCSEWLRVNPGPVITTNHKFAPPKRTEMKTGMEDLIHHFKLFTEGMHVPEGETYTAVEHPKGEFGVYIISDGANKPYRLKIRAPGFAHLQGMDEMAKGHMLADVVAIIGTQDIVFGEVDR

SEQ ID NO: 14801 - protein, 456 aa, Neisseria meningitidis; identical to SEQ ID NO: 8567

SEQ ID NO: 14802 - protein, 369 aa, Neisseria meningitidis; identical to SEQ ID NO: 8556

SEQ ID NO: 14803 - protein, 138 aa, Neisseria meningitidis; identical to SEQ ID NO: 774

SEQ ID NO: 14804 - protein, 329 aa, Neisseria meningitidis; identical to SEQ ID NO: 7473

SEQ ID NO: 14805 - protein, 376 aa, Neisseria meningitidis; identical to SEQ ID NO: 7113

SEQ ID NO: 14806 - protein, 503 aa, Neisseria meningitidis
MKWLKRLTVIVGTFYRYRLAGLCASLMGSGWICALLKMMPQSSKLKNEPPAVRLRLALESLGPIFIKFGQVLSTRPDLIPHDYAVELAKLQDKVPPFDARLSREQIEKSLGQSIEKLYAEFETEPIASASIAQVHKARLHSGERVAVKVLRPNLLPLIEQDLSLMRFGAAWVERLFSDGRRLKPLEVVAEFDKYLHDELDLMREAANAGQLGRNFQNSNMLIVPKVFYDYCTSDVLTIEWMDGTPVADIAKLKADGIDLHKLADYGVEIFFTQVFRDGFFHADMHPGNILVAADNRYIALDFGIVGTLTDYDKRYLAINFLAFFNRDYRRVATAHIESGWVPADTRAEELEAAVRAVCEPVFNKPISQISFGLVLMRLFEVSRCFNVEIQPQLVLLQKTLLNIEGLGRQLDPDLDLWKTAKPFLVKWMNGQVGPKALWRNLKNEAPDWAQIIPSLPRKISALIDENRQQEMRDAYIHLVKVQQRQSLWLAVIAVVLLLILLLK

SEQ ID NO: 14807 - protein, 273 aa, Neisseria meningitidis; identical to SEQ ID NO: 221

SEQ ID NO: 14808 - protein, 787 aa, Neisseria meningitidis
MQFSYSWLKTQADTELSSDKLEHLLTMSGLEVEEAETAAPAFAGVVVAEVKSVEKHPDADRLNVTRVDAGTGELVQIVCGAPNVKAGIKVPCSLPGAVLPGNFKIKPTKMRGVVSNGMLCSTDELGLPDDGVNGLHILPEDAPVGTNIREYLDLDDTLFTLKITPNRADCLSIKGIAREVSALTGCAFRQPEIHTAPITGSRKQPVQINAPADCGRFISRVIENVNAKAATPDWMKQRLERSGIRSISVLVDIGNYVMLEIGQPMHVFDADKLSGSLHIRRAREGETLECLNEKTVSLSENTLVVADEKGALSLAGLMGGAASAVSDGTQNIVLEAAWFAPEIIAGKSRQYGFGSDSSFRFERSVDYRLQADAIERATELVLQICGGAAGEMVEAQGELPEAKQVGLRLDRLKTVLGVDIPAEQVETILQHLDLQPEKTAEGFRVTAPSFRFDIEIEADLIEEIGRVYGYENIPDDYTSGRLKMLELPETRRPRFAVYNEMAARGYREVVSYAFVNEQWEQDFAANADPIRLQNPLAAQYAVMRSTLIGGLVEILQNNLNRKQNRVRVFEIARVFGKGSDGQFVQNERIGGLWYGAAMPEQWGGKTRNADFYDIKADVENLLKNKAVEFVKTGHPALHPGRAANIVSDGKVIGFVGELHPKWLQKYDLPQAPLVFEIDMAAVLECGKTRYRAVSKFQPVRRDLAFVMPEAMSHDDLLLVLEGAANKLVQEISVFDVYRGTGLPEGMKSVAVKVILQDMENTLTDEAVEPLIGKLIGAATAAGARLRS

SEQ ID NO: 14809 - protein, 242 aa, Neisseria meningitidis
MTKQLKLSALFVALLASGTAVAGEASVQGYTVSGQSNEIVRNNYGECWKNAYFDKASQGRVECGDAVAAPEPEPEPEPAPAPVVVVEQAPQYVDETISLSAKTLFGFDKDSLRAEAQDNLKVLAQRLSRTNIQSVRVEGHTDFMGSDKYNQALSERRAYVVANNLVSNGVPVSRISAVGLGESQAQMTQVCEAEVAKLGAKVSKAKKREALIACIEPDRRVDVKIRSIVTRQVVPAHNHHQH

SEQ ID NO: 14810 - protein, 164 aa, Neisseria meningitidis
MIFKQNQNYWAVFYTNEEALIVQTCSGLGLTAIDHLYPPHILPLDTDNETLGTTVLQALANSRTFVYDSPEDQDFFDTEKIRQRYEDWVAKLCGNLGYKTRRALFKNMMSVDIWLHNGCLKISPSRHVKLEAWDAIDADDVILSLDNSPEEIGAGLKLALSRCR

SEQ ID NO: 14811 - protein, 192 aa, Neisseria meningitidis
MSNTIKMVVGLGNPGKEYEQTRHNAGFWFLDELAWKWKASFKEEKKFFGEVARATLPDGDVWLLKPTTFMNRSGQAVAALAQFYKIKPEEILVVHDELDIPCGRIKFKLGGGNGGHNGLKDIQARLGTADYYRLRLGIDHPGDRNLVVGYVLNKPSAEHRQQIDDAIAKSLQAIPDIISGKWEEATRFLHSK

SEQ ID NO: 14812 - protein, 915 aa, Neisseria meningitidis
LKPICFYLMGVMLYHHSYAEDAGRTGSEAQIQVLEDVHVKAKRVPKDKKVFTDARAVSTRQDIFKSSENLDNIVRSIPGAFTQQDKSSGIVSLNIRGDSGFGRVNTMVDGITQTFYSTSTDAGRAGGSSQFGASVDSNFIAGLDVVKGSFSGSAGINSLAGSANLRTLGVDDVVQGNNTYGLLLKGLTGTNSTKGNAMAAIGARKWLESGASVGVLYGHSRRSVAQNYRVGGGGQHIGNFGAEYLERRKQRYFVQTGGLKFNSDSGKWERDFQRQFWKHKLYKKYDDPQELQKYIEGQDKDWRENLAPQYDITPIDPSSLKQQSAGNLFKLEYDGVFNKYTAQFRDLNTKIGSRKIINRNYQFNYGLSLNPYTNLNLTAAYNSGRQKYPKGSKFTGWGLLKDFETYNNAKILDLNNTATFRLPRETELQTTLGFNYFHNEYGKNRFPEELGLFFDGPDQDNGLYSYLGRFKGDKGLLPQKSTIVQPAGSQYFNTFYFDAALKKDIYRLNYSTNTVGYRFGGEYTGYYGSDDEFKRAFGENSPTYKKHCNRSCGIYEPVLKKYGKKRANNHSVSISADFGDYFMPFASYSRTHRMPNIQEMYFSQIGDSGVHTALKPERANTWQFGFNTYKKGLLKQDDTLGLKLVGYRSRIDNYIHNVYGKWWDLNGDIPSWVSSTGLAYTIQHRNFKDKVHKHGFELELNYDYGRFFTNLSYAYQKSTQPTNFSDASESPNNASKEDQLKQGYGLSRVSALPRDYGRLEVGTRWLGNKLTLGGAMRYFGKSIRATAEERYIDGTNGGNTSNFRQLGKRSIKQTETLARQPLIFDFYAAYEPKKNLIFRAEVKNLFDRRYIDPLDAGNDAATQRYYSSFDPKDKDEDVTCNADGLCNGKYGGTSKSVLTNFARGRTFLITMSYKF

SEQ ID NO: 14813 - protein, 226 aa, Neisseria meningitidis; identical to SEQ ID NO: 1949

SEQ ID NO: 14814 - protein, 157 aa, Neisseria meningitidis; identical to SEQ ID NO: 140

SEQ ID NO: 14815 - protein, 301 aa, Neisseria meningitidis
VRGISDSEATDDTGFRNNMNTLKFTKMHGLGNDFMVIDAVSQDFTPEDAPIAAWADRFRGVGFDQLLVVGRSETEGVDFRYRIFNADGSEVGQCGNGARCFARFVADKGLTDKKEICVETANGVIFPKLSDNGMVTVNMGKPRFMPSEIPFVPESGEGDDACIYGVHLESGIQPVSCVNMGNPHAVIVVDDVECAPVRETGSLIEPHRQFPERVNVGFMQIISRTAIRLRVFERGVGETQACGTGACAAVVAGIRLGLLDEGKTVEVILPGGTLYIEWACGGDVMMTGPAETVFEGELAYS

SEQ ID NO: 14816 - protein, 381 aa, Neisseria meningitidis
MTETQSLELAKELISRPSVTPDDRDCQKLLAERLHKIGFAAEELHFGDTKNIWLRRGTKAPVVCFAGHTDVVPTGPVEKWDSPPFEPAERDGRLYGRGAADMKTSIACFVTACERFVAEHPDHQGSIALLITSDEEGDALDGTTKVVDVLKARDELIDYCIVGEPTAVDKLGDMIKNGRRGSLSGNLTVKGKQGHIAYPHLAINPVHTFAPALLELTQEVWDEGNKYFPPTSFQISNINGGTGATNVIPGELSVKFNFRFSTESTEAGLKQRVHAILDKHGVQYDLQWSCSGQPFLTHAGKLTDVARAAIAEICGVETELSTTGGTSDGRFIKAIAKELIELGPSNATIHQINENVRLNDIPKLSAVYEGILARLLAGNAV

SEQ ID NO: 14817 - protein, 68 aa, Neisseria meningitidis; identical to SEQ ID NO: 7052

SEQ ID NO: 14818 - protein, 121 aa, Neisseria meningitidis; identical to SEQ ID NO: 6632

SEQ ID NO: 14819 - protein, 97 aa, Neisseria meningitidis; identical to SEQ ID NO: 910

SEQ ID NO: 14820 - protein, 477 aa, Neisseria meningitidis
MSQYDVVVIGAGPGGYVAAIRAAQLGFKTACVDAGVNKAGNAPALGGTCLNVGCIPSKALLQSSEHFHAAQHDFAEHGITVGDVKFDAAKMIERKDAIVTKLTGGVKFLFQKNKVTSLFGTASFAGKNGDAYQIEVDNKGEKTVIEAKHVIVATGSVPRPLPQVAIDNVNVLDNEGALNLTEVPAKLGVIGSGVIGLEMGSVWNRVGAEVTILEAAPTFLAAADQQIAKEAFKYFTKEQGLSIELGVKIGDIKSEGKGVSVAYETAAGEAKTEVFDKLIVAIGRIPNTKGLNAEAVGLEKDERGFIKVDGECRTNLPNVWAIGDVVRGPMLAHKASDEGVAVAERIAGQKPHIDFNNVPFVIYTDPEIAWVGKTEEQLKAEGVEYKKGTSGFGANGRALAMGKAKGTVKVLADAKTDRILGVHMIGPVVSELLTEGVTALEFFASSEDIARIIHAHPTLSEVVHEAALAADKRALHG

SEQ ID NO: 14821 - protein, 508 aa, Neisseria meningitidis
MNTPLPYSNYLIRILTASVYDVAVETPLEPARSLSVRLKNNILLKREDLQPVFSFKIRGAYNKMSKLPKDALACGVIAASAGNHAQGVALSAQRLGCRAVIVMPETTPKIKVDAVKSRGGEVVLRGVSYNDAYDYAMELAEQEGLTYIAPFDDPDVIAGQGTVGMEIVSQHPDPIRAVFVPIGGGGLAAGVAAFIKQVRPEIKVIGVQTNDSCCMKQSVEAGEIVHLKDVGLFSDGTAVKVVGNETFRLCKELLDEIITVDTDAVCGAVKDIFDDTRSITEPAGALALAGLKAYIAREGAENQTLIAVTSGANMNFHRLRHVSERSELGEGNEGIFAVTIPEERGSFLKFVNILGNRNITEFNYRYGDDEKAHIFVGLQAAGLQDLAVIGSRLDEAGLPNVDLTDDEIAKIHIRYMVGGRTDKVENERLVSFEFPERPGALARFLNHMQGGWNITLFHYRNHGADYGRILVGIDVPPHDAAAFDGFLESLGYSYHEETQNAAYKLFLA

SEQ ID NO: 14822 - protein, 221 aa, Neisseria meningitidis; identical to SEQ ID NO: 11037

SEQ ID NO: 14823 - protein, 119 aa, Neisseria meningitidis; identical to SEQ ID NO: 420

SEQ ID NO: 14824 - protein, 590 aa, Neisseria meningitidis
MNGNAVCKTFRRHFKHTRTVKFHVMSVKIQTRSVNTDVFNHLLTAGADPLIARLCASRGVQSPAELDDKLASLLPYQTLTNCEAAAGRLADAVERKEKILIVADYDADGATACSVGMSGLAAMGAKVDFLVPNRFEHGYGLTPELAEIAAEQGVDLLITVDNGIASIAGVARAQALGLDVIVTDHHLPAETVPDCIIVNPNQKGCGFPSKSLAGVGVIFYVLMALRAELRRRNYFSDGIKEPNLGELLDLVALGTVADVVPLDHNNRILVSQGLKRMRSGKMRPGIRALFEVARRDWRKAQPFDMGFALGPRINAAGRLDDMSVGIACLLAQDDAEAQELAAQLNNLNIERREIEQSMLQDALNAFPETLPPGQTTLVAYRDDFHQGVVGIVASRLKDRFYRPTIVFAPADNGEVRGSGRSIPNLHLRDALDLVSKRHPDLILKFGGHAMAAGLSILEHNIPAFQTAFEEAVREMVCEDDLSQTFITDGSLPARDITLEQAQNLARHVWGQGFAPPSFTDEFHVVRQQPLGAEGKHKKVWLQKDGYEFEAMFWRCSEDIPEYIRTVYRLVANEWRNNLELQLYIDYWEAA

SEQ ID NO: 14825 - protein, 293 aa, Neisseria meningitidis; identical to SEQ ID NO: 9178

SEQ ID NO: 14826 - protein, 255 aa, Neisseria meningitidis
MSSNKASIFTRLHRLCRLAVWLFKTGKNLRGIDGGCPESRNRAVIELGRGALAALDIGLEVGRPAPEHPNGVLVAANHVSWLDIFAMSAVYPSSFIAKQEIKSWPVLGKMGQNAGTVFINRNSRRDIEPINRAVCETLQRGQNVSFFPEARTSSGLGLLPFKAALFQSAIDAGAKVLAVALRYYDETGKRTARPSYADVGLPTCLWRIVSMKKLTIKVDFVCVADAAESEDRYALKDKIEESIRAVVAGDADVAV

SEQ ID NO: 14827 - protein, 1296 aa, Neisseria meningitidis
MTYPIPKPREKSRWPNLSQGSLPLALARYLPHKQLKVVLTLDAEQALRLQTAWRFFRPHDTAVFLPDWETLPYERFSPHQDLVSERLSALWQIKSGAADVLFVPVATAMQKLPPVPFLAGRTFWLKTGQTLDIGRLKSDLVDAGYNHVSHVVAAGEFAVRGGIVDLFPMGSEMPYRIDLFDDEIDSIKTFDTETQRTISPVSEIRLLPAHEFPTDSEAQKIFRSRFREEVDGNPNDAAVYKAVSNGHFGAGVEYYLPLFFENELETLFDYIGEDALFVSLGDVHAEANRFWSDVKSRYAMAQGDETYPPLLPQYLYLSADVFAGRLKNYGQVLPDVSGKEHTLPDLAVNRQSDEPLQALKDFQTTFDGRILLCAESLGRRETMLGFLQQNGLKAKPVSDWQGFLSAHEPLMITVAPLAYGFKLGGLQSPNQQQTTSASEGEGDAVTDQTEFSAAATNPLPSPLPQEREQSAAAVSDDLKAKSSLHLVASNLHGQIRQQPTPSPVGEGWGEGKAVAAQTEFPASATNPLPSPLPQEREQSAAAVSDNLKTESSLPPGKSNLHGQIQQQPAPSPVGEGWGESKAVADQSAIAVITESELYQYVARSRAHNRRKKHAAVSDGLLRDLAEINIGDPVVHEEHGIGRYMGLVTMDLGDETNEMMLLEYAGEAQLYVPVSQLHLISRYSGQAHENVALHKLGSGAWNKAKRKAAEKARDTAAELLNLYAQRAAQSGHKFEINELDYQAFADGFGYEETEDQAAAIAAVIKDLTQTKPMDRLVCGDVGFGKTEVALRAAFVAVMGGKQVAVLAPTTLLVEQHAQNFADRFADFPVKVASLSRFNNSKATKAALEGMADGTVDIVIGTHKLVQDDIKFKNLGLVIIDEEHRFGVRQKEQLKRLRANVDILTMTATPIPRTLSMALEGLRDFSLITTAPSRRLAVKTFVKPFSEGSVREAVLRELKRGGQVFFLHNEVDTIENMRERLETLLPEARIGVAHGQLRERELEQVMRDFLQQRFNVLLCSTIIETGIDIPNANTIIINRADKFGLAQLHQLRGRVGRSHHQAYAYLLTPEYITKDAEKRLDAIAAADELGAGFTLAMQDLEIRGAGEILGEGQSGEMIQVGFTLYTEMLKQAVRDLKKGRQPDLDAPLGITTEIKLHSPALLPEDYCPDIHERLVLYKRLAVCETVQQINTIHEELVDRFGLPEQPVKTLIESHHLRLMAKELGIDAIDAAGEAVTVTFGKNNNVDPTEIILLIQNDKKYRLAGADKLRFTAEMENIEVRINTVKNVLKTLQNRCLPK

SEQ ID NO: 14828 - protein, 92 aa, Neisseria meningitidis; identical to SEQ ID NO: 1287

SEQ ID NO: 14829 - protein, 312 aa, Neisseria meningitidis
MLELNGLCKRFGGKTVADNICLTVGRGKILAVLGRSGCGKSTLLNMIAGIVRPDGGEIQLNGENITRMPPEKRRISLMFQDYALFPHMSALENAAFGLKMQKMPKAEAERLAMAALAEVGLENEVHRKPEKLSGGEKQRLALARALVVRPSLLLLDESFSSLDTHLRGTLRRMTAERIRNGGIPAVLVTHSPEEACTAADEIAVMHGGRILQYGTPETLVKTPSCVQVARLMGLPNTNDDRHIPQHAVRFDQDGMECRVLSRTCLPESFSLSVLHPEHGILWLNLDMPHAGEISGNDTVRIHIEDREIVRFR

SEQ ID NO: 14830 - protein, 311 aa, Neisseria meningitidis
  misc_feature 307, 308, 309: 'Xaa' is any amino acid
VSISAPYANENSRILLSTTDISSENGKIKLQSYGDQFYYAGQGELYTFDKRSYKTGKWYKLKHVTEIKEHKNAKADPVSLSASQGIEIKSGGNIGAHATLFDAPRGSVKIEAGRGLVLYAVEDLNYDKLDTRTKRKFIGITYDKVHDTTTHTMKTALPSRVVAESANLQSGWDAKLQGTQFETTLGGAAIRAGVGDQARADAKIILEGIKSSVRTETVSSSKSALWQKQAGRGSNIETLQLPSFTGSVAPVLSAPGGYIVDIPKGNLKTEIEKLAKQPEYAYLKQLQTAKNVDWNRCSLSTTSGTIXXXHT

SEQ ID NO: 14831 - protein, 103 aa, Neisseria meningitidis; identical to SEQ ID NO: 2233

SEQ ID NO: 14832 - protein, 512 aa, Neisseria meningitidis
MVSKLDKYWQHPALYWPLLILFAAATPFTFAPYYHFWLMPLIFGAFVRLIELRPRFAASSAYLFGLTAYTTQFYWIHTALHDVSGLPDLYAVPLTFLLPAYLALYPALCFWLWKKFTLPRGIKIGLVLPILWTLTEFARERFLTGFGWGAIGYSQITPDSPLAGFAPLGGIHMVTLATAFLGVWLVLASDNTARSGKRLLPIILIAALLAAGYTARQTDFTRPDGSRSTVALLQGNIDQTLKWREDQVIPTIQKYYEQVGKTTADIVILPETAIPVMRQNLPENILAKFAEQAQNNGSALAVGISQYTSDGNGYENAVINLTGYQENNQDGIPYYAKNHLVPFGEYKPLPFLTTPLYKMMNMPLSDFRKGGGKQSALLMKNQKIAFNICYEDGFGDELIAAAKDATLLANASNMAWYGKSNAMYQHLQQSQARAMELGRYMVRATNTGATAIISPKGNIIAQAQPDTETVLEGHIKGYVGETPYMKTGSSWWLMGILTLAALILFIFRNKEH

SEQ ID NO: 14833 - protein, 85 aa, Neisseria meningitidis; identical to SEQ ID NO: 4382

SEQ ID NO: 14834 - protein, 248 aa, Neisseria meningitidis
VQPETSAQYQHRFAQAIRGGEAADGLPQDRLNVYIRLIRNNIHSFIDRCYTETRQYFDSEEWSRLKEGFVRDAHAQTPYFQEIPGEFLQYCQSLPLSDGILALMDFEYTQLLAEVAQIPDIPDIHYSNHSKYTPSPAAFIRQYRYDVTDDLQEAETALLIWRNAEDDVMYQTLDGFDMMLLEIMGSSALSFDTLAQTLVEFMPEDDNWKNILLGKWSGWTEQRIIIPSLSAISENMEGNSPGQNHLSA

SEQ ID NO: 14835 - protein, 56 aa, Neisseria meningitidis; identical to SEQ ID NO: 3693

SEQ ID NO: 14836 - protein, 76 aa, Neisseria meningitidis; identical to SEQ ID NO: 286

SEQ ID NO: 14837 - protein, 284 aa, Neisseria meningitidis; identical to SEQ ID NO: 4138

SEQ ID NO: 14838 - protein, 150 aa, Neisseria meningitidis; identical to SEQ ID NO: 7624

SEQ ID NO: 14839 - protein, 301 aa, Neisseria meningitidis; identical to SEQ ID NO: 5026

SEQ ID NO: 14840 - protein, 42 aa, Neisseria meningitidis; identical to SEQ ID NO: 6907

SEQ ID NO: 14841 - protein, 296 aa, Neisseria meningitidis; identical to SEQ ID NO: 337

SEQ ID NO: 14842 - protein, 470 aa, Neisseria meningitidis
VKILILGNGQVGSTVAQNLAAIPNNDVTVIDIDEKALQETGSRLDVQTVFGNGASPFTLERAGAEDADLLLALSRSDETNIVACKVAADLFNIPGRIARVRSSEYLEYLSPKLENNENGSLSIFGITETISPEQLVTEQLAGLIDCPGALQVLRFADDRVRMVIIQARRGGLLVGRSIADIAQDLPDGADCQICAVYRNNRLIVPAPQTVIIEGDEILFAAAAENIGAVIPELRPKETSTRRIMIAGGGNIGYRLAKQLEHAYNVKIIECRPRRAEWIAENLDNTLVLQGSATDETLLDNEYIDEIDVFCALTNDDESNIMSALLAKNLGAKRVIGIVNRSSYVDLLEGNKIDIVVSPHLITIGSILAHIRRGDIVAVHPIRRGTAEAIEVVAHGDKKTSAIIGRRISGIKWPEGCHIAAVVRAETGETIMGHHTETVIQDGDHIIFFVSRRRILNELEKLIQVKMGFFG

SEQ ID NO: 14843 - protein, 181 aa, Neisseria meningitidis
MGKTVTLTAGHSNTDPGAVNGSDREADLAQDMRNIVASILRNDYGLTVKTDGTGKGNMPLREAVKLIRGSDVAIEFHTNAAVSKAATGIEALSTVKNKRWCQVLSKAVAKKTGWKLRGEDGFKPDNAGRHSRLAYAQAGGIVFEPFFISNDTDLALFKTTKWGICRAIADAIAMELGAAKV

SEQ ID NO: 14844 - protein, 383 aa, Neisseria meningitidis
MSNRDQLFKAPPFENHSPLTWYQAASQLPNFIRDDAQAAAIEHLDRLWTELMMFKRKRNRFLGRSLRSPQVPKGLYFYGGVGRGKSFLMDAFFGCLPYRRKRRVHFHAFMAEIHQRLKTLKSESNPLKSVAAEIAKETRVLCFDEFHVSDIADAMILGRLLENLLNEGVVLVATSNYAPSELYPQGQNRSSFLPTIALIESSLTVLNVDGGEDYRLRTLRPAEIFFTPANEENEAKLAKLFKEMTGITDLNPGISTIHGREIPHKAESGRAIWFDFRALCFGPRSQSDYLYLAEHYEMVFISGLEQLSPQEKAEARRLTWLIDVLYDFRVKLCATGAVDVNHIYTEGDFAEEFTRTASRMVEMQSEVYLEQPHLTLSPKDSGG

SEQ ID NO: 14845 - protein, 156 aa, Neisseria meningitidis
MTDTDTQADRFEQMMWQAVDKLFEQHDGKLESMDGREQELVLIWRTEADIGNGSILQFVCNWSFPAAEKTCSVLKKIGAVHSAMLIHRAADALGKEIRHLQSEGKNLKEMWDITQHLDNKTASLPNSLDEQYWQDPDKLYLPGWQYYSGNPVQTLF

SEQ ID NO: 14846 - protein, 313 aa, Neisseria meningitidis
MPTPKAFALLGPTAGGKTALALKIAETLPVEIISLDSALVYRDMDIGTAKPSASERAFVPHHLIDIIPPTESYSAARFVEDCTRLVGEISSRGRFALIVGGTMMYFRALTQGLNDLPEADACLRADLDEQKQMYGLDFLYRTLQKVDPETACRLKPNDSQRIERALEVYYLTGKPMSEHLGRQSPHTLPFDLHTAALIPENRARLHENIALRFHLMLEQGFIGEVENLRRRYPGLTADSPAIRCVGYRQAWKYLDGKTDFPAFVEKGIAATRQLAKRQLTWLRKTPLDCVADPFSDGTSCTRLIEAAKRFFGA

SEQ ID NO: 14847 - protein, 129 aa, Neisseria meningitidis
MSEAEYFSHFISNGNGKLLEIPQRRGRQDGVFIDWLSFTLHEDSLLKVSGCPLVSDAEYMFVLSKKLEEILGFGITSRCKSKGNKFYDSMFRLGSEEVDYGEVHYGGQRNTVLIELKGVVATLQIQVGN

SEQ ID NO: 14848 - protein, 513 aa, Neisseria meningitidis; identical to SEQ ID NO: 7492

SEQ ID NO: 14849 - protein, 672 aa, Neisseria meningitidis
MMGGKGGFYRHLAVEGNFGGTTQSLAVCSTIGANSVKMPLSFLYTPHRQAEFMALLQISEPGMSAAPHRHRLAAGIDLGTTNSLVATVRSGSAACLPDAEGRVTLPSVVRYLENGGIEVGKIALSAQKTDPLNTVSSAKRLIGRTLADLHQNTHYLPYRFGDNQRVIELHTRQGVKTPVEVSAEILKTLKSRAEETLVGDLVGVVITVPAYFDDAQRQATKDAARLAGLNVLRLLNEPTAAAIAYGLDNASEGTFVVYDLGGGTFDVSVLQLTKGLFEVKATGGNSALGGDDFDHRLFCYLLEQNGLSQLNEQDSQLLLSLVRAAKEQLTTQTEARIQATLSDGMAIDTSISRAEFHNLTQHLVMKTLEPVKQALKDAGVGKNEVKGVIMVGGSTRMLHVQQAVATFFGQTPLNNLNPDEVVALGAAIQANVLAGNKADGEWLLLDVTPLSLGLETYGGLAEKIIPRNSTIPTARAQDFTTFKDGQTAMTIHVVQGERELVADCRSLAKFTLRGIPPMAAGAARIRVTFQIDADGLLSVSAQEQSTGVHAQIEVKPSYGLDDGAITRMLKDSMDNAAEDMAARARAEAVVEAESLTDAVNAALELDSDLLDAEELQQIRQGIADLQGRLKDGKAEDIRAAAAKLGSITDNFAAKRMNRNIQRALTGQSVDNI

SEQ ID NO: 14850 - protein, 201 aa, Neisseria meningitidis; identical to SEQ ID NO: 9086

SEQ ID NO: 14851 - protein, 306 aa, Neisseria meningitidis
MPNPLYRQHIISISDLSREQLECLLQTALKLKAHPRGDLLEGKLIGSCFFEPSTRTRLSFETAVQRLGGKVIGFSDGANTSAKKGETLADTARIISGYTDAIIQRHPKDGAARVAAEFSRVPVINAGDGTNQHPSQTLLDLVTIYETQGRLDKLKIAMAGDLKYGRTVHSLCQALKRWGCEFAFVSPPSLAMPDYITEELDEAGCRYRILGSLEEAAEWADILYMTRVQRERFDEQEFAKIQGKFNLEASMLAHAKPNLRVLHPLPRVDEIHPDVDATPHAYYFEQATNGVYARMAILSLVLNEEV

SEQ ID NO: 14852 - protein, 240 aa, Neisseria meningitidis
MKPAYFISDLHLSEKQPELTALLLRFLRSSAARQARAVYILGDLFDFWVGDDEVSELNTSVAREIRKLSDKGVAVFFVRGNRDFLIGQDFCRQAGMTLLPDYSVLDLFGCKTLICHGDTLCTDDRAYQRFRKIVHRKRLQKLFLMLPLKWRTRLATKIRRVSKMEKQVKPADIMDVNAAFTARQVRAFGAERLIHGHTHREHIHHENGFTRIVLGDWHNDYASILRVDGDGAVFVPLEKY

SEQ ID NO: 14853 - protein, 82 aa, Neisseria meningitidis; identical to SEQ ID NO: 2338

SEQ ID NO: 14854 - protein, 434 aa, Neisseria meningitidis
MKPFAENIPHSLRGNCCDEALPPHTVDCPECGCRADVPRLDSGEAAFCPRCGHKLFRVGRHPFSAPPAYAAASLILMAFAYGMTYIEVGIPGAASVLSLPEMMRLMVFQDYGFLAEVMFVLTFGAPVLFLLLCLYVYAALIRKQAYPALRLATRVMMRLRQAMMVDVFFVSTLVAYIKLSSVAEVRFGSAFYLMFALSVMLIRTSVSVPQHWVYFQIGRLTGDNAVQTASEGKTCCSRCLYFRDSAESPCGVCGAELYRRRPKSLSISSAFLTAAVILYFPANILPIMISSNPAATEVNTILNGIAYMWDEGDRLIAAVIFSASILVPVLKIAAMSVLIASARFALPTGAKKLSHLYRITEAVGRWSMIDIFVIIILMCSFHTYAARVIPGSAAVYFCLVVILTMLSAYYFDPRLLWDKRASDGIAFNETEKHD

SEQ ID NO: 14855 - protein, 361 aa, Neisseria meningitidis; identical to SEQ ID NO: 2308

SEQ ID NO: 14856 - protein, 77 aa, Neisseria meningitidis
MNRRKIYLLSVALFTLAFMLLVLLGAYLLTVGSKAFAVASFLFAFGALFGQIGALALYLRHKSLHAAQSATKENRYV

SEQ ID NO: 14857 - protein, 140 aa, Neisseria meningitidis; identical to SEQ ID NO: 5192

SEQ ID NO: 14858 - protein, 588 aa, Neisseria meningitidis
LSEIIKRIFYYKCLKICPSVSDGGAVMLQSENSKNLISCSIKALPIMISTNGITMQFGAKPLFENVSVKFGEGNRYGLIGANGSGKSTFMKILGGDLEQTAGEVAIENGVRLGKLRQDQFAYEDMRVLDVVMMGHTEMWAAMTERDAIYANPEATEDDYMKAAELEAKFAEYDGYTAEARAAELLSGVGISEDLHNAKMAEVAPGFKLRVLLAQALFSKPDVLLLDEPTNNLDINTIRWLEGVLNQYDSTMIIISHDRHFLNEVCTHMADLDYNTITIYPGNYDDYMLASAQSRERALKDNAKAKEKLQELQEFVARFSANKSKARQATSRLKQADKIKSEMVEVKPSTRQNPYIRFEADEKAKLHRQAVEVEKLAKRFETQLFKNLNFILEAGQRLAIIGPNGAGKSTLLKLLAGAYNPEYSDGLLPDEGSIKWAEKASVGYYPQDHENDFDVDMDLSEWMRQWGQDGDDEQVIRGTLGRLLFGSNDVVKKVKVLSGGEKGRMLYGKLLLLKPNVLVMDEPTNHMDMESIESLNMALEKYNGTLIFVSHDRQFVSSLATQIIELDGKGGYEHYLGDYESYLEKKGVA

SEQ ID NO: 14859 - protein, 443 aa, Neisseria meningitidis
MLFNHTASELLDLCRRTLDLAKATGATAAEADFSESLGQSVSVRLGEIEQIEFQQDKSLDITVYVGKRKGRAGTADFSEQALRDTVRAAADIARHTAEDGCAGLADPELMAQHIGDPDLYHEWDLDTEAAVGFAKQCEQAALNEDERIENSEGAAVQTGHYQYVYGNTHGFAAHRQGTHHSISCSVVAADENGMQRDYWYDSACRHPDMDSPETIGQTAARRTLRRLGSRSIPTGSYPVLFDTTVSGGLIGHLVGALSGGALYRQSSFLIDSIGKKVLPDFLNLREEPHIPRSFRSSYFDAEGVATAPRFVIQNGIVEGYFLSSYSARKLGMQTTGNAGGAHNLYLNHTHETQSDLLKEMGTGLLVTELMGQGANTITGDYSRGAAGFWVENGVIAYPVHEITVAGRLQDMYRDIVGVADDALRRSSNKIGSILIAGMTVAGS

SEQ ID NO: 14860 - protein, 144 aa, Neisseria meningitidis
MCGLWLLRALTAKLPQQRYAALFITLFFAAVLVFGRHDSMYWYPVLVNLMMLAVFGGSLFAGQTVIERLARLQQPDLPEKAVRYTRRVTQVWCVFFIANGTLAALLARLGRYDWWAVYTGVIAYVLMGMPFAGEWLYRKLVLKV

SEQ ID NO: 14861 - protein, 52 aa, Neisseria meningitidis
MCGPCGWIYDEEHGDPEHGIAPGTKFEDIPDDWKCPECGVGKEDFYLLDFVI

SEQ ID NO: 14862 - protein, 412 aa, Neisseria meningitidis; identical to SEQ ID NO: 2406

SEQ ID NO: 14863 - protein, 964 aa, Neisseria meningitidis
VLQYRFSFIFQAASIMCNHHPQHSHDNDTIRIRGARTHNLKNIDLDIPRHKLVVVTGLSGSGKSSLAFDTLYAEGQRRYVESLSAYARQFLQMMDKPDVDLIEGLSPAISIEQKSTSHNPRSTVGTVTEIHDYLRLLYARVGTPYCPEHKLPLSSQTVSQMVDAVLKLPEDTRVMILAPTVRERKGEFVDFFADLQAQGFARVRVDGEVYQLDEVPKLEKNIKHNIDVVIDRVKVKADIKQRLAESFETALRHGNERALAMEMDSGEEHWFSARFACPVCSYSLPELEPRLFSFNNPMGSCPTCDGLGNTNFFDPEKVVAHPELSLATGAIDGWDKRNQFYFQMIQSLARHYGFDVQAAWETLPEKVKKVILHGSGKEVIDFTYLSERGTTFNRSHAFEGIIPNLERRYRETDSETVREKLREYQNHRACPSCGGARLRKEARYVYVSGEPLHEVSAWPLTKTHRFFETLDLDGNKKQIAEKILKEITERLGFLINVGLDYLNLSRSAETLSGGEAQRIRLASQIGSGLTGVMYVLDEPSIGLHQRDNDRLLATLKRLRDLGNSVIVVEHDEDAIREADFVVDMGPGAGEHGGNVLIADTPENVAKCENSVTGQYLSGKKSIAVPSERTPVNPERMLVLKGARGNNLKNVTLELPLGLITCITGVSGSGKSTLINDTLAKITARELNRAQEEPAPYDDIRGLEHLDKVINVDQSPIGRTPRSNPATYTGLFTPIRELFAGVPLSRERGYNVGRFSFNVKGGRCEACQGDGVIKVEMHFLPDVYVPCEVCHGKRYNRETLEIQYKGKNISQVLDMTVEEAREFFDAVPTVSRKLQTLMDVGLGYIRLGQSATTLSGGEAQRVKLALELSKRDTGRTLYILDEPTTGLHFADIALLLEVIGRLKGKGNSIVIIEHNLDVIKTADWIVDLGPEGGDGGGRIIAKGSPEQVAKVKGSYTGKYLKVVLR

SEQ ID NO: 14864 - protein, 470 aa, Neisseria meningitidis
MKISRPPEFTLLQQEYMQHLTERMTQIAKLLNSSANNPDIDIPDFLTEIKDYSEFSVTDENGTYLHWDKFRRIHTEDTRMKWRAVKESRKKIQKPIDFPFEHQFWFCIPDSLQARLHLIDKSCGSSIGTSSLGGFGRSEQNRFLLKSLIMEEAITSAQLEGAATTRKVAKDMLKSQRKPKTKDEIMIVNNYHLMKKAVELKNTPLSVEMILDLHRIATSNAIENKAEPGQFRQDDEIFIADINGNSLYQPPPHGQVHTLMEEVCAFANNTYDGVENPFIHPVVQAIILHFLIGYIHPFGDGNGRTARALFYWFMLKNGYWLFEYISISRLLKNAPAQYAKSYLYAETDDLDLTYFIYYQCDIIKRAVADLEHYISDKQKHQQEFKAAIAQYTEKIGKLNQRQIGILQKAVEESGKIFTAQEIANQYGISLNTARSDLSKLGEYRFLVPFKSGNALEYVAPQDLLERLEKK

SEQ ID NO: 14865 - protein, 316 aa, Neisseria meningitidis; identical to SEQ ID NO: 6611

SEQ ID NO: 14866 - protein, 240 aa, Neisseria meningitidis; identical to SEQ ID NO: 1969

SEQ ID NO: 14867 - protein, 518 aa, Neisseria meningitidis
MTLAEFWPLCLRRLHDMLPQGQFAQWIAPLTVGEEGGVWVVYGKNQFACNMLKSQFAGKIEAVREELAAGRSAFVFKPGEGVRYEMAVVEGAVEPAEPSLHAGSEEMPVQEVLLDELPSEEPVKPAASKTAADILAERMRNLPHEPRHTAEPASRPESEVLAKARTDAQRDAEEARYEQTNLSPDYTFDTLVEGKGNRLAAAAAQAIAESPGQSYNPFFLYGSTGLGKTHLVQAVGNELLKNRPDAKVRYMHSDDYIRSFMKAVRNNTYDVFKQQYKQYDLLIIDDIQFIKGKDRTMEEFFYLYNHFHNEKKQLILTCDVLPAKIEGMDDRLKSRFSWGLTLELEPPELEMRIAILQKKAEAAGISIEDEAALFIANLIRSNVRELEGAFNRVGASSRFMNRPVIDIDLARTALQDIIAEKHKVITADIIIDAVAKYYRIKISDVLGKKRTRNIARPRQVAMSLTKELTTLSLPSIGDSFGGRDHTTVMHGIRAVAKLREEDPELAQDYEKLLILIQN

SEQ ID NO: 14868 - protein, 391 aa, Neisseria meningitidis
MLNTFLSPWPCFTQEEADAVSKVLLSNKVNYWTGNECREFEKEFAAFAGTRYAVALANGTLALDVALKAMGIGQGDDVIVTSRTFLASASCIVNAGANPVFADVDLNSQNISAETVKTVLTPNTKAIIVVHLAGMPAEMDGIMALAKEHNLWVIEDCAQAHGAKYKGKSVGSIGHVGAWSFCQDKIMTTGGEGGMVTTNDKTLWEKMWSYKDHGKSYDAVYHREHAPGFRWLHESFGTNWRMMEMQAAIGRIQLKRLPEWTACRQAHAAKLAESLGKFKSIRLVEVADYIGHAQYKFYAFVKPEHLKDGWTRDRIVGELNARKVPCYQGSCSEVYLEKAFDNTPWRPKERLKNAVELGDTSLMFLVHPTLTDGEIAFCKEHIEAVLTEATR

SEQ ID NO: 14869 - protein, 377 aa, Neisseria meningitidis; identical to SEQ ID NO: 7656

SEQ ID NO: 14870 - protein, 76 aa, Neisseria meningitidis; identical to SEQ ID NO: 8288

SEQ ID NO: 14871 - protein, 336 aa, Neisseria meningitidis
MPIFKGLDMKNFLSLFASILMSALIAVWFSQNPINAYWQQTYHRNSPLEPLAAYGWWRSGAALQENAYTLSDGIKAFLSGETPPTPQDGGSADMPPEAAASEAAPQTGEIQEWKQDTDTAAVRSGDKVFFVGDSLMQGVAPFVQKSLKQQYGIESVNLSKQSTGLSYPSFFDWPKTIEETLQKHPEISVLAVFLGPNDPWDFPVGKRYLKFASDEWAQEYLKRVDRILEAAHTHRVQVVWLGIPYMKKAKLDGQMRYLDKLLSEHLKGKIILIPTAHTLSGGKDRYTDSVNVNGKPVRYRSKDGIHFTAEGQKLLAAKIMEKIVFEPSTQPSSTQP

SEQ ID NO: 14872 - protein, 385 aa, Neisseria meningitidis; identical to SEQ ID NO: 7299

SEQ ID NO: 14873 - protein, 156 aa, Neisseria meningitidis; identical to SEQ ID NO: 955

SEQ ID NO: 14874 - protein, 318 aa, Neisseria meningitidis; identical to SEQ ID NO: 5909

SEQ ID NO: 14875 - protein, 277 aa, Neisseria meningitidis
MPHALVLQFPSAEALPSDFPSRLPEPDCADEKRMRFIVEEGFSLSGADAALLGSRQIDHAVLPDMDFGELGLIVSDMDSTLITIECVDEIAAGVGLKDKVAEITERSMRGELDFEQSLRSRVALLAGLDEQILADVYENVLKLSPGAEFLLDECKRHDVKFLLVSGGFTFFTERLQQRLGFEYQHANVLEIENGRLTGRLKGRIIDAQAKADLLREYRSRLGLQPHQVLAMGDGANDIPMLKEAGIGVAYRAKPKARAAADACINFGGLERVRGLFG

SEQ ID NO: 14876 - protein, 332 aa, Neisseria meningitidis; identical to SEQ ID NO: 7596

SEQ ID NO: 14877 - protein, 322 aa, Neisseria meningitidis
MTAKPFSLNLTNLLLLAALFAVSLSVGVADFRWSDVFSLSDSQQVMFISRLPRTFAIVLTGASMAVAGMIMQILMRNRFVEPSMAGAGQSAALGLLLMSLLLPAAPLPVKMSVAAVAALIGMLVFMMLIRRLPPTAQLMVPLVGIIFGGVVEAVATFIAYENEMLQMLGVWQQGDFSSVLLGRYELLWITGGLAVFAYLIADRLTILGLGETVSVNLGLNRTAVLWSGLIIVALITSLVIVTVGNIPFVGLVVPNIISRLIGDRLRQSLPAVALLGASLVLLCDILGRVIVFPFEIPVSTVFGVLGTALFLWLLLRKPAHAV

SEQ ID NO: 14878 - protein, 2724 aa, Neisseria meningitidis
MNRTLYKVVFNKHRNCMIAVAENAKREGKNTADTQAVGILPNDIAGFAGFIHSISVISFSLSLLLGSALILTSSSATAQGIVADKSAPAQQQPTILQTGNGIPQVNIQTPTSAGVSVNQYAQFDVGNRGAILNNSRSNTQTQLGGWIQGNPWLARGEARVVVNQINSSHSSQLNGYIEVGGRRAEVVIANPAGIAVNGGGFINASRATLTTGQPQYQAGDLSGFKIRQGNVVIAGHGLDARDTDYTRILSYHSKIDAPVWGQDVRVVAGQNDVAATGDAHSPILNNAAANTSNNTANNGTHIPLFAIDTGKLGGMYANKITLISTVEQAGIRNQGQWFASAGNVAVNAEGKLVNTGMIAATGENHAVSLHARNVHNSGTVASQDDANIHSQTLDNSGTVLSSGRLTVRNLGRLKNQNNGTIQAARLDMSTGGLDNTGNITQTGSQALDLVSAGKFDNSGKIGVSDVPQTGLNPNPSVIPQIPSTATGSGSSTVSVSKPGSNNPVSPTAPAKNYAVGRIQTTGAFDNAGSINAGGQIDIAAQNGLGNSGSLNAAKLRVSGDSFNNTVKGKLQAHDLAVNTQTAKNSGHLLTQTGKIDNRELHNAGEIAANNLTLIHSGRLSNDKKGNIRAAHLQLDTAGLHNAGNILADSGTVTTKNNLRNTGKVSVARLNTEGQTLDNTRGRIEAETVNIQSQQLTNQSGHITATEQLTINSRNVDNQNGKLLSANQAQLAVSDGLNNQHGEIATNRQLSIHDKNQNTLALNNADGTIQSAGNVSLKAKSLANNGTLTAGNKLDIALTDDFVVERDLTAGKQLNLSIKGRLKNTHTLQAGHTLKLNAGNIDNQVTGKIIGGEQTDITSEQHVDNRGLINSDGLTHIGAGQTLTNTGTGKIYGNHIALDAQILLNREETTEGSTKAGTIAARKRLDIGAKEIHNQEGALLSSEGIFAVGNRLDEQHHAAGMADTFVNGSAGLEVQGDALMSVRNMQNINNHFKTETYLAKAEKQVRDYTVLGQNTYYQAGKDGLFDNSQGQKDQTTATFHLKNGSRIEANQWHVRDYHIETYKERIIENRPAHITVGGNLTASGQNWLNKDSRIVVGGRIITDDLNQKEITNQSTTGKGRTDAVGTQWDSVTKKGWYSGRKRQRRTERNHTPYHDTQLFTHDFDTPVSVIQQNAASPSFQPAASAIKLIDGVSTAAVNGQRIHTGNVVSLNNATVTLPNSSLYTTHPDNKGWLVETDPQFADYRRWLGSDYMLQQLKLDTNHLHKRLGDGYYEQKLVNEQIHQLTGYRRLDGYRSDEEQFKALMDNGLTAAKTFALTPGIALSAEQVARLTSDIVWMENQTVTLSDGSTQTVLVPKVYALARKGDLNTSGGLISAEQVLLKLQNGNLTNSGTIAGRQAVLIQARNINSNGNIQADQIGLKAEKSINIDGGQVQAGRLLTAQAQNINLNGTTQTSGNERNGNTAIDRMAGINVVGSHTEQVDNRTSDGILSLHAGNDINLNAATVSNQVKDGTTQITAGNNLNLGTIRTEHREAYGTLDDENHRHVRQSTEVGSSIRTQNGALLRAGNDLKIRQGELEAEEGKTVLAAGRDVTISEGRQITELDTSVSGKSKGILSSTKTQDRYRFSHDEAVGSNIGGGKMIVAAGQDINVRGSNLISDKGIVLKAGHDIDISTAHNRYTGNEYHESKKSGVMGTGGLGFTIGNRKTTDDTDRTNIVHTGSIIGSLNGDTVTVAGNRYRQTGSTVSSPEGRNTVTAKSIDVEFANNRYATDYAHTQEQKGLTVALNVPVVQAAQNFIQAAQNVGKSKNKRVNAMAAANAAWQSYQAAQQMQQFAPSSSAGQGQNNNQSPSISVSITYGEQKSRNEQKRHYTEAAASQIIGKGQTTLAATGSGEQSNINITGSDVIGHAGTALIADNHIRLQSAKQDGSEQSKNKSSGWNAGVAVKIGNGIRFGITAGGNIGKGKEQGGNTTHRHTHVGSTTGKTTIRSGGDTTLKGAQLIGKGIQADTRNLHIESVQDTETSQSKQQNGNVQVTVGYGFSASGSYSQSKVKADHASVTEQSGIYAGEDGYQIKVRDNTDLKGGIITSTRSAESKGKNRFQTATLTHRDIQNHSRYEGRSFGIGGSFDLNGGWDGTVTDKQGRPTDRISPAAGYGSDGDSKNSTTRSGVNTRNIHITDEAGQLARTGRTAKETEARIYTGIDTETAAQHTGRLKNSFDKDAVAKEINLQREVTKEFGRNAAQAVAAVADKLGNTQSYERYQEARTLLEAELQNTDSEAEKAAFRASLGQVNAYLAENQSRYDTWKEGGIGRSILHGAAGGLTTGSLGGILAGSGTSLAAPYLDKAAENLGTAGKAAVNALGGAAIGYAAGGNVGTAAVGANVDWNNRQLHPKEMALADKYAEALKREVEKREGRKISSQEAAMRIRRQILRWVDKGSQDGYTDQSVISLIGMKGEDKALGYTWDYRDYGARNPQTYNDPKLFEEYRRQDKPEYRNLTWLHSGTKDTKIRQGERKNEEFALNVAEGLTSLVNPNPRIKVPILAGIRNLKNIKPTVTGSDPLLAGAGNIRIPATSNVAKVDRIPDTALASKSHQKNDFGTSKGQGAESSIPVPQAISIKIKNPDKTVSETTYQSNPKHTPGQLGFKFDAGIEPKNSVQLIESSVQIGKQRFAIDDKGHIHRYMGGDRKNEPWHWAGSTSDKKNPLSLTSQQKAGIKRAYPEQSKNKLLK

SEQ ID NO: 14879 - protein, 41 aa, Neisseria meningitidis; identical to SEQ ID NO: 3182

SEQ ID NO: 14880 - protein, 46 aa, Neisseria meningitidis
MMPTIFNHLENNGGNIWQNITPARYPEQHQGGIHQADGSLKILLLL

SEQ ID NO: 14881 - protein, 869 aa, Neisseria meningitidis
LTAEPSTSLFPPIERIKMPANLSSALETFKRQRDAAEAHYLKANRVSVFFREYTAAVETLLAALWVEHFQNSALCLMAVGGFGRGELYPCSDVDLAVVSPAPLSDGIQEQIARFVQTLWDCKLMPSVKSGGIGELCESVRDDITGDTAFLEARFLFGNRQTADELAKKMNAQRNVPAFVEAKLVEMEHRHAKSQGSGAVLEPNIKSCPGGLRDIHTLLWIAKAQGLATDLPDLLKQRILTRAEAGMLSHGYRRLAHIRIHLHLNAKRAEDRLLFDLQPQVAESMGYEGLNLRRQSEELMRVFYRAIKTVKQLGGILTPMLQSRVSSTPLRVTLRIDDDYIQVNNQIAARHTDIFFRRPEHIFKIVEIMQQRNDITALEPQTLRAWWGATRKINRSFYQNSENRHRFAGFFRNGNGLTQTLRFLNLYGVLGRYLPAWEKIVGLLQHDLFHIYPVDDHILTVVRNVRRLALDMHSHELPYASALMQSFEKQDILYLAAFFHDIAKGRGGDHAIQGIADARQFAADHFLTEEESDLLAWLVENHLLMSTVAQKEDIQDPSVLDAFCKRVQTHERLSALYLLTISDIRGTNPKLWNAWRASLLESLFHAAGRYLTGNGGNPHTLFGRRRQEAADLLTRAAVPEKQQKKLWNALGSAYFARHQSREILWHAANLVHDFETPIVRSRILPKSDSFQVMVFMPNGPRLFARLCRIFSRHGFDILAARAFITEHDYILDTFIVQIPSQHAPEDYPDIQSALEAELNSFIHGHTVAEISSHSRRISRRSRYMPIAPSITITPEEDYPDWYSVEITAVNRPFLLADMAEVFFAHNVSLRYAKISTLDERAEDSFTVFSLDLKNPKIQSSLKQTLLEQLS

SEQ ID NO: 14882 - protein, 431 aa, Neisseria meningitidis
MSVIQDLQSRGLIAQTTDIEALDALLNEQKIALYCGFDPTADSLHIGHLLPVLALRRFQQAGHTPIALVGGATGMIGDPSFKAAERSLNSAETVAGWVESIRNQLTPFLSFEGGNAAIMANNADWFGSMNCLDFLRDIGKHFSVNAMLNKESVKQRIDRDGAGISFTEFAYSLLQGYDFAELNKRHGAVLEIGGSDQWGNITAGIDLTRRLNQKQVFGLTLPLVTKSDGTKFGKTEGGAVWLNAKKTSPYQFYQFWLKVADADVYKFLKYFTFLSIEEIDAIEAKDKASGTKPEAQRILAEEMTRLIHGEAALQAAQRISESLFAEDQSSLTESDFEQLALDGLPVFEISDGINAVEALVKTGLASSNKEARGFVNAKAVLLNGKPAEANNPNHAAERPDDACLLTDEHKRFGKYTILRRGKRNHALLVWK

SEQ ID NO: 14883 - protein, 117 aa, Neisseria meningitidis; identical to SEQ ID NO: 302

SEQ ID NO: 14884 - protein, 68 aa, Neisseria meningitidis
MFTFLNKNIFIKTIVLGCFYSFLFFSFFVSGKSFGYSFEIFNMDTSALAFLSVFMGFFISVAVHIYDI

SEQ ID NO: 14885 - protein, 193 aa, Neisseria meningitidis; identical to SEQ ID NO: 1600

SEQ ID NO: 14886 - protein, 395 aa, Neisseria meningitidis; identical to SEQ ID NO: 3616

SEQ ID NO: 14887 - protein, 61 aa, Neisseria meningitidis; identical to SEQ ID NO: 1125

SEQ ID NO: 14888 - protein, 158 aa, Neisseria meningitidis
MPIEIERRFLIGNDNWRQYADEPLLLRQGYLSVEKERTVRVRIAGKRAWLTLKGYISEISRSEFEYEIPLADAEKMMETMCPFKMEKRRYPVRWGGSLFEVDVFLGENAPLVVAEIELPDENADFDRPDWLGREITADGMFTNAYLSRHPFSSWKNAV

SEQ ID NO: 14889 - protein, 489 aa, Neisseria meningitidis; identical to SEQ ID NO: 4824

SEQ ID NO: 14890 - protein, 232 aa, Neisseria meningitidis; identical to SEQ ID NO: 6483

SEQ ID NO: 14891 - protein, 764 aa, Neisseria meningitidis
VEEEAMNTPTDLKVTKRDGRLEAIDLDKIHRVVTWAADGLENVSVSQVELKSHIQFYNGIRTDDIHETIIKAAADLISEDTPDYQYLAARLAIFHLRKIAYGEYEPPHLYDHVKKLTDAGKYDRHILEDYSREEFDELNAYIDHERDMSFSYAAVKQLEGKYLVQNRVTRQIYETPQFLYVLVAMCLFSKYPKEARLGYVKRFYDAVSTFKVSLPTPIMSGVRTPTRQFSSCVLIECDDSLDSINATTSAIVKYVSQRAGIGINAGRIRGLDSEIRGGEARHTGCIPFFKMFQAAVKSCSQGGVRGGAATLFYPLWHIEAESLLVLKNNRGVEDNRIRQLDYGVQINRLLYTRLIKGGNITLFSPNEVPGLYEAFFADQDEFERLYTKYEQDPDIRKRIIPAADLFSTLMQERAGTGRIYIQNVDHCNTHSPFDPRVAPVHQSNLCMEIALPTKPLDNINDPNGEIALCTLSAFNLGALNSLDELEGLADLTVRALDALLDYQGYPVEAARTSTMGRRSLGIGVINYAYYLAKNGVRYSDGSALGLTHRTFEAIQYYLLKASANLAKEYGACTLFNQTVYSQGKLPIDTYKKDLDAVCGEPLHYDWESLRAEIVKYGLRNSTLTALMPSETSSQIANATNGIEPPRGLVTVKASKDGILKQVVPEFETLKNAYETLWQLPGNEGYLKLVGVMQKFVDQSISANTAYDPGKFEGGKVSMKQMLKDLLTAYKYGVKTLYYHNTRDGADDTQTDIQDDGCAGGACKI

SEQ ID NO: 14892 - protein, 284 aa, Neisseria meningitidis; identical to SEQ ID NO: 1842

SEQ ID NO: 14893 - protein, 471 aa, Neisseria meningitidis; identical to SEQ ID NO: 7428

SEQ ID NO: 14894 - protein, 419 aa, Neisseria meningitidis
MKQTVLKNNLQNLLESAENILLLQGPVGDFFLRLADWLTANGKTVHKFNFNAGDDYFYPPTQAHTVVFNDNYDAFPEFLQEYITQHHIQAVVCFGDTRPYHVIAKRIANENQASFWAFEEGYFRPYYITLEKDGVNAFSPLPRRADFFLEQFPKLAQQEYKAPTPVRGGFTPMAKNAVRYYIELFRNPNKYPNYIHHRASNAGHYLKLWSISILKRLNYYIEDIQIAKRVEAGKYGKFFIVPLQVFNDSQVRIHCDFSSVRSFLLHALASFAAHAPADTNLIIKHHPMDRGFIDYSRDIKRFIKKHPKLKGRITYVHDVPLPVFLRHGLGMVTINSTSGLSGLIHNMPVKVLGRAHYDIPGITDQNTLAEFWNHPTPPDSDLFHAYRMYHLNVTQINGNFYSQVFFPNKNTSDSSTPTT

SEQ ID NO: 14895 - protein, 471 aa, Neisseria meningitidis
MGADIAQLNSKVRTELFSSTGNQTIANLGGRLATNLSNAGISAGINTAVNGGSLKDNLGNAALGALVNSFQGEAASKIKTTFSDDYVAKQFAHALAGCVSGLVQGKCKDGAIGAAVGEIVAESILGGRNPATLSDAEKHKVISYSKIIAGSVAALNGGDVNTAANAAEVAVVNNALNFDSTPTNAKKHQPQKPDKTALEKIIQSIMPAHAAGAMTNPQDKDAAIWISNIRNGITGPIVITSYGVYAAGWTAPLIGTAGKAAISTCMANPSGCTVMVTQAAEAGAGIVTGAVTVGNAWEAPVGALSKAKAAKQAAPKETINNLANLAKAEQQILFRIAQRDTQLDAWKTGFNNRVRKGAGLLDASNIPITINGKTIKPVQAISLKGAPVYSGVSEQEIFALYRQMTGQNPNFRVLPDGRLANGIISTGEWAGTKIALRNFSKTENSTQARWTLDLQNPPSFIKGTKLELKFQ

SEQ ID NO: 14896 - protein, 269 aa, Neisseria meningitidis; identical to SEQ ID NO: 5955

SEQ ID NO: 14897 - protein, 56 aa, Neisseria meningitidis; identical to SEQ ID NO: 2455

SEQ ID NO: 14898 - protein, 489 aa, Neisseria meningitidis; identical to SEQ ID NO: 7627

SEQ ID NO: 14899 - protein, 240 aa, Neisseria meningitidis
MSEDTDMLRSILAASLLAVSFPAAAEALNYNIVEFSESAGVEVAQDTMSARFQVAAEGRDKNAVNAEFVKKFNSFNRKLKNGSFKTELVSRSAMPRYQYTNGRRIQTGWEERAEFKVEGRDFDALNRFIADVQTDASLEYTDFSVSRERRNEVIDQVSKDAILRFKTRAEKLAGILGASGYKIVKLNLGHIGSHIAGGGAAQAKMLRAMPMAASVNMEGADSAAPGVEEISISVNGTVQF

SEQ ID NO: 14900 - protein, 147 aa, Neisseria meningitidis; identical to SEQ ID NO: 2466

SEQ ID NO: 14901 - protein, 410 aa, Neisseria meningitidis
MGLKHFLEKIEPHFLPGGKHEKWYALYEAAATIFYTSGAVTRKAAHVRDALDSKRMMILVWLALFPAMFYGMYNVGAQAFGALTPDLLQQSIANDWHYALANALGINMSSEAGVLGKMLFGAIYFLPIYATVFIVGGFWEVLFATVRKHEINEGFFVTSILFALIVPPTLPLWQAALGISFGVVVAKEVFGGTGKNFMNPALAGRAFLFFAYPANLSGDAVWTAVDGYSGATALAQWAAHGADGLKNAVTGQTITWMDAFIGKLPGSIGEVSTLALLIGGAFIVFARIASWRIIAGVMIGMIAMSSLFNFIGSDTNAMFAMPWYWHLVVGGFAIGMLFMATDPVSASFTNVGKWWYGALIGVMCVLIRVVNPAYPEGMMLAILFANLFAPIFDYFVAQANIKRRKARSNG

SEQ ID NO: 14902 - protein, 351 aa, Neisseria meningitidis; identical to SEQ ID NO: 1414

SEQ ID NO: 14903 - protein, 424 aa, Neisseria meningitidis; identical to SEQ ID NO: 4741

SEQ ID NO: 14904 - protein, 112 aa, Neisseria meningitidis
MTGFNDAAGVASSSTIKGKYVKEVEVKNGVVTATMLSTGVNNEIKGKKLSLWAKRQAGSVKWFCGQPVTRAANAKDDVAAATGTDKIDTKLKKPFYPISFRTDEAGFPLLRE

SEQ ID NO: 14905 - protein, 60 aa, Neisseria meningitidis; identical to SEQ ID NO: 4635

SEQ ID NO: 14906 - protein, 246 aa, Neisseria meningitidis; identical to SEQ ID NO: 2993

SEQ ID NO: 14907 - protein, 124 aa, Neisseria meningitidis; identical to SEQ ID NO: 2472

SEQ ID NO: 14908 - protein, 136 aa, Neisseria meningitidis; identical to SEQ ID NO: 1774

SEQ ID NO: 14909 - protein, 105 aa, Neisseria meningitidis; identical to SEQ ID NO: 895

SEQ ID NO: 14910 - protein, 94 aa, Neisseria meningitidis; identical to SEQ ID NO: 387

SEQ ID NO: 14911 - protein, 190 aa, Neisseria meningitidis
MDNHAEAHWQNGWLQSIRHTPSPNFSPRETGETVSLIVLHNISLPPFEYGTDAVEKLFANRLDPDGHPFFSLIHTLRVSSHFLIKRDGETVQFVSCDNMAYHAGVSSFGGREKCNAFSIGIELEGCDFEPFAEAQYRSLEALLDAICRRYPVTAVTGHQDIAPGRKTDPGHFFDWRRIREKGFPVDRNAV

SEQ ID NO: 14912 - protein, 658 aa, Neisseria meningitidis
MEYMDLKSLLNFGLPNMPRTVIGLRKKAQRDGWQTRRRQGKGGGVEYALPIEIRAAIMKRQSDELAEKMPKMLPQVRPGTAMSAQALAEAAKLLNEKQRSVADARCAVVAAVLGIKYEYDCSAKAAVAQFLGLLAEGKLDAVTLGNLEKANDRSRSAKVGERTLDGWISAYLKAENATERLVTLAPKTTKVVKPIESYGWLPMFMQFHNIPSAPKLAHSYRRFVQWAEAENMPVNDVPNLSMVRRVWDKLPLIMQERGRKTGAAYKSLLPYVKRDWGALKPNDVWIGDGHSFKAKVAHPVHGRPFKPEVTVIIDGCTRFVVGFSVSLAESCVAVSDALRIGVKHFGLPIIYHSDNGGGQTGKTIDHEITGITSRLGIRHETGIAGNPQGRGIIERWWKDNLIEMARQYETFAGAGMDSSTKNLMYRKMESAFNALEKGKDLTEEQQKYLKKLPSWSRFIADVVKCIDDYNNRPHGELPRHPDGGHYTPKAYREMRLEQDGIAPDMLSAEELATMFMPQEVRKVQRGWLDLFNNSYFSTELAEYHKDEVRVSYDLDDADFVNVFDMDGKFIAKAQINGNTREAFPVSRRDQLAENRRKGKIKRAENAIKLANAEVNPALEQAAAWDELGNLGGNVIEAEYAVLPKTGTDDFVLFEADRS

SEQ ID NO: 14913 - protein, 292 aa, Neisseria meningitidis; identical to SEQ ID NO: 1803

SEQ ID NO: 14914 - protein, 63 aa, Neisseria meningitidis
LLLCIADMLLYRLLGGAEIECGRCPVPPMTDWQHFLLAMGTVSAWVAVIWAYLIIESEKNGRY

SEQ ID NO: 14915 - protein, 415 aa, Neisseria meningitidis; identical to SEQ ID NO: 8108

SEQ ID NO: 14916 - protein, 378 aa, Neisseria meningitidis
MKNISLSPPAMLGILGGGQLGRMFTIAAKTMGYKVTVLDPDPDAPAAEFADRHLCAPFDDQAALDELAKCAAVTTEFENVNADAMRFLAKHTNVSPSGDCVAIAQNRIQEKSWIRKAGLQTAPYQAVCKAEDITEASTQFLPGILKTATLGYDGKGQIRVKTLDELKAAFAEHGGVDCVLEKMVDLRSEISVIVCRLNNDNVQTFDPAENIHENGILAYSIVPARLSADVQQQARQMAQRLADELDYVGVLAVEMFVVGDTHELVVNEIAPRPHNSGHHTIDACAADQFQQQVRLMCNLPPADTKLLSSCCMANILGDVWQEDGGEPDWFPLQSRPDAHLHLYGKKTAHKGRKMGHFTVLTTDSDTAFQEAKKLHQSL

SEQ ID NO: 14917 - protein, 808 aa, Neisseria meningitidis
MHIPFKPVLAAAAIAQAFPAFAADPAPQSAQTLNEITVTGTHKTQKLGEEKIRRKTLDKLLVNDEHDLVRYDPGISVVEGGRAGSNGFTIRGVDKDRVAINVDGLAQAESRSSEAFQELFGAYGNFNANRNTSEPENFSEVTITKGADSLKSGSGALGGAVNYQTKSASDYVSEDKPYHLGIKGGSVGKNSQKFSSITAAGRLFGLDALLVYTRRFGKETKNRSTEGDVKIENKGYVFSPTQSFSKYQTYVATGVARSQPDPQEWVNKSTLFKLGYNFNDRNRIGWIFEDSRTDRFTNELSNLWTGTIYSPATGDYRHRQDVSYRRRSGVEYKNELEHGPWDSLKLRYDKQRIDMNTWTWDIPKNYDLRGINSEVYHSFRHIRQNTAQWTADFEKQLDFSKAVWAAQYGLGGGRGDNANSDYSYFVKLYDPKILTSNQAKITMLIENRSKYKFAYWNNVFHLGGNDRFRLNAGIRYDKNSSSAKDDPKYTTAIRGQIPHLGSERAHAGFSYGTGFDWRFTKHLHLLAKYSTGFRAPTSDETWLLFPHPDFYLKANPNLKAEKAKNWELGLAGSGKAGNFKLSGFKTKYRDFIELTYMGVSSDNPNKPTYAPLSDGTALVSSPVWQNQNRTAAWVKGIEFNGTWNLDSIGLPKGLHTGLNVSYIKGKATQNNGKETPINALSPWTAVYSLGYDAPSKRWGINAYATRTAAKKPSDTVHSNDDLNNPWPYAKHSKAYTLFDLSAYLNIGKQVTLRAAAYNITNKQYYTWESLRSIREFGTVNRVDNKTHAGIQRFTSPGRSYNFTIEAKF

SEQ ID NO: 14918 - protein, 273 aa, Neisseria meningitidis
MDFLIVLKALMMGLVEGFTEFLPISSTGHLIVFGNLIDFHSNHKVFEIAIQLGAVLAVVFEYRQRFSNVLHGVGKDRKANRFVLNLAIAFIPAAVMGLLFGKQIKEYLFNPLSVAVMLVLGGFFILWVEKRQSRAEPKIVDVDALRPIDALMIGVAQVFALVPGTSRSGSTIMGGMLWGIERKTATEFSFFLAVPMMVAATAYDVLKHYRFFTLHDVGLILIGFVAAFVSGLVAVKALLRFVSKKNYIPFAYYRIVFGIAIIILWLSGWISWE

SEQ ID NO: 14919 - protein, 594 aa, Neisseria meningitidis
MSLVELKVPDIGGHENVDIIAVEVNVGDTIAVDDTLITLETDKATMDVPAEVAGVVKEVKVKVGDKISEGGLIVVVEAEGTAAAPKAEAAAAPAQEAPKAAAPAPQAAQFGGSADAEYDVVVLGGGPGGYSAAFAAADEGLKVAIVERYKTLGGVCLNVGCIPSKALLHNAAVIDEVRHLAANGIKYPEPELDIDMLRAYKDGVVSRLTGGLAGMAKSRKVDVIQGDGQFLDPHHLEVSLTAGDAYEQAAPTGEKKIVAFKNCIIAAGSRVTKLPFIPEDPRIIDSSGALALKEVPGKLLIIGGGIIGLEMGTVYSTLGSRLDVVEMMDGLMQGADRDLVKVWQKQNEYRFDNIMVNTKTVAVEPKEDGVYVTFEGANAPKEPQRYDAVLVAAGRAPNGKLISAEKAGVAVTDRGFIEVDKQMRTNVPHIYAIGDIVGQPMLAHKAVHEGHVAAENCAGHKAYFDARVIPGVAYTSPEVAWVGETELSAKASGRKITKANFPWAASGRAIANGCDNGFTKLIFDAETGRIIGGGIVGPNGGDMIGEVCLAIEMGCDAADIGKTIHPHPTLGESIGMAAEVALGTCTDLPPQKKK

SEQ ID NO: 14920 - protein, 60 aa, Neisseria meningitidis; identical to SEQ ID NO: 3237

SEQ ID NO: 14921 - protein, 287 aa, Neisseria meningitidis
MRILLTGSKSQLARCLRDRLPEDWETIATDSASLDITDADAVCNMVKSFQPDAIVNTAAYTAVDKAEGDAAAAFAVNASAVYNLALAAHRAHARFIHISTDYVFDGKGKRPYQESDFTNPSNVYGQSKTAGELLALSANPDSLILRTSWLFSEYGDNFVRTMLNLARERSPLSAVHNQIGCPTYAGDLSATIIRLLQHSNPVRGIYHYAGGKSVSWYEFVQHIFQAASQQQTSFPIPELTAVSDKEYPTAAPRPAYSILDCRKIENDFGIKPSDWQKALAQVVSKLL

SEQ ID NO: 14922 - protein, 46 aa, Neisseria meningitidis; identical to SEQ ID NO: 13095

SEQ ID NO: 14923 - protein, 494 aa, Neisseria meningitidis; identical to SEQ ID NO: 2766

SEQ ID NO: 14924 - protein, 254 aa, Neisseria meningitidis; identical to SEQ ID NO: 14364

SEQ ID NO: 14925 - protein, 98 aa, Neisseria meningitidis; identical to SEQ ID NO: 1735

SEQ ID NO: 14926 - protein, 252 aa, Neisseria meningitidis; identical to SEQ ID NO: 6509

SEQ ID NO: 14927 - protein, 81 aa, Neisseria meningitidis; identical to SEQ ID NO: 8766

SEQ ID NO: 14928 - protein, 665 aa, Neisseria meningitidis
LPHAVSIPQNSDTWYKIPSFPTLKNRTRYRLKQPCLSDGIGTRKHTMPEYRSKTSTHGRNMAGARALWRATGVMETDFGKPIIAVANSFTQFVPGHVHLHNMGQLVAREIEKAGAIAKEFNTIAIDDGIAMGHSGMLYSLPSRDLIADSIEYMVNAHCADALVCISNCDKITPGMLIAAMRLNIPTIFVSGGPMEAGKVIGVANIQPERRLDLIDAMIESADDNVSNRQVEEVEQNACPTCGSCSGMFTANSMNCLTEALGLSLPGNGSYLATHAGRKELFLEAGRMIVEITKRYYEQNDETVLPRSIATKKAFENAMTMDIAMGGSTNTILHLLAVANEAGVDFKMADIDRLSRVVPCICKTAPNNHDYYMEDVHRAGGIFAILKELDKAGKLHTDVHTIHAPTLKDAIEKWDVTNPENTRAIERFKAAPGGVRTTQAFSQNRMWKTLDLDREKGCIRDVEHAYSQDGGLAVLFGNIAERGCVVKTAGVDESILKFTGRARVFESQEDAVEGILGNQIVAGDIVIIRYEGPKGGPGMQEMLYPTSYLKSKGLGKACALLTDGRFSGGTSGLSIGHASPEAAEGGAIGLVHEGDTVEIDIPNRSIHLAISDEELAARRAEMEARGSKAWKPKNRDRYVSAALRAYGAMATSADKGAVRDVAQIER

SEQ ID NO: 14929 - protein, 199 aa, Neisseria meningitidis; identical to SEQ ID NO: 3649

SEQ ID NO: 14930 - protein, 735 aa, Neisseria meningitidis
MFPDQSAPNLLQGLNPEQLSAVTWPPQSALVLAGAGSGKTRVLTTRIAWLLQSGQASVHSIMAVTFTNKAAKEMQTRLGAMIPINVRAMWLGTFHGLCHRFLRLHHRDAGLPSSFQILDSGDQLSLIKRLLKSLNIAEEIIAPRSLQGFINAQKESGLRASVLSAPDPHTSRMIECYAEYDKICQREGVVDFAELMLRSYEMLQSNEILRQHYQNRFNHILVDEFQDTNKLQYAWLKLMAGGNAAVFAVGDDDQSIYRFRGANVGNMTALMEEFHIDAPVKLEQNYRSVGNILAAANAVIENNDERLGKNLRTDAEAGDKIRYYSAFTDLEEARFIVDETKALEREGWDLDEIAVLYRSNAQSRVIEQSLFRSGIPYKIYGGLRFYERQEIKHALAYLRLAVNPDDDNALLRVINFPPRGIGARTVENLQTASNEQGITLWQAACNAGAKAAKVVAFVRLIEALRNQVGQLSLSEIIVGILKDSGLTEHYRTQKGDNQDRLDNLDELVNAAIEFKPEDSNFEILPENISDDPAFPILAFLSNATLESGENQAGVGEKAVQLMTVHAAKGLEFNAVFLTGMEEGRFPSEMSLAERGGLEEERRLMYVAITRARKRLYITMAQQRMLHGQTQFGIVSRFVEEIPPEVLHYLSVKKPAYDSYGNTRQTAASKDKIIDDYKQPQTYAGFRIGQNVRHAKFGTGVIIDAADKGESARLTINFGKQGVKELDTKFAKLEEM

SEQ ID NO: 14931 - protein, 266 aa, Neisseria meningitidis; identical to SEQ ID NO: 8747

SEQ ID NO: 14932 - protein, 1139 aa, Neisseria meningitidis; identical to SEQ ID NO: 6379

SEQ ID NO: 14933 - protein, 144 aa, Neisseria meningitidis; identical to SEQ ID NO: 4528

SEQ ID NO: 14934 - protein, 223 aa, Neisseria meningitidis; identical to SEQ ID NO: 5959

SEQ ID NO: 14935 - protein, 235 aa, Neisseria meningitidis; identical to SEQ ID NO: 6978

SEQ ID NO: 14936 - protein, 370 aa, Neisseria meningitidis
MFSDTDISMMENALRLAALGRFSTSPNPRVGCVIAHGSQIVGQGFHVKAGEPHAEVHALHQAGEMAQGATAFVTLEPCSHYGRTPPCAEALLRSGVTRVVAAMRDPNPLVAGKGLALLEVAGIKTECGLLEHQARELNRGFLSRIERRRPFVRLKCAVSLDGKTALSDGSSFWITGEDTRADVQVLRAESCAVLTGIGTVLADNPRLNVRAFPTLRQPARIVLDSRLRLPLDSHLLTDGQSPTYIATLERNEDRLHPYREHAHIRILMPSETAGGKIDLHHLMRLLADEGFGEIMVEAGSELTSAFLAEDLADEIVLYRSPKILGGGGGGLFCLLENRAALSAPPLWTPVSSEILGHDIKTVFRKNGNAF

SEQ ID NO: 14937 - protein, 92 aa, Neisseria meningitidis; identical to SEQ ID NO: 3856

SEQ ID NO: 14938 - protein, 197 aa, Neisseria meningitidis
MADGMGNLIGWEKTGLVVGKQWITAKDDKVSDVCNANGEMGVIGLYEPFSHGALTIPGHPNCRCEVVSVSGGELGEFAEKKELRKAAMQYARDNFIGKSYVNENSGHELKVTWQGVKHAASKANQAELSIMTKLDDLLRYAKYEGSYSDRKGHPNIIAAHKYRAVAKVGNESLNIGVIVREFPDDHKHYDHFILKDE

SEQ ID NO: 14939 - protein, 575 aa, Neisseria meningitidis
MQLSGAQIIVQSLKAEGVEYVFGYPGGAVIEIYDALFQLNKFKHILTRHEQAAVHAADAYARVSGKVGVALVTSGPGVTNALTGIATAYTDSIPMVVISGQVGNSLIGTDAFQEVDTVGITRPCVKHNFLVTDINELAETIKKAFQIAASGRPGPVVVDVPKDVTQAMAKFSYPQEDIFIRSYQPVVQGHIGQIKKAVQMLASAKRPVVYFGGGVVLGNASEELTRFVRMTGAPCTGTLMGLGAYPSSDRQFLGMLGMHGTYEANLAMQNADVVLAVGARFDDRVVSVPSKFFEKAKKVIHIDVDPSSIAKRVKVDIPIVGDVKNVLSEMVALWQKQESVPSEDALGKWWKTIEEWRSQDCLWFDNGSEIIKPQYVIQKLAEITGNSAIITSDVGQHQMFAAQYYPFERPRQWLNSGGLGTMGVGLPYAIGAKLAAPDQDVFCITGDGSIQMNIQELSTCFQYRIPVNVITLNNGYLGMVRQWQEIYYGGRESETYFDSLPDFVKLAEAYGHIGIRVDKKSDVEGALLEALNQKDRLVFIDFLTDQKQNVMPMVGNGKGLDEMVLPPHMRADGKA

SEQ ID NO: 14940 - protein, 553 aa, Neisseria meningitidis
MTESITRDSMQYDVVIVGAGPSGLSAAIKLKQLAEQNGREISVCVVEKGSEAGAHSLAGAVIDPIALNELIPDWKEKGAPLTRTVTQDKVLFLTEKKAFNLPITPNFDNHGNYIVSLGEVVRWLAEQAENMGVEIYPGFAAAEVLYHEDGSVKGIATGNMGIGKDGEPTDSFQPGMELWAQQTLFAEGCRGSLSKQIIERFKLDQNSQPQTYGLGIKEVWEVPSEQHQPGLVVHSAGWPLDSKTYGGAFVYHFDDNKVAVGFVVGLDYQNPYLSPFEEFQRFKTHPEIRKTFEGGRRIAYGARSLIEGGLQSLPKLSFKGGILVGDAAGFLNMPRIKGIHTAMKSAMLAAEAVFPLLENLEEVEGFDSGKEAADYQQRFEQSWLYQELYAARNVRPSFKWGVYLGSLYTGIDQMIFRGKAPWTLKHHGKDNEQLKKAAACKPIDYPKPDGVLTFDRLSSVFLANLAHEENQPDHLVLNNPQTMIDVNYKEYASPETRYCPAGVYEIVEENGNPRLQINAANCVHCKTCDIKDPTQNITWICPEGASGPNYGGM

SEQ ID NO: 14941 - protein, 181 aa, Neisseria meningitidis
MSKIICLTAGHSNTDPGAVNGSDREADLAQDMRNIVASILRNDYGLTVKTDGTGKGNMPLREAVKLIRGSDVAIEFHTNAAVSKAATGIEALSTVKNKRWCQVLSKAVAKKTGWKLRGEDGFKPDNAGRHSRLAYAQAGGIVFEPFFISNDTDLALFKTTKWGICRAIADAIAMELGAAKV

SEQ ID NO: 14942 - protein, 757 aa, Neisseria meningitidis; identical to SEQ ID NO: 11770

SEQ ID NO: 14943 - protein, 260 aa, Neisseria meningitidis; identical to SEQ ID NO: 7097

SEQ ID NO: 14944 - protein, 330 aa, Neisseria meningitidis; identical to SEQ ID NO: 244

SEQ ID NO: 14945 - protein, 155 aa, Neisseria meningitidis; identical to SEQ ID NO: 6051

SEQ ID NO: 14946 - protein, 65 aa, Neisseria meningitidis; identical to SEQ ID NO: 127

SEQ ID NO: 14947 - protein, 141 aa, Neisseria meningitidis
MAIERTISIIKPDAVGKNVIGKIYSRFEENGLKIVAAKMKQLTLKEAQEFYAVHKDRPFYAGLVEFMTGGPVMIQVLEGENAVLKNRELMGATNPAEAAEGTIRADFATSVSINAVHGSDTPENAALEIAYFFSQTEICPR

SEQ ID NO: 14948 - protein, 63 aa, Neisseria meningitidis; identical to SEQ ID NO: 5865

SEQ ID NO: 14949 - protein, 380 aa, Neisseria meningitidis
MKVFKQQLEQLGAQNQYRSIPDLIHQGRYITRENRKMLNMSSNDYLGLASDENLRRSFLQQYGGNFPSFTSSSSRLLTGNFPIYTDLEELVAQRFQRESALLFNSGYHANLGILPALTTTKSLILADKFVHASMIDGIRLSRCAFFRYRHNDYEHLKNLLEKNVGKFDRTFIVTESVFSMDGDVADLKQLVQLKKQFPNTYLYVDEAHAIGVYGQNGLGIAERDNLIAEIDLLVGTFGKALASVGAYAVCNQVLKECLINQMRPLIFSTALPPFNVAWTYFIFERLPQFSKERSHLEQLSAFLRREVAHRTQIMPSQTCIVPYILGGNEATLAKAEYLQRQGYYCLPIRPPTVPKNTSRIRLSLTADMTTDEVRQFAVYL

SEQ ID NO: 14950 - protein, 349 aa, Neisseria meningitidis; identical to SEQ ID NO: 6547

SEQ ID NO: 14951 - protein, 823 aa, Neisseria meningitidis
MKKTCFHCGLDVPENLHLTVRYEGEDRETCCAGCQAVAQSIIDAGLGSYYKQRTADAQKTELPPQEILDQIRLYDLPEVQSDFVETHGGTREAVLMLGGITCAACVWLIEQQLLRTDGIVRIDLNYSTHRCRVVWDDGKIRLSDILLKIRQIGYTAAPYDAQKIEAANQKERKQYIVRLAVAGLGMMQTMMFALPTYLYGGDIEPDFLQILHWGGFLMVLPVVFYCAVPFYQGALRDLKNRRVGMDTPITVAIIMTFIAGVYSLATNAGQGMYFESIAMLLFFLLGGRFMEHIACRKAGDAAERLVKLIPAFCHHMPDYPDTQETCEAAVVKLKAGDIVLVKPGETIPVDGTVLEGSSAVNESMLTGESLPVAKMPSEKVTAGTLNTQSPLIIRTDRTGGGTRLSHIVRLLDRALAQKPRTAELAEQYASSFIFGELLLAVPVFIGWTLYADAHTALWITVALLVITCPCALSLATPTALAASTGTLAREGILIGGKQAIETLAQTTDIIFDKTGTLTQGKPAVRRISLLRGTDEAFVLAVAQALEQQSEHPLARAILNCRVSSGSVPDIAIKQRLNRIGEGVGAQLTVNGETQVWALGRASYVAEISGKEPQTEGGGSAVYLGSQSGFQAVFYLTDPLKDSAAEAVRQLAGKNLTLHILSGDRETAVAETARALGVAHYRAQAMPEDKLEYVKALQKEGKKVLMIGDGINDAPVLAQADVSAAAAGGTDIARDGADIVLLNEDLRTVAHLLDQARRTRHIIRQNLIWAGAYNIIAVPLAVLGYVQPWIAALGMSFSSLVVLGNAMRLHKQVDMPSEKMPSEQ

SEQ ID NO: 14952 - protein, 87 aa, Neisseria meningitidis; identical to SEQ ID NO: 205

SEQ ID NO: 14953 - protein, 299 aa, Neisseria meningitidis
MVAKIKKFSDSTLSVLNNGERRFYVYCLTDLKKDKILYIGKGCGNRIFEHEWVASRSQDPVSGEIIDRKLKAISKCKKLGRYIISYHLTEVEALAAESALIHFVKSVLGKKLKNKIAGHGPGGISVEELDRRFGFSSLPLDEINSNELILAIKIHNAFDLDTDEELDYLFDNQDDANLKSRTLGNWVIGKDVASKVKYVIGVHTGLQNAVVSAYEVDGFETMVEETKNGRKQSRYRFRTTSRSEEVLAKLGLQQKCLPELKFGSGGEKAYIRPKTETETEQENIQTTPNPKIKKEKTKS

SEQ ID NO: 14954 - protein, 916 aa, Neisseria meningitidis
MLTNIAKKIFGSRNDRLLKQYRKSVARINALEEQMQALSDADLQAKTAEFKQRLADGQTLDGILPEAFAVCREASRRTLGMRHFDVQLIGGMVLHDGKIAEMRTGEGKTLVATLAVYLNALAGKGVHVVTVNDYLASRDAGIMEPLYNFLGLTVGVIISDMQPFDRQNAYAADITYGTNNEFGFDYLRDNMVTDQYDKVQRELNFAVVDEVDSILIDEARTPLIISGQADDNIQLYQIMNTVPPHLVRQETEEGEGDYWVDEKAHQVILSEAGHEHAEQILTKMGLLAENDSLYSAANIALMHHLMAALRAHTLFHKDQHYVIQDGEIVIVDEFTGRLMSGRRWSEGLHQAVEAKEGVEIKRENQTLASITFQNYFRLYTKLSGMTGTADTEAFEFQSIYNLETVIIPTNRPVQRKDFNDQIFRSAEEKFEAVVKDIEECHKRGQPVLVGTTSIENSELVSHLLQKAGLPHNVLNAKEHEREALIVAQAGKVGAITVATNMAGRGTDIVLGGNLKHQTDAIRADETLSDEEKQAQIAALENGWQAEHDKVMEAGGLHIIGTERHESRRIDNQLRGRSGRQGDPGSSRFYLSFEDPLLRLFALDRAAAILNRLAPERGVAIEHNLLTRQIEGAQRKVEGRNFDMRKQVLEYDDVANEQRKVIYSQRNEILTSKDISDLMKEIRFDVIGGLVDIYMPPDSMEEQWDIPTLENRLAAEFRLHEDIQSWLKADNTIDGQDIKERLIERIENEYAAKTELVGKQAMADFERNVMLQVIDNQWREHLAAMDYLRQGIHLRSYAQKNPKQEYKREAFTMFQDLWNGIKFHIASLLTSVQIEQNPVAVVEEQPIGNIQSIHSESPDMEELLGQSQTDLVTEAFNPDGTDFSPEALEARGQIVHRNDPCPCGSGLKYKQCHGKLA

SEQ ID NO: 14955 - protein, 371 aa, Neisseria meningitidis
MGLKKACLTVLCLIVFCFGIFYTFDRVNQGERNAVSLLKDKLFNEEGEPVNLIFCYTILQMKVAERIMAQHPGERFYVVLMSENRNEKYDYYFNQIKDKAEWAYFFHLPYGLNKSFNFIPTMAELKVKAMLLPKVKRIYLASLEKVSIAAFLSTYPDAEIKTFDDGTINLIQSSSYLGDEFSVNGTIKRNFARMMIGDWSIAKTRNASDEHYTIFKGLKNIMDDGRRKMTYLPLFDASELKAGDETGGTVRILLGSPDKEMKEISEKAAKNFNIQYVAPHPRQTYGLSGVTTLNSPYVIEDYILREIKKNPHTRYEIYTFFSGAALTMKDFPNVHVYALKPASLPEDYWLKPVYALFTQSGIPILTFDDKD

SEQ ID NO: 14956 - protein, 331 aa, Neisseria meningitidis; identical to SEQ ID NO: 1014

SEQ ID NO: 14957 - protein, 201 aa, Neisseria meningitidis
MLCPNTARNKENIMSIKSDKWIRRMSEEFGMIDPFEPNQIKEADGKRIISYGTSSYGYDIRCANEFKIFTNINSTIVDPKNFDPKNFVTVEDDCCIIPPNSFALARTVEYFRIPRNVLTVCLGKSTYARCGIIVNVTPFEPEWEGYVTLEFSNTTPLPAKIYAGEGVAQVLFFESDEVCETSYKDRNGKYMGQTGVTLPKA

SEQ ID NO: 14958 - protein, 257 aa, Neisseria meningitidis; identical to SEQ ID NO: 7786

SEQ ID NO: 14959 - protein, 531 aa, Neisseria meningitidis; identical to SEQ ID NO: 6044

SEQ ID NO: 14960 - protein, 284 aa, Neisseria meningitidis
METQENMIKTALQAAQKPFFEFAPNNTLLVFTPDQDGGWRYKSHPELMQNPYRKCGKFLMHDTASLIKFVQKHKQDGTQIYIDADFKSGRIDVTAVINGHTQQAPGWLDFYAVYTPQHTTSASNWLNNNAHRMNQMEFSHFLTNNARNIVSKNPGNENSVYPTAAEVLDFALNLEYTEKTTFKQGYREQDGRINFTFQSEDSGQTEKNLKMFERFGIEFTPHQGGASYFVEALLKFRIDKNSGALVLWYELQQIDAVIEQAAKDISEAVQKAFPEIDIYFGVIA

SEQ ID NO: 14961 - protein, 332 aa, Neisseria meningitidis
MSRPVPAVFGSVFHSQMPVLAYREGKWQPTEWQSSQDLSLAPGAHALHYGSECFEGLKAFRQADGKIVLFRPTANIARMRQSADILHLPRPETQAYLDALVELVKRAADEIPDAPAALYLRPTLIGTDPVIGKAGSPSETALLYILASPVGDYFKVGSPVKILVETEHIRCAPHMGRVKCGGNYASAMHWVLKAKAEYGANQVLFCPNGDVQETGASNFILINGDEIITKPLTDEFLHGVTRDSVLTVAKDLGYTVSERNFTVAELKAAVENGAEAILTGTAAVISPVTSFVIDGKEIEVKSQERGYAIRKAITDIQYGLAEDKYGWLVEVC

SEQ ID NO: 14962 - protein, 487 aa, Neisseria meningitidis; identical to SEQ ID NO: 6113

SEQ ID NO: 14963 - protein, 429 aa, Neisseria meningitidis
MMKSILTVSGNRMRKPRITYLDVWANDERIGTLEKGAMYRFAYDNPNSSLLGLHYQDRSKVYISNNMPHIFAQYFPEGFLDAHITSKYAFHDAPFEDNEMLRLAILCRETLGRIHVRCNDPLFNEWIDGLEMKNPRILTERDLLGINARQVFQQYMAEIFHHGRFVSVSGIQQKMSLEAIRRNTKQTASYIAKGFDASEYPCLAANEFLCMQTIKQAGIAVAQTSLSEDSSVLLVRRFDVSEQGYFLGMEDFTSLRQYSVEDKYKGSYAAIAQIIRQISGRPDEDLIHFFNQLAASCILKNGDAHLKNFSVLYHDEYDVRLAPVYDVLDTSIYRVGTQGIFDAYDDTLALNLTNHGKKTYPSKNTLLDFAEKYCDLGREDASFMIDTIVQAKEQVLVKYSDVLRENEWLAQKWHFIPDENEEGLPFTFR

SEQ ID NO: 14964 - protein, 288 aa, Neisseria meningitidis; identical to SEQ ID NO: 7363

SEQ ID NO: 14965 - protein, 201 aa, Neisseria meningitidis; identical to SEQ ID NO: 3643

SEQ ID NO: 14966 - protein, 428 aa, Neisseria meningitidis; identical to SEQ ID NO: 5940

SEQ ID NO: 14967 - protein, 182 aa, Neisseria meningitidis; identical to SEQ ID NO: 2877

SEQ ID NO: 14968 - protein, 119 aa, Neisseria meningitidis; identical to SEQ ID NO: 7767

SEQ ID NO: 14969 - protein, 615 aa, Neisseria meningitidis
MYLPSMKHSLPLLAALVLAACSSTHAPSSKTLADNIETAGLSASVPTRPAEPEGKTLADYSSYPSALDAVKQKNDAAVAAYLENAGDSAMAENVRNEWLKSLGARRQWTLFAQEYAKLKPEGRAQEVECYADSSRNDYTRAAELVKNTGKLPSGCTKLLEQAAASGLLDGNDAWRRVRGLLAGRQTTDARNLAAALGSPFDGGTQGSREYALLNVIGKEARKSPNAAALLSEMESGLSLEQRSFAWGVLGHYQSQNLNVPAALDYYGKVADRRQLTDDQIEWYARAALRARRWDELASVISHMPEKLQKSPTWLYWLARSRAATGNTQEAEKLYKQAVATGRNFYAVLAGEELGRKIDTRNNVPDAGKNSVLRMAEDGAVKRALVLFQNSRTAGDAKMRRQAQAEWRFATRGFDEDKLLTAAQTAFDHGFYDMAVNSAERTDRKLNYTLRYISPFKDTVIRHAQNVNVDPAWVYGLIRQESRFVIGAQSRVGAQGLMQVMPATAREIAGKIGMDAAQLYTADGNIRMGTWYMADTKRRLQNNEVLATAGYNAGPGRARRWQADIPLEGAVYAETIPFSETRDYVKKVMTNAAYYASLFGAPHIPLKQRMGIVPAR

SEQ ID NO: 14970 - protein, 175 aa, Neisseria meningitidis; identical to SEQ ID NO: 5

SEQ ID NO: 14971 - protein, 105 aa, Neisseria meningitidis; identical to SEQ ID NO: 9830

SEQ ID NO: 14972 - protein, 371 aa, Neisseria meningitidis
MKIVIAPDSFKESLTAQQVAEAIKRGFQQSIADVECLLCPVGDGGEGTVDAIRHSLDLEEKCLQVTGPFGQKEVMRYFQKEQLALFEVADLVGLGKIPLEKRNPLQIQTRGIGELIRHLISQEIKEIYIGVGGTASNDGGIGIAAGLGYQFYDEDGNALPACGQSLLNLASVSTENCYKIPEDVHIRILADVVSPLCGHQGATYTFGKQKGLDSTMFEVVDQAIQDFYEKVSPATLKLKGAGAGGGIAGGLCAFAQASIVSGIDTCLDLIDFDKKVSDVDLVIVGEGRLDRQSLAGKAPIGVAKRTPVGVPVVAICGSLVEDLPSLPFENIQAAFSILEKSEPLEDSLKNASLYLEHTASNIGHLLNMPKI

SEQ ID NO: 14973 - protein, 188 aa, Neisseria meningitidis
LNIKYSGIENRFETAILKKNGVRSGFVSFAPNLAAVKLNDYAKVRKRITKTKQKADIVIVMFHGGAEGKQAEHLPFDTEIFYGENRGNVVEFARLAVDSGADVVFGQGSHVTRAVELYRDRFISYSGGNFATYGAINTSGISGIAPIFKIITDKQGRFVSGNIIPITQIGDKIPKIDPEKPLSGGLFI

SEQ ID NO: 14974 - protein, 436 aa, Neisseria meningitidis; identical to SEQ ID NO: 3506

SEQ ID NO: 14975 - protein, 504 aa, Neisseria meningitidis
MTTSKCPVTHLTMNNGAPVADNQNSLTAGPRGPLLAQDLWLNEKLADFVREVIPERRMHAKGSGAFGTFTVTHDITKYTRAKIFSEVGKKTEMFARFTTVAGERGAADAERDIRGFALKFYTEEGNWDVVGNNTPVFFLRDPRKFPDLNKAVKRDPRTNMRSATNNWDFWTLLPEALHQVTIVMSDRGIPAGYRHMHGFGSHTYSFWNEAGERFWVKFHFRTQQGIKNLTNEEAAKIIADDRESHQRDLYEAIERGEFPKWTMYIQVMPEADAEKVPYHPFDLTKVWPKKDYPLIEVGEFELNRNPENFFADVEQSAFAPSNLVPGIGASPDKMLQARLFNYADAQRYRLGVNFRQIPVNRPRCPVHSNQRDGQGRADGNYGSLPHYEPNSFGQWQQQPDFAEPPLKINGDAANWDYRQDDDDYFSQPRALFNLMNDAQKQALFGNTAAAMGDAPDFIKYRHIRNCHRCDPAYGEGVAKALGLTVEDAQAARATDPALGQPGLL

SEQ ID NO: 14976 - protein, 351 aa, Neisseria meningitidis; identical to SEQ ID NO: 6589

SEQ ID NO: 14977 - protein, 228 aa, Neisseria meningitidis; identical to SEQ ID NO: 380

SEQ ID NO: 14978 - protein, 355 aa, Neisseria meningitidis; identical to SEQ ID NO: 10136

SEQ ID NO: 14979 - protein, 92 aa, Neisseria meningitidis; identical to SEQ ID NO: 752

SEQ ID NO: 14980 - protein, 108 aa, Neisseria meningitidis; identical to SEQ ID NO: 3002

SEQ ID NO: 14981 - protein, 460 aa, Neisseria meningitidis
MANIARDIFKAYDIRGIVGKTLTDDAAYLIGRAIAAKAAEKGMTRIALGRDGRLSGPELMEHIQRGFTDSGIDVLNVGMVATPMLYFAAINECGGSGVMITGSHNPPDYNGFKMMLGGDTLAGEAIQELLSIIEKDGFAAAGKQGSVTEKDISGEYLKHITGHIRLKRPMNIAIDAGNGVGGAFAGKLYKGLGNEVTELFCDVDGTFPNHHPDPSKPKNLQDLIAALKNGDAEIGLAFDGDADRLGVVTKDGNIIYPDRQLMLFAQDVLNRNPGAKVIFDVKSTRLLAPWIKEHGGKAIMEKTGHSFIKSAMKETGAPVAGEMSGHIFFKERWFGFDDGLYAGARLLEILSASDNPSEVLNNLPQSISTPELNIALPEGSNGHQVINELAAKAEFEGATEIITIDGRRVEFPDGFGLMRASNTTPILVLRFEADTQEAIERIQNQFKAVIESNPNLIWPL

SEQ ID NO: 14982 - protein, 460 aa, Neisseria meningitidis
MARDNRIQMFPHEWRASTTLSGVYALRMLGMFLVLPVLAVYAASLPGAEGNKTLVGLAMGIYGLTQALLQLPLGIASDKFGRKKTIYVGLIVFAAGSFLAAAADTLPMLVAARAIQGAGAVSAAVTALLADLTRDGVRTRAMAMIGLSIGLTFSVSLVVAPVIADAVGVRGLFLLTGILTVASIGVVAWMTPDPEVSKLHEDTQAQPSRIGEVLKNRRLLTLDFGIFALHAAQMALFTALPFAMTQLGLEKIQHWKVYLPSTITGLVVMVPLIIVGETRNKLKQVFILGIACIAAAQLGLLSGMRSVGLITAYLVVYFIGFNVLEASLPSMVSKIAPSDLKGTAMGVYNTMQSLGLFAGGVAGGLLFQKYGFSGVFAFCSILMLLWLVIAVLSPAPKPVKNLSYPVGGVWQGNQEGLYRALSELEGVEDIGFSFDGQTVYLKVLQKGFDQAAAEKIITGV

SEQ ID NO: 14983 - protein, 612 aa, Neisseria meningitidis
MCGIVGAIRAHHNVVDFLTDGLKRLEYRGYDSSGIAVNTDGKIKRVRRVGRVQLMEDAAREKGISGGIGIGHTRWATHGGVTEPNAHPHISGGMIAVVHNGIIENFESERKRLEGLGYRFESQTDTEVIAHSINHEYAQNGGRLFEAVQEAVKRFHGAYAIAVIAQDKPDELVVARMGCPLLVALGDDETFIASDVSAVIAFTRRVAYLEDGDIALLASDGIKRLTDKSGLPAERKVKVSELSLASLELGPYSHFMQKEIHEQPRAIADTAEVFLDGGFIPENFGKNAKSVFESIRSVKILACGTSYYAALTAKYWLESIAKIPADVEIASEYRYRSVIADPDQLVITISQSGETLDTMEALKYAKSLGHRHSLSICNVMESALPRESSLVLYTRAGAEIGVASTKAFTTQLVALFGLAVTLAKVRGLVSEEDEARYTEELRQLPGSVQHALNLEPQIAAWAQQFAKKSSALFLGRGIHYPIALEGALKLKEITYIHAEAYPAGELKHGPLALVDENMPVVVIAPNDSLLDKVKANMQEVGARGGELFVFADLDSNFNATEGVHVIRAPRHVGELSPVVHTIPVQLLAYHTALARGTDVDKPRNLAKSVTVE

SEQ ID NO: 14984 - protein, 174 aa, Neisseria meningitidis; identical to SEQ ID NO: 3281

SEQ ID NO: 14985 - protein, 119 aa, Neisseria meningitidis; identical to SEQ ID NO: 3189

SEQ ID NO: 14986 - protein, 114 aa, Neisseria meningitidis
LRTHFVISNVPSTPNLLRGRQLEGKLILEVPAQVNPIPQSVLRAAQEENVIIRDTTGRIYNRWWFSIRWLCRCTSCKKRIIDTNRENRGRCVSNCKCKHWISMDCQFVRAKRRS

SEQ ID NO: 14987 - protein, 344 aa, Neisseria meningitidis; identical to SEQ ID NO: 6064

SEQ ID NO: 14988 - protein, 355 aa, Neisseria meningitidis
MDLSIVVPIYNVESYLEACLSSIEPILSNENVELILVNDGSKDGSEDICYKYIDKTTNNKQQTTNNKQQTTNNKQQTTNNKQQTTNNKHRTPNIKYIYQDNQGLSEARNTGIKNSNGKYIVFIDSDDFINCQVLLDFLSKDDIDMPDVVFLNAVKYDKGSVSYFGEDYQPEKILNQSKVEVLKGLCRFRKFPGSAWNKIIKRELIIKEKLFFEKGIYSEDIEWSMRLFNAATTFFYLDGCYYYYRQGRKDSITGTVSEKSIKSLLYILEKNAEMEFNRDISSYLYSFLSYEYLVLLFIMTSKNIECDADIKRRAYHLRFMLLKSNKLIYKLIFPIITLFGVDITGRILKVIRGNV

SEQ ID NO: 14989 - protein, 414 aa, Neisseria meningitidis; identical to SEQ ID NO: 8661

SEQ ID NO: 14990 - protein, 581 aa, Neisseria meningitidis; identical to SEQ ID NO: 2972

SEQ ID NO: 14991 - protein, 421 aa, Neisseria meningitidis
MFSFFRRKKKQETPAPEEAQVQETAAKAESEVTQIVENIKEDAESLAESVKGQVESAVETVSGAVEQVKETVAEMLSEAEEAAEKAAEQVEAAKEAIAETVGEAVGQVQEAVATTEEHKLGWAARLKQGLTKSRDKMAKSLAGVFGGGQIDEDLYEELETVLITSDMGMEATEYLMKDVRDRVSLKGLKDGNELRGALKDALYDLIKPLEKPLVLPETKEPFVIMLAGINGAGKTTSIGKLAKYFQAHGKSVLLAAGDTFRAAAREQLQAWGERNNVTVISQTTGDSAAVCFDAVQAAKARGIDIVLADTAGRLPTQLHLMEEIKKVKRVLQKAMPDAPHEIIVVLDANIGQNAVNQVKAFDDALGLTGLIVTKLDGTAKGGILAALASDRPVPVRYIGVGEGIDDLRPFDARAFVDALLD

SEQ ID NO: 14992 - protein, 384 aa, Neisseria meningitidis
MTETTQTPTFKPKKSVALSGVAAGNTELCTVGRTGNDLSYRGYDILDLAQKCEFEEVAHLLIHGHLPNKFELAAYKTKLKSMRGLPIRVIKVLESLPAHTHPMDVMRTGVSMLGCVHPERESHPESEARDIADKLIASLGSLLLYWYQYSHNGKRIEVESDEETIGGHFLHLLHGKRPSESHIKAMHVSLILYAEHEFNASTFTARVIAGTGSDMYSSITGAIGALKGPKHGGANEVAYDIQKRYRNADEAEADIRERIGRKEIVIGFGHPVYTISDPRNVVIKEVARGLSKETGDMRLFDIAERLESVMWEEKKMFPNLDWFSAVSYQKLGVPTAMFTPLFVISRTTGWSAHVLEQRKDGKIIRPSANYTGPEDLAFVEIEER

SEQ ID NO: 14993 - protein, 201 aa, Neisseria meningitidis
MELRERLGMMPDEYQKMELFKRKVLDFAVKQINDKTDISITYEQHKEGRKIVGFTFSILHKIGSKDIPLENQSELFAGMTDLEAGTIRVRAEAYIASLIAKGQNVTKAHRLNILKKAVEERWGFEDVAKDNGAKNPENKNAKVVLNEWEKISNGTRFKDKDGTIWVKDSGMLRTEGTNRWIADSQIAKLFPMLTVMVEEGI

SEQ ID NO: 14994 - protein, 164 aa, Neisseria meningitidis
MKNRFAKIVKDIFSFTQFVSEAENKIPNQSSRYYDCWRELEILNASALEDWEISGKPEKWEKWTEKYQTEALQSVKHLFAEEVPENNIVCDISHFLHFADWAEADIPNQSRLYAEYWWEMEIFKMSVLEDWERSGKPLDWKKWQRQYRSEAFELVKKLNRSKQE

SEQ ID NO: 14995 - protein, 540 aa, Neisseria meningitidis; identical to SEQ ID NO: 7154

SEQ ID NO: 14996 - protein, 531 aa, Neisseria meningitidis
MWGLLGTIATSVFQVGKAMDGRRWAVWGAFALLPSAFLAVMVVAPLWAVAAYDGLAWRAVLSDAYMLKRLAWTVFQAAATCVLVLPLGVPVAWVLARLAFPGRALVLRLLMLPFVMPTLVAGVGVLALFGADGLLWRGGQDTPYLLLYGNVFFNLPVLVRAAYQGFVQVPAARLQTARTLGAGAWRRFWDIEMPVLRPWLAGGVCLVFLYCFSGFGLALLLGGSRYATVEVEIYQLVMFELDMAVASVLVWLVLGVTAAAGLLYAWFGRRAGSDKAVAPVMPSPPQSVEEYVLLAFAAAVLSVCCLFPLLAIVVKAWSAGESWRVLMESETWQAVWNTLRFSAAAVYAAAVLGVVYAAAARRSAWMRGLMFLPFMVSPVCVSAGVLLLYPQWTASLPLLLAMYALLAYPFVAKDVLSAWDALPPDYGRAAAGLGANGFQTACRITFPLLKPALRRGLTLAAATCVGEFAATLFLSRPEWQTLTTLIYAYLGRAGEDNYARAMVLTLLLSAFALGIFLLLDNGEGGKQTETL

SEQ ID NO: 14997 - protein, 45 aa, Neisseria meningitidis; identical to SEQ ID NO: 7562

SEQ ID NO: 14998 - protein, 409 aa, Neisseria meningitidis; identical to SEQ ID NO: 4088

SEQ ID NO: 14999 - protein, 506 aa, Neisseria meningitidis
MFFISIRYIFVRKLWCANGQPFKITPLRIENPPERNIMMKNRVTNIHFVGIGGVGMSGIAEVLHNLGFKVSGSDQARNAATEHLGSLGIQVYPGHTAEHVNGADVVVTSTAVKKENPEVVAALEQQIPVIPRALMLAELMRFRDGIAIAGTHGKTTTTSLTASILGAAGLDPTFVIGGKLNAAGTNARLGKGEYIVAEADESDASFLHLTPIMSVVTNIDEDHMDTYGHSVEKLHQAFVDFIHRMPFYGKAFLCIDSEHVRAILPKVSKPYATYGLDDTADIYATDIENVGAQMKFTVHVQMKGHEQGSFEVVLNMPGRHNVLNALAAIGVALEVGASVEAIQKGLLGFEGVGRRFQKYGDIKLPNGGTALLVDDYGHHPVEMAATLSAARGAYLEKRLVLAFQPHRYTRTRDLFEDFTKVLNTVDALVLTEVYAAGEEPIAAADSRALARAIRVLGKLEPIYCENVADLPEMLLNVLQDGDIVLNMGAGSINRVPAALLALSKQI

SEQ ID NO: 15000 - protein, 164 aa, Neisseria meningitidis; identical to SEQ ID NO: 3532

SEQ ID NO: 15001 - protein, 103 aa, Neisseria meningitidis; identical to SEQ ID NO: 392

SEQ ID NO: 15002 - protein, 397 aa, Neisseria meningitidis
MTEDERFAWLQLAFTPYIGAESFLLLLRRFGSASNALSAPAEQVAPAVRHKQAAEAWRNAEKRASARQAAEAALEWEMRDGCRLMLLQDEDFPEMLTQGLTAPPVLFLRGNVRLLHKPSAAIVGSRHATPQAMRIAKDFGKSLGGQNIPVVSGMASGIDTAAHQGALEAEGGTIAVWGTGIDRIYPPSNKNLAYEIAEKGLIVSEFPIGTRPYAGNFPRRNRLIAALSQVTLVVEAALESGSLITAGLAAEMGREVMAVPGSIDNPHSKGCHKLIKDGAKLTECLDDILNECPGLLQNTGASSYSINKDTSDTGSRAVQTAYAPPPSPEGKMPSEGAACGTDPGGILDKMGFDPVHPDVLAEQLAMPAADLYAALLELELDGSVAAMPGGRYQRIRT

SEQ ID NO: 15003 - protein, 183 aa, Neisseria meningitidis; identical to SEQ ID NO: 824

SEQ ID NO: 15004 - protein, 263 aa, Neisseria meningitidis; identical to SEQ ID NO: 5998

SEQ ID NO: 15005 - protein, 698 aa, Neisseria meningitidis
MSIYLSRLSFGFSRRLLVVLQTEAAECGLACLVSVLGFHGFYTDLRHLRARFSLSLKGATLADLVRFANSMNLTARAVRLDLDELVNLRLPCILHWDLNHFVVLHEVHRNHIVIMNPASGWQKVRMEEVSRCFTGVALELFPNTQFEEKHETRKIRVLPMLRGVVGLKRSLFQLLLLAAVLQVFALASPFFMQWVIDHAIVSADRDLLMTLALCFGLLMIVRQLVSLLQTWAGMYLSTSLNIQWKANVLRRLMDLPVSYFAKRHLGDVVSRFGSVDSIQSTLTSTFFVLVLNSIMAVFTLGLMYLYSPSLTTVVLVVLLIYIGIRWVAYYPLRHATQENIVHAAKQSSYFMETIRGIQTVKLFDKNAQRHAAWLNLFIDTINTGLMTQKLSALFGFTNGLLFGIANILIVYFGAVSVLNGGFTVGALMAFMSYKSQFESKAGSLIDQFVQIKMLGLHAERLADIVLEETENEQNNDFSLPKNLEHFDIQIENVSFSYAENEPYILQNFSLIIKQGTAIAFAGHSGCGKSTLIQILTGSLKPESGHVLLGGHDIHALPPAFIRTWSASVMQNDVLFTGSIAENISFFDDTPNMEKIAFCAQMANIHHEIVAMPMAYETLIGDMGSALSGGQKQRIVLARALYREPKILFLDEASSHLDINNERVINDNLRQLNITKIMVAHRQETLNTADSVVYLDKVA

SEQ ID NO: 15006 - protein, 256 aa, Neisseria meningitidis; identical to SEQ ID NO: 6198

SEQ ID NO: 15007 - protein, 208 aa, Neisseria meningitidis; identical to SEQ ID NO: 9498

SEQ ID NO: 15008 - protein, 1201 aa, Neisseria meningitidis
MFHFAFPAQTALRQAITDAYRRNEIEAVQDMLQRAQMSDEERNAASELARRLVTQVRAGRTKAGGVDALMHEFSLSSEEGIALMCLAEALLRIPDNATRDRLIADKISDGNWKSHLNNSPSLFVNAAAWGLLITGKLTATNDKQMSSALSRLISKGGAPLIRQGVNYAMRLLGKQFVTGQTIEEALQNGKEREKMGYRFSFDMLGEAAYTQADADRYYRDYVEAIHAIGKDAAGQGVYEGNGISVKLSAIHPRYSRAQHGRVMGELLPRLKELFLLGKKYDIGINIDAEEANRLELSLDLMEALVSDPDLAGYKGIGFVVQAYQKRCPFVIDYLIDLARRNNQKLMIRLVKGAYWDSEIKWAQVDGLNGYPTYTRKVHTDISYLACARKLLDAQDAVFPQFATHNAYTLGAIYQMGKGKDFEHQCLHGMGETLYDQVVGPQNLGRRVRVYAPVGTHETLLAYLVRRLLENGANSSFVNQIVDENISIDCLIKSPFDTIAEQGIHLHNALPLPRDLYGKCRLNSQGVDLSNENVLQQLQEQMNKAAAQDFHAASIVNGKARDVGEAQPIKNPADHDDIVGTVSFADAALAQEAVGAAVAAFPEWSATPAAERAACLRRFADLLEQHTPALMMLAVREAGKTLNNAIAEVREAVDFCRYYANEAEHTLPQDTKAVGAIVAISPWNFPLAIFTGEVVSALAAGNTVIAKPAEQTSLIAGYAVSLMHEAGIPTSALQLVLGAGDVGAALTNDARIGGVIFTGSTEVARLINKALAKRGDNPVLIAETGGQNAMIVDSTALAEQVCADVLNSAFDSAGQRCSALRILCVQEDVADRMLDMIKGAMDELVVGKPIQLTTDVGPVIDAEAQQNLLNHINKMKGVAKSYHEVKTAADVDSEKSTFVRPILFELNNLNELQREVFGPVLHVVRYRADKLDSVIDQINSKGYALTHGVHSRIEGTVRHIRSRIEAGNVYVNRNIVGAVVGVQPFGGHGLSGTGPKAGGSFYLQKLTRAGEWVAPTLSQIGQADEAALKRLEALVHKLPFNAEEKKAAAAALGHARIRTLRRAETVLTGPTGERNSISWHAPKRVWIHGGSTVQAFAALTELAASGIQAVVEPDSPLASYTADLEGLLLVNGKPETVGISHVAALSPLNSARKQELAAHDGALIRILPSENGLDILQVFEEISCSVNTTAAGGNASLMAVAD

SEQ ID NO: 15009 - protein, 419 aa, Neisseria meningitidis; identical to SEQ ID NO: 6072

SEQ ID NO: 15010 - protein, 151 aa, Neisseria meningitidis; identical to SEQ ID NO: 3388

SEQ ID NO: 15011 - protein, 437 aa, Neisseria meningitidis
LPCRLKAVSDGICILIRLESIIEQAQNINKLNNGRTLRCRTDKTEESPMSKKLHPQTLAIRGGKEQTEYREHNQALFLTSSFMWDNAQHAADLFSKKIKGFTYTRTANPTTAAFEKRIAALEGAERAVATSTGMSAIQAAFFTFLQAGDHVVSSRSLFGTTVGFINNIVTKFGIEVSHVSPTDINEWKAAVKANTKLLFLETPSNPLGEVADLEALAELAHGIGAILVVDNSLLSPVGSQPLKHGADISVSSATKAIDGHGRVMGGVLAGSEELMAQVAMYCNSCGLAMSPFNAWQLLSGVETLSLRMEKQFDNALKIAQWLQAQPQVQAVYYTGLPDHPQAELIRKQQNGGGIVIGFEVADQAAAWKVVDGVELFSRTANLGDVRSTITHPWTTTHGRMQPEEKLAANIRPGLVRLSVGLEYVGDLIDDLKQALAR

SEQ ID NO: 15012 - protein, 245 aa, Neisseria meningitidis
MIILDKVSKHYQTRDKTRFAAVEPTSLEIRDGEIFGLMGYSGAGKSTLLRLINLLERPDSGKVNVCGQELTALDAAALRQARQNIGMVFQQFNLLSNRTVAGNVAFPLEIAGWPSEKIKERVAECLEIVGLTERAGHYPAQLSGGQKQRVGIARALAPKPQVILADEPTSALDPATTRSVLECLEDINKRFNVTIVIVTHEMSVIRRLCDRAALLDKGKVVEIVEVRGNQIHARSDIGRELIRED

SEQ ID NO: 15013 - protein, 185 aa, Neisseria meningitidis
MFWLVLPYAVTINRPMPSERVSASDGIAPEQGGDMKKPKILFVCLGNICRSPMAEYILRRRAAEAGIPLEADSAGTSGWHDGEDMHRETAKILKKHGIDASGFTSRKIRQSDAVAFDCIIAMDGKNLSELERTFGRRSEKIFKLTDLIPESGYDHVPDPWYTGDFEETFRLADAGCRALLEKISK

SEQ ID NO: 15014 - protein, 1429 aa, Neisseria meningitidis
MNEGEVVLTPEQIQTLRGYASRGDTYGGWRYLANLGDRYADNAAAIVGKDTNLNGLNLWMKKGVENLWDDTVGKKTRLEKFDRVALQHFSQYVDLINKNNGRLPNTSEIERSYYKAVTYHGVSSSAAIDLVINRSLPDMADGYWALGLGIEAERIHNEQAVNNPNGSERDNRKQLISALDKGFDGSFKEKHFTFLQSVMMDLTKLGVEYTIDGWQKIGGWGNGIINDLYKSVVKREWTGIFEIVNNNIKQGNEAFKNEINSLVHDMKAAGKEFGDDLNTQWNNLTQAAEIIYNDIVDNTSQGIEKGVKAIKELSEKMKNAASDLADGSAEKAKQVVEDLAQAAKEAYENAKSTAEKAAQAAREFFKGLPSFKDLAEKFRDLFPNPEGWIDDGHQCFAPWVKETKKRNGKYHVYDPLALDLDGDGIETVATKGFSGSLFDHNRDGIRTATGWVSADDGLLVRDLNGNGIIDNGAELFGDNTKLADGSFAKHGYAALAELDSNGDNIINAADAAFQTLRVWQDLNQDGISQANELRTLEELGIQSLDLAYKDVNKNLGNGNTLAQQGSYTKTNGTTAKMGDLLLAADNLHSRFKDKVELTAEQAKAANLAGIGRLRDLREAAALSGDLANMLKAYSAAETKEAQLALLDNLIHKWAETDSNWGKKSPMRLSTDWTQTANEGIALTPSQVAQLKKNALVSLSDKAKAAIDAARDRIAVLDAYTGQDSNTLYYMSEEDALNIVKVTNDTYDHLAKNIYQNLLFQTRLQPYLNQISFKMENDTFTLDFSGLVQAFNHVKETNPQKAFVDLAEMLAYGELRSWYEGRRLMADYVEEAKKAGKFEDYQKVLGQETVALLAKTSGTQADDILQNVGFGHNKNVSLYGNDGNDTLIGGAGNDYLEGGSGSDTYVFGKGFGQDTVYNYDYATGRKDIIRFTDGITADMLTFTREGNHLLIKAKDGSGQVTVQSYFQNDGSGAYRIDEIHFDNGKVLDVATVKELVQQSTDGSDRLYAYQSGNTLNGGLGDDYLYGADGDDLLNGDAGNDSIYSGNGNDTLNGGEGNDALYGYNGNDVLNGGEGNDHLNGEDGNDTLIGGAGNDYLEGGSGSDTYVFGKGFGQDAVYNYDYATGRKDIIRFTDGITADMLTFTREGNHLLIKAKDGSGQVTVQSYFQNDGSGAYRIDEIHFDNGKVLDVATVKKLVQQSTDGSDRLYAYQSGNTLNGGLGDDYLYGADGDDLLNGDAGNDSIYSGNGNDTLNGGEGNDALYGYNGNDALNGGEGNDHLNGEDGNDTLIGGAGNDYLEGGSGSDTYVFGKGFGQDTVYNYHVDKNSDTMHFKGFKAADVHFIRSGSDLVLSASEQDNVRISGFFYGENHRVDTFVFDDAAISNPDFAKYINAGNNLVQSMSVFGSNTAATGGNVDANTQSVQQPLLVTPSA

SEQ ID NO: 15015 - protein, 113 aa, Neisseria meningitidis; identical to SEQ ID NO: 6827

SEQ ID NO: 15016 - protein, 61 aa, Neisseria meningitidis; identical to SEQ ID NO: 965

SEQ ID NO: 15017 - protein, 307 aa, Neisseria meningitidis
MENQRPLLGFALALLAAMTWGTLPIAVRQVLKFVDAPTLVWVRFTVAAAVLFVLLALGGRLPKWRDFSWCSFRLLLLGVAGISANFVLIAQGLHYISPTTTQVLWQISPFTMIVVGVLVFKDRMTAAQKIGLVLLLAGLLMFFNDKFGELSGLGAYAKGVLLCAAGSMAWVCYAVAQKLLSAQFGPQQILLLIYAVSAAVFLPFAEPAHIGSLDGTLAWVCFAYCCLNTLIGYGSFGEALKHWEASKVSAVTTLLPVFTVIFSLLGHYVMPDTFAAPDMNGLGYVGALVVVGGAVTAAVGDRLFKRR

SEQ ID NO: 15018 - protein, 377 aa, Neisseria meningitidis; identical to SEQ ID NO: 10962

SEQ ID NO: 15019 - protein, 414 aa, Neisseria meningitidis; identical to SEQ ID NO: 461

SEQ ID NO: 15020 - protein, 361 aa, Neisseria meningitidis
VHAPDVTLRNLTVTRSGMSLPAMDAGIYLEETAPRALIEHNNILDNSVGVYLHGSADAMVRENKIVGDATLRVNERGNGVTVWNAPGAQVVGNDISKGRDGIFSNTSTHNTYKNNRFSDLRFAVHYMYTNDSEISGNISVGNNMGYVLMFSERLKVFDNIAVGSRDQGIMLNYVNYSDIHDNIINKAGKCVFAYNANYDKLSANHFENCQIGIHFTAAIEGTSLHDNSFINNESQVKYVSTRFLDWSEGGHGNYWSDNSAFDLNGDGFGDSAYRPNGIIDQIIWRAPVSRLLMNSPAISIVKWAQAQFPAVLPGGVVDSKPLMKPYAPKIQTRYQAMKDELLKEVETRQSEWGRAENGSLN

SEQ ID NO: 15021 - protein, 703 aa, Neisseria meningitidis
MKISFHLALLPTLIIASFPVAAADTQDNGEHYTATLPTVSVVGQSDTSVLKGYINYDEAAVTRNGQLIKETPQTIDTLNIQKNKNYGTNDLSSILEGNAGIDAAYDMRGESIFLRGFQADASDIYRDGVRESGQVRRSTANIERVEILKGPSSVLYGRTNGGGVINMVSKYANFKQSRNIGAVYGSWANRSLNMDINEVLNKNVAIRLTGEVGRANSFRSGIDSKNVMVSPSITVKLDNGLKWTGQYTYDNVERTPDRSPTKSVYDRFGLPYRMGFAHRNDFVKDKLQVWRSDLEYAFNDKWRAQWQLAHRTAAQDFDHFYAGSENGNLIKRNYAWQQTDNKTLSSNFTLNGDYTIGRFENHLTVGMDYSREHRNPTLGYSRAFTASIDPYDRASWPASGRLQPILTQNRHKADSYGIFVQNIFSATPDLKFVLGGRYDKYTFNSENKLTGSSRQYSGHSFSPNIGAVWNINPVHTLYASYNKGFAPYGGRGGYLSINTSSSAVFNADPEYTRQYETGVKSSWLDDRLSTTLSAYQIERFNIRYRPDPKNNPYIYAVSGKHRSRGVELSAIGQIIPKKLYLRGSLGVMQAKVVEDKKNPDRVGIHLNNTSNVTGNLFFRYTPTENLYGEIGVTGTGKRYGYNSRNKEVTTLPGFARVDAILGWNHKNVNVTFAAANLFNQKYWRSDSMPGNPRGYTARVNYRF

SEQ ID NO: 15022 - protein, 357 aa, Neisseria meningitidis
MAKIITPLSANQVKNAKPRDKLYKLSDGGGLALWVYPTGGRSWKLSFVQDGRQQTISLGRYPDFSLADAREWREEVRRKRAHGENVVNKKVRADFAFEKVARDWFVRWSKGRSEKYAGQVMRNFERWVFPAIGNLDIRQIRTADVVGCLRVMEARGIVDTLRKTKNSLKMVFAFAVGSGMMEINPVAQIGSGVFERAKTGNMAALSPSELPRLIDFLEQRNEFAVYAGRVRIHPVTRLCIYWLLLTMTRIQEAALMEWSELDGEVWRIPAERKKERRGHDVPLSRAMQWVLDQARALNVNGRFVFESVNFQGHINKESPRVAMQRAGLDTTAHGLRSLARTYLREVLKVDSIMRKRK

SEQ ID NO: 15023 - protein, 200 aa, Neisseria meningitidis; identical to SEQ ID NO: 2775

SEQ ID NO: 15024 - protein, 268 aa, Neisseria meningitidis; identical to SEQ ID NO: 8566

SEQ ID NO: 15025 - protein, 100 aa, Neisseria meningitidis
MTGNKNNFLEIILSDIHENIKIKPLTIKVKGENVINILPEEVSFYVKQGVDLIYEKYKRKFFISEISFCQSDSRPSSIYAFLTFHLLEDIIKNESPSNYT

SEQ ID NO: 15026 - protein, 264 aa, Neisseria meningitidis
MKAYLDLMRHVLDNGTDKSDRTGTGTRSVFGYQMRFDLGKGFPLLTTKKLHLRSIIHELLWFLKGDTNIKYLKDNNVSIWDEWADENGDLGPVYGYQWRSWPAPDGRHIDQIANVVEQIKKNPDSRRLIVSAWNPALVDEMALPPCHALFQFYVADGKLSCQLYQRSADIFLGVPFNIASYALLTMMMAQVCGLEAGEFIHTFGDAHLYSNHFEQAALQLEREPCALPVMKINPEVKDLFAFKFEDFELEGYDPHPHIKAAVSV

SEQ ID NO: 15027 - protein, 339 aa, Neisseria meningitidis; identical to SEQ ID NO: 14494

SEQ ID NO: 15028 - protein, 172 aa, Neisseria meningitidis; identical to SEQ ID NO: 601

SEQ ID NO: 15029 - protein, 248 aa, Neisseria meningitidis; identical to SEQ ID NO: 3755

SEQ ID NO: 15030 - protein, 155 aa, Neisseria meningitidis; identical to SEQ ID NO: 5339

SEQ ID NO: 15031 - protein, 557 aa, Neisseria meningitidis
MLLTLSLRDFVIVENLNLDFQSGFTVLTGETGAGKSITLDAIGLLLGDKADYSQVRSGAKEAQLSALFDISHLPTLKAELYEQGLLNDGEEELSIRRIIDAKGKSRSFINNQAATLAQLKSVGSQLIDIHGQNAHHSLNQEAAQRELLDAFAGSRAQAETVRQLYQNWANSKKALQEAQEQAENIALEQERLEWQFNELNQLDIKQGEWEALSQSHDSLAHSAELLQAAEEVGSKIDGDNGIQRHIYQCQKLLANLQNIEPRFAESLNMLASIEAELGEISANMRDVAGRSDINPNELAAQEQRMGELMGMARKYRIEPEELPAKLAEIEERLQSLQAAADLDALEHNVAHNFAEYQEAAHILSAMRHQAAERLSGETTEHMQHLAMKGARFDIVLLPSSPTAHGLEQVQFQVAANKGNPPRPLNKVASGGELARISLALQVVASQYTQVPTLIFDEVDTGIGGGVAEMVGKALRSLGRKHQVLAVTHLPQVASCGENHWRVRKHSEGEQTVSEISILDKIQRVEEVARMLGGEVITDTTRQHAAELLQLASKNSLF

SEQ ID NO: 15032 - protein, 38 aa, Neisseria meningitidis
LELKYCNREAKASVVTFTIYFIILISSKKEIQDYTYCQ

SEQ ID NO: 15033 - protein, 93 aa, Neisseria meningitidis
  misc_feature 88, 89: 'Xaa' is any amino acid
MKQNIEKLESSVYTLVQKFETLVSENRRLKETVAELKRAHERQKLEHETAVDELSEALLVQVGKLKEDLQNKIDSLTEENTRYRSLLXXHTLN

SEQ ID NO: 15034 - protein, 96 aa, Neisseria meningitidis; identical to SEQ ID NO: 4410

SEQ ID NO: 15035 - protein, 945 aa, Neisseria meningitidis
MLDKYSPAEIESKHYQNWEEQGYFQPDMDLTKPSFSIQLPPPNVTGTLHMGHAFNQTIMDGLTRYYRMKGCNTAWIPGTDHAGIATQIVVERQLAAQNVSRHDLGREKFLEKVWEWKEVSGGTITQQMRRVGCSADWTREYFTMDDVRAETVTEVFVRLYEQGLIYRGKRLVNWDPVLGTAVSDLEVESVEEQGSMWHIRYPLADNPAEAVIVATTRPETLLGDVAVAVNPEDERYTHLIGKELILPLTGRTIPVIADEYVEKDFGTGCVKITPAHDFNDYEVGKRHDTRLVNVFDLEAKVLANAEVFNFKGEAQPSFALPEKYAGLDRFAARKQMVADLQEQGFLVEIKAHTLMTPKGDRTGSVIEPMLTSQWFVAMSATPNGGEPDSEFKGLSLADKAKKAVDSGTVRFIPENWVNTYNQWMNNIQDWCISRQLWWGHQIPAWYDEAGNVYVARNQAEAEKQAGKTGLTREEDVLDTWFSSALVPFSTLGWPSETDELKAFLPSNVLVTGYEIIFFWVARMIMMTTHFTGKVPFKDVYIHGIVRDHEGKKMSKSEGNVIDPVDLIDGIDLDKLLVKRTTGLRKPETAPKVEEATKKLFPEGIPSMGADALRFTMASYASLGRSVNFDFKRAEGYRNFCNKIWNATNFVLMNTENQDCGYGATAAEPRGYSFPDMWIVGRLNQTIEQVTQAYETYRFDLAAETLYSFVWNDYCDWYLELAKVQLQTGCASRQRATRHTLLRVLEAALRLLHPIIPFITEELWQTVAPMCDAKTADSIMLARFPEADSGEIVQTAFEQMTVLQDLIGAVRNLRGEMGIQPNVKAPLFVESTDDLADYLKYLPMMTRLTEAQQVAALPESEDAPVAVCNGARLMLKVEIDKAAETARLSKEAEKLQKALDKLNAKLSKPGYTEKAPAHLVEKDKADLAELEDKMAKVQNQLAKLKD

SEQ ID NO: 15036 - protein, 120 aa, Neisseria meningitidis
MASSNVNNEIKDKKLSLWAKRQDGSVKWFCGQPVTRNDTAKDDTVAADTDTAKKIDTKHLPSTCRDDSSTGCIETPRADFKHFQKISRYRVLPESRHMAEKLRHSRAGGNLGLSARKLIG

SEQ ID NO: 15037 - protein, 431 aa, Neisseria meningitidis
VIAMIYIVLFLAAVLAVVAYNMYQENQYRKKVRDQFGHSDKDALLNSKTSHVRDGQPSGGPVMMPKPQPAVKKTAKPQDPAMRNLQEQDAVYIAKQKQAKASPFKTEIETALEESGIIGNSAHTVSEPQTGHSAPKPADAPAKPAPVPQTPAKPLITLKELSKVELPWFDVRFDFISYIALTEAKELHALPRLSNRCRYQIVGCTMDDHFQIAEPIPGIRYQAFIVGIQAVSRNGLASQEELSAFNRQVDAFAQSMGGQTLHTDLAAFIEVASALDAFCARVDQTIAIHLVSPTSISGVELRSAVTGVGFVLEDDGAFHYTDTSGSTMFSICSLNNEPFTNALLDNQSYKGFSMLLDIPHSPAGEKTFDDLFMDLAVRLSGQLNLNLVNDKMEEVSTQWLKDVRTYVLARQSEMLKVGIEPGGKTALRLFS

SEQ ID NO: 15038 - protein, 231 aa, Neisseria meningitidis
MSELILKCEGVGKRYRDGGLDVRVLHGLDLEIHAGESTGIIGSSGSGKSTLLHILGGLDMPSEGRVLLMGEDLRTLSQRQLGILRNRHLGFVYQFHHLLPEFSALENVMMPLLIGKKKREEAAETAMAMLEKVGLKHRSAHRAGELSGGERQRAAIARALVTQPKCLLADEPTGNLDRANARNVLDMMLELKTELGTGLVVVTHDDELAGRFERVMVMKDGSLHPKQGANA

SEQ ID NO: 15039 - protein, 288 aa, Neisseria meningitidis
VPSEPGKNMIQHAGLGYRRDLAEDFLSLSENSPICFIEAAPENWLKMGGWARKQFDRVAERLPLALHGLSMSLGGQAPLDTDLIDGIKEMMRRYDCTFFSDHLSYCHDGGHLYDLLPLPFTEEMVHHTARRIREVQDRLGCRIAVENTSYYLHSPLAEMNEVEFLNAVAREADCGIHLDVNNIYVNAVNHGLLSPEAFLKNVDADRVCYIHIAGHDVETPELLIDTHGAAVLPTVWDLLELAYAKLPTIPPTLLERDFNFPPFAELEAEVAKIADYQTRAGKECRRAA

SEQ ID NO: 15040 - protein, 456 aa, Neisseria meningitidis
MINPIASLSPLDGRYAQSVEALRPIFSEYGLMKARVKVELNWLKALAAEPKIAEVPPFSAGTLAEIDTVIENFSLEDAAAVKAIEATTNHDVKAIEYWLKERFSGVPEVAAASEFIHFACTSEDINNLSHALMLQEAREAVLLPKLAEIIEKLTGMAHELAAVPMMSRTHGQPATPSTLGKEISNVVYRLQRQFKNLQAQEFLGKINGAVGNYNAHMVAYPDVDWETHCRNFVEIGLGLTFNPYTIQIEPHDYMAEFFQTLSRINTILIDFNRDVWGYISLGYFKQKVKAGEVGSSTMPHKVNPIDFENSEGNLGMANAVLGFLSEKLPISRWQRDLTDSTVLRNMGVGVGYAVLGFAAHLRGLNKLEPNPAALAADLDATWELLAEPIQTVMRRYGVANPYEKLKDLTRGKGGITPEVLKGFIGSLEIPVEAKAKLLELTPALYVGKAEALAKRI

SEQ ID NO: 15041 - protein, 220 aa, Neisseria meningitidis; identical to SEQ ID NO: 2583

SEQ ID NO: 15042 - protein, 704 aa, Neisseria meningitidis
MFLFSDGLQSINNNNRRKRIVKNAYIPSRGIRKIPHLFTLLPEFHICKDGKGAEAVIGWGLRPTTHKARAFAAEHQLPFIALEDGFLRSLGLGVAGYPPYSIVYDDIGIYYDTTRPSRLEQLILAADTMPSETLAQAQQTMDFILQHHLSKYNHAPELSDDHPLRSPSKPETVLIIDQTFGDMAIQYGGADASTFELMFQTALNENPQADIWVKTHPDVLCGKKQGYLTQLAQQHRVHLLAEDINPISLLQNVDKVYCVTSQMGFEALLCGKPLTTFGLPWYAGWGVSDDRHPEINRLVQTQRRATRNLLQLFAAAYLQYSRYLNPNTGEAGSLFDVIDYLATVKRKNDKLRGELYCVGMSLWKRAVAKPFFNVPSCRLKFISSTQKLARVKLSDDARILAWGNGKEAIVRFAEQHHIPLLRMEDGFIRSVGLGSNLVPPLSLVTDDMSIYFNAETPSRLEYILQNQNFDDQDFQTALKLQKMLTENHISKYNVGNSDFSAPSTDKTVILVPGQVEDDASIRYGSPQIYRNLDLLRTVRERNPNAYIIYKPHPDVVSGNRIGHISPEDAARYADQTAEQTDILTCLQYADEVHTMTSLTGFEALLRGKKVSCYGLPFYAGWGLTQDLLPIPRRSRRLELWQLIAGTLIHYPDYIHPETHQAINAETAAQILIRQKNMQKNNNGLHRGYFAKKLGKIKQLYRSFK

SEQ ID NO: 15043 - protein, 321 aa, Neisseria meningitidis; identical to SEQ ID NO: 6149

SEQ ID NO: 15044 - protein, 704 aa, Neisseria meningitidis; identical to SEQ ID NO: 6999

SEQ ID NO: 15045 - protein, 332 aa, Neisseria meningitidis; identical to SEQ ID NO: 5628

SEQ ID NO: 15046 - protein, 418 aa, Neisseria meningitidis
MKVLVLGAGVAGVSSAWYLAEAGHEVTVIDRAEGVAMETSFANAGQLSYGYTTPWAAPGIPTKALKWLFKSHPPLLFRPDGSLYQIEWLWQMLQNCTAAHYQTNKERMVRMSEYSREMFRRFEAQTGMNFEGRKKGTLQVFRQTKEVEAAKQDIAVLERYGVPYRRLKPEECAEFEPALARVTAKIAGGLHLPADATGDCHLFTENLYKLCQEKGVQFHFNQTISRIDHNGLRIKAVETETGRFEADAVVCALGCFSRTVLAQLDLDLPIYPVKGYSLTLPVTNSDGAPVSTVLDESYKVAITRFDNRIRVGGMAELSGYEIKLPEKRRETLALVVNDLFPEGGDLSQALFWSGLRPMTPDSTPLIGRTRFENLFLNTGHGTLGWTMSLGSAKLTADIVSGKDTEIRSDDLSLSHYQA

SEQ ID NO: 15047 - protein, 671 aa, Neisseria meningitidis
MKSYPDPYRHFENLDSAETQNFAAEANAETRARFLENDKARALSDGILAQLQDTRQIPFCQEHRARMYHFHQDAEYPKGVYRVCTAATYRSGYPEWKILFSVADFDELLGDDVYLGGVSHLVEQPNRALLTLSKSGGDTAYTLEVDLEAGELVEGGFHFPAGKNHVSWRDENSVWVCPAWDERQLTESGYPREVWLVERGKSFEESLPVYQIGEDGMMVNAWRYLDPQGSPIDLIEASDGFYTKTYLQVSAEGEAKPLNLPADCDVVGYLAGHLLLTLRKDWHRANQSYPSGALVAVKLNRGEIGAAQLLFAPDETQALESVETTKRFVVASLLENVQGRLKAWRFTDGKWQEAELPRLPSGALEMTDQPWGGDVVYLAASDFTTPLTLFALDLNVMELTVMRRQPQQFDSDGINVQQFWTTSADGERIPYFHVGKNAAPDTPTLVYAYGGFGVPELPHYLGSIGKYWLEEGNAFVLANIRGGGEFGPRWHQAAQGISKHKSVDDLLAVVRDLSERGISSPQHIGLQGGSNGGLITAAAFVREPQSIGALVCEVPLTDMIRYPLLSAGSSWTDEYGNPQKYEVCKRRLGELSPYHNLSDGIDYPPALITTSLSDDRVHPAHALKFYAKLRETSPQSWLYSPDGGGHTGNGTQREAADELACVLLFLKEFLG

SEQ ID NO: 15048 - protein, 360 aa, Neisseria meningitidis
MPSEAASDGILPLYPTRTIFQKPIMLPFFPEPSLSYTQQNRTAVLLLNLGTPDAPTAQAVRPYLKSFLTDRRVVELPKWLWYPILHGLVLTLRPKKSAHAYEKIWFKEGSPLEVYTARQAAALAKRMPDLIVRHAMTYGNPSVADVLSELKAQGAGRLLVIPMYPQYAASSSGAAVDKVCEQLLLQRNQMSVRTVSRFYDDTGYIDAMKNHILRYWAEHGRGKKLMLSFHGVPQKHYDLGDPYPDECRHTAKLLAEALELTEDQYVVSFQSQFGRAKWVTPSTQDLFGKLPKQGVTELDVFCPGFLADCLETMEEIALMGREQFYEAGGKSYRYIPCLNDNPDWIDALVALAEENLGGWR

SEQ ID NO: 15049 - protein, 123 aa, Neisseria meningitidis
MKLLFILLVLFVAVEHFYIAWLEMTQIPSEKAAETFKLPYEFMEQNRVQTLFGNQGLYNGFLGIGLVWSRFAAPDNAVYGAMVLFLGFVLIAAAWGAFSSGNKGILVKQGLPAFLAAAAVLAV

SEQ ID NO: 15050 - protein, 385 aa, Neisseria meningitidis
VPFDGKGFPNFEKDVKYDTRINTAVPQVNPIDEPVFNPKGSVGSAHSWSITARIQYAKLPRQGRIRYIPPKNYSPSAPLPKGPNNGYSAGNLSKKVLTLVYINGKLKFGPSSLPSSALKAPVPIVGKAEAPPGKAVPVGEARIPSNPKAVKGTTVTLSQEQRLANGELIPKGSVVTWSDNAVKVVRPDGKKRRFNSRDWEQKALPKPQLPKDYRDDINIGGNNPRFNQQRHEKIESHNPNRIEEIRQRNAVSSAERQADALKRMQTSGRTRLPGQPQKGKPGAAREMSSSDNPNQTAEAFARRYLGRKLTLMERVEGEKLYGGKCVGCWKAQMPDGTFVVYRPAGNASMTKGTTASVDINNPTLNNLNINLKGKPTELKFKFPAR

SEQ ID NO: 15051 - protein, 671 aa, Neisseria meningitidis
VGSFHGFCLSDSIGFQMPSENAKRSCFFILNEKTGAFFMTTPKKTAKTSGNEARELADLSEDIGIRFKYPNSERVYLQGSRGDIRVPLREIRQDDTYTAQGTEANPPIPVYDTSGVYGDPAAHINLKQGLPHIRTAWLDERGDTEILPKLSSEYGIERAHDPKTAHLRFNQITRPRRAKAGRNVTQLHYARQGIITPEMEFVAIRERLKLDELSQKPEYAKLLKQHAGQSFGANIPTHPDQITPEFVRREIAAGRAIIPANINHPELEPMIIGRNFRVKINGNLGNSAVTSSLTEEVEKMVWSLRWGADTIMDLSTGAHIHETREWIIRNAPVPIGTVPIYQALEKTGGIAEDLTWDLFRDTLIEQAEQGVDYFTIHAGVLLRYVPMTANRLTGIVSRGGSIMAKWCLAHHRENFLYTHFDEICEIMKAYDVSFSLGDGLRPGCIADANDESQFAELHTLGELTSKAWKHDVQVMIEGPGHVPLQRVKENMTEELQHCFEAPFYTLGPLVTDIAPGYDHITSGIGAANIGWYGTAMLCYVTPKEHLGLPDKEDVRTGIITYKLAAHAADLAKGWPGAQLRDNALSKARFEFRWRDQFRLSLDPERAESFHDETLPAEGAKIAHFCSMCGPKFCSMKITQEVRDYADKQKAQRQGMEEKAVEFVKKGAKIYS

SEQ ID NO: 15052 - protein, 154 aa, Neisseria meningitidis
MIEMSKDYRNDLYDVYVSYPPQVDRGLIRECLKENLGEEKAEGLIESLDSKPQVLVEEKCTWAKREELHDYFSYLGLDIITRRYMELETVVPPEEGEGEGEGADGEMPEYLELHGGREDDISAPSQPEPPTRNIKPLVFGLLIAFLGYLLGKIF

SEQ ID NO: 15053 - protein, 591 aa, Neisseria meningitidis
MSIVLHGVAAGKGIAVGCAHLIARGTEEVPQYDVAEADTDAEAERFDAAVKATRKELEQLRSAIPENAPTELGAFISLHLMLLTDVTLSREPVDILREQKINAEWALKQQSDKLAAQFDNMDDAYLRERKQDMLQVVRRIHNNLIGQGNELEVADNLFDETVLIANDLSPADTVLFKEQRIAAFVTDAGGPTGHTAILGRSLDIPSVVGLHNARKLITEGETVIVDGINGVLIIAPDESVLNEYRRRAREYRSHKRDLNKLKKTAAATADGVCIELVGNIESAEDVKPLHNLGADGIGLFRSEFLYLNRDTMPSEDEQYEVYSAIVKKMKGKSVTIRTVDLGVDKNPRWFGKNSTPNGSLNPALGMTGIRLCLAEPVMFRTQMRAILRAAVHGPVRMMWPMITSVSEVRQCLIHLDTAQRQLAERGDAFGKVGIGCMIEIPSAALTVGSILKLVDFISVGTNDLIQYILSVDRGDDSVSHLYQPGHPAVLKMLQHVIRTANRMDKDVSVCGEMAGDTAFTRVLLGMGLRRFSMNPNNILPVKNIILHSNVGQLESDIAKVIRCEDEEKSEKLIKQMNSVSVEEEADFKGRK

SEQ ID NO: 15054 - protein, 182 aa, Neisseria meningitidis; identical to SEQ ID NO: 3766

SEQ ID NO: 15055 - protein, 107 aa, Neisseria meningitidis
MIIDEKSTSDVLKQYQELGFDLTKSMIIEFFIEGSQKNLQSIESQIISYRQDFQISIEQDEFGEMWTCYCSVNIVPSLENILAIETTLFDIAQKNDCNYEGFGSYGN

SEQ ID NO: 15056 - protein, 352 aa, Neisseria meningitidis; identical to SEQ ID NO: 6199

SEQ ID NO: 15057 - protein, 283 aa, Neisseria meningitidis; identical to SEQ ID NO: 9103

SEQ ID NO: 15058 - protein, 261 aa, Neisseria meningitidis
MSRIRQAFAALDGGKALIPYITVGDPDIRTTLALMHGMVANGADILELGVPFSDPMADGPVIQRAAERALANGISLRDVLDVVRKFRETDTQTPVVLMGYLNPVHKMGYREFAQEAAKAGVDGVLTVDSPVETIDPLYRELKDNGVDCIFLIAPTTTEDRIKTIAELAGGFVYYVSLKGVTGAASLDTDEVSRKIEYLHQYIDIPIGVGFGISNAESARKIGRVAEAVIVGSRIVKEIENNAGNEAAVVGALVKELKDAVR

SEQ ID NO: 15059 - protein, 328 aa, Neisseria meningitidis; identical to SEQ ID NO: 9651

SEQ ID NO: 15060 - protein, 425 aa, Neisseria meningitidis
MRSSDILIVDDEIGIRDLLSEILQDEGYSVALAENAEEARKLRHQARPAMVLLDIWMPDCDGITLLKEWAKNGQLNMPVVMMSGHASIDTAVEATKIGAIDFLEKPISLQKLLSAVENALKYGAAQTETGPVFDKLGNSAAIQEMNREVGAAVKCASPVLLTGEAGSPFETVARYFHKNGTPWVSPARVEYLIDMPMELLQKAEGGVLYVGDIAQYSRNIQAGIAFIVGKAEHRRVRVVASGSRAAGSDGIACEEKLAELLSESVVRIPPLRMQHEDIPFLIQGIACNVAESQKIAPASFSEEALAALTRYDWPGNFDQLQSVVATLLLEADGQEIGAAAVSSLLGQNVPAEGAEDMVGGFNFNLPLRELREEVERRYFEYHIAQEGQNMSKVAQKVGLERTHLYRKLKQLGIGVSRRAGEKTEE

SEQ ID NO: 15061 - protein, 90 aa, Neisseria meningitidis; identical to SEQ ID NO: 3546

SEQ ID NO: 15062 - protein, 70 aa, Neisseria meningitidis
VCFSPLHQKFLENRRESAVLVSAGTVEMGNIDGIDGSGGLKPTLVYWNHCIIATNRPTATRAHPRHTTVA

SEQ ID NO: 15063 - protein, 515 aa, Neisseria meningitidis; identical to SEQ ID NO: 654

SEQ ID NO: 15064 - protein, 144 aa, Neisseria meningitidis; identical to SEQ ID NO: 9512

SEQ ID NO: 15065 - protein, 462 aa, Neisseria meningitidis
MNAVVVAVIVMLVLSLSRVHVVLSLTVGAFVGGAVAGMPLQNIADAAGQVSQAGIIPVFNKGLEGGAKIALSYAMLGAFAMAITHSGLPQQLAGAVVRKLNRGGMPDSVRSGEGGVKWLLLSIILVMGIMSQNIIPIHIAFIPMIVPPLLLVFNRLKIDRRLIACVITFGLVTTYMFLPYGFGAIFLNEILLGNIHSAAPQLDVKNINVMAAMAIPALGMLTGLLLAFVHYRKPRLYQSNNADTAGNADAANRPQPSAYRSLAAAAAIAVCFAIQLMYEDSLVLGAMLGFAVFMMLGVINRDKANDVFGEGIKMMAMVGFIMIAAQGFAAVMNATGHIQPLVESSMAIFGNSKGMAALAMLVVGLLVTMGIGSSFSTLPIIAAIYVPLCVGLGFSPLATVAIVGTAGALGDAGSPASDSTLGPTMGLNADGQHDHIRDSVIPTFIHYNIPLLIAGWIAAMVL

SEQ ID NO: 15066 - protein, 77 aa, Neisseria meningitidis
MKLTLMFREYCSLCHKMRDALKPFQNEYGFGLDVLDVDDDPVLEEKYNELVPVLLAGDKEICHWYLDEKKLRQVLES

SEQ ID NO: 15067 - protein, 445 aa, Neisseria meningitidis
MSNHTSWSSKIGFVLAAAGSAIGLGAIWKFPYTAGTNGGAVFFLLFLIFTVLVALPVQLAEFYIGRTGGKNAVDSFRVLRPGTQWLWVGRMGVAACFILLSFYSVVGGWVLNYVVHSFTGAVHTGADFEALFGATISNPAGSLSYQALFMLITVWVVKGGISDGIEKANRYLMPGLFILFIALAIRSLTLPGAMEGVSFLLKPNWSYFKADTMITALGQAFFALSIGVSAMITYASYLGKDQDMFRSGHTIMWMNLLVSLLAGLVIFPAVFAFGFEPSQGPGLIFIVLPAVFMKMPFGTVLFAVFMLLVVFATLTSAFSMLETVIASTIRQDERKRKKHTWLIGTAIFIIGIPSALSFGVWGEFKVFGKTIFDLWDYVISAVIMPIGALSVSIFTAWIQDKQSVLKDAGAGSTVPRAVLLLWLNTLRYLAPIAIIIVFVNSLGIL

SEQ ID NO: 15068 - protein, 221 aa, Neisseria meningitidis
MDSWFEDTAMGRYVAKLEQDFFGRYLDSYRFSGMCAVQVGGPWLSLSEDVVCVPRDMSMSAENMALADVSADMLLFPHTLEGGVPSQILSEAHRILKPSGRLMLTGFNPYSLWGFSRWFDGERLPEKRFCLPLPELKRRLADVGFDIEFGKFMVYLPPVSSLGQIRFWRFMEKAGDRWWPQCAAVYGLVLVKRAAGVTPLPAWDGYLGGKALAAGAARVAD

SEQ ID NO: 15069 - protein, 124 aa, Neisseria meningitidis; identical to SEQ ID NO: 4349

SEQ ID NO: 15070 - protein, 225 aa, Neisseria meningitidis; identical to SEQ ID NO: 1206

SEQ ID NO: 15071 - protein, 286 aa, Neisseria meningitidis; identical to SEQ ID NO: 148

SEQ ID NO: 15072 - protein, 146 aa, Neisseria meningitidis; identical to SEQ ID NO: 6527

SEQ ID NO: 15073 - protein, 101 aa, Neisseria meningitidis; identical to SEQ ID NO: 2399

SEQ ID NO: 15074 - protein, 93 aa, Neisseria meningitidis
MPSEARYGKLRQKQKPESHHSHSRESGFLGFRCFSVSMNFQAAVPDKYPQSKIPSFPRRWESRSVRTGTYAPSFPRKRKSRPFGFSFLVSGNF

SEQ ID NO: 15075 - protein, 481 aa, Neisseria meningitidis
MSTQTNFDLVLFGATGDLAMRKLLPCLYQAHVAGLLHPEGRILGVSRSELDTEGFLAKVETSSKIHVKENFSDEAWASFVERFAYLKVDVTQPDDFAALGDLVKARKETDNVVIYLSTAPKFFAQTCENLAKIGLNADNVRVVLEKPLGTDLASSQQINTDVARYFKEGQIYRIDHYLGKESLQNLLALRFANVMFEPLWNNKYIESVQLTIAEQLGVEERGEFYDITGALRDMVQNHLMQMLCMTAMEAPASLDADAVRDEKVKVIKSLKPLTVESVNENVVRGQYTAARGMNGYLEEINVPQDSFTETYVAIKAEIENERWKGVPFYLRTGKRMAGKVAEIVLNFKDLNSHIFEGSRTAPNRLVIELQPYESVRLYTQMKTPGAGNKVETVPLATDLGKALESRRAEAYERLLLDVINGKLALFNRRDELEAAWEYVMPILENWTNNTTPPHGYGAHSWGPEAARELLARDGHKWHEEQ

SEQ ID NO: 15076 - protein, 149 aa, Neisseria meningitidis; identical to SEQ ID NO: 628

SEQ ID NO: 15077 - protein, 436 aa, Neisseria meningitidis
MTDLFAREPDAPLAERLRPHTLDDVVGQEHLIGEGKPLRVAVEGGKPHSMLLWGPPGVGKTTLARILAQSFNAQFLPVSAVFSGVKDIREAIDKAEIALQQGRATILFVDEVHRFNKAQQDAFLPHVESGLLTFIGATTENPSFEVNPALLSRAQVYVLQPLSSDDLKKLIAKVLALPEYQEFTIETDAQKLLVNTADGDARRLLNLLEQLLRAADTRRLKNLTAEFLADSLGAQIRRFDKGGESFYNQISALHKSVRGSHPNAALYWFCRMLDGGTDPRYLARRIVRIAWEDIGLADPRAFQIANDAAATFERLGSPEGELALAQAVLYLAAAAKSNAGYKAYNQMRHFVKENASDEVPVHLRNAPTKLMKELGYGREYRYAHDEPNAYAAGESYMPDGLDEPDFYQPVPRGLEIKIGEKLEWLKSLDEEVLKAK

SEQ ID NO: 15078 - protein, 119 aa, Neisseria meningitidis
MASYVSIKGWIECSDDDIKIIQENINNFWNNCPFNIEEKESAKIYKSGWIFPTNSFNWSSYIFFGACVKSYFIIYFEKCIKTIMELDIEISGFFELDYYEDSYKVNWKINNGNLIQTTN

SEQ ID NO: 15079 - protein, 206 aa, Neisseria meningitidis
MKPQFITLDGIDGAGKSTNLAVIKAWFERRGLPVLFTREPGGTPVGEALREILLNPETKAGLRAETLMMFAARMQHIEDVILPALSDGIHVVSDRFTDATFAYQGGGRGMPSEDIEILEHWVQGGLRPDLTLLLDVPLEVSMARIGQTREKDRFEQEQADFFMRVRSVYLDRAAACPERYAVIDSNLGLDEVRNSIEKVLDRHFGC

SEQ ID NO: 15080 - protein, 201 aa, Neisseria meningitidis
MILLHLDFLSALLYAAVFLFLIFRAGMLQWFWASIALWLGISVLGAKLMPGIWGMTRAAPLFIPHFYLTLGSIFFFIGHWNRKTDGNGWQADPEHPLLGLFAVSNVSMTLAFVGICALVHYCFSGTVQVFVFAALLKLYALKPVYWFVLQFVLMAVAYVHRCGIDRQPPSTFGGSQLRLGGLTAALMQVSVLVLLLSEIGR

SEQ ID NO: 15081 - protein, 595 aa, Neisseria meningitidis; identical to SEQ ID NO: 6503

SEQ ID NO: 15082 - protein, 219 aa, Neisseria meningitidis
LCASCLNVNKIVIIATFYRNPERPSEMRNEEKRALRRELRGRRSQMGRDVRAAATVKINRLLKRYIKKGRKIGVYWPMGKELRLDGFVRVAQKRGAKLYLPYIEPRSRRMWFTPYPESGMERERIRGRAKLNVPQFAGRKRRVHDLNLLLVPVVGMDRLGYRLGQAGGYYDATLAAMKYRLQAKTVGVGFACQLVDRLSVEAHDLPLDGFVSEAGILCF

SEQ ID NO: 15083 - protein, 331 aa, Neisseria meningitidis; identical to SEQ ID NO: 12175

SEQ ID NO: 15084 - protein, 277 aa, Neisseria meningitidis; identical to SEQ ID NO: 7531

SEQ ID NO: 15085 - protein, 354 aa, Neisseria meningitidis
MEKEFRILNIVSAKIWGGGEQYVYDVSKALGLRGCTMFTAVNKNNELMHRRFSEVSSVFTTRLHTLNGLFSLCALTRFIRENRISHLMIHTGKIAALSILLKKLTGVRLIFVKHNVVANKTDFYHRLIQKNTDRFICVSRLVYDVQTADNPFKEKYRIVHNGIDTGRFPPSQEKPDSRFFTVAYAGRISPEKGLENLIEACVILHRKYPQIRLKLAGDGHPDYMCRLKRDVSASGAEPFVSFEGFTEKLASFYRQSDVVVLPSLVPEAFGLSLCEAMYCRTAVISNTLGAQKEIVEHHQSGILLDRLTPESLADEIERLVLNPEAKNALATAAHQCVAARFTINHTADKLLDAI

SEQ ID NO: 15086 - protein, 78 aa, Neisseria meningitidis; identical to SEQ ID NO: 1246

SEQ ID NO: 15087 - protein, 573 aa, Neisseria meningitidis
MPSEAICSKKTMLNKDQFADNHFIRTIIEDDLKSGKHEAVQTRFPPEPNGYLHIGHAKSICLNFGLAYIYDGLCNLRFDDTNPEKENDEYVNAIKEDVEWLGFHWAGEPRFASNYFDQLYDYAVGLIKDGKAYVDDLTPEEMREYRGTLTEAGKNSPYRDRSIEENLDLFTRMKNGEFPDGSKTLRLKIDMASGNINMRDPVIYRIRRAHHHNTGDKWCIYPMYDYTHCISDAIEGITHSLCTLEFEAHRPLYDWVLDNIPAPHATRPRQYEFSRLELLYTITSKRKLNQLVVEKHVSGWDDPRMPTISGMRRRGYTPEGLRLFVKRAGISKSENIVDMSVLEGAIREELENSAPRLMAVLNPLKVTLTNFEAGRTQNRRAAFHPNHEEMGDREVPVSQTIYIEADDFAENPPKGFKRLTPGGEVRLRHGYVIKCDEVVKDEAGNVVELKCSIDHDTLGKNPEGRKVKGVIHWVSAEHAAEIKVRLYDRLFTVERPDAVRGEDGEYLPFTDFLNPESVKEITAYAEPAAKDLPAESRWQFERIGYFVTDRKDHGKDTPVFNRTVTLKDSWQPK

SEQ ID NO: 15088 - protein, 57 aa, Neisseria meningitidis; identical to SEQ ID NO: 6070

SEQ ID NO: 15089 - protein, 428 aa, Neisseria meningitidis
MTAQHQAPLRFITAGSVDDGKSTLIGRLLYDSKALLSDQIKTLESGKSKGLKETIDFSVLTDGLEAEREQGITIDVAYRYFSTAKRKFIIADTPGHEQYTRNMVTGASTASAAVVLVDASQLDFGAQPLQLLPQTKRHSAILRQLNCPHIVVAVNKMDLLDYSEDKFNAIVEAYRRLAEQLGLKDAHFVPVSALLGDNIVYPGGNMPWYKGEPLLSILETLPGADEVSRTADDFYFPVQLVVRQDADKADDFRGYQGRIERGSVAVGQTVRIEPNGLTAEVSEIITPKGEVAQAFAGEAATLRLDRDIDVSRGDLFVDKNSPLAPQKHLEATLCWFDERPLNTARKYLLKHGTQTVPAKVGEIESVLDVRTLEQEAGAESLKMNDIAKVRINLQKPVTATPYAENTAAGSFILIDEATYGTVAAGMIL

SEQ ID NO: 15090 - protein, 324 aa, Neisseria meningitidis
MPSEKNIGFMAGSSRPLWVAFALLLVSCILFMTLNVKGDWDFVLHLRLTKLAALLMVAYAVGVSTQLFQTLTNNPILTPSILGFDSLYVFLQTLLVFTLGGVGYASLPLTGKFGFELVVMMGGSLLLFYTLIRQGGRDLPRMILIGVIFGILFRSLSSLLSRMIDPEEFTAAQANMFASFNTVHNELLGIGALILLISAAAVWRERYRLDVHLLGRDQAVNLGISYTRNTLWILLWIAALVATATAVVGPVSFFGLLTASLANHFSPSVRHSVRLPMTVCVGGILLVGGQTVFEHFLGMKAVLSVVVEFAGGLVFLYLVLKHKK

SEQ ID NO: 15091 - protein, 126 aa, Neisseria meningitidis
MKQTVKWLAAALIALGLNQAVWADDVSDFRENLQAAAQGNAAAQYNLGAMYYKGHGVRRDDAEAVRWYRQAAEQGLAQAQNNLGVMYAERRGVRQDRALAQEWLGKACQNGNQDGCDNDQRLKAGY

SEQ ID NO: 15092 - protein, 83 aa, Neisseria meningitidis
MKTLEKRMKALDKRMMKFGKSLEGRLDARLIESALDYIHYSERFLAFEILCTYIEDFDVRLTEQESREISFINKEFEIESTSD

SEQ ID NO: 15093 - protein, 221 aa, Neisseria meningitidis
MTFTAVLFDLDGVITDTAEYHYRAWKKLAEELGIGIDRKFNEQLKGVSRDDSLKRILAHGGKTVGEAEFAELTRRKNDNYVEMIQAVKPEDVYPGILPLLETLKANGKKIALASASKNGPFLLERMGLTHFFDTVADPAAVAHSKPAPDIFLAAAEGVGADIRRCIGIEDAAAGVAAIKASGALPIGVGKAEDLGSDIPLVPGTAELTYAYLQNVWAQSGR

SEQ ID NO: 15094 - protein, 419 aa, Neisseria meningitidis; identical to SEQ ID NO: 12451

SEQ ID NO: 15095 - protein, 96 aa, Neisseria meningitidis; identical to SEQ ID NO: 6139

SEQ ID NO: 15096 - protein, 146 aa, Neisseria meningitidis
VNIRRAVYADCAALAALDAVCNPSAWTQHQFESALVSPSEQVFLAEKDGRLAAFIVWQNLPDESELHLIATAPECRRQGIASALLEYWYAHLPEGTQRLLLEVRAGNTAAQALYAAHGFTDAGRRKNYYRTADGKTEDAVLMEKIC

SEQ ID NO: 15097 - protein, 837 aa, Neisseria meningitidis
LKNNRQIKLIAASVAVAASFQAHAGLGGLNIQSNLDEPFSGSITVTGEEAKALLGGGSVTVSEKGLTAKVHKLGDKAVIAVSSEQAVRDPVLVFRIGAGAQVREYTAILDPVGYSPKTKSALSDGKTHRKTAPTAESQENQNAKALRKTDKKDSANAAVKPAYNGKTHTVRKGETVKQIAAAIRPKHLTLEQVADALLKANPNVSAHGRLRAGSVLHIPNLNRIKAEQPKPQTAKPKAETASMPSEPSKQATVEKPVEKPEAKVAAPEAKAEKPAVRPEPVPAANTAASETAAESAPQEAAASAIDTPTDETGNAVSEPVEQVSAEEETESGLFGGSYTLLLAGGGAALIALLLLLRLAQSKRARRTEESVPEEEPGLDDAADDGIEITFAEVETPATPEPAPKNDVNDTLALDGESEEELSAKQTFDVETDTPSNRIDLDFDSLAAAQNGILSGALTQDEETQKRADADWNAIESTDSVYEPETFNPYNPVEIVIDTPEPESVAQTAENKPETVDTDFSDNLPSNNHIGTEETASAKPASPSGLAGFLKASSPETILEKTVAEVQTPEELHDFLKVYETDAVAETAPETPDFNAAADDLSALLQPAEAPSVEENITETVAETPDFNATADDLSALLQPSEVPAVEENAAETVADDLSALLQPAEAPAVEENVTETVAETPDFNATADDLSALLQPSEAPAVEENAAETVADDLSALLQPAEAPAVEENAAEITLETPDSNTSEADALPDFLKDGEEETVDWSIYLSEENIPNNADTSFPSESVGSDAPSEAKYDLAEMYLEIGDRDAAAETVQKLLEEAEGDVLKRAQALAQELGI

SEQ ID NO: 15098 - protein, 418 aa, Neisseria meningitidis; identical to SEQ ID NO: 8075

SEQ ID NO: 15099 - protein, 311 aa, Neisseria meningitidis
MSVLIIVEHDNKQLNPTTLHAVTAAAKLGKVDLLVAGNGASAVVEFAKQVAGVKKVLVADAAHYAEGLAEELAPLVVKLAADYRYVAATATTFGKNLLPRVAALLDVPQISDLTEIVDNTTFVRPIYAGNAFETVQVDSEKLVLTFRATAFDAAPVQGGHAEAVNVEATPAQNLSRFVNRQLSHSDRPELTQAKVIVSGGRALGSAEKFNEVLTPLADVLGAAIGASRAAVDAEYAPNDAQVGQTGKVVAPQLYFAIGISGAIQHVAGMQDSKVIVAINKDADAPIFNVADYGLVGDLFEIVPQLTEALKN

SEQ ID NO: 15100 - protein, 475 aa, Neisseria meningitidis
MIHTEPSAQPSTMDTAAFLKHIESAFRRIFSDGINLMQYLPEDKWLALKQAGLLLPFLDKKYGGRKGSQFEIQEVLRIAGHYGVPVTLRTGIEGALVLQPLQEFGDEAQIAQGLDMVFKGEGGGLGVTEPETSGAAIAREMQSYYEYTDGQTIYVNAAKYWQGNSQSDFLLVAAKERKNGKLAKVIDLLLVPKTYIRCETLASEGLRAVRYAVNRIDAEMPATAVMKLSQSDAAGLRAFQNIFIRSRLQLIGMTHGIMEYTLENLERYVRNDIRFVDYERREIRRRHQVSEILYRYVCHSVSPVAPVAHQLMEANIVKTLATEYTYAAAQMLQKLLGAKGFERGHTAGNIAIDIRPFTIFEGPNDMLYAEIYDQFVRATAEEKEAGMKLDKNQTLLDRLQTDARFAAVARDYTLPEDIRSFLQEHTLTDACALQKVFIGKIIARLFVFVQAEHEDTAAFLLNDIRKDILDCRYCG

SEQ ID NO: 15101 - protein, 150 aa, Neisseria meningitidis; identical to SEQ ID NO: 2445

SEQ ID NO: 15102 - protein, 580 aa, Neisseria meningitidis
LAFKKVVTGIFQSLIRRITVGMEIINDAELIRSMQRQQHIDAELLTDANVRFEQPLEKNNYVLSEDETPCTRVNYISLDDKTARKFSFLPSVLMKETAFKTGMCLGSNNLSRLQKAAQQILIVRGYLTSQAIIQPQNMDSGILKLRVSAGEIGDIRYEEKRDGKSAEGSISAFNNKFPLYRNKILNLRDVEQGLENLRRLSSVKTDIQIIPSEEEGKSDLQIKWQQNKPIRFSIGIDDAGGKTTGKYQGNVALSFDNPLGLSDLFYVSYGRGLVHKTDLTDATGTETESGSRSYSVHYSVPVKKWLFSFNHNGHRYHEATEGYSVNYDYNGKQYQSSLAAERMLWRNRLHKTSVGMKLWTRQTYKYIDDAEIEVQRRRSAGWEAELRHRAYLNRWQLDGKLSYKRGTGMRQSMPAPEENGGDILPGTSRMKIITAGLDAAAPFILGKQQFFYATAIQAQWNKTPLVAQDKLSIGSRYTVRGFDGEQSLFGERGFYWQNTLTWYFHPNHQFYLGADYGRVSGESAQYVSGKQLMGAVVGFRGGHKVGGMFAYDLFAGKPLHKPKGFQTTNTVYGFNLNYSF

SEQ ID NO: 15103 - protein, 115 aa, Neisseria meningitidis
MDKELNPGTGDYTGRTVDTLQNAVYIRLMTPLGSWWADKTLGSLLHLLQREKDLQRVSLLAEQYADEALQPIVKSGRADKITVRAEQPHDGRLILHIRVDTAAGGFDYRHEVPVI

SEQ ID NO: 15104 - protein, 605 aa, Neisseria meningitidis
VKPLRRLTNLLAACAVAAAAFGQPALAADLAQDPFITDNAQRQHYEPGGKYHLFGDPRGSVSDRTGKINVIQDYTHQMGNLLIQQAAIQGNLGYTVRFSGHGHEEHAPFDNHAADSASKEQGNVDEGFTVYRLNWEGHEHHPADAYDGPKGGNYPKPTGARDEYTYHVNGTARSIKLNPTDTRDVRQRISDNYSNLGSNFSDRADEANRKMFEHNAKLDRWGNSMEFINGVAAGALNPFISAGEALGIGDILYGTRYAIDKAAMRNIAPLPAEGKFAAIGGLGSVAGFEKNTREAVDRWIQENPNAAETVEALVNVLPFAKVKNLTKAAKPGKAAVSGDFSKSYTCSFHGNTLVKTADGYKAIARIRVGDRVFSKDEASGETGYKPVTAQYGNPYQETVYIEVSDGIGNSQTLISNRIHPFYSDGKWIKAEDLKAGSRLFAENGAEQTVQSVTVKPEPLQAYNLTVADWHTYFVKGDKAETEGVWVHNDCPTKLKPTERYNRQTHYGGSQTDGARAQAARQAGEGKPCPTCGRIQIFGTKTAPSPQHEPPLVKHYYEHGGHSMSNADRAKHARESIKGTQCLTCQRKEGAMMSRYSREQAKKHGL

SEQ ID NO: 15105 - protein, 261 aa, Neisseria meningitidis; identical to SEQ ID NO: 3244

SEQ ID NO: 15106 - protein, 247 aa, Neisseria meningitidis
MLIIRNLIYWLILCSTLIFLFPFMLLASPFRDGAHKMARVWVKILNLSLKHIVGLKYRIIGAEHIPDRPAVICAKHQSGWETLALQDIFPPQVYVAKRELFKIPFFGWGLKLVKTIGIDRNNRREANEQLIKQGLARKNEGYWITIFPEGTRLAPGKRGKYKLGGARMAKMFEMDIVPVALNSGEFWPKNSFLKYPGEITVVICPTIPHASGSEAELMGKCEHLIETQQPLISGAGPFAAKMPSETA

SEQ ID NO: 15107 - protein, 110 aa, Neisseria meningitidis
MADKEQVEKMIYSENKQSVIDGMLGMTFSSEEDEIPWISEKLTELSKHKDLNIARLSLTCFGHLARMHENIGDCDKVIALLRSKQGNPDFQGFAEDALDDISFFIFKKHP

SEQ ID NO: 15108 - protein, 289 aa, Neisseria meningitidis; identical to SEQ ID NO: 657

SEQ ID NO: 15109 - protein, 121 aa, Neisseria meningitidis; identical to SEQ ID NO: 4117

SEQ ID NO: 15110 - protein, 238 aa, Neisseria meningitidis; identical to SEQ ID NO: 3469

SEQ ID NO: 15111 - protein, 391 aa, Neisseria meningitidis; identical to SEQ ID NO: 2276

SEQ ID NO: 15112 - protein, 767 aa, Neisseria meningitidis
MNTQAHAPHTDSNTLMLGRYAERAYLEYAMSVVKGRALPEVSDGQKPVQRRILFAMRDMGLTAGAKPVKSARVVGEILGKYHPHGDSSAYEAMVRMAQDFTLRYPLIDGIGNFGSRDGDGAAAMRYTEARLTPIAELLLSEINQGTVDFVPNYDGAFDEPLHLPARLPMVLLNGASGIAVGMATEIPPHNLNEVTQAAIALLKKPTLETADLMQYIPAPDFAGGGQIITPADELRRIYETGKGSVRVRARYEIEKLARGQWRVIVTELPPNANSAKILAEIEEQTNPKPKAGKKQLNQDQLNTKKLMLDLIDRVRDESDGEHPVRLVFEPKSSRIDTDTFINTLMAQTSLEGNVSMNLVMMGLDNRPAQKNLKTILQEWLDFRTVTVTRRLKFRLNQVEKRLHILEGRLKVFLHIDEVIKVIRESDDPKADLMAAFGLTEIQAEDILEIRLRQLARLEGFKLEKELNELREEQGRLNILLGDENEKRKLIIKEMQADMKQYGDARRTLVEEAGRAVLTQTTADEPITLILSEKGWIRSRAGHNLDLSQTAFKEGDRLKQTLEGRTVLPVVILDSLGRTYTLDAAEIPGGRGDGVPVSSLIELQNGAKPVAMLTGLPEQHYLLSSSGGYGFIAKLADMVGRVKAGKVVMTTDSGETVLPPIAVYASSFINPDCKIIAATSQNRALAFPIGELKIMAKGKGLQIIGLNAGESLTHTAVSSEPEILIESEGRRGAAHKDRIPVSLLEAKRGKKGKLLPISGSLKQLSSPK

SEQ ID NO: 15113 - protein, 458 aa, Neisseria meningitidis; identical to SEQ ID NO: 569

SEQ ID NO: 15114 - protein, 330 aa, Neisseria meningitidis
MKKESRPAFDAAAVFDAAAVPVSDSGFAANANVRRFVDDEVGKGDFSRAEWQDFFDKAAYKADIVKIMHSPSTSRPWYVFRTGNSGKAKFRGARRFYAENRALIDDVAQKYGVPAELIVAVIGIETNYGKNTGSFRVADALATLGFDYPRRAGFFQKELVELLKLAKEEGGDVFAFKGSYAGAMGMPQFMPSSYRKWAVDYDGDGHRDIWGNVGDVAASIANYMKQHGWRTGGKILVSATLAPGADVQAIIGEKTALTRTVADLKAYGIIPGEELADDEKAVLFKLETAPGVFEYYLGLNNFYTVWQYNHSRMYVTAVRDIANSLGGPGL

SEQ ID NO: 15115 - protein, 227 aa, Neisseria meningitidis
MFALLEAFFVEYGYAAVFFVLVICGFGVPIPEDLTLVTGGVISGMGYTNPHIMFAVGMLGVLVGDGIMFAAGRIWGQKILKFKPIARIMTPKRYAQVQEKFDKYGNWVLFVARFLPGLRTAVFVTAGISRKVSYLRFLIMDGLAALISVPIWIYLGEYGAHNIDWLMAKMHSLQSGIFVILGIGATVVAWIWWKKRQRIQFYRSKLKEKRAQRKAAKAAKKAAQSKQ

SEQ ID NO: 15116 - protein, 729 aa, Neisseria meningitidis
MIYHRIAVNVPLSDGLLTYSHSEPLPQGMRVLVPFRNKTVVGMVWETDIAPDMDTARILSIQTTFLDEPPLPESWRDLLSFTSRYYHYPTGQAVFAALPQGLKETRAVEMPQPPLFYALNEAGRAQTPPPARFNKKAALWDALLSGGMTMAALKQVNAQAAKLIEDWAEQGWIETTEAAKPVLRSYHGQASHSEFVLNADQQKASDEIQTALGRFRPFLLYGITGSGKTEVYFDAMAKVLAQGRQVLFLLPEINLTPQLLKRVENRFADVPTAVLHSQMAAGRRTQDYLRAMLGQAKLVIGTRLAVFTPMDDVGLIVVDEEHDGSFKQDNELRYHARDLAVWRAKQSGCPVVLGSATPSLESWHKAQSGAYRLLQLTERAHTAAQLPQVDILNVGRLKLDNGFSPQALQLLKQNFEAGGMSLVYLNRRGFAPALFCGDCGHTFGCPNCSAKMVLHQRARQLRCHHCDHREPIPFKCPDCGNQDLTAVGHGTQRVEETLRAFLPKAAVVRVDRDSTAHKNDWADLYRRIADNEIDILVGTQMLAKGHDFARLNLVIVLNADGSLYSADFRAPERLFAELMQVSGRAGRADKPGKVLIQTQLPEHPVFAAVKAQNYAVFAENELNERQMFAMPPFGFQTAVRADAPRVADAMEFLNAAKETLAPLLPESVSQFGAAPMLMVRLAERERAQIFLESVSRQDLHRAVSLWVQVLQQNRDGKIRWSVDVDPQEA

SEQ ID NO: 15117 - protein, 195 aa, Neisseria meningitidis
MEHKLPQLPYEPDALSPHLSKETLEFHYGKHHQTYITNLNNQIKGTEFENLPLEEIVKKSSGGVFNNAAQTWNHTFYWLGFTPKGQGKPSGELAAAIDAKWGSFEKFQEAFNACAAGTFGSGWAWLVKTPAGGLDLVSTSNAATPLTTENTPLLTCDVWEHAYYIDYRNSRPNYLKGFWEIVNWDEVAKRFAALS

SEQ ID NO: 15118 - protein, 473 aa, Neisseria meningitidis; identical to SEQ ID NO: 719

SEQ ID NO: 15119 - protein, 135 aa, Neisseria meningitidis
LAEGQKSAVTEYYLNHGTWPKNNTSAGVASSSTIKGKYVKEVTVANGVITATMLSSGVNKEIQGKKLSLWAKRQDGSVKWFCGLPVTRNAAKDDTVAAAAKTADNINTKHLPSTCRDASSVVCIETPPTAFYKNT

SEQ ID NO: 15120 - protein, 109 aa, Neisseria meningitidis; identical to SEQ ID NO: 6762

SEQ ID NO: 15121 - protein, 149 aa, Neisseria meningitidis
MSLIGEILPLSHIVLDMEVGSKKRLFEEAGLLLERESSLFHADVFECLFAREKLGSTGLGQGVAIPHGRHAGVKQATGAFIRTREPVGFDAPDGKPVSLVFILLVPENATGEHLEVLSKLAGKFSQKSIRESLMTVSSAEEARAILTEE

SEQ ID NO: 15122 - protein, 384 aa, Neisseria meningitidis
MADKKSPLIAVSVGEASGDLLGAHLIRAIRKRCPQARFVGIGGELMKAEGFESLYDQERLAVRGFVEVVRRLPEILRIRRGLVRDLLSLKPDVFVGIDAPDFNLGVAERLKRSGIPTVHYVSPSVWAWRRERVGKIVHQVNRVLCLFPMEPQLYLDAGGRAEFVGHPMAQLMPLEDDRETARKTLGVDAGIPVFALLPGSRVSEIDYMAPVFFQTALLLLERYPAARFLLPAATEATKRRLAEILQRSEFAGLPLTVTDRQSETVCRAADAVLVTSGTATLEVALCKRPMVISYKISPLTYAYVKRKIKVPHVGLPNILLGKEAVPELLQHDAVPEKLAAALADWYEHPDKVAALQQDFRVLHLLLKKDTADLAARAVLEEAGC

SEQ ID NO: 15123 - protein, 228 aa, Neisseria meningitidis
MTVLQERYREVSDRIGKLVLQAGRKPHSVSLIAVGKTFPSDGIREVYAAGQRDFGENYIQEWYGKTEELADLTDIVWHVIGDVQSNKTKFVAERAHWVHTVCRLKTAVRLSGQRPSSMPPLQVCIEVNIAGEAVKHGVAPEEAVALAVEVAKLPNIVVRGLMCVAKANSSETELKVQFQTMRKLLADLNAAGVKADVLSMGMSDDMPAAIECGATHVRIGSAIFGKRG

SEQ ID NO: 15124 - protein, 637 aa, Neisseria meningitidis
MLNITLPDGSVRQYESPVTVAQIAASIGVGLARAAVAGRVNGKLVDACDPIVEDSAVQIITPKDQEGIEIICHSCAHLVGHAVKQLYPNAKMVIGPVIEEGFYYDIATEKPFTPEDVAAIEARMKELIAQDYDVVKIMTPRAEAIKIFQERGEEYKLRLIDDMPEVEAMGMYHHQEYVDMCRGPHVPNTRFLKNFKLTKLAGAYWRGDSNNEMLQRIYGTAWATKDELKAYIQRIEEAEKRDHRKLGKQLDLFHLQDEAPGMVFWHPKGWALWQVIEQHMRKELNAAGYKEVKTPQIMDKTFWEKSGHWDNYKDNMFVTSSEKREYAVKPMNCPGHVQIFNNGLRSYRDLPMRLAEFGSCHRNEPSGALHGLMRVRGFVQDDAHIFCTEDQIVSEARAFNELLVRIYKQFGFHDVSVKLSLRPEKRAGSDDVWDKAEQGLREALTACGVEWGELPGEGAFYGPKIEYHVRDALGRSWQCGTLQLDFVLPERLNAEYVTENNDRARPVMLHRAILGSLERFIGILIENHAGSFPLWLAPVQMVIMNITENQADYCREVAAKLQAAGFRAELDLRNEKIGYKIRDNSQYRFPYQIVVGDKEKQENKVAVRRKAEDLGSLDLDDFIAQLQQEITDALVNH

SEQ ID NO: 15125 - protein, 112 aa, Neisseria meningitidis; identical to SEQ ID NO: 10404

SEQ ID NO: 15126 - protein, 163 aa, Neisseria meningitidis
MRAVIQKTVGAKVDVVSEAGTETCGKIDGGFVVLLGVTHSDTEKDARYIADKIAHLRVFEDEAGKLNLSLKDVGGAVLLVSQFTLYADATSGRRPSFSQAAPAEQAQQLYLRTAELLRGHGIHVETGRFRTHMQVSLCNDGPVTILLDSFMTRISPKMKVVPD

SEQ ID NO: 15127 - protein, 321 aa, Neisseria meningitidis; identical to SEQ ID NO: 7025

SEQ ID NO: 15128 - protein, 215 aa, Neisseria meningitidis; identical to SEQ ID NO: 6176

SEQ ID NO: 15129 - protein, 109 aa, Neisseria meningitidis; identical to SEQ ID NO: 2887

SEQ ID NO: 15130 - protein, 394 aa, Neisseria meningitidis; identical to SEQ ID NO: 6005

SEQ ID NO: 15131 - protein, 227 aa, Neisseria meningitidis; identical to SEQ ID NO: 1151

SEQ ID NO: 15132 - protein, 208 aa, Neisseria meningitidis
MRKIRTKICGITTPEDASAAVAAGADAVGLVFFQGSSRAVDIARAKKITAALPPFVSVVALFVNESAQNIRRILAEVPIHIIQFHGDEDDTFCRQFHRPYIKAIRVQTTSDIRNAADRFPDAQALLFDAYHPSEYGGTGHRFDWTLLAEYSGKPWVLAGGLTPENVGEAVRITGAEAVDVSGGVEASKGKKDAAKVAAFIATANRLFR

SEQ ID NO: 15133 - protein, 41 aa, Neisseria meningitidis; identical to SEQ ID NO: 6542

SEQ ID NO: 15134 - protein, 128 aa, Neisseria meningitidis
  misc_feature 122, 123: 'Xaa' is any amino acid
LAADRTIPEPSKTRYLRDYRGRPAYPLLSMFKAVLLGQWNSLSDPELEHSLITRIDFNLFCRFDELSIPDYSTLCRYRNRLAQDNTLSELLELINRQLTEKGLKIEKASAAVVDATIIQTAXXTHLIN

SEQ ID NO: 15135 - protein, 193 aa, Neisseria meningitidis; identical to SEQ ID NO: 1378

SEQ ID NO: 15136 - protein, 311 aa, Neisseria meningitidis
MGHNMMTTQKWYEHITNVIIGNTANFNSGCLDSIDYVDERKGVPLAAMEHIFMDVRAAASHAYLFEHDLNKFKQYAYVAGKLGVLLSVNAEDPEPFFFPCDMLNIQNPMFLMLMSDSPQLREFLVRNIDNIANDTEAFVNRYDLNRHMIYNTLLMVEGKQLDRLKQRSEKVLAHPTPSKWLQKRLYDYRFFLAFAEQDAEAMKAALEPLFDKKTARMAAKETLSYFDFYLQPQIVTYAKIASMHGFDLGIDHEIAPRDLIVYDPLPADEYQDIFDFMKQYDLSYPYEYLQDWIDYYTFKTDKLVFGNAKRE

SEQ ID NO: 15137 - protein, 93 aa, Neisseria meningitidis; identical to SEQ ID NO: 3308

SEQ ID NO: 15138 - protein, 118 aa, Neisseria meningitidis; identical to SEQ ID NO: 680

SEQ ID NO: 15139 - protein, 179 aa, Neisseria meningitidis
MKITHCKLKKKVQKELLRFFALEITARSAADILGIHPNSAALFYRKIRTVINHHLALAADEVFEGPVEPDESDFGGRRKGRRGRGAAGKVVVFGILKRNGRVYTVVVNNAKSETLLPVIKKKIMPDSIVYTDSLSSCDKLDVSGFIHYRINHSKEFADRQNHINGIENFWNQAKRVLRK

SEQ ID NO: 15140 - protein, 202 aa, Neisseria meningitidis
LCQKEHVNPFALSKQYLLVVTFVKSSSKNFQAALLWARSAKLFENLEIGKETIYCCAFDKTAEQAGMAGVFLNYIENWNGKQIYINGRIHSGSIYDLLGVLDCYQKSQSCPNPKSHCCFVSDDIFLWHGSRPTFEISLDLTGKKKETSSAKKFVMPCINFRHHRIEKETYLGNWNEQIAALAVKQNIDWCPSFDIENFRQYE

SEQ ID NO: 15141 - protein, 142 aa, Neisseria meningitidis
MMFSWFKLFHLFFVISWFAGLFYLPRIFVNMAMIDAPRGNPEYVRLSDMAVRLYRFMSPLGFGAVVFGAAIPFAAGWWGSGWVHVKLCLGLMLLAYQLYCGVLLRRFQNYSNTFSHRWYRVFNEIPVLLMVAALYLVVFKPF

SEQ ID NO: 15142 - protein, 269 aa, Neisseria meningitidis
MTPLKIAIAGANGRMGRVLVEAVNNHPDTVLSGALEHSGSEALGLDAGYAVGLKTGIAISDDVDAVLAQSDVLIDFTRPEPTLKHLQKCVEKQVNIIIGTTGFDDAGKAAIHTAAEQTGIVFAANFSVGVNLTFHILDTVARVLNEGYDIEIIEGHHRHKVDAPSGTALRMGEVIAGALGRDLKQCAVYGREGHTGPRDPSTIGFATVRAGDIVGDHTALFATDGERVEITHKASSRMTFAAGAVRAAVWVNGKTGLYDMQDVLGLNNR

SEQ ID NO: 15143 - protein, 219 aa, Neisseria meningitidis
  misc_feature 215, 216, 217: 'Xaa' is any amino acid
LQFLEDSLRPRITRVDLALDFFDGEYTPEQALLDHDNGFFDNSNMRPKSEMVGTAWRREDGSGKTFYVGRKKNSRFVRVYEKGRQLGDKESKWVRFEIQFNHGDMEIPLDILINQGSYFSGAFPICQKFKNMPNPERFDYRKKVANLTFQHKLRYAKNAVGKLINFMFDMGFDSDEIVRYLKADLGYPKGLEPEKYSLAGLKESLKFGFIHEQPXXXHT

SEQ ID NO: 15144 - protein, 206 aa, Neisseria meningitidis; identical to SEQ ID NO: 1164

SEQ ID NO: 15145 - protein, 210 aa, Neisseria meningitidis
MTVWVGLTGGIGSGKSAAAQCFADLGVPRIDADAAAHSLTASDGIALPEIRRLFGDTVFDTQGLLRRDILRKEVFASPSRKALLESVMLPLIFSEIKKQQETFTDAAYGIVEIPLLTEKRQFISLIRRVLTISAPLEKRIGRVMARSGLTRGEVADIISHQASESERLLLADDVLLNDGSLKSLREKTMRLHAFYSGIFASKPTQGKHND

SEQ ID NO: 15146 - protein, 655 aa, Neisseria meningitidis
VGNTFKSILVWVALGIGLMAAFNALDGKKEDNGQIEYSQFIQQVNNGEVSGVNIEGSVVSGYLIKGERTDKSTFFTNAPLDDNLIKTLLDKNVRVKVTPEEKPSALAALFYSLLPVLLLIGAWFYFMRMQTGGGGKGGAFSFGKSRARLLDKDANKVTFADVAGCDEAKEEVQEIVDYLKAPNRYQSLGGRVPRGILLAGSPGTGKTLLAKAIAGEAGVPFFSISGSDFVEMFVGVGASRVRDMFEQAKKNAPCIIFIDEIDAVGRQRGAGLGGGNDEREQTLNQLLVEMDGFESNQTVIVIAATNRPDVLDPALQRPGRFDRQVVVPLPDIRGREQILNVHSKKVPLDKSVDLLSLARGTPGFSGADLANLVNEAALFAGRRNKVKVDQSDFEDAKDKIYMGPERRSMVMHEDEKRATAYHESGHAIVAESLPFTDPVHKVTIMPRGRALGLTWQLPERDRISMYKDQMLSQLSILFGGRIAEDIFVGRISTGASNDFERATQMAREMVTRYGMSDKMGVMVYAENEGEVFLGRSVTRSQNISEKTQQDIDAEIRRILDEQYQVAYKILDENRDKMETMCKALMEWETIDRDQVLEIMAGKQPSPPKDYSHNLRENADAAEDNAPHAPTREETEAPAPADTASTESEQQPENKA

SEQ ID NO: 15147 - protein, 279 aa, Neisseria meningitidis; identical to SEQ ID NO: 5188

SEQ ID NO: 15148 - protein, 489 aa, Neisseria meningitidis
LKAVIPHTGGHEMNEYYQLIKHPDISLSPISDGIGVGNPATGEILAYVRNTGSDKLKNLIQKAAAAQKLWAAKTALERADILWRWYFLVKENKEALARLMTMEQGKSLTESRGEIDYAASFVRWFAEEARRIDGDVLTSVKASQKLVVLKQPVGVTAAITPWNFPSAMIARKAAPALAVGCAMIVKPASLTPLSAYALAVLAYEAGVPQDLLPVVSGSASEISHEFVTNPTVRKISFTGSTEVGAKIFADSAADIKKLSLELGGNAPFIVFDDADLDKAVEGALASKFRNSGQTCVCTNRVYAQSGIHDEFCRKLSEKVAELKLGNGLEDGVNQGPLIEEKAVEKVEQHIADALSKGASCLTGGKRSALGGTFFEPTVLSGVTTQMAVAREETFGPLCPVFRFETEAEVIAAANNTEYGLAAYLFTADTARQWRVGEALEYGMVGINTGLISNEAAPFGGVKRSGLGREGSKYGADEYLELKYLCMDVG

SEQ ID NO: 15149 - protein, 375 aa, Neisseria meningitidis
MYTFRPFPKLHTETHIMNIQNIRTLLDTVAVPNTARTLGGEKAVRSVEQRSDGIHIALHFGFPVAHIAAAIADSVQETLMPETGDTHIHLSMDTEIGTHKVQPGVTTIKGVKNIIAVASGKGGVGKSTTTANLAAAMARMGARVGVLDADLYGPSQPTMLGVDDRKPDQKNQKLIPVESSDGIQVMSIGFLVDTGQAVVWRGPMVSQALQQLMFQSEWDEVDYLFIDLPPGTGDIQLTLSQRIPVTGSVIVTTPQDIALIDARKAVDMFRKVNIPILGVLENMSVHICSNCGHSEALFGTDGGKDLAARLNVPLLGQLPLSLPVREAMDGGTPAQLFDEHPAIAKIYTDAAFQIALSIADKGKDFSSRFPKIVVE

SEQ ID NO: 15150 - protein, 495 aa, Neisseria meningitidis; identical to SEQ ID NO: 2837

SEQ ID NO: 15151 - protein, 395 aa, Neisseria meningitidis; identical to SEQ ID NO: 13319

SEQ ID NO: 15152 - protein, 138 aa, Neisseria meningitidis; identical to SEQ ID NO: 937

SEQ ID NO: 15153 - protein, 122 aa, Neisseria meningitidis; identical to SEQ ID NO: 2347

SEQ ID NO: 15154 - protein, 394 aa, Neisseria meningitidis
MTEPTSRRRFLKTCTAAAGAGLLQACGTSATSVPPLPSSHSVVKARTVPLQTPRRQSSDGNLLRVVASSGFAEDTNRVNTALTRLYNAGFTVTNQQAGSRRFQRFAGTDTQRAADFQEVASSRVATPKVLMGLRGGYGAARILPHIDFASLGARMLEHGTLFFGFSDVCAVQLALLAKGNMMSFAGPMAYSDFGKPAPGAFTMDAFIKGATQNRLTVDVPYIQRADVETEGTLWGGNLSVLASLAGTPYMPDIDGGILFLEDIGEQPYRIERMLNTLYLSGILKKQRAIVFGNFRMEKIRDVYDSSYDFSAVANHVSRTAKIPVLTGFPFGHIADKITFPLGAHARIRMNGNGGYSVAFEGYPTLNASALTLDTLLPPPDFPFFPESGVADISE

SEQ ID NO: 15155 - protein, 444 aa, Neisseria meningitidis
VGEPENKSSEPVREIQASKEMPSETSSPRKENETEVHIPAAPFIVKQSGSNALAVCALVLAALGLGTSGFLFVQGQNVLKNQELAFNQKIDKAALGESENAALLKDNLNRQAAIQSELDRLDGNVKANGEQILEMQKSYRELTKGRADWLVDETETILNLAAQQLVLTGNIQTAVGVLEHIDSRLSRFNQAELLPIKQAVSSDLAELKNRPYVDISGTALRLDRLETAVSGLPLMLDGVLKPGVQVKNEAASASWWQNVWEKSLGTLKGLVEIRRLENNDAMLLSPEQAYFVRENLRLRLLDARIALMQRNGEVYQGDLNNAEAAVRQYFDAKSPATQSWLKELAELKALDVRMTADDGLKNSLNAVRAYRDGTRMTAAENQEAEQAASEPANENTASEPAAASDVKTIEAPSLPSERKPEQPAKKQPVPEKAGRSPSAKGERA

SEQ ID NO: 15156 - protein, 91 aa, Neisseria meningitidis
LLVTAVQTVFSANVYACRHNGKTSYSQTPGKHCTNAGLGRDRVYSSVRPAVKDRAEDAGVGDYSDTVRDEHVQNPKGNAQKDGSAAGIKPH

SEQ ID NO: 15157 - protein, 59 aa, Neisseria meningitidis; identical to SEQ ID NO: 642

SEQ ID NO: 15158 - protein, 76 aa, Neisseria meningitidis; identical to SEQ ID NO: 374

SEQ ID NO: 15159 - protein, 209 aa, Neisseria meningitidis
MNLFQNAKFFTTVNHLKDLPDTPLEIAFVGRSNAGKSSAINTLTNHVRLAYVSKTPGRTQHINFFELQNGNFMVDLPGYGYAQVPEAVRAHWVNLLGDYLQQRKQLIGLVLIMDARHPLKELDIRMLDFFHTTGRPVHILLSKADKLSKNEQIKTLSQVKKLLKPYSDRQNISVQLFSSLKKQGIDEANRTVGSWFDAADAAASSPEEN

SEQ ID NO: 15160 - protein, 191 aa, Neisseria meningitidis; identical to SEQ ID NO: 1730

SEQ ID NO: 15161 - protein, 216 aa, Neisseria meningitidis
VITDIEQAITDRLKRGLGRMVRTVKSYNGEADDLAGQIHTLPAVWVTYGGSKVEPASTGGVCGRYQDTAEFVVMVAARNLRNEQAQRQGGIDSREIGSNDLIRAVRRLLDGQRLGFADSRGLVPKAVRAIANHVLVQNAAVSIYAVEYAIRFNTCGLENDRYPEHTDNPDDPNHIFTKYQGTLSEPWPDFEGLDGKIYDPQSADEIPVNLTLKDKQ

SEQ ID NO: 15162 - protein, 91 aa, Neisseria meningitidis
LNDAVHYRNMKLSEEESYSYWKYCITEYIDNHEEKDNIWYLSNKHNEKLLYLNNNIIKESVFKKGYIKNIMEKIIMKYNYILNGNDKIYLT

SEQ ID NO: 15163 - protein, 200 aa, Neisseria meningitidis
LRVLSAPPALPFAYASVSCGFFCLLWFLSEALMVDAWSVPDFESKICPPEALAARLALLPRPLVFTNGCFDILHRGHVTYLAQARSMGGALVLALNTDASVRRLGKGGDRPINPLENRAAVAAALESVDLVTWFDGDTPAALIEAVKPEILVKGGDWAADKIVGAAETLARGGQVFSIPFLHQTSTTKTLAKIRAAEGGK

SEQ ID NO: 15164 - protein, 173 aa, Neisseria meningitidis; identical to SEQ ID NO: 6851

SEQ ID NO: 15165 - protein, 390 aa, Neisseria meningitidis
MKQINHTLQQKLAEFKAKSGMNQTQLARGIGTSPASISMYLNGTYAEKGGNYETIEPKIEAFLEMQDSKAQREELVLGFVSTKTTRRIAEVMRDAHEGGETVVIYGQAGLGKTQAVKNYCDKNPAAILIEANPSFTALVLMRKLATAAKVSAMGSLNDLFESVSDRLRDSGRLIVVDEAENLPLRALEIVRRLHDETGCGLVLSGMPRLVANLRGKHGELVQLYSRVSVALNLGESLPDDELFEIAKAALPDAVKHLLPDSVQALITVIGFNETLELVRLMGGTTYPLRQGYTKNSQSRVAYLEEIIGSEAAGRLVEAMAPCNLFIPRCETALYELRNRKIRSQFDRQTAGGTPAYEAVNDLALAHRLSDRHVWRILKQADKEAEQENLF

SEQ ID NO: 15166 - protein, 141 aa, Neisseria meningitidis
MTQETALGAALKSAVQTMSKKKQTEMIADHIYGKYDVFKRFKPLALGIDQDLIAALPQYDAALIARVLANHCRRPRYLKALARGGKRFDLNNRFKGEVTPEEQAIAQNHPFVQQALQQQSAQAASETPSVEAEAAGSSAAE

SEQ ID NO: 15167 - protein, 310 aa, Neisseria meningitidis
MYEIKQPFHSGYLQVSEIHQIYWEESGNPDGVPVIFLHGGPGAEASPECRGFFNPDVFRIVIIDQRGCGRSRPYACAEDNTTWDLVADIEKVREMLGIRKWLVFGGSWGSTLSLAYAQTHPERVKGLVLRGIFLCRPSETAWLNEAGGVSRIYPEQWQKFVAPIAENRRNRLIEAYHGLLFHQDEEVCLSAAKAWADWESYLIRFEPEDVDEDAYASLAIARLENHYFVNGGWLQGDRAILNNIGKIRHIPTIIVQGRYDLCTPMQSAWALSKAFPEAELRVVQAGHRAFDPPLVDALVQAVEDILPHLL

SEQ ID NO: 15168 - protein, 348 aa, Neisseria meningitidis
MIPATYTLSQITARLGGEWRGEDISVTAVRPLADAQAEHISFLANPKYKAEVHDSSAGAVIVSAKAADGFEGRNLIVADDPYLYFAKVARLFSPVVKARGGIHPTAVVEPGATVPTSCEIGANVYIGANTVLGEGCRILANAVVQHDCKLGDEVVLHPNAVVYYGCTLGRRVEIHSGAVIGADGFGLAFAGDSWFKIPQTGAVTLGDDVEIGSNTNIDRGAMSDTTVGNGTKIDNQVQIGHNCKIGSHTVIAAKTGISGSVTIGSYCIIGGGVGTVGHIEIADKTTIGGGTSVTHSITESGKHLAGIFPMSTHKEWARNAVYIHRLSEMNKRLKTLEQQLSDTGQDSK

SEQ ID NO: 15169 - protein, 170 aa, Neisseria meningitidis; identical to SEQ ID NO: 8813

SEQ ID NO: 15170 - protein, 1071 aa, Neisseria meningitidis
MPKRTDLKSILIIGAGPIVIGQACEFDYSGAQACKALREEGYKVILVNSNPATIMTDPEMADVTYIEPIMWQTVEKIIAKERPDAILPTMGGQTALNCALDLARNGVLAKYNVELIGATEDAIDKAEDRGRFKEAMEKIGLSCPKSFVCHTMNEALAAQEQVGFPTLIRPSFTMGGSGGGIAYNKDEFLAICERGFDASPTHELLIEQSVLGWKEYEMEVVRDKNDNCIIICSIENFDPMGVHTGDSITVAPAQTLTDKEYQIMRNASLAVLREIGVDTGGSNVQFAVNPENGEMIVIEMNPRVSRSSALASKATGFPIAKVAAKLAVGFKLDELRNDITGGKTPASFEPSIDYVVTKIPRFAFEKFPAADDRLTTQMKSVGEVMAMGRTIQESFQKALRGLETGLCGFNPRSSDKAEIRRELANPGPERMLFVADAFRAGFTLEEIHEICAIDPWFLAQIEDLMKEEKAVSDGILSDLDFAALRRLKRKGFSDKRLAQLLNVSEKEVREHRYALKLHPVYKRVDTCAAEFATETAYLYSTYEEECEARPSDRKKVMILGGGPNRIGQGIEFDYCCVHAALALRESGFETIMVNCNPETVSTDFDTSDRLYFEPLTLEDVLEIVRTENPWGVIVHYGGQTPLKLANALVENGVNIIGTSADSIDAAEDRERFQKVLNDLGLRQPPNRIAHNEEEALVKAEEIGYPLVVRPSYVLGGRAMQIVHSAEQLQKYMREAVQVSEDSPVLLDFFLNNAIEVDVDCVSDGKDVVIGGIMQHVEQAGIHSGDSGCSLPPYSLSEEIQDEIRRQTKAMAYALGVVGLMNVQFAVQDGVVFVLEVNPRASRTVPFVSKATGVPLAKVGARCMAGISLKEQGVEKEVVPDFYAVKEAVFPFIKFPGVDTILGPEMRSTGEVMGVGASFGEAYYKAQLGAGERLNPTGKIFLSVREEDKERVIKTAKNFQALGYGICATRGTAQYLTEHGLIVQTINKVPEGRPHIGDALKNGEIALVVNTVSSDPQSVSDSHIIRQSALQQRVPQYTTTAGGEAMSEGAKSRDHLGVYSVQELHGRLKNRN

SEQ ID NO: 15171 - protein, 128 aa, Neisseria meningitidis; identical to SEQ ID NO: 605

SEQ ID NO: 15172 - protein, 867 aa, Neisseria meningitidis
MSKTVRYLKDYQTPAYRILETDLHFDIAEPQTVVKSRLTVEPQRVGEPLVLDGSAKLLSVKINGVAADYVLEGETLTIADVPSERFTVEVETEILPAENKSLMGLYASGGNLFTQCEPEGFRKITFYIDRPDVMSKFTTTIVADKKRYPVLLSNGNKIDGGECSDGRHWVKWEDPFAKPSYLFALVAGDLAVTEDCFTTMGGRNVKIEFYTAEADKPKVGFAVESLKNAMKWDETRFGLEYDLDIFMVVAVGDFNMGAMENKGLNIFNTKFVLADSRTATDTDFEGIESVVGHEYFHNWTGNRVTCRDWFQLSLKEGLTVFRDQEFSGDRASRAVRRIENIRLLRQHQFPEDAGPTAHPVRPASYEEMNNFYTMTVYEKGAEVVRMYHTLLGEEGFQKGMKLYFQRHDGQAVTCDDFRAAMADANGINLDQFALWYSQAGTPVLEAEGRLKNNSFELTIKQTVPPTPDMADKQPMMIPVKVGLLNRNGEAVAFDYQGKRATEAVLLLTEAEQIFLLEGVTEAVVPSLLRGFSAPVHLNYPYSDDDLLLLLAHDSDAFTRWEAAQTLYRRAVAANLAALSDGIELPKHEKLLAAVEKVISDDLLDNAFKALLLGVPSEAELWDGAENIDPLRYHQAREALLDTLAVRFLPKWHELNRQAAKQENQSYEYSPEAAGWRTLRNVCRAFVLRADPAHIETVAEKYGEMAQNMTHEWGILSAVNGNESDTRNRLLAQFADKFSDDALVMDKYFALVGSSRRSDTLQQVQTALQHPKFSLENPNKARSLIGSFSRNVPHFHAEDGSGYRFIADKVIEIDRFNPQVAARLVQAFNLCNKLEPHRKNLVKQALQRIRAQEGLSKDVGEIVGKILD

SEQ ID NO: 15173 - protein, 126 aa, Neisseria meningitidis; identical to SEQ ID NO: 6506

SEQ ID NO: 15174 - protein, 287 aa, Neisseria meningitidis
VENVETHSQNHRKRLIGTFFLVGLENLLMLVYPVFGGWAINAVIAGQAWQALLYALVVLLMWLVGAARRIADTRTFTRIYTEIAVPVVLEQRQRQVPHSAVTARVALSREFVSFFEEHLPIAATSVVSIFGACIMLLVLEFWVGVSAVGILALFLWLLPRFAAISENLYFRLKNSLERDNHFIRKGDRRQLDRHYGLLARLRVLISNREAFGYLCVGTAMGILFGFAFVMMTLKGYSSAGHVYSVGTYLWMFAMSLDDVPRLVEQYSNLKDIGQRIEWSKRNIKAGT

SEQ ID NO: 15175 - protein, 225 aa, Neisseria meningitidis
MKLKNKYQKFSKISEQKFREIIRCFALDLTASDTAKMTGISVRGINPIFLKIRHRIAALCEQSSPLSGVVELDESYFGARRIRGKRGRGASGKTIVFGILKRNGVVYTEIVPDASKASLIKVIRGHISADSEINTDGWKAYDGLVDMGYEKHYRVHHGSNEFARGKQHINGIESFWSYTKGRLAKFHGISKEMFYLHLKETEFRFNHRHEDLGKILMKMLRNNPI

SEQ ID NO: 15176 - protein, 42 aa, Neisseria meningitidis; identical to SEQ ID NO: 6772

SEQ ID NO: 15177 - protein, 163 aa, Neisseria meningitidis; identical to SEQ ID NO: 6300

SEQ ID NO: 15178 - protein, 321 aa, Neisseria meningitidis; identical to SEQ ID NO: 6981

SEQ ID NO: 15179 - protein, 171 aa, Neisseria meningitidis
LVTREVCEPRSWTVKTRIIQANAFRRHLNAMPSEHAAYADLTASSAKRLLCAKAILFSSAVRTGAAVGNIFFDGFADGGDFGDGAQYGFATFNAVDAASDSECGIAGAAVLEIVEDEDFEGDLGSWADSVKMVRSSDGITVVPMPSETAAVQAFVPDGKIGYNIGHQCPTY

SEQ ID NO: 15180 - protein, 416 aa, Neisseria meningitidis
MFSKSVTLAQYDPDLAAAIAQEDQRQQDHVELIASENYVSCAVMEAQGSQLTNKYAEGYPGKRYYGGCEYVDIVEQLAIDRVKKLFGAQYANVQPHSGSQANQAVYASVLKPGDTILGMSLAHGGHLTHGASVNISGKLYNAVTYGLDENEVLDYAEVERLALEHKPKMIVAGASAYALQIDWAKFREIADKVGAYLFVDMAHYAGLVAGGEYPNPVPFCDFVTTTTHKTLRGPRGGVILCRDNTHEKALNSSIFPSLQGGPLMHVIAAKAVAFKEALQPEFKQYAKQVKINAAAMAEELVKRGLRIVSGRTESHVFLVDLQPMKITGKAAEAALGKAHITVNKNAIPNDPEKPFVTSGIRIGSAAMTTRGFNEADARVLANLVADVLSNPEDEANLAKVRKQVTALCNKYPVYGA

SEQ ID NO: 15181 - protein, 387 aa, Neisseria meningitidis; identical to SEQ ID NO: 30

SEQ ID NO: 15182 - protein, 2273 aa, Neisseria meningitidis
MNKRCYKVIFNKKRSCMMAVAENVHRDGKSMQDSEAASVRVTGAASVSSARAAFGFRMAAFSVMLALGVAAFSPAPASGIIADKSAPKNQQAVILQTANGLPQVNIQTPSSQGVSVNRFKQFDVDEKGVILNNSRSNTQTQLGGWIQGNPHLARGEARVIVNQIDSSNPSLLNGYIEVGGKRAEVVVANPSGIRVNGGGLINAASVTLTSGVPVLNNGNLTGFDVSSGKVVIGGKGLDTSDADYTRILSRAAEINAGVWGKDVKVVSGKNKLDFDGSLAKTASAPSSSDSVTPTVAIDTATLGGMYADKITLISTDNGAVIRNKGRIFAATGGVTLSADGKLSNSGSIDAAEITISAQTVDNRQGFIRSGKGSVLKVSDGINNQAGLIGSAGLLDIRDTGKSSLHINNTDGTIIAGKDVSLQAKSLDNDGILTAARDVSVSLHDDFAGKRDIEAGRTLTFSTQGRLKNTRIIQAGDTVSLTAAQIDNTVSGKIQSGNRTGLNGKNGITNRGLINSNGITLLQTEAKSDNAGTGRIYGSRVAVEADTLLNREETVNGETKAAVIAARERLDIGAREIENREAALLSSSGDLHIGSALNGSRQVQGANTSLHNRSAAIESSGNIRIATKDLQNTNEHLRFHTEETHREHRIEYQAEGRTERYPEGSQKELGWEIFEDESLHMRTPDGSPHSVWYKYDYERITAESKITESKPGQIISGGNLVLDAAKLKNHNSRIIAGGRLIVGTPESALDNDETLGTKTITDKGDLHRYHRHHKKGRDSTGYSRSPYEPAPEVSSIRMGISAYKGYAPQQASDIPGTVVPVVAENGIHPTFTLPNSSLFAIAPNNKGYLIETDPAFTDYRKWLGSGYMLAALQQDPNHIHKRLGDGYYEQKLVNEQIAKLTGYRRLDGYTNDEEQFKALMDNGITIAKELQLTPGIALSAEQVARLTSDIVWLENETVTLPDGTTQTVLKPKVYVRARPKDMNGQGALLSGSVVDIGSGAIENRGGLIAGREALILNAQNIKNLQGDLQGKNIFAAAGSDITNTGSIGAENALLLKASNNIESRSETRSNQNEQGSVRNIGRVAGIYLTGRQNGSVLLDAGNNIVLTASELTNQSEDGQTVLNAGGDIRSDTTGISRNQNTIFDSDNYVIRKEQNEVGSTIRTRGNLSLNAKGDIRIRAAEVGSEQGRLKLAAGRDIKVEAGKAHTETEDALKYTGRSGGGIKQKMTRHLKNQNGQAVSGTLDGKEIILVSGRDITVTGSNIIADNHTILSAKNNIVLKAAETRSRSAEMNKKEKSGLMGSGGIGFTAGSKKDTQTNRSETVSHTESVVGSLNGNTLISAGKHYTQTGSTISSPQGDVGISSGKISIDAAQNRYSQESKQVYEQKGVTVAISVPVVNTVMGAVDAVKAVQTVGKSKNSRVNAMAAANALNKGVDSGVALYNAARNPKKAAGQGISVSVTYGEQKNTSESRIKGTQVQEGKITGGGKVSLTASGAGKDSRITITGSDVYGGKGTRLKAENAVQIEAARQTHQERSENKSAGFNAGVAIAINKGISFGFTAGANYGKGYGNGDETAYRNSHIGSKDSQTAIESGGDTVIKGGQLKGKGVGVTAESLHIESLQDTAVFKGKQENVSAQVTVGYGFSVGGSYNRSKSSSDYASVNEQSGIFAGGDGYRIRVNGKTGLVGAAVVSDADKSKNLLKTSEIWHKDIQNHASAAASALGLSGGFSYSPKPTSGQYSTKKEAEIGKIGGKPVSLMRFDQVSAKDDELNEKYRSERIEKGETFKEANLNQNNAGGLKFGLKQNDIHSNDKYALAKMGLGNLLGNAKESESRQSITRSVISEGDWQIASAQGRKNIAGIEKGTSSAHKALAKADREGLLKEVELNRDVAKEFINETLIGGIADEAYRSQFIAEHRLMTFKMDENGEPIEDKQLEEDINKQFDNSVKLKKEFASFKDYWEAYKAIGGNIYELREVSDQERKNLKTARYTDPETGKTVEKIVVGVNGIFNNIQAAAKFAAQQYVGRFNPEKNRYERTYENVYFLHNPETNGRGFSKLPEIAVAAFHKMLEGAKIGNKTVIGLSNSGLALGNIMEDYGKDKNGLFVGSHSRGTLVVDNVLNTLNTQANRDKKILSNTELKMVGPAANVVRADKRLFQLQQGVTTPRTADFARQSIQIENHELDLIGMLIGRNPATVGTNTRQKSQWQAIRDIIGDYTSPHNCYGMANKQCVTDGHRDPENKQTQSPTGVFERGVSNEIEIMYRPVRIYDLQHPKGKTK

SEQ ID NO: 15183 - protein, 161 aa, Neisseria meningitidis; identical to SEQ ID NO: 6695

SEQ ID NO: 15184 - protein, 213 aa, Neisseria meningitidis; identical to SEQ ID NO: 1951

SEQ ID NO: 15185 - protein, 209 aa, Neisseria meningitidis
LPGVFVLAALAACKPQDNSAAQAASSSASASAAENAAKPQTRGTDMRKEDIGGDFTLTDGEGKPFSLSDLKGKVVILSFGFTHCPDVCPTELLTYSDTLKQLGGQAKDVKVVFVSIDPERDTPEIIGKYAKQFNPDFIGLTATGGQNLPVIKQQYRVVSAKVNQKDDSENYLVDHSSGAYLIDKNGEVAIFSPYGSEPETIAADVRTLL

SEQ ID NO: 15186 - protein, 273 aa, Neisseria meningitidis
MSLQNIIETAFENRADITPTTVTPEVKEAVLETIRQLDSGKLRVAERLGVGEWKVNEWAKKAVLLSFRIQDNEVLNDGVNKYFDKVPTKFADWSEDEFKNAGFRAVPGAVARRGSFVAKNVVLMPSYVNIGAYVDEGAMVDTWATVGSCAQIGKNVHLSGGVGIGGVLEPLQASPTIIEDNCFIGARSEIVEGVIVEEGSVISMGVFIGQSTKIFDRTTGEIYQGRVPAGSVVVSGSMPSKDGSHSLYCAVIVKRVDAQTRAKTSVNELLRGI

SEQ ID NO: 15187 - protein, 44 aa, Neisseria meningitidis
MSDTKNGWLAKDGWVKRVQNVNKIEIHYIENSRTGEKTDFKFKD

SEQ ID NO: 15188 - protein, 513 aa, Neisseria meningitidis
MVFDNNYHYNAMPVRLLVNIQDADSDGIQTASENNNGTRMGYNRPMEKNTLSARAPSPWLPLLLAIAIFMQMLDATILNTALPEIAADLNESPLNMQLAVISYTLTVALLIPLSGYLADRFGTKKVFFGSIAVFMLGSALCAASGSLFELTLSRVVQGIGGSMLVPIPRLTILRVYDKSKLLNAINYAVMPALIGPVLGPLAGGYLVEYASWHWIFLLNLPIGLLGFILGRNIMPDIKGSNISLDFKGYLIFSAAACLLLLSAESLSHALPPYFALLPLCGGLLFARRYFRHMKTASKPIYSADLFLIRTFRLGLAGNLFSRLGISSIPFLMPLMFQVAFGFGASLSGWLVAPVALSSLLVKPLIAPLMKRFGYRTVLLWNTKLLAAFIMLLALPDGNSPLWIWIFLSLAIGACNSLQFSAMNTLTLADLRPQQTGSGNSLMAVNQQLSISMGIVAGALILKNWTFLIPASSGLHSAFRMTLLSIGGITLASSLVFKRLHVSDGANLTRNTPS

SEQ ID NO: 15189 - protein, 122 aa, Neisseria meningitidis
MTCFKIRLSKQSLKGRTMNKPFITQAQLALYKYQPSSKYFGQSMALIAQKEFEEFVNNVKEYDILESFSYFLNKRVAHNIWKIYFSDESVIFIRKSEENGKTVHEFVYQEYTDSSDFNSMFE

SEQ ID NO: 15190 - protein, 275 aa, Neisseria meningitidis; identical to SEQ ID NO: 2739

SEQ ID NO: 15191 - protein, 161 aa, Neisseria meningitidis; identical to SEQ ID NO: 1189

SEQ ID NO: 15192 - protein, 281 aa, Neisseria meningitidis; identical to SEQ ID NO: 8149

SEQ ID NO: 15193 - protein, 201 aa, Neisseria meningitidis
MTIYFKNGFYDDTLGSIPEGAVAVRAEEYAALLAGQAQGGQIAADSDGRPVLTPPRPSEYHEWDGKKWEIGEAAAAARFAEQKTATAFRLAAKADELKNSLLAGYPQVEIDSFYRQEKEALARQADNNAPTPMLAQIAAARGVELDVLIEKVVEKSARLAVAAGAIIGKRQQLEDKLNTIETAPGLDALEKEIEEWTLNIG

SEQ ID NO: 15194 - protein, 140 aa, Neisseria meningitidis
MQVTSKWIDGMCFVGTTEGGHSVVMEGSAAEGAAKRGPSPLEMLLLGVAGCSSIDVVMIAEKQRQKVTDCRATVTAKRADDAPRVFTEIHIHFKVFGHDLKESAIERAVQMSAEKYCSASIMLGKAAKITHSFEIAGADK

SEQ ID NO: 15195 - protein, 352 aa, Neisseria meningitidis
MSGYTGGLVVSGGISLIDRLDIMENVNRIVAEGIAAVEAAQDFNALEQIKARYLGKTGELTGLLKTLGQMSPEERKTIGAHINECKNRFQTAFNAKRDALNEAKLQARLAAEALDITLPGRAQEGGSLHPVTLTLQRVVELFHGMGFEVADGPEIEDDFHNFQALNIPANHPARAMQDTFYVENGDVLRTHTSPIQIRYMLDKKEPPIRIIAPGRVYRVDSDATHSPMFHQAEGLWVEEGVTFADLKAVFTDFIRRFFERDDLQVRFRPSFFPFTEPSAEIDIMGENGKWLEVGGCGMVHPNVLKNVNIDSEKYTGFAFGIGLDRFAMLRYNVNDLRLFFDNDLNFLKQFAK

SEQ ID NO: 15196 - protein, 198 aa, Neisseria meningitidis; identical to SEQ ID NO: 12496

SEQ ID NO: 15197 - protein, 156 aa, Neisseria meningitidis
LAEGQKSAVTEYYLNHGEWPANNSSAGVATSASDIKGKYVQSVEVKNGVITATMLSTGVNKEIQGKKLSLWAKRQAGSVKWFCGQPVQRAGTATDDAITAANGTDKKIDTKLEKPFYPKVSVPTDLDSRLRGNDGGAVSVFSDKFLKLKISSFPQG

SEQ ID NO: 15198 - protein, 390 aa, Neisseria meningitidis
MATHADETTIQNRQEANSAKVKRKRRLTALTLLFALAAAAAGSAFFLWWQHEEETEDAYVAGRVVQVTPQKGGTVRKVLHDDTDAVKKGDVLAVLDDDNDVLAYERAKNELVQAVRQNRRQNAATSQAGAQVALRRADLARAQDDLRRRSALAESGAVSAEELAHARAAVSQAQAAVKAALAEESSARAALGGDVSLREQPAVQTAIGRLKDAWLNLQRTQIRAPADGQVAKRSVQVGQQVAAGAPLMAVVPLSDVWVDANFKETQLRHMKIGQPAELVSDLYGKQIVYRGRVAGFSAGTGSAFSLIPAQNATGNWIKVVQRVPVRIVLNREDVDRHPLRIGLSMTVKVDTSAAGAPVSKTPGAALPEMESTDWSEVDRTVDEILGQSAP

SEQ ID NO: 15199 - protein, 636 aa, Neisseria meningitidis
MTLETLLALPRNIKKICFLIHDFLMIFIAFWFTQSLKADYSNEWFDPANWQSFLLTAPLTIGLFVRMGLYRAVTRFISFRILSTALAGSLASAVLFFLNTLIFEERLRLALPIVYFLLLFVSVTGSRMVLRGLLSEHPQKQMIPVIIYGAGRSGRQLLEAVKQMREYSAAAFVDDDPKLWHTVIYDLAVYQPDAIAFLIERYGVEKILLAIPGATQEQRRRIISKLEAYPCEVLTIPGMKDLMDGKISIGTLKKISVSDLLGRDSVAPDDRLMNADIEGKTVMVTGAGGSIGSELCRQIIRRRPEKLLLFELSEFALYAIEKELRETCIQKRLDTEILPFLGSVQNRTLLEHVMTAFSVATVYHAAAYKHVPMVEFNTVEGIRNNIFGTLECALAATASGVRTFVLISTDKAVRPTNTMGAGKRMAELCLQALAAEPGQKTRFSMVRFGNVLGSSGSVVPLFEKQIAEGGPLTLTHPEITRYFMTIPEAAQLVIQAGAMGTGGDVFVLDMGESVKIIDLARQMITLSGLKPKTPEQPDGDIEILITGLRPGEKLYEELLIGDNVRKTGHPRIMTADEAMLPWHELSVLLDRIRAACDRYDQQAIRTLLINAPTGFTPSDGICDLLWVRETHRKNAV

SEQ ID NO: 15200 - protein, 207 aa, Neisseria meningitidis; identical to SEQ ID NO: 1335

SEQ ID NO: 15201 - protein, 107 aa, Neisseria meningitidis
MFLDDVNVFLDDLNTNPITDEWYMSNFADKHIKILESYETFDILKQFVDYMIEEYDEKSEYEIMEILRQLKYQADTNEKFYTNTQKQKIVELYKQEISQDILNEIFR

SEQ ID NO: 15202 - protein, 235 aa, Neisseria meningitidis; identical to SEQ ID NO: 1248

SEQ ID NO: 15203 - protein, 99 aa, Neisseria meningitidis; identical to SEQ ID NO: 1731

SEQ ID NO: 15204 - protein, 54 aa, Neisseria meningitidis; identical to SEQ ID NO: 6606

SEQ ID NO: 15205 - protein, 172 aa, Neisseria meningitidis; identical to SEQ ID NO: 3384

SEQ ID NO: 15206 - protein, 143 aa, Neisseria meningitidis; identical to SEQ ID NO: 7006

SEQ ID NO: 15207 - protein, 152 aa, Neisseria meningitidis; identical to SEQ ID NO: 1697

SEQ ID NO: 15208 - protein, 77 aa, Neisseria meningitidis; identical to SEQ ID NO: 10282

SEQ ID NO: 15209 - protein, 152 aa, Neisseria meningitidis; identical to SEQ ID NO: 5260

SEQ ID NO: 15210 - protein, 162 aa, Neisseria meningitidis
MTPLFRKAVWLLFAVSVCAFAGSLAAQYVLGMEPCVLCISQRLCVLATALCTAIVLMCRPRRRAGGLFGAVFISIPAVTGISVAAYQLWLQSLPPGTAPSCGAPWTFRLKGWPLFDWFEPVVRGFGNCAEPDYLLGIALPVWSVAYFLAVVLTVWWAWARAK

SEQ ID NO: 15211 - protein, 640 aa, Neisseria meningitidis; identical to SEQ ID NO: 9576

SEQ ID NO: 15212 - protein, 228 aa, Neisseria meningitidis; identical to SEQ ID NO: 380

SEQ ID NO: 15213 - protein, 794 aa, Neisseria meningitidis
MADNYVIWFENLRMTDVERVGGKNASLGEMISQLTEKGVRVPGGFATTADAYRAFLAHNGLSERISAALAKLDVEDVAELARVGKEIRQWILDTPFPEQLDAEIEAAWNKMVADAGGADISVAVRSSATAEDLPDASFAGQQETFLNINGLENVKEAMHHVFASLYNDRAISYRVHKGFEHDIVALSAGVQRMVRSDSGASGVMFTLDTESGYDQVVFVTSSYGLGENVVQGAVNPDEFYVFKPTLKAGKPAILRKTMGSKHIKMIFTDKAEAGKSVTNVDVPEEDRNRFSITDEEITELAHYALTIEKHYGRPMDIEWGRDGLDGKLYILQARPETVKSQEEGSRNLRRFAINGEKTVLCEGRAIGQKVGQGKVRLIKDASEMDSVEAGDVLVTDMTDPDWEPVMKRASAIVTNRGGRTCHAAIIARELGIPAVVGCGNATELLKNGQEVTVSCAEGDTGFIYAGLLDVQITDVALDNMPKAPVKVMMNVGNPELAFSFANLPSEGIGLARMEFIINRQIGIHPKALLEFDKQDDELKAEITRRIAGYASPVDFYVDKIAEGVATLAASVYPRKTIVRMSDFKSNEYANLVGGSVYEPHEENPMLGFRGAARYVADNFKDCFALECKALKRVRDEMGLTNVEIMIPFVRTLGEAEAVVKALKENGLERGKNGLRLIMMCELPSNAVLAEQFLQYFDGFSIGSNDMTQLTLGLDRDSGLVSESFDERNPAVKVMLHLAISACRKQNKYVGICGQGPSDHPDFAKWLVEEGIESVSLNPDTVIETWLYLANELNK

SEQ ID NO: 15214 - protein, 269 aa, Neisseria meningitidis
MIQDTRPLIRVVAGILLDSDGNYLLSSRPEGKPYAGYWEFAGGKVEAGETDFQALQREFEEELGIRILAATPWLTKIHSYEHARVCLKFLWVNPGQWTGEPQSREGQAWSWQKAGDFTVAPMLPANGALLRSLSVPRRLYGSLKTGLHGENSMGAYRVLPLGSAEGSGANVLMEAAQWQDRPEHADSVWMMVQTREQWRQAQEKGADVVVWRVCNDVQAQEAAEALRQGVSVPLVLAANGQTVARYGKLWLGLGAHVVVRDETIGKNHE

SEQ ID NO: 15215 - protein, 621 aa, Neisseria meningitidis
MIEKLTFGLFKKEDARSFMRLMAYVRPYKIRIIAALIAIFGVAATESYLAAFIAPLINHGFSAPAAPPELSAAAGIISTLQNWREQFTYMVWGTENKIWTVPLFLIILVVIRGICRFTSTYLMTWVSVMTISKIRKDMFAKMLTLSSRYHQETPSGTVLMNMLNLTEQSVSNASDIFTVLTRDTMIVTGLTIVLLYLNWQLSLIVVLMFPLLSLLSRYYRDRLKHVISDSQKSIGTMNNVIAETHQGHRVVKLFNGQAQAANRFDAVNRTIVRLSKKITQATAAHSPFSELIASIALAVVIFIALWQSQNGYTTIGEFMAFIVAMLQMYAPIKSLANISIPMQTMFLAADGVCAFLDTPPEQDKGTLAPQRVEGRISFRNVDVEYRSDGIKALDGFNLDIRQGERVALVGRSGSGKSTVVNLLPRFVEPSAGNICIDGIDIADIKLDCLRAQFALVSQDVFLFDDTLFENVRYSRPDAGEAEVLSALQAANLQSLIDASPLGLHQPIGSNGSNLSGGQRQRVAIARAILKDAPILLLDEATSALDNESERLVQQALERLMENRTGIIVAHRLTTIEGADRIIVMDDGKIIEQGTHEQLMSQNGYYTMLRNISNKDAAVRTA

SEQ ID NO: 15216 - protein, 126 aa, Neisseria meningitidis
MNIRFFALTVPVLSLAACAVPEADDGGGRGHMPPVQNQAGTADFRAFSCENGLSVRVRHLDSGKVALRLDGRRAVLSSDVAASGERYTAEHGLFGNATEWHQKGGEAFFGFTDAYGNSVETSCRAR

SEQ ID NO: 15217 - protein, 615 aa, Neisseria meningitidis
MHDTRTMMIKPTALLLPALFFFPHAYAPAADLSENKAAGFALFKNKSPDTESVKLKPKFPVRIDTQDSEIKDMVEEHLPLITQQQEEVLDKEQTGFLAEEAPDNVKTMLRSKGYFSSKVSLTEKDGAYTVHITPGPRTKIANVGVAILGDILSDGNLAEYYRNALENWQQPVGSDFDQDSWENSKTSVLGAVTRKGYPLAKLGNTRAAVNPDTATVDLNVVVDSGRPIAFGDFEITGTQRYPEQIVSGLARFQPGTPYDLDLLLDFQQALEQNGHYSGASVQADFDRLQGDRVPVKVSVTEVKRHKLETGIRLDSEYGLGGKIAYDYYNLFNKGYIGSVVWDMDKYETTLAAGISQPRNYRGNYWTSNVSYNRSTTQNLEKRAFSGGIWYVRDRAGIDARLGAEFLAEGRKIPGSAVDLGNSHATMLTASWKRQLLNNVLHPENGHYLDGKIGTTLGTFLSSTALIRTSARAGYFFTPENKKLGTFIIRGQAGYTVARDNADVPSGLMFRSGGASSVRGYELDSIGLAGPNGSVLPERALLTGSLEYQLPFTRTLSGAVFHDMGDAAANFKRMKLKHGSGLGVRWFSPLAPFSFDIAYGHSDKKIRWHISLGTRF

SEQ ID NO: 15218 - protein, 603 aa, Neisseria meningitidis; identical to SEQ ID NO: 6451

SEQ ID NO: 15219 - protein, 122 aa, Neisseria meningitidis; identical to SEQ ID NO: 83

SEQ ID NO: 15220 - protein, 256 aa, Neisseria meningitidis
VSETQNEQPVQPLVEHLIELRRRLMWTVVGILVCFFGMMPFAQQLYTFIADPLMANLPKDTSMIATDVIAPFFVPVKVTLMAAFLISLPHTLYQIWAFVAPALYQNEKRLITPLVLSSVSLFFIGMAFAYFLVFPVIFKFLASVTPVGVNMATDIDKYLSFILGMFVAFGTTFEVPIVVILLTKIGVVTTGQLKHARPYVIVGAFVIAAVITPPDVISQTLLAIPLILLYEAGIWFGRFFTPRSEQDGDIRPPAKT

SEQ ID NO: 15221 - protein, 41 aa, Neisseria meningitidis; identical to SEQ ID NO: 6310

SEQ ID NO: 15222 - protein, 125 aa, Neisseria meningitidis
VNKTLILALSALLGLAACSVERVSLFPSYKLKIIQGNELEPRAVASLRPGMTKDQVLLLLGSPILRDAFHTDRWDYTFNTSRNGIIKERSNLTVYFENGVLVRTEGDVLQNAAEALKDRQNTDKP

SEQ ID NO: 15223 - protein, 310 aa, Neisseria meningitidis
MLSQLEYGIAKENRPNRQADRFAGSVLPLAASLTHKPNIMKPIPTDTFQPAILPQAFETEIKSTCTGRIYRIQTATLGEIPSEGYPVLFVLDGEAFFPALFNIMQSLMNNPVTRSNAPCLIVGIGYTTGSVRDLAQRAADYTPPLGDNATADERQQFGQADRFAAFIDSELTAFLESRYTLNRNETAVFGHSFGALFGLYSLLSHRRFRRHWLVSPSIWWHNRRILDFMPSENRLDGIDVCLNIGALERGSGCKRREERDMAGLSERMAAELDRHGAAVFFREYPNADHGNVSFYSLTDCVEYLRKAWQR

SEQ ID NO: 15224 - protein, 265 aa, Neisseria meningitidis; identical to SEQ ID NO: 10198

SEQ ID NO: 15225 - protein, 252 aa, Neisseria meningitidis
MKITPVKALTDNYIWMIQEGNHAVCVDPSDPTPVLEFLVRNRLMLAQTWVTHPHPDHEGGAAALWRGYMESPVYGESDIEAATHTVTAGTQFTFGEGLITVWATPGHTDRHISYLMETSDGIHVFCGDTLFSAGCGRVFTGTIEQLYDSFQRFNRLPENTLFYPAHEYTAANLDFAAHIEPDNADIQTALKAAAHTPTLPVTLAHERRVNPFLRVDLPHVRDRAEALSGKTLNSSLDTFVALRELKNQYRTK

SEQ ID NO: 15226 - protein, 291 aa, Neisseria meningitidis; identical to SEQ ID NO: 2244

SEQ ID NO: 15227 - protein, 68 aa, Neisseria meningitidis
MKAVRDIALWLAVTVWINFFPDNYRYDTVPQGRYGYWHADHPWYPYARFLLPLFLACILFYRHFRKRK

SEQ ID NO: 15228 - protein, 97 aa, Neisseria meningitidis; identical to SEQ ID NO: 1217

SEQ ID NO: 15229 - protein, 310 aa, Neisseria meningitidis
MKQNRTFTFPDFRTVYSYAPLYRLQHLKYTLRKFFGKKEIYAFEQFVNASPIRQGLFLHCPQDAYPLLREFVDRRFNCKRRLDAMTADFLMAEKLFGTDILHQMEDYRFHLVLAHLSDGISLWLNRNDNCVEEGAWSLSLRDEAGNRLYMATFAFVGTHLLTASVQGPAGEEAKDTVRRITKQLHGLRPQQLMVTALQYFAAVLGLDGAMGIAQKHQVKLRWKLKKRVKMNYDAFWQEYGASLERDGYWHLPQTPARKDLTDIESKKRSMYRKRYEMLDNMVAEMKDGLKTEARGISDGIQTEKPLRQTA

SEQ ID NO: 15230 - protein, 102 aa, Neisseria meningitidis; identical to SEQ ID NO: 6833

SEQ ID NO: 15231 - protein, 270 aa, Neisseria meningitidis
VPSETVSDGTDKPPPLNPAVLACIIRHSIRNSQQVSNMSLKTVAVIGAMEQEIELLREMMENVKAVSFGKFAAYEGELAGKRMVLALSGIGKVNAAVATAWIIREFAPDCVINTGSAGGLGKGLKVGDVVVGTEIAHHDVDVTAFGYVWGQVPQLPAVFVSDGLLVGKAKQAAEVFEGAAVEQGLIVSGDRFVHSSEGVAEIRKHFPKVKAVEMEAAAIAQTCHQLETPFVIIRAVSDSADEKADISFDEFLKTAAASSAKMVAEIVKSL

SEQ ID NO: 15232 - protein, 714 aa, Neisseria meningitidis
MNAPFFRLSLLSLTLAAGFAHAAENNANVALDTVTVKGDRQGSKIRTNIVTLQQKDESTATDMRELLKEEPSIDFGGGNGTSQFLTLRGMGQNSVDIKVDNAYSDSQILYHQGRFIVDPALVKVVSVQKGAGFASAGIGATNGAIIAKTVDAQDLLKGLDKNWGVRLNSGFASNEGVSYGASVFGKEGNFDGLFSYNRNDEKDYEAGKGFRNDNGGKTVPYSALDKRSYLAKIGTSFGDDDHRIVLSHMKDQHRGIRTVREEFAVSEKNSRITIKRQAPAYRETTQSNTNLAYTGKDLGFVEKLDANAYVLEKKRYSADDKDNGYAGNVKGPNHTRITTRGMNFNFDSRLAEQTLLKYGINYRHQEIKPQAFLNSQFKIEDKKDATDEEKKKNRDNENIAKAYRLTNPTKTDTGAYIEAIHEIDGFTLTGGLRYDRFKVKTHDGKTVSSSNLNPSFGVIWQPHEHWSFSASHNYASRSPRLYDALQTHGKRGIISIADGTKAERARNTEIGFNYNNGTFAANGSYFWQTIKDALANPQNRHESTTAVREAVNAGYIKNHGYELGASYRTGGLTAKVGVSHSKPRFYDTHKDKLLSANPEFGAQVGRTWTASLAYRFQNPNLEIGWRGRYVQKAVGSILVAGQKDRNGKLENVVRKGFGVNDVFANWKPLGKDTLNVNLSVNNVFNTFYYPHSQRWTNTLPGVGRDVRLGVNYKF

SEQ ID NO: 15233 - protein, 827 aa, Neisseria meningitidis
VSISAPYANENSRILLSTTDISSENGKIKLQSYGDQFYYAGQGELYTFDKRSYKTGKWYKLKHVTEIKEHKNAKADPVSLSASQGIEIKSGGNIGAHATLFDAPRGSVKIEAGRGLVLYAVEDLNYDKLDTRTKRKFIGITYDKVHDTTTHTMKTALPSRVVAESANLQSGWDAKLQGTQFETTLGGAAIRAGVGDQARADAKIILEGIKSSVRTETVSSSKSALWQKQAGRGSNIETLQLPSFTGSVAPVLSAPGGYIVDIPKGNLKTEIEKLAKQPEYAYLKQLQTAKNVDWKQVQLVYDKWDYKAEGLTGAGAAIIALAVTVVTSGAGTGAVLGLNGAAAAATDAAFASLASQASVSFINNKGNIGNTLKELGRSSTVKNLMVAVATAGVADKIGASALNNVSDKQWINNLTVNLANAGSAALINTAVNGGSLKDNLEANILAALVNTAHGEAASKIKQLDQHYIVHKIAHAIAGCAAAAANKGKCQDGAIGAAVGEIVGEALVKNTDFSRMSATEIEKSKAKITAYSKLVAGTATAVAGGDVNAAANAAQIAVENNTLYPKCIGAKCDEFQKEQQKWIRENPEEYREVLLLQTGFIPIIGDIQNFVQAQTAADYLFALVGVVPGIGESIQAYKVAKAAKNLQGMKKALDKAATVATAQGYVSKTKIKIGQTELRVTAATDKQLLKTISEGRDTTGKMTEQLFDSLAKQNGFRVLSGGKYGGNNGFDHVWQAADGSVVLIVESKQIRNGTVQLNPNGAGGYTQMSEDWIKQVANSLPDGSPAKAAVFKAEREGKLKTAIAGVDRQTGKAVILSVKVPSKTNIRR

SEQ ID NO: 15234 - protein, 167 aa, Neisseria meningitidis; identical to SEQ ID NO: 623

SEQ ID NO: 15235 - protein, 601 aa, Neisseria meningitidis
MRYKPLLLALMLVFSTPAVAAHDAAHNRSAEVKKQTKNKKEQPEAAEGKKEKGKNGAVKDKKTGGKEAAKEGKESKKTAKNRKEAEKEATSRQSARKGREGDKKSKAEHKKAHGKPVSGSKEKNAKTQPENKQGKKEAKGQGNPRKGGKAEKDTVSANKKVRSDKNGKAVKQDKKYREEKNAKTDSDELKAAVAAATNDVENKKALLKQSEGMLLHVSNSLKQLQEERIRQERIRQERIRQARGNLASVNRKQREAWDKFQKLNTELNRLKTEVAATKAQISRFVSGNYKNSQPNAVALFLKNAEPGQKNRFLRYTRYVNASNREVVKDLEKQQKALAVQEQKINNELARLKKIQANVQSLLKKQGVTDAAEQTESRRQNAKIAKDARKLLEQKGNEQQLNKLLSNLEKKKAEHRIQDAEAKRKLAEARLAAAEKARKEAAQQKAEARRAEMSNLTAEDRNIQAPSVMGIGSADGFSRMQGRLKKPVDGVPTGLFGQNRSGGDVWKGVFYSTAPATVESIAPGTVSYADELDGYGKVVVVDHGENYISIYAGLSEISVGKGYMVAAGSKIGSSGSLPDGEEGLYLQIRYQGQVLNPSSWIR

SEQ ID NO: 15236 - protein, 178 aa, Neisseria meningitidis; identical to SEQ ID NO: 1831

SEQ ID NO: 15237 - protein, 876 aa, Neisseria meningitidis
MQEQYQPAAIEPAAQKKWDDARIFNVSEDASKPKYYCLSMFPYPSGKLHMGHVRNYTIGDVLSRFKLLNGFNVMQPMGWDAFGMPAENAAMKNNVAPAAWTYDNIEYMKTQLKSLGFAIDWARETATCKPEYYRWEQWLFTKLFEKGIVYRKNGTVNWDPVDQTVLANEQVIDGRGWRSGALIEKREIPMYYFKITDYAEELLNDLDKLEHWPEQVKTMQRNWIGKSRGMTVRFAVSDDSKQGLEGDYANFLQVYTTRPDTLMGATYVAVAAEHPLATAAAAGKPELQAFIAECKAGSVAEADMATMEKKGVPTGRYVVNPLNGDKLEVWIANYVLWGYGDGAVMAVPAHDERDFEFATKYNLPKKQVIAVGDNAFDENQWQEWYGDKENGVLVNSGDLDGLDFQTAFDAVAAKLQSQGAGEPKTQYRLRDWGISRQRYWGCPIPIVHCEQCGDVPVPADQLPVVLPENVVPDGMGSPLAKMPEFYETACPCCGGAAKRETDTMDTFMESSWYFFRYMSPKFSDGMVDPAAAKYWGAVDQYIGGIEHAILHLLYARFFTKLMRDEGLVNVDEPFERLLTQGMVVCETYYRENDKGGKDWINPADVELTFDDKGRPISAVLKADGLPVVISGTEKMSKSKNNGVDPQELINAYGADTARLFMMFAAPPEQSLEWSDSGVEGAHRFLRRLWRTVYEYLKQGEAVKAFAGSQDGLSKELKDLRHKLHATTAKVSDDYGRRQQFNTAIAAVMELLNQYDKTDTGGEQGRAVAQEVLETAVRLLWPIVPHICETLWSELNGAKLWEAGWPTVDEAALVKSEIEVMVQVNGKLRGKITVAADASKADLEAAALATEGAVKFMEGKPAKKIIVVPGRLVNIVV

SEQ ID NO: 15238 - protein, 436 aa, Neisseria meningitidis; identical to SEQ ID NO: 7620

SEQ ID NO: 15239 - protein, 129 aa, Neisseria meningitidis
MPKPYPARYRANPNRKGKIMSSELIVHTSDAAFEKDVLNADIPVLLDFWAPWCGPCKMIAPILDDIAAEFEGRLKVVKINIDDNEATPSRFGVRGIPTLMVFKNGEVVATKVGALAKGQLTAFVEASIA

SEQ ID NO: 15240 - protein, 71 aa, Neisseria meningitidis; identical to SEQ ID NO: 3375

SEQ ID NO: 15241 - protein, 657 aa, Neisseria meningitidis
MHPIETPDKTFHDGDGVSELGTILPAWWLNQVQSELLAVLTAAGIQPDKSQPNQLLAALNRLAVVITGDQTVNGQKTFTAQTQFQSGIHLSANQTNWNGGHKAYIGADADNAHIVFGDNTLRLHGANNRISYNNHDIFHKANKPRFAEDIEGKPNTLSGYGIGNFKVETFRGDLNTLKTDGIYSLPTAGGSSNLPVENTACHIQVIAGTRHGWCRQLGYPAYTSDVYERHQTSSANDNWSAWKKLNSDGIPVGAIVSFPKAVQNPAGYLKANGTTFAQNTFPDLYRALGNSNRLPDLSRTDIGITAWFPSDQIPTGWLAFDDIRTRVTETAYPELYRLLTGKYGSIQNVPQAEDRFIRNAGNSLAVGTKQEDEIKRHVHKVFSHWTNHTDAAALGYEDRNERQRSALVSTWTDENLNDNGFLTPRSDSKMATGGDENRPKALVLKLCIKAADTLGEAVFWIKSHGETINAGALDAGTLAQGLQDKADRDHTHTAAQIQGLDEKISTAVAAQFTRQTIGGVDIVRFPDGTMIQTGSYRFTRSGGPIENEVVFPVAFADGNVKCFVSERHSERVTGDRRQHNWLFIRAKNHAAAIITNWYEGSCDWMAIGKAASGNAASSPIGPEIPETNEEPQRESGRTSTGPRNRRRRDGLLEALQD

SEQ ID NO: 15242 - protein, 305 aa, Neisseria meningitidis; identical to SEQ ID NO: 1198

SEQ ID NO: 15243 - protein, 280 aa, Neisseria meningitidis; identical to SEQ ID NO: 5980

SEQ ID NO: 15244 - protein, 62 aa, Neisseria meningitidis; identical to SEQ ID NO: 5951

SEQ ID NO: 15245 - protein, 253 aa, Neisseria meningitidis
MDANKEPNWEKRLENLRQTRRMKAVPTYAPLSRPSETGTDAPVPKLDDESRARVLKAYLKKWQEEHNAAVADCGEEVETDPMIVLQENWLNAQASLQMSVSEKHIESRRRIRFDAKKDSAEFETGQIEGRENADAAESGTAADGVAENGEGGAEEALMPVQINILNPKAVNRREVFCLSEQELTERLIKRLRPHLTDTVNGIIRTAVQKQMAVFTYQLQQMLHEQAGAVVEDVLEHDVRKILNDIKYELKYKR

SEQ ID NO: 15246 - protein, 329 aa, Neisseria meningitidis; identical to SEQ ID NO: 247

SEQ ID NO: 15247 - protein, 63 aa, Neisseria meningitidis; identical to SEQ ID NO: 1437

SEQ ID NO: 15248 - protein, 278 aa, Neisseria meningitidis
MIDLHCHSTVSDGMLSPAEVVRLAHQNGCTLLALTDHDHTGGIAEARAEADRLGLRLINGVEISVTWRGRTIHVVGLDFDEQDENLQNLLAQVRQGRLKRLEAIAAKLEKRGISGAYDGALALAANKEMVSRTHVAEFLIRVGHVKNKQQAFTKYLGDGKSCAVRHEWATLEDCVSAVNGAGGMAVIAHPMRYDLSATAKRNLFEEFKNLGGAGIEVHSGNCCKNDRLNYALLAERFGMLASAGSDFHRLNDFSGGILGACPELPENCRPVWAHFSRH

SEQ ID NO: 15249 - protein, 92 aa, Neisseria meningitidis; identical to SEQ ID NO: 1005

SEQ ID NO: 15250 - protein, 309 aa, Neisseria meningitidis; identical to SEQ ID NO: 176

SEQ ID NO: 15251 - protein, 388 aa, Neisseria meningitidis
MKWAAVAAVAAAAVWGGWSYLKPEPQAAYITEAVRRGDISRTVSATGEISPSNLVSVGAQASGQIKKLYVKLGQQVKKGDLIAEINSTSQTNTLNTEKSKLETYQAKLVSAQIALGSAEKKYKRQAALWKDDATSKEDLESAQDALAAAKANVAELKALIRQSKISINTAESELGYTRITATMDGTVVAILVEEGQTVNAAQSTPTIVQLANLDMMLNKMQIAEGDITKVKAGQDISFTILSEPDTPIKAKLDSVDPGLTTMSSGGYNSSTDTASNAVYYYARSFVPNPDGKLATGMTTQNTVEIDGVKNVLIIPSLTVKNRGGKAFVRVLGADGKAAEREIRTGMRDSMNTEVKSGLKEGDKVVISEITAAEQQESGERALGGPPRR

SEQ ID NO: 15252 - protein, 376 aa, Neisseria meningitidis; identical to SEQ ID NO: 2865

SEQ ID NO: 15253 - protein, 125 aa, Neisseria meningitidis; identical to SEQ ID NO: 535

SEQ ID NO: 15254 - protein, 227 aa, Neisseria meningitidis; identical to SEQ ID NO: 2059

SEQ ID NO: 15255 - protein, 265 aa, Neisseria meningitidis; identical to SEQ ID NO: 1691

SEQ ID NO: 15256 - protein, 145 aa, Neisseria meningitidis; identical to SEQ ID NO: 14300

SEQ ID NO: 15257 - protein, 270 aa, Neisseria meningitidis
MSVGHYENFPVGSLILPRRLRKPVHAVYAFARTADDMADEGSMPSEARLAGLEGLRRELDVLASGGRSAHPLIARLDAEAVVPFGLDLQPFYDLLSAFSQDVVKTRYGNFGELADYCRRSANPVGRIMLALYGKTDAVCVAQSDGICTALQLVNFWQDVAVDWQKGRVYIPQDDLLKFGVSEGQIAEGRADAAFQRLMAYECRCAFRMLKAGSPLARELKGRIGLELRMIVLGAQLILQKLDACRYDVFAQRPVLDKKDWLIMLKRALWK

SEQ ID NO: 15258 - protein, 338 aa, Neisseria meningitidis; identical to SEQ ID NO: 8361

SEQ ID NO: 15259 - protein, 281 aa, Neisseria meningitidis
MKFPSFLPSFKRILCLSAVISVLGACTVVADVYGQDSATMNAAAAKDYMKTVELNKSAGNVDTTSRTARRVQAVFRRMLPYADAANNTGHRFDWKMTVFKNDELNAWAMPGGKMAFYTGIVDKLKLTDDEIAAIMGHEMTHALHEHGKNKVGQQILTNTAAQIGTQIILDKKPDTNPELVGLGMDILGTYGLTLPYSRSLEEEADEGGMMLMAQAGYHPAAAVRVWEKMNQENDQNGFIYAITSTHPTNNARIENLKRLLPTVMPVYEQSVRNKGRVNIVD

SEQ ID NO: 15260 - protein, 378 aa, Neisseria meningitidis
MEMKQTDSTIKSRAAVAFAPNQPLQIVEIDVEMPRKGEVLIRNTHTGVCHTDAFTLSGSDPEGVFPVVLGHEGAGVVVAVGEGVSSVKPGDHVIPLYTAECGECEFCCSGKTNLCVSVRDTQGKGLMPDGTTRFSYQGQPIYHYMGCSTFSEYSVVAEVSLAKINPEANHEQVCLLGCGVTTGIGAVHNTAKVQEGDSVAVFGLGAIGLAVVQGARQAKAGRIIAIDTNPSKFELAKQFGATDCLNPNDYDKPIKDVLLDINKWGIDHTFECIGNVNVMRQALESAHRGWGQSIIIGVAGAGQEISTRPFQLVTGRVWKGSAFGGVKGRSELPKMVEDSMKGDIELEPFVTHTMTLDQINEAFELMHEGKSIRAVIHY

SEQ ID NO: 15261 - protein, 235 aa, Neisseria meningitidis
LVKTADGYKAIARIRTGDRVFSKDEASGKTGYKPVTARYGNPYQETVYIKVSDGISNSQTLISNRIHPFYSQGKWIQAGRLKKGDTLLSESGAKQTVQNITLKQQPLKAYNLTVADWHTYFVKGSQAETEGVWVHNDCPYDKGNQRYKDASYHGKNDNSVKSRAPTNGQAALDNSVQVKSTSPRRVGVDKANNEIVVLNKTQTFNNGSAEYHGHVRSWQDLHTDQKNALKKAGLD

SEQ ID NO: 15262 - protein, 127 aa, Neisseria meningitidis; identical to SEQ ID NO: 2146

SEQ ID NO: 15263 - protein, 281 aa, Neisseria meningitidis
VSVQTAFRISNAVRTPAKQQQTYARQASAMITIRNVSYRIGTRPILDNVSLDIPEGGITALVGPNGAGKSTLFSFMARLRPLESGSIAYRGKNLADTPTAELARTLSILTQENSIMSRITVRDLLMFGRYPYHQGRPSETDKTIVEEALAEFHLQDFADRYLTELSGGQRQRAMIAMVFCQSTDYVLLDEPLNNLDMYHARSLMQILQKLTREHKRTTVAVLHDINQAAAYADHVVAMKNGKVALTGTPEEVFTVHNIKELFDMDVDVLDYEGKKLIVHHI

SEQ ID NO: 15264 - protein, 315 aa, Neisseria meningitidis
MNILSKISSFIGKTFSLWAALFAAAAFFAPDTFKWAGPYIPWLLGIIMFGMGLTLKPSDFDILFKHPKAVIIGVIAQFAIMPATAWLLSKLLNLPAEIAVGVILVGCCPGGTASNVMTYLARGNVALSVAVTSVSTLISPLLTPAIFLMLAGEMLEIQAAGMLMSIVKMVLLPIVLGLIVHKVLGSKTEKLTDALPLVSVAAIVLIIGAVVGASKGKIMESGLLIFAVVVLHNGIGYLLGFFAAKWTGLPYDAQKTLAIEVGMQNSGLAAALAAAHFAAAPVVAVPGALFSVWHNISGSLLATYWAAKAGKHKKP

SEQ ID NO: 15265 - protein, 55 aa, Neisseria meningitidis; identical to SEQ ID NO: 1257

SEQ ID NO: 15266 - protein, 51 aa, Neisseria meningitidis; identical to SEQ ID NO: 7347

SEQ ID NO: 15267 - protein, 111 aa, Neisseria meningitidis; identical to SEQ ID NO: 233

SEQ ID NO: 15268 - protein, 187 aa, Neisseria meningitidis; identical to SEQ ID NO: 7528

SEQ ID NO: 15269 - protein, 45 aa, Neisseria meningitidis; identical to SEQ ID NO: 3752

SEQ ID NO: 15270 - protein, 158 aa, Neisseria meningitidis
MEHLFGKWLPDLPAAVSDGIDLPMSRLLKARSLTAALRALPHTFSVELLKLGELETECGGRLVREVLLKLDGIPVVEARSECRIGSAFWQNILDCGTRPLGERLFQADLEGARSAFEFAVSGEGCGRYFAARRSRFSRHGEEMLLTEYFLPELKRFIG

SEQ ID NO: 15271 - protein, 404 aa, Neisseria meningitidis; identical to SEQ ID NO: 7117

SEQ ID NO: 15272 - protein, 333 aa, Neisseria meningitidis; identical to SEQ ID NO: 620

SEQ ID NO: 15273 - protein, 355 aa, Neisseria meningitidis
MFGGISVKMAAFPSEAESPVMYPLARRILFALDAEKAHHFTLDALYTVYKLGLIPVTDNRTKPVKLMGMDLPNPVGLAAGLDKNGEYIDALGALGFGFIEIGTVTPNPQPGNPQPRLFRVPEHQGIINRMGFNNHGIDTMIRNIEKSKFSGVLGINIGKNAVTPIENAADDYLICLEKAYAHASYITVNISSPNTKNLRALQGGDELSALLEALKNKQAQLASVHGKYVPLAVKIAPDLDEAQIEDIAHVVKSVEMDGIIATNTTIDKSSLGSHPLAGEQGGLSGLPVHEKSNRVLKLLADHIDGKLPIIGVGGIMEGEDSADKIRLGATAVQVYSGLIYKGPALVKECLKALAR

SEQ ID NO: 15274 - protein, 226 aa, Neisseria meningitidis
VQADLAYAAERITHDYPKATGADKDKISTVSDYFRNIRAHSIHPRVSVGYDFGGWRIAADYASYRKWNNNKYSVNTKKVQENQGTRKDLKTENQENGSFHAASSLGLSAIYDFKLNDKFKPYIGARVAYGHVRHSIDSTKKTTEVVTSTHGGADTKPTIYNGESTQNAYHESHSIRRLGLGVVAGVGFDITPKLTLDTGYRYHNWGRLENTRFKTHEVSLGMRYRF

SEQ ID NO: 15275 - protein, 599 aa, Neisseria meningitidis
LEVGAKPAFFALQSAPDLLLNLPVWKNTFMKASQFFISTLKEAPAEAALASHKLMIRAGLIKANASGLYTWMPMGLRVLRKVENVVREEMARAGSVELLMPVVQPAELWQESGRWEFYGKELLRLKDRHDRDFCMGPTCEEVIADIVRKEINSYKQLPKNFYHIQTKFRDEVRPRFGVMRAREFVMKDAYSFHADYASLQTTYDAMYDAYCRIFTRLGLAFRPVAADTGSIGGTGSHEFQVLAESGEDVIAYSDTSDYAANVELAPTLPLKGERTAAQAELVKVHTPNVKTIESLVEFLNIPVEQTLKSIVVEGENEGEIVLLLLRGDHEFNDIKAEKLAGVKSPLTMASSAAIVEQFGANGGSLGPVGFAGKVYADFATEKGADWVIGANEDGYHYTGFNFGRDAAEPEFVDLRNVVEGDESPDGQGRLKLARGIEVGHVFQLRDKYTQAMNVSFLDNNGKSQVMEMGCYGIGITRVVAAAIEQNNDEKGIIWTKAMAPFEVVIVPMNYKKSDTVREAADKIYAELLAAGADVLLDDRDERAGVLLNDSELLGIPHRIVIGDRALKEGNVEYAERRNNEAQAVAIGEIVARVTASLNG

SEQ ID NO: 15276 - protein, 103 aa, Neisseria meningitidis; identical to SEQ ID NO: 1558

SEQ ID NO: 15277 - protein, 74 aa, Neisseria meningitidis
MNSETLDVTGLKCPLPILRAKKALAQMQQGDVLTVLATDGGAPGDFEAFCRQTGHVLLDSSEQDGVFTLVVQHK

SEQ ID NO: 15278 - protein, 113 aa, Neisseria meningitidis; identical to SEQ ID NO: 995

SEQ ID NO: 15279 - protein, 48 aa, Neisseria meningitidis; identical to SEQ ID NO: 6016

SEQ ID NO: 15280 - protein, 403 aa, Neisseria meningitidis; identical to SEQ ID NO: 3534

SEQ ID NO: 15281 - protein, 186 aa, Neisseria meningitidis; identical to SEQ ID NO: 6815

SEQ ID NO: 15282 - protein, 140 aa, Neisseria meningitidis
MAYATVEDMVARFGELEVLQLTDRNNEGLIDREVAQTALVDATAEIDAYLGRFKRPFTDVPPILKRLCCDIARYRLTAANGVLITDEIRNRYKIDVLDLLRAMAKGEVQLGVDDSGEEVAAGEDGIVFLNGKNKVFGRDH

SEQ ID NO: 15283 - protein, 148 aa, Neisseria meningitidis; identical to SEQ ID NO: 4053

SEQ ID NO: 15284 - protein, 265 aa, Neisseria meningitidis
MAAVFSVCACFMCSCLVVKNTVIGSGRTKIAVPLVARDAAVLSAVLDQIKNLPFDIVEFRADFLECAGSIGEVLRHTQTVRDALPDKPLLFTFRRHGEGGSFPCSDDYYFELLDALIESRLPDIIDIELFSGETAVRCAVANAQKNGIAALLCNHEFHRTPPQEEIVCRLKQMEDCGADICKIAVMPQSAEDVLTLLSATLKAKELAAKPIVTMSMGQTGAVSRLAGQVFGSSITFGSGTQNSAPGQIGVSALRATLDCLENGAD

SEQ ID NO: 15285 - protein, 388 aa, Neisseria meningitidis
MRKFNLTALSVMLALGLTACQPPEAEKAAPAASSEAQTANEGGSVSIAVNDNACEPMELTVPSGQVVFNIKNNSGRKLEWEILKGVMVVDERENIAPGLSDKMTVTLLPGEYEMTCGLLTNPRGKLVVTDSGFKDTTNEADLEKLSQPLADYKAYVQGEVKELVAKTKTFTEAVKAGDIEKAKSLFADTRVHYERIEPIAELFSELDPVIDAREDDFKDGAKDAGFTGFHRIEYALWVEKDVSGVKEIAAKLMTDVEALQKEIDALAFPPGKVVGGASELIEEVAGSKISGEEDRYSHTDLSDFQANVDGSKKIVDLFRPLIEAKNKALLEKTDTNFKQVNEILAKYRTKDGFETYDKLGEADRKALQASINALAEDLAQLRGILGLK

SEQ ID NO: 15286 - protein, 303 aa, Neisseria meningitidis; identical to SEQ ID NO: 1821

SEQ ID NO: 15287 - protein, 55 aa, Neisseria meningitidis; identical to SEQ ID NO: 7238

SEQ ID NO: 15288 - protein, 140 aa, Neisseria meningitidis; identical to SEQ ID NO: 1638

SEQ ID NO: 15289 - protein, 223 aa, Neisseria meningitidis; identical to SEQ ID NO: 7430

SEQ ID NO: 15290 - protein, 281 aa, Neisseria meningitidis; identical to SEQ ID NO: 3006

SEQ ID NO: 15291 - protein, 399 aa, Neisseria meningitidis; identical to SEQ ID NO: 2328

SEQ ID NO: 15292 - protein, 319 aa, Neisseria meningitidis; identical to SEQ ID NO: 6432

SEQ ID NO: 15293 - protein, 334 aa, Neisseria meningitidis
MSGAAAALLAGIILYFKSDKKRQENGEWSSGLEYAYILTAVGVFAALSLFMSFAAVFLIFVVLCGTAWGVYKYRLKTHPEISESSHFGDYFGSFFPTVLVLFLIRSFIAEPFQIPSSSMRPGLIKGDFILVGKFSYGLRVPVLNNIFIPTGKIERGDVVVFNYPLQPEMTYIKRIVGIPGDVVEYRDKILTVNGKPTSDIPNGTYRYPDDTDPSEIHNTDMFRSGLDGKSFNILKKEGQPAVSLPVLGKYTSDIMSENGYSIEQSGLEHCQYADDGSGFVCKVPEGRYFAMGDNRDNSADSRYWGFVDDKLVVGKAMFILMNFGDFGRAGTAIR

SEQ ID NO: 15294 - protein, 100 aa, Neisseria meningitidis
MGYRVGINCFDTRLQADDYLLSSLPPTVTQDGKIIRPERVGEKWVLNGKPVMLSYPKCSNFEQIKQGSYVGSTVLILFVVIYGFRLLINFLKDIGKVGTD

SEQ ID NO: 15295 - protein, 69 aa, Neisseria meningitidis; identical to SEQ ID NO: 5143

SEQ ID NO: 15296 - protein, 218 aa, Neisseria meningitidis; identical to SEQ ID NO: 7053

SEQ ID NO: 15297 - protein, 188 aa, Neisseria meningitidis; identical to SEQ ID NO: 6079

SEQ ID NO: 15298 - protein, 289 aa, Neisseria meningitidis
MKRIFLPALPAILPLSTYADLPLTIEDIMTDKGKWKLETSLTYLNSENNRAELAAPVYIQTGATSFIPIPTEIQENGSNTDMLAGTLGLRYGLTGNTDIYGSGSYLWHEERKLDGNGKTRNKRMSDISAGISHTFLKDDKNPALIGFLESTVYEKSRNKASSGKSWLIGATTYKAIDPVVLSLTAAYRINGSKTLSSNTKYKAGNYWMLNPNISFAANDRISLTGGIQWLGKQPDRLDGKKESARNTSTYAHFGAGFGFTKTTALNASARFNVSGQSSSELKFGVQHTF

SEQ ID NO: 15299 - protein, 86 aa, Neisseria meningitidis; identical to SEQ ID NO: 13718

SEQ ID NO: 15300 - protein, 290 aa, Neisseria meningitidis
VGINANPNCADEAGKLIWENDPNKNWWANRMDDVRGIVQGAVNPFLMGFQGVGIGAITDSAVSPVTDTAAQQTLQGINHLGNLSPEAQLAAATALQDSAFAVKDGINSAKQWADAHPNITATAQTALAVAEAATTVWGGKKVELNPTKWDWVKNTGYKKPAARHMQTVDGEMAGGNRPPKSITSNSKADASTQPSLQAQLIGEQISSGHAYNKHVIRQQEFTDLNINSPADFARHIENIVSHPTNMKELPRGRTAYWDDKTGTIVIRDKNSDDGGTAFRPTSGKKYYDDL

SEQ ID NO: 15301 - protein, 217 aa, Neisseria meningitidis
MKITHCKLKKKVQKELLHFFVLEVTARSATDILGIHPNSAVLFYRKIRTVINYHLALAADEVFEGSVELDESYFGGQRKGRRGRGAVGKVVVFGILKRNGWVYTVVVDNAKSETLLPVIKKKIMPDSIVYTDSLSSCDKLDVSGFIHYRINHSKEFADRQNHINGIENFWNQAKRVLRKYNGIDRKSFPLFLKECEFRFNFGTPSRQLKILQDWCGI

SEQ ID NO: 15302 - protein, 617 aa, Neisseria meningitidis
MNRYPLWKYLLIVFTIAVAAVYSLPNLFGETPAVQVSTNRQAIIINEQTQFKVDAALQNAGIQTDGMFVVDNSLKVRFKDTETQLKARDVIENTLGEGYITALNLLADSPEWMAKIKANPMFLGLDLRGGVHFTMQVDMKAAMQKTFERYSGDIRRELRREKIRSGTVRQAGNSLTVPLQDAGDVQKALPQLRKLFPEATLNSDGSNIVLTLSEEAVNKVRSDAVKQNITTLHNRVNELGVAEPVIQQSGADRIVVQLPGVQDTAKAKDIIGRTATLELRMVEDDPAKLREALEGNVPSGYELLSSGGDRPETLLISKQVELTGDNINDAQPSFDQMGAPAVSLSLDSAGGSIFGELTAANVGKRMAMVLIDQGKSEVVTAPVIRTAITGGRVEISGSMTTAEANDTSLLLRAGSLAAPMQIVEERTIGPSLGKENIEKGFHSTLWGFAIVAAFMVVYYRLMGFFSTIALSANILFLIGILSAMQATLTLPGMAALALTLGMAIDSNVLINERIREELRAGVPPQQAINLGFQHAWATIVDSNLTSLIAGIALLVFGSGPVRGFAVVHCLGILTSMYSSVVVFRALVNLWYGRRRKLQNISIGAVWKPEAETAAGKE

SEQ ID NO: 15303 - protein, 222 aa, Neisseria meningitidis; identical to SEQ ID NO: 3618

SEQ ID NO: 15304 - protein, 252 aa, Neisseria meningitidis; identical to SEQ ID NO: 6622

SEQ ID NO: 15305 - protein, 1786 aa, Neisseria meningitidis
MKTKRFKINAISLSILLAYALTPYSEAALVRDDVDYQIFRDFAENKGKFFVGATDLSVKNKQGQNIGNALSNVPMIDFSVADVNRRTLTVIDPQYAVSVKHVKGDEISYYGHHNGHLDVSNDENEYRSVAQNDYEPNKNWHHGNQGRLEDYNMARLNKFVTEVAPIAPTSAGGGVETYKDKNRFSEFVRVGAGTQFEYNSRYNMTELSRAYRYAIAGTPYQDVNVTSNLNQEGLIGFGDNSKHHSPEKLKEVLSQNALTNYAVLGDSGSPLFAYDKQEKRWVFLGAYDYWAGYQKNSWQEWNIYKKEFADKIKQRDNAGTIKGNGEHHWNITFGTNSKIGSTAVRLAGNEKDANNGQNVTFEDNGTLVLDQNINQGAGGLFFKGDYTVKGANNDITWLGAGIDVADGKKVVWQVKNPNGDRLAKIGKGTLEINGTGVNQGQLKVGDGTVILNQKADSNQKVQAFSQVGIVSGRGTLVLNSSNQINPDNLYFGFRGGRLDANGNDLTFEHIRNVDEGARIVNHNTGHASTITLTGKSLITAPQNLSVYEIRNDYDDDDYYGYYSYRKPIPQGKDLYYKNYRYYALKSGGSVNAPMPENGQTENNDWILMGSTQEEAKKNAMNHKNNQRISGFSGFFGEENGKGHNGALNLDFNGKSAQNRFLLTGGTNLNGKISVTQGNVLLSGRPTPHARDFVNKSSAQKDAHFSKNNEVVFEDDWINRTFKATEIAVNQSASFSSGRNVSDITANITATDNAKVNLGYKNGDEVCVRSDYTGYVTCNTDNLSDKALNSFGATQINGNVNLSQNAALALGKAALWGQIQGQGNSRVSLNQHSKWHLTGDSQVHNLSLADSHIHLNNASDAQSANKYHTLKINHLSGNGHFHYLTHLAKNLGDKVLVKESASGHYQLHVQDKTGEPNQEGLNLFDASSVQDRSRLSVSLANNHVDLGALRYTIKTENGITRLYNPYAENRRRVKPTPSPATNTASQAQKATQTDGAQIAKPQNIVVAPPSPQANQAEEAKRQQAKAEQVKRQQAEAERKSAELAKQKAEAEREARELATRQKAEQERSSAELARRHEKEREAAELSAKQKVEAEREAQALAVRRKAEAEEAKRQAAELARRHEKEREAAELSAKQRVGEEERRQTAQSQPQRRKRRAAPQDYMAASQDRPKRRGHRSVQQNNVEIAQAQAELARRQQEERKAAELLAKQRAEAEREAQALAARRKAEAEEAKRQAAELAHRQEAERKAAELSANQKATAEAQALAARQQKALARQQEEARKAAELAVKQKAETERKTAELAKQRAAAEAAKRQQEARQTAELARRQEAERQAAELSAKQKAETDREAAESAKRKAEEEEHRQAAQSQPQRRKRRAAPQDYMAASQNRPKRRGRRSTLPAPPSPSFDSSAYAAPRALHNPDWYENDYEEIPLDALEDENVSESVDTSDKQPQDNTELHEKVETVSLQPRAAQPRAQAAAQPQAQAAAQPQAQAVAQADAVSTNTNSALSDAMASTQSILLDTGASLTRHIAQKSRADAEKNSVWMSNIGYGRDYASAQYRRFSSKRTQTQIGIDRSLSENMQIGGVLTYSDSQHTFDQASGKNTFVQANLYGKYYLNDAWYVAGDIGAGSLRSRLQTQQKANFNRTSIQTGLTLGNTLKINQFEIVPSAGIRYSRLSSADYKLGNDSVKVSSMSVKTLTAGLDFAYRFKVGNLTVKPLLSAAYFANYGKGGVNVGGNSFAYKADNQQKYSAGAALLYRNVTLNVNGSITKGKQLEKQKSGQIKIQIRF

SEQ ID NO: 15306 - protein, 423 aa, Neisseria meningitidis
MKLLVIGNGGREHALAWKLAQSPKVETVFVASGNAGTAIEPKLQNIDLTAHQDLIEFCRKENIVFTVVGPEAPLAAGVVDDFRAAGLKIFGPTQYAAQLESSKDFAKAFMAKYNIPTAQYQTFENADAAHDYVNQKGAPIVIKADGLAAGKGVIVAMTLDEAHAAIDDMLLDNKMGNAGARIVIEDFLQGEEASFIVMVDGNNVLPMATSQDHKRLLDGDKGLNTGGMGAYSPAPVVTPVVYERAMNEIILPTVAGMKAEGHEFTGFLYAGLMIDQSGAPHTIEFNCRFGDPETQPIMSRLNSDLSDLVEAAIDGKLDSVTAEWSPQTAVGVVLAAQNYPETPKKGDVISGLDAANQVGKVFHAGTTANEKGDVLTNGGRVLCVVGLGDNVAQAKAKAYGALEKISFDGMQYRKDIADKAINR

SEQ ID NO: 15307 - protein, 383 aa, Neisseria meningitidis
MQTWQLPEHIADVLPTNARQLESAREQLLALFRVHGYELVQPPLMEYAHSLLTHIDAGLSLKTILVTDRLSGRQLGIRADITPQVARIDAHLLSANQGINRLCYAGPVLHAQSDGLLNMREPLQAGAEMYGFADIRGDIELIDLMLKSMKIADMGKVLLSLGHIGIFRALSDAAHLDAGQSATLLALMQDKDTGAVEAQVKAWKLDGMWAKAFSLLPRLYGGREVLSDARGRLPDLSAVGGALGELQAVCDAFPDCEIHIDLSELRVDNYHTGLLYAAYAADFHDAVARGGRYDGLGGYFGRARPATGFSFDLRSFIGRLPAIERQPAVLVDAEDAEAAREAVEALREQGQCVVVDYGIGHNVSEELAGRLKKTDGVWQVVKR

SEQ ID NO: 15308 - protein, 321 aa, Neisseria meningitidis; identical to SEQ ID NO: 3510

SEQ ID NO: 15309 - protein, 118 aa, Neisseria meningitidis; identical to SEQ ID NO: 3785

SEQ ID NO: 15310 - protein, 140 aa, Neisseria meningitidis
MKITKIFTFDSSHMLDGHDGKCQNLHGHTYKLEITVSDDPVRGGPKDGMVMDFTDLKAIVKQHITDPFDHAFIYHGGNGRESQIAALLEGWNMKTLRLPCRTTAENMAVEMYDRLKNAGLNVCRVKLWETPTSCAEYEGE

SEQ ID NO: 15311 - protein, 344 aa, Neisseria meningitidis; identical to SEQ ID NO: 6064

SEQ ID NO: 15312 - protein, 356 aa, Neisseria meningitidis
VSASETENRIGLTVPLELAGGRLDAVLAKLLPDYSRSRLTSWIKEGAVIVNDKPSQPKDKMIGGEQICVTVRPSEENLAFVPEPMALDIVYEDDTVIVVNKPAGLVVHPAAGNWTGTLLNGLLAHCPELSQIPRAGIVHRLDKETSGLMVVAKTLSAQNSLVRQLQERTVKRIYRAVANGIVPFDGKIETQIGRDPHNRLKMAVVKFGGKPAVTHVKVLERYLAHSYIECSLETGRTHQIRVHMREANHPLAADPVYGNPRHPCGDTVKEAVKSLGARQALHAYRLSFTHPKTGETVSFEAPIPDDIYHLLSVLRLEAGLDSSLSNEEEWQDKFGADDDDDWNEDDYDVEVVYVRE

SEQ ID NO: 15313 - protein, 449 aa, Neisseria meningitidis; identical to SEQ ID NO: 481

SEQ ID NO: 15314 - protein, 318 aa, Neisseria meningitidis
MNIIGLDISKDTIDATLHKINGSIHYIKFKNNDDGLKQFRLWIKGNRIRKAYIGMEATGIYYEKAADMLSSYYIVYVINPLKIKDYGKSRFNRTKTDKADSNLIADYIKRHQDTLIPYQIPKNKALQKLINLKNQLQQQQKQIKNRLHSTEEDFIRNIHQDLIDTIQDKMEQVKIAISEQIKKQTDNNHYRNLQTIPSIGKDTASVLYAQLTEKHFKTANQFVSYAGLSPAIIQSGTSVRGRGRLSRYGNRRLKSTLYMPALCAYRFNAFPKLINNLKKAGKPKMVIIVAIMRKLAKLAYYIVKTGQPYDAERHRLNQ

SEQ ID NO: 15315 - protein, 164 aa, Neisseria meningitidis; identical to SEQ ID NO: 7401

SEQ ID NO: 15316 - protein, 797 aa, Neisseria meningitidis
MKLKQIASALMVLGISPLALADFTIQDIRVEGLQRTEPSTVFNYLPVKVGDTYNDTHGSAIIKSLYATGFFDDVRVETADGQLLLTVIERPTIGSLNITGAKMLQNDAIKKNLESFGLAQSQYFNQATLNQAVAGLKEEYLGRGKLNIQITPKVTKLARNRVDIDITIDEGKSAKITDIEFEGNQVYSDRKLMRQMSLTEGGIWTWLTRSNQFNEQKFAQDMEKVTDFYQNNGYFDFRILDTDIQTNEDKTKQTIKITVHEGGRFRWGKVSIEGDTNEVPKAELEKLLTMKPGKWYERQQMTAVLGEIQNRMGSAGYAYSEISVQPLPNAETKTVDFVLHIEPGRKIYVNEIHITGNNKTRDEVVRRELRQMESAPYDTSKLQRSKERVELLGYFDNVQFDAVPLAGTPDKVDLNMSLTERSTGSLDLSAGWVQDTGLVMSAGVSQDNLFGTGKSAALRASRSKTTLNGSLSFTDPYFTADGVSLGYDVYGKAFDPRKASTSIKQYKTTTAGAGIRMSVPVTEYDRVNFGLVAEHLTVNTYNKAPKHYADFIKQYGKTDGTDGSFKGWLYKGTVGWGRNKTDSALWPTRGYLTGVNAEIALPGSKLQYYSATHNQTWFFPLSKTFTLMLGGEIGYANGYGKTKEIPFFENFYGGGLGSVRGYESGTLGPKVYDEYGEKISYGGNKKANVSAELLFPMPGAKDARTVRLSLFADAGSVWDGKTYDDNSSSATGGRVQNIYGAGNTHKSTFTNELRYSAGGAVTWLSPLGPMKFSYAYPLKKKPEDEIQRFQFQLGTTF

SEQ ID NO: 15317 - protein, 704 aa, Neisseria meningitidis
MDLLSVFHKYRLKYAVAVLTILLLAAVGLHASVYRTFTPENIRSRLQQSIAHTHRKISFDADIQRRLLPRPTVILKNLTITEPGGDQTAVSVQETKIGLSWKNLWSDQIQIEKWVVSSAELALTRDGKGVWNIQDLIDSQKRQASVNRIIVENSTVRLNFLQEQLILKEINLNLQSPDSSGQPFESSGILVWGKLSVPWKSRGLFLSNGIGPPEISPFHFEASTSLDGHGITISTTGSPSVRFNAGGADAAGLGLRADTSFRNLHLTAQIPALALRNNSIKIETVNGAFTAGGEYARWDGSFKLDKANLHSGIANIGNAEISGSFKTPRHQTNFSLNSPLVWTENKGLDAPRLYVSTLQDTVNRLPQPRFISRLDGSLSVPNLQNWNAELNGTFDRQTVAAKFRYTHEDAPHLEAAVALQKLNLTPYLDDVRQQNGKIFPDTLAKLSGDIEAHLKIGKVQLPGLQLDDMETYLHADKGHIALSRFKSGLYGGHTEGGISIANTRPATYRLQQNASNIQIQPLLQDLFGFHSFSGNGDAVIDLTASGETRKELIRSLQGSLSLNISNGAWHGIDMDNILKNGISGKTADNAAPSTPFHRFTLNSEISDGISRHIDTELFSDSLYVTSNGYTNLDTQELSEDVLIRNAVHPKNKPIPLKITGTVDKPSITVDYGRLTGGINSRKEKQKILEDTLLEQWQWLKPKEP

SEQ ID NO: 15318 - protein, 160 aa, Neisseria meningitidis
MKYLNLAAITLAATFAAHTASADELAGWKDNTPQSLQSLKAPVRIVNLWATWCGPCRKEMPAMSKWYKAQKKGSVDMVGIALDTSDNIGNFLKQTPVSYPIWRYTGANSRNFMKTYGNTVGVLPFTVVEAPKCGYRQTITGEANEKSLTDAVKLAHSKCR

SEQ ID NO: 15319 - protein, 1161 aa, Neisseria meningitidis
MRLTHIKLSGFKSFTDPTTIHVPGQLVAVIGPNGCGKSNVIDAVRWVLGEASAKQLRGESMQDVIFNGAATRRPAPRASVELVFDNSDHSLQGAWGQYAEVSIKRQLTRQGESTYFINNQTVRRRDITDLFLGTGVGARGYAVIEQGMISRIIEARPEELRAYIEEAAGVSKYKERRKETEGRLKDTREHLQRLGDLQNELARQVEKLEKQAETAERYKSLTAQLNQQQDLLDYAQWQQSLAAADKATAQHQSLQAQQDETAAQVQALNDEVHALQTAEQSQQQAVHELSNKRGVLREQIARLEEQIRHQQNLHQRIERDKQAAQAQMQRIHQEQQQIRVQLEENELQAEEKQTELAEWAMQVAEHEERLPELEEAQATLNAAFQTRQDEANRIRRELALKQQQLAHAEQTVAKHEERKGRLKQENQALNLPDEAETAAAQEAAALLQNRQEHYEEQIIAAEEALHAAREAFQTASNRFQSLKQQHITLQAQQQALSQILSQQQEAADFWQASDHAAAPQLWQHITAPAEWQHALSVILAERLHARAVPQGFVPPEPLPQGQAAWLSDGLSGGIKKSLPVQALLNQIQAQPPFQTALHHWLDGVLCAPDLSYALAHQSDLGAHQIWLTPEGHQVDKVSVLLYAKPAQESLIAQKARLDGIASELDNLAPELSADEAAFKQAEAAVRSSEVQHKNLMQQQQQHTRQYSQAQQRAAELLARTNQGQIRREHIERELAQLAEEQTVLQHTSDGLSDDIVTLQEAAAELEHQQQTTAHSRQEQQGRLKQAQLALLEANRQYGLAEVAVHKLNQQKQNYRQQIAQLEQQTLDWQERQQELALAYETEFQNDEQHIKLEELSEAVQTLDEEYIVVQEKLAQIQEQGREQYAKVQTLQTKLPQLQAATQTALLQQQEALINAKRYHQNLTERAADLDALEALAKESPKVLNSSIGSLSQQIEALGAVNLAALQELEEARERDGYYRSQSEDVQAAITLLEEAIAQIDDKTKARFKETFDAVNGKVQTFFPTLFGGGEATLKMIGDDLLTAGVSIMARPPGKKNSTIHLLSGGEKALTAMSLVFALFSLNPAPFCLLDEVDAPLDDANTSRFCNLVKEMSAQTQFLYISHNRLTMEMAEQLVGVTMQEKGVSRVVAVDIKQALEMAEAV

SEQ ID NO: 15320 - protein, 457 aa, Neisseria meningitidis
MSNPFSSLGLGTELVSALTAQGYENPTPIQAAAIPKALAGHDLLAAAQTGTGKTAAFMLPSLERLKRYATASTSPAMHPVRMLVLTPTRELADQIDQNVQSYIKNLPLRHTVLFGGMNMDKQTADLRAGCEIVVATVGRLLDHVKQKNISLNKVEIVVLDEADRMLDMGFIDDIRKIMQMLPRQRQTLLFSATFSAPIRKLAQDFMNAPETVEVAAQNTTNANVEQHIIAVDTIQKRNLLERLIVDLHMNQVIVFCKTKQSVDRVTRELVRRNLSAQAIHGDRSQQSRLETLNAFKDGSLRVLVATDIAARGLDIAELPFVINYEMPAQPEDYVHRIGRTGRAGADGVAISLMDESEQKMFESIKELTGNKLLIERIEGFEPQWWEQGGAKPEKTEMREPRQRNRYESARAQREKNTRPETTANDAGAACGKIAGRSRRSRREHRTCALLQPRYGVK

SEQ ID NO: 15321 - protein, 371 aa, Neisseria meningitidis; identical to SEQ ID NO: 849

SEQ ID NO: 15322 - protein, 91 aa, Neisseria meningitidis
MNEGEVVLTPEQIQTLRGYAFRGDTYGGWRYLANLGDRYADDAAAIVGKDANLNGLNLWMKKGVENLWDDTVGKKIRLMCISVFWIVVFNL

SEQ ID NO: 15323 - protein, 217 aa, Neisseria meningitidis
MKITHCKLKKKVQKELLRFFVLEVTAHSAADILGIHPNSAALFYRKIRTVINHHLALAADEVFEGPVEPDESDFGGRRKGRRGRGAAGKVVVFGILKRNGRVYTVVVDNAKSETLLPVIKKKIMPDSIVYTDSLSSCDKLDVSGFIHYRINHSKEFADRQNHINGIENFWNQAKRVLRKYNGIDRKSFPLFLKECEFRFNFGTPSQQLKILRDWCGI

SEQ ID NO: 15324 - protein, 642 aa, Neisseria meningitidis
MAKVIGIDLGTTNSCLAISENGQTKVIENAEGARTTPSVIAYLDGGEILVGAPAKRQAVTNAKNTIYAAKRLIGHKFEDKEVQRDIESMPFEIIKANNGDAWVKAQGKELSPPQISAEVLRKMKEAAEAYLGEKVTEAVITVPAYFNDSQRQATKDAGRIAGLDVKRIINEPTAAALAFGMDKGDNKDRKVAVYDLGGGTFDISIIEIANLDGDKQFEVLATNGDTFLGGEDFDQRLIDYIIDEFKKEQGIDLKQDVMALQRLKEAAEKAKIELSSGQQTEINLPYITMDATGPKHLAMKITRAKFESLVEDLIARSIEPCRTALKDAGLSTGDIDDVILVGGQSRMPKVQEAVKDFFGKEPRKDVNPDEAVAVGAAIQGEVLSGGRSDVLLLDVTPLSLGIETMGGVMTKLIQKNTTIPTKASQVFSTAEDNQSAVTIHVLQGERERASANKSLGQFNLGDIAPAPRGMPQIEVTFDIDANGILHVSAKDKGTGKAANITIQGSSGLSEEEIERMVKDAEANAEEDKKLTELVASRNQAEALIHSVKKSLADYGDKLDAAEKEKIEAALKEAEEAVKGDDKAAIDAKTEALGAASQKLGEMVYAQAQAEAQAGESEQANASAKKDDDVVDADFEEVKDDKK

SEQ ID NO: 15325 - protein, 385 aa, Neisseria meningitidis
MKFATKAIHSSYDCDEHNRALMPPIYQNSMFALHEIGENVPYRYSRLSNPTRQILEDTVADLEHGAAGFAFSSGMAGIDAVWRTFLRPGDTIVAVADIYGGAYDLLVDVYQKWGVNVVFADLGNPDNLDELLKAHKVKLVWLETPSNPLLRLVDIKVLAAKAKAAGALVGIDNTFATPYLQQPLDMGCDFVFHSATKYLCGHSDVLMGIVVAKTKELAQPLHDMMVHTGAVAGPLDCWLVLRGIKTLALRMNAHCQNALEIARRLEAHPAIEKVFHPGLPSHEHYELAKTQMPKGIGGVVTVYLKNDTREAANSVIKNMKLVKMASSLGGVESLVNHCYSQSHSGVPHDVKMEMGIRVGLLRFSVGIEDVDDIWNDISAALDTTV

SEQ ID NO: 15326 - protein, 264 aa, Neisseria meningitidis; identical to SEQ ID NO: 6162

SEQ ID NO: 15327 - protein, 68 aa, Neisseria meningitidis
MSALLLTACQHVSDRHEAVGMANSASKFCIAKGGGREAKKDESGGGYALCHLPDSRIVEEWEYFRSQH

SEQ ID NO: 15328 - protein, 754 aa, Neisseria meningitidis
VSISAPYANENSRILLSTTDISSENGKIKLQSYGDQFYYAGQGELYTFDKRSYKTGKWYKLKHVTEIKEHKNAKADPVSLSASQGIEIKSGGNIGAHATLFDAPRGSVKIEAGRGLVLYAVEDLNYDKLDTRTKRKFIGITYDKVHDTTTHTMKTALPSRVVAESANLQSGWDAKLQGTQFETTLGGAAIRAGVGDQARADAKIILEGIKSSVRTETVSSSKSALWQKQAGRGSNIETLQLPSFTGSVAPVLSAPGGYIVDIPKGNLKTEIEKLAKQPEYAYLKQLQTAKNVDWKQVQLVYDKWDYKAEGLTGAGAAIIALAVAAATGGVGAGLIGAAQGTTSAAIANAAFTSLATQASISLVNNKGNVGKTLKELGRSRTVKNLVVAAATAGVSNKIGTSALANVSDKQWVNNMTVNLADAGSAALINTAVNGGSLKDNLEANILAALVNTAHGEAASKIKGLDQHYVAHKIAHAVAGCAAAAANKGKCQDGAIGAAVGEIVGEALVKNTDFSDMTPEQLDLEVKKITAYAKLAAGTVAGVTGGDVNTAAQTAQNAVENNAVKAVVTAAKVVYKVARKGLKNGKINVRDLKQTLKDEGYNLADNLTTLFDETLDWNDAKAVIDIVVGTELNRANKGEAAQKVKEVLEKNRPYIPNKGAVPNMSTYMKNNPFGKQLAQISEKTTLPTQQGQSVFLVKRNQGLLKTGDRFYLDGQHKNHLEVFDKNGNFKFVLNMDGSLNQMKTGAAKGRKLNLK

SEQ ID NO: 15329 - protein, 123 aa, Neisseria meningitidis; identical to SEQ ID NO: 2701

SEQ ID NO: 15330 - protein, 392 aa, Neisseria meningitidis; identical to SEQ ID NO: 276

SEQ ID NO: 15331 - protein, 94 aa, Neisseria meningitidis; identical to SEQ ID NO: 6698

SEQ ID NO: 15332 - protein, 256 aa, Neisseria meningitidis
MKITTWNVNSLNVRLPQVQNLLADNPPDILVLQELKLDQDKFPAAALQMMGWHCVWSGQKTYNGVAIVSRNAPEDVNIGLPALPDDPQRRVIAATVGGVRVINVYCVNGEALDSPKFKYKEQWFAALTEFVRDEMARHGKLVLLGDFNIAPADADCYDPEKWYEKIHCSTVERQWFQNLLDLGLTDSLRHIHPEGAFYTWFDYRGAMFQRKLGLRIDHILVTSEMAAVLKDVRVDLDTRALERPSDHAPVTAEFDW

SEQ ID NO: 15333 - protein, 472 aa, Neisseria meningitidis
MENILSVLVGTVNRFLWDYLLIYALLGIGLFFTLYLGAPQITKLGAGFKSVFGGLFAKGDKDDKSLSQFQALAVAISAQIGTGNVAGVATAITAGGPGAIFWMWVSAVLGMSTIFAEALLAQKYRVVSHGKYIGGPAFYITHGLTPKIGRGAARFLSGFFSIALIIALGFIGNATQANSIASAVTIAFDVPSLAVGIVLAVLAGMVVIGGVNRIANIAQFVVPFMAVVYILCAVVILFEFSDYIVPMFNHIFTAAFNPEAVLGGAAGIGMREAIRFGVARGLFSNEAGMGSTPHAHATADVKHPVQQGMAAFVGVFIDTILVCTATALIILLTDANLSGEQGAAVTQFAFNKAFPGFGSQLLAVCLTFFAFTTIIGWYYFGESNIRFLFRGRHLGIYRALVLLAIVLGTLGKVDLVWSLSDMFNGFMVIPNLIALFLLRKEIRAIYDDYLAQKKAGRDLSYPYEFHEFHDKG

SEQ ID NO: 15334 - protein, 117 aa, Neisseria meningitidis; identical to SEQ ID NO: 4861

SEQ ID NO: 15335 - protein, 66 aa, Neisseria meningitidis; identical to SEQ ID NO: 2062

SEQ ID NO: 15336 - protein, 157 aa, Neisseria meningitidis
MSRNTEELQGISLLGNQKTQYPIGYAPEILEAFDNKHPDNDYFVKFVCPEFTSLCPMTGQPDFATIYIRYIPHIKMVESKSLKLYLFSFRNHGDFHEDCVNIIMKDLIALMDPKYIEVFGEFTPRGGIAIHPFANYGKAGTEFEALARKRLFEHDAQ

SEQ ID NO: 15337 - protein, 280 aa, Neisseria meningitidis
VGSLIVGCSAIPSSGPSAKKIVSLGQQSEVQIPEVELIDVNHTVAQLLYKAQINQSFTQFGDGYASAGTLNIGDVLDIMIWEAPPAVLFGGGLSSMGSGSAHQTKLPEQLVTARGTVSVPFVGDISVVGKTPGQVQEIIKGRLKKMANQPQVMVRLVQNNAANVSVIRAGNSVRMPLTAAGERVLDAVAAVGGSTANVQDTNVQLTRGNVVRTVALEDLVANPRQNILLRRGDVVTMITNPYTFTSMGAVGRTQEIGFSARGLSLSEAIGRYGRFARSPF

SEQ ID NO: 15338 - protein, 317 aa, Neisseria meningitidis
MNHKKIVVLDADTLPGRVFHFDFPHELAVYGTTGADETAERVRDAHIVITNKVMISADIIAANPQLELIAVSATGVNNVDIGAAKAAGVAVCNVRAYGNESVAEHAFMLMIALMRNLPAYQRDVAAGLWEKSPFFCHYGAPIRDLNGKTLAVFGRGNIGRTLAGYAQAFGMGVVFAEHKHASAVREGYVSFEDAVRAADVLSLHCPLNAQTENMIGENELRQMKPGAVLINCGRGGLVDENALLAALKYGQIGGAGVDVLTEEPPRGGNPLLNARLPNLIVTPHTAWASREALDRLFDILLANIHAFVKGEAQNRVV

SEQ ID NO: 15339 - protein, 136 aa, Neisseria meningitidis
MTTYTIPKKDYQFLYIYEGTLLNYTLKNDEFHIIVQNVDYPDFPQEIPTPNYTDWVKIKFKQFSYLKFIYGYATKSQDINIDNTLELGELKQDDEILDYGGALELIGGRYDFPTAFRIDIVCREIELEFLDQEGFN

SEQ ID NO: 15340 - protein, 122 aa, Neisseria meningitidis
MRIFKNQWIVKFAKKHKINDSELLEAVERADNGLIDADLGGGVIKQRIARQGQGRSGGYRSLILLKQADRAFFVYAFAKNDRENISDKELDVYRKAAAYYLKYTRAELAALKEDGIITEIES

SEQ ID NO: 15341 - protein, 238 aa, Neisseria meningitidis
LVKCRLKIISDGIFIWGENEVASVFLEGEAVEVGNIFCIGRNYAAHIEELKNEIPSEPVVFMKPSGSILNSGGTILLPEFSRDVQFECELVLLVGKDSDGMGEGEDILGCVAGYGVGLDLTARDIQCHLKAQGLPWLKAKGFRHSACVSDFAAADRIGNPEKVLFSLKQNGVLKQRGDTGLMIYPIREILHKLAADYGLGKGDLVFTGTPSGVGAIGAGDNLALELDGLVRASFTVGC

SEQ ID NO: 15342 - protein, 95 aa, Neisseria meningitidis; identical to SEQ ID NO: 6515

SEQ ID NO: 15343 - protein, 157 aa, Neisseria meningitidis; identical to SEQ ID NO: 5447

SEQ ID NO: 15344 - protein, 255 aa, Neisseria meningitidis; identical to SEQ ID NO: 7390

SEQ ID NO: 15345 - protein, 335 aa, Neisseria meningitidis
MSTFFQQTAQAMIAKHIDRFPLLKLDQVIDWQPIEQYLNRQKNRYLRDHRGRPAYPLLSMFKAVLPGQWHSLSDPELEHSLITRIDFNLFCRFDELSIPDYSTLCRYRNWLAQDDTLSELLKLINRQLTEKGLKIEKASAAVVDATIIQTAGSKQRQTIEVDEEGQVSGQTTPSKDSDARWIKKNGLYKLGYKQHTRTDAEGYIEKLHITPANAHECKHLSPLLEGLPEGTTVYADKGYDSAENRQHLEEHQLLDGIMRKACRNRPLSEVQTKRNRYLSKTRYVVEQSFGTLHRKFRYARAAYFGLIKVSAQSHLKAMCLNLLKAANRLSAPAAA

SEQ ID NO: 15346 - protein, 445 aa, Neisseria meningitidis
MTDTAGLRRRNLRQWIAEHYGGLQTRFAEAVALNTGELSALLKNKSFGEKKARKIEQAAKMPAFWLDTEHTARPPEHTGKHTMSHISPIPEILADIKAGKMVIITDAEDRENEGDLLMAAQFVTPEAINFMIKHARGLVCLPMDGEMVEKLGLPMMTQKNGAQYGTNFTVSIEAAHGITTGISAADRALTIQTAVSPTAKPEDIVQPGHIFPLRAQKGGVLVRAGHTEAGVDLAQMNGLIPASVICEIINDDGTMARMPELMKFAEEHKLKIGTIADLIEYRSRTESLLEDMGNAPVQTPWGEFQQHVYVDKLSGETHLALVKGTPSADTETLVRVHEPFSVMDFIQANPRHSWSLPKALERIQQAESGVVILLHRTEDGASLLDRTLPKGANQAYKWDSKSYGIGAQILAGLNVKKLRVLGQPSSFTGLTGFGLEVVGFEEAEK

SEQ ID NO: 15347 - protein, 176 aa, Neisseria meningitidis
VLECACNQSAVPERTNMAIVKNSVVSLHYEMYDANNQLLDKTEEPIAYLHGGYDGIFPLVEEALHGKDAGDTVDVALSPDDAFGEQDSELVRIEDVGVFPVEVEVGMMFEADDPETGDVVVYRVTDVADGKAVVDGNHPLAGMKIRFKATVESVRDASDEEIAHGHVHGPHGHHHH

SEQ ID NO: 15348 - protein, 145 aa, Neisseria meningitidis; identical to SEQ ID NO: 1775

SEQ ID NO: 15349 - protein, 207 aa, Neisseria meningitidis; identical to SEQ ID NO: 243

SEQ ID NO: 15350 - protein, 149 aa, Neisseria meningitidis; identical to SEQ ID NO: 2323

SEQ ID NO: 15351 - protein, 344 aa, Neisseria meningitidis; identical to SEQ ID NO: 6373

SEQ ID NO: 15352 - protein, 366 aa, Neisseria meningitidis; identical to SEQ ID NO: 8931

SEQ ID NO: 15353 - protein, 105 aa, Neisseria meningitidis; identical to SEQ ID NO: 895

SEQ ID NO: 15354 - protein, 178 aa, Neisseria meningitidis; identical to SEQ ID NO: 7442

SEQ ID NO: 15355 - protein, 176 aa, Neisseria meningitidis; identical to SEQ ID NO: 2300

SEQ ID NO: 15356 - protein, 157 aa, Neisseria meningitidis
MLSTESLKQIDIELAKYPADQRRSAIMGALRIAQTEKGWLAPETIAFVAEYIGISPAQAYEVATFYNMYDLEPVGKYKLTVCTNLPCALRGGMDTGEYLKKKLGIGYGETTPDGKFTLVEGECMGACGDAPVMLVNNHSMCGFMTEEAIEKKLAELE

SEQ ID NO: 15357 - protein, 249 aa, Neisseria meningitidis
MGDSVIYYVEQADEPVNRAGERARKTFKYFWRELFWERRRIIPALDFAMVKAPFFQDGEICEHMWIDDIYFDGLYIYGVLNNKPGELTNIEQGESICVPVDDISDWMFVCNGIPYGGFTIQAMRGQMTEEERTEHDAAWGIDFGDPGQVLLVYEEKEHPENLEEHPMCRNCIDDFRQQLSQNPDFLHEQDEDGYTPLHHEAIAGNALMVQAMLEYGANPASKTSEGYTALDFARLTGWQNVADLLEPRH

SEQ ID NO: 15358 - protein, 347 aa, Neisseria meningitidis
MSKKIKVGIVGATGYTGVELLRLLAAHPDVEVAAVTSRSEAGTAVADYFPSLRGVYGLAFQTPDEAGLEQCDIVFFATPNGIAMKDAPRLIEQGVRVIDLSADFRIRDIPTWEHWYGMTHAAPDLVSQAVYGLSELNREAVAQARLVANPGCYPTCVSLPLVPLLRQCRLKPGMPLIADCKSGVSGAGRKGNVGSLLCEAGDNFKAYGIAGHRHLPEIRQTIAGLQDGIAEGFVFTPHLAPMIRGMHATVYLHLSNGICPETVLRDYYRDSLFVDILPTGSAPETRSVRGANLCRISIQQAAQSDVWVVLSVIDNLVKGAAGQAVQNMNIMFGLEETHGLDAIPLLP

SEQ ID NO: 15359 - protein, 983 aa, Neisseria meningitidis
MPSEQGFQTAFAFSVIIWGCAGAGFKPASSFPIFFCPLSVLSGFFMSNRPTLLLVDGSSYLYRAYHAMGQNLTAPDGAPTGALYGVLNMLRRLRSEYPHDYCAVVFDAKGKNFRHQMFEEYKATRPPMPDDLRPQAEALPDLVRLTGWPVLVIGQVEADDVIGTLAKQGAEHGLRVIVSTGDKDMAQLVDERVTLVNTMSGETLDIEGVKAKFGVRPDQIRDYLALMGDKVDNVPGVEKCGPKTAVKWLEAYGSLQGVIEHASEIKGKVGENLRAALPRLPLSYDLVTIKTDVDLHAELSDGIESLRCTTPKWAQLVVDFKRWGFRTWLKEAESRMHEAADGDLFGSDTIGEQAALDMETSSERLPEKAVAPEKLDYQAVTTEAQFATLLDKLSQAEKIGIDTETTSLDAMNAALVGISIAFQAGEAVYIPVGHSLTAAPEQLDLQDVLGHLKPYLENPALKKIGQNLKYDQHVFANYGIALNGIAGDAMLASYIIESHLGHGLDELSERWLGLETITYESLCGKGAKQIGFADVAIGQATEYAAQDADFALRLEAHLRAQMDEKQLEMYEKMELPVAQVLFEMERNGVQIDRAELARQSAELGAELMKLEQEAYAAAGQPFNLNSPKQLQEILFDKMGIPTKGLKKTAKGGISTNEAVLEQLAPDYPLPKIILQNRSLAKLKSTYTDKLPEMISPKDGRVHTTYAQAVAITGRLASNNPNLQNIPIRTEEGRKVRRAFTAPQGSVIVSADYSQIELRIMAHLSGDKTLIAAFQNGEDVHRRTAAEVFGTAPENVSSEQRRYAKTINFGLIYGMGQYGLAKSLGIDNLSAKNFIDRYFDRYPGVAEYMQRTKEQAAAQGYVETLFGRRLYLPDIRNKNANARAGAERAAINAPMQGTASDLIKRAMIDVSRWLSECEASPWDELLQSKLIMQVHDELVLEVVETELDFVKEKLPQIMAKVDGGLLDVPLVAEVGVGENWEEAH

SEQ ID NO: 15360 - protein, 159 aa, Neisseria meningitidis; identical to SEQ ID NO: 3392

SEQ ID NO: 15361 - protein, 362 aa, Neisseria meningitidis
MSDYTQQLQDKKDHLKTLFAGLDVPEWEVYESPDKHYRMRAEFRIWHEGGEMFYAMFEKGQKAGGASLIRCDRFDAASEAVNCLMPELIAVAAQSAELRNRWYAVEFLSTLSGEMLVTMIYHKRLDDEWMQAAQALQQQLDTSVIGRSRGQKIVLKQDYVTETLKVGNRDFRYRQIEGGFTQPNAAVCQKMLEWACGAAEGLDGDLLELYCGNGNFTLPLSEKFERVLATEISKTSISAAQWNIEANGIGNIKIARLSAEEFTEAYTGKREFKRLKDGGIALTDYAFSTIFVDPPRAGIDEETLKLVSQFDNIIYISCNPETLRANLDTLVETHAVERAALFDQFPFTHHIESGVLLKKKIL

SEQ ID NO: 15362 - protein, 105 aa, Neisseria meningitidis
MGNKLTPPAELPDEQDLRAVLAYNMRLFRVNKGWSQEELARQCGLDRTYVSAVERKRWNIALSNIEKMAAALGVAAYQLLLPPQERLNLMTNSADTRQMPSESGI

SEQ ID NO: 15363 - protein, 205 aa, Neisseria meningitidis; identical to SEQ ID NO: 2053

SEQ ID NO: 15364 - protein, 60 aa, Neisseria meningitidis
LPQKAAAVKKSGNYWQFMRNFDKLAEEAAEHAAEGAVKFIDGKPAKKIIAVPGRLANIVV

SEQ ID NO: 15365 - protein, 197 aa, Neisseria meningitidis
MASIQNLYETVIGVLGNQAGKVISALGEITVECLPEHYISAMTALRDHEDLHFELLVDLCGVDYSTYKNEVWQGKRFAVVSQLLSVKNNQRIRVRVWVSDDDFPVVESVVDIYNSADWYEREAFDMYGIMFNNHPDLRRILTDYGFVGHPFRKDFPISGYVEMRYDEEQKRVIYQPVTIEPREITPRIVREENYGGQ

SEQ ID NO: 15366 - protein, 67 aa, Neisseria meningitidis
MDNLNTQEISVLPENLPLYCSGPDNEQWNGHPRVFLPLCEGESGSVACPYCGTRYRLDGKMPHHHYA

SEQ ID NO: 15367 - protein, 363 aa, Neisseria meningitidis
MQTFNRERLEFALDKRGCTQTKLAELLGITARQVRNYVKDEQIPDLNELANLLEFPVHFFTNDERLPELKSQAVSFRARSRTSKRLEKQALNHSITAFLLNDWLETEFTLSQAVLPDFSDISPEEAAQELRLEWGLGNEPIPNMITLLEAKGVRVFSLSLDTKDIDAFCTWYENHPFVFLNTQKSAERSRFDAAHELGHLIRDKYSMEHSKNSEITEDEPRDIIEKEANAFASAFLMPEAALRLYRHVPITIENLLKIKRRFGVSLVALAYRMHKLGMITDRMYIHNLCPLFAKKKYRTIEPEPMEREISSALRKMLTILKNDGIGIEQIAENLNVSPKDVADLTFGLVERDLNRYRKLRLVK

SEQ ID NO: 15368 - protein, 159 aa, Neisseria meningitidis; identical to SEQ ID NO: 929

SEQ ID NO: 15369 - protein, 300 aa, Neisseria meningitidis
MENMVTFSKIRPLLAIAAAALLAACGTAGNNAARKPVQTAKPAAVVGLALGGGASKGFAHIGIIKVLKENGIPVKVVTGTSAGSIVGSLFASGMSPDRLELEAEILGKTDLVDLTLSTSGFIKGEKLQNYINRKVGGRRIQQFPIKFAAIATDFETGKAVAFNQGNAGQAVRASAAIPNVFQPVIIGRHTYVDGGLSQPVPVSAARRQGANFVIAVDISARPGKNISQGFFSYLDQTLNVMSVSALQNELGQADVVIKPQVLDLGAVGGFDQKKRAIRLGEEAARAALPEIKRKLAAYRY

SEQ ID NO: 15370 - protein, 874 aa, Neisseria meningitidis
MKTSELRQKFLKFFETKGHTVVRSSSLVPHDDPTLLFTNAGMNQFKDVFLGFDKRPYSRATTAQKCVRAGGKHNDLENVGYTARHHTFFEMMGNFSFGDYFKRDAIHFAWEFLTSPEWLNIPKDKLLATVYAEDDEAYNIWLNEIGMPSERIVRIGDNKGAKYASDNFWQMGDTGPCGPCSEIFYDHGEEIWGGIPGSPEEDGDRWIEIWNCVFMQFNRDEQGNMNPLPKPSVDTGMGLERMAAVMQHVHSNYEIDLFQDLLKAVARETGAAFSMEEPSLKVIADHIRSCSFLIADGVLPSNEGRGYVLRRIIRRAVRHGYKLGQSKPFFHKLVADLVKEMGGAYPELKEKQAQIEEALKNEESRFAQTLETGMALLENALAKGGKTLDGEIIFKLYDTYGFPYDLTADMARELGIELDEAGFEREMEAQRARARAAQSFKANAQLPYDGQDTEFKGYSERQTESKVLALYKDGEQVDELNEGDSGAVVIDFTPFYAESGGQVGDVGYIFSGENRFEVRDTQKIKAAVFGQFGVQTSGRLKVGDSVTAKVDDEIRNANMRNHSATHLMHKALRDVLGRHVEQKGSLVTTESTRFDISHPQAVTAEEIAEVERRVNEAVLANVAVNAAIMSMEDAQKTGAMMLFGEKYGDEVRVLQMGGFSTELCGGTHVSRTGDIGLFKIISEGGIAAGVRRIEAITGLNALKWAQEQERLVKDIIAETKAQTEKDVLAKIQAGAAHAKALEKELARAKAELAVHAGAKLLDDAKDLGAAKLVAAQIEADAAALREIVTDLTGKSDNAVILLAAVNDGKVSLCAGVSKALTGKVKAGDLVKFAAEQVGGKGGGRPDLAQAGGTDAGKLPAVLDSVKDWVGAKLV

SEQ ID NO: 15371 - protein, 2514 aa, Neisseria meningitidis
MNKTLYRVIFNRKRGAVVAVAETTKREGKSCADSDSGSAHVKSVPFGTTHAPVCRSNIFSFSLLGFSLCLAVGTANIAFADGIIADKAAPKTQQATILQTGNGIPQVNIQTPTSAGVSVNQYAQFDVGNRGAILNNSRSNTQTQLGGWIQGNPWLARGEARVVVNQINSSHSSQMNGYIEVGGRRAEVVIANPAGIAVNGGGFINASRATLTTGQPQYQAGDLSGFKIRQGNVVIAGHGLDARDTDYTRILSYHSKIDAPVWGQDVRVVAGQNDVVATGNAHSPILNNAAANTSNNTANNGTHIPLFAIDTGKLGGMYANKITLISTAEQAGIRNQGQLFASSGNVAIDANGRLVNSGTMAAANAKDTDNTAEHKVNIRSQGVENSGTAVSQQGTQIHSQSIQNTGTLLSSGEILIHNSGSLKNETSGTIEAARLAIDTDTLNNQGKLSQTGSQKLHIDAQGKMDNRGRMGLQDTAPTASNGSSNQTGNSYNASFHSSTTTPTTATGTGTATVSISNITAPTFADGTIRTHGALDNSGSIIANGQTDVSAQQGLNNAGQIDIHQLNAKGSAFDNHNGTIISDAVHIQAGSLNNQNGNITTRQQLEIETDQLDNAHGKLLSAEIADLAVSGSLNNQNGEIATNQQLIIHDGQQSTAVIDNTNGTIQSGRDVAIQAKSLSNNGTLAADNKLDIALQDDFYVERNIVAGNELSLSTRGSLKNSHTLQAGKRIRIKANNLDNAAQGNIQSGGTTDIGTQHNLTNRGLIDGQQTKIQAGQMNNIGTGRIYGDNIAIAATRLDNQDENGTGAAIAARENLNLGIGQLNNRENSLIYSGNDMAVGGALDTNGQATGKAQRIHNAGATIEAAGKMRLGVEKLHNTNEHLKTQLVETGREHIVDHEAFGRHELLREGTQHELGWSVYNDESDHLRTPDGAAHENWHKYDYEKVTQKTQVTQTAPAKIISGNDLTIDGKEVFNTDSQIIAGGNLIVQTEKDGLHNEQTFGEKKVFSENGKLHSYWREKHKGRDSTGHSEQNYTLPEEITRNISLGSFAYESHRKALSHHAPSQGTELPQSNGISLPYTSNSFTPLPSSSLYIINPVNKGYLVETDPRFANYRQWLGSDYMLDSLKLDPNNLHKRLGDGYYEQRLINEQIAELTGHRRLDGYQNDEEQFKALMDNGATAARSMNLSVGIALSAEQVAQLTSDIVWLVQKEVKLPDGGTQTVLVPQVYVRVKNGDIDGKGALLSGSNTQINVSGSLKNSGTIAGRNALIINTDTLDNIGGRIHAQKSAVTATQDINNIGGMLSAEQTLLLNAGNNINSQSTTASSQNTQGSSTYLDRMAGIYITGKEKGVLAAQAGKDINIIAGQISNQSEQGQTRLQAGRDINLDTVQTSKHQATHFDADNHVIRGSTNEVGSSIQTKGDVTLLSGNNLNAKAAEVSSANGTLAVSAKNDINISAGINTTHVDDASKHTGRSGGGNKLVITDKAQSHHETAQSSTFEGKQVVLQAGNDANILGSNVISDNGTQIQAGNHVRIGTTQTQSQSETYHQTQKSGLMSAGIGFTIGSKTNTQENQSQSNEHTGSTVGSLKGDTTIVAGKHYEQIGSTVSSPEGNNTIYAQSIDIQAAHNKLNSNTTQTYEQKGLTVAFSSPVTDLAQQAIAVAQSSKQVGQSKNDRVNAMAAANAGWQAYQTGKSAQNLANGTTNAKQVSISITYGEQQNRQTTQVQANQAQASQIQAGGKTTLIATGAAEQSNINIAGSDVAGKAGTILIADNDITLQSAEQSNTERGQNKSAGWNAGAAVSFGQGGWSLGVTAGGNVGKGYGNGDSITHRHSHIGDKGSQTLIQSGGDTTIKGAQVRGKGVQVNAKNLSIQSVQDRETYQSKQQNASAQVTVGYGFSAGGDYSQSKIRADHVSVTEQSGIYAGEDGYQIKVGNHTDLKGGIITSTQSAEDKGKNRFQTATLTHSDIKNHSQYKGESFGLGASASISGKTLGQGAQNKPQNKHLTSVADKNSASSSVGYGSDSDSQSSITKSGINTRNIQITDEAAQIRLTGKTAAQTKADIDTNVTTDTAERHSGSLKNTFNKEAVQSELDLQRTVSQDFSKNVQQANTEINQHLDKLKADKEAAETAAAEALANGDMETAKRKAHEAQDAAAKADNWQQGKVILNMLASGLAAPTQSGAGIAAATASPAVSYAIGQHFKDLAGQNANGKLTASQETAHVLAHAVLGAAVAAVGDNNALAGALSAGGSEAAAPYISKWLYGKEKGSDLTAEEKETVTAITNVLGTATGAAVGNSATDAAQGSLNAQSAVENNDTVEQVKFALRHPRIAIAIGSVHKDPGSTLEPNISTIASTFQLNLFPNSEFGGEGGVGNAFRHVLWQATITREFGKDIAVKVGNSHESGEKINYSIRRNLSLDKADEMIDQLNNEIGREIALNTNRLNTKELVGLILETYKNNGFYQAERNSNGNYDVVRKRLSEKDYQNTSNILIHLDNTGAGFKIQQRRKQIRAQISARQWRR

SEQ ID NO: 15372 - protein, 400 aa, Neisseria meningitidis; identical to SEQ ID NO: 8056

SEQ ID NO: 15373 - protein, 306 aa, Neisseria meningitidis
MTKLYAEIAKMETQDDGTVKVWGYASSEAVDSDGEVIAAAAMKAAIPDYMKFGAEREMHGSNAAGTAIEINVEDDGRTFFVAHIVDPVAVTKVKTGVYKGFSIGGSVTAHDELNKSQITGLKLTEISLVERPANPDAVSTCFKADKGAETVNNDTEHNATYFSHFPSKQKSTGGSRCPFLYRFPYFFTAGSTGLAGPFGAGAPTEAWSFSFASTAGPMPFTLVKSSTDLNAPFCARYSAMAFAFAGPMPGSASNSCCEAALMFTAAREKAQENSIQNSTNIFFMVFPLRVANNKPHLATIKRVILK

SEQ ID NO: 15374 - protein, 859 aa, Neisseria meningitidis
MRYDKLTAKFQQALAEAQSLALAADGSYLEAGFVLKALLDDQNSGAAALLAHAGVNVPQVKQRLQQHLNSLPKVSGQGGDILPSRELQAVLNLMDKAATKRGDAYIASELFLLALVQQNDAAGKILKEAGATEQNINAAIDTVRGGQNVNDANAEDQRDALKKYTLDLTQRARDGKLDPVIGRDDEIRRAIQVLQRRTKNNPVLIGEPGVGKTAIVEGLAQRIVNGEVPESLRNKRLLVLDLAALIAGAKYRGEFEERLKGVLNDLAKDDGNTLIFIDEIHTLVGAGKTDGAMDAGNMLKPALARGELHCIGATTLDEYRQYIEKDAALERRFQKVLVGEPSVEDTIAILRGLQERYEIHHGIDITDPAIVAAAELSDRYITDRFLPDKAIDLIDEAASRVKMEKETKPEAMDKIDRRLIQLRMEKAHVEKEKDDASKKRLELIDEEINGLQKEYADLDEIWKAEKAISDGAANIKKQIDEVKIKIEQAKRQGDLALASKLMYEDLEHLEKQRAAAERADTDSTKPANKLLRNNVGAEEIAEVVSRMTGIPVSKMMEGERDKLLKMEEVLHRRVVGQDEAVRAVSDAIRRSRSGLADPNKPYGSFLFLGPTGVGKTELCKALAGFLFDSEDHLIRIDMSEYMEKHAVARLIGAPPGYVGYEEGGYLTEQVRRKPYSVILLDEVEKAHPDVFNILLQVLDDGRLTDGQGRTVDFKNTVIVMTSNIGSQHIQQMGIQDYEAVKEVVMEDVKEHFRPEMINRIDEVVVFHGLDQANIRSIAKIQLKGLEKRLEKQNLRLTVSDAALDIIAKAGFDPIYGARPLKRAIQSEIENPLAKALLAGNYAPESEIRVEADGDRLKFA

SEQ ID NO: 15375 - protein, 276 aa, Neisseria meningitidis
MAHYAIGDIQGCFDELTALLGKIGFNHGTDTLWLTGDIVNRGPKSLETLQFCIRHENSVQIVLGNHDLHLLAVGCGEGAPKRSDTIEPILKHPDGKKMLDWLRAQPLLIREGSRVMVHAGILPQWRIAKAESLAREAEAELRGKKYVKFFSKMYGNKPAAWDEGLEGYARLRFIVNAFTRMRALTFKNELDFDYKSTVKKMPPYLRPWFKAPDRQNLDRTIIFGHWSSLGYTNADNVISLDTGALWGGQLTAVNLETEEITQVQAAGGIDWKSFAK

SEQ ID NO: 15376 - protein, 162 aa, Neisseria meningitidis; identical to SEQ ID NO: 911

SEQ ID NO: 15377 - protein, 413 aa, Neisseria meningitidis
MPTKTPSLFGGAMIIAGTVIGAGMLANPTATSGVWFTGSLAVLLYTWFSMLSSGLMILEVNTHYPHGASFDTMVKDLLGRGWNIINGIAVAFVLYLLTYAYIFVGGDLTAKGLGSAAGGDVSLTVGQLVFFGILAFCVWASARLVDRFTSVLIGGMVLTFIWATGGLIADAKMPVLFDTQAPVGTNYWIYAATALPVCLASFGFHGNVSSLLKYFKGDAPKVAKSIWTGTLIALVIYVLWQTAIQGNLPRNAFAPVIAAEGQVSVLIETLSKFAQTGNMDKILTLFSYMAIATSFLGVTLGLFDYIADIFKWNDSVSGRTKTAALTFLPPLISCLLFPTGFVTAIGYVGLAATVWTGIIPAMLLYRSRKKFGAGKTYKVYGGLWLMVWVFLFGIVNIAAQVLSQMELVPVFKG

SEQ ID NO: 15378 - protein, 262 aa, Neisseria meningitidis; identical to SEQ ID NO: 3640

SEQ ID NO: 15379 - protein, 216 aa, Neisseria meningitidis; identical to SEQ ID NO: 10044

SEQ ID NO: 15380 - protein, 335 aa, Neisseria meningitidis
MSTFFRQTAQAMIAKHIDRFPLLKLDQVIDWQPIEQYLNRQKTRYLRDHRGRPAYPLLSMFKAVLLGQWHSLSDPELEHSLITRIDFNLFCRFDELSIPDYSTLCRYRNWLAQDDTLSELLELINCQLTEKGLKVEKASAAVIDATIIQTAGSKQRQAIEVDEEGQISGQTTPSKDSDARWTKKNGLYRLGYKQHTRTDAEGYIEKLHITPANAHECNHLLPLLEGLPKGTTVYADKGYDSAENRQHLKEHQLQDGIMRKACRNRPLSEVQTKRNRYLSKTRYVVEQSFGTMHRKFRYARAAYFGLSKVSAQSHLKAMCLNLLKAANRLSAPAAA

SEQ ID NO: 15381 - protein, 544 aa, Neisseria meningitidis; identical to SEQ ID NO: 3460

SEQ ID NO: 15382 - protein, 103 aa, Neisseria meningitidis; identical to SEQ ID NO: 1510

SEQ ID NO: 15383 - protein, 399 aa, Neisseria meningitidis
MPPAEVPSDGIVKNFIKNRIPIMSTPALLVLADGSVFHGTSIGYEGSTSGEVVFNTSMTGYQEILTDPSYCKQIVTLTYPHIGNTGTNAEDEESRSVYAAGLIIRDLPLLHSNFRASESLHDYLVRNKTVAIADIDTRRLTTLLREKGAQGGAILTGADATIEKAQELIAAFGSMVGKDLAKEVSCTETYEWTEGEWALGKGFVTPDEQPYHVVAYDFGVKTNILRMLASRGCRLTVVPAQTSAQDVLALNPDGVFLSNGPGDPEPCTYAIEAVQKLMASGKPIFGICLGHQLISLAIGAKTLKMRFSHHGANHPVQDLDSGKVVITSQNHGFAVDADTLPANARITHKSLFDNTLQGIELTDKPVFCFQGHPEASPGPQDVGYLFDKFIGNMKAAKRA

SEQ ID NO: 15384 - protein, 320 aa, Neisseria meningitidis; identical to SEQ ID NO: 6633

SEQ ID NO: 15385 - protein, 284 aa, Neisseria meningitidis
VGQSGELFCFGQMPVWKAENLPEVLLSGYSSEGGEWVCLNVLQGDVEVRTQDGAAEVWSAESGDCVFAPQQVFSVKPKTDDAEIRLSMYCVAEDYFHKKYGMSATHSAVAAAQDIVPAGRALDMGCGQGRNALFLGLKGFEVTAVDHNPAALANVAELAEAEGLNVRTLEYDLNAAALQGEFDYIVATVVLMFLMPQRVPDVIADMQAHTAAGGYNLIVSAMDTADFPCPMPFPFKFKEGELKDYYRDWELVEYKEELGAMHAKDENGNPIRFKFVTMLAKRPE

SEQ ID NO: 15386 - protein, 271 aa, Neisseria meningitidis; identical to SEQ ID NO: 1333

SEQ ID NO: 15387 - protein, 154 aa, Neisseria meningitidis; identical to SEQ ID NO: 741

SEQ ID NO: 15388 - protein, 757 aa, Neisseria meningitidis; identical to SEQ ID NO: 11770

SEQ ID NO: 15389 - protein, 556 aa, Neisseria meningitidis
MEKIWLDSYEKGVSAEIDITQYNSVSDVFRQSVEKFADQPAFQNMGKTLTYAETGKLATDFASYLQNVLKLPRGERVAIMMPNVLQYPIALFGILQAGLVAVNTNPLYTPRELEHQLKDSGATAIIVLENFANTLDLVLPRTQIKHVIVASVGEMFGLLKGSLINFIIRKIKKMVPEYRIRETVSFQTALKEGAKHVFQPVALNREDTALLQYTGGTTGVAKGAVLSHGNICANMLQAKEWIKNQLREGKETVIAALPLYHIFALTVNLMIFANAGSKIILITNPRDMKGFIGELKKQRVNVFIGVNTLFNAMVNRPDFAEVDFSELRLTLGGGMATQKAVAEKWKKITGTPIVEAYGLTEASPGVCCNPLNIESYSGSIGLPVSSTEVELRDANGKEVPVGQPGELWVKGPQVMQGYWNRPEETAKAIDARGFLETGDIAVMDEKGWLKLVDRKKDLVVVSGFNVYPNEIEEVIAHHGKVMEVACIGVPDEKTGEALKVFVVKKDPSLTKEELIAFCRTELTAYKVPKNIEFREELPKSNVGKILRRELRQSTGK

SEQ ID NO: 15390 - protein, 389 aa, Neisseria meningitidis
MTAHKILPVLLSIILGVSHATAASPAPNKPAVHAAPTFQTPETLTAAHIVIDLQSKQILSAKNINTPVEPAALTQLMTAYLVFKNMKSGNIRSEENLKIPESAWASEGSRMFVRPGDTVSTDKLLKGMIALSANDAALTLAGRLGNGSIENFVQQMNKEARRLGMKNTVFKNPTGLSREGQVSTAKDLAQLSEALMRDFPEYYPLFSIKSFKFKNIEQNNRNILLYRDNNVNGLKAGHTESGGYNLAVSYSGNGRHILVITLGSESAETRASDNSKLLNWALQAFDTPKIYPKGKTVAQIQISGGSKKTVRAGFLKEAYITLPHKEAKMAEQILETIQPIPAPVKKGQILGKIKIRQNGYTIAEKEIVALENVKKRSRWQRLWACLTGQ

SEQ ID NO: 15391 - protein, 160 aa, Neisseria meningitidis; identical to SEQ ID NO: 236

SEQ ID NO: 15392 - protein, 473 aa, Neisseria meningitidis
MDTKEILGYAAGSIGSAVLAVIILPLLSWYFPADDIGRIVLMQTAAGLTVSVLCLGLDQAYVREYYAAADKDTLFKTLFLPPLLSAAAIAALLLSRPSLPSEILFSLDDAAAGIGLVLFELSFLPIRFLLLVLRMEGRALAFSSAQLVPKLAILLLLPLTVGLLHFPANTAVLTAVYALANLAAAAFLLFQNRCRLKAVRHAPFSPAVLHRGLRYGIPIALSSIAYWGLASADRLFLKKYAGLEQLGVYSMGISFGGAALLFQSIFSTVWTPYIFRAIEANAPPARLSATAESAAALLASALCLTGIFSPLASLLLPENYAAVRFIVVSCMLPPLFCTLVEISGIGLNVVRKTRPIALATLGALAANLLLLGLAVPSGGARGAAVACAASFWLFFAFKTESSCRLWQPLKRLPLYLHTLFCLTSSAAYTCFGTPANYPLFAGVWAAYLAGCILRHRKDLHKLFHYLKKQGFPL

SEQ ID NO: 15393 - protein, 190 aa, Neisseria meningitidis; identical to SEQ ID NO: 2428

SEQ ID NO: 15394 - protein, 305 aa, Neisseria meningitidis
MSVYTSVSDDEMRGFLSGYDLGEFVSLQGIAQGITNSNYFLTTTSGRYVLTVFEVLKQEELPFFLELNRHLSMKGVAVAAPVARKDGRLDSVLAGKPACLVACLKGSDTALPTAEQCFHTGAMLAKMHLAAADFPLEMENPRYNAWWTEACARLLPVLSQDDAALLCSEIDALKDNLGNHLPSGIIHADLFKDNVLLDGGQVSGFIDFYYACRGNFMYDLAIAVNDWARTADNKLDEALKKVFIGGYEGVRPLSAEEKAYFPTAQRAGCIRFWVSRLLDFHFPQAGEMTFIKDPNAFRNLLLSLD

SEQ ID NO: 15395 - protein, 887 aa, Neisseria meningitidis
VSISAPYANENSRILLSTTDISSENGKIKIQSYGDQYYYARQSELYTFERRSYKTGKWYNRKHITEVKEHKNAKPDAVTLSASQGIDIKSGGSIDAYATAFDAPKGSINIEAGRKLTLYAVEELNYDKLDSQKRRRFLGISYSKAHDTTTQVMKTALPSRVVAESANLQSGWDTKLQGTQFETTLGGATIRAGVGEQARADAKIILEGIKTTIHNETVSSSKSALWQKQAGRGSNIETLQLPSFTGPVAPVLSAPGGYIVDIPKGNLKTEIEKLAKQPEYAYLKQLQTAKNVDWKQVQLAYDKWDYKQEGLTGAGAAIVVIIVTALTYGYGAAAAGSVTAAGSSTAAAATTTAAATTTVSTAAAMQTAALASLYSQAAVAIINNKGDVGKALKDLGTSDTVKQIVTSALTAGALNQMGADIAQLNSKVRTELFSSTGNQTIANLGGRLATNLSNAGISAGINTAVNGGSLKDNLGNAALGALVNSFQGEAASKIKTTFSDDYVAKQFAHALAGCVSGLVQGKCKDGAIGAAVGEIVAESILGGRNPATLSDAEKHKVISYSKIIAGSVAALNGGDVNTAANAAEVAVVNNALNFDSTPTNAKKHQPQKPDKTALEKIIQSIMPAHAAGAMTNPQDKDAAIWISNIRNGITGPIVITSYGVYAAGWTAPLIGTAGKAAISTCMANPSGCTVMVTQAAEAGAGIVTGAVTVGNAWEAPVGALSKAKAAKQAAPKETINNLANLAKAEQQILFRIAQRDTQLDAWKTGFNNRVRKGAGLLDASNIPITINGKTIKPVQAISLKGAPVYSGVSEQEIFALYRQMTGQNPNFRVLPDGRLANGIISTGEWAGTKIALRNFSKTENSTQARWTLDLQNPPSFIKGTKLELKFQ

SEQ ID NO: 15396 - protein, 443 aa, Neisseria meningitidis
MSGWHTLLQDASYKGVGFDIEVVDESNGKALAEHARPFVQGIDLEDMGTTGRQVQINAVFWGKGYAGRLKKLLDALEQPGGGVLVHPVWGRMHNMIAASWSYRHEADYVDYAGIDITFREAAEAQEIFVFENAFLVELEALIADIDTYREAAIGFVDAVLAVDAGVSALWGSALGIWSAASGTFGAVRRLFDLDKIAFPDRGGYSAAAFKNGSAKLFADISVMVDTGIRREAGLADNAMHHAGWSPRQRFDGAAAVADRAAAIPDNLLTGRFSDGLQNRLNRLTAKQVQPVAQAVRLLSTSSLLSVATALIEAHGEEMTAPDLIEVNRAMRRRMQAEIAALRAVQTAAAESGGLTANAVYTEAYQTAESLRAAAGRLNALVAAVINQKPPLIVRQAPIDGTIHQIAHEFYGDIARAAELVRLNPHIHHPAFIKRGTLVNSYAK

SEQ ID NO: 15397 - protein, 671 aa, Neisseria meningitidis
MMKLNPQQLEAVRYLGGPLLVLAGAGSGKTGVITQKIKHLIVNVGYLPHTVAAITFTNKAAAEMQERVAKMLPKSQTRGLTICTFHSLGMKILREEANHIGYKKNFSILDSTDSAKIIGELLGGTGKEAVFKAQHQISLWKNDLKTPEDVVQTASNIWEQQTARVYASYQETLQSYQAVDFDDLIRLPAVLLQQNSEVRNKWQRRLRYLLVDECQDTNTCQFTLMKLLTGAEGMFTAVGDDDQSIYAWRGANMENLRKMQENYPQMKVIKLEQNYRSTARILKIANKVIENNPKLFTKKLWSKLGEGEPVKVVACQNEQHEADWVVSQIVKQKLIGGDKTQYADFAVLYRGKHQARIFEEALRGARIPYRLSGGQSFFDKAEIKDVLSYVRLLANPNDDPAFLRAVTTPKRGIGDVTLGKLNTYAHEHECSLYEAAQNEEALATLNNTNRQHLQAFMDMFGSYRAKAETGEAGEFINSLLEEIDYENHLLASEEGKAGEIKWRNVGDLVSWFARKGGEDGKNIIELAQTVALMTLLEGKDEEETDAVSLSTLHAAKGLEYPYVFLVGCEEGVLPHNDSIEEGNVEEERRLMYVGITRAKRQLTLTHCVKRKKQGTWQFPEPSRFIDEMPQEDLKILGRKGGEPIVSKEEGRRNLADIIGRLDSMKKGGPED

SEQ ID NO: 15398 - protein, 241 aa, Neisseria meningitidis
MSIIVENLTVSYRRRPAVHHVDITFEEHSMWAVFGPNGAGKSTFLKSLMGLQPIDTGSIRLDGLTRQNIAYLPQQSDIDRSQPMTVFDLAAMGLWYEIGFFRGINAVQKQRVHESLERVGMRQFAGRQIAHLSNGQFQRVLFARMLVQNAKFLLLDEPFNAVDARTTYELLDVLQKCHCGGHAIIAVLHDYEQVRAYFPSTLLLAREKIAAGATETILTEPYLAQANAKMQQQESPDWCAS

SEQ ID NO: 15399 - protein, 232 aa, Neisseria meningitidis
MKSRHLALGVAALFALAACDSKVQTSVPADSAPAASAAAAPAGLVEGQNYTVLANPIPQQQAGKVEVLEFFGYFCPHCAHLEPVLSKHAKSFKDDMYLRTEHVVWQKEMLTLARLAAAVDMAAADSKDVANSHIFDAMVNQKIKLQEPEVLKKWLGEQTAFDGKKVLAAYESPESQARADKMQELTETFQIDGTPTVIVGGKYKVEFADWESGMNTIDLLADKVREEQKAAQ

SEQ ID NO: 15400 - protein, 241 aa, Neisseria meningitidis
MSEGMVSPVLYLIPTPLGTPDTPCLLPHDQRAVVGLTDFVVEAEKTARAHLKHLGVTMPIRELNLQTLNEHTDLKTLPELLKPLQEGRSMGIVSEAGCPAVADPGANLVALAHKHGFEVRPLVGPSSLLLALMASGANGQNFAFKGYLPSEKNERIQSLKALEQRSRQQNETQLFIETPYRNDVLLADAVENLHPETRLCTATDLTLPTQSVVSKTVADWRRMKEMPNLKKRPTIFVMYAG

SEQ ID NO: 15401 - protein, 147 aa, Neisseria meningitidis; identical to SEQ ID NO: 1095

SEQ ID NO: 15402 - protein, 398 aa, Neisseria meningitidis; identical to SEQ ID NO: 6776

SEQ ID NO: 15403 - protein, 230 aa, Neisseria meningitidis
MTAFVHTLSDGMELTVEIKRRAKKNLIIRPAGTHTVRISVPPCFSVSALNRWLYENEAVLRQTLAKTPPPQTAENRLPESILFHGRQLAPTAHQDTQILLMPSEIRVPEGAPEKQLALLRDFLERQAHSYLIPRLERHARTTQLFPASSSLTSAKTFWGVCRKTTGIRLNWRLVGAPEYVADYVCIHELCHLAHADHSRAFWALTRRFAPYTPEAKQWLKIHGRELFALG

SEQ ID NO: 15404 - protein, 275 aa, Neisseria meningitidis
MPELPEVETTLRGIAPHIEGKTVEAVVLRQLKLRWQINPDLGEILSGRQVLSCGRRAKYLLIRFQTGVLLIHLGMSGSLRIFTPSDGRIGRPDRHDHVDIVFSDGTVMRYRDPRKFGAILWYEGIEEHHPLLEKLGPEPLSEAFCTDYLYVRLKAQKRAVKLALMDNAVVVGVGNIYANESLFRAGISPHRPANRLKKKECALLVETVKAVLQRAIETGGSTLRDFVDSDGKSGYFQQEYTVYGRHNQPCPRCGGLVVKETLGQRGTFYCPNCQK

SEQ ID NO: 15405 - protein, 96 aa, Neisseria meningitidis; identical to SEQ ID NO: 3537

SEQ ID NO: 15406 - protein, 393 aa, Neisseria meningitidis; identical to SEQ ID NO: 5005

SEQ ID NO: 15407 - protein, 65 aa, Neisseria meningitidis; identical to SEQ ID NO: 6901

SEQ ID NO: 15408 - protein, 389 aa, Neisseria meningitidis; identical to SEQ ID NO: 3300

SEQ ID NO: 15409 - protein, 82 aa, Neisseria meningitidis; identical to SEQ ID NO: 2740

SEQ ID NO: 15410 - protein, 261 aa, Neisseria meningitidis
MNPFLNTAFKAARRAGQMMIRAAGNLDAVKTDSKAFNDFVSDVDRNSEIILVEALKEAYPHHKITCEESGSHGKAAAEYEWIIDPLDGTTNFLHGHPQYAISMALLHKGVLQEALVYAPERNDVYMASRGKGALLNDRRIRVSNRIELNRCLIGTGFPVVDQSMMDKYLAILKDFLAKTAGGRREGAASLDLCAVATGRFDGFFEFNLKPWDIAAGALIVQEAGGIVTDMSGEDGWLESGDIVAANPKVLAQMLKIISAHV

SEQ ID NO: 15411 - protein, 462 aa, Neisseria meningitidis; identical to SEQ ID NO: 8923

SEQ ID NO: 15412 - protein, 225 aa, Neisseria meningitidis
MQADFNRPVLAIDTGTSYLSLALRADGETHLFHQEAGSRQSELILPEIRTLFHDAGITAADLGAIVYAKGPGAFTGLRIGIGVAQGLATPFDTPLIGIPTLDAAASLPPPQSCILAAADARMGEVFYAWFDTLNRRRLSGYQVGRAADIRLPEGCAFSDGIGNAFALENRPPFSGKPDMPTAADFLNLAEEGGFPAVAAAHAELLYVRNKIALTAKEQAERRALL

SEQ ID NO: 15413 - protein, 168 aa, Neisseria meningitidis
VIHHELSRMSLQSVHFFVLSRDDLGCLCFDVEIIGRILPILQGIFMNNSSFFGNRLKEERKKLKMTQAEIAEKCGVSGRMWGDYERGISQPKAELFFQFEKVGIDVQYVMHGRRGETAVMPSETLNAEEQELLVLFREAAAADREMILMVARRAEKKAQTALGKVSNG

SEQ ID NO: 15414 - protein, 135 aa, Neisseria meningitidis; identical to SEQ ID NO: 9106

SEQ ID NO: 15415 - protein, 231 aa, Neisseria meningitidis; identical to SEQ ID NO: 3708

SEQ ID NO: 15416 - protein, 134 aa, Neisseria meningitidis
MTAQPCPICTAQDEDILLQTPKLRVIAVHNDSGSPAFCRVIWRKHIAEMTDLSAAERGELMEMVYKVEAAMRQVFQPAKINLASLGNVVPHLHWHIIARFENDASFPAPIWANPIRKHGMTLPQDWTEQLKKLL

SEQ ID NO: 15417 - protein, 311 aa, Neisseria meningitidis
MDIVFAADDNYAAYLCVAAKSVEAAHPDTEIRFHVLDAGISEANRAAVAANLRGGGGNIRFIDVNPEDFAGFPLNIRHISITTYARLKLGEYIADCDKVLYLDIDVLVRDSLTPLWDTDLGDNWLGACIDLFVERQEGYKQKIGMADGEYYFNAGVLLINLKKWRRHDIFKMSCEWVEQYKDVMQYQDQDILNGLFKGGVCYANSRFNFMPTNYAFMANRFASRHTDPLYRDRTNTVMPVAVSHYCGPAKPWHRDCTAWGAERFTELAGSLTTVPEEWRGKLAVPHRMFSTKRMLQRWRRKLSARFLRKIY

SEQ ID NO: 15418 - protein, 188 aa, Neisseria meningitidis
MLVHPEAMSVGALADKIRKIENWPQKGILFHDITPVLQSAEYFRLLVDLLVYRYMDQKIDIVAGLDARGFIIGAALAYQLNVGFVPIRKKGKLPFETVSQSYALEYGEAAVEIHTDAVKLGSRVLLVDDLVATGGTMLAGLELIRKLGGEIVEAAAILEFTDLQGGKNIRASGAPLFTLLQNEGCMKG

SEQ ID NO: 15419 - protein, 119 aa, Neisseria meningitidis
LSDRAYPEKFYIYGENQERNTNHLFGDNGIIDGTDRLNKMGYFPENIPVWLADHPRACVDYLYTAVLQTGSIGRVILDDWFPSDEDKQSVYDLLNQIEPHLNTQEWENLQLWKRKNPIM

SEQ ID NO: 15420 - protein, 124 aa, Neisseria meningitidis; identical to SEQ ID NO: 2472

SEQ ID NO: 15421 - protein, 146 aa, Neisseria meningitidis; identical to SEQ ID NO: 5620

SEQ ID NO: 15422 - protein, 433 aa, Neisseria meningitidis
MPSETARPLYADTCAAHTLVWFRQNLRIRDNAALCAAVAEGLPVIGIWIDDAETDNPRRAAFYRQSAAELAQGLAGRGIPLYTAASPAELVRLAVRLNIRAVIADESHTFADKLADNALWHELNKHGIALTFVNDRAVFGKTDLIPDGGTAHTDFDRYREVWLDRFSKQPPAGPDLFAAYRQPFPENLSAPPPAALSDGIFLPQNSGETAAWRQWRRFLEQADSYSVLKDFPSRKHTSLMGAYLSAGCISPRLLARESLERRLNAWADNIIRRDFFLQLALQHADDDPSDGNPEHTLRLTLWQQGRTGIPIIDAAMRCLHKTGSLHPALRRLSADFFCHVLNLPRREGEIWFARQLTDFDAAINQGNWRLAASRHTCPDIAAAAHKTDPDGTFVRRHIPELAHLSADTVHTPWRFACSVDTHGYPAYPVAGIP

SEQ ID NO: 15423 - protein, 336 aa, Neisseria meningitidis
MSDTPATRDFGLIDGRAVTGYVLSNRRGTRVCVLDLGGIVQEFSVLADGVRENLVVSFDDAASYADNPFQINKQIGRVAGRIRGAAFDINGRTYRVEANEGRNALHGGSHGLAVTRFNAVAADGRSVVLRSRLQQSADGYPNDLDLDISYRLDEDDRLTVSYRATALGDTVFDPTLHIYWRLDAGLHDAVLHIPQGGHIPADAEKLPVSTVSDGLEVFDFSRPKPLDAAVAALRRETGRAGFDDAYRVPSDIGRPAAVLQAGRRRRISIYSDRNGLVIFTAAPQDFARHDAGVYDALATEAQTLPDSLHWPEFGNIRLNKGDTREATIAYGIESLS

SEQ ID NO: 15424 - protein, 160 aa, Neisseria meningitidis; identical to SEQ ID NO: 182

SEQ ID NO: 15425 - protein, 351 aa, Neisseria meningitidis
MITLAVDAMGGDQGLAVTVPGATAFLQAHPDVRLIMTGDETQLRQALTAAGAPMERIDICHTTQVVGMDESPQSALKNKKDSSMRVAINQVKEGKAQAAVSAGNTGALMATARFVLKTIPGIERPAIAKFLPSDTDHVTLALDLGANVDCTPEQLAQFAVIGSELVHALHPQKGQPRVGLVNVGTEDIKGTDTVKQTYKLLQNSKLNFIGNIESNGILYGEADVVVADGFVGNVMLKTIEGAVKFMSGAIRREFQSNLFNKLAAVAALPALKGLKNKLDPRKFNGAILLGLRGIVIKSHGGTDETGFRYALEEAYHEAKSAGLSKIEQGVAEQLAALETAKAVQNENVGGL

SEQ ID NO: 15426 - protein, 582 aa, Neisseria meningitidis
MIHYKITPSPLDHEWHILLTFTQDDDLPIEISLPNWVPGSYLIRDFSRHITSIHASCNGTSMPLEQIAKNRWHAAAVRGEWQIRYTVYAFDLSVRGSFLTTERGFFDGSCLFLKVEGTETLPHRLELTGIPSEWRIATTLPETGRFVFQAASYAELIDRPVEMGLIEFLDFEAAGIPHTIALSGIYPDFDRNRLVSDIKKICETELAVFSSPAPFQKYLFLLHVGDHIYGGLEHTDSTALLADRHSLPPYGMTDADDTYTTLLGLFSHEYFHAWNVKSIKPAAFVPYDLDKENYTEQLWAFEGITSYYDDLFLARSRTISPESYLNLLAQGITRVQQTRGRLRQTLAESSFTAWNKFYKPDENSPNAIVSYYQKGALAALCLDLIIRNRSNGRHSLDTVMDKLYREWRDTHSGIPEKHWQIRCQEITGLDLEDFFQKALYSTEDLPLAECLATAGVGLTFLPLPRQHGGGYAEHICPVPSAGDFGARFKQNTDHIVLTHVFNGGSAESAALCPQDKIIALDGYACTDFAAQWARYHVNAKINIHFFRAGILRQTVLTVQAAAADTAILHITDRNLLDNWLFG

SEQ ID NO: 15427 - protein, 305 aa, Neisseria meningitidis
MVLDGFAAHFDAYLENIVREGKSEHTVAAYRRDLEELFALLAQMPSEAEGGVPQGLSQRDFTAALRRLSQRGLNARTLARKLSSWRQYCVWLVERGLMRADPTADIKPPKQPERVPKALPQEWLNRMLDLPVDGGDPLAVRDHALFELMYGSGLRVSEIHGLNADDVYLDEAWVHVTGKGRKQRQVPLTGKSVEALKNYLPLRQTASDGKALFTGRNGTRLSQRQIQKRLAQWAAQNGDGRHVSPHMMRHSYAGHLLQASRDIRAVQELLGHSSLSTTQIYTKLDFDHIARLYDEAHPRAKRQDE

SEQ ID NO: 15428 - protein, 436 aa, Neisseria meningitidis
MNTPHPRPKIAVIGAGWAGLSAAVTLTRHADVTLFEAGRQAGGRARTLAGNTDGFGFLDNGQHILLGAYRGVLRLMKTIGSDPRAAFLRVPLHWHMHGGLQFRALPLPAPLHILGGVLLARRVPSAFKAKLLADMSDLQKSARLGQPDTTVAQWLKQRNVPRAAVMQFWQPLVWGALNTPLETASLRVLCNVLSDGVLTKKSGSDYLLPKQDLGAIVAEPALAELQRLGADIRLETRVCRLNTIPDGKVLVNGEAFDAAVPATAPYHAAALLPEGTPEHVQTAYQNLRYHAITTVYLRYAEPVRLPAPLTGLADGTAQWLLCRGRLGLPENEVSAVISVSDRVGAFTNRAWADKVHADLKRILPHLGEPEAVRVITEKRATTAADAPPPDLSWLHRHRIFPAGDYLHPDYPATLEAAVQSGFAAAETCLQSLSDAV

SEQ ID NO: 15429 - protein, 147 aa, Neisseria meningitidis
MPFRLFLGILCGLSMVAPVYAQGQPDAVNAYIQKKKVIVDTSKAELCFADDRQCHPVLIGVATPKGTFGLTLNSTDKPGYGGEVIGFKQEGDFLFALHRVWNQIPSERRNERIASPSVSDRIMTNGCINVSDAVYEKLRHYFVLEVI

SEQ ID NO: 15430 - protein, 215 aa, Neisseria meningitidis; identical to SEQ ID NO: 8650

SEQ ID NO: 15431 - protein, 379 aa, Neisseria meningitidis
MSRLWFFAAKNIIIRLIYLLPKETQMALVSMRQLLDHAAENSYGLPAFNVNNLEQMRAIMEAADQVNAPVIVQASAGARKYAGAPFLRHLILAAVEEFPHIPVVMHQDHGASPDVCQRSIQLGFSSVMMDGSLMEDGKTPSSYEYNVNATRTVVNFSHACGVSVEGEIGVLGNLETGEAGEEDGVGAVGKLSHDQMLTSVEDAVRFVKDTGVDALAIAVGTSHGAYKFTRPPTGDVLRIDRIKEIHQALPNTHIVMHGSSSVPQEWLKVINEYGGNIGETYGVPVEEIVEGIKHGVRKVNIDTDLRLASTGAVRRYLAENPSDFDPRKYLSKTIEAMKQICLDRYLAFGCEGQAGKIKPVSLEKMANRYAKGELNQIVK

SEQ ID NO: 15432 - protein, 1067 aa, Neisseria meningitidis; identical to SEQ ID NO: 495

SEQ ID NO: 15433 - protein, 240 aa, Neisseria meningitidis; identical to SEQ ID NO: 5944

SEQ ID NO: 15434 - protein, 484 aa, Neisseria meningitidis; identical to SEQ ID NO: 2793

SEQ ID NO: 15435 - protein, 94 aa, Neisseria meningitidis; identical to SEQ ID NO: 6698

SEQ ID NO: 15436 - protein, 208 aa, Neisseria meningitidis
VNPFSEDGKMSELDNILAHNRQFVESGEYEKYFTDKYPERGLAVLSCMDARIIGLLPDALGLKNGDAKLIKNAGALVTHPWGSVMRSLLVAVFELKVREIMVIAHHDCGMQGLNAEEFLGRVRESRIPEDRIETLRYAGVDLDGWLTGFDNVEDSVRHTVELIRRHPLMPRHIAVHGLVIHPVTGKLTLVVDGSVSDGMDLSEGMETS

SEQ ID NO: 15437 - protein, 259 aa, Neisseria meningitidis
MAASPEAKFTEEKILWVKHHTPKLITFAISRPESYRFKAGQFSRLGFYEGEGFIWRAYSIVSAEYADTLEYFAVLIQDGPMSARFAKMQQGNTILLDKNATGFLLPERFPDGKDLVMLCTGSGIAPFLSILEQPEIRQRFDTVNLIHSVSFPEELIFNDRLAALTEHPLVGEYGHSFRFVPVTTRAANPSGLSGKRIPELLKNSSIEQALHTKFTPESTRFMICGNPEMVKDTFQTLLDMGYAMHRNRIPGQIMMENGF

SEQ ID NO: 15438 - protein, 122 aa, Neisseria meningitidis
  misc_feature 2, 3, 4, 116, 117: 'Xaa' is any amino acid
VXXXTALQTAARRVESYHQRQKMESWSYTDEDGTLLGQQDYWRVTETLKSALKRFESGCYLIWYPCLSREESRKLPEELKKLVPDNYLHAELHVHAPKADGFGMHGSGMFVINPPXXTHLIN

SEQ ID NO: 15439 - protein, 96 aa, Neisseria meningitidis; identical to SEQ ID NO: 4744

SEQ ID NO: 15440 - protein, 325 aa, Neisseria meningitidis
MIYPWHNEQWRQIAEHWERRPNAWLFAGKKDTGKTTFARFAAKALLCETPAPGCKPCGECMSCHLFGQGSHPDFYEITPLSDESENGRKLLQIKIDAVRKIIDNVYLTSVRGGLRVVLIHPAESMNVQAANSLLKVLEEPPPQVVFLLVSHAADKVLPTIKSRCRKMVLPAPSHEEALAYLRDRGVAEPEEFLAFHSGAPLFDEADGVRALRIKLLDILAEPRLLKILDYAALFDKEKLPLDVFVGWMQKWLVDLGLCLQHMKPVYYPAYEDRLLQTVSGFRPRNVFAAEDMLKQLAPYGFHTLNVKMQIEHLLINYLELKKENG

SEQ ID NO: 15441 - protein, 177 aa, Neisseria meningitidis
MFPPDKTLFLCLSALLLTSCGTTSGKHRQPKPKQTVRQIQAVRISHIDRTQGSQELILHSLGLIGTPYKWGGSSTATGFDCSGMIQFVYKNALNVKLPRTARDMAAASRKIPDSRLKAGDLVFFNTGGAHRYSHVGLYIGNGEFIHAPSSGKTIKTEKLSTPFYAKNYLGAHTFFTE

SEQ ID NO: 15442 - protein, 157 aa, Neisseria meningitidis; identical to SEQ ID NO: 15356

SEQ ID NO: 15443 - protein, 642 aa, Neisseria meningitidis
LIECKNINRYFGSGENRVHILKDISLSIEKGDFVAIIGQSGSGKSTLMNILGCLDTAGSGSYRIDGIETAKMQPDELAALRRERFGFIFQRYNLLSSLTARDNVALPAVYMGAGGKERSARAEKLLQDLGLASKEGNKPGELSGGQQQRVSIARALMNGGEIIFADEPTGALDTASGKNVMEIIHKLHEAGHTVIMVTHDPGIAANANRVIEIRDGEIISDTSKNPEIPASNVGRIREKASWSFYYDQFVEAFRMSVQAVLAHKMRSLLTMLGIIIGIASVVSVVALGNGSQKKILEDISSIGTNTISIFPGRGFGDRRSGRIKTLTIDDAKIIAKQSYVASATPMTSSGGTLTYRNTDLTASLYGVGEQYFDVRGLKLETGRLFDENDVKEDAQVVVIDQNVKDKLFADSDPLGKTILFRKRPLTVIGVMKKDENAFGNSDVLMLWSPYTTVMHQITGESHTNSITVKIKDNANTQVAEKGLTDLLKARHGTEDFFMNNSDSIRQIVESTTGTMKLLISSIALISLVVGGIGVMNIMLVSVTERTKEIGIRMAIGARRGNILQQFLIEAVLICVIGGLVGVGLSAAVSLVFNHFVTDFPMDISAASVIGAVACSTGIGIAFGFMPANKAAKLNPIDALAQD

SEQ ID NO: 15444 - protein, 416 aa, Neisseria meningitidis
MTKLTRRQIIRRTAGTLFALSPIASAVAKTVRAPQFTAARIWPSHTYTRLTLESTTALKYQHFTLDNPGRLVVDIQNANINTVLHGLSQKVMADDPFIRSIRAGQNTPTTVRLVIDLKQPSYAQVFSLPPVGGFKNRLVVDLYPQGMDPDDPMMALLNGSLNKTRRGSPEADLAQNTPAQTERGKNGRRPVIMIDPGHGGEDPGAVSPGGLQEKHVVLSIARETKKQLEALGYNVFMTRNEDVFIPLGVRVAKGRARRADVFVSIHADAFTSPSARGTGVYMLNTKGATSSAAKFLEQTQNNADAVGGVPTSGNRNVDTALLDMTQTATLRDSRKLGKLVLEELGRLNHLHKGRVDEANFAVLRAPDMPSILVETAFLSNPAEEKLLGSESFRRQCAQSIASGVQRYINTSVLKRG

SEQ ID NO: 15445 - protein, 272 aa, Neisseria meningitidis
MKKTVFTCAMIALTGTAAAAQELQTANEFTVHTDLSSISSTRAFLKEKHKAAKHISVRADIPFDANQGIRLEAGFGRSKKNIINLETDENKLGKTKNVKLPTGVPENRIDLYTGYTYTQTLSDSLNFRVGAGLGFESSKDSIKTTKHTLHSSRQSWLAKVHADLLSQLGNGWYINPWSEVKFDLNSRYKLNTGVTNLKKDINQKTNGWGFGLGANIGKKLGESASIEAGPFYKQRTYKESGEFSVTTKSGDVSLTIPKTSIREYGLRVGIKF

SEQ ID NO: 15446 - protein, 129 aa, Neisseria meningitidis; identical to SEQ ID NO: 14100

SEQ ID NO: 15447 - protein, 658 aa, Neisseria meningitidis
MSKLKTIALTASGLSVCPGFLYAQNTSSHQIGLAIMRLNSSILDLPPTKQYFQSGSLWSELRQGFRMGEVNPELVRRHESKFIASHSYFNRVINRSRPYMYHIANEVKKRNMPAEAALLPFIESAFVTKAKSHVGASGLWQFMPATGRHYGLEKTPVYDGRHDVYAATDAALNYLQYLYGLFGDWPLAFAAYNWGEGNVGRAINRARAQGLEPTYENLRMPNETRNYVPKLLAVRNIIATPQSFGMNISDIDNKPYFQAVEPDRPLDNEAIARLAGITQSELLALNPAFNVPAFIPKSKRKLLLPVASVQTFQSNYLNAAPDSLFSWEVYTPAAKTSLSDISTATGMSIADIKRLNNLNGNLVNAGRSILVAKNGKTLQTASESVVSIDIDNTPDTYRSNMPAGTVNVGIARIRPAAAQTADITVAPLPQKTVRTEPDPLVRIAEPALATAAAQPQTEKQTAMPSETQTATLAQIIPQNDMQAADELMQLVARNNLRRQAEETISAVIGTPDTVAEHKISASPQHTAAADGKRRIRLETRIAKAADGEAEISPLHASIHRVVEGDTLFNIAKRYNVSVADLIVANNIKGNTIQKGQVLRLAQAAPAQTRIEKVSYTARKGDTFKSIAARFNIHIDDIRRLNPNLNTINPGQRVKLIGS

SEQ ID NO: 15448 - protein, 248 aa, Neisseria meningitidis
MNVLISNDDGYLSEGIAVLARVTAEFANVRVVAPERDRSGVSNSLTLERPLQLKQAQNGFYYVNGTPTDCIHIGQSVFSDFQADFVFSGINRGANMGDDTLYSGTVAAATEAYLMGIPAVAFSLNDASGRYWATAEKALWTLLAHFFKTPPQSPILWNINIPAVEPEDVRGIKIARLGRRHHGQNVIPARNPRGEQIYWIGPVGEVSDREEGTDFGECGAGFITVTPLQIDLTAYPDMAETAAFWHAD

SEQ ID NO: 15449 - protein, 64 aa, Neisseria meningitidis
LESHDLAEGYTYFFNENTDDCYVLKQDFINNERYEKTELYPQKDKVILFPKFGEYDLVLNPDII

SEQ ID NO: 15450 - protein, 100 aa, Neisseria meningitidis; identical to SEQ ID NO: 10276

SEQ ID NO: 15451 - protein, 105 aa, Neisseria meningitidis
MQKRIEEIQSKYREWCHLLPQLEEDIRRWKHAVALIRDMDNFYTHEYQACHRAIEDGAEVDLRTEGEYSIMSEDALWNALGEFHQLAWLYLRSSVDALDKYTQED

SEQ ID NO: 15452 - protein, 351 aa, Neisseria meningitidis
MKTYAPALYTAALLTACSPAADSNHPSGQNAPANTESDGKNITLLNASYDLARDFYKEYNPLFIKTYQSEHPGTSVSIQQSHGGSSKQALSVANGLQADVVTMNQSSDIDLLEKKGLVEKGWQQALPDHAAPYTSTMVFLVRKNNPKQIRDWNDLAKDGVNIVIANPKTSGNGRYAFLGAYGYGLKATNGNEQEAQKLVASILKNTPVFENGGRAATTTFTQRNIGDVLITFENEANYVSKKLTQGQFEIVYPSYTISAESPVAVVNSVVAKKGTQKTARAYLEYLWSEPAQELAASLYLRPRNPEVLARHKADFPDLDTFSPEKKFGGWDNIMKTYFADGGIFDRLTAQK

SEQ ID NO: 15453 - protein, 88 aa, Neisseria meningitidis; identical to SEQ ID NO: 6869

SEQ ID NO: 15454 - protein, 270 aa, Neisseria meningitidis
MENIGRQRPIGVFDSGIGGLTNVRALMERLPMENIIYFGDTARVPYGTKSKATIENFSMQIVDFLLEHDVKAMVIACNTIAAVAGQKIRQKTGNMPVLDVISAGAKAALATTRNNKIGIIATNTTVNSNAYARAIHRDNPDTLVRTQAAPLLVPLVEEGWLEHEVTRLTVCEYLKPLLADGIDTLVLGCTHFPLLKPLIGREAHNVALVDSAITTAEETARVLAQEGLLNTDNNNPDYRFYVSDIPLKFRTIGERFLGRTMEQIEMVSLG

SEQ ID NO: 15455 - protein, 415 aa, Neisseria meningitidis
MQLTAVGLNHQTAPLSIREKLAFAAACLPEAVRNLARSNAATEAVILSTCNRTELYCVGDSEEIIRWLADYHSLPIEEIRPYLYALDMQETVRHAFRVACGLDSMVLGEPQILGQIKDAVRVAQEQESMGKKLNALFQKTFSVAKEVRTDTAVGENSVSMASASVKLAEQIFPDIGDLNVLFIGAGEMIELVATYFAAKSPRLMTVANRTLARAQELCDKLGVNAEPCLLSDLPAILHDYDVVVSSTASQLPIVGKGMVERALKQRQSMPLFMLDLAVPRDIEAEVGDLNDAYLYTVDDMVNIVQSGKEARQKAAAAAETLVSEKVAEFVRQQQGRQSVPLIRALRDEGEKARKQVLENAMKQLAKGATAEEVLERLSIQLTNKLLHSPTQTLNKAGEEDKDLVHAVAQIYHLDK

SEQ ID NO: 15456 - protein, 502 aa, Neisseria meningitidis; identical to SEQ ID NO: 14

SEQ ID NO: 15457 - protein, 391 aa, Neisseria meningitidis; identical to SEQ ID NO: 7218

SEQ ID NO: 15458 - protein, 179 aa, Neisseria meningitidis
MSQVFKDFDLSSVWESDSWADENYKEAPFTPEILAAVESELGYKLPQSFIELMAVQNGGIFVKNCFPTTQRNSWAENHVQICEVSGIGFEKEGSLCGETGQKLWLEEWEYPPIGVYFANDPSGGHAMFALDYRACGKDGEPKVVFVEQESDFEIVELAPDFETFIRSLRHEDEFIDEEI

SEQ ID NO: 15459 - protein, 89 aa, Neisseria meningitidis; identical to SEQ ID NO: 1473

SEQ ID NO: 15460 - protein, 107 aa, Neisseria meningitidis; identical to SEQ ID NO: 7198

SEQ ID NO: 15461 - protein, 334 aa, Neisseria meningitidis
MQRQIKLKNWLQTVYPERDFDLTFAAADADFRRYFRATFSDGSSVVCMDAPPDKMSVAPYLKVQKLFDMVNVPQVLHADTDLGFVVLNDLGNTTFLTAMLQEQGETAHKALLLEAIGELVELQKASREGVLPEYDRETMLREINLFPEWFVAKELGRELTFKQRQLWQQTVDTLLPPLLAQPKVYVHRDFIVRNLMLTRGRPGVLDFQDALYGPISYDLVSLLRDAFIEWEEEFVLDLVIRYWEKARAAGLPVPEAFDEFYRWFEWMGVQRHLKVAGIFARLYYRDGKDKYRPEIPRFLNYLHRVSRRYAELAPLYALLVELVGDEELETGFTF

SEQ ID NO: 15462 - protein, 138 aa, Neisseria meningitidis
MIDVKIDNIFVVLNQIERLGNGIENRYLLMRRLSETMHTAVKLNFRYAGRPKWLGLKYRDGKPLSDSGRLKDSFSTLSDNDTALVGTNIVYAAIHNFGGMAGRNRKVRIPQREFLTLTDDDKQALMDDVQDYFSGLIP

SEQ ID NO: 15463 - protein, 187 aa, Neisseria meningitidis
MKLIILDRDGVINQDRDDFVKSADEWIPVEGSMDAVAFLTQAGYTVAVATNQSGIGRKYFTVQNLTEMHAKMHRLVRQAGGEINGIWFCPHTDADNCNCRKPKPGMIEDIIGRFNAQASETWLVGDSLRDLQAIDAVGGKPALVLTGKGKKTLSQHGHELPEHTQVFDTLLDFSQYIMQENTAPQAD

SEQ ID NO: 15464 - protein, 455 aa, Neisseria meningitidis
MPDLHTEFSRLLPADEIAELSPTLLKDQRNRFTSAPDIILQPRSVESVQTIMRFCYEHRIPVTPQGGNTGLCGAAVSENGVLLNLSKLNRIRSINLSDNCITVEAGSVLQTVQQAAEASNRLFPLSLASEGSCQIGGNIACNAGGLNVLRYGTMRDLVIGLEVVLPNGERVSHLHPLHKNTTGYDLRHLFIGSEGTLGIITAATLKLFARPSDKATAWVGIPDIESAVRLLTETQAHFAERLCSFELIGRFAAELSSEFSKFPLPTHSEWHILLELTDSLPDSNLDDRLVEFLYKKGFTDSVLAQSEQERIHMWTLRENISASQRKLGTSIKHDIAVPIGHVADFVRRCAKDLEQNFKGIQIVCFGHLGDGSLHYNTFLPDILSNEAYRYEDDINSTVYRNVLACNGTVAAEHGIGIIKKQWLDKVRTPAEIALMKSIKQHLDPYNIMNPGKLLP

SEQ ID NO: 15465 - protein, 43 aa, Neisseria meningitidis; identical to SEQ ID NO: 3165

SEQ ID NO: 15466 - protein, 199 aa, Neisseria meningitidis; identical to SEQ ID NO: 368

SEQ ID NO: 15467 - protein, 124 aa, Neisseria meningitidis; identical to SEQ ID NO: 2472

SEQ ID NO: 15468 - protein, 129 aa, Neisseria meningitidis; identical to SEQ ID NO: 5927

SEQ ID NO: 15469 - protein, 155 aa, Neisseria meningitidis; identical to SEQ ID NO: 3828

SEQ ID NO: 15470 - protein, 144 aa, Neisseria meningitidis; identical to SEQ ID NO: 7462

SEQ ID NO: 15471 - protein, 754 aa, Neisseria meningitidis
MLAPELEQILQQLYREARKAHYEFISLEHLLLVLIEEDASVPNVLKLCGADLKVVSEQLAASVAENTPLIPEHLLDTVETRPTLGFQRVMQRAMVHTQSAGKAAVEPLDVLVALMSETDSHTVYFLKLQSVTRFEVLRCIAHGSPDDEDGNDSDGLGREGEEAEQKTGSLSDYTVNLNTEVKAGRIDPLIGRKHEMERLVQILCRRRKNNPLLVGEAGVGKTALAEGLAHQIVNGGIPDALKDAEVYALDMGSLLAGTKYRGDFEARVKSVLKQLEKIPHAILFIDEIHTIIGAGSTSGGTMDASNLLKPALAKGSLRCIGATTYDEYRTIFDKDHALSRRFQKIDVVEPTVSETVQILRGLKPMFEAFHQVRYTQGALEAAAELSARYINERFLPDKAIDVMDEAGAAQRILPKSKQKKVIGKAQIETVIAKVSRIPEKTVSHDDKQVLQFLDRDLKNMVYGQENAIDALVAAVKMSRSGLALPDKPIGSFLFSGPTGVGKTEAAKQLAYSMGVPLQRFDMSEYMERHAVSRLIGAPPGYVGFEQGGLLTEAVNKQPHCVLLLDEIEKAHPDIFNVLLQVMDAGKLTDNNGKSADFRNVILIMTTNAGAESLSRPSLGFTAKRERGDEMQAINKLFTPEFRNRLDAIIPFAPLSEPIIVKVVDKFLLQLEHQLLDKKVEAEFTPALHKYLAEKGFDPQMGARPMHRLIQEKIRKPLADELLFGKLSDGGFVRIDWDAAKEEAVLKFKKSKVKI

SEQ ID NO: 15472 - protein, 377 aa, Neisseria meningitidis; identical to SEQ ID NO: 10962

SEQ ID NO: 15473 - protein, 349 aa, Neisseria meningitidis
MPNCFKFHTVIERHWQKPYPVLSFLLKPLSGLFAKIAAKRRTDFLSGKRQSEKLPVPVVVVGNIHAGGTGKTPIVAALVSGLQEKGVKVGIISRGYGRKSKAVHVLNAASRAEDAGDEPLLLFSKTGAPTAVGSSRAEVGRALLAAHPDIGLIVADDGLQHYALQRDVEIAVFPSADTARQDLDLLPNGNLREPLSRLDSVDAVVVSGGKADALFRPSENMFHSRIEAGRIYRLNNPSEILDTGRLKNQTVVAVAGIAKPARFFDSLRHMGITLNQTVALPDHADISAADLPDADAVIITEKDAVKFSDGIGLNHIWVLPVCAIIEPDLAEFVLERLEGAEGRLKARFG

SEQ ID NO: 15474 - protein, 113 aa, Neisseria meningitidis; identical to SEQ ID NO: 3580

SEQ ID NO: 15475 - protein, 134 aa, Neisseria meningitidis
MRKSRLSRYKQNKLIELFVAGVTARTAAELVGVNKSTAAYYFHRLRLLIYQNSPHLEMFDGEVEADESYFAERQNHINGIGNFWNRAKRHLRKFDGIPKAHFELYLKGYERRFNNSEIKVQISILKQLVKSSLS

SEQ ID NO: 15476 - protein, 421 aa, Neisseria meningitidis
MNTLQRRKTHQVRIDHITVGSEAPVVIQSMTNTDTADAKATALQIKELSDAGSEMVRITVNSPEAASKVAEIRRRLDDMGYATPLIGDFHFNGERLLAEFPECGKALSKYRINPGNVGKGVKGDEKFAFMIRTAAENDKAVRIGVNWGSLDQSLAKRMMDANLASSAPKPPEEVTKEALIVSALESAEKAVLLGLPEDKIILSCKVSAVQDLIQVYRELGSRCAYPLHLGLTEAGMGSKGIVASTAALSVLLQEGIGDTIRISLTPEPGSPRTQEVVVGQEILQTMGLRSFTPMVTACPGCGRTTSTVFQELAQDVQNYLRQKMSIWRTLYPGVESLNVAVMGCVVNGPGESKLADIGISLPGTGETPVAPVYVDGERKVTLKGDNIATEFLAIVEEYVKTNYGENGLKRHQGKVIPIHSL

SEQ ID NO: 15477 - protein, 324 aa, Neisseria meningitidis
MDTLTRFLPEHLQQNQLPEALGGVLLSVVSACTEINAKVRLGALAGVLGMAGTGNIQGEDQKKLDVIANNIMIDTLKANPAVAGLASEEEDSFVSAGENGRYLVLFDPLDGSSNIDVNISVGTIFSILEKPEGALATESFLQTGRQQLAAGYILYGPQTQLVFTFGHGVYMFTLNAENEFVLTKEKPKVPESTKEFAINMSNRRHWLPPVQQYIDELLAGETGTRGKNYNMRWVASMVAEIHRILMRGGVFMYPQDKRDPAKPGKLRLMYEANPMSLILEQAGASASNAYQAMLDIQPENLHQRVAVFMGSSEEVAYLDRLHAK

SEQ ID NO: 15478 - protein, 498 aa, Neisseria meningitidis
MSLALVYSRALSGMNAPLVEVEAHLANGLPHFNIVGLPDTEVKESRDRVRAAIIQSGFEFPAKKITVNLAPADLPKESGRFDLPIAIGILAASGQVAPEKLAEYEFAGELALSGLLRPVRGALAMAWQGMQAKRAFVLPEENAGQAAVMRGITVYGARSLGEVAAHLNGIEPLVQTDCQVPQMPSENTKLLDLVDVKGQHTARLALEIAAAGGHSLLMMGPPGTGKSMLSQRLPGILPPLTEDELVEVWALRSLLPNHQQQLDSNRPFRSPHHSASAAAMVGGGSDPRPGEISLAHHGVLFLDELPEFDRKVLEVLREPLENGEIHISRAARQAVYPAKFQLVAAMNPCPCGYLGHPVKPCRCTPESVARYRSKISGPLLDRIDLTIEVPSLSAAELMQQEAGESSASVLERVIAARDKQYARQGKVNAALSVSELDTSARIQKEAQEALGGLLEKLSLSARSFHRIMRVARTLADLAGDEEVGRSHVMKAIGFRRAL

SEQ ID NO: 15479 - protein, 415 aa, Neisseria meningitidis
MFSLEAWIGLRYLRAKKRNGFMSFITMVSIAGIALGVTALIVVLSVMNGFQKEIRGQLLNVAPHAEIGYIDNTDTDWRNLLRFTENRKGILAAAPYVSNQALLANAGEIRGVQMRGILPSEERKVVEYGDKMPAGKFEDLIPGEFDIILGVGLAEALGAEVGNKVTVITPEGNVTPAGVVPRLKQFTVVGLVKTGVYEVDNSLAMTHIQDARVLYRLDKEVAGLRLKLADPQNAPALTAKLIPEAQRDTVWVRDWTFSNRSYFEAVELEKRMMFIILTLIIAVAAFNLVSSLVMAVTEKQADIAILRTLGLSPGGVMKIFMVQGAFSGFFGTLAGVVCGVLLGWNVGRVVAFFENLLGVHLINSQVYFIDYLPSDVDMGDVALIACISLGLSFVATLYPSRRASKTQPAEALRYE

SEQ ID NO: 15480 - protein, 611 aa, Neisseria meningitidis; identical to SEQ ID NO: 6640

SEQ ID NO: 15481 - protein, 436 aa, Neisseria meningitidis; identical to SEQ ID NO: 6841

SEQ ID NO: 15482 - protein, 129 aa, Neisseria meningitidis
MNPHEKLLTTDNPILRQRAKAMRQEMSGAEAKLWQHLRAGRLNGYKFRRQQPMGNYIVDFMCVTPKLIVEADGGQHTEQAAYDHARTAYLNSLGFTVLRFWNHEILQQTNDVLAEILRVLQELEKQYAQ

SEQ ID NO: 15483 - protein, 96 aa, Neisseria meningitidis; identical to SEQ ID NO: 3692

SEQ ID NO: 15484 - protein, 215 aa, Neisseria meningitidis
MASKSSKTNLDLNNLHLLNLPARLFIALLAVAAVLGLGYAGLFKSQMESLEEYEAKETELKNTYKQKSIDAASLNNLRDELASIRSAFDIMLKQLPTDAEIPNLVQELHQAGSSNGLRLDSVMPQPPVDDGPIKRLPYSISITGNYEQISQFTRDVGSLSRIITLESLKIAQSPENGGNPDGKSSILNLNAIATTYQAKSVEELAAEAAQNAEQK

SEQ ID NO: 15485 - protein, 330 aa, Neisseria meningitidis
MKKSLIALTLAALPVAAMADVTLYGTIKTGVETSRSVYYEDGKAAEVTTGTGIVDLGSKIGFKGQEDLGNGLKAIWQVEQKASIAGTDSGWGNRQSFIGLKGGFGKLRVGRLNSVLKDTGDINPWDSKSDYLGVNKIAEPEARLISVRYDSPEFAGLSGSVQYALNDNAGRHNSESYHAGFNYKNGGFFVQYGGAYKRHEQIDNVKIEKYQIHRLVSGYDNDALHASVAVQQQDAKLVEDNYSHNSQTEVAATLAYRFGNVTPRVSYAHGFKGSFDDADRYNTYDQVVVGAEYDFSKRTSALVSAGWLQEGEGESKFVSTAGGVGLRHKF

SEQ ID NO: 15486 - protein, 561 aa, Neisseria meningitidis
MSMENFAQLLEESFTLQEMNPGEVITAEVVAIDQNFVTVNAGLKSESLIDVAEFKNAQGEIEVKVGDFVTVTIESVENGFGETKLSREKAKRAADWIALEEAMENGNILSGIINGKVKGGLTVMISSIRAFLPGSLVDVRPVKDTSHFEGKEIEFKVIKLDKKRNNVVVSRRAVLEATLGEERKALLENLQEGSVIKGIVKNITDYGAFVDLGGIDGLLHITDLAWRRVKHPSEVLEVGQEVEAKVLKFDQDKQRVSLGMKQLGEDPWSGLTRRYPQGTRLFGKVSNLTDYGAFVEIEQGIEGLVHVSEMDWTNKNVHPSKVVQLGDEVEVMILEIDESRRRISLGMKQCQANPWEEFAANHNKGDKISGAVKSITDFGVFVGLPGGIDGLVHLSDLSWTESGEEAVRKYKKGEEVEAVVLAIDVEKERISLGIKQLEGDPFGNFISVNDKGSLVKGSVKSVDAKGAVIALSDEVEGYLPASEFAADRVEDLTTKLKEGDEVEAVIVTVDRKNRSIKLSVKAKDAKESREALNSVNAAANANAGTTSLGDLLKAKLSGEQE

SEQ ID NO: 15487 - protein, 636 aa, Neisseria meningitidis
MNILSVENASFAIGHVALLDKTSFQLDSGEKVGLIGRNGAGKSSFLKILAGLQKLDDGQIIVQNNLKIVYVPQESFFDKDATVFDTVAEGLGEIRDLLRRYHHVSHELENGSSEALLKELNELQLEIEAKDGWKLDAAVKQTLGELGLPENEKIGNLSGGQKKRVALAQAWVQKPDVLLLDEPTNHLDIDAIIWLENLLKAFEGSLVVITHDRRFLDNIATRIVELDRGILRSYPGSFSKYSEKKAQELAVEAEHNRLFDKFHAQEEAWIRKGIEARRTRNEGRVRRLEELRRQRAERRNVQGQVNFKLDSGEKSGKIIAELEHASFAYGGKVIMDKFSAILQRGDKIGLIGPNGIGKTTFLKLILGELQPTYGRIRIGSKQEVAYFDQFRSALNENDTVFYTLGQGNDYVEVGGKKKHVMSYLEDFLFHPARAQSPVSSLSGGERNRLLLAKLFTRPANILVLDEPTNDLDIDTQELLEDLLRDYQGTVFLVSHDRMFLDNVITQSIVFEGQGRLKEYIGGYQDYIDAKSREDKIQTASAPKASDAEPAKEKPKANRTVKLSYKEQRELDALPDEIAALEAEQAEINTQLSYPEIFKDYEKAGALQNRAEEIEMLLLEKLERWELLETKRNGNAV

SEQ ID NO: 15488 - protein, 367 aa, Neisseria meningitidis
MNTTANPSNIIVGLSGGVDSSVTAALLKQQGYQVRGVFMQNWEDDDNDEYCSIKQDSFDAIAVADIIGIDIDIVNFAAQYKDKVFAYFLQEYSAGRTPNPDVLCNAEIKFKCFLDYAVGQGADTIATGHYARKEVRNGVHYLLKGLDRNKDQSYFLYRLKPFQLERAIFPLGGLEKPEVRRLAAEFKLPTAAKKDSTGICFIGERPFREFLQKYLPTDNGKMVTPEGKTVGEHVGLMFYTLGQRKGLGIGGAGEPWFVAAKDLTKNELIVVQGHDHPLLYTRSLVMNDLSFTLPERPKAGRYTCKTRYRMADAPCELRYLDEETAELVFDEPQWAVTPGQSAVLYDGDICLGGGIIQTTDKPVIITR

SEQ ID NO: 15489 - protein, 64 aa, Neisseria meningitidis; identical to SEQ ID NO: 905

SEQ ID NO: 15490 - protein, 120 aa, Neisseria meningitidis; identical to SEQ ID NO: 6845

SEQ ID NO: 15491 - protein, 203 aa, Neisseria meningitidis; identical to SEQ ID NO: 6013

SEQ ID NO: 15492 - protein, 192 aa, Neisseria meningitidis
MFNKSFNTIHLTEGGKMNAIRTFQNRTPEIHESCMIDEACVVIGEVSLAEDVSVWPCAVLRGDVNSITVGARSNIQDGSVLHVSHKTAAKPEGSPLVIGEDVTVGHKVMLHGCRIGNRVLVGMGTTVLDDAVIEDEVMIGAGSLVPPRKRLAGGYLYVGSPVRQVRVLTDEEKAFLKYSAAHYVKLSKQYGM

SEQ ID NO: 15493 - protein, 786 aa, Neisseria meningitidis; identical to SEQ ID NO: 6598

SEQ ID NO: 15494 - protein, 266 aa, Neisseria meningitidis; identical to SEQ ID NO: 2607

SEQ ID NO: 15495 - protein, 133 aa, Neisseria meningitidis
LAEGQKSAVTEYYLNHGEWPANNSSAGVATSADIKGKYVKSVEVKNGVVTAQMASSNVNNEIKGKKLSLWAKRQAGSVKWFCGQPVTRKANNADDVADDGNDKIDTKHLPSTCRDESTAGCIETPPTAFYKNT

SEQ ID NO: 15496 - protein, 111 aa, Neisseria meningitidis; identical to SEQ ID NO: 7149

SEQ ID NO: 15497 - protein, 861 aa, Neisseria meningitidis; identical to SEQ ID NO: 7392

SEQ ID NO: 15498 - protein, 160 aa, Neisseria meningitidis; identical to SEQ ID NO: 1762

SEQ ID NO: 15499 - protein, 592 aa, Neisseria meningitidis
MNKIYRIIWNSALNAWVVVSELTRNHTKRASATVETAVLATLLFATVQASANNEEQEEDLYLDPVQRTVAVLIVNSDKEGTGEKEKVEENSDWAVYFNEKGVLTAREITLKAGDNLKIKQNGTNFTYSLKKDLTDLTSVGTEKLSFSANGNKVNITSDTKGLNFAKETAGTNGDTTVHLNGIGSTLTDTLLNTGATTNVTNDNVTDDEKKRAASVKDVLNAGWNIKGVKPGTTASDNVDFVRTYDTVEFLSADTKTTTVNVESKDNGKKTEVKIGAKTSVIKEKDGKLVTGKGKDENGSSTDEGEGLVTAKEVIDAVNKAGWRMKTTTANGQTGQADKFETVTSGTNVTFASGKGTTATVSKDDQGNITVKYDVNVGDALNVNQLQNSGWNLDSKAVAGSSGKVISGNVSPSKGKMDETVNINAGNNIEITRNGKNIDIATSMTPQFSSVSLGAGADAPTLSVDDKGALNVGSKDANKPVRITNVAPGVKEGDVTNVAQLKGVAQNLNNRIDNVDGNARAGIAQAIATAGLVQAYLPGKSMMAIGGGTYRGEAGYAIGYSSISDGGNWIIKGTASGNSRGHFGASASVGYQW

SEQ ID NO: 15500 - protein, 249 aa, Neisseria meningitidis
MPTMLIVRPSGRAKDDVEICRRTGWQAEVLSPIEIETDKASLKRLPEMYARADAVFWVSPTAVETAVPYLNLSDGIKAQIAVGQGSRRALERCLVRTVIAPDDGNDSEAVLRLTVWNSLPEGARVLFVRGHGGRDFLMNALQEKGFRTEVAEVYFRRHKPLNFQNFQTENIAAAYITSTELVRLLFGQLPPQFSRFFKSLLYFTHHPRIAEALKREGVCSVETVPTLEAALSHSSISVSDGMVFPGTSN

SEQ ID NO: 15501 - protein, 133 aa, Neisseria meningitidis; identical to SEQ ID NO: 6682

SEQ ID NO: 15502 - protein, 658 aa, Neisseria meningitidis
MSRIAALPDHLVNQIAAGEVVERPANALKEIVENSIDAGATAIEVELAGGGIRLIRVSDNGGGIHPDDIELALHRHATSKIKTLNDLEHVASMGFRGEGLASIASVSRLTLTSRQNDSSHATQVKAEDGKLSSPTAAAHPVGTTIEAAELFFNTPARRKFLKSENTEYAHCATMLERLALAHPHIAFSLKRDGKQVFKLPAQSLHERIAAIVGEDFQTASLGIDSGNGALRLYGAIAKPTFAKGKTDKQYCFVNHRFVRDKVMLHAVKQAYRDVLHNALTPAFVLFLDLPPEAVDVNVHPTKTEIRFRDSQQVHQLVFHTLNKALADTRANLTESVGNAGEVLHDITGVVSTPMPSENDSENLFDSVSNYPTGNKSDTHNAFGSSGKTAPMPYQSAYAPQQRSLSLRESRAAMNTYAELYKKTDDIDLELSRFEQARFGNMPSETPAPQTDTPLSDGIPSPSELPPLGFAIAQLLGIYILAQAEDSLLLIDMHAAAERVNYEKMKRQRQENGNLQSQRLLIPVTFAASHEECAALADYAETLAGFGLELSDMGGNTLAVRAVPAMLGKADVVSLAKDVLNELAQVGSSQTIEEHENRILATMSCHGSIRAGRRLTLPEMNALLRDMENTPRSNQCNHGRPTWVKLTLKELDALFLRGQ

SEQ ID NO: 15503 - protein, 144 aa, Neisseria meningitidis; identical to SEQ ID NO: 3606

SEQ ID NO: 15504 - protein, 384 aa, Neisseria meningitidis
MKFIDEAKIEVAAGKGGNGATSFRREKFVPRGGPDGGDGGKGGSVWAEADENTNTLVEYRFVKRYQAKNGEKGHGSDRYGAGADDIVLKMPVGTLIRDLDTDETVADLTYHGQRVCLAKGGKGGLGNIHFKSSVNRAPKQSTPGEEGETRSLQLELKVLADVGLLGMPNAGKSTLITAVSAARPKIANYPFTTLHPNLGVVRIDENHSFVMADIPGLIEGAAEGAGLGHRFLKHLSRTGLLLHVVDLAPFDETANPAEEALAIINELRKYDEELYGKPRWLVLNKLDMLDEEEAQARTAAFLEAVGWDYPKPDDRFQFDTETPRLFQISALTHQGTQELVHQINQYLIEKKRIEAEKAEAERAATNVEIAEQQPKTDTGVFKPE

SEQ ID NO: 15505 - protein, 816 aa, Neisseria meningitidis
MTQKEKHFEEYAALATLPLRDVVVYPHMVLPLFVGRPKSIAALENAITREEPVFLLAQTDAALEEPVAADLYQTGTVAQVLQVLKLPDGTVKVLVEGLYRGRVLTIEDTGGLFVSHIETVVEEDTGGNTDLEAVRRTLLAQFEQYAKLNKKIPAEIIGSINGIAENSRLTDTVAAHLQLKLAQRQQILEIPEIGKRMEFLLAQLESELDIMQAEKRIRGRVKRQMEKSQREYYLNEQIKAIHKELGEEDENGELDALEAGIKKAGMSKEAEEKCLSELKKLKMMPPMSAESTVVRNYIDTLLELPWKKKSRVSKDIAKAGLVLDTDHYGLEKVKERILEYLAVQKRMDKLKGPILCLVGPPGVGKTSLGESIAKATGRKYVRMALGGVRDESEIRGHRRTYIGSMPGKILQNMAKAGVKNPLFLLDEIDKLGSDFRGDPASALLEVLDPEQNNKFADHYAEVDYDLSDVMFIATSNSLNIPTPLLDRMEIIRLSGYTEDEKINIAMQYLVPKQMKRNGVKEGELAIEESAVRDIIRYYTREAGVRSLDREIAKICRKVVMQITLDEDSKTKKTGKAKPRAVKVNEKNLHDYLGVRRFDYGVAESENRIGQVTGLAWTEVGGELLTVEAAALPGKGVIQCTGQLGDVMKESVSAAWSVVRSRAESVGLAPDFYEKKDIHIHVPEGATPKDGPSAGIAMTLAAVSAFTKIPVRADVAMTGEITLRGEVLPIGGLKEKLLAALRGGIKHVLIPKDNLKDLEEIPENVKTGLTIHPVKWIDEVLALGLESQPEPWAEPSGAEAAAESASKPKPRSRATKH

SEQ ID NO: 15506 - protein, 133 aa, Neisseria meningitidis
MPSEAFRRHRAYRENKLQPLVSVLICAYNAEKYFAQSLAAVVNQTWRNLEILIVDDGSTDGTLAIAKDFQKWDSRIKILAHDRLLNRKQQRRDSPANTFKHRLIRALTKISREREKRRQRREQLIGKIIVPFQ

SEQ ID NO: 15507 - protein, 274 aa, Neisseria meningitidis
MLKKFVLGGIAALVLAACGGSEGGSGASSAPAQSAVSGSLIERINNKGTVTVGTEGTYAPFTYHDKDGKLTGYDVEVTRAVAEKLGVKVEFKETQWDSMMAGLKAGRFDVVANQVGLTSPERQATFDKSDPYSWSGAVLVARNDSNIKSIDDIKGVKTAQSLTSNYGEKAKAAGADLVAVDGLAQSLTLIEQKRADATLNDELAVLDYLKKNPNAGVKIVWSAPADEKVGSGLIVNKGNDEAVAKFSTAINELKADGTLKKLGEQFFGKDISVQ

SEQ ID NO: 15508 - protein, 324 aa, Neisseria meningitidis
MTEYPGIGSPLFYGVFFAAVLVMIALDMFSLKKNSSHKVGVKEALAWSGLWVAVSCLFAGWLYFKLAGNPGYGAAVAKEKVLEFFTGYILEKSLAVDNIFVFLMIFGYFKVAPQFQHRVLLYGVLGALVLRTVMIFVGAALVRQFEWILYLFGAFLLYTGIHMMKPEGDEEEDLANSRLLNAVKKVVPVGTEFHGEKFFTVENGKKIATPLFLVLVMIELSDVVFAVDSIPAVFAVTTDPFIVLTSNIFAILGLRAMYFLLADVAERFIFLKYGLAFVLSFIGVKMLVMHWVHIPISVSLSIVFGALGASILTSLIYTKKQLDK

SEQ ID NO: 15509 - protein, 265 aa, Neisseria meningitidis
MNRLYPHPIIAREGWPIIGGGLALSLLVSICCGWWSLPFWVFTVFALQFFRDPAREIPLNPEAVLSPVDGRIVVVERARDPYRDVDALKISIFMNVFNVHSQKSPADCTVTKVVYNKGKFVNADLDKASTENERNAVLATTASGREITFVQVAGLVARRILCYTQAGAKLSRGERYGFIRFGSRVDMYLPVDAQAQVAIGDKVNGVSTVLARLPLTAPQIESEPESEPASQAASVETAANPSAEQRQIEATAAKIQAAVQDVLKD

SEQ ID NO: 15510 - protein, 361 aa, Neisseria meningitidis; identical to SEQ ID NO: 7621

SEQ ID NO: 15511 - protein, 78 aa, Neisseria meningitidis; identical to SEQ ID NO: 1464

SEQ ID NO: 15512 - protein, 52 aa, Neisseria meningitidis; identical to SEQ ID NO: 11681

SEQ ID NO: 15513 - protein, 661 aa, Neisseria meningitidis
MAKNNQYSESSITVLKGLEPVKERPGMYTRTDSPTHICQEVIDNAADEALGGFATAIDVQIHEDGSLSVRDNGRGIPVGLHPEEGVPVVELVFTRLHAGGKFNKKDGGSAYAFSGGLHGVGVSVTNALSTRLEVTVKREGKIHRIVFAGGDVVEPLAQVGKCAVKDSGTEVRVWPDGKYFESPNYSIPELERLLRAKAVLLPGVRVSLTRPVKGEDEAHTQTWHYPDGLKSYLTDLIADAQEAVPLFSCENYISDGHNGDFSIGEGAAFALTWLEEGSCANESYVNLIPTPLGGTHEAGLKQAVFNAVNNFINLHNLLPRGVKVQSDDVFGKTAFVLSARVLDPQFQGQTKDKLTNRDALKLVAAVSGDPLELWLNQNVDFGKKIAELAIRQAQARMRSVKKIEKKKGSGVAVLPGKLTDCESEDIRENELFLVEGDSAGGSAKLARDKATQAILPLRGKVLNSFEVHPDQLFGNAEIHDISVAIGVDPHGINDHPDLSGLRYGKIAILSDADVDGSHIQVLLLTLFYRHFPKLVADGHIYVAQPPLFRVDVNAQGKSKPARKFYALDQNELDSILERLQKEGVKETAYSISRFKGLGEMNPDQLKDTTMHPDTRRLLQVQIPEGADDETRDIFVKLMGKGEAAARRAWMEREGDTAELDI

SEQ ID NO: 15514 - protein, 98 aa, Neisseria meningitidis; identical to SEQ ID NO: 9060

SEQ ID NO: 15515 - protein, 323 aa, Neisseria meningitidis; identical to SEQ ID NO: 3380

SEQ ID NO: 15516 - protein, 166 aa, Neisseria meningitidis
  misc_feature 162, 163, 164: 'Xaa' is any amino acid
MRKILVTGGAGFIGSAVVRHIIRNTQDSVVNLDKLTYAGNLESLTDIADNPRYAFEQVDICDRAELDRVFAQHRPDAVMHLAAESHVDRSIGSAGEFIQTNIVGTFNLLEAARAYWQQMPSEQHEAFRFHHISTDEVYGDLRGTDDLFTETAPYAPSSPYSXXXHT

SEQ ID NO: 15517 - protein, 498 aa, Neisseria meningitidis
MKLSIQKFMMLFAAAISLLQIPISHANGLDARLRDDMQAKHYEPGGKYHLFGDGRGSVKNRVYAVQTFDATAVGPILPITHERTGFEGVIGYETHFSGHGHEVHSPFDNHDSRSTSDFSGGVDGGFTVYQLHRTGSEIHPEDGYDGPQGSDYPPPGGARDIYSYYVKGTSTKTKINTVPQAPFSDRWLKENAGAASGFLSRADEAGKLIWENDPNQNWWGNRMDDIRGIIQGAANPFLTGFQGLGVGAITDSAVNPVTYAAARKTLQGIHNLGNLSPEAQLAAATALQDSAFAVKDSINSARQWADAHPNITATAQTALSVAEAAGTVWGGKKVELNPTKWDWVKNTDYKTPAARPMQTLDGEMAGGNKPPKSITSGGKANAATYPQLVNQLTGQNLKNIAAQDPRLSLALHKSEKNFPIGTATYEEADRLGKIWVGEGARQTSGGGWLSIDGTRQYRPPTEKNSQFATTGIQANFETYTIDSNGKRNKIKNGHLNIR

SEQ ID NO: 15518 - protein, 77 aa, Neisseria meningitidis; identical to SEQ ID NO: 1677

SEQ ID NO: 15519 - protein, 85 aa, Neisseria meningitidis
MKPRNLFFAGCLLTSATFAEDIGVPVELINVGNRIAMPSEGESLALLPFAEDVPPVRDAMPSEVPKSAAGGDVRGDRMGMPINIG

SEQ ID NO: 15520 - protein, 206 aa, Neisseria meningitidis
MLTPKSCDLFNIPFFQFSQLKKYRPESIPQIKADYKENWQIWQQLIQQVAAELGAPFAPPHIERWCNGWQVRAHFFAYFKYAQYKNSAAILSILLNRRRLSVSLDWHCYKADVSPITLPDYNRWLDNFDTEKYAAFDMWHGAESEYDDYRTVAQQNESDRKLQNDEDFFCIGKHIERDDLGRQDVAKWIAETVEDLLPLYEACHGK

SEQ ID NO: 15521 - protein, 160 aa, Neisseria meningitidis; identical to SEQ ID NO: 2526

SEQ ID NO: 15522 - protein, 116 aa, Neisseria meningitidis; identical to SEQ ID NO: 5541

SEQ ID NO: 15523 - protein, 158 aa, Neisseria meningitidis; identical to SEQ ID NO: 871

SEQ ID NO: 15524 - protein, 88 aa, Neisseria meningitidis
MARMVFCVKLNKEAEGMKFPPLPNELGKRIFENVSQEAWMAWTRHQTMLINENRLSLADPRAREYLAQQMEQYFFGDGADAVQGYVPQ

SEQ ID NO: 15525 - protein, 685 aa, Neisseria meningitidis
MPEQNRILCRELSLLAFNRRVLAQAEDQNVPLLERLRFLCIVSSNLDEFFEVRMAWLKREHKRCPQRRLDNGKMPSETIADVTEAARSLIRHQYDLFNNVLQPELAQEGIHFYRRRNWTDTQKKWIENYFDRELLPILTPIGLDPSHPFPRPLNKSLNFAVELDGTDAFGRPSGMAIVQAPRILPRVVPLPSELCGGGHGFVFLSSILHAHVGKLFPGMNVKGCHQFRLTRDSDLTVDEEDLQNLRAAIQNELHDREYGDGVRLEVADTCPAYIRDFLLAQFKLTAAELYQVKGPVNLVRLNAVPDLVNRPDLKFPTHTPGRLKALGKTASIFDLVRQSPILLHHPYQSFDPVVEMMREAAADPAVLAVKMTIYRTGTRSELVRALMKAALAGKQVTVVVELMARFDEANNVNWAKQLEEAGAHVVYGVFGYKVHAKMALVIRREDGVLKRYAHLGTGNYHQGTSRIYTDFGLITADEQITADVNTLFMEITGLGKPGRLNKLYQSPFTLHKMVIDRIARETEHAKAGKPARITAKMNSLIEPTVIEALYRASAAGVQIDLIVRGMCTLRPGVKGLSENIRVRSIIGRQLEHARVYCFHNNGADDTFISSADWMGRNFFRRIETAAPITAPELKKRVIREGLEMALADNTHAWLMQPDGGYIRATPAEGESEADLQNDLWTLLGG

SEQ ID NO: 15526 - protein, 1014 aa, Neisseria meningitidis
MFWIVMIVILLLALAGLFFVRAQSEREWMREVSAWQEKKGEKQAELPEIKDGMPDFPELALMLFHAVKTAVYWLFVGVVRFCRNYLAHESEPDRPVPPASANRADVPTASDGYSDSGNGTEEAETEAAEAAEEEAADTEDIATAVIDNRRIPFDRSIAEGLMPSESEISPVRPVFKEITLEEATRALNSAALRETKKRYIDAFEKNETAVPKVRVSDTPMEGLQIIGLDDPVLQRTYSRMFDADKEAFSESADYGFEPYFEKQHPSAFSAVKAENARNAPFHRHAGQGKGQAEAKSPDVSQGQSVSDGTAVRDARRRVSVNLKEPNKATVSAEARISRLIPESQTVVGKRDVEMPSETENVFTETVSSVGYGGPVYDETADIHIEEPAAPDAWVVEPPEVPKVPMPAIDIPPPPPVSEIYNRTYEPPTGFEQAQRSRIAETDHLADDVLNGGWQEETAAIADDGSEGAAERSNGQYLSETEAFGHDSQAICPFEDVPSERPSCRVSDTEADEGAFQSEETDAVYEHLPTTDLLLPPLFNPEATQTEEELLENSITIEEKLAEFKVKVKVVDSYSGPVITRYEIEPDVGVRGNSVLNLEKDLARSLGVASIRVVETIPGKTCMGLELPNPKRQMIRLSEIFNSPEFAESKSKLTLALGQDITGQPVVTDLGKAPHLLVAGTTGSGKSVGVNAMILSMLFKAAPEDVRMIMIDPKMLELSIYEGIPHLLAPVVTDMKLAANALNWCVNEMEKRYRLMSFMGVRNLAGFNQKIAEAAARGEKIGNPFSLTPDDPEPLEKLPFIVVVVDEFADLMMTAGKKIEELIARLAQKARAAGIHLILATQRPSVDVITGLIKANIPTRIAFQVSSKIDSRTILDQMGAENLLGQGDMLFLPPGTAYPQRVHGAFASDEEVHRVVEYLKQFGEPDYVDDILSGGGSEELPGIGRSGDGETDPMYDEAVSVVLKTRKASISGVQRALRIGYNRAARLIDQMEAEGIVSAPEHNGNRTILVPLDNV

SEQ ID NO: 15527 - protein, 274 aa, Neisseria meningitidis; identical to SEQ ID NO: 5218

SEQ ID NO: 15528 - protein, 203 aa, Neisseria meningitidis
MRRTALLLLALTAGTSLAAGFNQKDTPINTRYRETPEEAAAREFKEHTAKLPPLPDTHSDGWFDIYVDENYGKQPKILLDSLQIMPAPDGSIRYILNIRSDKGYDNLTAEGIFCAHFSIRFGNGKPSSYKVFGYGDTVNRRWIQPRNAEWKPIGGTLSRNDALRAVLYAAFCEDGIPTDTRGLIQRLKERAGHYAPSMKQHSK

SEQ ID NO: 15529 - protein, 203 aa, Neisseria meningitidis
MITTYKTITSLTQAEFKDKGSRFIAFAYPIRTLADVKKYLDPLKEEHHKARHWCYAYRLGVDGVQFRANDDGEPSGSAGRPILGQIDSVGITDVLVVVVRYFGGTLLGVPGLIHAYKEATAQALAVAEVVEKNIEKTVWLKCEYPFLNEAIRIAKQYQADVLERDLQLDCRLTVSLSLVNYEACVAAWKSTRQIEVNTEKPFE

SEQ ID NO: 15530 - protein, 626 aa, Neisseria meningitidis
MNIFYEESGQFKIAAIIQKNDATYQVDTQHGKRTKVKANNVFAEFDGDMAAFLENAQAQAADIDTDLLWEVCGEEEFTAEAIAEEYYGHAPTKTELAATLIALYAAPMYFYKKAKGVFKAAPEETLKQALAAIERKKQQDAQIDAWAEALKRGEMPSEIAADLKTILHAPDKQSLTYKAFTKAADALKTSAYELAKKTGGITSIPQYLQDGFEIKYFPKGTGFPDLPLPEMPDLPKADVTAFSIDDESTTEVDDALSLTDLGNGIKRVGIHIAAPSLAIKQGDKMEKNIMERLSTVYFPGGKITMLPENWIAAFSLDAGAYRPSISIYFDVDSEFNVGAPTCKIEAVNIAENLRIQAIEPHFNAEAGLDEAGEMMFAHHQDLIWFYQFAITLQKARGKYEPDRAPQYDYSIELDEEGKVSVVRRERGSPIDTLVSEMMILANSTWAQMLHDNDLPGLFRVQPTGKVRMSTQSEPHIGMGVRHYGWFTSPLRRAADYINQKQLISLIDDTAEPLYQNSDAELFAALRDFDAAYTAYADFQRQMEAYWSLVYLQQQGTSELTATILKEDLVRIEGLPLVTRATGIPFDALPKSQALFKITELDAEKQFVSLNYIKAVAPAGTTAGNAV

SEQ ID NO: 15531 - protein, 366 aa, Neisseria meningitidis
MAGNTFGQLFTVTTFGESHGAGLGCIIDGCPPGLALTESDIQADLDRRKPGTSRHVTQRREADQVEILSGVFEGKTTGTPIALLIRNTDQRSKDYGNIAQSFRPGHADYTYWHKYGTRDYRGGGRSSARETAARVAAGAVAKKWLKEKFGTEITAYVTQVGEKKIRFEGCEHISQNPFFAANQSQIAELENYMDSVRKSLDSVGAKLHIEAANVPVGLGEPVFDRLDAEIAYAMMGINAVKGVEIGAGFDSVTQRGSEHGDELTPQGFLSNHSGGILGGISTGQDICVNIAIKPTSSIATPRRSIDINGDPVELATHGRHDPCVGLRAAPIAEAMLALVLIDHALRHRAQNADVQVNTPDITLSNK

SEQ ID NO: 15532 - protein, 228 aa, Neisseria meningitidis
MADLTFQQAVSNIIGMKGEIVRALGETFVMVGLSTTFAVVFGTLLGVLLFVTSSRQLHYNKPVNFLLDNLVNLMRAFPFVILMIAMIPATRAIVGSTIGPIAASLVLSVSGLFYFARLVEQNLREVPKGVIEAAAAMGAPPLAIVRKVLLNEARAGMVSSITVLAIGLLSYSAAAGMIGGGGLGDLAIRYGYYRYQTEVIVFIVALLVLLVILIQSTGNTLARKLDKR

SEQ ID NO: 15533 - protein, 121 aa, Neisseria meningitidis; identical to SEQ ID NO: 847

SEQ ID NO: 15534 - protein, 1204 aa, Neisseria meningitidis
MSASIQAFDPLTVPIAGTNLIEASAGTGKTYGIAALFTRLIVLEQKNVERVLVVTFTKAATAELKTRLRARLDDVLQVLESKEIAELGDGALSDGIAAYCAEHHEGDTFLPELLKQALQKEGRTRLIVRLKAAIGQFDNAAIYTIHGFCQRILRDYAFLCQAPFDVEMTEEDGDRLLIPAQDFWRERVSNDPVLAALAFKRKAVPQTVLAQISRYLSRPYLNFRRPQADLKQAQRNAETSWQTVCRLLPELEAGFWRIHPDLNGNSYRKNSFGNLFKELAQKSAAGQLPFLDKDTHDRLLKLASDKLEAGLKKGKTPDAAVFAELQKLADFGYDLNALEEAEEATIIRLQLDLIGYLNRSLAEMKKSRRERGFDDLLLDVHTALTDNPHAETLARAVAENWETALIDEFQDTDPLQYEIFQKIFIAQNRPLFLVGDPKQAIYSFRGADIYAYLQAAEDARHRYTLATNYRSHAALIGSIGALFRLKERPFVLENIGYSEVGAARAESRLSPERPAVQVRWLHENDNEKANKDVLRRRAADYCADEIAHALNEAAGGRLNFKGCPLQSGDIAVLVRTHNEAVMVSAALKKRQVQSVLLSRESVFASPEAAALSALIGFWLEPRRAGTLRFVLTSGIFGYDAQQLHDFNQNESEILHWAESARTALDNWNQYGIFAAMQQFSQTHGIETRLLSRNNGRSLTNYFQLLELLAAEDAQNRNPAALHKWLRDQISLAGNNSGDNRAIRLESDEDLVKIVTMHASKGLQYPLVYCPFAWDAQDTGPSDWQILHQSANRTELLAKAQLSEDEQKQYADEEMAERLRLLYVALTRAEEQLNIYAAYSTNTADNPLAYLIEGSPQDSRETVRRAYACEKDGIAMLKRNWRRVADNAPSGTNFAFTENAPPPAAYRSNAGQTAEFAANSIPERGFRFVRHTSFTALSRHTQTPDGGEEDACPSLDAAETSVPAMPSETPTASDGISIHDFPKGTQAGLCLHEILEDFKFGQAAAGQETLIADKLKKYGFEEIWLPAVAEMAEACRKTPLTGAYCLSDIPPECRCPEMGFTLHTEDFGLKRLRDWFARDDIRLPEVCRAAAETLDFHTVNGFLNGFIDMVCQDPDGNICIIDYKSNHLGADASAYTQQAMDEAVTHHHYYLQALIYAVAAARYFKLRGQPPAAVSVRYLFLRGTDGKGGGVWRWDIDAAALEQIK

SEQ ID NO: 15535 - protein, 242 aa, Neisseria meningitidis
MGGKMSDKKYNVDEGEIAKFSRIADKWWDKSGEFKTLHDINPLRLDYIDGHADLRGKRVLDVGCGGGILAESMARRGAAFVKGIDMAEQSLETARLHAALNNVADIEYECIRVEDLAEAEPHSFDVVTCMEMMEHVPDPAAIVRACANLVKPDGMVFFSTINKNPKSYLHLIVAAEYLLKFVPKGTHDWKKFIAPAELARMCRQAGLDVADTKGMTYHVLSQTYALCDSTDVNYMFACRPAF

SEQ ID NO: 15536 - protein, 405 aa, Neisseria meningitidis
MEIILGIVMFTVIVLVLALMILFAKSKLVSEGDITIKVNGEKELTMPAGGKLLGALANEGIFIPSACGGGGSCGQCRVVVKSGGGDILPTELSHISKREAREGCRLSCQVSVKTDMDIEVPEEVFGVKKWECTVISNDNKATFIKELKLAIPEGEEVPFRAGGYIQIEAPPHTVAYKDFDIPKEYHEDWDKYNLWQYVSKVDEPILRAYSMASYPEEKGIIMLNVRIATPPPRVPDAPPGQMSSYIWSLKPGDKVTISGPFGEFFAKDTDAEMVFIGGGAGMAPMRSHIFDQLKRLNSKRKITFWYGARSKREMFYVEDFDQLAAEFPNFTWHVALSDPLPEDNWDGYTGFIHNVVYENHLKNHEAPEDCEFYMCGPPIMNQSVIKMLKDLGVEDENILLDDFGG

SEQ ID NO: 15537 - protein, 253 aa, Neisseria meningitidis; identical to SEQ ID NO: 974

SEQ ID NO: 15538 - protein, 314 aa, Neisseria meningitidis
MSASKKFPIPLSYFSIALGLFALGLSWRYGASVGLLPALAAESLLAVASVVWLLLVAAYLIKMFAYRNDFLSDLRDLVQCCFISAIPITAMLEGLALKPYQAGAAAVLIYVGVAGQLAFSMYRAAGLWRGLHSLEATTPIIYLPTVATNFVSASSLAALGHHDYAALFFGAGMFSWLSLEASILGRLRTAAPVGTAARGVVGIQLAPAFVGCGAYFAVGGKVDGFALALIGYGCLQLLFLLRLTRWFWEGGFTMSFWGFSFGFAAMAGCGLHLAASGVLSGLGLTLATAGSAGVALLLVGTLHRIATGRFLVRG

SEQ ID NO: 15539 - protein, 315 aa, Neisseria meningitidis; identical to SEQ ID NO: 7020

SEQ ID NO: 15540 - protein, 280 aa, Neisseria meningitidis; identical to SEQ ID NO: 6063

SEQ ID NO: 15541 - protein, 279 aa, Neisseria meningitidis
MTATAAAIDRLLPQTQCRECGYDGCLPYAQAVATGEAYNLCAPGGATVVRDLAALLGKPLVAPAKTQAKALARIDESACIGCTACIRACPADAIMGAGKLMHTVIADECTGCGLCVAPCPVDCIHMQPVADTVLPRARRFSLSADSRFAAAEHARARYLKRNERKQREADERKAMLAEREAAVRNARPQTPDTPKKPAFNPADLIAKAMAKAQTQQDRLAAADNRKDYQAKQIAEARERAELRRAQRDMKYGSDSEKAAALEYLKQYKAKQEAAQNTAS

SEQ ID NO: 15542 - protein, 367 aa, Neisseria meningitidis; identical to SEQ ID NO: 4663

SEQ ID NO: 15543 - protein, 412 aa, Neisseria meningitidis; identical to SEQ ID NO: 12960

SEQ ID NO: 15544 - protein, 169 aa, Neisseria meningitidis
MIILHTNKGDIKIELDFDKAPVTAKNFEQYVKDGFYDGVIFHRVIKGFMIQGGGMDENMNEKETRDPIQNEASNGLPNDKYTIAMARTSAPHSASAQFFINTADNAFLNFRSKELYGKTVVQDWGYAVFGKVVDGFDVVDAIEGVSTKRHGYHDDVPSEPVVIIKAEAV

SEQ ID NO: 15545 - protein, 335 aa, Neisseria meningitidis
MSTFFRQTAQAMIAKHIDRFPLLKLDQVIDWQPIEQYLNRQKNRYLRDHRGRPACPLLSMFKAVLPGQWHSLSDPELEHSLITRIDFNLFCRFDELSIPDYSTLCRYRNWLAQDDTLSELLKLINRQLTEKGLKIEKASAAVVDATIIQTAGSKQRQTIEVDEEGQVSGQTTPSKDSDARWIKKNGLYKLGYKQHTRTDAEGYIEKLHITPANAHECKHLSPLLEGLPEGTTVYADKGYDSAENRQHLEEHQLLDGIMRKACRNRPLSEVQTKRNRYLSKTRYVVEQSFGTLHRKFRYARAAYFGLIKVSAQSHLKAMCLNLLKAANRLSAPAAA

SEQ ID NO: 15546 - protein, 397 aa, Neisseria meningitidis
MYRHIEYYPGDPILSLVETFKNDPRPEKVNLSIGIYFDDEGKMPVLESVRRAETARAATPAPSPYLPMEGLDTYRSAVQHLLFGKDNPALAQGRIATVQTLGGSGALKVGADFLHRWFPEARAYVSDPTWDNHRGIFEGAGFEVGTYPYYDPAAVGVKFDEMTAFFNTLPENSVLILHPCCHNPTGVDMSEQQWDEVLHIIKTRKLIPFMDIAYQGFGGDLDSDAYAVRKAVEMELPLFVSNSFSKNLSLYGERVGGLSVVCPNKEEADLVFGQLKFTVRRIYSSPPAHGAYIAADVMNSPELYALWQNEVYMMRDRIRAMRQKLYDVLTAQIPDRDFTYFIKQRGMFGYTGLSVEQVRRLRDEFAVYLLDSGRMCVAGLNTSNTDYVARAFAEVLK

SEQ ID NO: 15547 - protein, 213 aa, Neisseria meningitidis
MQKPETIHISGPAGILETIHIPSEQVPARGVAVINHPNPLQGGTNTNKVIQTAAKALSKLGFHCYLPNLRGVGGSGGTHDYGRGETQDCLAVIDYARAQHPEAPEFALSGFSFGGYVATFAAQARIPDLLLLIGAAVCHYTGRPEPSAVPNVAKTLMIHGAEDEVVEIEKALKWAEPQDLPVITIAGSTHFFHGKLIVLRDTILRFAPVCLNG

SEQ ID NO: 15548 - protein, 733 aa, Neisseria meningitidis; identical to SEQ ID NO: 6260

SEQ ID NO: 15549 - protein, 489 aa, Neisseria meningitidis
MDKHNGTYRDLHRPASEFATRDEYLEHELQIMQPKRWRPNLPFRDYRFEWEDLIPAMAGTIGKVVMVGAVAAAFAAPLGLPDSFVLENVRYELLIAAAFILLVSGFFLPGANLPGTHGPLIPMIPIVVSAGGHPLAFGISIAVLGLLMALFRGGSIMAKLTSNGVCGGLLLYLGFIGTTGQVKKLFSWAGGFNMPYIAFTVIIVTIVMYALLEHWKKRWLAVPLGCLIAGVVAFALGAPFEFHTAPGLPPMSPAYWWGENSGWHLGLPTAESFLVVFPFAVLAVAMWSPDFLGHQVFQKISYPEKTDKVLMNIDDTMTSCSVRQAVGSILGGANFTSSWGTYIVPASIAKRPIPGGAVLTAVLCIIAGLWGYPMDLAIWQPVLSVALVVGVYLPLLEAGMEMTRKGKTTQSAAIVVFSSALVNPVFGWALTMLLDNLGLIGCKERSAQLGFAGRVLIPAVGFLILCVAMGAVGMLPGIPPFLEHFKSLG

SEQ ID NO: 15550 - protein, 258 aa, Neisseria meningitidis; identical to SEQ ID NO: 2774

SEQ ID NO: 15551 - protein, 291 aa, Neisseria meningitidis
MLQGSLVALITPMNQDGSIHYEQLRDLIDWHIENGTDGIVAVGTTGESATLSVEEHTAVIEAVVKHVAKRVPVIAGTGANNTVEAIALSQAAEKAGADYTLSVVPYYNKPSQEGMYRHFKAVAEAAAIPMILYNVPGRTVVSMNNETILRLAEIPNIVGVKEASGNIGSNIELINRAPEGFVVLSGDDHTALPFMLCGGHGVITVAANAAPKLFADMCRAALQVDIALARELNNRLIPIYDTMFCEPSPAAPKWAVSALGRCEPHVRLPLVPLTENGQAKVRAALKASGQL

SEQ ID NO: 15552 - protein, 337 aa, Neisseria meningitidis; identical to SEQ ID NO: 263

SEQ ID NO: 15553 - protein, 258 aa, Neisseria meningitidis; identical to SEQ ID NO: 8194

SEQ ID NO: 15554 - protein, 263 aa, Neisseria meningitidis
MNLFFDTELGKQQNKATHKIRVMSEAWLEKNGYCPCCGSKPMKRFANNKPVADLFCPNCHEQYELKSKNQKTIGNIVPDGAYHTMLERIRSDTNPNFFFLAYKKADYSIRQLVLVPKHFITPDMIIPRNKGIKNRPHHIMCSINLAPLPESGKIFLIDDSRIIEPETVLKKWQSNLFLRNQNAERKGWLLAVMKCIDQLPEEFTLSQMYGFEDKLSIQFPQNNHIRDKIRQQLQILRDQNTIEFIGRGLYKKIDKLPPTSKAF

SEQ ID NO: 15555 - protein, 352 aa, Neisseria meningitidis; identical to SEQ ID NO: 327

SEQ ID NO: 15556 - protein, 218 aa, Neisseria meningitidis
VNKRLFCSRNGLRYYLLGGFCLSVFPFLLVFASSVWAVYRTGGQVLPPYVRADAALVLGAAAWDKRPSPVFRERINHAIALYQSRRVGKIVFTGGRTKKGYMTEAEVGRRYALKQGVPARNILFENTSRNTYENLNNIRPVLRANGIASVVIVSDPYHLARAAEMAEDLGVRVYMSATPTTRFDAGNKKKIFMLQEGYALSLYRLEKWGSRFLGWLSD

SEQ ID NO: 15557 - protein, 594 aa, Neisseria meningitidis
MELMTVLLPLAALVSGVLFTWLLMKGRFQGEFADLNAQLAEKAARCDFVEQAHAEIASELAVLDGKYRHLQDENYALGNRFSAAEKQIAHLQEKEAESVRLKQSYIELQEKAQGLAVENERLATQLGQERKAFADQYALERQIRQRIETDLEESRQTVRDVQNDLADVGNRFAAAEKQIAHLQEKEAEAERLRQSHTELQEKAQGLAVENERLATQIEQERLASEEKLSLLGEARKSLSDQFQNLANTILEEKSRRFTEQNREQLHQVLNPLNERIHGFGELVKQTYDKESRERLTLENELKRLQGLNAQLHSEAKALTNALTGTQNKVQGNWGEMILETVLENSGLQKGREYTVQAASVRKEEDGGTRRLQPDVLVNLPDNKQIVIDSKVSLTAYVRYTQAADADTAARELAAHVASIRAHMKGLSLKDYTDLEGVNTLDFVFMFIPVEPAYLLALQHDAGLFQECFDKRIMLVGPSTLLATLRTVANIWRNEQQNQNALAIADEGGKLYDKFVGFVQTLESVGKGIDQAQNSFQTAFKQLAEGRGNLVGRAEKLRLLGVKANKQLARDLTERANETTALSESLEYAAEDEAV

SEQ ID NO: 15558 - protein, 66 aa, Neisseria meningitidis; identical to SEQ ID NO: 1185

SEQ ID NO: 15559 - protein, 250 aa, Neisseria meningitidis
MTDILIDNTATEAVRALIRAFPLVPVSQPPEQGSYLLAEHDTVSLRLVGEKSSVIVDFASGAAQYRRTKGGGELIAKAVNHTAHPTVWDATAGLGRDSFVLASLGLAVTAFEQHPAVACLLSDGIRRALLNPETQDTAAHINLHFGNAAEQMPALVQTQGKPDIVYLDPMYPERRKSAAVKKEMTYFHRLVGEAQDEAALLHTARQTAKKRVVVKRPRLGEHLAGQAPAYQYTGKSTRFDVYLPYGTDKG

SEQ ID NO: 15560 - protein, 531 aa, Neisseria meningitidis
MSQEILDQVRRRRTFAIISHPDAGKTTLTEKLLLFSGAIQSAGTVKGKKTGKFATSDWMDIEKQRGISVASSVMQFDYKDHTVNLLDTPGHQDFSEDTYRVLTAVDSALMVIDAAKGVEAQTIKLLNVCRLRDTPIVTFMNKYDREVRDSLELLDEVENILKIRCAPVTWPIGMGKNFKGVYHILNDEIYLFEAGGERLPHEFDIIKGIDNPELEQRFPLEIQQLRDEIELVQAASNEFNLDEFLAGELTPVFFGSAINNFGIQEILNSLIDWAPAPKPRDATVRMVEPDEPKFSGFIFKIQANMDPKHRDRIAFLRVCSGRFERGMKMKHLRINREIAASSVVTFMSHDRELVEEAYAGDIIGIPNHGNIQIGDSFSEGEQLAFTGIPFFAPELFRSVRIKNPLKIKQLQKGLQQLGEEGAVQVFKPMSGADLILGAVGVLQFEVVTSRLANEYGVEAVFDSASIWSARWVSCDDKKKLAEFEKANAGNLSIDAGGNLAYLAPNRVNLGLTQERWPDIVFHETREHSVKL

SEQ ID NO: 15561 - protein, 896 aa, Neisseria meningitidis
MSDNRLDTARRHSLFLARQLDNGKLKPEIFLPMLDKVLTEADFQAFADWDKIRAEENEEELARQLRGLRRYVVSQIIVRDINRISDLNEVTRTITLFADFAVNTALDFAYDYYRDMYGTPIGRYTKSPQHLSVVAMGKAGGYELNVSSDIDLIFVYPESGDTDGRRERGNQEFFTKVGQKLIALLNDITADGQVFRVDMRLRPDGDSGALVLSETALEQYLITQGREWERYAWCKGRVVTPYPNGIKSLVRPFVFRKYLDYGAYEAMRKLHRQISSEVGKKGMADNIKLGAGGIREVEFIAQIFQMIRGGQMRALQLKGTQETLEKLAESGIMPSENVETLLAAYRFLRDVEHRLQYWDDRQTQTLPASPEQRQRLAESMGFDDYADFLNALNQHRNQVNRLFNEILSEPGEQTQSNGEWQWVWQEKPDEEGRQCRLKEHGFDAEAVAARLDQIRHGHKYRRLSAHAQPRFDALMPLLVRAAAAQNNPTDTLMRLFDFLENISRRSAYLAFLNEHPQTLAQLAEIMGQSSWAAAYLNKYPILLDELISAQLLDTAFDWDKLAAELSDGIKACGGDTEAQMDTLRRFQHAQVFRLAVQDLAGLWTVESLSDQLSALADTILAAALLCAWADMPKKHRDTPQFAVVGYGKLGGKELGYASDLDLVYLYDDPHPDAGDVYSRLARRLTNWLSAATGAGSLYETDLRLRPNGDAGFLAHSIAAFEKYQRENAWTWEHQSLTRARFICGTPEIQTAFDRIRTEMLTAERDQTALAGEIIEMREKMFPTHPPADSNVKYARGGVVDVEFIVQYLILAHARQYPQLLDNYGNIALLNIAADCSLIDKNLAEQSRTAYRFYRRQQHNTKLRDAAKTEVTGELLAHYGNVRKLWRDVFGEEAATA

SEQ ID NO: 15562 - protein, 223 aa, Neisseria meningitidis; identical to SEQ ID NO: 7430

SEQ ID NO: 15563 - protein, 558 aa, Neisseria meningitidis; identical to SEQ ID NO: 1615

SEQ ID NO: 15564 - protein, 166 aa, Neisseria meningitidis
LPQCRLKPFRRHYPAKCSNNMPKATFYTHVAQVPIFTCRLIARAIRDGGRILVWSDSFGQLQELDKMLWQYEAESFIPHEIWETEEAMPSEPSVLLACGGNLPRIPEGMTVLNLSDGFWNTAPVLPARVLEIVGNSLEELADSRERFTAYRRSGFAIEHHGMEGKA

SEQ ID NO: 15565 - protein, 196 aa, Neisseria meningitidis; identical to SEQ ID NO: 12580

SEQ ID NO: 15566 - protein, 253 aa, Neisseria meningitidis; identical to SEQ ID NO: 5498

SEQ ID NO: 15567 - protein, 183 aa, Neisseria meningitidis
LSGINIKLKSGDSLLIRGPSGCGKTSLLRALAGLWPFGSSGKVSRPPHQDILFLPQRPYTAQGSLRDAVCYPDIDKQHPELIEAMNTCRLGYLVDKLDKTDDWQHKLSPGELQRVAFVRALLSKPKIVLLDEATAALDEPTEALLYRALKQKLPDSIIISIGHRSTLNAFHNMHLDVGNAACG

SEQ ID NO: 15568 - protein, 433 aa, Neisseria meningitidis; identical to SEQ ID NO: 14229

SEQ ID NO: 15569 - protein, 64 aa, Neisseria meningitidis
MCDFRGYEEPEMVKKRPVVVIARNRHNGKLVTVVPLSSTEPVPLADYHHKMSGNPLPDKPHIQC

SEQ ID NO: 15570 - protein, 145 aa, Neisseria meningitidis; identical to SEQ ID NO: 7320

SEQ ID NO: 15571 - protein, 760 aa, Neisseria meningitidis; identical to SEQ ID NO: 4734

SEQ ID NO: 15572 - protein, 204 aa, Neisseria meningitidis
MSFDNYLVPTVIEQSGRGERAFDIYSRLLKERIVFLVGPVTDESANLVVAQLLFLESENPDKDIFFYINSPGGSVTAGMSIYDTMNFIKPDVSTLCLGQAASMGAFLLSAGEKGKRFALPNSRIMIHQPLISGGLGGQASDIEIHARELLKIKEKLNRLMAKHCGRDLADLERDTDRDNFMSAEEAKEYGLIDQILENRASLRL

SEQ ID NO: 15573 - protein, 192 aa, Neisseria meningitidis; identical to SEQ ID NO: 746

SEQ ID NO: 15574 - protein, 381 aa, Neisseria meningitidis
MQNNSYGYAVSVRVGGKEHRHWERYDIDSDFLIPADSFDFVIGRLGPEAAIPDLSGESCEVVIDGQIVMTGIIGSQRHGKSKGGRELSLSGRDLAGFLVDCSAPQLNVKGMTVLDAAKKLAAPWPQIKAVVLKAENNPALDKIDIEPGETVWQALTHIANSVGLHPWLEPDGTLVVGGADYSSPPVATLCWSRTDSRRNIERMDIEWDTDNRFSEVTFLAQSHGRSGDSAKHDLKWVYKDPTMTLHRPKTVVVSDADNLAALQKQAKKQLADWRLEGLTLTITVGGHKTRDGVLWQPGQRVHVIDDEHGIDAVFFLMGRRFMLSRMDGTQTELRLKEDGIWTPDAYPKKAEAVRKRKGKRKGVSHKGKKGGKKQAETAVFE

SEQ ID NO: 15575 - protein, 467 aa, Neisseria meningitidis; identical to SEQ ID NO: 687

SEQ ID NO: 15576 - protein, 139 aa, Neisseria meningitidis
MTEYPGIGSPLFYGVFFAAVLVMIALDMFSLKKNSSHKVGVKEALAWSGLWVAVSCLFAGWLYFKLAGNPGYGAAVAKEKVLEFFTGYILEKSLAVDNIFVFLMIFGYFKVAPQFQHRVLLYGVLGALVLRTVMIFVGA

SEQ ID NO: 15577 - protein, 350 aa, Neisseria meningitidis; identical to SEQ ID NO: 8682

SEQ ID NO: 15578 - protein, 1862 aa, Neisseria meningitidis
MNKGLHRIIFSKKHSTMVAVAETANSQGKGKQAGSSVSVSLKTSGDLCGKLKTTLKTLVCSLVSLSMVLPAHAQITTDKSAPKNQQVVILKTNTGAPLVNIQTPNGRGLSHNRYTQFDVDNKGAVLNNDRNNNPFLVKGSAQLILNEVRGTASKLNGIVTVGGQKADVIIANPNGITVNGGGFKNVGRGILTTGAPQIGKDGALTGFDVRQGTLTVGAAGWNDKGEADYTGVLARAVALQGKLQGKNLAVSTGPQKVDYASGEISAGTAAGTKPTIALDTAALGGMYADSITLIANEKGVGVKNAGTLEAAKQLIVTSSGRIENSGRIATTADGTEASPTYLSIETTEKGAAGTFISNDGRIESKGLLVIDTGEDIGLRNGAVVQNNGNRPAATVLNAGRNLVIESKANVNNAKGSTNLSTGGRTTINDATIQAGSSVYSSTKGDTELGENTRIIAENVTVLSNGSIGSAAVIEAKDTAHIEAGKPLSLETSNVASNIRLNNGSIKGGKQVVLMADDDIQAKASHLNASGNLYIHAGKDLDLNADKDLSTQSISLRADNTALISSNGNTLTAEKNLDIQAGSLSVRQSNLQSSGGNVQMSATKGNISLNQSWINASQNIDTAALQGNIISDGLTAVAEVGRVSLLANGNVDFNGLNTLIAEGDINAGSVGKGRLKMDNTDIYASAGDVKLVAGGQLDLGNGTVNGGHISLDSNKGSMVVQNVHLNARASLKVDADQTLTINNSKLNSDHNTQINTNHGHMTLNQLDAHSRRHMSISAQGKGKGKDSGQILQNDQQNSKSTLAADGVLSLNSSALQVLDNTTLRGGAINIKAGGGIIKRGHIDWETQDTATMRSAELKPLSGMMSIESGGDNPLTVEPGNRIVSAGDLAVNHNGTFQISARAGNNGNPSAQTASVSAKGNIGIVAGEVDIDAANIAAGKDLALVATKGNISLNSIRNTFSNYQLKTDKHNITQQLTDVEQELSKLTSDPKYRKAQDLSQMLRRKYKRRDKVFGDSEARLRGLRAKINAADEAWAERQSPVKALLERKQLLQQALLTVSQPGSGHENQGSTLSGQNIKLLAAGGIRIQGSKVAATQQANIQAAGFLPAPAAEELQEGRLQSAIDISGVLDTFEYGQQGSDKYGYAIFSRPSEISGKTGVTLSAPNANENSRISLSAANIEAENGKIKIQSYGDQYYYARQGELYTFERRSYKTGKWYNRKHITEVKEHKNAKPDAVNLSASQGIDIKSGGSIDAYATAFDAPKGSINIEAGRKLTLYAVEELNYDKLDSQKRRRFLGISYSKAHDTTTQVMKTALPSRVVAESANLQSGWDTKLQGTQFETTLGGATIRAGVGEQARADAKIILEGIKSSIHTETVSSSKSTLWQKQAGRGSNIETLQLPSFTGPVAPVLTAPGGYIADIPKGNLKTEIEKLSKQPEYAYLKQLQVAKNINWNQVQLAYDRWDYKQEGLTEAGAAIIALAVTVVTSGAGTGAVLGLNGAAAAATDAAFASLASQASVSFINNKGDVGKTLKELGRSSTVKNLVVAAATAGVADKIGASALNNVSDKQWINNLTVNLANAGSAALINTAVNGGSLKDNLEANILAALVNTAHGEAASKIKQLDQHYIVHKIAHAIAGCAAAAANKGKCQDGAIGAAVGEIVGEALVKNTDFSRMSATEIEKAKAKITAYSKLVAGTASAVVGGDVNTAANAATVAVENNSLFQPQTTLEAGVRNAILRGDIQELRLLLGEANFSTADAAYAQRILASMEKIGESNSRLLAERYGVDWLNKVHHIFKGHQGSIGNTLIQKSGSMENAVVATQKAVDALKLTKTGNYPVTVTVNGITVIVRVYVNNGVSRIATILKM

SEQ ID NO: 15579 - protein, 506 aa, Neisseria meningitidis
MQLIDYSHSFFSVVPPFLALALAIITRRVLLSLGIGILVGVAFLVGGNPVDGLTHLKDMVVGLAWSDGDWSLGKPKILVFLILLGIFTSLLTYSGSNQAFADWAKRHIKNRRGAKMLTACLVFVTFIDDYFHSLAVGAIARPVTDKFKVSRAKLAYILDSTAAPMCVLMPVSSWGASIIATLAGLLVTYKITEYTPMGTFVAMSLMNYYALFALIMVFVVAWFSFDIGSMARFEQAALNEAHDETAVSDGSRGRVYALIIPVLALIASTVSAMIYTGAQASETFSILGAFENTDVNTSLVFGGTCGILAVVLCTLGTIKTADYPKAVWQGAKSMFGAIAILILAWLISTVVGEMHTGDYLSTLVAGNIHPGFLPVILFLLASVMAFATGTSWGTFGIMLPIAAAMAVKVDPSLIIPCMSAVMAGAVCGDHCSPISDTTILSSTGARCNHIDHVTSQLPYALTVAAAAASGYLALGLTKSALLGFGTTGIVLAVLIFLLKDKKRANA

SEQ ID NO: 15580 - protein, 119 aa, Neisseria meningitidis; identical to SEQ ID NO: 6447

SEQ ID NO: 15581 - protein, 72 aa, Neisseria meningitidis; identical to SEQ ID NO: 113

SEQ ID NO: 15582 - protein, 334 aa, Neisseria meningitidis
MTIIVTGAAGFIGSNIVKALNQRGITDIVAVDNLSKGEKFKNLAECEIAHYLDKHEFIRQVREHILPYQNIEAVFHQGACSDTMNHDGLYMMDNNYQYTLDLLDWCQDKRIPFLYASSAAVYGKGEIFREERELEKPLNVYGYSKFLFDQVLRRRMKEGLTAQVVGFRYFNVYGQHEQHKGRMASVAFHHFHQYREHGYVNLFGSNDGYGNGEQTRDFVSVEDVAKVNLYFFDHPELSGIYNLGTGRSQQFNELAAATVNACRAAEGKPEMSLKELVEEELIRYIPFPDALKGKYQSFTQADITKLREAGYKEEFFDVKSGVDRYVKWMLENLA

SEQ ID NO: 15583 - protein, 166 aa, Neisseria meningitidis; identical to SEQ ID NO: 15516
  misc_feature 162, 163, 164: 'Xaa' is any amino acid

SEQ ID NO: 15584 - protein, 512 aa, Neisseria meningitidis
MFHSIEKYRTPAQVLLGLIALTFVGFGVSTVSHPGADYIVQVGDEKISEQSLNAAVQNEQADGGSPSRDAVFQSLLQRAYLKQGAKLMGISVSSEQIKQIIVDDPNFHDANGKFDHALLNRYLSQRHMSEDQFVEEIRDQFALQNLVNLVQNGVLVGDAQAEQLIRLTQVNRTIRSHTFNPDEFIAQVKVSEADLQKFYNANKKDYLLPKAVKLEYVALNLKDFADKQTVSETEVKNAFEERVARLPANEAKPSFEQEKAAVENELKMKKAVADFNKAKEKLGDDAFNHPSSLAEAAKNSGLKVETQETWLSRQDAQMSGMPENLINAVFSDDVLKKKHNSEVLTINSETAWVVRAKEVREEKTLPFAEAKDAVRQAYIRTEAAKLAENKAKDVLTQLNGGKAVDVKWSEVSVLGAQQARQSMPPEAYAELLKAKPANGKPAYVRLIGLPAPVIVEVQAVTPPDDIAAQLPLAKQALAQQQSANTFDLLIRYFNGKIKQTKGAQSVDNGDGQ

SEQ ID NO: 15585 - protein, 131 aa, Neisseria meningitidis
VKLLANNWQPIAIIALVGTLLAVSHHQGYKSAFAKQQAVIDKMERDKAQALLLSAQNYARELELARAEAKKYEVKAHAVGMALAKKQAEVSRLKTERDLCKIPFPPDSRNPNTGFRLFSPQIPPNFTQIPP

SEQ ID NO: 15586 - protein, 181 aa, Neisseria meningitidis; identical to SEQ ID NO: 3765

SEQ ID NO: 15587 - protein, 123 aa, Neisseria meningitidis
MKRQAFFKLMACAAFLSAISLRLPVLGACYAILSLYAFALYGIDKRRAVRGKRRIPEHRLLLPALFGGWAGAYLGSRIFRHKTAKKRFVVLFRLTVSGNVLATCILIDYFVPPELFVKLGQHL

SEQ ID NO: 15588 - protein, 64 aa, Neisseria meningitidis; identical to SEQ ID NO: 6143

SEQ ID NO: 15589 - protein, 245 aa, Neisseria meningitidis; identical to SEQ ID NO: 6094

SEQ ID NO: 15590 - protein, 138 aa, Neisseria meningitidis; identical to SEQ ID NO: 6327

SEQ ID NO: 15591 - protein, 70 aa, Neisseria meningitidis; identical to SEQ ID NO: 232

SEQ ID NO: 15592 - protein, 213 aa, Neisseria meningitidis; identical to SEQ ID NO: 9820

SEQ ID NO: 15593 - protein, 349 aa, Neisseria meningitidis
LILMNTPIPFSERLIRWQKQHGRHHLPWQVKNPYCVWLSEIMLQQTQVATVLDYYPRFLEKFPTVQALAAAPQDEVLSLWAGLGYYSRARNLHKAAQQVVEQFGGTFPSERKDLETLCGVGRSTAAAISAFSFNRRETILDGNVKRVLCRVFARDGNPQDKKFENSLWTLAESLLPSENADMPAYTQGLMDLGATVCKRTKPLCHQCPMADICEAKKQNRTAELPRKKTAAEVPTLPLYWLIVRNRDGAILLEKRPAKGIWGGLYCVPCFESLNGLSDFAAKFSLTMADMDEQTALTHRLTHRLLMITPFEGQMPSESPSDGIWIKPAHLKDYGLPKPLEIYLNGNRLE

SEQ ID NO: 15594 - protein, 241 aa, Neisseria meningitidis
METQNKPTVTDIDRPILVPPGGHKKVLLHSCCAPCSGEVMEAMLASGIDYTIYFYNPNIHPHKEYMLRKEENVRFAEKFGIPFIDKDDDYENDRKEWFAKAKGMEFEPERGIRCTMCFDMRFEKAAQYAHEHGFPVFTSSLGISRWKNMAQINDCGRRAAAPYDDVVYWDFNWRKGGGSARMIEISKRENFYQQEYCGCAYSLRDSNAHRKSQGRIPIKLGVLYYGDESTQYEPAPIRVDK

SEQ ID NO: 15595 - protein, 318 aa, Neisseria meningitidis
MKVLFIADPMASFKTYKDTTYAMMREMAKRGWQLFHTLSGELSVNGGLVTAQASAFEFLGAKNDDDHEWFKAADKVQTALKAFDAVIMRTDPPFDMQYLYATQLLTLAEQQGAKVFNSGQAMRDFNEKLAILNFSRFIAPTLVTTRSADVRVFLKEHGDIIIKPLDGMGGMGIFRLTEKDPNIGSILETLMQLDSRTIMAQRYIPEIVHGDKRILIIGGEVVPYALARIPQNGETRGNLAAGGRGVAQELGGRDREIAETLAPELKRRGILLAGLDVIGSNLTEVNVTSPTGFQEIMKQKGFDVAAMFADAVAAWSVR

SEQ ID NO: 15596 - protein, 119 aa, Neisseria meningitidis; identical to SEQ ID NO: 8399

SEQ ID NO: 15597 - protein, 321 aa, Neisseria meningitidis; identical to SEQ ID NO: 2168

SEQ ID NO: 15598 - protein, 82 aa, Neisseria meningitidis; identical to SEQ ID NO: 1233

SEQ ID NO: 15599 - protein, 254 aa, Neisseria meningitidis; identical to SEQ ID NO: 10869

SEQ ID NO: 15600 - protein, 97 aa, Neisseria meningitidis; identical to SEQ ID NO: 177

SEQ ID NO: 15601 - protein, 422 aa, Neisseria meningitidis
LTNRGGAKLKTNSKSSERMSEVEYFSHFISDGKGKLLEIPQRRGKQDGVFVDWISFTFHEDTLLKVSGCPLFSDAEYMYVLSRKLEEILGFGITRKCKSRGNKFYESMYRLGSDDVDYGEVHFGGQRNTVLVELKGTGCSVASPGWELRLKQFLDDSIRTRITRIDLALDFFDGEYTPDQALLDHDNGFFDNSNQRPKSETIGTAWRNEDGSGKTFYVGRKKNSRFVRVYEKGRQLGDKESKWVRFEIQFNYGDIEIPLDILINQGSYFCGAFPICRKFKNMPVPERFDQRKKTLNLTFEHKLHYAKNAVGKLVNFMIEMGFDNSEIVESLKADSGFPKGLEPEKYALEMLRDGLKHGFIHEQPDIDLEIELDELGVIAFKNSDKFDREKRLFSPDYDVEKERKYQEYLSKVYHQNVDYDYF

SEQ ID NO: 15602 - protein, 69 aa, Neisseria meningitidis; identical to SEQ ID NO: 3057

SEQ ID NO: 15603 - protein, 389 aa, Neisseria meningitidis; identical to SEQ ID NO: 1828

SEQ ID NO: 15604 - protein, 41 aa, Neisseria meningitidis; identical to SEQ ID NO: 1263

SEQ ID NO: 15605 - protein, 449 aa, Neisseria meningitidis; identical to SEQ ID NO: 5514

SEQ ID NO: 15606 - protein, 218 aa, Neisseria meningitidis
MTIKIILIDDHTLFRSGIKALLSRQHGFEVIGEAADGLSGIKMISRLQPDVVLLDLDMPGMNGREALSQIISINPQQAVIMLTVSEDSDDLTECIRIGARGYLLKNINADFLLESIRKAAEGDNVFSPEMTAKLVKSLISPQSTQGTQALSSLTPRELEILGYLAAGHSNKIIARHLDLAESTVKVHVQNLLRKLNLSSRVQAAVYAIRHNVPQPVLE

SEQ ID NO: 15607 - protein, 446 aa, Neisseria meningitidis
MLNPSRKLVELIRILDEGGFIFSGDPVQATEALRRVDGSTEEKIIRRAEMIDRNRMLRETLERVRAGSFWLWVAAATFAFFTGFSGTYLLMDNQGLNFFLVLAGVLGMNTLMLAVWLAMLFLRVKVGRFFSSPATWFRGKDPVNQAVLRLYADEWRQPSVRWKIGATSHSLWLCTLLGMLVSVLLLLLVRQYTFNWESTLLGDSSSVRLVEMLAWLPAKLGFPVPDARAVIEGRLNGNIADARAWSGLLVGSIACYGILPRLLAWAVCKILLKTSENGLDLEKPYYQAVIRRWQNKITDADTRRETVSAVSPKIVLNDAPKWAVMLETEWQDGEWFEGRLAQEWLDKGVAANREQVAALETELKQKPAQLLIGVRAQTVPDRGVLRQIVRLSEAAQGGAVVQLLAEQGLSDDLSEKLEHWRNALTECGAAWLEPDRAAQEGRLKDQ

SEQ ID NO: 15608 - protein, 61 aa, Neisseria meningitidis; identical to SEQ ID NO: 6755

SEQ ID NO: 15609 - protein, 39 aa, Neisseria meningitidis; identical to SEQ ID NO: 7406

SEQ ID NO: 15610 - protein, 271 aa, Neisseria meningitidis; identical to SEQ ID NO: 3345

SEQ ID NO: 15611 - protein, 168 aa, Neisseria meningitidis
MFRRHFPVREKALNITVLAVGTKMPRWVDEAVAEYAKRFGRDVAYALKEIKPEKRGAGVNAAQGMAAEEKRILEAIPQGAFLVVLDERGKAPTSVELAEHLKSWQQNGEHVCFVIGGADGMTDRLKQQARMMMRLSSLTLPHGMVRVLLTEQLYRAASILHNHPYHRE

SEQ ID NO: 15612 - protein, 298 aa, Neisseria meningitidis
MESENIISAADKARILAEALPYIRRFSGSVAVIKYGGNAMTEPALKEGFARDVVLLKLVGIHPVIVHGGGPQINAMLEKVGKKGEFVQGMRVTDKEAMDIVEMVLGGHVNKEIVSMINTYGGHAVGVSGRDDHFIKAKKLLIDTPEQNGVDIGQVGTVESIDTGLVKGLIERGYIPVVAPVGVGEKGEAFNINADLVAGKLAEELNAEKLLMMTNIAGVMDKTGNLLIKLTPKRIDELIADGTLYGGMLPKIASAVEAAVNGVKATHIIDGRMPNALLLEIFTDAGIGSMILGGGEDA

SEQ ID NO: 15613 - protein, 725 aa, Neisseria meningitidis
MTRFKYSLLFAALLPVYAQADVSVSDDPKPQESTELPTITVTADRTASSNDGYTVSGTHTPLGLPMTLREIPQSVSVITSQQMRDQNIKTLDRALLQATGTSRQIYGSDRAGYNYLFARGSRIANYQINGIPVADALADTGNANTAAYERVEVVRGVAGLLDGTGEPSATVNLVRKRPTRKPLFEVRAEAGNRKHFGLGADVSGSLNTEGTLRGRLVSTFGRGDSWRQRERSRNAELYGILEYDIAPQTRVHAGMDYQQAKETADAPLSYAVYDSQGYATAFGPKDNPATNWANSRHRALNLFAGIEHRFNQDWKLKAEYDYTRSRFRQPYGVAGVLSIDHNTAATDLIPGYWHADPRTHSASVSLIGKYRLFGREHDLIAGINGYKYASNKYGERSIIPNAIPNAYEFSRTGAYPQPASFAQTIPQYGTRRQIGGYLATRFRAADNLSLILGGRYSRYRTGSYDSRTQGMTYVSANRFTPYTGIVFDLTGNLSLYGSYSSLFVPQSQKDEHGSYLKPVTGNNLEAGIKGEWLEGRLNASAAVYRARKNNLATAAGRDPSGNTYYRAANQAKTHGWEIEVGGRITPEWQIQAGYSQSKTRDQDGSRLNPDSVPERSFKLFTAYHFAPEAPSGWTIGAGVRWQSETHTDPATLRIPNPAAKARAADNSRQKAYAVADIMARYRFNPRAELSLNVDNLFNKHYRTQPDRHSYGALRTVNAAFTYRFK

SEQ ID NO: 15614 - protein, 444 aa, Neisseria meningitidis; identical to SEQ ID NO: 1459

SEQ ID NO: 15615 - protein, 218 aa, Neisseria meningitidis
MDFEKARFNMVEQQIRPWDVLDFDVLDALAEIPRELFVDEDLQGLAYADMALPLANGHKMLEPKVVARLAQGLKLTKNDTVLEIGTGSGYATALLAKLAGKVVSDDIDAEQQKRAKAVLDGLSLENIDYVQNNGLTELSAGAPFDAVYVGGAVNLVPEVLKEQLKDGGRMVVIVGRKPVQRALLITRKGDVFEEKVLFDTLVAHLDDKDADPFGGFQF

SEQ ID NO: 15616 - protein, 343 aa, Neisseria meningitidis; identical to SEQ ID NO: 7589

SEQ ID NO: 15617 - protein, 133 aa, Neisseria meningitidis; identical to SEQ ID NO: 8

SEQ ID NO: 15618 - protein, 176 aa, Neisseria meningitidis; identical to SEQ ID NO: 1829

SEQ ID NO: 15619 - protein, 276 aa, Neisseria meningitidis
LNAARRQRYNRPQLFFPNIIMTTTEHDNDDAFLLRYSRHILLDEIGIEGQQKLSAAHILVVGCGGLGAAALPYLAASGIGTLTIADSDTVELHNLQRQVAFDEGDVGKPKAEALADRLKRINHNVDVRTVNEKLDGCRLTGLVQTADIVLDCCDNYATRQAVNRVCVQTKTPLVSGAAVRFEGQLAVYRPDLPDSPCYACLFDGGSASDGICSLFGVFSPLVGIIGSTQAAEALKILLDAGEPSHGRLAVYRALEGGWQYFDLPRNPECPVCGAER

SEQ ID NO: 15620 - protein, 283 aa, Neisseria meningitidis
MHILLTALLKCLSLLPLSCLHTLGNRLGHLAFYLLKEDRARIVANMRQAGMNPDPKTVKAVFAETAKGGLELAPAFFRKPEDIETMFKAVHGWEHVQQALDKHEGLLFITPHIGSYDLGGRYISQQLPFPLTAMYKPPKIKAIDKIMQAGRVRGKGKTAPTSIQGVKQIIKALRSGEATIVLPDHVPSPQEGGEGVWVDFFGKPAYTMTLAAKLANVKGVKTLFFCCERLPDGQGFDLHIRPVQGELNGDKAHDAAVFNRNAEYWIRRFPTQYLFMYNRYKMP

SEQ ID NO: 15621 - protein, 119 aa, Neisseria meningitidis; identical to SEQ ID NO: 2176

SEQ ID NO: 15622 - protein, 291 aa, Neisseria meningitidis; identical to SEQ ID NO: 5426

SEQ ID NO: 15623 - protein, 312 aa, Neisseria meningitidis; identical to SEQ ID NO: 8892

SEQ ID NO: 15624 - protein, 174 aa, Neisseria meningitidis
MQTRILSAVLLAFSTAAFAGGAFTLQFDNPSEDGGFTQNQILSAPYGFGCSGGNASPALSWKNPPAGTKSFVLTVYDKDAPTGLGWMHWVVADIPADVHRRNATSLQLSRCANIADDPSAAISAVISLRICRIRLTPSYTAKPMPSCCNHANTPQSATSAALCGTSSSVSTAAA

SEQ ID NO: 15625 - protein, 50 aa, Neisseria meningitidis
MSGIYLPRLFPPHIAERGLLYFQQGKVLDVRKTSAGHYRTEVCGSENYWV

SEQ ID NO: 15626 - protein, 167 aa, Neisseria meningitidis
MSDPNLIDPEIFAAEGQNLQGSFLLEELDERVSSHDYPADRQTKISFTLTGGRDRLQRLFLDLNVKADMPLICQRCIKPMPFMLDESSRIVLFSNEESLDESMLADEELEGILIEKELDVRTLVEDQILMSLPFSPRHEDCGDNGTLEEVNRDKPNPFAVLAGLKSS

SEQ ID NO: 15627 - protein, 127 aa, Neisseria meningitidis
MTFAYWCILIACLLPLFCAAYAKKTGGFRFKDNHNPRDFLARTQGTAARAHAAQQNGFEAFAPFAAAVLTAHATGNAGQATVNTLAGLFILFRLAFIWCYIADKAALRSLMWAGGFACTVGLFVAAA

SEQ ID NO: 15628 - protein, 226 aa, Neisseria meningitidis
  misc_feature 226: 'Xaa' is any amino acid
MVKGKSMVSEEIELNHYLEAKGIKAVESDLGEFIVQMAGEKPTHIVMPAIHKTKEQVSELFHQNLGTPLTDDVDQLTGFARKALRDIYSTADVGLSGVNFAVAETGTLCLVENEGNGRLSTTVPPVHIAITGIEKVVAKLSDIPPLYSLLPRSAIGQNITTYFNMITGPRRSEELDGPQEMHLVLLDNGRSQAYAEDQMRRTLQCIRCGACMNHCPVYTRIGGAAX

SEQ ID NO: 15629 - protein, 74 aa, Neisseria meningitidis
MEKPLNFKPIPYPQTRESAAGWFKRNGVCKAHWAKYFNLERTTVEHLLRGKLKGNFGKSHEAAVLLGMKEKSDD

SEQ ID NO: 15630 - protein, 47 aa, Neisseria meningitidis; identical to SEQ ID NO: 7066

SEQ ID NO: 15631 - protein, 301 aa, Neisseria meningitidis
MNQTAINRADVRTRFIFDDMPVRGLHVRLENVWQHIVKQKNYPAAIRRALGELLAAGVLLSGNLKNEGTLIVQVQGQGRLKMLVAEATSDRTVRATARWDEAAEIADDESLGDLLGGNGVFVLTLQPKDGEPWQGVVPLEGDGIAQMLMNYMKRSEQLDTHIVLSASDEAAGGLLVQRLPEAVLDEEAWEHVSTLARTLTAEELAELDAQHVLYRLFHETPPRVFEPETFEFSCTCSRGKVSDMLMLGGEEVGGVVAEQGSIEVDCDFCHSKYVFDETDVNALFGEDVVGVAREQTRHTVQ

SEQ ID NO: 15632 - protein, 434 aa, Neisseria meningitidis
MAMAKNVVVIGAQWGDEGKGKIVDWLAEEAGGVVRFQGGHNAGHTLVVGGKKTILRLIPSGILHESLDCFIGSGVVVSPEALLGEIDELNAAGVKNVEGRLKIAPTCPLILPYHIALDQAREASRGKGKIGTTGRGIGPAYEDKVARRAIRAADLLHPEKLREKLDAVLAYYNVQLQHLHNAEPVKAEDVMAVIEKVAPRIAPMITDVSRVLNEKNKNGEKLLFEGAQGALLDIDYGTYPFVTSSNCLAGAASAGAGVGPQMLDYVLGIVKAYTTRVGSGPFPTELFDEVGVGLAERGHEFGSVTGRARRCGWFDAAALKRSIQINGISGMCITKLDVMDGVETINICVGYELPDGGKTDILPCGSDAVETCKPIYETMPGWRKSTFGVKDYGALPENAKAYLKRIEEVCGAPVAIVSTGPDREETIVLHHPFA

SEQ ID NO: 15633 - protein, 135 aa, Neisseria meningitidis
MAYTTAKAAEKIGISAHTLRFYDKEGLLPNIGRDEYGNRCFTDNDLQWLGLLQCLKNTGMSLKDIKRFAECTVIGDDTIEERLSLFENQIENVKCQIAELKRYLDLLEYKLAFYQKAKALGSVKAVNLPQIPETA

SEQ ID NO: 15634 - protein, 82 aa, Neisseria meningitidis; identical to SEQ ID NO: 3017

SEQ ID NO: 15635 - protein, 250 aa, Neisseria meningitidis
MANQRPIYGFHAVNARLWQNPKSIVELYVQEGKNDVRTREVLEKAANENIRVYFADADRLNAISKGARHQGVVGFIDASKNHVHLEDVLENLSEPPLLLILDGITDPHNLGACLRTADAMGVHAVIAPKDKSAGLNATVSKVASGAAETVPYITVTNLARTLRELKEYGIWIIGTDMSGESDLYHCNLPDSAAWVMGNEGDGMRRLTREHCDMLVSIPMFGTVESMNVSVSAGMVLSETRRQRVLKNEKV

SEQ ID NO: 15636 - protein, 222 aa, Neisseria meningitidis; identical to SEQ ID NO: 197

SEQ ID NO: 15637 - protein, 214 aa, Neisseria meningitidis; identical to SEQ ID NO: 1408

SEQ ID NO: 15638 - protein, 257 aa, Neisseria meningitidis
MSANILAIANQKGGVGKTTTTVNLAASLASRGKRVLVVDLDPQGNATTGSGIDKAGLQSGVYQVLLGDADVQSAAVRSKEGGYAVLGANRALAGAEIELVQEIAREVRLKNALKAVEEDYDFILIDCPPSLTLLTLNGLVAAGGVIVPMLCEYYALEGISDLIATVRKIRQAVNPDLDITGIVRTMYDSRSRLVAEVSEQLRSHFGDLLFETVIPRNIRLAEAPSHGMPVMAYDAQAKGTKAYLALADELAARVSGK

SEQ ID NO: 15639 - protein, 365 aa, Neisseria meningitidis
LRYNSNHLPKPSNTMPSETRLPNFIRTLIFALSFIFLNACSEQTAQTVTLQGETMGTTYTVKYLSNNRDKLPSPAEIQKRIDDALKEVNRQMSTYQPDSEISRFNQHTAGKPLRISSDFAYVTAEAVRLNRLTHGALDVTVGPLVNLWGFGPDKSVTREPSPEQIKQAASYTGIDKIILKQGKDYASLSKTHPKAYLDLSSIAKGFGVDKVAGELEKYGIQNYLVEIGGELHGKGKNARGEPWRIGIEQPNIVQGGNTQIIVPLNNRSLATSGDYRIFHVDKNGKRLSHIINPNNKRPISHNLASISVVADSAMTADGLSTGLFVLGETEALKLAEQEKLSVFLIVRDKGGYRTAMSSEFEKLLR

SEQ ID NO: 15640 - protein, 171 aa, Neisseria meningitidis
MKSKLPLILINFSLISSPLGANAAKIYTCTINGETVYTTKPSKSCHSTDLPPIGNYSSERYIPPQTPEPVSSPSNGRQVVKYKAPVKTVSKPAKSNTPPPQQAPSNNSRRSILETELSNERKALVEAQKMLSQARLAKGGNINHQEINALQSNVLDRQQNIQALQRELGRM

SEQ ID NO: 15641 - protein, 45 aa, Neisseria meningitidis; identical to SEQ ID NO: 645

SEQ ID NO: 15642 - protein, 308 aa, Neisseria meningitidis
MSFAFFFPGQGSQSLGMMNGFTGQAVVKNTFDEASAILDQDLWAMINGSDAEIIGQTVNTQPIMLAAGVAVYRAYLEAGGKTPAAVAGHSLGEYTALVAAGALDFANAVKLVRLRAELMQSAVPQGVGAMAAILGLEDGQVKAICAESAQGEVVEAVNFNSPGQVVIAGNAAAVGRAMTAAKEAGAKRALPLPVSVPSHCSLMKPTADKLAEALKTVEIKQPQIRVIHNADVAAYDDADKIKDALVRQLYSPVRWTETVNALVSDGIAESAECGPGKVLAGLAKRINKAAACSALTDAGQVAAFIEAH

SEQ ID NO: 15643 - protein, 216 aa, Neisseria meningitidis; identical to SEQ ID NO: 10044

SEQ ID NO: 15644 - protein, 123 aa, Neisseria meningitidis; identical to SEQ ID NO: 616

SEQ ID NO: 15645 - protein, 230 aa, Neisseria meningitidis
MKLIKYLQYQGIGSRKQCQWLIAGGYVFINGTCMDDTDADIDSSSVETLDIDGEAVTVVPEPYFYIMLNKPEDYETSHKPKHYRSVFSLFPDNMRNIDMQAVGRLDADTTGVLLITNDGKLNHNLTSPSRKIPKLYEVTLKHPTGETLCETLKNGVLLHDENETVCAADAVLKNPTTLLLTITEGKYHQVKRMIAAAGNRVQHLHRRRFAHLETENLKPGEWKFIDCPKF

SEQ ID NO: 15646 - protein, 109 aa, Neisseria meningitidis
MGSLIIEDLQEGFGKEAVKGKEITVHYTGWLENGTKFDSSLDRRQPLTITLGVGQVIKGWDEGFGGMKEGGKRKLTIPSEMGYGARGAGGVIPPHATLIFEVELLKVYE

SEQ ID NO: 15647 - protein, 114 aa, Neisseria meningitidis; identical to SEQ ID NO: 7673

SEQ ID NO: 15648 - protein, 198 aa, Neisseria meningitidis; identical to SEQ ID NO: 1998

SEQ ID NO: 15649 - protein, 160 aa, Neisseria meningitidis
  misc_feature 2, 3, 156, 157, 158: 'Xaa' is any amino acid
VXXGASGNFELNVYMPVIAYNLLQSIRLLGDACNSFNEHCAVGIEPVPEKIDYFLHHSLMLVTALNRKIGYENAAKVAKTAYKNNKSLRETADEVWDEIEARFEDIFAAELADWCEDEREWPALDADIFNEWFDIQLSTVITDLEHEPLAREAFQXXXHT

SEQ ID NO: 15650 - protein, 318 aa, Neisseria meningitidis
MNTAAIYRQYQTYVRSDKSGWALDGCSDSALIAQAKQPGLHLEMCINRFDSGITLSRMRGGGTGAFPTEIHNFSHNCALFVMVSGQNRLQMGGREYRPSAGEIWLVRGELADVSETLLPDNSGMCALHLDFSLEKLRRWHDEGLLDERLFSPQTIGRFALQRLAQNAAALTAAACPLLQRSFESDGFGLLADEAAALELSARLLRFTFRRHDNGYRRRRIDEAADILQYEFARPLTIAEIARRVGLNECYLKRYFKAQTGETVAGCLRRLRLEHALALIESGSTVQAAMHFCGYRHAGRFNEAFRRHYGFLPSDVKKC

SEQ ID NO: 15651 - protein, 490 aa, Neisseria meningitidis; identical to SEQ ID NO: 7202

SEQ ID NO: 15652 - protein, 321 aa, Neisseria meningitidis
MSHTQLTQGERYHIQYLSRHCTVTEIAKQLNRHKSTISREIRRHRTQGQQYSAEKAQRQSQTIKQRKRQPYKLDSQLIQHIDTLIRRKLSPEQVCAYLCKHHQITLHHSTIYRYLRQDKSNGSTLWQHLRICSKPYRKRYGSTWTRGKVPNRVGIENRPAIVDQKSRIGDWEADTIVGKGQKSALLTLVERVTRYTIICKLDSLKAEDTARAAVRTLKAHKDRVHTITMDNGKEFYQHTKITKALKAETYFCRPYHSWEKGLNENTNGLIRQYFPKQTDFRNISDREIRRVQDELNHRPRKTLGYETPSVLFLNLFQPLIH

SEQ ID NO: 15653 - protein, 481 aa, Neisseria meningitidis
MAHFFNINYPTYKGKNMTVRIEHDLLGDREIPAEVYWGIHTLRAIENFKISTQKISDVPQFVRSMVMVKKATAQANGKLGAVKPEIAAAIEKACDEVLLNNRCLDQFPSDVYQGGAGTSVNMNTNEVIANLALEALGYEKGRYDIVNPMDHVNASQSTNDAYPTGFRLAVYYSIGELLDKLAVLKNAFAAKAEAFKDVLKMGRTQLQDAVPMTTGQEFQSFQVLLEEEILNLDRTRQLLLEVNLGATAIGTGVNTPKGYAELVVKKLSEVSGLPCKLTENLIEATSDCGAYVMVHGALKRTAVKLSKICNDLRLLSSGPRAGLKEINLPELQAGSSIMPAKVNPVIPEVVNQVCFKVIGNDTTITFAAEAGQLQLNVMEPVIAQCMFETISLLGNAAVNLAEKCVKGITVNREICERYVFNSIGLVTYLNPYIGHHNGDLVGKICAQTGKGVREVVLERGLLSEEELNRILSPENLMNPHL

SEQ ID NO: 15654 - protein, 231 aa, Neisseria meningitidis
MKLKTLALTSLTLLALAACSKQAETSVPADSVQSSSSAPAAPAPLTEGVNYTVLSTPIPQQQAGKVEVLEFFGYFCPHCAHLEPVLSEHTKTFKDDTYLRREHVIWGDEMKPLARLAAAVEMAGESDKANSHIFDAMVNQKINLADTDTLKKWLSEQTAFDGKKVLAAFDAPESQARAAQMEELTNKFQISGTPTVIVGGKYQVEFKDWQSGMTTIDQLVDKVREEQKKPQ

SEQ ID NO: 15655 - protein, 150 aa, Neisseria meningitidis; identical to SEQ ID NO: 3757

SEQ ID NO: 15656 - protein, 93 aa, Neisseria meningitidis
VDWMGSLFLPGGALLFLSVVSTTLSACLGMPLLLVSPAGVLDGAAEALAIAAFLMLVARPPAVFGGLWKFNYSLREKAYISWLGLAEPCRFRR

SEQ ID NO: 15657 - protein, 539 aa, Neisseria meningitidis
MDNLVWDGVPDIRTLDQTIRKHAHPLNLIVCLPDNQIPDFQTAQDASDAECRLKHRLDQATQCLQFDSINLIEHILPDVRFWLVPPSRTRRLHEHFHHISWQTEAIPQTESKPDKPWFALPQTSERQKPEHILVIGAGISGAATAHALASHGISVTVLEARKAAQAASGNRQGLLYAKISPHDTEQTELLLAGYGYTKRLLGHILPESETWGGNGIIHLNYSRTEQQRNHELGLQKHHNHLYRSITQAEAEKIAGIPLSVPYDHPSCGLYWQHGVWLNPPTFVRALLSHPLIGLHEDTPLTDISHDGEKWIASTPNGTFTATHIIYCTGAHSSCLPETNLAALPLRQIRGQTGLTPSTPFSEQLRCAVSGESYISPSWHGLHCYGASFIPNSSHTGWNEAEEASNRQALAQLSPALAESLFAANPNPQKYQGHAAIRCDSPDHLPLVGALGDIAAMRQTYTKLALDKNYRIDTPCPYLPNAYVNTAHGTRGLATAPICAAAVAAEILGLPHPLSKRLRHALHPNRTIIRAIVRRKDLTP

SEQ ID NO: 15658 - protein, 178 aa, Neisseria meningitidis; identical to SEQ ID NO: 1654

SEQ ID NO: 15659 - protein, 84 aa, Neisseria meningitidis
MDSLSILDILIGESEQVSSNFIIEPYQVPFFERFSEYFICFDRRNLDKPKQPVYWIWDMENPLADSIKSFIYKLFENPNFLNEI

SEQ ID NO: 15660 - protein, 358 aa, Neisseria meningitidis
MKYKALSLLPLAAALAACAGGGGVAEPHVPVSIPTATPLTGEVKLSSDNSKIENINTANTETHPPRRTRRSLYASPQNTSSGISIQQREVEKIYFGVKSPEKSFIFQTPGGAQYALSSYADPIVPSYSSPDFKIPDRHAGQRLADGSRIFICCSDSGATSYAEITKQDYMKFGAWIGPNGEIDLFAGGFPVGKTPPPAFSYGSSTPETKGTGKITYQVWGIRVRNGQFVTSSYTPPKNSGYTFNPTNTPVLSFITANFNSNKLAGKIIGNSDYGPDVKIENATINGLTFSGDATSGGKTGNLEGKFFGKFNGSRDSETSIGGKITFDGDRSLDTVFGGVSYKKELENNTDMSTTHLTK

SEQ ID NO: 15661 - protein, 134 aa, Neisseria meningitidis; identical to SEQ ID NO: 6040

SEQ ID NO: 15662 - protein, 268 aa, Neisseria meningitidis
MWHWDIILILLAVGSAAGFIAGLFGVGGGTLIVPVVLWVLDLQGLAQHPYAQHLAVGTSFAIMVFTAFSSMLGQHKKRAVDWKTVFAMMPGMIFGVFAGALSAKYIPAFGLQIFFILFLTVVAFKTLHTGPQTASRPLPKLPGLTAVSTLFGAMSSWVGIGGGSLSVPFLIHCGFPAHKAIGTSSGLAWPIALSGAISYLLNGLNIAGLPEGSLGFLYLPAVAVLSAATIAFAPLGVKTAHKLSSAKLKKSFGIMLLLIAGKMLYNLL

SEQ ID NO: 15663 - protein, 133 aa, Neisseria meningitidis; identical to SEQ ID NO: 825

SEQ ID NO: 15664 - protein, 171 aa, Neisseria meningitidis
MKRTKKYPFLTLQRQRFHLNFENASSAAGIPAERDFYRWAWSALKNEYRRADISLILLDEEEARAYNRDYRGKDYATNVLSFALNEGEILPCQVSEKLYGDLIICPQVVLKEAAEQGKTPERHFAHLTIHGTLHLMGYDHIEDDEAEIMEAEEIRLMLAAGFPNPYQEDEY

SEQ ID NO: 15665 - protein, 67 aa, Neisseria meningitidis; identical to SEQ ID NO: 7480

SEQ ID NO: 15666 - protein, 668 aa, Neisseria meningitidis
MADMKKITPQNLRPLLSESLGHTDFVNVLNALIKFLRRGGKKCAGERFDLIIDTFKQDRELLSRFSRCFYIWLAQIHIYPALIKLGIFSRHSFAREMGIRIYERFSPSYKDFANLGEVFLYLFHSENDDKWLQTLNIRQWLVLYELIRSHAEPSKLQTAGIRLADARLRAIEMLSVWTASEAIEPDLIRIAPRLLEADSSFVALQRETAKLVEHYRNGTTPYDTAHLEVMFDQCFSQIDYLRRKGTGAGSGSSVKVAHLLERLRQTVDRLKLLTDIQTGAGNSNRLTIALMNSLIYAAVEQYSTRHLRRSSIRMLARSITENKSHHGEHYITRNRKEYFKMFYSAAGGGIIIALMALLKIRISTLGLSPFLTSLSAGFNYGIGFMIIHMLHCTVATKQPAMTAASFAEQVDLNEGGKAVDNKLAKLLIDVCRSQSVAVFGNVSIAILLACAISFGYAHLYRQPILDAHTAAYQFKSIDIIAYPTLWYAAIAGLWLFCSGIIAGFFDNRADYLNLRQRLPFNPLLRKIMRPGPRRVLAAYIHKHYGSLAGNFIFGMLLGMTGYFGHLLGLPLDIRHVAFSSANLGYAAVSGNVGLGTFVLGIFSVLAIGLVNLCVSFSLALFVALRSRGTKIGSIRNLIKSFWNQIKSNPCILFLPPAKEQGHPPSDKP

SEQ ID NO: 15667 - protein, 503 aa, Neisseria meningitidis
MSEQNHPQTEPQLDENQIIALRREKLHNIRQQRNAYPNDFKRDSFAADLHAQYGEIGKEELDPQGIPVKVAGRMMLKRQMGKASFATIQDVSGQIQLYLNNKGVSQEILDDFNHWDLGDIVGAEGTLFKTNHGELTVRVSDIRLLSKSLRPLPDKHKGLSDQETKYRQRYVDLIANEESRNTFIKRSQIIQSVRNFMVNERYLEVETPMMHPIPGGATAKPFVTHHNALDIPLYLRIAPELYLKRLVVGGLERVFEINRSFRNEGMSVRHNPEFTMIEFYEAFSDYERMMQMAEDIIRNASRTVNGTAKISYNGKEVDLESPFERLTILEAIKKYNPHYTDEQLNDAEWLKKEIVKHGESLPPSPGIGSLQLALFEGCAEGKLWNPTFIVDYPVEVSPLARASDTKQGLTERFELFVVGRELANGYSELNDPEDQAERFKAQVAQKDAGDDEAMHYDADYIRAMEFGLPPTGGCGIGIDRLVMLLTDSQTIRDVILFPQMRPE

SEQ ID NO: 15668 - protein, 552 aa, Neisseria meningitidis; identical to SEQ ID NO: 6029

SEQ ID NO: 15669 - protein, 84 aa, Neisseria meningitidis
MKHMTEQEIYRLLRDTLTELFEIEPERITPDTNLYEDLEIDSIDAIDLIDRIKRETGRKLQAEDFRNIRTVNDVVQAVLKIQAG

SEQ ID NO: 15670 - protein, 199 aa, Neisseria meningitidis
LLLSCRLKHVSDGIGLHQIRIKMGIYDFQMKDAEGNAVDLSGYRDKVLLIVNTATRCGLTPQYEALQKLYAQYTAEGLEILDFPCNQFREQAPESSGEIAQVCMMKFGTKFKIFDKIEVNGANTAPLYAYLKSVKPQDKGNHLFKDFVLKLAALGEKRDEGDIKWNFTKFLVNRDGEVVERFAPSVTPEEIEADIRALL

SEQ ID NO: 15671 - protein, 453 aa, Neisseria meningitidis
MLKKWLNKMLPSGRSSKKAESKTVIPAERHNIRAEMLSFAAENVIRRLKGAGFQAYVVGGAVRDLLLGIEPKDFDVATDATPEQVHKLFRRSRIIGRRFQIVHVMNGAETIEVTTFRGGAKVHQNARGRIMKDNTYGSIEEDAMRRDFTCNALYYDPEKEEILDFHNGMDDIAERKLVMIGNAAERYQEDPVRILRAIRLSGKLGFELSQATAGPIAESICRLKHEPVARLFDEIMKLLFSGHARECLKRLNGFDIPDDIHPLLNALRVSDGIAGKMTVLALKNTDERLRADKSVSVGFVLAALMWPELERHWKSNLQQGLKPAPALSDAINTMRETVERGWGVPQRFSATMREIWMFQPQFENRKGARPHKLFAQARFRAAYDFLLLRAETGNADRALAEWWTAFQTASTEQRTEMTKNEAAARHEKNEGQAKKRRRRRRKPKPKVVGTDWE

SEQ ID NO: 15672 - protein, 60 aa, Neisseria meningitidis
MGVLREMAEKLGHKVLPLAPYLPELNPIEKVWANIKRYLRTVLSDYARFDDALLSYFDFN

SEQ ID NO: 15673 - protein, 207 aa, Neisseria meningitidis; identical to SEQ ID NO: 1132

SEQ ID NO: 15674 - protein, 57 aa, Neisseria meningitidis; identical to SEQ ID NO: 735

SEQ ID NO: 15675 - protein, 282 aa, Neisseria meningitidis; identical to SEQ ID NO: 1327

SEQ ID NO: 15676 - protein, 1306 aa, Neisseria meningitidis
LNYIIAFSNSPETDFSDGIQIKTAKHGHTMTTTTAPQRIREIPYNYTSYTDREIVIRLLGNEAWQILQDLRGQRKTGRSARMLFEVLGDIWVVVRNPYLVDDLLEHPKRRAALIREMRHRLNEIRKRRDDNRQVDVLVAAAEKAVERFDSSFDETSQKRRQILERLSKITKPHNIMFDGLARVTHVTDATDWRVEYPFVVVNPDTEAEIAPLVRALIELDLVIIPRGGGTGYTGGAIPLDAMSAVINTEKLDKHNGVEFVELAGLDGKHPIIHCGAGVVTRRVEETAHQAGLVFAVDPTSADASCVGGNVAMNAGGKKAVLWGTALDNLAYWQMVNPQGEWLRIERVRHNFGKIHDEETAVFDVHTLDSDGLNIVKTERLEIPGHKFRKVGLGKDVTDKFLSGLPGVQKEGTDGIITGVAFVLHKMPKYTRTVCMEFFGTVATATPSIVEIRDFLLAHDSVRLAGLEHLDWRYVRAVGYATKAAGKGRPKMVLLADVVSDDEAAVEAAAEHICELARARDGEGFIAVSPEARKTFWLDRSRTAAIAKHTNAFKINEDVVIPLERLGEYSDGIERINIELSIQNKLKLCAALEQYLSGKLPIDKMGTDLPTAELLGERGKHALAHVSAVKTRWEWLLANLDTPLADYKARYGAAVHAAPEAKNNESCFIAFRDFRLRVSVKADVMKPLAEIFSGKTDTKIIQGLGKIHAKTVRSRVFVALHMHAGDGNVHTNIPVNSDDADMLQTAYRSVERIMKIARSLGGVISGEHGIGITKLEFLTDEDLQPFWNYKNQVDPKHTFNRHKLMKGSDLSNAYTPSFELLGAESLIMEKSDLGTIADSVKDCLRCGKCKPVCSTHVPRANLLYSPRNKILGVGLLTEAFLYEEQTRRGVSVKHFEELMDIGDHCTVCHRCVKPCPVNIDFGDVTVAVRNYLADSGHKRFAPAASMGMAFLNATGPKTIKALRAAMIQTGFPAQNFAYKIGKLLPIGTKKQKAEPKATVGKAPIKEQVIHFINRPLPKNVPAKTPRSLLGIEDGKSIPIIRNPASPEDAEAVFYFPGCGSERLFSQIGLAVQAMLWHVGVQTVLPPGYMCCGYPQDAGGNKAKAEEMSTNNRVAFHRMANTLNYLDIKTVVVSCGTCYDQLEKYRFEEIFPGCRIIDIHEYLLEKGVKLDGVKGQQYLYHDPCHTPIKTMNATQMASSLMGQKVVLSDRCCGESGMFAVKRPDIATQVKFRKQEEIEKNLKELPQGEPVKMLTSCPACLQGLSRYADDNNMPADYIVIEMAKYILGENWLDEFVKKANNGGVEKVLL

SEQ ID NO: 15677 - protein, 304 aa, Neisseria meningitidis; identical to SEQ ID NO: 3139

SEQ ID NO: 15678 - protein, 56 aa, Neisseria meningitidis; identical to SEQ ID NO: 326

SEQ ID NO: 15679 - protein, 337 aa, Neisseria meningitidis; identical to SEQ ID NO: 6882

SEQ ID NO: 15680 - protein, 590 aa, Neisseria meningitidis
MIPSDFIDELLAKTDIVDIIDEQVPLKKGGANYMACCPFHKEKTPSFSVSPTKQFYHCFSCGAHGSAIGFVMEHQGLSFPEAVQFLADRVGMIVPKVRGQNDNPEVRAERKKKQQTLEETTAAAADFYAQQLKFNPTAKAYLDKRGLSAEVIAHYGLGYAPDGWQPLAQVFQPYPNTALVDTGMVIDNEGRYYDRFRHRIMFPIRNPRGQVIGFGGRVLDDSKPKYLNSPDTPLFDKGKNLYGLYEGRAAVKEVGRILVVEGYMDVVALAQFGVGYGVAALGTATTAEHVKILMRQADSIYFCFDGDSAGRKAAWRALENALPQLKDDKSLHFLFLPEEHDPDSYIRAYGKAQFEDALLNQSKPLSEYFWEHLSDGIHLNTQEGKAELVKTSSPLLAQITAPALAYLLKQRLSELVGIDPDNLAQLLGQEAPKRHVKQKNYKLPPISVKQPVMLTLVQRQIRSLLINPDWAAYIDLPDYLALDGDFACLANLAESIKNHAAVPETAQVLEYMRGSPYEETITRIFHSTHQSEEMNSSSEEDCENFQIGMKKLLNELKYSQIEALKQKSLQSGLNESEKKLLLSLLTAKQN

SEQ ID NO: 15681 - protein, 79 aa, Neisseria meningitidis; identical to SEQ ID NO: 5965

SEQ ID NO: 15682 - protein, 417 aa, Neisseria meningitidis
VDKLKISANGPLNGEITVSGAKNAALPLMCAGLLTSGTLRLKNVPMLADVKTTQKLLQGMGARVLTDNISEFEINGGTVNNTCAPYELVRTMRASILVLGPTLARFGEAQVSLPGGCAIGSRPVDQHLKGLEAMGAEIVIEHGYVKAKGKLKGTRVAMDVVTVGGTENLLMAATLAEGTTVLENCAIEPEVVDLAECLVKMGAKISGIGTSTMVVEGSDELHGCEHSVVPDRIEAGTFLCAVAITGGRVVLRNAAPKTMEVVLDKLVEAGAVIEAGDDWIAIDMRQRPKAVDIRTVVHPGFPTDMQAQFMALNAVAEGSCRVVETIFENRFMHVPELNRMGANITTEGNTAFVQGVEQLSGAVVKATDLRASASLVIAGLAARGETVVEQIYHLDRGYEHIEKKLGSVGAKIERVSG

SEQ ID NO: 15683 - protein, 468 aa, Neisseria meningitidis
MNDYTAMPSEDREVGALSLPPHSMEAEQSVLGGLMLENPAWDRIADVVSGEDFYRHEHRLIFRSIAKLINESRPADVITVQEDLQRNEELEAAGGFEYLITLAQNTPSAANIRRYAEIVRERSIMRQLAEVGTEIARSAYNPQGRDAGQLLDEAENKVFQIAESTAKSKQGFLEMPDLLKEVVQRIDMLYSRDNPDEVTGVPTGFIDLDKKTSGLQPGDLIIVAGRPSMGKTAFSINIAEHVAVEGKLPVAVFSMEMGGAQLVMRMLGSVGRLDQSVLKTGRLEDEHWGRLNEAVVKLSDAPVYIDETPGLTALELRARARRLARQFNNKLGLIVIDYLQLMAGSGRSDNRASELGEISRSLKALAKELQVPIIALSQLSRTVEQRTDKRPMMSDLRESGAIEQDADLIMFMYRDEYYNQDSPMKGLAECIIGKHRNGPVGKIFLTWTGQFTKFDNAAYIPEEAKIED

SEQ ID NO: 15684 - protein, 109 aa, Neisseria meningitidis; identical to SEQ ID NO: 899

SEQ ID NO: 15685 - protein, 389 aa, Neisseria meningitidis; identical to SEQ ID NO: 11490

SEQ ID NO: 15686 - protein, 166 aa, Neisseria meningitidis
MADLQKNFQTSFRDAMASCAAGVHVITTDGAAGRYGITMTAVAPVTDEPPTVMLCINRSARIIPILSENGSLCINTLADEHQDVAEHFAGLTGLSPEERFAYHIWHRGKTGQLEIEGALVHLHGHIVGKHEIGTHFVFYVRLDEIKNCGCKRPALLYFRRQFRFLD

SEQ ID NO: 15687 - protein, 96 aa, Neisseria meningitidis; identical to SEQ ID NO: 6139

SEQ ID NO: 15688 - protein, 580 aa, Neisseria meningitidis
MKFFPAPCLLVILAVIPLKTLAADENDAELIRSMQRQQHIDAELLTDANVRFEQPLEKNNYVLSEDETPCTRVNYISLDDKTARKFSFLPSVLMKETAFKTGMCLGSNNLSRLQKAAQQILIVRGYLTSQAIIQPQNMDSGILKLRVSAGEIGDIRYEEKRDGKSAEGSISAFNNKFPLYRNKILNLRDVEQGLENLRRLSSVKTDIQIIPSEEEGKSDLQIKWQQNKPIRFSIGIDDAGGKTTGKYQGNVALSFDNPLGLSDLFYVSYGRGLVHKTDLTDATGTETESGSRSYSVHYSVPVKKWLFSFNHNGHRYHEATEGYSVNYDYNGKQYQSSLAAERMLWRNRLHKTSVGMKLWTRQTYKYIDDAEIEVQRRRSAGWEAELRHRAYLNRWQLDGKLSYKRGTGMRQSMPAPEENGGDILPGTSRMKIITAGLDAAAPFILGKQQFFYATAIQAQWNKTPLVAQDKLSIGSRYTVRGFDGEQSLFGERGFYWQNTLTWYFHPNHQFYLGADYGRVSGESAQYVSGKQLMGAVVGFRGGHKVGGMFAYDLFAGKPLHKPKGFQTTNTVYGFNLNYSF

SEQ ID NO: 15689 - protein, 92 aa, Neisseria meningitidis; identical to SEQ ID NO: 419

SEQ ID NO: 15690 - protein, 481 aa, Neisseria meningitidis
MNWSDLNLMPAMPEIVLLSLLVLLLLADLWVSDDKRRWTHYGALATVAVTAVVQLAVWEQGSTSSFNGMYIADGMSRLAKMVLYALTFALFVYARPYNQVRGIFKGEFYTLSLFALLGMGVMVSAGHFLTAYIGLELLSLALYALIALRRDSGFAAEAALKYFVLGALASGLLLYGISMVYGATGSLEFAGVLASSFNEEANEWLLKLGLVFIVVAVAFKLGAVPFHMWVPDVYHGAPTSVTALVGTAPKIAAVVFAFRILVTGLGTVHHDWSLMFALLAAASLLVGNLAAIMQTNIKRMLAYSTVSHMGFILLAFMAGAVGFAAGLYYAITYALMAAAGFGVLMVLSDGDNECENISDLAGLNQHRVWLAFLMLLVMFSMAGIPPLMGFYAKFGVIMALLKQGHVWLSVFAVVMSLIGAFYYLRVVKVMYFDESGRARPTVGGNNAAKFLLSVNALLLVLWGIMPQTVIDWCAKALENTL

SEQ ID NO: 15691 - protein, 272 aa, Neisseria meningitidis; identical to SEQ ID NO: 1395

SEQ ID NO: 15692 - protein, 132 aa, Neisseria meningitidis; identical to SEQ ID NO: 1178

SEQ ID NO: 15693 - protein, 216 aa, Neisseria meningitidis; identical to SEQ ID NO: 4887

SEQ ID NO: 15694 - protein, 796 aa, Neisseria meningitidis
MTEQKHEEYGADSIQVLEGLEAVRKRPGMYIGDTQDGSGLHHMVFEVLDNAIDEALAGHCDKITVTIHADHSVSVADNGRGMPTGIHPKEGRSAAEVIMTVLHAGGKFDNNSYKISGGLHGVGVSVVNALSDWVTLTIYRDGKEHFVRFVRGETEEPLKVVGDSDKKGTTVRFLASAETFGNVEYSFDILAKRIRELSFLNNGVDIELTDERDGKHESFALSGGVAGFVQYMNRKKTPLHEKIFYAFGEKDGMSVECAMQWNDSYQESVQCFTNNIPQRDGGTHLTALRQVMTRTINSYIEANEVAKKAKVETAGDDMREGLTCVLSVKLPDPKFSSQTKDKLVSGEIGPVVNEVISQALTDFLEENPAEAKIITGKIVDAARAREAARKAREITRRKGVMDGLGLPGKLADCQEKDPALSELYLVEGDSAGGSAMQGRDRKFQAILPLKGKILNVEKARFEKMLASQEVAALITALGAGIGKEEFNAEKLRYHRIIIMTDADVDGAHIRTLLLTFFYRQMPELVERGYIYIAQPPLYKAKYGKQERYLKDELEKDQWLLGLALEKAKIISDGRTIEGAELADTAKQFLLAKTVIEQESRFVDELVLRAMLHASPIDLTSSENADKAVAELSGLLDEKEVALERIEGHEGHRFIKITRKLHGNVMVSYIEPKFLNSKAYQTLTQTAAALKGMVGEGAKLYKGENGYDADSFETALDILMSVAQKGMSIQRYKGLGEMNPEQLWETTMDPAVRRLLKVRIEDAIAADEVFVTLMGDEVEPRRAFIENNALIAQNIDA

SEQ ID NO: 15695 - protein, 177 aa, Neisseria meningitidis
MADFNQILTPGDVDGGIINVVNEIPAGSNHKIEWNRKLAAFQLDRVEPAIFAKPTNYGFIPQTLDEDGDELDVLLVTEQPLATGVFLEARVIGVMKFVDDGEVDDKIVCVPADDRNNGNAYKTLSDLPQQLIKQIEFHFNHYKDLKKAGTTKVESWGDVEEAKKVIKESIERWNKQA

SEQ ID NO: 15696 - protein, 477 aa, Neisseria meningitidis
MPARNRWMLLLPLLASAAYAEETPREPDLRSRPEFRLHEAEVKPIDREKVPGQVREKGKVLQIDGETLLKSPELLSRAMYSAVVSNNIAGIRVILPIYLQQAQQDKMLALYAQGILAQADGRVKEAISHYRELIAAQPDAPAVRMRLAAALFEDRQNEAAADQFDRLKAENLPPQLMEQVELYRKALRERDAWKVNGGFSVTREHNINQAPKRQQYGKWTFPKQVDGTAVNYRLGAEKKWSLKNGWYTTAGGDVSGRVYPGNKKFNDMTAGVSGGIGFADRRKDAGLAVFHERRTYGNDAYSYTNGARLYFNRWQTPKWQTLSSAEWGRLKNTRRARSDNTHLQISNSLVFYRNARQYWMGGLDFYRERNPADRGDNFNRYGLRFAWGQEWGGSGLSSLLRLGAAKRHYEKPGFFSGFKGERRRDKELNTSLSLWHRALHFKGITPRLTLSHRETWSNDVFNEYEKNRAFVEFNKTF

SEQ ID NO: 15697 - protein, 170 aa, Neisseria meningitidis; identical to SEQ ID NO: 1267

SEQ ID NO: 15698 - protein, 65 aa, Neisseria meningitidis
MSKIKVTATDGLRVPTEHNPHEYIGQEPVEVDGNSLYYRRMIDDGDLVVVEDAALNTKTRNTKGE

SEQ ID NO: 15699 - protein, 189 aa, Neisseria meningitidis; identical to SEQ ID NO: 11971

SEQ ID NO: 15700 - protein, 388 aa, Neisseria meningitidis
MNLHEYQAKELLASYGLPVQGGILAHNGEEAAAAYDKLGGKFAVVKAQVHAGGRGKAGGVKVVKSREEAKEVAESLIGTNLVTYQTDANGQPVNSVLVCEDMYPVQTELYLGAVVDRSTRRVTFMASTEGGVEIEKVAAETPEKIFKVTVDPLVGLQPCQAREVAFQLGLKDKQINEFVKLMTGAYKAFVENDFALFEVNPLAVRENGALACVDGKIGIDSNALYRLPKIAELRDKSQENERELKASEFDLNYVALEGNIGCMVNGAGLAMATMDIIKLKGGQPANFLDVGGGATKDRVVEAFKLILEDKSVQGVLINIFGGIVRCDMIAEAIVAAVKEINVNVPVVVRLEGNNAELGAKILNESGLKLTSADGLNDAAEKIVAAVNA

SEQ ID NO: 15701 - protein, 328 aa, Neisseria meningitidis; identical to SEQ ID NO: 372

SEQ ID NO: 15702 - protein, 950 aa, Neisseria meningitidis
MKLSELFNPDEFAARHLSFGDEAALLAAVGEKSMDDFVGNTVPQSIRMPSELDLPDALTEADALAKLKGIASKNVINKSYIGLGYYPTRVPNVILRNVLENPGWYTAYTPYQAEIAQGRLEALLNFQQVCIDLTGFPVAGASLLDEATAAAEAMAMAHRVGKVKSERFFVDERVYPQTLDVMKTRAKYFGFELVVGDFAKADEGEYFGALFQYVGKDGDVQDLQDVIGRLKAKGTIVAVAADIMSLVLLKSPAELGADIALGNTQRFGVPMGFGGPHAAYFAFKDEFKRSAPGRIIGVSKDASGKPALRMALSTREQHIRREKATSNICTAQALLANLAGMYAVYHGPEGVKRIANRIHALASAFADALVSDGLNVVHKVFFDTVTVDFGNKEKADQVFAAALESGYNLRRVNDTQVAAAFHETSACEDLVDLYRAFTGKDTFAFADDVKGRLNAELLRQDDILQHPVFNRYHTEHEMLRYLKKLEDRDLAMNRSMISLGSCTMKLNATAEMLPITWAEFSDIHPYAPEAQTVGYRELLADMENSLKAITGFDAISFQPNSGAQGEYSGMLAIRRYQEAQGEAQRNICLIPKSAHGTNPATAAMLGLKVVVVDTDEHGNVNIDDLKAKAEQHRDALSAIMITYPSTHGVYEEGIRDICRIIHENGGQVYMDGANLNAQIGIMQPAEVGADVLHMNLHKTFCIPHGGGGPGMGPIGLKAHLAPFAPGHALTDTHSASADQTAVAAAAFGSASILPITWMYLTMMGKQGMEQATRWALLNANYVAKRLGEDYPILYTGKNGRVAHECIVDLRPLKAESGITETDIAKRLMDYGFHAPTVSFPVAGTLMIEPTESESKAELDRFIAALKQIKQEVLKVGRGEWPKDDNPLVNAPHTAADITGDWARPYSREEAVFPLPFVREHKFWPFVNRVDDVYGDRNLVCSCPPMENYED

SEQ ID NO: 15703 - protein, 223 aa, Neisseria meningitidis
MKTVSTAVVLAAAAVSLTGCATESSRSLEVEKVASYNTQYHGVRTPISVGTFDNRSSFQKGIFSDGEDRLGSQAKTILVTHLQQTNRFNVLNRTNLNALKQESGISGKAHNLKGADYVVTGDVTEFGRRDVGDHQLFGILGRGKSQIAYAKVALNIVNVNTSEIIYSAQGAGEYALSNREIIGFGGTSGYDATLNGKVLDLAIREAVNSLVQAVDNGAWQPNR

SEQ ID NO: 15704 - protein, 251 aa, Neisseria meningitidis
MIKIRNIHKTFGENTILRGIDLDVGKGQVVVILGPSGSGKTTFLRCLNALEMPEDGQIEFDNERPLKIDFSKKPSKHDILALRRKSGMVFQQYNLFPHKTALENVMEGPVAVQGKPAAQAREEALKLLEKVGLGDKVDLYPYQLSGGQQQRVGIARALAIQPELMLFDEPTSALDPELVQDVLNAMKELAREGWTMVVVTHEIKFALEVATTVVVMDGGVIVEQGSPKELFDHPKHERTRRFLSQIQSTKI

SEQ ID NO: 15705 - protein, 900 aa, Neisseria meningitidis
MQLHILNNPKDAALAADAEFLKQSLFNLLHEEASPLVVETVKLLSTSDDSAALIEKVLPQLDEQQTHDLTLACGLFAQILNIAEDVHHERRRQIHEEAGRGGAEGSLTETVRRLKAGKADGKSVQRQLDNTSVTAVLTAHPTEVQRQTVLSFNRRIRALLPQRERCTNADALARLRREIDTILLGLWQTSETRRHKLSVNDEINNGVSIFPMSFFEALPKLYRNMEHDFQMVYPDVCVPNILKIGGWIGGDRDGNPFVSAETLRFAFRRHADAVFRFYRGELDKLYRELPLSIRRVKVNDDVMALAALSPDEELARTEEPYRRAIAYIMARAMGKARALGLGMGCKFGFLEPYASAQEFLDDLKKLQRSLIDNGSRLLAEGRLADLIRSVSVFGFHMMPLDLRQHAGKHADVVAELFQHAGLEDYNSLNEEQKQAVLLRELSHQRPLYSPFITYSDHTRHELAIFNEARKIKDEFGEDAVTQSIISNCEQPSDLLALALLLKESGLLAVENGKPHSRINIVPLFETIEALENACPVMETMFRLDWYDALLESRGNIQEIMLGYSDSNKDGGYVTSSWCLYQAELGLVELFKKYDVRMRLFHGRGGSVGRGGGPSYQAILAQPAGSVAGQIRITEQGEVITAKYADPGNAQRNLETLVAATLEASILPDKKDPDAKLMQDLSDVSFKYYRELITHPDFIDYFLQTSPIQEIATLNLGSRPASRKTLARIQDLRAIPWVFSWMQNRLMLPAWYGFGSAVETLCEGNPETLAALREHAQSNPFFQAMLSNMEQVMAKTDITLAENYAGLSESPDKAKIIFGMIKEEYRRSRKALLDLLQTEELLRDNRSLARSLALRIPYLNALNGLQVAMLKRLRKEPDNPHALLMVHLTINGVAQGLRNTG

SEQ ID NO: 15706 - protein, 148 aa, Neisseria meningitidis
MTGFNDAAGVASSSDIKGKYVEKVEVKNGVVTATMLSSGVNNEIKGKKLSLWAKRQNGSVKWFCGQPVTRNDTATATDVAAANGKTDDKINTKHLPSTCRDDSSTGCIETPRADFKHFQKISRYRVLPESRQMAEKLRHSRKSGNLVR

SEQ ID NO: 15707 - protein, 88 aa, Neisseria meningitidis; identical to SEQ ID NO: 1982

SEQ ID NO: 15708 - protein, 44 aa, Neisseria meningitidis; identical to SEQ ID NO: 6328

SEQ ID NO: 15709 - protein, 260 aa, Neisseria meningitidis; identical to SEQ ID NO: 2560

SEQ ID NO: 15710 - protein, 427 aa, Neisseria meningitidis; identical to SEQ ID NO: 7408

SEQ ID NO: 15711 - protein, 103 aa, Neisseria meningitidis; identical to SEQ ID NO: 1278

SEQ ID NO: 15712 - protein, 318 aa, Neisseria meningitidis
MKEFDFIKRYLQTGTDKDVVLGIGDDAAIVRPREGFDLCFSADMLLKDRHFFADVKPEDLAWKVLVVNVSDMAAMGAIPRWVLLSAALPELDEVWLKRFCGSFFGLAKKFGVTLIGGDTTKGDMAFNVTIIGELPKGRALRRDAAVAGDDIWVSGRVGMAAAALNCRLKRCVLPDEVFAECEQKLLRPEPRVGLGLALLPFARAAQDVSDGLAQDLGHILTASGVGAEIWADSLPSLSVLKDILPRAQWLSYTLAGGDDYELVFTAPESCRSRVLDAAERCGVPVTRIGKINGGCRLKVLDADGRELELHSLGFDHFG

SEQ ID NO: 15713 - protein, 117 aa, Neisseria meningitidis; identical to SEQ ID NO: 408

SEQ ID NO: 15714 - protein, 147 aa, Neisseria meningitidis
LVMPVKKVEKNILVLHGADKMFELVDKVEDYPNFLPWYSKTEVIGRNGNELKARLFMDYMHVRQSFATHNRNIPGREIRMELLEGPFKTLRGTWKFIDLGDDMCKIEFNLEYDFSNAVLSALISPVFNHLSATLVEAFVKEADRRYA

SEQ ID NO: 15715 - protein, 468 aa, Neisseria meningitidis
MKLFQRIFATFCAVIVCAIFVASFSFWLVQNTLAENQFNQRRTIETTLMGSIISAFRARGDAGAREILTEWKDSPVSSGVYVIQGDEKKDILNRYIDSYTIERARLFAAGHPHSNLVHIEYDRFGEEYLFFTKDWDKLQARRLPSPLLIPGLPLAPIWHELIILSFIIVVGLLMAYILAGNIAKPIRILGNGMDRVANGELETRISQQVDDRDDELSHLAIQFDKMAEKLEKLVAKERHLLHHVSHEMRSPLARMQAIVGLIQAQPQKQEQYLKRLEGELTRMDTLAGELLTLSRLETSNMALEKESLKLLPFLGNLVEDNQSIAQKNGQTVTLSADGKIPENTTILANESYLYRAFDNVIRNAVNYSPEGSTILINIGQDHKHWIIDVTDNGPGVDEMQLPHIFTAFYRADSSANKPGTGLGLALTQHIIEQHCGKIIAENIKPNGLRMRFILPKKKTGSKTEKSAN

SEQ ID NO: 15716 - protein, 248 aa, Neisseria meningitidis
MTSCEPVNEKTDQKAVSAQQAKEQTSFNNPEPMTGFEHTVTFDFQGTKMVIPYGYLARYTQDNATKWLSDTPGQDAYSINLIEISVYYKKTDQGWVLEPYNQQNKAHFIQFLRDGLDSVDDIVIRKDACSLSTTMGERLLTYGVKKMPSAYPEYEAYEDKRHIPENPYFHEFYYIKKGENPAIITHRNYHRYGENDYSTSVGSCINGFTVRYYPFIREKQQLTQQELVGYHQQVEQLVQSFVNNPSKK

SEQ ID NO: 15717 - protein, 171 aa, Neisseria meningitidis
MKIKQIVKPGLAVLAAGVLSACATKSNVKADGTTDNPVFPKPYSVTLDNNRGTFPIYDELDLMRPGLTKDDIYKILGRPHYDEGMYGVREWDYLFHFHTPGVGTDPENTSGVEDVTTCQYKVIFDKDKFARSFYWNPVFPKDAACPPPAPKAEPQVIIREIVPATPKRIRQ

SEQ ID NO: 15718 - protein, 143 aa, Neisseria meningitidis; identical to SEQ ID NO: 2619

SEQ ID NO: 15719 - protein, 95 aa, Neisseria meningitidis; identical to SEQ ID NO: 3028

SEQ ID NO: 15720 - protein, 96 aa, Neisseria meningitidis; identical to SEQ ID NO: 6139

SEQ ID NO: 15721 - protein, 761 aa, Neisseria meningitidis
MQLLAAEGIHKHELDVQKSRRFIGIKVGKSNYSKNELNETKLPVRVVAQTAATRSGWDTVLEGTEFKTTLAGADIQAGVGEKARVDAKIILKGIVNRIQSEEKLETNSTVWQKQAGRGSTIETLKLPSFESPTPPKLSAPGGYIVDIPKGNLKTEIEKLAKQPEYAYLKQLQVAKNINWNQVQLAYDRWDYKQEGLTEAGAAIIALAVTVVTSGAGTGAVLGLNGAAAAATDAAFASLASQASVSFINNKGDVGKTLKELGRSSTVKNLVVAAATAGVADKIGASALNNVSDKQWINNLTVNLANAGSAALINTAVNGGSLKDNLEANILAALVNTAHGEAASKIKQLDQHYIVHKIAHAIAGCAAAAANKGKCQDGAIGAAVGEIVGEALTNGKNPDTLTAKEREQILAYSKLVAGTVSGVVGGDVNAAANAAEVAVKNNQLSDKEGREFDNEMTACAKQNNPQLCRKNTVKKYQNVADKRLAASIAICTDISRSTECRTIRKQHLIDSRSLHSSWEAGLIGKDDEWYKLFSKSYTQADLALQSYHLNTAAKSWLQSGNTKPLSEWMSDQGYTLISGVNPRFIPIPRGFVKQNTPITNVKYPEGISFDTNLKRHLANADGFSQKQGIKGAHNRTNFMAELNSRGGRVKSETQTDIEGITRIKYEIPTLDRTGKPDGGFKEISSIKTVYNPKKFSDDKILQMAQNAASQGYSKASKIAQNERTKSISERKNVIQFSETFDGIKFRSYFDVNTGRITNIHPE

SEQ ID NO: 15722 - protein, 272 aa, Neisseria meningitidis
MRIFSTGGKMDTQAVITHIARWLDEYAARANAKGFVVGVSGGIDSAVVSALAARTGRPTLLLDMPIRQHPGQLERARLHIRNLQRQYANVSAQTVDLTDTFQTFEQTVGTHQTAFANQPLSLANARSRLRMLTLYYYGQIHGLLVTGTGNKIEDFGVGFFTKYGDGGVDISPIADLTKTQVYRLAEALGVDEAIQKAPPTDGLWDTERTDEEQMGASYPELEWAMGVYGTRKPEDFEGRQREVLEIYTRLHRAMQHKINPIPVCRIPPELLG

SEQ ID NO: 15723 - protein, 259 aa, Neisseria meningitidis
MHIIDSHCHLNFEGLKERLPEVLSNMEANGVGQALAISVSRESFAEVSAIAEVYEHIYCTIGVHPDSKEAEEFSIAEMVAAAAHPKVVGIGETGLDYYWCKGDLSWQHKRFADHIEAANQTGLPVIVHTRDAAADTLSILKECRVNSGVIHCFSEDIGFARAAMDLGLYISFSGIVTFKNAPLVQEAAKYVPDDRILVETDAPFLAPVPKRGRQNEPAFVRYTAEHIAKLRNQTLEQVAAYTTENFYQLFKKVPDMRAV

SEQ ID NO: 15724 - protein, 169 aa, Neisseria meningitidis
MKKKLLSGIKFAVQTALVFLLVSLFLDWIRKPDEPAGAAGRPLTLLSGQRLTLGQFSRDRTVLVYFWGSWCGVCRYQSPIIDDLAADGVPVVGVAVRSGSSAEVAAYMAKRGLGFPTVNDEDGGLARSWRIVATPAVVLVKNGKMVHYTTGISSYWGLRARIFQADVFG

SEQ ID NO: 15725 - protein, 346 aa, Neisseria meningitidis
MQPIRYRTDLTPYNTFGLRAQARAFIALEHADGLCDIVRLPEFDRDTVLWLGGGSNILLMQDYAGLVVHMENKGIREIARSDGMVLIEAQAGEIWHDFVLHTVALGLSGLENLSLIPGTVGASPVQNIGAYGVEAKDVIHSVRCFDLDTETFVELANADCRFAYRESLFKQEGKGRYVIVSVVFALKTHFVPNLGYGDLAAAVAELSAGRVPTAKDVSDAVCAIRNSKLPNPNVLGNVGSFFKNPVIGAEKAAALLEQHPDMPHYPQPDGSVKLAAGWLIEQCRLKGFQIGGAAVHDRQALVLVNKNNASANDVRQLAQHIKFTVFARFQVELHAEPNWLPASFSL

SEQ ID NO: 15726 - protein, 484 aa, Neisseria meningitidis
MSIEPTPPNLENDGIENDVERVSADFDRVHSLCEILEPAFEQIENGTPLEDASLRDKLTELTVLLSELHPADVAAVLESLPPRERNIVWILVKPEDDGEVLLEVSDAVRETLIESMDKDELLAAVDDLDADELAELADDLPHQVVYEALQTRDEEERAQVKAAMSYEDNQVGAIMDFELVSIRADVACEVVLRYLRRFDSLPDHTDKIFVVDENDVLQGVLPIRKLLVADPEDLVENVMAKDVVRFRAEDDVEEAAQAFERYDLVTAPVVDENKKLIGRITIDEMVDVIREESEADMLNMAGLQEEEDLFAPVLDSVKNRWMWLAINLCTAFLASRVIGAFEGSIEKIVALAALMPIVAGIGGNSGNQTITMIVRAMAMGQLTDMQAGRLLKKEVGVALVNGIIWGTVMGAVSWLLYGSLGIGLVMVAAMTLNLLLAATVGVLIPVVMEKFGRDPALGSSVLITAVTDSGGFLIFLGLATLFLL

SEQ ID NO: 15727 - protein, 328 aa, Neisseria meningitidis; identical to SEQ ID NO: 6244

SEQ ID NO: 15728 - protein, 160 aa, Neisseria meningitidis; identical to SEQ ID NO: 1608

SEQ ID NO: 15729 - protein, 69 aa, Neisseria meningitidis
MTESRQTRLQVKCPTCQTAVVWEPENAFRPFCSQRCKLIDLGGWADGKYTVSGQTESLPEISEPDMAYR

SEQ ID NO: 15730 - protein, 81 aa, Neisseria meningitidis; identical to SEQ ID NO: 1361

SEQ ID NO: 15731 - protein, 180 aa, Neisseria meningitidis
MINHIEKYTGTISHGSKSDSGSQYKLNIAAIPSSPNRDLKTYITLGLSKYNLNYKSRFEILFVCSLKYDENQIFPFLRWLAETIIENKKILLRGQVIYLPRSIVDSTKMDALYVSAPFYFDDDFQVCYGEHYNIVFPLLVPLYKQEAELVEKKGWNAFEQFLLDNEVGNLSDMNRKPFTW

SEQ ID NO: 15732 - protein, 204 aa, Neisseria meningitidis
MRITVIITTLQSAQRKPMPWNLPIFLTWLRVLLIPVMTALFYLPFPWFAEETINLTAAVIFAVAALTDWFDGFLARLWKQTSDFGAFLDPVADKLMVAVSLLLLVKLDRTYVLFAMIIIGREITISALREWMAQMGKRNSVAVATVGKFKTAAQMLAIFLLLLNIPDFYGFNLVVIGNVLMFIASLLTVWSMLYYLKMAWKEIA

SEQ ID NO: 15733 - protein, 163 aa, Neisseria meningitidis; identical to SEQ ID NO: 684

SEQ ID NO: 15734 - protein, 701 aa, Neisseria meningitidis; identical to SEQ ID NO: 6719

SEQ ID NO: 15735 - protein, 437 aa, Neisseria meningitidis; identical to SEQ ID NO: 1149

SEQ ID NO: 15736 - protein, 154 aa, Neisseria meningitidis
MKELDKIDFRILKILQQNARIPMTELAEKVGLSTTPVTERVRRLEREHYISGYHAHLNPHLLGKPLLVFVELKLQSKSGNIFEDFKKEVLKIPQIMECHLVSGEYDYLIKVRLPDMSAYRDMLGNILLQLPVASESRSYVVMEEVKENPVLDLD

SEQ ID NO: 15737 - protein, 868 aa, Neisseria meningitidis
MAANQRYRKPLPGTDLEYYDARAACEDIKPGSYDKLPYTSRILAENLVNRADKVDLPTLQSWLGQLIEGKQEIDFPWYPARVVCHDILGQTALVDLAGLRDAIAEKGGDPAKVNPVVQTQLIVDHSLAVECGGYDPDAFRKNREIEDRRNEDRFHFINWTKTAFENVDVIPAGNGIMHQINLEKMSPVVQVKNGVAFPDTCVGTDSHTPHVDSLGVISVGVGGLEAETVMLGRASMMRLPDIVGVELNGKRQAGITATDIVLALTEFLRKERVVGAFVEFFGEGARSLSIGDRATISNMTPEFGATAAMFAIDEQTIDYLKLTGRDDAQVKLVETYAKTAGLWADALKTAVYPRVLKFDLSSVTRNMAGPSNPHARFATADLAAKGLAKPYEEPSDGQMPDGSVIIAAITSCTNTSNPRNVVAAALLARNANRLGLKRKPWVKSSFAPGSKVAEIYLKEAGLLPEMEKLGFGIVAFACTTCNGMSGALDPKIQKEIIDRDLYATAVLSGNRNFDGRIHPYAKQAFLASPPLVVAYALAGSIRFDIENDVLGVADGKEIRLKDIWPADEEIDAVVAEYVKPQQFRDVYVPMFDTGTAQKAPSPLYDWRPMSTYIRRPPYWEGALAGERTLRGMRPLAILPDNITTDHLSPSNAILAVSAAGEYLAKMGLPEEDFNSYATHRGDHLTAQRATFANPKLFNEMVKNEDGSVRQGSFARVEPEGETMRMWEAIETYMNRKQPLIIIAGADYGQGSSRDWAAKGVRLAGVEAIVAEGFERIHRTNLIGMGVLPLQFKPDTNRHTLQLDGTETYDVVGERTPRCDLTLVIHRKNGETVEVPVTCRLDTAEEVLVYEAGGVLQRFAQDFLEGNAA

SEQ ID NO: 15738 - protein, 89 aa, Neisseria meningitidis; identical to SEQ ID NO: 4489

SEQ ID NO: 15739 - protein, 380 aa, Neisseria meningitidis
MNTLYTLFATCPRGLETVLSQELESLGCTDVQVFDGGVSCRGGLEQVYAANLHSRTASRILLRLTKGTYRNERDIYKLAKNINWFNWFTLQQTFKVKVEAKRANVKSIQFVGLTVKDAVCDAFRDIYDARPSVDKAAPDVRIHAFLDERNVEIFIDTSGEALFKRGYRLDTGEAPLRENLAAGLLLSAGYDGTQPFQDPFCGSGTIAIEAAWIAARRAPGMMRRFGFEKLQNFDKTLWSDLRRRAEAQVKPAFAPISGSDSDRRIIQTALANARSAGVDDIVSFSVADAQSVRPNGENGIMVSNPPYGVRLEEVRALQALYPQLGTWLKKYYAGWLAAMFTGDREMPKFMRLSPKRKIPLYNGNLDCRLFLIDMVQGSNR

SEQ ID NO: 15740 - protein, 214 aa, Neisseria meningitidis
MKLKHLLPLLLSAVLSAQAYALTEGEDYLVLDKPIPQKQSGKIEVLEFFGYFCVHCHHFDPLLLKLGKALPSDAYLRTEHVVWQPEMLGLARMAAAVNLSGLKYQANPAVFKAVYEQKIRLENRAVAGKWALSQKQFDGKKLMRAYDSPEAAAAASKMQKLTEQYGIDSTPTVVVGGKYRVIFNNGFDGGVHTIKELVAKVREERKRQTPAVQK

SEQ ID NO: 15741 - protein, 71 aa, Neisseria meningitidis; identical to SEQ ID NO: 2068

SEQ ID NO: 15742 - protein, 212 aa, Neisseria meningitidis
MQIAIIDYGMGNLHSVLKSVRTAGQLAGKNTEIFLSGDPERVSRADKVIFPGQGAMPDCMAALTRGGLDEAVKDALKNKPFFGICVGAQLLFDHSEEGNTDGLGWFGGKVRRFERDLRDPQGCRLKVPHMGWNTVRQTQNHPLFKDIPQDTRFYFVHSYYFAPENPETILGESDYPSPFACIVGKDNVFATQFHTEKSHDAGLTMLKNFLNW

SEQ ID NO: 15743 - protein, 354 aa, Neisseria meningitidis; identical to SEQ ID NO: 7532

SEQ ID NO: 15744 - protein, 214 aa, Neisseria meningitidis; identical to SEQ ID NO: 3176

SEQ ID NO: 15745 - protein, 469 aa, Neisseria meningitidis
MPHINFDTIPGSIRVPGQYIEFNTRNAVQGLPQNPQKVLMVAPMLTAGIQPALEPVQLFSDAEAADLFGQGSLAHLMVRQAFANNPYLDLTVIGIADHSAGVQATATVTLSGTATAPGVVEITIGGKQVSTAVNTGETAATVADRLKTAITAADVTVTASGSGAAVTLTAKHKGEIGNESGLTVSTGNTGLTYQANAFTGGAKNADIATALSKVAGKHYHIICSPFSDDANAKALSNHITNVSNAIEQRGCIGVLGMSAALSTATTATGEINDGRMTCAWYKGAVEPNGIIAAGYAAVLAFEEDPAKPLNTLEIKGLAVTPDAQWPLFAECNNALYNGLTPLTVVNNRVQIMRAVSTYTKSANNTDDPALLDITTIRTLDYVRRSVKERIALRFPRDKLSDRLLPKVKSEILDVLIKLDQAEIIENAEANKGKLVVARAQNDPNRVNAIIPADVVNGLHVFAGRIDLIL

SEQ ID NO: 15746 - protein, 664 aa, Neisseria meningitidis
MKRHFMPKILQQTTLHRFFRANTHHPISPSVLQQAGDLIRWLCFSDGISDFRPCRLKPQNPIGGTVMNTVSNYLSALREAMKAQGLDALVIPSADPHLSEYLPEHWQARRELSGFTGSVGTFVLTTDEAGVWVDSRYWEQAAKQLAGSGIELQKSGQVPPYNEWLAANLPENAAVGIPSDMVSLTGKRTLAQSLTAKNIRIEHPNDLLDQVWTSRPAIPAETVFIHDPAYVSETAAEKLARVRAVMAEKGADYHLVSSLDDIAWLTNLRGSDVPFNPVFVSFLLIGKDNAVLFTDRCRLNAEAAAALQTAGITVEPYAQVAGKLAQIGGALLIEPNKTAVSTLVRLPESVRLIEGINPSTLFKSCKSEADIARIREAMEHDGAALCGFFAEFEDIIGNGGSLTEIDVDTMLYRHRSVRPGFVSLSFDTIAGFNANGALPHYSATPESHSTISGNGLLLIDSGAQYKGGTTDITRVVPVGTPTAEQKRDNTLVLKAHIALAEAVFPENIPSPLIDAICRKPLWQAQCDYGHGTGHGVGYFLNVHEGPQRIAFAAPATPETAMKKGMVTSIEPGLYRPGKWGIRIENLAANQAVAAPQETEFGSFLCFETLTLCPIDTRLMDTALMTDGEIDWVNRYHAEVRRRLEPLTEGAAKAWLIKRTEPLAR

SEQ ID NO: 15747 - protein, 41 aa, Neisseria meningitidis
MVYRENIRNDKIMKAIHCQIIVIILDILSNEKKYFSQCKPL

SEQ ID NO: 15748 - protein, 386 aa, Neisseria meningitidis
MRKKLTALVLSALPLAAVADVSLYGEIKAGVEGRNYQLQLTEQPSKAQGQTNNQVKVTKAKSRIRTKISDFGSFIGFKGSEDLGEGLKAVWQLEQDVSVAGGGATQWGNRESFVGLAGEFGTLRAGRVANQFDDASQAIDPWDSNNDVASQLGIFKRHDDMPVSVRYDSPDFSGFSGSVQFVPAQNSKSAYTPAYVDEQSKYHAAVVGKPGSDVYYAGLNYKNGGFAGNYAFKYARHANVGRDAFELFLLGSGSDQAKGTDPLKNHQVHRLTGGYEEGGLNLALAAQLDLSENADKTKNSTTEIAATASYRFGNAVPRISYAHGFDFIERGKKGENTSYDQIIAGVDYDFSKRTSAIVSGAWLKRNTGIGNYTQINAASVGLRHKF

SEQ ID NO: 15749 - protein, 151 aa, Neisseria meningitidis
MVDAVVKTPEFLPFTSVGIFRFGADITQYKNILETFMYEPPDEFGTEYYESPDSNLLISVEKNKIISIFCYQELYFMGVNIIGLNFEIFKQLFHYPKLNDIDKCYLSNESYPTYVYEFDEIGVQAWEAKGKIVTIIAGGKDNYSIEPYYDE

SEQ ID NO: 15750 - protein, 255 aa, Neisseria meningitidis; identical to SEQ ID NO: 6946

SEQ ID NO: 15751 - protein, 468 aa, Neisseria meningitidis
VKFSTKAETLQAQQTGAQLFVCAEASQLSNPTALALFASLEEGQNFADTKIPTDNGLQAIAVARLAKTDRAALNKAAAEAAKWAQNQETVNVDVHVFEEAQAAAVAEAFAIAFGNAAYRFDRYKKEAKPAKFETAVFHSAHEAAVKEALRVAEAQVYGQSLCRDLGNAAPNECTPEFLARTAKAEAEKLGAHAKIIEKDYIKENMGSFWSVAKGSAEAPYLVELSYFGAADKEAAPVVLVGKGITFDTGGISLKPGLNMDEMKFDMCGAATVISTFCAAVKLQLPINLIAVVATCENMPSGAANKPGDVVKSMKGLTIEVLNTDAEGRLILCDALTYAEQFKPKAVIDVATLTGACIVALGHDVSGVMGNNQDLVDSLLVASYNVDDKAWQLPLFETYKDQLKSNFADIPNIGTPGAGTITAATFLSYFTEDYPWAHLDIAGTAWKSGAEKGATGRPVPLLLNYLRNL

SEQ ID NO: 15752 - protein, 476 aa, Neisseria meningitidis
MTWETVIGLEIHVQLNTKSKIFSGASTAFGAEPNAHAGVVECALPGVLPVMNREVVEKAIKLGLALDAKINRKNVFDRKNYFYPDLPKGYQISQLDLPIVEHGKLEIVVGDDVKTINVTRAHMEEDAGKSVHEGLNGATGIDLNRAGTPLLEVVSEPEMRSAAEAVAYAKALHSLVTWLNICDGNMAEGSFRVDANVSVRPKGQAEFGTRREIKNLNSFRFLEQAINYEAEAQIEILEDGGKVQQATMLFDPEKGETRVMRLKEDAHDYRYFPDPDLLPVIISDDRLQKAKAEMPELPKEMAARFVADYGVSDYDARLLTASRVQAAYFEEAAKESGQGKLTANWMNGELAATLNKEGMELADSPITAPRLAALVGKIADGTLSSKLAKKAFEAMWAEPEASIAEIIEKHGLQQMTDTGEIEAMVDEVLANNAKAVEQFKSGNEKALNAIVGQVMKASKGKANPAQVQELIKAKLA

SEQ ID NO: 15753 - protein, 216 aa, Neisseria meningitidis; identical to SEQ ID NO: 3431

SEQ ID NO: 15754 - protein, 144 aa, Neisseria meningitidis; identical to SEQ ID NO: 1668

SEQ ID NO: 15755 - protein, 142 aa, Neisseria meningitidis; identical to SEQ ID NO: 5523

SEQ ID NO: 15756 - protein, 103 aa, Neisseria meningitidis; identical to SEQ ID NO: 3787

SEQ ID NO: 15757 - protein, 307 aa, Neisseria meningitidis; identical to SEQ ID NO: 1349

SEQ ID NO: 15758 - protein, 291 aa, Neisseria meningitidis
MPTVRFTESVSKHDLDALFEWAKASYGAESCWKTLYLNRLPLGNLSPEWAERVKKDWEAGCSESSDGIFLNADGWSDMGGRLQHLARTWNKAGLLHGWRNECFDLTDGGGNILFSLERAAFRPFGLLSRAVHLNGLTESDGRWHFWIGRRSPHKAVDPDKLDNIAAGGVSSGELPSEAVCRESSEEAGLDQTLFPLIRPVSRLHSLRPVSRGVHNEILYVFDAVLPETFLPENQDGEVACFEKMDIGSLVATMLSGNMMHDAQLVTLDAFCRYGLIDAAHPLSEWLDGIRL

SEQ ID NO: 15759 - protein, 298 aa, Neisseria meningitidis; identical to SEQ ID NO: 5118

SEQ ID NO: 15760 - protein, 303 aa, Neisseria meningitidis; identical to SEQ ID NO: 7939

SEQ ID NO: 15761 - protein, 71 aa, Neisseria meningitidis; identical to SEQ ID NO: 1785

SEQ ID NO: 15762 - protein, 85 aa, Neisseria meningitidis; identical to SEQ ID NO: 3676

SEQ ID NO: 15763 - protein, 1389 aa, Neisseria meningitidis
MTDTAPTDTDPTENGTRKMPSEHRPAPPAKKRRPLLKLSAALLSVLILAVCFLGWLAGTESGLRFGLYQIPSWFGVNISSQNLKGTLLDGFDGDNWSIETEGADLKISRFRFAWKPSELMRRSLHITEISAGDIAIVTKPTPPKEERPPLSLPDSIDLPAAVYLDRFETGKISMGKAFDKQTVYLERLDASYRYDRKGHRLDLKAADTPWSSSSGSASVGLKKPFALDTAIYTKGGLEGKTIHSTARLSGSLKDVRAELAIDGGNIRLSGKSVIHPFAESLDKTLEEVLVKGFNINPAAFVPSLPDAGLNFDLTAIPSFSDGIALEGSLDLENTKAGFADRNGIPVRQVLGSFVIRQDGTVHIGNTSAALLGRGGIRLSGKIDTEKDILDLNIGINSVGAEDVLQTAFKGRLDGSIGIGGTTASPKISWQLGIGTARTDGSLAIASDPANGQRKLVLDTVNIAAGQGSLTAQGYLELFKDRLLKLDIRSRAFDPSRIDPQLPAGNINGSINLAGELAKEKFTGKMRFLPGTFNGVPIAGSADIVYESRHLPRAAVDLRLGRNIIKTDGGFGKKGDRLNLNITAPDLSRFGFGLAGSLNVRGHLSGDLDGGIRTFETDLSGAARNLHIGKAADIRSLDFTLKGSPDTSRPIRADIKGSRLSLSGGAAVVDTADLMLDGTGVQHRIRTHAAMTLDGKPFKFDLDASGGINRELTLWKGSIGILDIGGAFNLKLQNRMTLEAGAERVAASAANWQAMGGSLNLQHFSWDKKTGISAKGGAHGLHIAELHNFFKPPFEHNLVLNGDWDVAYGRNARGYLNISRQSGDAVLPGGQALGLNAFSLKTRFQNDRIGILLDGGARFGRINADLGIANAFGGNMANAPLGGRITASLPDLGALKPFLPAAAQNITGSLNAAAQIGGRVGSPSVNAAVNGSSNYGKINGNITVGQSRSFDTAPLGGRLNLTVADAEVFRNFLPVGQTVKGSLNAAVTLGGSIADPHLGGSINGDKLYYRNQTQGIILDNGSLRSHIAGRKWVIDSLKFRHEGTAELSGTVGMENSGPDVDIGAVFDKYRILSRPNRRLTVSGNTRLRYSPQKGISVTGMIKTDQGLFGSQKSSMPSVGDDVVVLGEVKKEAAAPLPVNMNLTLDLNDGIRFAGYGADVTIGGKLTLTAQSGGSVRGVGTVRVIKGRYKAYGQDLDITKGTVSFVGPLNDPNLNIRAERRLSPVGAGVEILGSLNSPRITLTANEPMSEKDKLSWLILNRAGSGSSGDNAALSAAAGALLAGQINDRIGLVDDLGFTSKRSRNAQTGELNPAEQVLTVGKQLTGKLYIGYEYSISSAEQSVKLIYRLTRAIQAVARIGSRSSGGELTYTIRFDRFSGSDKKDSAGNSKGK

SEQ ID NO: 15764 - protein, 94 aa, Neisseria meningitidis; identical to SEQ ID NO: 2694

SEQ ID NO: 15765 - protein, 106 aa, Neisseria meningitidis; identical to SEQ ID NO: 2510

SEQ ID NO: 15766 - protein, 107 aa, Neisseria meningitidis; identical to SEQ ID NO: 1793

SEQ ID NO: 15767 - protein, 112 aa, Neisseria meningitidis; identical to SEQ ID NO: 3481

SEQ ID NO: 15768 - protein, 131 aa, Neisseria meningitidis; identical to SEQ ID NO: 9635

SEQ ID NO: 15769 - protein, 130 aa, Neisseria meningitidis
MYSFEANANAVKISETVSVDTGQGAKIHKFVPKNSKTYSSDLIKTVDLTHIPTGAKARINAKITASVSRAGVLAGGGKLARLGAKFSTRAVPYVGTALLAHDVYETFKEDIQARGYQYDPETDKFAKVSG

SEQ ID NO: 15770 - protein, 130 aa, Neisseria meningitidis; identical to SEQ ID NO: 15769

SEQ ID NO: 15771 - protein, 423 aa, Neisseria meningitidis
MFQWLYDALWLLAPIWIRRYLDKRSGSAPAYRAHRDERFGKPYPNPVTGAVWIHAVSVGETRAAQPLIRELRQRFPDAPLLMTQMTPTGRETAQVLFPDAQCRYLPYDKKTWVRQFLREHRPMFGVLMETEIWPNLMKECRRAGVPLFLANARLSEKSLNGYLKVRRLIRPAAASLTGCLAQTEADAARLAKLGAASVQVCGNTKYDLMPSEQMKTLAGQFEKRIGGRPVAVCGSTRVYRGEDEAEKLLAAWQQYRGDALLVVVPRHPEHFQTVFETAKRFGFKVQRRSDGLPVEPDTQVWIGDSMGELYAYYLCADVTFVGGSLVDSGCQNIIEPLSCGVPTIFGFSTYNFSEACRHALASGAAVRVESADAWREAVEKTLSSEGGGMQMQAHVDGFIAQHRGAGARIAEAVREAVCGHRGR

SEQ ID NO: 15772 - protein, 685 aa, Neisseria meningitidis
MTRKILVTSALPYANGSIHLGHMVEHIQTDVWVRFQKLRGNECHYCCADDTHGTPVMLAAQKQGIAPEDMIAKVREEHLADFTGFFIGYDNYYSTHSPENKQFSQDIYRALKANGKIESRVIEQLFDPEKQMFLPDRFVKGECPKCHAQDQYGDNCEVCGTTYSPTELINPYSAVSGAKPELRESEHFFFKLDECADFLKAWTSGNNPHDGKPHLQPEALNKMKEWLGEGEETTLSDWDISRDAPYFGFEIPDAPGKYFYVWLDAPVGYMASFKNLCDRIGIDFDEYFKAGSQTEMYHFIGKDILYFHALFWPAMLHFSGHRAPTGVYAHGFLTVDGQKMSKSRGTFITAKSYLEQGLNPEWMRYYIAAKLNSKIEDIDLNLQDFISRVNSDLVGKYVNIAARASGFIAKRFEGRLKDVADSALLAKLTAQSEAIAECYESREYAKALRDIMALADIVNEYVDANKPWELAKQEGQDERLHEVCSELINAFTMLTAYLAPVLPKVAENAAKFLNLEAITWANTRETLGKHAINKYEHLMQRVEQKQVDDLIEANKQSIAAAAVPAAEEGKYEKVAEQASFDDFMKIDMRVAKVLNCEAVEGSTKLLKFDLDFGFEKRIIFSGIAAFYPNPAELNGRMVIAVANFAPRKMAKFGVSEGMILSAATADGKLKLLDVDAGAQPGDKVG

SEQ ID NO: 15773 - protein, 174 aa, Neisseria meningitidis
MEMKQMLLAVGVVAVLAGCGKDAGGYEGYWREKSDKKEGVIAVKKEKGNYFLNKINVFTGKEESLLLSEKDGALSINTGIGEIPIKLSDDGKELYVERRQYVKTDAAMKDKIIAHQKKCGQTAQAYLDARKALPSNQTYQQRQAAIEQLKRRFEAEFDELEKEIKCNGRPTLLF

SEQ ID NO: 15774 - protein, 167 aa, Neisseria meningitidis; identical to SEQ ID NO: 189

SEQ ID NO: 15775 - protein, 105 aa, Neisseria meningitidis; identical to SEQ ID NO: 3792

SEQ ID NO: 15776 - protein, 207 aa, Neisseria meningitidis
MERKERLRAGIAAMGLDISETAQDRLLVYVDLLKKWNKTYNLTALRDEEKMIVHHLLDSLTLLPHIEGVQTMLDVGSGGGQPGIPAAVCRPDVQITLLDANTKKTAFLQQAVIELGLDNVRVVSGRVEAVSDVRADVVTSRAFAELADFVSWTVHLLKDGGYWAAMKGVYPQEEIGRLPQDVCVEKVQRLDVPGLDAERHIVILSKR

SEQ ID NO: 15777 - protein, 247 aa, Neisseria meningitidis
MPDAVKKVYLIHGWGANRHVFDDLMPRLPATWPVSAVDLPGHGDAPFAQPFDIEAAADAVAAQIDTPADILGWSLGGLVALYLAARHPDKVRSLCLTASFARLTADEDYPEGLAAPALGKMVGAFRTDYAKHIKQFLQLQLLHTPDADGIIGRILPDLARCGTPSALQEALDAAERADARHLLDKIDVPVLLVFGSKDAITPPRMGEYLHRRLKGSRLVVMEKAAHAPFLSHAEAFAALYRDFVEGV

SEQ ID NO: 15778 - protein, 326 aa, Neisseria meningitidis
MAMAENGKYLDWAREVLHAEAEGLREIAAELDKNFVLAADALLHCKGRVVITGMGKSGHIGRKMAATMASTGTPAFFVHPAEAAHGDLGMIVDNDVVVAISNSGESDEIAAIIPALKRKDITLVCITARPDSTMARHADIHITASVSKEACPLGLAPTTSTTAVMALGDALAVVLLRARAFTPDDFALSHPAGSLGKRLLLRVADIMHKGGGLPAVRLGTPLKEAIVSMSEKGLGMLAVTDGQGRLKGVFTDGDLRRLFQECDNFTGLSIDEVMHTHPKTIAAERLATEALKVMQANHVNGLLVTDADGVLIGALNMHDLLAARIV

SEQ ID NO: 15779 - protein, 164 aa, Neisseria meningitidis; identical to SEQ ID NO: 7730

SEQ ID NO: 15780 - protein, 207 aa, Neisseria meningitidis; identical to SEQ ID NO: 2101

SEQ ID NO: 15781 - protein, 302 aa, Neisseria meningitidis; identical to SEQ ID NO: 1790

SEQ ID NO: 15782 - protein, 279 aa, Neisseria meningitidis; identical to SEQ ID NO: 2627

SEQ ID NO: 15783 - protein, 100 aa, Neisseria meningitidis; identical to SEQ ID NO: 1675

SEQ ID NO: 15784 - protein, 242 aa, Neisseria meningitidis
MIKLTAQQIFDKLLDEEKILSANGQIRFFLGDVDIIVKQKDVVGNIIQEWLGGLRKREIEFDVSTNTQMPPDFFLNKKDRSRELLEVKAFNRNAGPGFDIADFKMYSDKIIHKPYMLDVDYLIFGYDMDDNGNVTIKDLWLKKVWQITRSMDGWAINLQVKKGVVHKIRLGVWYSINKKNMPMFECLEDFVSAIEETVYQNPATRHNASLWKKKFEEAYKKHYNRSISIPRWHEIAHKYKKK

SEQ ID NO: 15785 - protein, 112 aa, Neisseria meningitidis; identical to SEQ ID NO: 7736

SEQ ID NO: 15786 - protein, 442 aa, Neisseria meningitidis; identical to SEQ ID NO: 3795

SEQ ID NO: 15787 - protein, 105 aa, Neisseria meningitidis; identical to SEQ ID NO: 7739

SEQ ID NO: 15788 - protein, 124 aa, Neisseria meningitidis; identical to SEQ ID NO: 3797

SEQ ID NO: 15789 - protein, 99 aa, Neisseria meningitidis; identical to SEQ ID NO: 1679

SEQ ID NO: 15790 - protein, 179 aa, Neisseria meningitidis
MNIIDTAIPDVKLLEPQVFGDARGFFMETFRDEWFKTQVCERTFVQENHSKSGKGVLRGLHYQTENTQGKLVRVVVGEVFDVAVDMRKDSPTFGKWVGEILSAENKRQLWVPEGFAHGFYVLSDTAELTYKCTDYYKPEAEQVLIWNDPAIGIDWPLQGEPNLSPKDLAGKVLAEAVTF

SEQ ID NO: 15791 - protein, 288 aa, Neisseria meningitidis; identical to SEQ ID NO: 12814

SEQ ID NO: 15792 - protein, 317 aa, Neisseria meningitidis
MHQYYDAVILSVGNGLLKRFFKQNAQLNIASRPLIITLFPGVVFGDQASILSRMGADIVLYNNKHDFRIAETYKKQYKLSCQNILYGYPNFRHASKGCHGERIYFIDQVKIPFKKEERIYTLKKLITLAEKYPEKEFTILLRVADKDITVHQDKHSYIELAKQFQLPSNLTIERKSTAQAFQEMGYCLSYSSTMLFEAECKGIPVGVVADLGFSKSYANQHFLGSGVLVYFDQIDFTSPKIADPDWLDCYATKKVITTDEFNKLLKQVVPLQHDYQEYLSAVNSIESTKTIFLRKFKKLIRDPKKFFYDSKWLRKVI

SEQ ID NO: 15793 - protein, 317 aa, Neisseria meningitidis; identical to SEQ ID NO: 15792

SEQ ID NO: 15794 - protein, 205 aa, Neisseria meningitidis; identical to SEQ ID NO: 11786

SEQ ID NO: 15795 - protein, 205 aa, Neisseria meningitidis; identical to SEQ ID NO: 11786

SEQ ID NO: 15796 - protein, 183 aa, Neisseria meningitidis; identical to SEQ ID NO: 1696

SEQ ID NO: 15797 - protein, 185 aa, Neisseria meningitidis; identical to SEQ ID NO: 7750

SEQ ID NO: 15798 - protein, 221 aa, Neisseria meningitidis; identical to SEQ ID NO: 7751

SEQ ID NO: 15799 - protein, 405 aa, Neisseria meningitidis; identical to SEQ ID NO: 3566

SEQ ID NO: 15800 - protein, 189 aa, Neisseria meningitidis; identical to SEQ ID NO: 8960

SEQ ID NO: 15801 - protein, 123 aa, Neisseria meningitidis; identical to SEQ ID NO: 130

SEQ ID NO: 15802 - protein, 106 aa, Neisseria meningitidis; identical to SEQ ID NO: 7757

SEQ ID NO: 15803 - protein, 237 aa, Neisseria meningitidis; identical to SEQ ID NO: 7758

SEQ ID NO: 15804 - protein, 166 aa, Neisseria meningitidis; identical to SEQ ID NO: 987

SEQ ID NO: 15805 - protein, 394 aa, Neisseria meningitidis
MTPQVLTILGSTGSIGESTLDVVSRHPEKFRVFALAGHKQVEKLAAQCQTFQPEYAVVADAEYAARLEALLKRDGTATQVLHGAQALVDVASADEVSGVMCAIVGAVGLPSALAAAQKGKTIYLANKETLVVSGALFMETARANGAAVLPVDSEHNAVFQVLPRDYTGRLNEHGIRSIILTASGGPFLTTDLGTFDSITPAQAVKHPNWSMGRKISVDSATMMNKGLELIEAHWLFNCPPDKLEVVIHPQSVIHSMVRYRDGSVLAQLGNPDMRTPIAYCLGLPERIDSGVGDLDFDALSALTFQKPDFDRFPCLKLAYEAMNAGGVAPCVLNAANEAAVAAFLDGQIKFTDIAKTVAHCLSQDFSDGIGDIGGLLAQDARTRAQARAFIGTLR

SEQ ID NO: 15806 - protein, 248 aa, Neisseria meningitidis; identical to SEQ ID NO: 4029

SEQ ID NO: 15807 - protein, 375 aa, Neisseria meningitidis
MNTSQRNRLVSRWLNSYERYRYRRLIHAVRLGGAVLFATASARLLHLQHGEWIGMTVFVVLGMLQFQGAIYSKAVERMLGTVIGLGAGLGVLWLNQHYFHGNLLFYLTVGTASALAGWAAVGKNGYVPMLAGLTMCMLIGDNGSEWLDSGLMRAMNVLIGAAIAIAAAKLLPLKSTLMWRFMLADNLADCSKMIAEISNGRRMTRERLEENMAKMRQINARMVKSRSHLAATSGESRISPAMMEAMQHAHRKIVNTTELLLTTAAKLQSPKLNGSEIRLLDRHFTLLQTDLQQTVALINGRHARRIRIDTAINPELEALAEHLHYQWQGFLWLSTNMRQEISALVILLQRTRRKWLDAHERQHLRQSLLETREHG

SEQ ID NO: 15808 - protein, 185 aa, Neisseria meningitidis; identical to SEQ ID NO: 5793

SEQ ID NO: 15809 - protein, 194 aa, Neisseria meningitidis
MHILTAGVDEAGRGPLVGSVFAAAVILPEIFDLPGLTDSKKLSEKKRDALAEMIKNQAVAWHVAAASPEEIASLNILHATMLAMKRAVDGLAVRPERIFIDGNRIPEHLNIPAEAVVKGDSKIIEISAASVLAKTARDAEMYALAQRHPQYGFDKHKGYGTKQHLEALKQYGVLPEHRRDFAPVRNLLAQQTLF

SEQ ID NO: 15810 - protein, 628 aa, Neisseria meningitidis
MIYPKTYDVIVVGGGHAGTEAALAAARMGAQTLLLSHNIETLGQMSCNPSIGGIGKGHLVRELDALGGAMALATDKSGIQFRRLNASKGAAVRATRAQADRILYKAAIREMLENQENLDLFQQAVEDVTLDGDRISGVITAMGVEFKARAVVLTAGTFLSGKIHIGLENYEGGRAGDPAAKSLGGRLRELNLPQGRLKTGTPPRIDGRTIDFSQLTEQPGDTPVPVMSVRGNAEMHPRQVSCWITHTNTQTHDIIRSGFDRSPMFTGKIEGVGPRYCPSIEDKINRFADKDSHQIFLEPEGLTTHEYYPNGISTSLPFDIQIALVRSMKGLENAHILRPGYAIEYDYFDPRNLKASLETKTIAGLFFAGQINGTTGYEEAAAQGLLAGANAVQYVREQDPLLLRREQAYLGVLVDDLITKGVNEPYRMFTSRAEYRLQLREDNADMRLTEDGYKIGLVGEAQWRMFNEKREAIEREIQRLKTTWYTPQKLAEDEQIRVFGQKLSREANLHDLLRRPNLDYAALMTLEGAMPSERLSAEVVEQVEIQVKYQGYIDRQNEEIDSRRDIETLKLPEDIDYSKVKGLSAEVQQKLNQHKPETVGQASRISGVTPAAVALLMVHLKRGFKDAK

SEQ ID NO: 15811 - protein, 919 aa, Neisseria meningitidis
MKRMLFNATQAEELRVAIVDGQNLLDLDIETLGKEQRKGNIYKGIITRIEPSLEACFVDYGTDRHGFLPFKEVSRSYFRDYEGGRARIQDVLKEGMEVIVQVEKDERGNKGAALTTFISLAGRYLVLMPNNPRGGGVSRRIEGEERQELKAAMAQLDIPNGMSIIARTAGIGRSAEELEWDLNYLKQLWQAIEEAGKAHHDPYLLFMESSLLIRAIRDYFRPDIGEILVDNQEVYDQVAEFMSYVMPGNIGRLKLYEDHTPLFSRFQIEHQIESAFSRSVSLPSGGAIVIDHTEALVSIDVNSARATRGADIEDTAFKTNMEAAEEVARQMRLRDLGGLVVIDFIDMENPKHQRDVENVLRDALKKDRARVQMGKLSRFGLLELSRQRLKPALGESSHVACPRCAGTGVIRGIESTALHVLRIIQEEAMKDNTGEVRAQVPVDVATFLLNEKRAELFAMEERLDVNVVLIPNIHLENPHYEINRIRTDDVEEDGEPSYKRVAEPEEDESAKPFGGEKAKAARPEPAVKGVRHTSPAPTAAPEKKTSWWDSFKAWLKRIFGGSETQAAPAAETSEKRSTANRSGSRANNRRQNPRRSKREGSKVEVREVAGKTAGQEARADKAETRNNGNRRRNERGDRAAGRADEAEIQDRNIQPAATVADAAPSETEVQTGKRRRNGSRSERGQTAPETATVAETTVQTAENTPSEPHTAEDKGSKPKSERNRRERDSRDAKERRERNNQRDRRQNGKKRNIPSAAKIEQYLNIHDTADKVRSAAAHVFGETDANAPITVSIADPVAERDLPTASPAVSNGDAPVYDAAEKIRRATAAILPEGATPKAEAQEMPSETATFTAAAEQARETAQTGGLVLIETDPAALKAWAAQPEVQAGRGLRRSEQPKPSEVATVPAEEMIQVETRQG

SEQ ID NO: 15812 - protein, 658 aa, Neisseria meningitidis
MNEFSLAPIVVVLLVSVITVILCRKFNIPSMLGYLLVGFLAGPGMLSLIPKSHATDYLGEIGIVFLMFSIGLEFSLPKLRAMRRLVFGLGGLQVGVTMLSVMGILMLTGVPFNWAFAVSGALAMSSTAIVSRILSEKTELGQPHGQMAMGVLLMQDIAVVPLMILIPALAGGGDGNIWAALGLAFAKMLLTLGLLFFVGSKIMSRWFRMVAKRKSSELFMINVLLVTLGVAYLTELEGLSMALGAFVAGMLLSETEYRFQVEDDIRPFRDILLGFFFITVGMKLDIQALIGGWRQVLMLLAMLLVLKALVVFAIAFKMKHSVGDSLKTALYLAQGGEFGFVMLAIAGQLDMVSPEWEQAATAAVLLSMIIAPFLLGGSDALVGRLVKSSWDMKSLDLHSMLVETMSKSDHVLIVGFGRGGQTVGRVLAQEDIPYFALDLDIARVQVARSAGEPVSFGDAKRREVLEAAGLGRAKMVVVTLNNMHETQHVLDNVLSMYPNMPVYVRATNDDYVKTFTDIGAEEAVSDTKETGLVLAGYAMLGNGASYRHVYQTMANIRHSRYAALEGLFVGSDDEAGFGENGETVRHAFPLAAEAYAVGKTVGTLPMAAYGIKLLFVRRRTGRIENPDASFTLKGGDVLVVAGKKEEIISFENWSLQGI

SEQ ID NO: 15813 - protein, 454 aa, Neisseria meningitidis
FKIGIGPSSSHTVGPMKVAAAFATGLDAQAVRIVIDIYGSLALTGYGHGTFDALMLGLEGSLPHDIPLAGIPERLERIRTQHILRLNGQEIRFIPDRDLNIRGNQVLPKHPNGLRFTAYASDGIVLKEQVYYSTGGGFVVTGEDFERQSETEKTVPYPYNSCAELLDRCRLNRLDISEVVLANEAALAGCSANEIRRRVAGVADVMEGCIKRGLAADGELPGGLNVRRRAPHLATKLKVLRETEIVNTQLWPMVYAMAVNEENAAGGRVVTAPTNGAAGIIPAVLHYFRKFNPHATQERVENFLLTAGAIGILYKTNASISGADVGCQGEVGVACSMAAGAYAEVIGGTPKQVENAAEMAMEHHLGLTCDPVGGLVQIPCIERNGIAAEKALKLGTLALLEDGTDKKVSLDEVIRTMLQTGRDMKATYKETSLAGLAATLRKRAVPVSVRVVEC

SEQ ID NO: 15814 - protein, 290 aa, Neisseria meningitidis; identical to SEQ ID NO: 3809

SEQ ID NO: 15815 - protein, 119 aa, Neisseria meningitidis; identical to SEQ ID NO: 7767

SEQ ID NO: 15816 - protein, 206 aa, Neisseria meningitidis; identical to SEQ ID NO: 1725

SEQ ID NO: 15817 - protein, 483 aa, Neisseria meningitidis; identical to SEQ ID NO: 5802

SEQ ID NO: 15818 - protein, 358 aa, Neisseria meningitidis; identical to SEQ ID NO: 7769

SEQ ID NO: 15819 - protein, 358 aa, Neisseria meningitidis; identical to SEQ ID NO: 7769

SEQ ID NO: 15820 - protein, 113 aa, Neisseria meningitidis; identical to SEQ ID NO: 1729

SEQ ID NO: 15821 - protein, 113 aa, Neisseria meningitidis; identical to SEQ ID NO: 1729

SEQ ID NO: 15822 - protein, 618 aa, Neisseria meningitidis
MLNKIFSWFESRIDPYPEAAPKTPEKGLWRFIWSSMTGVRKWIAALAALTAGIGIMEALVFQFMGKIVEWLGKYAPAELFAEKGWELAAMAAMMVFSVVWAFAASNVRLQTLQGVFPMRLRWNFHRLMLNQSLGFYQDEFAGRVSAKVMQTALALRDAVMTVADMVVYVSVYFITSGVILASLDSWLLLPFIGWIVGFASVMRLLIPKLGQTAAWQADARSLMTGRITDAYSNIATVKLFSHGAREAAYAKQSMEEFMVTVRAQMRLATLLHSCSFIVNTSLTLSTAALGIWLWHNGQVGVGAVATATAMALRVNGLSQYIMWESARLFENIGTVGDGMATLSKPHTILDKPNALPLKVSQGEIKFEHVDFSYEAGKPLLNGFNLTIRPGEKVGLIGRSGAGKSTIVNLLLRFYEPQSGTVSIDGQDISGVTQESLRAQIGLVTQDTSLLHRSVRDNIIYGRPDATDAEMVSAAERAEAAGFIPELSDAKGRRGYDAHVGERGVKLSGGQRQRIAIARVMLKDAPILLLDEATSALDSEVEAAIQESLDKMMDGKTVIAIAHRLSTIAAMDRLVVLDKGRIIEEGTHAELLEKRGLYAKLWAHQSGGFLNEHVEWQHD

SEQ ID NO: 15823 - protein, 241 aa, Neisseria meningitidis
MDFLSCWRRIADAPTIRRCVLCHGSSGVSDGICAGCRNDLAAYRTDAANSCPLCFRHVQGGAVCGGCQKKPPAFDRMWASLHYEPPVSNMIHALKHLADLSMVQPLADLMMQNPPDRLADECFDFVLPVPLSRERLLQRGFNQSESIVGLLAQRYGWQILPRHTVFRHHRPPQSTLKGGERRRNIKNAFEIRTPIPENCNILLIDDVFTTGATLDELAKTLKKSGANRICCWTLARTPMKK

SEQ ID NO: 15824 - protein, 369 aa, Neisseria meningitidis
MMKIKALMIAAALLAAADVHAAPQKAKTASAKAAKAAKAAKVAKVAKVAKVAKVAKVAKVAKVAKVAKVAKVAATAQKEAAPAQQQGGIRFSDGIAAVADNEVITRRRLAEAVAEAKANLPKDAQISESELSRQVLMQLVNQSLIVQAGKRRNIQASEAEIDAVVAKNPALKNLSPAQRRDFADNIIAEKVRQQAVMQNSRVSEAEIDAFLEQAQKQGITLPEGAPLRQYRAQHILIKADSENAAVGAESTIRKIYGEARSGTDFSSLARQYSQDASAGNGGDLGWFADGVMVPAFEEAVHALKPGQVGAPVRTQFGWHIIKLNEVRDAGTPQERIRNSVRQYIFQQKAEQATVNLLRDLHSGAYVDIR

SEQ ID NO: 15825 - protein, 214 aa, Neisseria meningitidis; identical to SEQ ID NO: 1743

SEQ ID NO: 15826 - protein, 82 aa, Neisseria meningitidis; identical to SEQ ID NO: 1744

SEQ ID NO: 15827 - protein, 65 aa, Neisseria meningitidis; identical to SEQ ID NO: 3913

SEQ ID NO: 15828 - protein, 696 aa, Neisseria meningitidis
MLPTQPNPTQPNPTQPNPTQPNPTQPNPTQPNPSPDLSDTAGANTEAIYTSDGITANSTQLEQLKKLFPACFDADGNFLIDRLQAEIAPQTDIGREFYEMNWLGKSYARLLRNLPPETLISEDKTHNAKPENAGSQNLLIRGDNLEVLKHLKNAYTNSVKMIYIDPPNTGSDGFVYQDDRKFTPAELARLANIDEDEAARILDFTDKGSNSHSAWLTFMYPRLYVARELLKDDGVIFISIDDNEAAQLKLLCDEVFGEGNFVAQLPWRKRTAKSDVPFGISQDYEWIFVFAKSCQFIAATKGKERRYYETDDFPDRPWRTHDLTKQTTAAERPNSFFTMVDPKTGKKYPANPNATWRVTKDTFQDYYNKGKIVFPDDYDFLNISNPVMRYFKDDDMKKAGEDFGKVAVSSRLPENVGTLADAVAEYLAIFSRTLPENIGMTKEGTKEITDLFGSKIFTFPKPSQLIKFLVSISSKSNDLILDFFAGSGTTAHAVMQLNAEGQNGNRRYICVQLPEKTAEKSEARKAGYPTIFDITKARIEKAAAKIRVEHPDYTGDSGFKIFQTADNFRQHPDKDFSPEQPDLPLNDELSEEQLQTLLTTWTLYDGAALTTPVEPVRLGAYTAYLCEKRLYLMNAGFTSADLLAFIRKLDDDADFNPNRVIVFGSNMASAMQHELDQAVRGYANKKEIELNVVIRV

SEQ ID NO: 15829 - protein, 473 aa, Neisseria meningitidis
MTTIYNTLTRQKEPFAPIDPKNVRMYVCGMTVYDYCHLGHARVMVVFDMIARWLRECGYPLTYVRNITDIDDKIIARAAENGETIGELTARFIQAMHEDADALGVLRPDIEPKATENIPQMIAMIETLIQNGKAYPAANGDVYYAVREFAAYGQLSGKSLDDLRAGERVEVDGFKRDPLDFVLWKAAKAGEPAWESPWGNGRPGWHIECSAMSENLFGDTFDIHGGGADLQFPHHENEIAQSVGATGHTCGHHHAQTHHGQSIASHVKYWLHNGFIRVDGEKMSKSLGNFFTIREVLKQYDPEVVRFFILRAHYRSPLNYSDAHLDDAKGALTRLYTTLKNTPAAAFDLSENANDYTRRFYAAMNDDFGTVEAVAVLFELAGEVNKTNDAQLAGCLKALGGIIGLLQRDPTEFLQGSAASDGLSNEEIEDLIARRKQARADKNWAESDRIRDLLNEHKIILEDNAGGTTWRRG

SEQ ID NO: 15830 - protein, 464 aa, Neisseria meningitidis
MTVKTRFAPSPTGYLHIGGVRTALFSWAFARHHKGEFLLRIEDTDLARSTAESVNIILDGMKWVGLDYDNAGNVVYQTRRFDRYKEVIAELLEKGDAYYCYCSKEELEAMREKAEKEGTATYDRRWRPEAGKTLPEIPAGVQPVVRFKTPLDGVTKWTDLVKGEISIPNEALDDLIIARADGTPTYNFCVVVDDYDMGVTHVIRGDDHVNNTPKQINILKAIGATLPEYGHLPMILNEQGKKISKRSGDTVAITDFGAMGILPEAMLNYLARLGWAHGDDEFFTMEQFIEWFDLKDVSPSPSRMDLKKLYWINGEHIKITPNGKLAELVKPRLALRDIHETEKPALEDVLALVKDRAQDLNTLADECLYFYVKQTPTEADVQKHWDDEAAARMLRFAERLEGLEDWNAEAIHDLFKPFCDEEGIKMGKLGMPLRLAVCGTAKTPSVDAVLALIGKEEVLKRIRA

SEQ ID NO: 15831 - protein, 441 aa, Neisseria meningitidis
MKKYLFRAALYGIAAAILAACQSKSIQTFPQPDTSVINGPDRPVGIPDPAGTTVGGGGAVYTVVPHLSLPHWAAQDFAKSLQSFRLGCANLKNRQGWQDVCAQAFQTPVHSFQAKQFFERYFTPWQVAGNGSLAGTVTGYYEPVLKGDDRRTAQARFPIYGIPDDFISVPLPAGLRSGKALVRIRQTGKNSGTIDNTGGTHTADLSRFPITARTTAIKGRFEGSRFLPYHTRNQINGGALDGKAPILGYAEDPVELFFMHIQGSGRLKTPSGKYIRIGYADKNEHPYVSIGKYMADKGYLKLGQTSMQGIKSYMRQNPQRLAEVLGQNPSYIFFRELAGSSNDGPVGALGTPLMGEYAGAVDRHYITLGAPLFVATAHPVTRKALNRLIMAQDTGSAIKGAVRVDYFWGYGDEAGELAGKQKTTGYVWQLLPNGMKPEYRP

SEQ ID NO: 15832 - protein, 456 aa, Neisseria meningitidis
MPQNTLNIVILAAGKGTRMYSKMPKVLHEIGGETMLGRVIDTAAALNPQNICVVVGHGKEQVLDTVKRDVVWVEQTEQLGTGHAVKTALPHLAAEGRTLVLYGDVPLIDVETLETLLEAAGNEVGLLTDVPADPSGLGRIIRDGSGSVTAIVEEKDASAAQKAVKETNTGILVLPNAKLENWLNSLSSNNAQGEYYLTDLIAKAVADGIKVHPVRVRASHLAAGVNNKRQLAELERIFQTEQAQELLKAGVTLHDPARFDLRGRLKHGQDVVIDVNCIFEGEVEIGDNVEIGANCVIKNAKIGANSKIAPFSHLEDCEVGENNQIGPYARLRPQAKLANDVHVGNFVEIKNAAIGKGTKANHLTYIGDAEVGSKTNFGAGTIIANYDGVHKHKTVIGDEVRIGSNCVLVSPVKIGNKVTTGAGSTITRNVEDGKLALARSRQTVIEGWVRPEKDKQ

SEQ ID NO: 15833 - protein, 99 aa, Neisseria meningitidis; identical to SEQ ID NO: 2699

SEQ ID NO: 15834 - protein, 466 aa, Neisseria meningitidis
MTPSALKKTVLLLGTAFAAASAQASGYHFGTQSVNAQSTANAAAAEAADASTIFYNPAGLTKLDSSQISVNANIVLPSIHYEADSATDFTGLPVQGSKSGKITKTTVAPHIYGAYKVNDNLTVGLGVYVPFGSATEYEKDSVLRHNINKLGLTSIAVEPVAAWKLNDRHSFGAGIIAQHTSAELRKYADWGIKSKAEILTAKPPKPNGVAEAAKIQADGHADVKGSDWGFGYQLAWMWDINDRARVGVNYRSKVSHTLKGDAEWAADGAAAKAMWSTMLAANGYTANEKARVKIVTPESLSVHGMYKVSDKADLFGDVTWTRHSRFDKAELVFEKEKTVVKGKSDRTTITPNWRNTYKVGFGGSYQISEPLQLRAGIAFDKSPVRNADYRMNSLPDGNRIWFSAGMKYHIGKNHVVDAAYTHIHINDTTYHTAKASGNDVDSKGASSARFKNHADIIGLQYTYKFK

SEQ ID NO: 15835 - protein, 480 aa, Neisseria meningitidis
MSHLFRKEVFVAQQNKWTGQVILTRPFSFLFLTFCAFLIALCIIIFLIFGSYTNKTTVEGQLLPTMGVVRVYSSDIGTITHKFVEDGNFVKAGEPLFKLSTSRFGEKGNVQAKLAAEANLKKTLALQELERLKRIHQNEQKNVHNNIHRLNNQLENIKQQITGQNRQIRLAEKTLNKNKFLASQGAVSQQDKMTAESHLLEQRSRLESLKREQNNAIRELDEQKITLSSLPERHKTELSQLNRAITEMNQEILDFDLKSEQTIRASKSGDLCKNNLLTKFDAKCAKKFSIANLPNIEQKVGKIRKVLHFENEIEHKILVTYVIAKVSGYISTINVDIGQQVEPSKLLLSIVPEQTELVANLYIPSKAVGFIKPKDKVVLRYQAYPYQKFGHATGEIISVARTALGKQKLSGLGIIFTNPTLLNEPAYLVKVKLEKQTIKAYGENKPLQIGMILEADILHERKKLYEWVLDPLYSISGKIN

SEQ ID NO: 15836 - protein, 308 aa, Neisseria meningitidis
MKVIFAGTPDFAAAALKAVAAAGFEIPLVLTQPDRPKGRGMQLTAPPVKQAALELGLRVEQPEKLRNNAEALQMLKEVEADVMVVAAYGLILPQDVLDVPKHGCLNIHASLLPRWRGAAPIQRAIEAGDAETGVCIMQMDIGLDTGDVVSEHRYAIQPTDTANEVHDALMEIGAAAVVADLQQLQSKGRLNAVKQPEEGVTYAQKLSKEEARIDWSESAAVIERKIRAFNPVPAAWVEYQGKPMKIRRAEVVAQQGAAGEVLSCSADGLVVACGENALKITELQPAGGRRMNIAAFAAGRHIEAGTKL

SEQ ID NO: 15837 - protein, 96 aa, Neisseria meningitidis; identical to SEQ ID NO: 1755

SEQ ID NO: 15838 - protein, 68 aa, Neisseria meningitidis; identical to SEQ ID NO: 5814

SEQ ID NO: 15839 - protein, 369 aa, Neisseria meningitidis
MSLTRLILKFYALLRLFLGKNARTAWISHPACAGHEPGANHPDSPDRILCIEQALRRAGIWQHLQTIEAEEISDTRLALVHSSKYLNRLESCQPQKGKIFRLDDDTAISTGSLSAARFAAGSAVQAVDMVMNRKAWHAFCAARPPGHHAGSGKAGGFCLLNNVAAGVMHAIAEYRLKRIAVIDFDVHYGDGTAEIFKDDPRILFFNLFETDLFPFPENNDMPDGGNMVHLPLPPGTGSRTFREAVRRQWLPRLAAFKPELVLLSAGFDAHRLDESGRLNLHEADFAWLTHKIIQTASGCPGKIVSVLEGGYTLEPLAQSAAEHIRVLAGLGKSDAATAYQKTLDPTKKRFAKPKTGQVRQPTQSDRYDI

SEQ ID NO: 15840 - protein, 180 aa, Neisseria meningitidis; identical to SEQ ID NO: 3825

SEQ ID NO: 15841 - protein, 143 aa, Neisseria meningitidis; identical to SEQ ID NO: 7796

SEQ ID NO: 15842 - protein, 238 aa, Neisseria meningitidis
LLIHYTLCRYRNWLAQDDTLSELLKLINCQLTEKGLKVEKASAAVVDATIIQTAGSKQRQAIEVDEEGQVSGQTTPSKDSDARWIKKNGLYKLGYKQHTRTDAEGYIEKLHITPANAHECKHLPPLLEGLPEGTTVYADKGYDSAENRQHLEEHQLQDGIMRKACRNRPLTEVQTKRNRYLSKIRYVVEQSFGTLHRKFRYARSTYFGLIKVSAQSHLKAMCLNLLKAANRLSAPAAA

SEQ ID NO: 15843 - protein, 130 aa, Neisseria meningitidis; identical to SEQ ID NO: 7797

SEQ ID NO: 15844 - protein, 186 aa, Neisseria meningitidis; identical to SEQ ID NO: 7798

SEQ ID NO: 15845 - protein, 106 aa, Neisseria meningitidis
LLMCVLLHRRLSHAGDESVYVAQSPLAASEGRGARERGGQVLSHWLSPYYLSNYGCIMRLCLLFVKHYTVKMCKYLVRTYTLFFTFSSIGYQCVQRKFENFYILVV

SEQ ID NO: 15846 - protein, 399 aa, Neisseria meningitidis
LSTFPNHTMHAISFPNRTRLTALPPLSLYIHIPWCIKKCPYCDFNSHSLKNGLPEAAYIDALLTDLQLELPNIWGRPVETVFFGGGTPSLFQAESIDRLLSGVRSLLRLQPEAEITLEANPGTFEIEKFQGFKDAGITRLSIGVQSFNDDMLSRLGRVHNGKEALTAIATALKLFDKINIDLMYALPNQTVRTALDDVQTAIATGATHISAYHLTMEPNTPFGHTPPKGLPQDEAALDIEDAVHSALENGGFIHYETSAFAKPAMQCRHNLNYWQFGDYLGIGAGAHGKISYPDRIERTVRRRHPNDYLALMQNRPSEAVERKTVAAEDLPFEFMMNALRLTDGVPAAMLQERTGVPSAKIMAQIETARQKGLLETDPAVFRPTEKGRLFLNDLLQCFL

SEQ ID NO: 15847 - protein, 86 aa, Neisseria meningitidis
LLLPRQHLGQNGRRLKSKHRPSCCRLRMSTGQPQCRRNRRSRLQHCRRQSREVGKNGKTGEIKADGRKVNVRIDSTEADLLYPAGQ

SEQ ID NO: 15848 - protein, 129 aa, Neisseria meningitidis; identical to SEQ ID NO: 11676

SEQ ID NO: 15849 - protein, 511 aa, Neisseria meningitidis; identical to SEQ ID NO: 3843

SEQ ID NO: 15850 - protein, 87 aa, Neisseria meningitidis; identical to SEQ ID NO: 375

SEQ ID NO: 15851 - protein, 287 aa, Neisseria meningitidis
MSEIGLVKIYSGKVRDLYEIDDKRMLMVASDRLSAFDVILDDPIPSKGEILTQISNFWFKKLAHIMPNHFTGQTVYDVLPENEAKVLEKRAVVAKKLTPVKVEAIVRGYLAGSGWKDYQKTGSVCGIRLPEGMQEAQQLPEVIFTPSTKAAVGDHDENISFEECERSIGKELAAEVRAKAIQLYTEAAEYAKSRGIIICDTKFEFGLDENGRLTLMDEVLTPDSSRFWPADQYEVGTNPPSFDKQFVRDWLEQSGWNKKAPAPKVPADVIQKTVEKYREALTLLTQD

SEQ ID NO: 15852 - protein, 121 aa, Neisseria meningitidis; identical to SEQ ID NO: 7805

SEQ ID NO: 15853 - protein, 273 aa, Neisseria meningitidis
MTFDKWLGLSKLPKNEARMLLQYVSEYTRVQLLTRGGEEMPDEVRQRADRLAQRRLNGEPVAYILGVREFYGRRFTVNPSVLIPRPETEHLVEAVLARLPENGRVWDLGTGSGAVAVTVALERPDAFVRTSDISTPALETARKNAADLGARVEFAHGSWFDTDMPSEGKWDIIASNPPYIENGDKHLLQGDLRFEPQIALTDFSDGLSCIRTLAQGAPDRLAEGGFLLLEHGFDQGAAVRGVLAENGFSGVETLPDLAGLDRVTLGKYMKHLK

SEQ ID NO: 15854 - protein, 451 aa, Neisseria meningitidis; identical to SEQ ID NO: 7806

SEQ ID NO: 15855 - protein, 117 aa, Neisseria meningitidis
VITLRIVWAVANRAKRPQSDSKAAAAGHGILYLLMLAVPVIGMIRQYGSGRGPLKVFGVEVMQGSPEKIEWMANLGNTFHGNLGWLLFAAVAGHVAMVVTHRVQGRDVLCRMTGRVR

SEQ ID NO: 15856 - protein, 394 aa, Neisseria meningitidis
MSLHSDILVVGAGPAGLSFAAELAGSGLKVTLIERSPLTVLQNPPYDGREIALTHFSREIMQRLGMWDKIPENEIYPLRDAKVLNGRSDYQLHFPQPTEARGEPADCLGYLISNHNIRRAAYEVVSQLDNITILTDTVVKEVKTSDNEAQVILENGKILTARLLLAADSRFSQTRRQLGISSDMHDYSRTMFVCRMKHTLSNQHTAYECFHYGRTIALLPLEEHLTNTVITVDTDKINSVQNLSPEELAASVKEQLKARLGDMELVSSIHHYPLVGMIAKRFYGKRSALIGDAAVGMHPVTAHGFNLGLSSADILAKLILEAEQRGQDIGAASLLEKYSSKHMLHAHPLYHGTNMMLKLFTNETAPAKLLRGLVLRAGNNFPPLKKLITKQLTG

SEQ ID NO: 15857 - protein, 282 aa, Neisseria meningitidis
MSTFFRQTAQAMIAKHIDRFPLLKLDQVIDWQPIEQYLNRQRTRYLRDHRGRPAYPLLSMFKAVLLGQWHSLSDPELEHSLITRIDFNLFRFDELSIPDYSTLCRYRNRRRKTTPCPNCRNSTANPKKTKRKHPPPSLTPPLFRPPAANSVRPKSMKKDKSAAKPHRVKTAMPVGQRKTASTDSVTNNIPVPMRKAISRNCTSPQPIPMSATTCCLCWKALPKARPSMPTKAMTVRKTEHLEEHQLLDGIMRGQPISDLKVRKATRRCVTCKRPTGVRPLPP

SEQ ID NO: 15858 - protein, 90 aa, Neisseria meningitidis
VFAVIFFSTLGCILAWIRDIPKIKSKKILARYLYIIGIINVIISYVLIKNILVSVSDGGGIKYVAIYLSNLFFWTVLMYVLVKRLSKKPS

SEQ ID NO: 15859 - protein, 90 aa, Neisseria meningitidis; identical to SEQ ID NO: 7807

SEQ ID NO: 15860 - protein, 707 aa, Neisseria meningitidis
MCKPNYGGIVLLPLLLASCIGGNFGVQPVVESTPTAYPVTFKSKDVPTSPPAGPSVETTPVNRPAVGAAMRLPRRNTAFHREDGTVIPDSKQAEEQLSFKEGDVLFLYGSKENKLQQLKSEIHKRDPDVEIRTSENENKKYDYKFVDAGYVYVKGKDEIKWTSDHKQFSNRLGYDGFVYYSGEHPSQSLPSAGKVKYFGNWQYMTDAKRHRAGQAVGIDNLGYITFYGNDVGATSYAAKDVDEREKHPAKYTVDFDNKTMNGKLIKNQYVRNKNNLDEPKKPLTIYDITAKLDGNRFTGSAKVNPDLAKNLAGNERLFFHADADQRLEGGFFGDNGEELAGRFISNDNSVFGVFAGKQKTDASGTKPALPSGKHTKILDSLKISVDEATDDHARKFAISTMPDFGHPDKLLVEGREIPLVSQEKTIELADGRKMTVSACCDFLTYVKLGRIKTERPAAKPKAQDEEDSDIDNGEESEDEIGDEEEGTEDAAAGDEGSEEDEATENEDGEEDEAEEPEEESSAEGNGSSNAILPVPEASKGRDIDLFLKGIRTAEADIPQTGTAHYTGTWEARIGVPDKKDDQLYGTTFIQKDSYANQGAKAQFTVDFGKKSISGTLTEKNDTHPAVYIEKGVIDGNGFHATARTRDNGIDLSGQGSTNPQRFEANNLLVTGGFYGPQAAELGGNIIDSDRKFGAVFGAKKDDKEATR

SEQ ID NO: 15861 - protein, 37 aa, Neisseria meningitidis; identical to SEQ ID NO: 970

SEQ ID NO: 15862 - protein, 154 aa, Neisseria meningitidis
LTEEMMKKQRHILCVGCLYIILKVNVFPNTGWMEASKGMQGMSFSTFGYADAPGYTFSRIGHTLIFLLGKTTGTRTTVSDSSHNVYYVKLYICANNSKALSCCLMLCQFGRKLSICAIKRALRWRSSKWVSSWTRRIKRCGHPNRDPLNVLVGI

SEQ ID NO: 15863 - protein, 834 aa, Neisseria meningitidis
MHHFGRAATSCAAVWMRAFIKNYVLTLLFLKYVSDKHKYGGGMIELHAGTTFDDIVKLKNTADIGDRLNKIIAQIAEANDLKGVIDVTDFNDEDKLGKGKEMIDRLSRLVGIFKKLNLSSNQAEDDDLLGDAYEYLMRHFATESGKSKGQFYTPAEVSRIMAKIIGISADCRPAPAFMTRPAARVRCCSKPPPKPAAKSAFTVRKKMWQPRPLPVIFCTTTKPPKSTPGTPCPIRLSVMKTTGLRPSILPLPIRLIPPEKNGDYAFLLHLLKSLKPSGKGAIILPHGVLFRGNAEARIRTELLNLDLIKGIIGLPANLFYGTGIPACIIVIDKEHAQTAQFAEEGTNQVISGGSVFMIDASRGFIKDGNKNRLREQDIHKIIDTSTNLVTAVWCIAKSQHKITTLICLAISTAEKLKTCKISPPIFMAAYLRTIWTHWKPIGKFAVKTSCLPNTMDALPLYNGIDCKSFPLFLKECEFRFNFGTPSQQLKILRDWCGIGSSTAPNLIHYKIESSQIKAHILAHPDYAAFKAGHLAKFAAWHTQNDLAAIQPGRLIRKWSESLLDAFKPGSLIEEYDFYQILTDYWAETLQDDVYLIAQDGWKAVKNLAEITKESDEDANLTVVFEETETGKKGKAKTKRISKKYRSEVIAPELVARRYFSDGIAKLEEKQSELERLSQELENHIEEHGGEEGALNDVLDAKGKLSAKLLKTALEESGIEEGERAVLQTTQTLMTQEKAAKDAVKTQIEALNLAVFKQFGRLSEAEIKQLAVQDKWLADLQSRIENRLENSIQQLISRLNTLEDRYRSPMAELAREVEKWQSKVNAHLENMGFGG

SEQ ID NO: 15864 - protein, 101 aa, Neisseria meningitidis
METWVQNYTAIGGSLYLTAAAALLPIVFFFAALTVLKLKGYQAGLYTLLIALAVAVFGFGMPAVWRFLPCRRSRTDPTPLRHAGFDRALQNRQIHPHRFGL

SEQ ID NO: 15865 - protein, 122 aa, Neisseria meningitidis; identical to SEQ ID NO: 2373

SEQ ID NO: 15866 - protein, 273 aa, Neisseria meningitidis
VNRTAFCCLSLTAALILTACSSGGGGVAADIGAGLADALTAPLDHKDKSLQSLTLDQSVRKNEKLKLAAQGAEKTYGNGDSLNTGKLKNDKVSRFDFIRQIEVDGQLITLESGEFQIYKQDHSAVVALQIEKINNPDKIDSLINQRSFLVSGLGGEHTAFNQLPSGKAEYHGKAFSSDDAGGKLTYTIDFAAKQGHGKIEHLKTPEQNVELASAELKADEKSHAVILGDTRYGGEEKGTYHLALFGDRAQEIAGSATVKIREKVHEIGIAGKQ

SEQ ID NO: 15867 - protein, 135 aa, Neisseria meningitidis
MEIRAIKYTAMAALLAFTVAGCRLAGWYECSSLSGWCKPRKPAAIDFWDIGGESPPSLEDYEIPLSDGNRSVRANEYESAQQSYFYRKIGKFEACGLDWRTRDGKPLIETFKQGGFDCLEKQGLRRNGLSERVRW

SEQ ID NO: 15868 - protein, 694 aa, Neisseria meningitidis
MDYLSRLSFGFNKKLPVILQTEVAECGLACLTSILSYYGFHTDLRTLRQKYTLSLKGANLADIMRFGNEMNLTPRALRLELDELSNLQLPCILHWNLNHFVVLCSISKDSIVIMDPAVGMRKIKMDEVSQKFTGIALELFPNTHFEEKKETKKIKILSLLRGAGLKRSLIQMLILAISLEVFALVSPFFMQWVIDHVIVTADKNLLLTLTLGFGLLTILQQLISLLQAWVGMHLSTTLNLQWKANIFKRLLDLPNGYFSKRHLGDVISRFGSIDHIQETLTSTFFVLVLNSLMAVFTFVLMTIYSTQLSLIVLLTLVLYILIRWLAYYPLRNATEENIVHEAKQNSYFMETIRGIQSVKLFDKHYQRHGTWMSLFVNTVNTKLTTDKLSALFEFSNKLLFSMENVIIIYLGASAILDGSFTVGVLMAFLAYKGQFESRTASLVDQYIQIKMLGLHAERLADITLNETETEIIKYNHIPKLDNEQLVLKVENVSFRYADNEPYLFENINLEFKDNEAVVLTGQSGRGKSTLLNILTGSLKPETGTVSINGHDIYQVSPSFIRGLSGIVRQDDVLFAGSIGENISFFDESPNMELIEQCAKMAQIHDDILKMPMGYETLIGDMGNILSGGQKQRVILARALYKRPKILFLDEASSHLDVENEQKINHNLKSLGIMKIMVAHRQETIQSADKILNLG

SEQ ID NO: 15869 - protein, 463 aa, Neisseria meningitidis; identical to SEQ ID NO: 7825

SEQ ID NO: 15870 - protein, 413 aa, Neisseria meningitidis
MSKFFKRLFDIVASASGLIFLSPVFLILIYLIRKNLDSPVFFFQERPGKDGKPFKMVKFRSMRDALDSDGIPLPDGERLTPFGKKLRAASLDELPELWNILKGEMSLVGPRPLLMQYLPLYDNFQNRRHEMKPGITGWAQVNGRNALSWDEKFACDVWYIDHFSLCLDIKILLLTVKKVLIKEGISAQGEATMPPFTGKRKLAVVGAGGHGKVVADLAAALGRYREIVFLDDRAQGSVNGFSVIGTTLLLENSLSPEQYDVAVAVGNNRIRRQIAEKAAALGFALPVLVHPDATVSPSATVGQGSVVMAKAVVQAGSVLKDGVIVNTAATVDHDCLLNAFVHISPGAHLSGNTHIGEESWIGTGACSRQQIRIGSRATIGAGAVVVRDVSDGMTVAGNPAKPLPRKNPETSTA

SEQ ID NO: 15871 - protein, 352 aa, Neisseria meningitidis
MSSRKIIHIDMDAFYASVELREQPHLKGRPVVVAWEGARSVICAASYEARQFGLHSAMSVATAKRLCPQAVYVPPHFDLYRQVSAQIHAVFRRYTDLIEPLSLDEAYLDVTRNFKNIPYASEVAKEIRAAIFAETGLTASAGIAPNKFLAKIASDWRKPNGQFVLPPHKVMAFLETLPLGKIPGVGKVTLKKMQSLGMRTAGDLRRFERGELLNHFGRYGYRLYDLVRGTDERPVKAERERLQISTEITLPEDLPLEQAAGHLPHLAEDLWRQITRKNVEAQSVTLKLKTYDFRIITRTLTYSSVLPDCAALLQAAQMLMARVPPQTEDAFRLIGIGVGHLVPKNQQQDLWA

SEQ ID NO: 15872 - protein, 421 aa, Neisseria meningitidis; identical to SEQ ID NO: 7830

SEQ ID NO: 15873 - protein, 333 aa, Neisseria meningitidis; identical to SEQ ID NO: 7831

SEQ ID NO: 15874 - protein, 333 aa, Neisseria meningitidis; identical to SEQ ID NO: 7831

SEQ ID NO: 15875 - protein, 454 aa, Neisseria meningitidis
MSSPSNTNRQTSSRLTYILTVAGATVGFGATWRFPYLVGENGGGAYVFLFCIAMLVIGIPMILVENVIGRRKGVNALDAFGGSMNGKPVAKIWKLVGWAGLLGAFGIMAYYMVLGGWVISYIVNIIGGNLDISSPVDGMVTKSFFTEHIENSPWEIAFYTLLFVAVNQWILVKGVIGGIEKAAKLMPLLFLFLIAMVVRNVTLPGAMEGVAFYLKPDFSKITAELFVFVLGQVFFALSLGFGVMITLSSYLDKNENLVQTAVITAITNTIIAILAGFMIFPSLFSFGVAPDSGPTLVFQSLPIVFSHMWAGSVFAVIFFSLLLIAALTTSLTIYEVLITTIQEKTKIRRTAAITIVLAAIFIFGNIPSILSYGPWKDVSVFGKNIFDAFDYISGNILFMLTALGSALFVGFVMKDEAKEELLYKGNHTTVNIWFAYVKYLVPLVILLIFISNLF

SEQ ID NO: 15876 - protein, 330 aa, Neisseria meningitidis; identical to SEQ ID NO: 7833

SEQ ID NO: 15877 - protein, 258 aa, Neisseria meningitidis
MNRPKQPFFRPEVAVARQTSLTGKVILTRPLSFSLWTTFASISALLIILFLIFGNYTRKTTAEGQILPASGVIRVYAPDTGTITAKFVEDGEKVKAGDKLFALSTSRFGAGGSVQQQLKTEAVLKKTLAEQELGRLKLIHGNETRSLKATVERLENQKLHISQQIDGQKRRIRLAEAVAKTALGRQELSGLGMVSSDLAKSNEPVYLVKIKPDKPTITAYGEEKPLQIGMTLEADILHEKRRLYEWVLELIYSMSGKL

SEQ ID NO: 15878 - protein, 292 aa, Neisseria meningitidis
MARRSKTFEEAAAEVEERFGHRGIKLVEFEGTAKPCVINCPKHGNQTCSRYSNMFIGSSWGCPSCGNEQAAKAGIATLRKNHIALEMLKQAVTGMTKQERITTQAYNEMTKSVAGSNSIVLNDVQGDTTINNHHTHTHNRSVADGKALSMRLTPRPLLSDRQAAAFARTGKLTGSFDLFASVVAPSQYTFAVAMPDTSMSPVIEKGDLLVVEPRMRPADEDIVLIELSDKRLVVAHLVIDIAGRMLIYQTGRPSEAFDLPEGSVIFGVVLEVKKRFMSAAQARRRVDSDYRP

SEQ ID NO: 15879 - protein, 300 aa, Neisseria meningitidis; identical to SEQ ID NO: 7835

SEQ ID NO: 15880 - protein, 469 aa, Neisseria meningitidis
MNFPKTAAFLLLLLASLAAHALDTGRIPQNEIAVYVQELDSGKVIIDHRSDVPVNPASTMKLVTAFAAFKTFGSNYRWATEFKSNGTVNDGTLDGNLYWAGSGDPVFNQENLLAVQRQLREQGIRNITGHLMLDHSLWGEVGSPDHFEADSGSPFMTPPNPTMLSAGMVMVRAERNAAGSTDILTDPPLPHIFAQNNLKITASQAACLSVKKLMRASFSDNTLKLRGNIPESCLGKPVGVRMFALDELIRQSFTNHWLLGGGRISDGIGIADTPEGAQTLAVAHSKPMKEILTDMNKRSDNLIARSVFLKLGGNGKLPAVSEQAASAVRRELAVSGIDVADLVLENGSGLSRKERVTARMMAQMLETAYFSPFAQDFIDTLPIAGTDGTLRNRFKQSGGLLRLKTGTLNNVRALAGYWLGDKPMVVVVIINSGRAVSLLPDLDNFVANNIISGGDGWLDAKLMCKERRA

SEQ ID NO: 15881 - protein, 1031 aa, Neisseria meningitidis
MNLETKPIAETPNFIVLDQYEKIEQSGSYQSENQLEAELIADLQNQGYEYRKDLNSQSRLLENLRAQLQRLNDVAFSDGEWARFLTEYLDRPSENITDKTRKIHDDHIYDFAFDDGRLKNIYLLDKKNLARNHVQLINFEQTGTHANRYDVTVLVNGLPLVQIELKKRGVAVREAFNQVHRYSKESFNSDNSLFKFLQIFVISNGTDTRYFANTTKRDKNSFDFTMNWARSDNHPIKDLKDFTATFLQKSVLLSVLLHYSVFDANDTLLIMRPYQIAAAERILWKINSSAQAKNWSKPESGGYVWHTTGSGKTLTSFKAARLATESAFIDKVFFVVDRKDLDYQTMKEYQRFSPDSVNGSESTAGLKRNLEKDDNKIIVTTIQKLNNLMKSEDNLPVYHQRVVFIFDECHRSQFGEAQKNLKKKFKKFCQFGFTGTPIFPENALGAETTAGVFGRELHSYVITDAIRDEKVLKFKVDYNDVRPQFKAVEAEQDEKKLSAAENRQALLHPERIREITQYILNQFRQKTHRLNAGGKGFNAMFAVSSVDAAKCYYEAFKTQQAGSLHPLKVATIFSFAANEEQNAVGEIVDETFEPEAMDSSAKEFLQAAINDYNACFKTNFGTDSKAFQNYYRDLAKRVKNQEVDLLIVVGMFLTGFDAPTLNTLFVDKNLRYHGLMQAFSRTNRIYDATKTFGNIVCFRDLEQATIDAITLFGDKNTKNVVLEKSYEEYMNGYTDRLTGEARRGYLDVAKELRERFPDPHEIETEKDKKDFAKLFGEYLRAENVLQNYDEFAALRELQNVDAADEDAMKAFQEKYYLSDEDVQEMRQVPMPSERAVQDYRSAYNDIRDWLRRQKAGEQKEQSKIDWDDVVFEVDLLKSQEINLDYILQLVFEHHKKIKGKAELVEEIRRIIRASIGHRAKEGLIVDFINDTDLDKVPDVPAILETFYTYAQEVMRHEAAGLIAAEGLNETAAKRYLISSLKRGYASENGTELTETLPKMSPINPQYLTKKQSVFQKIAAFVEKFAGIGTDI

SEQ ID NO: 15882 - protein, 399 aa, Neisseria meningitidis
MWTGFFSKSGTGIAEERHQNRRACTDVPLLAERNSKHPDRPYGFAKYRQSGLDIYAWHGMYFFPRFPFIDIDRIRWVRVGLKAFKHYIRENGLPDLIHAHRMNYAGILAQKISQKYGIPYVVTKHSSTITRGLIRPHQWQPMKNAAAHAAARLAISRHFAHVLQHKYGCEWQYLPNILGGIFNRPFEQREKNNKPHFVFCTVSHFRRLKGHDVLLTAFARALAQCPQLRLNIGGSGQEEQRLKQQAADLGITHAVTFLGALQPEAVLDLMRNSDAFVLASRTETFGVVYIEALSQGLPVIATRCGGAESIVSDGNGYLVPVDDDDALADALIKMYEHHSDFESARLRENCLNEFGENAVIGRLIGIFRQAIAEYGKKIPVKYSGLTKIRTRRRSRRQYK

SEQ ID NO: 15883 - protein, 327 aa, Neisseria meningitidis; identical to SEQ ID NO: 294

SEQ ID NO: 15884 - protein, 162 aa, Neisseria meningitidis
MLKITLIAACAENLCIGADNAMPWHIPEDFAFFKAYTLGKPVIMGRKTWESLPVKPLPGRRNIVISRQADYCAAGAETAASLEAALALCAGAEEAVIMGGAQIYGQAMPLATDLRITEVDLSVEGDAFFPAIDRTHWKEAERTERRVSSKGTSYAFVHYLRY

SEQ ID NO: 15885 - protein, 228 aa, Neisseria meningitidis
MYAFTDAQQQKALFWLVLFHILIIAASNYLVQFPFQIFGIHTTWGAFSFPFIFLATDLTVRIFGSHLARRIIFWVMFPALLLSYIFSVLFHNGSWTGLGALSEFNTFVGRIALASFAAYALGQILDIFVFNKLRRLKAWWIAPTASTVIGNALDTLVFFAVAFYASSDEFMAANWQGIAFVDYLFKLTVCGLFFLPAYGVILNLLTKKLTTLQTKQAQDRPAPSLQNP

SEQ ID NO: 15886 - protein, 508 aa, Neisseria meningitidis
MDYPPLKGAALAWVTLSLGLAVFMEVLDTTIANVAVPVIAGNLGAATTQGTWVITSFAVANAVSVPLTGFLAKRIGEVKLFTAAAVGFVITSWLCGIAPNLQALVFFRILQGFIAGPLIPLSQSLLMASYPPAKRTLALALWAMTVVVAPVLGPILGGWISGNWHWGWIFFINIPIGIISAWITWKHLKYRETETVKMPTDYVGLTLMVVGIGALQMMLDRGKELDWFASGEIITLGVVALVCLSYFIVWELGEKYPIVDLSLFKDRNFTVGIIATSLGFMVYMGTLTLLPLVLQTNLGYTSTWAGLAAAPVGILPVFLSPLIGRFGNKADMRLLVTASFLTFAFTFYWRTDFYADMDIGNVIWPQFWQGAGVAMFFLPLTTITLSHMKGGQIAAAGSLSNFLRVLMGGVGVSFVSTLWERREALHHTRFAEHITPYSATLHETAAHLSQHGVSDIQTLGIINNTITQQGFIIGSNEIFMAGSLLFIIMIPVIWLAKPPFHSGGDGGH

SEQ ID NO: 15887 - protein, 547 aa, Neisseria meningitidis
MNAFTRAWYALERHYQDTRHVLLRDRFACEPDRFERMHERLDGMLFDYSKNRLGEDTLQLLCRLAETADLEGKMRALRTGAKVNGSEGRAALHTALRLPDGADAVYADGRDVLPEIRRELNRALEFAHSLDDGSYQGTTGKRITDFVHIGIGGSDLGPAMCVQALEPFRRHITVHFAANADPACLDAVLCRLNPETTVFCVASKSFKTPETLLNAQAVKAWYRGAGFSESETACHFCAVSADTAAAAAFGIAAERVFAMYDWVGGRYSVWSPVGLPVMVAVGGARFRELLAGAHAMDSHFFHTPPRRNIPVLMALIAVWYNNFQHADGQTAVPYSHNLRLLPAWLNQLDMESLGKSRASDGSPAACKTGGIVFGGEGVNCQHAYFQLLHQGTRLIPCDFIVPVTAQGVEDGRSRFTVANAFAQAEALMKGKTLDEARAELADLPEAERERLAPHKEFPGNRPSNSILLDRLTPYNLGMLMAAYEHKTFVQGAIWNVNPFDQWGVEYGKQLAKTIIGELEGGTSVHDASTEGLMAFYRECRLKGGGAA

SEQ ID NO: 15888 - protein, 244 aa, Neisseria meningitidis; identical to SEQ ID NO: 1832

SEQ ID NO: 15889 - protein, 209 aa, Neisseria meningitidis; identical to SEQ ID NO: 7848

SEQ ID NO: 15890 - protein, 380 aa, Neisseria meningitidis
MKKSVLAVLAALSLAACGGSEKNAVQPQADAASAANAEAAATDTLNIYNWSNYVDESTVEDFKKANNLKLTYDLYENNETLEAKMLTGKSGYDLVVPGIAFLPRQIEAGAYQKVNKDLIPNYKNIDPELLKMLETADPGNQYAVPYFSGVNTIAITAKGKELLGGKLPENGWDLLFKPEYTHKLKSCGIALWDTPSEMFPILLNYLGKDPKGSNPEDLKAAAEVLKSIRPNVKRFSPSIIDELARGDICLAAGNGGDLNLAKARSEEVKNNVGIEVLNPKGMGFWIESWLIPADAKNVANAHKYINYTLDPEIAAKNGIAVTFAPASKPAREKMPAELVNTRSIFPNEQDMKDGFVMPQMSTDAKKLSVSLWQKIKVGTN

SEQ ID NO: 15891 - protein, 170 aa, Neisseria meningitidis; identical to SEQ ID NO: 7849

SEQ ID NO: 15892 - protein, 325 aa, Neisseria meningitidis
MQENPTVWLFDLDNTLHNADAGIFHLINRAMTRYMAHRLKLSESAASDLRQEYWHRYGATLAGLQIHHPEIDIADFLRESHPIDAILTRLHGMPETQNTLSRLKGRKAVFSNGPSFYVRAVVGALGLENRFDALFGTDDFGLLYKPNPQAYLNVCRLLDVPPECCIMVDDSADNLHQAKALGMKTVWFGAKSHALPFIDASVSDMAQLARYAETLSEHRQNHYNTPQPPKIRKNVMRKTFLILMTAAALLSGCAWETYQDGNGKTAVRQKYPAGTPVYYQDGSYSKNMNYNQYRPERHAVLPNQTGNNADEEHRQHWQKPKFQNR

SEQ ID NO: 15893 - protein, 152 aa, Neisseria meningitidis; identical to SEQ ID NO: 1438

SEQ ID NO: 15894 - protein, 558 aa, Neisseria meningitidis
MSQQYVYSMLRVSKVVPPQKTIIKDISLSFFPGAKIGLLGLNGAGKSTVLRIMAGVDKEFEGEAVPMGGIKIGYLPQEPELDPEKTVREEVESGLGEVAAAQKRLEEVYAEYANPDADFDALAEEQGRLEAIIAAGSSTGGGAEHELEIAADALRLPEWDAKIDNLSGGEKRRVALCKLLLSKPDMLLLDEPTNHLDAESVEWLEQFLVRFPGTVVAVTHDRYFLDNAAEWILELDRGHGIPWKGNYSSWLEQKEKRLENEAKSEAARVKAMKQELEWVRQNAKGRQAKSKARLARFEEMSNYEYQKRNETQEIFIPVAERLGNELIEFVNVSKSFGDKVLIDDLSFKVPAGAIVGIIGPNGAGKSTLFKMIAGKEQPDSGEVKIGQTVKMSLIDQSREGLQNDKTVFDNIAEGRDILQVGQFEIPARQYLGRFNFKGSDQSKIAGQLSGGERGRLHLAKTLLGGGNVLLLDEPSNDLDVETLRALEDALLEFAGSVMVISHDRWFLDRIATHILACEGDSKWVFFDGNYQEYEADKKRRLGEEGAKPKRIKYKPVTR

SEQ ID NO: 15895 - protein, 292 aa, Neisseria meningitidis
MCIEMKFIFFVLYVLQFLPFALLHKLADLTGLLAYLLVKPRRRIGEINLAKCFPEWSEEKRKTVLKQHFKHMAKLMLEYGLYWYAPAGRLKSLVRYRNKHYLDDALAAGENIILYPHFTAFEMAVYALNQDVPLISMYSHQKNKILDAQILKGRNRYDNVFLIGRTEGLRALVKQFRKSSAPFLYLPDQDFGRNDSVFVDFFGIRTATITGLSRIAALANAKVIPAIPVREADNTVTLQFYPAWKSFPGEDAQADAQRMNRFIEERVREHPEQYFWLHKRFKTRPEGSPDFY

SEQ ID NO: 15896 - protein, 434 aa, Neisseria meningitidis; identical to SEQ ID NO: 7859

SEQ ID NO: 15897 - protein, 346 aa, Neisseria meningitidis
MKAMVYHGANDIRFEEKPRPQIIDPTDAVVKIVKTTICGTDLGIWKGKKPEVADGRILGHESIGIVEEVGEAVKNIKVGDKVIISCVSKCCTCDNCKIQLYSHCRNGGWILGYMIDGTQAEYVRTPYADNSLVPLPDNVNEEVALLLSDALPTAHEIGVQYGDVKPGDTVFIAGAAPVGMSALLTAQLYSPAAIIVCDMDENRLKLAKELGATHTISPASGDVSKQVFAIVGEDGVDCAIEAVGIPATWNMCQDIVKPGGHIAVVGVHGQSVDFKLEKLWIKNLAITTGLVNANTTEMLMKAISSSSVDYTKMMTHHFKFSELEKAYDVFKHAAENQVMKVVLEAD

SEQ ID NO: 15898 - protein, 384 aa, Neisseria meningitidis; identical to SEQ ID NO: 7860

SEQ ID NO: 15899 - protein, 83 aa, Neisseria meningitidis
LYCLRLRRLVLIFVNPLYADAGDVYCVYNIRLKQYTACQVTRVEEHGGKKNTCDPAGFGLAGQQTAWGGGAGGFETALQRLKE

SEQ ID NO: 15900 - protein, 141 aa, Neisseria meningitidis; identical to SEQ ID NO: 7863

SEQ ID NO: 15901 - protein, 242 aa, Neisseria meningitidis
VSREINAGGHHFLYGGISGGGVHYWDNKDFSEQCLRLSLGYKNRSVTRSFGIVPFIGQNLLGGSRYNFVGGFNADFSRRLSERWRLTLNVGNMKRYQEDRTAARYDSHMPLAGATLMYSAPKDWLLYGGADWSHDLTKEAEQASIRKGLRVGAVKTFDGGLGLRANLRYTRRTFDAPGTLVYCFPRKDHEYQANLSLWHDKISWKGFTPQLNFRYLKIDSNMKSFYTRKNMQIFMSVEKDFK

SEQ ID NO: 15902 - protein, 119 aa, Neisseria meningitidis; identical to SEQ ID NO: 7865

SEQ ID NO: 15903 - protein, 235 aa, Neisseria meningitidis
MPSVELLLEIVGLPRGTFYYQLAVQSAEDKYADLKQHIHDIYRRHKGRYGYRRIAAAILHAGTPVNHKKVSRLMAKTGLKAVIRRRKYRSFKGEVGKIAPNILRRCFHAEKPNEKWVTDVTEFNVGGEKIYLSPIMDLFNGEIVSYRIQIRPTFDLAGEILKGAPEKPGSSEKPILHSDQGWQYQMFFIKSSKATVWFRVCPARETAWTMRQWKVSSERNRNVSIRANMIPLPNR

SEQ ID NO: 15904 - protein, 63 aa, Neisseria meningitidis; identical to SEQ ID NO: 7871

SEQ ID NO: 15905 - protein, 93 aa, Neisseria meningitidis
VQHITTKLFYFKITDISFFIDFKFHIFNILGILFQRKRNRLIKTIPAIHSGKTARNIRFPVSTTIRYRTPRCRFRLHIRQNFIRKENVENKKN

SEQ ID NO: 15906 - protein, 124 aa, Neisseria meningitidis; identical to SEQ ID NO: 1868

SEQ ID NO: 15907 - protein, 127 aa, Neisseria meningitidis
LYCLRLRRLVLIFVNPLYIIATTVPAQQTFLDAAELMQWSIETEGLGLNVISHKILGKDHAQVEFEAYFRDGQHRSAHHELSGFINIGGQWYFIDPTVPHPAMKQPCICGSGKKFKACCGKYLKPVA

SEQ ID NO: 15908 - protein, 107 aa, Neisseria meningitidis
MDIVQLGSAELKAWMDEGRMFCLLDVRTDEEAAICSLPDALHIPMNLIPLRQNELPDDVPLVVYCHHGIRSLHTAMYLADAGFENLYNLQGGIDAWAAEIDGNMMRY

SEQ ID NO: 15909 - protein, 96 aa, Neisseria meningitidis
LRQAFQTAFLKCVYLWCSKRSSESAASAKLKRGINEVKICLNLKGSLHPNPLSRGRGLGRGWQTEGLLGRHFQCAGCFYSGLTKIRTRRRSRRQYK

SEQ ID NO: 15910 - protein, 160 aa, Neisseria meningitidis; identical to SEQ ID NO: 3906

SEQ ID NO: 15911 - protein, 97 aa, Neisseria meningitidis; identical to SEQ ID NO: 1875

SEQ ID NO: 15912 - protein, 80 aa, Neisseria meningitidis; identical to SEQ ID NO: 1154

SEQ ID NO: 15913 - protein, 78 aa, Neisseria meningitidis; identical to SEQ ID NO: 7882

SEQ ID NO: 15914 - protein, 67 aa, Neisseria meningitidis; identical to SEQ ID NO: 5222

SEQ ID NO: 15915 - protein, 67 aa, Neisseria meningitidis; identical to SEQ ID NO: 7480

SEQ ID NO: 15916 - protein, 68 aa, Neisseria meningitidis; identical to SEQ ID NO: 3911

SEQ ID NO: 15917 - protein, 64 aa, Neisseria meningitidis; identical to SEQ ID NO: 631

SEQ ID NO: 15918 - protein, 147 aa, Neisseria meningitidis; identical to SEQ ID NO: 4898

SEQ ID NO: 15919 - protein, 43 aa, Neisseria meningitidis
MRPLQNSPKSPKFPPRHLGDFGEFCKGLGQYFERSARKSVWKP

SEQ ID NO: 15920 - protein, 267 aa, Neisseria meningitidis
MADILPSDKRRQPPKTKGSTMNIIEQEMKHSSLRKVDAEIAKIIADAHKINAESVKIAQESRWYPMMAATGLVTAIAAVLALIFKFAPQAPRGALSPEQNEQSRTIQPLPRMDYRARRRKPFHYPLPLSPPDCQNPQADRQRMPGRALPPFRKRHHPLRFYFFRRKTGRRSPICRRPYRNLPPGSQKNMRNKINRNDMELGYTPYNLRTLRNRCKLTQAELAQIVGVKHYIQVGRWEAKPDTETRRTDMSLEKWRQFLDWTEKTNAV

SEQ ID NO: 15921 - protein, 144 aa, Neisseria meningitidis
MKKQITSAVMMLSMIAPAMANGLDNQAFEKYVFHTQADAPMQLAELSQKEMKETEGEWIPNAVGGIMGGVGGHFSYMASAIASGSYNREAHWATIGGGALIGAMNPINGGRALINGMRGVAVGTVAGGITGYAGSTGKNTDIRR

SEQ ID NO: 15922 - protein, 90 aa, Neisseria meningitidis; identical to SEQ ID NO: 1889

SEQ ID NO: 15923 - protein, 100 aa, Neisseria meningitidis; identical to SEQ ID NO: 1890

SEQ ID NO: 15924 - protein, 73 aa, Neisseria meningitidis; identical to SEQ ID NO: 1891

SEQ ID NO: 15925 - protein, 72 aa, Neisseria meningitidis; identical to SEQ ID NO: 202

SEQ ID NO: 15926 - protein, 97 aa, Neisseria meningitidis; identical to SEQ ID NO: 7898

SEQ ID NO: 15927 - protein, 67 aa, Neisseria meningitidis; identical to SEQ ID NO: 5876

SEQ ID NO: 15928 - protein, 268 aa, Neisseria meningitidis; identical to SEQ ID NO: 3556

SEQ ID NO: 15929 - protein, 430 aa, Neisseria meningitidis; identical to SEQ ID NO: 1670

SEQ ID NO: 15930 - protein, 74 aa, Neisseria meningitidis; identical to SEQ ID NO: 3918

SEQ ID NO: 15931 - protein, 690 aa, Neisseria meningitidis
MGKANAFTAPITVVNYDEQALNNTEARTLVDAVAKKDASVWQFGGESNTLTGLYFRGYQLDARQFSVNGLTGMYGTQGTTSVQVGSAQLIQGASTAVNGMNPDGAVSGSVNIETKKAADEGNRKIGLARFGNNRAQGTFDLGQRFGENKAFGVRANGKLRHGDTPRHGYSEDNKEFAVNADYRGETLRVAFDSIYAKRKTNGGRARMQDIQNAGGRLSLWADVSKRLNTPIRKNHAERQPELARKRQTEILSINWHRLQPTIPILGRTLPTWMPISKSTAWLCPTPWASWITNTVGAPDGKTNLLPSWNWQNTAGQTNMLTFEWDAFDNAQITGGIGYNKARYYGTLISPTVCGTSGASDQTATCSSAKQYHTDTASLTDQYFRTLSMNLTARGEFETGPVTHNWSTAFDRVIRQRKTIQSGDAKRFSPMLMAAWVPQPDLVVYGNYMEDLEPADIKTDDSGETTMAKPRVSRQFEVGVRKNWGNFVTTLNAFQIKRPGYWRGQTNKDGSLTYGNNSDFARYKAQGGAAKDEQGMERNRGIEFNTYANLLNNTLRPTLGLMYLQSTVKEYPNSRDMLVNGVQVANPRVIAKAGVEWDTPFAKGLTLNGNVSYFGKSYQDTKKQYAFPSYTLVDVGARYKTKLGKNTLTVSSSVENLFNKNYWQVQRGQYDRSFAVVGMPRTYWLKAELDF

SEQ ID NO: 15932 - protein, 104 aa, Neisseria meningitidis
LINMKTSTVVFGGFFMADNGERIQIPVLENPDIREINHFFPYQILRKKPASLFSESSPSRNLAIPNLSILKRILWINKNQYGVASPCRTGFCSTISDENKHPRQ

SEQ ID NO: 15933 - protein, 410 aa, Neisseria meningitidis; identical to SEQ ID NO: 7906

SEQ ID NO: 15934 - protein, 139 aa, Neisseria meningitidis
LSYNNEGLMSVGQVREIFERFGKYDLVQTEYRRFKADKTENRNHKANSIFEYLHETFAKIVCRNLTHKNAPKNFQLPKTFLILSKKEKSEKFCILKMRLSIKFPMLLQRSLHILEKTFYSGLTKTSTALPRLSSKRTIL

SEQ ID NO: 15935 - protein, 99 aa, Neisseria meningitidis
MHYFSIHDQWGRHIGFFILLADDESEARPQSGRFAVKLEGGMENHVLSPFGQTEIPQYWRVVKDRIELFFDEAPVGTLRNEYLTVSGQTFVLNDLTGNM

SEQ ID NO: 15936 - protein, 137 aa, Neisseria meningitidis; identical to SEQ ID NO: 3923

SEQ ID NO: 15937 - protein, 71 aa, Neisseria meningitidis; identical to SEQ ID NO: 3926

SEQ ID NO: 15938 - protein, 66 aa, Neisseria meningitidis; identical to SEQ ID NO: 3365

SEQ ID NO: 15939 - protein, 375 aa, Neisseria meningitidis
MKIVFITTVASSIYGFRAPVIKKLIGKNHQVYAFVSEFSDNELDIIREMGVTPVTYRSNRSGLNPFSDIKSTFLIFKELKKISPDLVFPYFAKPVIFGTFAAKLAGVPRIVGMLEGLGFAFTPQPEGIPLKTKIIKGILIALYRIALPMLESLIVLNPDDKDELTDKYGIKIKNIHILGGIGLDLRQYPYSEADIPDEKEPVKFLFIGRFLKEKGIDDFIRAAEQVKDKYPDTVFTALGAIDKSRGGGDLERLAARDIIRFPGFVNNVSEVIKEHHIFVLPSYYREGVPRSTQEAMAVGRAVITTDVPGCRETVADKVNGFLIEPWNPRILAEKMIYFIENREAVRLMGNASYAIAKDKFDAEKVDLKLLDILKA

SEQ ID NO: 15940 - protein, 357 aa, Neisseria meningitidis
MRPFFVGATVLAILGALVFFISPGAVVLHRQIFLELMLPAAYGGFLTAALLDWTVFSGNLKPVATLMAALLLAASAILPFSPQTASFFVAAYWLVLLLFCARLIWLDRNTDNFALLTLLAAFTVFQTAYAVSGDLNLLRAQVHLNMAAVMFVSIRVSVLLGAEALKECRLKDPVFIPNVVYKNIAITFLLLHAAAELWLPAQTAGFTAFAVGFILLAKLRELHHHELLRKHYVRTYYLLQLFAAAGYLWTGAAKLQNLPSSAPLHLITLGGMMGGVMMVWLTAGLWHSGFTKLDYPKLCRIAIPILFAAAVSRAVLMNVNPIFFITVPAILTAVVFTLYLFTFVPIFRANAFTGDPE

SEQ ID NO: 15941 - protein, 336 aa, Neisseria meningitidis
MIFSIIVPIYNVEKYLRCCVDSVLAENFADYEMILVDDGSPDGCGKICDEYAGKYPHIKVIHQENGGLSDARNAGIRAAKGDYLIFLDSDDYWADTNRSKNGGGILFDLQQLADKKVDLILHPSSLNYHVIPKGADFSDNDFVRHFETLVEGRYYIANAWTKIVRREIIIKNNLFFPKGYIHEDFPYSLQLARFIKTFAFYDNPFYQYRVLGGSISHNIKYKNFSDVLTHLDRGVDFLVENKNSPIYGGLQKFVFDNIGYLRSILVRLYFSKNIIVIYRKYFSFKEKCRKIFGAKAIRPVFIGKTAFIIGLPILRLLVPPMLYPAIKAVYQKFFSE

SEQ ID NO: 15942 - protein, 218 aa, Neisseria meningitidis; identical to SEQ ID NO: 3932

SEQ ID NO: 15943 - protein, 1066 aa, Neisseria meningitidis
MRTTPTFPTKTFKPAAMALAVATTLSACLGGGGGTSAPDFNAGGTGIGSNSRATTAKSAAVSYAGIKNEMCKDRSMLCAGRDDVAVTDRDAKIKPPPNLHTGDFTNPNDAYKNLINLKPAIEAGYTGRGVEVGIVDTGESVGSISFPELYGRKEHGYNENYKNYTAYMRKEAPEDGDGKDIEASFDDEAVIETEAKPTDIRHVKEIGHIDVVSHIIGGRSVDGRPAGGIAPDATLHIMNTHDGTKNEIMSAAIRNAWVKLGERGVRIVNNSFGTTSRAGTADHFQIANSEEQYRQALLAYSGGDKTDEGIRLMQQSDYGNLSYHIRNKNMLFIFSASNDAQAQPNTLTLLPFYEKDAQKGIITVAGVDRSGEKFNGSNHCGITAMWCLSAPYEASVRFTRTNPIQIAGTSFSAPIVTGTAALLLQKYPWMSNDNLRTTLLTTAQDIGAVGVDSKFGWGLLDAGKAMNGPASFPFGDFTADTKGTSDIAYSFRNDISGTGGLIKKGGSQLQLHGNNTYTGKTIIEGGSLVLYGNNKSDMRVETKGALIYNGAASGGSLNSDGIVYLADTDRSGANETVHIKGDLQLGGEGTLYTRLGKLLKVDGTAMTGGKLYMSARGKGAGYLNRTGQRVPFLSAAKIGRDYSFFTNIETDGGLLASLDSVEKTAGSEGDTLSYYVRRGNAARTASAAAHSAPAGLKHAVEQGGSNLENLMVELDASESSATPETVETAAADRTDMPGIRPYGATFRAAAAVQHANAADGVRIFNSLAATVYADSTAAHADMQGRRLKAVSDGLDHNGTGLRVIAQTQQDGGTWEQGGVEGKMRGSTQTVGIAAKTGENTTAAATLGMGRSTWSENSANAKTDSISLFAGIRHDAGDIGYLKGLFSYGRYKNSISRSTGADEHAEGSVNGTLMQLGALGGVNVPFAATGDLTVESGLRYDLLKQDAFAEKGSALGWSGNSLTEGTLVGLAGLKLSQPLSDKAVLFATAGVERDLNGRDYTVTGGFTGATAATGKTGARNMPHTRLVAGLGADVEFGNGWNGLARYSYAGSKQYGNHSGRVGVGYRF

SEQ ID NO: 15944 - protein, 399 aa, Neisseria meningitidis
MDIQSKAKKLIEMIQTAPVEWKPLGEVASIGKGKQLNKSLLREKDKYPVINGGINPSGYWHEYNNEAGTIVISQGGASAGFVNWMDIPFFAGAHAYTIKANEDKLLQRFAYFFKNEANYIHAMSIRSSIPALAKSELQNLLIPIPPLETQQKIVKILDKFTELEATLEATLEATLEAELALRKRQYRYYRDFLLDFDNQIGGVADGYQCRLKDVVWKTLGEIAEYSKNRICSDKLNEHNYVGVDNLLQNREGKKLSGYVPSEGKMTEYIANDILIGNIRPYLKKIWQADCTGGTNGDVLVIRVTDEKVNPKYLYQVLADDKFFAFNMKHAKGAKMPRGSKAAIMQYKIPIPPLPEQEKIVAILDKFDTLTHSVSEGLPYEIALRRKQYEYYREQLLAFR

SEQ ID NO: 15945 - protein, 350 aa, Neisseria meningitidis; identical to SEQ ID NO: 7917

SEQ ID NO: 15946 - protein, 140 aa, Neisseria meningitidis
MFVNEKYPYAALFAGLVFLTLPFALAVHDAFALAFGRTGLLVSVSDGGFGWRGGWDGTVWFVFGVFAFLNVVVSAGLTKLAYKKMMRRHSRYTLFLSGVAACAAAAVAWIFELLLGSGALGGLGEAVLEYAFAVWLVAML

SEQ ID NO: 15947 - protein, 64 aa, Neisseria meningitidis; identical to SEQ ID NO: 11919

SEQ ID NO: 15948 - protein, 262 aa, Neisseria meningitidis
MKALHKTSFWESLAIQRRVIGALLMREIITRYGRNNIGFLWLFVEPLLMTFVIVLWKFADRYSTLNIVAFAITGYPMLMMWRNASKRAVGSISSNASLLYHRNVRVLDTILARMILEIAGATIAQIVIMAVLIAIGWIEMPADMFYMLMAWLLMAFFAIGLGLVICSIAFNFEPFGKIWGTLTFVMMPLSGAFFFVHNLPPKVQEYALMIPMVHGTEMFRAGYFGSDVITYENPWYIVLCNLVLLLFGLAMVSKFSKGVEPQ

SEQ ID NO: 15949 - protein, 384 aa, Neisseria meningitidis
MKRQALAAMIASLFALAACGGEPAAQAPAASAEAASSAAQTAAETPTGELPVIDAVTTHAPEVPPAIDRDYPAKVRVKMETVEKLTMEDGVEYRYWTFDGDVPGRMIRVRESDTVEVEFSNNPSSTVPHNVDFHAATGQGGGAAATFTAPGRTSTFSFKALQPGLYIYHCTVAPVGMHIANGMYGLILVEPKEGLPKVDKEFYIIQGDFYTKGKKGAQGLPFDMDKAVAEQPEYVVFNGHVGSIAGDNALKAKAGETVRMYVGNGGPNLVSSFHVIGEIFDKVYVEGDKLINENVQSTIVPAGGSAIVEFKVDIPGSYTLVDHSIFRAFNKGALGQLKVEGAENPEIMTQKLSDTAYAGNGAAPAASAPAASAPAASESEKSVY

SEQ ID NO: 15950 - protein, 276 aa, Neisseria meningitidis
MEFFIILLVAVAVFGFKSFVVIPQQEVHVVERLGRFHRALTTVDGIIYFQVTDPKLASYGSSNYIMAITQLAQTTLRSVIGRMELDKTFEERDEINSTVVSALDEAAGAWGVKVLRYEIKDLVPPQEILRSMQAQITAEREKRARIAESEGRKIEQINLASGQREAEIQQSEGEAQAAVNASNAEKIARINRAKGEAESLRLVAEANAEAIRQIAAALQTQGGADAVNLKIAEQYVAAFNNLAKESNTLIMPANVADIGSLISAGMKIIDSSKTAK

SEQ ID NO: 15951 - protein, 122 aa, Neisseria meningitidis
MSFGYLIATSQPCELLTKSRGETFSLIMDKWIYFRFCEGNIYTIRKNETESCLTERGGEWLKHIYEFNRGSFIFSYVLLKKRESEENFAEIVLKSIKNNKILTVKVRSGLHFDLRNIYRIEM

SEQ ID NO: 15952 - protein, 133 aa, Neisseria meningitidis
MRKSRLSRYKQNKLIELFVAGVTARTAAELVGVNKSTAAYYFHRLRLLIYQNSPHLEMFDGEVEADESYFAERQNHINGIGNFWNRAKRHLRKFDGIPKAHFELYLKGYERRFNNSEIKVCSILKQLVKSSLS

SEQ ID NO: 15953 - protein, 330 aa, Neisseria meningitidis
LQPLVSVLICAYNVEKYFAQSLAAVVNQTWCNLDILIVDDGSTDGTPSIARRFQEQDGRIRIISNPRNLGFIASLNIGLDELVKSGGIYCAHRCRRYCRPRLDKNRGRDGKRRGYCRDGFLFGDFGGRKQKRACRHCPKRRNLEKPPDPSGNHVCLPPPQPHTQQHDDYAAQRHRRFAVRSRLYPRRRLVLVRSRQIGQAGELPRSLGQIPFPSRPDFFQTQPATADGVENQRRNQGGVLEGGRHNRRVGLPELRAFEINGICVARKSLVRTGYRIPPPVPVRIFLVVGKVFFDRFTGFSDRPRDEEAVCRTAIENPEKNVTPLEIPGLL

SEQ ID NO: 15954 - protein, 668 aa, Neisseria meningitidis
MKLEASKHKQKFKKSFIVSLFFSILYTSPLLAVDYVYDKTKLTDDEITRLKKLRDRNSEYWKEETYHIKSNNRVYPNIPALFPKHPFDPFENINNSKRISFYDKEYTEDYLVGFAQGLGVAKRNGETEKPIRQYFKECLNTGKYSDDTCKSQQSIPTVRSDIFALNTKIKNSHINSEIFAVGNYTKLMYSAQHHSIWSEHLYSNSELSLDVDNSHVIGQTIDLGALELTNSLWEPRWNSNIDYLITKNAEIRFNTKSESLLVKEDYAGGARFRFAYGLKDKVPETPVLTFEKNITGTSDIIFENPIDDLKSLDGHQIIKVNGTADKHAFRLSGKHQKGIYTLSLQQRPEGFFTKVQERDDIAIYAQQAQAANTLFALRLNDKNSDIFDRTLPRKGLWLRVIDGHSSQWVQGKTAPVEGYRKGVQLGGEVFTRQNESNQFSVGLMGGQAEQRSTFRNPDTDNLTTGNMKGFGTGFYATWHQLQDKQTGAYIDSWVQYQRFRHRINTEDATERFTSKGITASIEAGYNALLAEHFTKKGNRVRFYLQPQAQLTYLGVNGKFSDSENAHVNLLGSRQLQSRVGVQAKAQFSLYKNIAIEPFAAVNALYHNKPFGVEMDGERRVINNKTAIESQLGVAVKIKSHLTLQATFNRQTGKHHQTKQGALNLQWTF

SEQ ID NO: 15955 - protein, 679 aa, Neisseria meningitidis
MTLKASKQASKQQASGRVNLLTLSVLSLFCTPYAWGADEYDPEVLPRFILEAAENRDSHVWRGPCSISFDCFGMFRAQLGSNTRSTKIGDDADFSFSDKPKPGTSHYFSSGKTDQNSSEYGYDEINIQGKNYNSGILAVDNMPVVKKYITEKYGADLKDAVKKQLQDLYKTRPEAWAENKKRTEEAYIAQFGTKFSTLKQTMPDLINKLVEDSVLTPHSNTSQTSLNNIFNKTLHVKIENKSHVAGQVLELTKMTLKDSLWEPRRHSDIHMLETSDNARIRLNTKDEKLTVHKAYQGGADFLFGYDVRESDKPALTFEDKVSGKSGVVLERRPENLKTLDGRKLIAAEKADSNSFAFKQNYRQGLYELLLKQCEGGFCLGVQRLAIPEAEAVLYAQQAYAANTLFGLRAADRGDDVYAADPSRQNIRGGAAADGRRKGVQIGGEVFVRQNEGSRLAIGVMGGRVGQHASVNSKGGAAGSDLHGYGGGVYAAWHQLRDKQTGAYLDGWLQYQRFKHRINDENRAERYKTKGWTASVEGGYNTLVAEGVVGKGNNVRFYLQPQAQFTYLGVNGGFTDSEGTGVGLLGSGQWQSRAGIRAKNRFALRNGVNLQPFAAFNVLHRSKSFGVEMDGEKQTLAGRTALEGRFGIEAGWKGHMSARIGYGKRTDGDKEAALSLKWLF

SEQ ID NO: 15956 - protein, 242 aa, Neisseria meningitidis
MPDYIRTSRAADSLRDIKITPHFLPHTDGSCLIECGNTKVICTASIDENVPPFLRGKNQGWVTAEYGMLPASTASRMRREASAGKQSGRTQEIQRLIGRSLRAVVDMEKLGERQILIDCDVIQADGGTRTASITGAFVALQIAVGKLVSDGILSENPIREAVAAVSVGVVNGVPLLDLDYPEDSGCDSDVNIVMTASGKIIEIQGTAEDAPFSLDELGKLVALAQKGIGELLQHQQNALSAA

SEQ ID NO: 15957 - protein, 40 aa, Neisseria meningitidis
LLIRHKDRRASAAVIPAQAGIQNVESKETVLPDKFPHRQT

SEQ ID NO: 15958 - protein, 572 aa, Neisseria meningitidis
MNLHQTVEHEAAAAFAAAGIADSPVVLQPTKNAEHGDFQINGVMGAAKKAKQNPRELAQKVADALAGNAVIESAEVAGPGFINLRLRPEFLAQNIQTALNDARFGVAKTDKPQTVVIDYSSPNLAKEMHVGHLRSSIIGDSISRVLEFMGNTVIRQNHVGDWGTQFGMLVAYLVEQQKDNAAFELADLEQFYRAAKVRFDEDPAFADTAREYVVKLQGGDETVLALWKQFVDISLSHAQAVYDTLGLKLRPEDVAGESKYNDDLQAVVDDLVQKGLAVEDDGAKVVFLDEFKNKEGEPAAFIVQKQGGGFLYASTDLACLRYRVGTLHADRLLYVVDHRQALHFEQLFTTSRKAGYLPENVGAAFVGFGTMMGKDGKPFKTRSGDTVKLVDLLTEAVERATALVKEKNPELGADEAAKIGKTVGIGAVKYADLSKNRTSDYVFDWDAMLSFEGNTAPYLQYAYTRVQSVFRKTGEWDADAPTVLTEPLEKQLAAELLKFEDVLQSVADTAYPHYLAAYLYQIATLFSRFYEACPILKAEGASRNSRLQLAKLTGDTLKQGLDLLGIDVLDVM

SEQ ID NO: 15959 - protein, 402 aa, Neisseria meningitidis
MTGIIHSLLDTDLYKFTMLQVVLHQFPQTHSLYEFRCRNASTVYPLADIKEDLEVELDALCRLRFTHDELGYLRSLRFIKSDFVDYLELFQLQRRFVEVGTDDKGRLNIRIEGPMIQAMFFEIFILAIVNELYFRRLETPAVIEEGERRLQAKAARLKEIAAAQNPDEPPFLISDFGTRRRYKLAWQEHVIRTLLEAAPSIVRGTSNVFLAKKLGITPIGTMAHEFLQAFQALDVRLRNFQKAALESWVHEYRGDLGVALTDVVGMDAFLRDFDLYFAKLFDGLRHDSGDPYVWGDKAYAHYQKLKIDSRTKMLTFSDGLDIERSWALHQYFKDRFKTGFGIGTNLTNDMGHTPLNIVLKLVECNGQSVAKLSDSPGKTMTNNSTFLAYLRQVFDVPEPETP

SEQ ID NO: 15960 - protein, 52 aa, Neisseria meningitidis
MFRAFLCGIGRAAWFAGKAAIITIFYMKFKNGLRFPACRLTAVSEKPVLSDC

SEQ ID NO: 15961 - protein, 139 aa, Neisseria meningitidis
  misc_feature 2, 3: 'Xaa' is any amino acid
VXXAPDHPLAAKNVWTAEDFIGETLITYPVPDEMLDLPKKILIPKNINPPRRHSELTIAIIQLVASRRGIAAFPYWTVMPYLEKGYVVHRQITDDGLQSKLYAAIRTEDTDKSYLNNFCQIIRERGFADLPGLSELEPV

SEQ ID NO: 15962 - protein, 101 aa, Neisseria meningitidis; identical to SEQ ID NO: 1118

SEQ ID NO: 15963 - protein, 258 aa, Neisseria meningitidis; identical to SEQ ID NO: 6783

SEQ ID NO: 15964 - protein, 193 aa, Neisseria meningitidis
  misc_feature 188, 189: 'Xaa' is any amino acid
MAEICLITGTPGSGKTLKMVSMMANDEMFKPDENGIRRKVFTNIKGLKIPHTYIETDAKKLPKSTDEQLSAHDMYEWIKKPENIGSIVIVDEAQDVWPARSAGSKIPENVQWLNTHRHQGIDIFVLTQGSKLLDQNLRTLVRKHYHIASNKMGMRTLLEWKICADDPVKMASSAFSSIYTLDKKVYDXXHTLN

SEQ ID NO: 15965 - protein, 398 aa, Neisseria meningitidis; identical to SEQ ID NO: 6385

SEQ ID NO: 15966 - protein, 90 aa, Neisseria meningitidis; identical to SEQ ID NO: 1115

SEQ ID NO: 15967 - protein, 94 aa, Neisseria meningitidis
MKLLAALIPLLMSVAGRILTALGLMAVTYSGVDRLVAHFQQAITHSITGAPQAMLQLFYISGGGTVLNILFGAIAFILSFKQMTKLATSIGKKK

SEQ ID NO: 15968 - protein, 86 aa, Neisseria meningitidis
  misc_feature 2, 3: 'Xaa' is any amino acid
VXXCTGALSRNRRVGLGLAEGKELHQVLVEIGHVSEGVSTIEEVFNTACKYQIDMPITQTLLQLIRKEMTPQQVVERLMERSARFE

SEQ ID NO: 15969 - protein, 414 aa, Neisseria meningitidis; identical to SEQ ID NO: 9411

SEQ ID NO: 15970 - protein, 106 aa, Neisseria meningitidis
  misc_feature 103, 104: 'Xaa' is any amino acid
MALIVHKYGGTSVGSPERIKNVAKRVAKARAEGHDIVVVVSAMSGETNRLVALAHEMQEHPDPRELDVVLSTGEQVTIGLLAMALKDIGVEAKSYTGWQVALXXHT

SEQ ID NO: 15971 - protein, 59 aa, Neisseria meningitidis
  misc_feature 53, 54: 'Xaa' is any amino acid
MRLTTKGRFAVTAMLDLAMNAQTGAVKLSAISERQNISLSYLEQLFGKLRRAXXTHLIN

SEQ ID NO: 15972 - protein, 51 aa, Neisseria meningitidis
MVIFLILSCVAESGDLCEGNKKAAPFSSGLFCVWDGFQASAKKYRTSVWYQ

SEQ ID NO: 15973 - protein, 39 aa, Neisseria meningitidis
MLEIQKTLLIAGFFICSRRFPIGNLKITDWAKIKNSIVD

SEQ ID NO: 15974 - protein, 386 aa, Neisseria meningitidis; identical to SEQ ID NO: 3047

SEQ ID NO: 15975 - protein, 143 aa, Neisseria meningitidis; identical to SEQ ID NO: 28

SEQ ID NO: 15976 - protein, 40 aa, Neisseria meningitidis
MVESCKIASNQKVNESRQKMPDCTEAAYYTGKRSGCSAVV

SEQ ID NO: 15977 - protein, 62 aa, Neisseria meningitidis
MVNIRTPLCGTRHCIVICLFCQSLRGSDNHMPSEKMYPDGFADIIARYLNQLSSGICRLTET

SEQ ID NO: 15978 - protein, 109 aa, Neisseria meningitidis; identical to SEQ ID NO: 4604

SEQ ID NO: 15979 - protein, 127 aa, Neisseria meningitidis
LRTTASPSLSESEKSGAIHRIRRPSQNAKQTNAKQASKQASKQASKQKIITPFLPTHALSARRIPLFPPLKPAFSSGRVSARPLSPVFLSPTRARDPCRIVPHFRARTASFRHPVLCFKYPCFRKKF

SEQ ID NO: 15980 - protein, 472 aa, Neisseria meningitidis
MNIHTLLSKQWTLPPFLPKRLLLSLLILLAPNAVFWVLALLTATARPIVNLDYLPAALLIALPWRFVKIAGVLAFWLAVLFDGLMMVIQLFPFMDLIGAINLVPFVLTAPTPYQIMTGLLLLYMLAMPFVLQKAAAKTDFRHIAVCAAVVAAAGYFTGHLSYYDRGPMANIFGANNFYYAKSQAMLYTVSQNADFITAGLVDPVFLPLGNQQRAATHLNEPKSQKILFIVAESWGLPANPELQNATFAKLLAQKDRFSVWESGSFPFIGATVEGEMRELCAYGGLRGFALRRAPDEKFARCLPNRLKQEGYATFAMHGAGSSLYDRFSWYPRAGFQEIKTAENLIGKKTCAIFGGVCDSELFGEVSAFFKKHSKGLFYWMTLTSHADYPESDIFNHRLKCTEYGLPAETDLCRNFSLHTQFFDQLADLIQRPEMKGTEVIIVGDHPPPVGNLNETFRYLKQGHVAWLHFKIK

SEQ ID NO: 15981 - protein, 166 aa, Neisseria meningitidis; identical to SEQ ID NO: 1498

SEQ ID NO: 15982 - protein, 294 aa, Neisseria meningitidis
  misc_feature 2, 3: 'Xaa' is any amino acid
VXXNPVEIVIDTPEPESVAQTAENKPETVDTDFSDNLPSNNHIGTEETASAKPASPSGLAGFLKASSPETILEKTVAEVQTPEELHDFLKVYETDAVAETAPETPDFNAAADDLSALLQPAEAPSVEENITETVAETPDFNATADDLSALLQPSEVPAVEENAAETVADDLSALLQPAEAPAVEENAAEITLETPDSNTSEADALPDFLKDGEEETVDWSIYLSEENIPNNADTSFPSESVGSDAPSEAKYDLAEMYLEIGDRDAAAETVQKLLEEAEGDVLKRAQALAQELGI

SEQ ID NO: 15983 - protein, 161 aa, Neisseria meningitidis
  misc_feature 3, 4: 'Xaa' is any amino acid
VCXXNNPAPNENPGTRPNPEPDPDLNPDANPDTDGQPGTSPDSPAVPDRPNGRDGKDGGLLCKFFPDILACDRLPEPNPAEDLNLPSETVNVEFKKSGIFQDSAQCPAPVTFTITVLDSSKQFAFSFENACTIAERLRYMLLALAWAVAAFFCIRTVSREV

SEQ ID NO: 15984 - protein, 314 aa, Neisseria meningitidis
MPSEHRTMNTGKPQKRAVNGVLLLDKPEGLSSNTALQKARRLFHAEKAGHTGVLDPLATGLLPVCFGEATKFAQYLLDADKAYTATLKLGEASSTGDAEGEIIATARADISLAEFQTACQALTGNIRQVPPMFSALKHEGKPLYEYARKGIVIERKPRDITVYAIDIAEFDAPKAVISVRCSKGTYIRTLSEDIAKHIGTFAHLTALRRTETAGFTIAQSHTLEALANLNETERDSLLLPCDVLVAHFPQTVLNDYAVHMLQCGQRPRFEEDLPSDTPVRVYTENGRFVGLAEYQKEICRLKALRLMNTAASAA

SEQ ID NO: 15985 - protein, 102 aa, Neisseria meningitidis; identical to SEQ ID NO: 1826

SEQ ID NO: 15986 - protein, 284 aa, Neisseria meningitidis
MPPIPAPSAPSEHTVAWVFGQPVTDLPQDLFIPPDALKVVLGSFQGPLDLLLYLIRKQNIDVLDIPMVKITEQYLHYIAQIETYQFDLAAEYLLMAAMLIEIKSRLLLPRTEAVEDEEADPRAELVRRLLAYEQMKLAAQGLDALPRAGRDFAWAYLPLEIAVEAKLPEVYITDLTQAWLGILSRAKHTRSHEVIKETISVRAQMTAILRRLNGHGICRFHDLFNPEQGAAYVVVNFIALLELAKEGLVGIVQEVGFGEIRISLNHEGAHSDGISGTRGGRDVF

SEQ ID NO: 15987 - protein, 926 aa, Neisseria meningitidis
MANNKMLFEVIENRKAVYLEDGDDEKCRLPEFVERNLKYPFFEWQKSALENFVIFDRTSKLKDFPDIKNRPTHLLFNMATGAGKTMMMAALILYYFEKGYRHFLFFVNQNNIVDKTENNFIGSTHAKFLFTEKILQGDTVIPIRKVEMFSPHSDGIEIKFTSIQKLYNDIHTERENQTTLADLHKLNLVMLGDEAHHLNAQTKGKKQGELDLEKEINDRTSNAEIERKGWEHMVLELLLNKNGNPSENVLLEFTATLPENADVQQKYADKIITKFGLKEFLQKGYTKEINLVSSTLGKKERVLHALLFAWYRHQIALKYGIANFKPVMLFRSKTIDESKADYSAFLNWAENVQADDFEFLDTFSGSLNNSDNANEQGKTRTEQALKFMQENGFEFAHLANWVKQNYQKHNVIITNSETNKNKTEKTDSETEKLLNNLEAADNPIRAIFTVDRLTEGWDVLNLFDIVRLYEGQNGGGSNKKSGKTAAATVSEKQLIGRGVRYFPFAFEGKQPNKRKFDNDMQHELRILEELFYYTHDEQSRYISELKNELRKDGYLPEKDDDKVLATFKLKSEFAANKDFRELLIWANKKIPNPNAKTNNANSLQANPQTLSFQVHGNQLLQETQFTADENDEKVKQLGTQNNFTQTIKMSEMERHIFNKALHIKGKNSQSLFHFNRLQSKLNIQNRNELQNNLLKDWQIEFLGLGQDKQVRPDDKLAGCLKILEMVEKHLNESDMPFIGTKEFTPKTLWEIFGTPKQKWVKKDDVKTTIATQNDWYVMNNFAGTGLEEALIQFISARLGDLKSQYDIHLIRNEEVFKLNNFADGEGFMPDFILLLKDKQKSSSNGVNDFLHYQIFIEPKGEHLVETDGWKEEFLEAITVEYGMDKILQKDTPHYRLIGLPFFTDHQKNGQFTESFPLGAASLEKMK

SEQ ID NO: 15988 - protein, 130 aa, Neisseria meningitidis
MNGKYYYGTGRRKSSVARVFLTKGTGQIIVNGRPVDEFFARETSRMVVRQPLVLTENAESFDIKVNVVGGGETGQSGAIRHGITRALIDFDAALKPALSQAGFVTRDAREVERKKPGLRKARRAKQFSKR

SEQ ID NO: 15989 - protein, 123 aa, Neisseria meningitidis; identical to SEQ ID NO: 7208

SEQ ID NO: 15990 - protein, 67 aa, Neisseria meningitidis
  misc_feature 62, 63: 'Xaa' is any amino acid
MLENLPYFQRHLPEDLAKVNEVINRAVQSDVALISQIGTYIISAGGKRLRPIMTILAGKAVXXHTLN

SEQ ID NO: 15991 - protein, 42 aa, Neisseria meningitidis
  misc_feature 36, 37: 'Xaa' is any amino acid
MLAKIPDGDTIKPIFHPNRTHMKKIIASALIATFAXXTHLIN

SEQ ID NO: 15992 - protein, 154 aa, Neisseria meningitidis; identical to SEQ ID NO: 1226

SEQ ID NO: 15993 - protein, 692 aa, Neisseria meningitidis
MKTDIQTELTQALLPHEKVWANEEKTILAKNILLDLVEKTDPTIIGLLLSNDELKRHFFVEVNGVLVFKLQDFRFFLDKHSVNNSYTKYANRIGLTDSNRFLKDSSDIVLDFPFKDCVLNGGQSTEEGEEIYFKRNNSQPASQPASQPASQPASQPASQLYTKLTRKRQEIFFNQTLAFDEIDRLFDAKAFSKFSRYTADGKQAVGEIKRHSDGTPAENLIIKGNNLIALHSLAKQFKGKVKLIYIDPPYNTGNDGFKYNDKFNHSTWLTFMKNRLEIAKELLMKDGSIFVSIDDNEQAYLKILMDEVFGNENFICNFIWEKKTGASDAKQIATITEFVLCYSKNFKTVKLNKNTFSYDTERYKLSDKFEQERGKYYIDNLDRGGLQYSDSLNFAIQCPDGTFTYPNGRTEFVNDGWIWKWSKNKIDWAITNGFLEFRKSKSKKSGWSVCYKNYMLVDNENKPIERSAPYKNLIQDILNTHATDELKKLFGSKVFTTPKPESLLQYLIQIATSESDIVLDYHLGSGTTAAVAHKMNRQYIGIEQMDYIETLAVERLKKVIDGEQGGISKAVNWQGGGEFVYAELAPFNETAKQQILACEDSDGIKTLFEGLCERYFLKYNVSINEFSQTIQEPEFQSLPLDEQKQMVLEMLDLNQMYVSLSEMDDEQFAGCLNDDDKALSRAFYQTEKKDGE

SEQ ID NO: 15994 - protein, 161 aa, Neisseria meningitidis; identical to SEQ ID NO: 8432

SEQ ID NO: 15995 - protein, 557 aa, Neisseria meningitidis
MLLTLSLRDFVIVENLNLDFQSGFTVLTGETGAGKSITLDAIGLLLGDKADYSQVRSGAKEAQLSALFDISHLPVLKAELYEQGLLNDGEEELSIRRIIDAKGKSRSFINNQAATLAQLKAVGSQLIDIHGQNAHHSLNQEAAQRELLDAFAGSRAQAETVRQLYQNWANSKKALQEAQEQAENIALEQERLEWQFNELNQLDIKQGEWEALSQSHDSLAHSAELLQAAEEVGSKIDGDNGIQRHIYQCQKLLANLQNIEPRFAESLNMLASIEAELGEISANMRDVAGRSDINPNELAAQEQRMGELMGMARKYRIEPEELPAKLAEIEERLQSLQAAADLDALEHNVAHNFAEYQEAAHILSAMRHQAAERLSGETTEHMQHLAMKGARFDIVLLPSSPTAHGLEQVQFQVAANKGNPPRPLNKVASGGELARISLALQVVASQYTQVPTLIFDEVDTGIGGGVAEMVGKALRALGRKHQVLAVTHLPQVASCGENHWRVRKHSEGEQTVSEISILDEIQRIEEVARMLGGEVITDTTRQHAAELLQLASKNSLF

SEQ ID NO: 15996 - protein, 115 aa, Neisseria meningitidis; identical to SEQ ID NO: 3528

SEQ ID NO: 15997 - protein, 167 aa, Neisseria meningitidis
MNTLQKGFTLIELMIVIAIVGILAAVALPAYQDYTARAQVSEAILLAEGQKSAVTEYYLNHGEWPGNNSSAGVATSANIKGKYVEKVEVKNGVVTATMLSTGVNKEIKGKKLSLWAKRQDGSVKWFCGQPVTRTDAKADTVAAAAKTADNINTKHLPSTCRDASDAS

SEQ ID NO: 15998 - protein, 332 aa, Neisseria meningitidis
VIASRLSGNISSAIQEHKDGKVNINRFQNILADLYSLGGLGSTLIEKNGNMQSWGIPLAIAGDIIAATAIATGDTGTISTEEFYNFDNWKGFGYELFEDWSRWVYDWLPDGWNLWKELDRNRSGQYHIYDPLALDLDGDGIETVAAKGFSGSLFDHNGNGIRTATGWVSADDGLLVRDLNGNGIIDNGAELFGDNTKLADGSFAKHGYAALAELDSNGDNIINAADAAFQSLRVWQDLNQDGISQANELRTLEELGIQSLDLAYKDVNKNLGNGNTLAQQGSYTKTDGTTAKMGDLLLAADNLHSRFTNKMLSISHVRENTISPFVLGCLNK

SEQ ID NO: 15999 - protein, 896 aa, Neisseria meningitidis; identical to SEQ ID NO: 7639

SEQ ID NO: 16000 - protein, 318 aa, Neisseria meningitidis; identical to SEQ ID NO: 6240

SEQ ID NO: 16001 - protein, 495 aa, Neisseria meningitidis; identical to SEQ ID NO: 2837

SEQ ID NO: 16002 - protein, 284 aa, Neisseria meningitidis; identical to SEQ ID NO: 6629

SEQ ID NO: 16003 - protein, 244 aa, Neisseria meningitidis; identical to SEQ ID NO: 1832

SEQ ID NO: 16004 - protein, 222 aa, Neisseria meningitidis; identical to SEQ ID NO: 3618

SEQ ID NO: 16005 - protein, 233 aa, Neisseria meningitidis; identical to SEQ ID NO: 6431

SEQ ID NO: 16006 - protein, 704 aa, Neisseria meningitidis; identical to SEQ ID NO: 6999

SEQ ID NO: 16007 - protein, 636 aa, Neisseria meningitidis; identical to SEQ ID NO: 7432

SEQ ID NO: 16008 - protein, 52 aa, Neisseria meningitidis; identical to SEQ ID NO: 11681

SEQ ID NO: 16009 - protein, 203 aa, Neisseria meningitidis; identical to SEQ ID NO: 3861

SEQ ID NO: 16010 - protein, 105 aa, Neisseria meningitidis
MGNKLTPPAELPDEQDLRAVLAYNMRLFRVNKGWSQEELARQCGLDRTYVSAVERKRWNIALSNIEKMAAALGVAAYQLLLPPQERLKLMTNSADTRQMPSESGI

SEQ ID NO: 16011 - protein, 82 aa, Neisseria meningitidis; identical to SEQ ID NO: 2338

SEQ ID NO: 16012 - protein, 263 aa, Neisseria meningitidis; identical to SEQ ID NO: 7586

SEQ ID NO: 16013 - protein, 245 aa, Neisseria meningitidis; identical to SEQ ID NO: 388

SEQ ID NO: 16014 - protein, 210 aa, Neisseria meningitidis; identical to SEQ ID NO: 6412

SEQ ID NO: 16015 - protein, 628 aa, Neisseria meningitidis; identical to SEQ ID NO: 6456

SEQ ID NO: 16016 - protein, 162 aa, Neisseria meningitidis; identical to SEQ ID NO: 9375

SEQ ID NO: 16017 - protein, 418 aa, Neisseria meningitidis; identical to SEQ ID NO: 6568

SEQ ID NO: 16018 - protein, 377 aa, Neisseria meningitidis; identical to SEQ ID NO: 8624

SEQ ID NO: 16019 - protein, 269 aa, Neisseria meningitidis; identical to SEQ ID NO: 6761

SEQ ID NO: 16020 - protein, 56 aa, Neisseria meningitidis; identical to SEQ ID NO: 2971

SEQ ID NO: 16021 - protein, 112 aa, Neisseria meningitidis
MTGFNDAAGVASSSTIKGKYVKEVEVKNGVVTATMLSTGVNNEIKGKKLSLWAKRQAGSVKWFCGQPVTRADNAKDDVAAATGTDKIDTKLKKPFYPISFRTDEAGFPLLRE

SEQ ID NO: 16022 - protein, 181 aa, Neisseria meningitidis; identical to SEQ ID NO: 7561

SEQ ID NO: 16023 - protein, 117 aa, Neisseria meningitidis
VNRQTAYLLASFSLIALIILSLSWELWIAPLRPGGSWLALKALPLCLPLSGILKKKIYTYQYSSMLVLIYFAEAVMRLFDAYPAEQICAALSAVFSIIFFISCLSFVKQYKETNNAR

SEQ ID NO: 16024 - protein, 71 aa, Neisseria meningitidis; identical to SEQ ID NO: 6296

SEQ ID NO: 16025 - protein, 915 aa, Neisseria meningitidis; identical to SEQ ID NO: 6934

SEQ ID NO: 16026 - protein, 181 aa, Neisseria meningitidis; identical to SEQ ID NO: 6628

SEQ ID NO: 16027 - protein, 413 aa, Neisseria meningitidis; identical to SEQ ID NO: 7036

SEQ ID NO: 16028 - protein, 235 aa, Neisseria meningitidis; identical to SEQ ID NO: 6960

SEQ ID NO: 16029 - protein, 59 aa, Neisseria meningitidis; identical to SEQ ID NO: 7121

SEQ ID NO: 16030 - protein, 100 aa, Neisseria meningitidis
MGFRVGMNCFDTRLQADDYLLSSLPPTVTQDGKIIRPERVGEKWVLNGKPVMLSYPKCSNFEQIKQGSYVGSTVLILFVVIYGFRLLINFLKDMGKVGID

SEQ ID NO: 16031 - protein, 231 aa, Neisseria meningitidis; identical to SEQ ID NO: 6948

SEQ ID NO: 16032 - protein, 78 aa, Neisseria meningitidis; identical to SEQ ID NO: 1622

SEQ ID NO: 16033 - protein, 308 aa, Neisseria meningitidis; identical to SEQ ID NO: 7263

SEQ ID NO: 16034 - protein, 1978 aa, Neisseria meningitidis; identical to SEQ ID NO: 7493

SEQ ID NO: 16035 - protein, 307 aa, Neisseria meningitidis; identical to SEQ ID NO: 526

SEQ ID NO: 16036 - protein, 167 aa, Neisseria meningitidis; identical to SEQ ID NO: 6368

SEQ ID NO: 16037 - protein, 320 aa, Neisseria meningitidis; identical to SEQ ID NO: 6880

SEQ ID NO: 16038 - protein, 159 aa, Neisseria meningitidis; identical to SEQ ID NO: 6605

SEQ ID NO: 16039 - protein, 197 aa, Neisseria meningitidis; identical to SEQ ID NO: 5970

SEQ ID NO: 16040 - protein, 758 aa, Neisseria meningitidis; identical to SEQ ID NO: 7394

SEQ ID NO: 16041 - protein, 298 aa, Neisseria meningitidis; identical to SEQ ID NO: 6951

SEQ ID NO: 16042 - protein, 196 aa, Neisseria meningitidis; identical to SEQ ID NO: 5310

SEQ ID NO: 16043 - protein, 334 aa, Neisseria meningitidis; identical to SEQ ID NO: 6545

SEQ ID NO: 16044 - protein, 597 aa, Neisseria meningitidis; identical to SEQ ID NO: 4965

SEQ ID NO: 16045 - protein, 147 aa, Neisseria meningitidis; identical to SEQ ID NO: 7370

SEQ ID NO: 16046 - protein, 164 aa, Neisseria meningitidis; identical to SEQ ID NO: 7401

SEQ ID NO: 16047 - protein, 224 aa, Neisseria meningitidis; identical to SEQ ID NO: 6279

SEQ ID NO: 16048 - protein, 113 aa, Neisseria meningitidis
MCDFRGYEEPEMVKKRPVVVIARNRHNGKLVTVVPLSSTEPVPLADYHHKMSGNPLPDKPHIQCWAKCDMTATVGLARLDRYKPKGRDRCIPIISEEDFQAIKTAVAKAFKLY

SEQ ID NO: 16049 - protein, 51 aa, Neisseria meningitidis; identical to SEQ ID NO: 1536

SEQ ID NO: 16050 - protein, 441 aa, Neisseria meningitidis
MYAKKGGLGLVKSRRFAPLFATQFLGAFNDNVFKTALFVMIGFYGLGQNGFLPAGQMLNLGALLFILPYFLFSSLSGQLGNKFDKAVLARWVKVLEMIIMAVAAYGFYIRSAPLLLACLFCMGAQSTLFGPLKYAILPDYLDDKELMMGNSLIESGTFVAILFGQILGTAVAGVPPYIVGILVLLVAVGGTVGSLFMPSVPAKAADTQIEWNIVRGTKSLLRETVRHKPVFTAIIGISWFWFVGAVYTTQLPTFTQIHLGGNDNVFNLMLALFSIGIAAGSVLCAKFSRERLMLAWVTVGALGLTVCGLVLVWLTHGHRFEGLNGIFWFLSQGWAYPVMAVMTLIGFFGGFFSVPLYTWLQTASSETFRARAVAANNIVNGIFMVSAAVLSAVLLFAVLLFLFDSISLLYLIVALGNIPLSVFLIKRERRFLGAAAIRKKP

SEQ ID NO: 16051 - protein, 215 aa, Neisseria meningitidis
MKGVYFVSGIDTDIGKTVATGMLAKQLLQQGKSVITQKPVQTGCQDIAEDIAVHRKIMGIPMQEADEQRLTMPEIFSYPASPHLAARLDGRDLDLDKIRTATQELAAQYEVVLVEGAGGLMVPLTENLLTIDYIRQQGYPVILVTSGRLGSINHTLLSFAALKQYGIRLYSLVFNHIHDSRDAHIAQDSLNYLKCRLKADFSEAEWMELAKTDAV

SEQ ID NO: 16052 - protein, 637 aa, Neisseria meningitidis; identical to SEQ ID NO: 6190

SEQ ID NO: 16053 - protein, 367 aa, Neisseria meningitidis; identical to SEQ ID NO: 14158

SEQ ID NO: 16054 - protein, 315 aa, Neisseria meningitidis; identical to SEQ ID NO: 7020

SEQ ID NO: 16055 - protein, 109 aa, Neisseria meningitidis; identical to SEQ ID NO: 3636

SEQ ID NO: 16056 - protein, 293 aa, Neisseria meningitidis; identical to SEQ ID NO: 7892

SEQ ID NO: 16057 - protein, 216 aa, Neisseria meningitidis; identical to SEQ ID NO: 6413

SEQ ID NO: 16058 - protein, 172 aa, Neisseria meningitidis; identical to SEQ ID NO: 2773

SEQ ID NO: 16059 - protein, 457 aa, Neisseria meningitidis; identical to SEQ ID NO: 7200

SEQ ID NO: 16060 - protein, 214 aa, Neisseria meningitidis; identical to SEQ ID NO: 909

SEQ ID NO: 16061 - protein, 63 aa, Neisseria meningitidis; identical to SEQ ID NO: 980

SEQ ID NO: 16062 - protein, 182 aa, Neisseria meningitidis; identical to SEQ ID NO: 977

SEQ ID NO: 16063 - protein, 125 aa, Neisseria meningitidis; identical to SEQ ID NO: 6097

SEQ ID NO: 16064 - protein, 38 aa, Neisseria meningitidis; identical to SEQ ID NO: 6664

SEQ ID NO: 16065 - protein, 43 aa, Neisseria meningitidis; identical to SEQ ID NO: 3165

SEQ ID NO: 16066 - protein, 102 aa, Neisseria meningitidis; identical to SEQ ID NO: 254

SEQ ID NO: 16067 - protein, 290 aa, Neisseria meningitidis; identical to SEQ ID NO: 6391

SEQ ID NO: 16068 - protein, 332 aa, Neisseria meningitidis
MSRPVPAVFGSVFHSQMPVLAYREGKWQPTEWQSSQDLSLAPGAHALHYGSECFEGLKAFRQADGKIVLFRPTANIARMRQSADILHLPRPETEAYLDALIKLVKRAADEIPDAPAALYLRPTLIGTDPVIGKAGSPSETALLYILASPVGDYFKVGSPVKILVETEHIRCAPHMGRVKCGGNYASAMHWVLKAKAEYGANQVLFCPNGDVQETGASNFILINGDEIITKPLTDEFLHGVTRDSVLTVAKDLGYTVSERNFTVDELKAAVENGAEAILTGTAAVISPVTSFVIGGKEIEVKSQERGYAIRKAITDIQYGLAEDKYGWLVEVC

SEQ ID NO: 16069 - protein, 101 aa, Neisseria meningitidis; identical to SEQ ID NO: 2399

SEQ ID NO: 16070 - protein, 208 aa, Neisseria meningitidis; identical to SEQ ID NO: 7560

SEQ ID NO: 16071 - protein, 337 aa, Neisseria meningitidis; identical to SEQ ID NO: 263

SEQ ID NO: 16072 - protein, 528 aa, Neisseria meningitidis; identical to SEQ ID NO: 2150

SEQ ID NO: 16073 - protein, 321 aa, Neisseria meningitidis; identical to SEQ ID NO: 6649

SEQ ID NO: 16074 - protein, 144 aa, Neisseria meningitidis; identical to SEQ ID NO: 1668

SEQ ID NO: 16075 - protein, 272 aa, Neisseria meningitidis; identical to SEQ ID NO: 15445

SEQ ID NO: 16076 - protein, 221 aa, Neisseria meningitidis; identical to SEQ ID NO: 5928

SEQ ID NO: 16077 - protein, 198 aa, Neisseria meningitidis
MTGFNDAAGVASSSDIKGKYVEKVEVKNGVVTATMLSSGVNKEIKGKKLSLWAKRQNGSVKWFCGQPVTRNDTATATATDVAAANGKTDDKINTKHLPSTCRDDSSTGCIETPRADFKHFQKISRYRVLPESRQMAEKLRHSRKSGNLVRWFQLFRINFETLIPSFPRKWESRTQNLKKPFYPISFRTDRPGFPPARE

SEQ ID NO: 16078 - protein, 321 aa, Neisseria meningitidis
VKPRFYWAACAVLLTACSPEPAAEKTVSAASASAATLTVPTARGDAVVPKNPERVAVYDWAALDTLTELGVNVGATTAPVRVDYLQPAFDKAATVGTLFEPDYEALHRYNPQLVITGGPGAEAYEQLAKNATTIDLTVDNGNIRTSGEKQMETLARIFGKEARAAELKAQIDALFAQTREAAKGKGRGLVLSVTGNKVSAFGTQSRLASWIHGDIGLPPVDESLRNEGHGQPVSFEYIKEKNPDWIFIIDRTAAIGQEGPAAVEVLDNALVRGTNAWKRKQIIVMPAANYIVAGGARQLIQAAEQLKAAFKKAEPVAAGKK

SEQ ID NO: 16079 - protein, 155 aa, Neisseria meningitidis; identical to SEQ ID NO: 5339

SEQ ID NO: 16080 - protein, 368 aa, Neisseria meningitidis
MSLYPIYNFSAGPAVLPEAVLETARQEMLDYNGTGFPVMAMSHRSEMFLSILHHAEQDLRQLLKVPDNYKILFLQGGATTQFNMAAMNLAHGFRTADAVVTGNWSRIAYEQMSRLTDTEIRLAAHGGEQFDYLDLPPVETWDVAPDSAFVHFAVNETVNGLQYREVPCLSEGMPPLVCDMSSEILSREFDVADYGLIYAGAQKNIGPAGVTVVIVREDLLERCPNDIPDVFNYRSHINRDGMYNTPSTYAIYMSGLVFRWLQAQGGVKKIEAVNRLKAQTLYETIDGSDGFYINRIRPNARSKMNVVFQTGDEELDRRFVLEAELQGLCLLKGYKTVGGMRASIYNAMPLEGVRALADFMRDFQRRYG

SEQ ID NO: 16081 - protein, 133 aa, Neisseria meningitidis; identical to SEQ ID NO: 8

SEQ ID NO: 16082 - protein, 305 aa, Neisseria meningitidis; identical to SEQ ID NO: 7109

SEQ ID NO: 16083 - protein, 206 aa, Neisseria meningitidis; identical to SEQ ID NO: 6672

SEQ ID NO: 16084 - protein, 220 aa, Neisseria meningitidis
MDSRKFTEASKRRLSELLDAKSEQGNTMRCDEVQGFMTALLSGPDKLTPLDWLPEVLGDESQFTAAERSEIERLVLAMAMETTAAMSDKKLPDLWLYENEDGGSDFYTWCNAYLYGLDIVPTDWFEAVDDEAFEELFYPIMALGGIYDEEENGAIRLQFTEGELAELESELPYALADIYRYWQAVINKPQTVRREGEKTGRNDPCPCGSGRKYKACCGKN

SEQ ID NO: 16085 - protein, 161 aa, Neisseria meningitidis
MRFFGIGFLVLLFLEIMSIVWVADWLGGGWTLFLMAADFAASVLMLRHTGLSGLLLAGAAMRSGGRVSVYQMLWPIRYTVAAVCLMSPGFVSSVLAVLLLLPFKGGAVLQAGGAENFFNMNQSGRKEGFSRDDDIIEGEYTVEEPYGGNRSRNAIEHKKDE

SEQ ID NO: 16086 - protein, 98 aa, Neisseria meningitidis; identical to SEQ ID NO: 7030

SEQ ID NO: 16087 - protein, 225 aa, Neisseria meningitidis; identical to SEQ ID NO: 1206

SEQ ID NO: 16088 - protein, 218 aa, Neisseria meningitidis
MTIKIILIDDHTLFRSGIKALLSRQHGFEVIGEAADGLSGIKMISRLQPDVVLLDLDMPGMNGREALSQIISINPQQAVIMLTVSEDSDDLTECIRIGARGYLLKNINADFLLESIRKAAEGDNVFSPEMTAKLVKSLISPQPAQGTQALSSLTPRELEILGYLAAGHSNKIIARHLDLAESTVKVHVQNLLRKLNLSSRVQAAVYAIRHNVPQPVPE

SEQ ID NO: 16089 - protein, 289 aa, Neisseria meningitidis; identical to SEQ ID NO: 6858

SEQ ID NO: 16090 - protein, 102 aa, Neisseria meningitidis
MTLKTDLLPKINNEDYQRLILKHSAEFSGGEIRLLNEILEKFNFDVVQAQALAQAVMQQVRFDPNAYHIDSDDEDTTGICPHCINPPMPPLRDYLVWRETRG

SEQ ID NO: 16091 - protein, 502 aa, Neisseria meningitidis; identical to SEQ ID NO: 7174

SEQ ID NO: 16092 - protein, 253 aa, Neisseria meningitidis
MGNLHEGHLALVREAKKRADSVVVSIFVNRLQFGQGEDFDKYPRTLQQDADKLAAEGIAVVFAPDEKELYPNVEQRYNVEPPNLQNELCGKFRPGHFRGVATVVSKLFHIVSPDIACFGKKDYQQLAVIKGFVEDLNFDVEIVPVDTGRAEDGLALSSRNQYLSAAERDEAPRLYRELKAVAESLVQGSLDYAGLEKRAVQSLTEYGWVVDYVEIRRADTLEVARAGDKKLVVLAAACLGTTRLIDNLEIKLP

SEQ ID NO: 16093 - protein, 97 aa, Neisseria meningitidis; identical to SEQ ID NO: 7902

SEQ ID NO: 16094 - protein, 553 aa, Neisseria meningitidis; identical to SEQ ID NO: 6712

SEQ ID NO: 16095 - protein, 87 aa, Neisseria meningitidis; identical to SEQ ID NO: 1364

SEQ ID NO: 16096 - protein, 157 aa, Neisseria meningitidis
VKNSVVSLHYEMYDANNQLLDKTEEPIAYLHGGYDGIFPLVEEALHGKDAGDTVDVALSPDDAFGEQDPELVRIEDAGVFPVEVEVGMMFEADDPETGDVVVYRVTDVADGKAVVDGNHPLAGMKIRFKATVESVRDASDEEIAHGHVHGPHGHHHH

SEQ ID NO: 16097 - protein, 375 aa, Neisseria meningitidis; identical to SEQ ID NO: 15807

SEQ ID NO: 16098 - protein, 156 aa, Neisseria meningitidis; identical to SEQ ID NO: 681

SEQ ID NO: 16099 - protein, 101 aa, Neisseria meningitidis; identical to SEQ ID NO: 6309

SEQ ID NO: 16100 - protein, 156 aa, Neisseria meningitidis; identical to SEQ ID NO: 7655

SEQ ID NO: 16101 - protein, 322 aa, Neisseria meningitidis
MTAKPFSLNLTNLLLLAVLFAVSLSVGVADFRWSDVFSLSDSQQVMFISRLPRTFAIVLTGASMAVAGMIMQILMRNRFVEPSMAGAGQSAALGLLLMSLLLPAAPLPVKMSVAAVAALIGMLVFMLLIRRLPPTAQLMVPLVGIIFGGVVEAVATFIAYENEMLQMLGVWQQGDFSGVLLGRYELLWITGGLAVFAYLIADRLTILGLGETVSVNLGLNRTAVLWSGLIIVALITSLVIVTVGNIPFIGLVVPNIISRLMGDKLRQSLPAVALLGASLVLLCDIIGRVIVFPFEIPVSTVFGVLGTALFLWLLLRKPAHAV

SEQ ID NO: 16102 - protein, 79 aa, Neisseria meningitidis; identical to SEQ ID NO: 6866

SEQ ID NO: 16103 - protein, 671 aa, Neisseria meningitidis; identical to SEQ ID NO: 6318

SEQ ID NO: 16104 - protein, 65 aa, Neisseria meningitidis; identical to SEQ ID NO: 6546

SEQ ID NO: 16105 - protein, 424 aa, Neisseria meningitidis; identical to SEQ ID NO: 6962

SEQ ID NO: 16106 - protein, 159 aa, Neisseria meningitidis; identical to SEQ ID NO: 929

SEQ ID NO: 16107 - protein, 88 aa, Neisseria meningitidis; identical to SEQ ID NO: 1100

SEQ ID NO: 16108 - protein, 115 aa, Neisseria meningitidis; identical to SEQ ID NO: 7399

SEQ ID NO: 16109 - protein, 415 aa, Neisseria meningitidis; identical to SEQ ID NO: 7326

SEQ ID NO: 16110 - protein, 887 aa, Neisseria meningitidis; identical to SEQ ID NO: 7001

SEQ ID NO: 16111 - protein, 61 aa, Neisseria meningitidis; identical to SEQ ID NO: 965

SEQ ID NO: 16112 - protein, 352 aa, Neisseria meningitidis; identical to SEQ ID NO: 7437

SEQ ID NO: 16113 - protein, 122 aa, Neisseria meningitidis; identical to SEQ ID NO: 12772

SEQ ID NO: 16114 - protein, 344 aa, Neisseria meningitidis; identical to SEQ ID NO: 6064

SEQ ID NO: 16115 - protein, 92 aa, Neisseria meningitidis; identical to SEQ ID NO: 32

SEQ ID NO: 16116 - protein, 257 aa, Neisseria meningitidis; identical to SEQ ID NO: 7786

SEQ ID NO: 16117 - protein, 449 aa, Neisseria meningitidis; identical to SEQ ID NO: 6325

SEQ ID NO: 16118 - protein, 96 aa, Neisseria meningitidis; identical to SEQ ID NO: 3537

SEQ ID NO: 16119 - protein, 581 aa, Neisseria meningitidis; identical to SEQ ID NO: 2972

SEQ ID NO: 16120 - protein, 291 aa, Neisseria meningitidis; identical to SEQ ID NO: 7128

SEQ ID NO: 16121 - protein, 118 aa, Neisseria meningitidis
LLWWLLDDKKLGISARKLIENPRNAIFVSAASIWEISIKQNKGLLKLPEEFFDVLQEEDFEMLPIGLFHAKQAGSLPEIHKDPFDRMLIAQTQAEGFELMTVDEYIPQYGIRVVNASS

SEQ ID NO: 16122 - protein, 201 aa, Neisseria meningitidis; identical to SEQ ID NO: 7112

SEQ ID NO: 16123 - protein, 63 aa, Neisseria meningitidis
MSALLPAACQHVSDRHGKFRFQILHCQRRQTGSKKDESGGGYALCHLPDSRIVEEWEYFRSQY

SEQ ID NO: 16124 - protein, 139 aa, Neisseria meningitidis
MNSGDDSPMSDINVTPLVDVMLVLLIVFMITMPVLTHSIPLELPTASEQTNKQDKQPKDPLRLTIDANGGYYVGGDSASKVEIGEVESRLKAAKEQNENVIVAIAADKAVEYDYVNKALEAARQAGITKIGFVTETKAQ

SEQ ID NO: 16125 - protein, 186 aa, Neisseria meningitidis
LPFATLALCTNAFAAPPSDASLARWLDTQNFDRDIEKNMIEGFNAGFKPYADKALAEMPEAKKDQAAEAFNRYRENVLKDLITPEVKQAVRNTLLKNAREIYTQEEIDGMIAFYGSPVGQSVVAKNPRLIKKSMSEIAVSWTALSGKIAQHHLPEFTEELRRIICGGKNPDAGCKQAGQVGKRHQK

SEQ ID NO: 16126 - protein, 205 aa, Neisseria meningitidis; identical to SEQ ID NO: 6895

SEQ ID NO: 16127 - protein, 261 aa, Neisseria meningitidis; identical to SEQ ID NO: 15410

SEQ ID NO: 16128 - protein, 90 aa, Neisseria meningitidis
MPIEDIPFYIFDLADFDGGIADIDNIVGFVSSCRLSKSKKNALTGIAFLRGIDVYDPPISKEKALKALEKHPEIYQKFQHFFPFVELPPL

SEQ ID NO: 16129 - protein, 511 aa, Neisseria meningitidis; identical to SEQ ID NO: 3843

SEQ ID NO: 16130 - protein, 628 aa, Neisseria meningitidis
MIYPKTYDVIVVGGGHAGTEAALAAARMGAQTLLLSHNIETLGQMSCNPSIGGIGKGHLVRELDALGGAMALATDKSGIQFRRLNASKGAAVRATRAQADRILYKAAIREMLENQENLDLFQQAVEDVTLDGERISGVITAMGVEFKARAVVLTAGTFLSGKIHIGLENYEGGRAGDPAAKSLGGRLRELKLPQGRLKTGTPPRIDGRTIDFSQLTEQPGDTPVPVMSVRGNADMHPRQVSCWITHTNTQTHDIIRSGFDRSPMFTGKIEGVGPRYCPSIEDKINRFADKDSHQIFLEPEGLTTHEYYPNGISTSLPFDIQIALVRSMKGLENAHILRPGYAIEYDYFDPRNLKASLETKTIAGLFFAGQINGTTGYEEAAAQGLLAGANAVQYVRGQDPLLLRREQAYLGVLVDDLITKGVNEPYRMFTSRAEYRLQLREDNADMRLTEDGYKIGLVSEAQWRMFNEKREAVEREIQRLKTTWYTPQKLAEGEQIRVFGQKLSREANLHDLLRRPNLDYAALMTLEGAMPSENLSAEVIEQVEIQVKYQGYIDRQNEEIDSRRDIETLKLPDGIDYGKVKGLSAEVQQKLNQHKPETVGQASRISGVTPAAVALLMVHLKRGFKDAK

SEQ ID NO: 16131 - protein, 390 aa, Neisseria meningitidis; identical to SEQ ID NO: 6996

SEQ ID NO: 16132 - protein, 241 aa, Neisseria meningitidis; identical to SEQ ID NO: 6741

SEQ ID NO: 16133 - protein, 192 aa, Neisseria meningitidis
MKTFALILADGQASRMGGEDKGLALLGGKALIDHVIDRVRPQVSHIAISTNRNLEEYARRSPHIFPDARQWQHFGPLSALCTAANDLQLATADWLLVVPCDMPYLPDDLVARFETVSKRTPLCNAYYVETPITMHYNIMYIRPQILQSAIPYLFSGMKTLRSWLQQQRARPVRFEFDGHFADLNTQTDLQEG

SEQ ID NO: 16134 - protein, 472 aa, Neisseria meningitidis; identical to SEQ ID NO: 7700

SEQ ID NO: 16135 - protein, 39 aa, Neisseria meningitidis; identical to SEQ ID NO: 7406

SEQ ID NO: 16136 - protein, 242 aa, Neisseria meningitidis; identical to SEQ ID NO: 7658

SEQ ID NO: 16137 - protein, 321 aa, Neisseria meningitidis; identical to SEQ ID NO: 2168

SEQ ID NO: 16138 - protein, 128 aa, Neisseria meningitidis; identical to SEQ ID NO: 7163

SEQ ID NO: 16139 - protein, 39 aa, Neisseria meningitidis; identical to SEQ ID NO: 6291

SEQ ID NO: 16140 - protein, 253 aa, Neisseria meningitidis; identical to SEQ ID NO: 7489

SEQ ID NO: 16141 - protein, 173 aa, Neisseria meningitidis
LLIPVLTALFYLPFPWFAEETINLTAAVIFAVAALTDWFDGFLARLWKQTSDFGAFLDPVADKLMVAVSLLLLVKLDRTYVLFAMIIIGREITISALREWMAQMGKRNSVAVATVGKFKTAAQMLAIFLLLLNFPDFYGFNLAFIGNVLMFIASLLTVWSMLYYLKMAWKEIA

SEQ ID NO: 16142 - protein, 202 aa, Neisseria meningitidis
LNTLYLGSNSPRRMEILTQLGYRVIQLPAGIDESVKAGETPFAYVQRMAEEKNRTALTLFCETNGTMPDFPLITADTCVVSDGIILGKPRSQAEAIEFLNRLSGKQHTVLTAVCIHYRGKTSSRVQTNRVVFKPLSSEEISAYVQSGEPMDKAGAYAVQGIGGIFIQSIEGSFSGIMGLPVYETVSMLQDLGYRSPLSALKP

SEQ ID NO: 16143 - protein, 68 aa, Neisseria meningitidis; identical to SEQ ID NO: 7052

SEQ ID NO: 16144 - protein, 107 aa, Neisseria meningitidis; identical to SEQ ID NO: 4856

SEQ ID NO: 16145 - protein, 364 aa, Neisseria meningitidis; identical to SEQ ID NO: 6346

SEQ ID NO: 16146 - protein, 239 aa, Neisseria meningitidis; identical to SEQ ID NO: 7151

SEQ ID NO: 16147 - protein, 271 aa, Neisseria meningitidis; identical to SEQ ID NO: 1333

SEQ ID NO: 16148 - protein, 191 aa, Neisseria meningitidis; identical to SEQ ID NO: 1730

SEQ ID NO: 16149 - protein, 52 aa, Neisseria meningitidis; identical to SEQ ID NO: 7703

SEQ ID NO: 16150 - protein, 179 aa, Neisseria meningitidis; identical to SEQ ID NO: 6830

SEQ ID NO: 16151 - protein, 153 aa, Neisseria meningitidis
VSGEQTLETAALMCEIPQTTARAWKRADKEKGDDWDKMRAAYTLAGGGIEDLSRAMLAGFMVQYNSTMTMLQDSSTEDLPPSDRAKLLASLADAFTKTVSANARVMPETSKLATALELIEFLMAFVQEKHPKHLPAFVEVLEPFGVEVEKKFG

SEQ ID NO: 16152 - protein, 177 aa, Neisseria meningitidis; identical to SEQ ID NO: 7904

SEQ ID NO: 16153 - protein, 309 aa, Neisseria meningitidis; identical to SEQ ID NO: 5954

SEQ ID NO: 16154 - protein, 812 aa, Neisseria meningitidis; identical to SEQ ID NO: 6924

SEQ ID NO: 16155 - protein, 280 aa, Neisseria meningitidis
MDIKINGITVGNDAPFVLFGGINVLEDLDSTLQTCAHYVEVTRKLGIPYIFKASFDKANRSSIHSYRGVGLEEGLKIFEKVKAEFGIPVITDVHEPHQCQPVAEVCDVIQLPAFLARQTDLVVAMAKTGNVVNIKKPQFLSPSQMKNIVEKFHEAGNGKLILCERGSSFGYDNLVVDMLGFGVMKQTCGNLPVIFDVTHSLQTRDAGSAASGGRRAQALDLALAGMATRLAGLFLESHPDPKLAKCDGPSALPLHLLEDFLIRIKALDDLIKSQPILTIE

SEQ ID NO: 16156 - protein, 74 aa, Neisseria meningitidis; identical to SEQ ID NO: 6681

SEQ ID NO: 16157 - protein, 79 aa, Neisseria meningitidis; identical to SEQ ID NO: 5965

SEQ ID NO: 16158 - protein, 252 aa, Neisseria meningitidis; identical to SEQ ID NO: 6622

SEQ ID NO: 16159 - protein, 201 aa, Neisseria meningitidis; identical to SEQ ID NO: 3643

SEQ ID NO: 16160 - protein, 256 aa, Neisseria meningitidis; identical to SEQ ID NO: 3311

SEQ ID NO: 16161 - protein, 290 aa, Neisseria meningitidis; identical to SEQ ID NO: 6884

SEQ ID NO: 16162 - protein, 90 aa, Neisseria meningitidis; identical to SEQ ID NO: 7650

SEQ ID NO: 16163 - protein, 209 aa, Neisseria meningitidis; identical to SEQ ID NO: 1847

SEQ ID NO: 16164 - protein, 200 aa, Neisseria meningitidis
MTDKISPDALIEAALLTQTEPLTEKSMRELCVPPLSQDKLIDVLAQLKTRWQDRALQLVHTQEGWRFQIVQTAFERLGSLQEQRAPRYSRAVMETLAIIAYQQPVTRGDIEGIRGVAVSQNVMQTLQDRGWIEVIGHRDTLGKPALWATTATFLSDLGLNSLEELPPLTELGELVLPDLIEMQPTDEEEPETVPSDTLPN

SEQ ID NO: 16165 - protein, 144 aa, Neisseria meningitidis; identical to SEQ ID NO: 4312

SEQ ID NO: 16166 - protein, 350 aa, Neisseria meningitidis
MTVSPVALRRKTECKPHPTARYWKKCDVEALFGLPFLDLIYQAAEIHRQNFNPREIQLSTLLSIKTGGCPEDCAYCPQSAHHNTNLGKEQMMDVDEIVEKAKIAKSRGASRFCMGAAWRGPKPKDVETVSAIIKAVKGLGMETCGTFGMLEEGMAEDLKEAGLDYYNHNLDTDPDRYNDIIHTRQHEDRMDTLGKVRNAGLKVCCGGIVGMNETRAERAGLIASLANLDPQPESVPINRLVKVEGTPLADAEDLDWTEFVRTIAVARITMPQSYVRLSAGRSNMPEAMQAMCFMAGANSIFYGDKLLTTGNPDEDGDRILMEKLNLYPLQFEPEGEVAEVEKASGIKVDY

SEQ ID NO: 16167 - protein, 92 aa, Neisseria meningitidis; identical to SEQ ID NO: 600

SEQ ID NO: 16168 - protein, 259 aa, Neisseria meningitidis; identical to SEQ ID NO: 6680

SEQ ID NO: 16169 - protein, 228 aa, Neisseria meningitidis
MTVLQERYCEVSDRIGKLVLQAGREPHSVSLIAVGKTFPSDGIREVYAAGQRDFGENYIQEWYGKTEELADLTDIVWHVIGDVQSNKTKFVAERAHWVHTVCRLKTAVRLSGQRPSSMPPLQVCIEVNIAGEAVKHGVAPEEAVALAVEVAKLPNIVVRGLMCVAKANSSETELKVQFQTMRKLLADLNAAGVKADVLSMGMSDDMPAAIECGATHVRIGSAIFGKRG

SEQ ID NO: 16170 - protein, 448 aa, Neisseria meningitidis; identical to SEQ ID NO: 5964

SEQ ID NO: 16171 - protein, 157 aa, Neisseria meningitidis; identical to SEQ ID NO: 140

SEQ ID NO: 16172 - protein, 90 aa, Neisseria meningitidis; identical to SEQ ID NO: 7807

SEQ ID NO: 16173 - protein, 154 aa, Neisseria meningitidis
MYKHLVVAVDGSETSINALKHAAELAGVNGARLTLVHVANPAEYMALAPEFLQHESYEAAAVAQGNEVLDAAERTAQELGVENTVKHLLVANKGAREMAQDLVDYADENGADLLVLGTHGRTGLMHLLMGSFAETVMRQSHLPLLIIRSKAEEA

SEQ ID NO: 16174 - protein, 232 aa, Neisseria meningitidis; identical to SEQ ID NO: 2345

SEQ ID NO: 16175 - protein, 307 aa, Neisseria meningitidis; identical to SEQ ID NO: 1349

SEQ ID NO: 16176 - protein, 540 aa, Neisseria meningitidis; identical to SEQ ID NO: 7154

SEQ ID NO: 16177 - protein, 248 aa, Neisseria meningitidis; identical to SEQ ID NO: 7247

SEQ ID NO: 16178 - protein, 88 aa, Neisseria meningitidis; identical to SEQ ID NO: 6869

SEQ ID NO: 16179 - protein, 172 aa, Neisseria meningitidis; identical to SEQ ID NO: 6789

SEQ ID NO: 16180 - protein, 116 aa, Neisseria meningitidis; identical to SEQ ID NO: 5541

SEQ ID NO: 16181 - protein, 56 aa, Neisseria meningitidis; identical to SEQ ID NO: 5982

SEQ ID NO: 16182 - protein, 90 aa, Neisseria meningitidis; identical to SEQ ID NO: 1507

SEQ ID NO: 16183 - protein, 186 aa, Neisseria meningitidis; identical to SEQ ID NO: 482

SEQ ID NO: 16184 - protein, 107 aa, Neisseria meningitidis; identical to SEQ ID NO: 6055

SEQ ID NO: 16185 - protein, 1071 aa, Neisseria meningitidis; identical to SEQ ID NO: 6791

SEQ ID NO: 16186 - protein, 282 aa, Neisseria meningitidis; identical to SEQ ID NO: 1323

SEQ ID NO: 16187 - protein, 406 aa, Neisseria meningitidis; identical to SEQ ID NO: 6490

SEQ ID NO: 16188 - protein, 210 aa, Neisseria meningitidis; identical to SEQ ID NO: 6015

SEQ ID NO: 16189 - protein, 291 aa, Neisseria meningitidis; identical to SEQ ID NO: 7133

SEQ ID NO: 16190 - protein, 365 aa, Neisseria meningitidis; identical to SEQ ID NO: 6610

SEQ ID NO: 16191 - protein, 70 aa, Neisseria meningitidis; identical to SEQ ID NO: 5197

SEQ ID NO: 16192 - protein, 397 aa, Neisseria meningitidis; identical to SEQ ID NO: 6661

SEQ ID NO: 16193 - protein, 164 aa, Neisseria meningitidis; identical to SEQ ID NO: 7379

SEQ ID NO: 16194 - protein, 102 aa, Neisseria meningitidis; identical to SEQ ID NO: 13551

SEQ ID NO: 16195 - protein, 311 aa, Neisseria meningitidis; identical to SEQ ID NO: 6357

SEQ ID NO: 16196 - protein, 319 aa, Neisseria meningitidis; identical to SEQ ID NO: 6432

SEQ ID NO: 16197 - protein, 262 aa, Neisseria meningitidis; identical to SEQ ID NO: 7522

SEQ ID NO: 16198 - protein, 318 aa, Neisseria meningitidis; identical to SEQ ID NO: 6480

SEQ ID NO: 16199 - protein, 92 aa, Neisseria meningitidis; identical to SEQ ID NO: 1287

SEQ ID NO: 16200 - protein, 225 aa, Neisseria meningitidis; identical to SEQ ID NO: 6285

SEQ ID NO: 16201 - protein, 1995 aa, Neisseria meningitidis
MNKGLHRIIFSKKHSTMVAVAETANSQGKGKQAGSSVSVSLKTSGDLCGKLKTTLKTLVCSLVSLSMVLPAHAQITTDKSAPKNQQVVILKTNTGAPLVNIQTPNGRGLSHNRYTQFDVDNKGAVLNNDRNNNPFVVKGSAQLILNEVRGTASKLNGIVTVGGQKADVIIANPNGITVNGGGFKNVGRGILTTGAPQIGKDGALTGFDVRQGTLTVGAAGWNDKGGADYTGVLARAVALQGKLQGKNLAVSTGPQKVDYASGEISAGTAAGTKPTIALDTAALGGMYADSITLIANEKGVGVKNAGTLEAAKQLIVTSSGRIENSGRIATTADGTEASPTYLSIETTEKGAAGTFISNGGRIESKGLLVIETGEDISLRNGAVVQNNGSRPATTVLNAGHNLVIESKTNVNNAKGPATLSADGRTVIKEASIQTGTTVYSSSKGNAELGNNTRITGADVTVLSNGTISSSAVIDAKDTAHIEAGKPLSLEASTVTSDIRLNGGSIKGGKQLALLADDNITAKTTNLNTPGNLYVHTGKDLNLNVDKDLSAASIHLKSDNAAHITGTSKTLTASKDMGVEAGSLNVTNTNLRTNSGNLHIQAAKGNIQLRNTKLNAAKALETTALQGNIVSDGLHAVSADGHVSLLANGNADFTGHNTLTAKADVNAGSVGKGRLKADNTNITSSSGDITLVAGNGIQLGDGKQRNSINGKHISIKNNGGNADLKNLNVHAKSGALNIHSDRALSIENTKLESTHNTHLNAQHERVTLNQVDAYAHRHLSITGSQIWQNDKLPSANKLVANGVLALNARYSQIADNTTLRAGAINLTAGTALVKRGNINWSTVSTKTLEDNAELKPLAGRLNIEAGSGTLTIEPANRISAHTDLSIKTGGKLLLSAKGGNAGAPSAQVSSLEAKGNIRLVTGETDLRGSKITAGKNLVVATTKGKLNIEAVNNSFSNYFPTQKAAELNQKSKELEQQIAQLKKSSPKSKLIPTLQEERDRLAFYIQAINKEVKGKKPKGKEYLQAKLSAQNIDLISAQGIEISGSDITASKKLNLHAAGVLPKAADSEAAAILIDGITDQYEIGKPTYKSHYDKAALNKPSRLTGRTGVSIHAAAALDDARIIIGASEIKAPSGSIDIKAHSDIVLEAGQNDAYTFLKTKGKSGKIIRKTKFTSTRDHLIMPAPVELTANGITLQAGGNIEANTTRFNAPAGKVTLVAGEELQLLAEEGIHKHELDVQKSRRFIGIKVGKSNYSKNELNETKLPVRVVAQTAATRSGWDTVLEGTEFKTTLAGADIQAGVGEKARADAKIILKGIVNRIQSEEKLETNSTVWQKQAGRGSTIETLKLPSFESPTPPKLTAPGGYIVDIPKGNLKTEIEKLAKQPEYAYLKQLQVAKNVNWNQVQLAYDKWDYKQEGLTRAGAAIVTIIVTALTYGYGATAAGGVAASGSSTAAAAGTAATTTAAATTVSTATAMQTAALASLYSQAAVSIINNKGDVGKALKDLGTSDTVKQIVTSALTAGALNQMGADIAQLNSKVRTELFSSTGNQTIANLGGRLATNLSNAGISAGINTAVNGGSLKDNLGNAALGALVNSFQGEAASKIKTTFSDDYVAKQFAHALAGCVSGLVQGKCKDGAIGAAVGEIVADSMLGGRNPATLSDAEKHKVISYSKIIAGSVAALNGGDVNTAANAAEVAVVNNALNFDSTPTNAKKHQPQKPDKTALEKIIQGIMPAHAAGAMTNPQDKDAAIWISNIRNGITGPIVITSYGVYAAGWTAPLIGTAGKLAISTCMANPSGCTVMVTQAAEAGAGIATGAVTVGNAWEAPVGALSKAKAAKQAAPKETINNLANLAKAEQQILFRIAQRDTQLDAWKTGFNNRVRKGAGLLDASNIPITINGKTIKPVQAISLKGAPVYSGVSEQEIFALYRQMTGQNPNFRVLPDGRLANGIISTGEWAGTKIALRNFSKTENSTQARWTLDLQNPPSFIKGTKLELKFQ

SEQ ID NO: 16202 - protein, 83 aa, Neisseria meningitidis
LPANNGIIRALSPPFTGINIRLFAALGLLSLSGAAAQASVYHCNSNGKSVYTSAPAGLCADADLPKISSHQGGGYRLKIKKLS

SEQ ID NO: 16203 - protein, 201 aa, Neisseria meningitidis; identical to SEQ ID NO: 291

SEQ ID NO: 16204 - protein, 323 aa, Neisseria meningitidis; identical to SEQ ID NO: 3380

SEQ ID NO: 16205 - protein, 327 aa, Neisseria meningitidis; identical to SEQ ID NO: 6336

SEQ ID NO: 16206 - protein, 415 aa, Neisseria meningitidis; identical to SEQ ID NO: 7351

SEQ ID NO: 16207 - protein, 219 aa, Neisseria meningitidis; identical to SEQ ID NO: 7467

SEQ ID NO: 16208 - protein, 332 aa, Neisseria meningitidis; identical to SEQ ID NO: 6359

SEQ ID NO: 16209 - protein, 558 aa, Neisseria meningitidis; identical to SEQ ID NO: 1615

SEQ ID NO: 16210 - protein, 228 aa, Neisseria meningitidis; identical to SEQ ID NO: 5963

SEQ ID NO: 16211 - protein, 45 aa, Neisseria meningitidis; identical to SEQ ID NO: 3752

SEQ ID NO: 16212 - protein, 591 aa, Neisseria meningitidis; identical to SEQ ID NO: 7516

SEQ ID NO: 16213 - protein, 318 aa, Neisseria meningitidis
MKVLFIADPMASFKTYKDTTYAMMREMAKRGWRLFHTLSGELSVNGGLVTAQASAFEFLGAKNDDDHAWFKSADKVQTALEAFDAVIMRTDPPFDMQYLYATQLLTLAEQQGAKVFNSGQAMRDFNEKLAILNFSRFIAPTLVTTRSADVRTFLKEHGDIIIKPLDGMGGMGIFRLTEKDPNIGSILETLMQLDSRTIMAQRYIPEIVHGDKRILIIGGEVVPYALARIPQNGETRGNLAAGGRGVAQELGGRDREIAETLAPELKRRGILLAGLDVIGSNLTEVNVTSPTGFQEIMKQKGFDVAAMFADAVAAWSVR

SEQ ID NO: 16214 - protein, 273 aa, Neisseria meningitidis; identical to SEQ ID NO: 4369

SEQ ID NO: 16215 - protein, 138 aa, Neisseria meningitidis; identical to SEQ ID NO: 774

SEQ ID NO: 16216 - protein, 60 aa, Neisseria meningitidis; identical to SEQ ID NO: 3237

SEQ ID NO: 16217 - protein, 48 aa, Neisseria meningitidis; identical to SEQ ID NO: 6730

SEQ ID NO: 16218 - protein, 84 aa, Neisseria meningitidis; identical to SEQ ID NO: 3171

SEQ ID NO: 16219 - protein, 215 aa, Neisseria meningitidis; identical to SEQ ID NO: 4487

SEQ ID NO: 16220 - protein, 618 aa, Neisseria meningitidis; identical to SEQ ID NO: 7771

SEQ ID NO: 16221 - protein, 377 aa, Neisseria meningitidis
MFKKFKPVLLSFFALVFAFWLGTGIAYEINPRWFLSDTATEVPENPNAFVAKLARLFRNADRAVVIVKESIRTEENLAGTVDDGPLQSEKDYLALAIRLSRLKEKAKWFHVTEQEHGKEVWLDYHIGEGGLVAVSLSQRSPEAFVNAEYLYRNDRPFSVNVYGGTVHGENYETTGEYRVVWQPDGSVFDAAGRGKIGEDVYEHCLGCYQMAQVYLAKYRDVANDEQKVWDFRKESNRIASDSRNSVFYQNMRELMPRGMKANSLVVGYDADGLPQKVYWSFDNGKKRQSFEYYLKNGNLFIAQSSTVALKADGVTADMQTYHAQQTWYLDGGRIVREEKQGDRLPDFPLNLENLEKEVRRYAEAAARRSGGRRDLSH

SEQ ID NO: 16222 - protein, 168 aa, Neisseria meningitidis; identical to SEQ ID NO: 7502

SEQ ID NO: 16223 - protein, 480 aa, Neisseria meningitidis; identical to SEQ ID NO: 6472

SEQ ID NO: 16224 - protein, 212 aa, Neisseria meningitidis; identical to SEQ ID NO: 7469

SEQ ID NO: 16225 - protein, 154 aa, Neisseria meningitidis; identical to SEQ ID NO: 6562

SEQ ID NO: 16226 - protein, 296 aa, Neisseria meningitidis; identical to SEQ ID NO: 7271

SEQ ID NO: 16227 - protein, 423 aa, Neisseria meningitidis; identical to SEQ ID NO: 7094

SEQ ID NO: 16228 - protein, 376 aa, Neisseria meningitidis; identical to SEQ ID NO: 2312

SEQ ID NO: 16229 - protein, 280 aa, Neisseria meningitidis
MDSFFKPAVWAVLWLMFAVRPALADELTNLLSSREQILRQFAEDEQPVLPINRAPARRAGNADELIGSAMGLNEQPVLPINRAPARRAGNADELIGSAMGLNEQPVLPVNRVPARRAGNADELIGNAMGLNEQPVLPVNRAPARRAGNADELIGNAMGLLGIAYRYGGTSVSTGFDCSGFMQHIFKRAMGINLPRTSAEQARMGTPVARSELQPGDMVFFRTLGGSRISHVGLYIGNNRFIHAPRTGKNIEITSLSHKYWSGKYAFARRVKKNDPSRFLN

SEQ ID NO: 16230 - protein, 168 aa, Neisseria meningitidis; identical to SEQ ID NO: 5993

SEQ ID NO: 16231 - protein, 316 aa, Neisseria meningitidis
LLNEAVDALAVREDGVYVDGTFGRGGHSRLILSRLGDAGRLIVFDKDPQAIAVAEELARSDKRVGVVHGGFASFQTALDGLGIGKVDGALFDLGISSPQIDDGSRGFSFRFDAPLDMRMDTTRGMSAAEWIAVASEQDLHEVIKNYGEERFSRRIARAIVAQRAESPIDTTRKLAQIVAQNVRTRERGQDPATRTFQAVRIFINRELEEVGAVLPQVMCRLKEGGRLAVIAFHSLEDRIVKQFVKKYSQHAPLPRWAAVREADLPELPLKIVGRALKPGEAEIAANPRARSAVLRVAERTAGPIPEQSQRKTSEWQ

SEQ ID NO: 16232 - protein, 250 aa, Neisseria meningitidis; identical to SEQ ID NO: 7000

SEQ ID NO: 16233 - protein, 123 aa, Neisseria meningitidis; identical to SEQ ID NO: 4020

SEQ ID NO: 16234 - protein, 334 aa, Neisseria meningitidis; identical to SEQ ID NO: 5969

SEQ ID NO: 16235 - protein, 436 aa, Neisseria meningitidis; identical to SEQ ID NO: 6386

SEQ ID NO: 16236 - protein, 265 aa, Neisseria meningitidis; identical to SEQ ID NO: 7433

SEQ ID NO: 16237 - protein, 675 aa, Neisseria meningitidis
LTGIRSEKQIQREIMLTQAAFNRLARSGKASQNDLARAAVATRNRIRELNAELKQGTGFADKMGKIGRFGAAAVAGGAAAYTVLKPAMDNRKQLDENINRVSRQAFIEDNSKSAAWIATEGAQQIKDLALELVEKNGGTHDKALDLISGMMTTGLNFAQTKNEAQAAYAFALASEGSGEDTAKLIKTLKDGGMSGKDLQLGLEHVLQSGLDGTFEVRDMVRELPSLLSAAQQAGMNGVGGLDYLLSLLQSAANKSGSPAEAATNVQNLLSKTLSPDTIGRLKKMANPNDPKKGVDWIGSVVQGKQNGENAVQVLSRLADAMLVKDKQYQDYKKRAAAGDKTAAEQANMLKGALLAQLLPDLQAKQGLLAATDMTQIREYMASLAGVTLDNGKIAKNNEARMLSAAAQQEQQESLAMLRESLTGTLVDMETSFKKLAAEYPNATLALQALTTAATAASAAMLLTAGGGKGAGFLKDVGSKALGWGKASAGGVAAGATAAGGKLLSWGKSAGSGLMNNPALVKRAGLLGMLLYSESLGDGTLPKGLRGTKTTPEMINRLKNNGIRFEPAPKREQARGGVPQYLAAPSAQPTDKMLSPLFSTQTAAYQAAIQQQTAAYQAALAQDTAAVTTGLAQVQSAMASASQTINTNVSLNIDGRVIANEVSRYQVAMFGRGAGQ

SEQ ID NO: 16238 - protein, 124 aa, Neisseria meningitidis
LVEGQKSAVTEYYLNHGEWPGDNSSAGVATSSEIKGKYVKSVEVKNGVVTAQMASSNVNNEIKGKKLSLWAKRQNGSVKWFCGQPVTRDKAKDDAVTAATGKGTANINTKHLPSTAPTRKSTPN

SEQ ID NO: 16239 - protein, 363 aa, Neisseria meningitidis
MSHISPIPEILADIKAGKMVIITDAEDRENEGDLLMAAQFVTPEAINFMIKHARGLVCLPMDGEMVEKLGLPMMTQKNGAQYGTNFTVSIEAAHGITTGISAADRALTIQTAVSPTAKPEDIVQPGHIFPLRAQKGGVLVRAGHTEAGVDLAQMNGLIPASVICEIINDDGTMARMPELMKFAEEHKLKIGTIADLIEYRSRTESLLEDMGNAPVQTPWGEFQQHVYVDKLSGETHLALVKGTPAADTETLVRVHEPFSVMDFIQANPRHSWSLPKALEHIQQAESGVVILLHRTEDGASLLDRTLPKGANQAYKWDSKSYGIGAQILAGLNVKKLRVLGQPSSFTGLTGFGLEVVGFEEAEK

SEQ ID NO: 16240 - protein, 463 aa, Neisseria meningitidis; identical to SEQ ID NO: 6311

SEQ ID NO: 16241 - protein, 131 aa, Neisseria meningitidis; identical to SEQ ID NO: 7197

SEQ ID NO: 16242 - protein, 416 aa, Neisseria meningitidis; identical to SEQ ID NO: 6814

SEQ ID NO: 16243 - protein, 189 aa, Neisseria meningitidis; identical to SEQ ID NO: 6305

SEQ ID NO: 16244 - protein, 258 aa, Neisseria meningitidis; identical to SEQ ID NO: 5438

SEQ ID NO: 16245 - protein, 180 aa, Neisseria meningitidis
VQSWKERRDFNIVKQDLDFSCGAASVATLLNNFYGQKLTEEEVLEKLDKEQMRASFEDMRRIMPDLGFEAKGYALSFEQLAQLKIPVIVYLKYRKDDHFSVLRGIDGNTVLLADPSLGHVSMSRAQFLDAWQTREGNLAGKILAVIPKKAETISNKLFFTQHPKRQTEFTVGQIRQARAE

SEQ ID NO: 16246 - protein, 323 aa, Neisseria meningitidis; identical to SEQ ID NO: 7334

SEQ ID NO: 16247 - protein, 86 aa, Neisseria meningitidis; identical to SEQ ID NO: 6575

SEQ ID NO: 16248 - protein, 260 aa, Neisseria meningitidis; identical to SEQ ID NO: 6125

SEQ ID NO: 16249 - protein, 98 aa, Neisseria meningitidis; identical to SEQ ID NO: 7463

SEQ ID NO: 16250 - protein, 49 aa, Neisseria meningitidis; identical to SEQ ID NO: 5144

SEQ ID NO: 16251 - protein, 262 aa, Neisseria meningitidis; identical to SEQ ID NO: 7126

SEQ ID NO: 16252 - protein, 371 aa, Neisseria meningitidis; identical to SEQ ID NO: 6570

SEQ ID NO: 16253 - protein, 225 aa, Neisseria meningitidis; identical to SEQ ID NO: 1002

SEQ ID NO: 16254 - protein, 469 aa, Neisseria meningitidis; identical to SEQ ID NO: 2689

SEQ ID NO: 16255 - protein, 338 aa, Neisseria meningitidis; identical to SEQ ID NO: 7819

SEQ ID NO: 16256 - protein, 296 aa, Neisseria meningitidis; identical to SEQ ID NO: 337

SEQ ID NO: 16257 - protein, 151 aa, Neisseria meningitidis; identical to SEQ ID NO: 6226

SEQ ID NO: 16258 - protein, 471 aa, Neisseria meningitidis
MNLHAKDKTQHPENVELLSAQKPITDFKGLLTTIISAVVCFGIYHILPYSPDANKGIALLIFVAALWFTEAVHITVTALMIPILAVVLGFPDMDIKKAMADFSNPIIYIFFGGFALATALHMQRLDRKIAVSLLRLSRGSMKAAVLMLFLVTAFLSMWISNTATAAMMLPLAMGMLSHLDREKERKTYVFVLLGIAYCASIGGLGTLVGSPPNLIAAKALNLDFVGWMKLGLPMMLLILPLMLLSLYVILKPNLNERVEIKAESIPWTLHRVIALLIFLATAAAWIFSSKIKTAFGISNPDTVIALSAAVAVVVFGVAQWKEVARNTDWGVLMLFGGGISLSTLLKTSGASEALGQQVAATFSSAPAFLVILIVAAFIIFLTEFTSNTASAALLVPIFSGIAMQMGLPEQVLVFVIGIGASCAFMLPVATPPNAIVFGTGLIKQREMMNVGILLNILCVVLVALWAYAVLM

SEQ ID NO: 16259 - protein, 99 aa, Neisseria meningitidis
MGYRVGINCFDTRLHADDYLLSSLPPTVTQDGKIIRPERVGDKWILNGKPVTLSYPKCSNYEQVKSGAYLGSMVLILFVVIYGFRLLINFLKDIGKVGA

SEQ ID NO: 16260 - protein, 118 aa, Neisseria meningitidis; identical to SEQ ID NO: 6050

SEQ ID NO: 16261 - protein, 378 aa, Neisseria meningitidis
MDWHERFPELEAQLGAPIENYAPPKHWTRKQLRSMGRVSYLCVDAAEQALADAGLLGDESITDGRMGVACGSSSGSTKDIGDVGELLLTGTSRNFSANTYVRMMPHTTAANIGIFFGLKGRIIPTSSACSSGSQGIGYAYEAIKYGLTDMMLAGGGEEFFPSEVYVFDSLYAASRRNGEPEKTPRPYDANRDGLVIGEGAGIFVLEELEHAKRRGAIIYAELVGYGANSDAYHISTPRPDAQGAILAFQTALQHANLAPEDIGWINLHGTGTHHNDNMESRAVAAVFGNNTPCTSTKPQTGHTLGAADAIEAAFAWGIADRQSNPEGKLPPRLWDGQNDPNLPAINLTGSGSRWETEKRITASSSFAFGGSNCVLIIG

SEQ ID NO: 16262 - protein, 331 aa, Neisseria meningitidis
MKKSLIALTLAALPVAAMADVTLYGTIKAGVETSRSVFHQNGQVTEVTTATGIVDLGSKIGFKGQEDLGNGLKAIWQVEQKASIAGTDSGWGNRQSFIGLKGGFGKLRVGRLNSVLKDTGDINPWDSKSDYLGVNKIAEPEARLISVRYDSPEFAGLSGSVQYALNDNAGRHNSESYHAGFNYKNGGFFVQYGGAYKRHHQVQEGLNIEKYQIHRLVSGYDNDALYASVAVQQQDAKLTDASNSHNSQTEVAATLAYRFGNVTPRVSYAHGFKGLVDDADIGNEYDQVVVGAEYDFSKRTSALVSAGWLQEGKGENKFVATAGGVGLRHKF

SEQ ID NO: 16263 - protein, 222 aa, Neisseria meningitidis; identical to SEQ ID NO: 7279

SEQ ID NO: 16264 - protein, 212 aa, Neisseria meningitidis
MFQNFDLGVFLLAVLPVLLSITVREVARGYTARYWGDNTAEQYGRLTLNPLPHIDLVGTIIVPLLTLMFTPFLFGWARPIPIDSRNFRNPRLAWRCVAASGPLSNLAMAVLWGVVLVLTPYVGGAYQMPLAQMANYGILINAILFALNIIPILPWDGGIFIDTFLSAKYSQAFRKIEPYGTWIILLLMLTGVLGAFIAPIVRLVIAFVQMFV

SEQ ID NO: 16265 - protein, 384 aa, Neisseria meningitidis
MVDKKSPLIAVSVGEASGDLLGAHLIRAIRKRCPQARFVGIGGELMKAEGFESLYDQERLAVRGFAEVVKRLPEILRIRRGLVRDLLSLKPDVFVGIDAPDFNLGVAERLKRAGIPTLHYVSPSVWAWRRERVGKIVHQVNRVLCLFPMEPQLYLDAGGRAEFVGHPMAQLMPLEDDRETARKTLGVDAGIPVFALLPGSRVSEIDYMAPVFFQTALLLLERYPAARFLLPAATAATKRRLAEVLQRPEFAGLPLTVIDRQSETVCRAADAVLVTSGTATLEVALCKRPMVISYKISPLTYAYVKRKIKVPHVGLPNILLGKEAVPELLQHDAVPEKLAAALADWYEHPDKVAALQQDFRALHLLLKKDTADLAARAVLEEAGC

SEQ ID NO: 16266 - protein, 402 aa, Neisseria meningitidis; identical to SEQ ID NO: 7040

SEQ ID NO: 16267 - protein, 168 aa, Neisseria meningitidis; identical to SEQ ID NO: 7260

SEQ ID NO: 16268 - protein, 207 aa, Neisseria meningitidis; identical to SEQ ID NO: 15776

SEQ ID NO: 16269 - protein, 344 aa, Neisseria meningitidis; identical to SEQ ID NO: 5994

SEQ ID NO: 16270 - protein, 540 aa, Neisseria meningitidis
MQVNIQIPCMLYRRGSVKPPLFEAPRLLPSFTDPVVPKLSAPGGYIVDIPKGNLKTEIEKLAKQPEYAYLKQLQVAKNVNWNQVQLAYDKWDYKQEGLTRAGAAIIALAVTVVTAGAGVGAALGLNGAAAAAADAAFASLASQASVSLINNKGDVGKTLKELGRSRTVKNLVVAAATAGVSNKLGASSLATWSETPWVNNLNVNLANAGSAALINTAVNGGSLKDNLEANILAALVNTAHGEAASKIKGLDQHYVAHKIAHAVAGCAAAAANKGKCQDGAIGAAVGEIVGEALVKNTDFSDMTPEQLDLEVKKITAYAKLAAGTVAGVTGGDVNTAAQTAQNAVENNAVKAVVTAAKVVYKVARKGLKNGKINVRDLKQTLKDEGYNLADNLTTLFDETLDWNDAKAVIDIVVGTELNRANKGEAAQKVKEVLEKNRPYIPNKGAVPNMSTYMKNNPFGKQLAQISEKTTLPTQQGQSVFLVKRNQGLLKTGDRFYLDGQHKNHLEVFDKNGNFKFVLNMDGSLNQMKTGAAKGRKLNLK

SEQ ID NO: 16271 - protein, 214 aa, Neisseria meningitidis; identical to SEQ ID NO: 1408

SEQ ID NO: 16272 - protein, 513 aa, Neisseria meningitidis; identical to SEQ ID NO: 7492

SEQ ID NO: 16273 - protein, 146 aa, Neisseria meningitidis
VRAFQTALRPSRILNILTVSLHAASLAVCLTWFYGWMMWFGLAALVASYAYSLRITNLKHRHAITAITIDRDGQAEIISGKDKTAATLAGSSMVTPYALFLQWDTGGTTVSQCIIPDMTDKESYRRLKVWILWRQPKKTAETDTSD

SEQ ID NO: 16274 - protein, 70 aa, Neisseria meningitidis; identical to SEQ ID NO: 7135

SEQ ID NO: 16275 - protein, 111 aa, Neisseria meningitidis
LEMFDGEVEADESYFGGQRKGKRGRGAAGKVAVFGLLKRNGKVYTVTVPNTQTATLFPIIREQVKPDSIFYTDCYRSYDVLDVREFSHFSFAETSFSYQSQHTFCRTTKPY

SEQ ID NO: 16276 - protein, 121 aa, Neisseria meningitidis; identical to SEQ ID NO: 6750

SEQ ID NO: 16277 - protein, 284 aa, Neisseria meningitidis; identical to SEQ ID NO: 1842

SEQ ID NO: 16278 - protein, 517 aa, Neisseria meningitidis
MPSERSADCCPAHFVVKFRKSTLNCGRRFDRPPINGNRQRKPMIHTEPSAQPSTMDTAAFLKHIESAFRRIFSDGIDLMRYLPEDKWLALKQAGLLLPFLDKKYGGRKGSQFEIQEVLRIAGHYGVPVTLRTGIEGALVLQPLQEFGDEAQVAQGLEMIFKGEGGGLGVTEPETSGAAIAREMQSYYEYIDGQTIYVNAAKYWQGNSQSDFLLVAAKERKNGKLAKVIDLLLVPKTYIRCETLASEGLRAVRYAVNRIDAEMPATAVMKLSQSDAAGLRAFQNIFIRSRLQLIGMTHGIMEYTLENLERYVRNDIRFVDYERREIRRRHQVSEILYRYVCHSVSPVAPVAHQLMEANIVKTLATEYTYAAAQMLQKLLGAKGFERGHTAGNIAIDIRPFTIFEGPNDMLYAEIYDQFVRATAEEKEAGMKLDKNQTLLDRLQTDARFAAVARDYTLPEDIRSFLQEHTLTDACALQKIFIGKIIARLFVFVQAEHEDTAAFLLNDIRKDILDCRYCG

SEQ ID NO: 16279 - protein, 152 aa, Neisseria meningitidis; identical to SEQ ID NO: 1697

SEQ ID NO: 16280 - protein, 252 aa, Neisseria meningitidis; identical to SEQ ID NO: 6230

SEQ ID NO: 16281 - protein, 100 aa, Neisseria meningitidis; identical to SEQ ID NO: 6868

SEQ ID NO: 16282 - protein, 169 aa, Neisseria meningitidis; identical to SEQ ID NO: 219

SEQ ID NO: 16283 - protein, 91 aa, Neisseria meningitidis; identical to SEQ ID NO: 4054

SEQ ID NO: 16284 - protein, 67 aa, Neisseria meningitidis; identical to SEQ ID NO: 6237

SEQ ID NO: 16285 - protein, 161 aa, Neisseria meningitidis; identical to SEQ ID NO: 6695

SEQ ID NO: 16286 - protein, 116 aa, Neisseria meningitidis; identical to SEQ ID NO: 4624

SEQ ID NO: 16287 - protein, 177 aa, Neisseria meningitidis; identical to SEQ ID NO: 6602

SEQ ID NO: 16288 - protein, 198 aa, Neisseria meningitidis; identical to SEQ ID NO: 7148

SEQ ID NO: 16289 - protein, 91 aa, Neisseria meningitidis
MNEGEVVLTPEQIQTLRGYASRGDTYGGWRYLANLGDRYADDAAAIVGKDANLNGLNLWMKKGVENLWDDTVGKKTRLMCISVFWIVVFNL

SEQ ID NO: 16290 - protein, 1429 aa, Neisseria meningitidis
MNEGEVVLTPEQIQTLRGYASRGDTYGGWRYLANLGDRYADDAAAIVGKDANLNGLNLWMKKGVENLWDDTVGKKTRLEKFDRVALQHFRQYARLINQNNGRLPNTSEIERSYYKAVTDNGVSSSAAIDLVINRSLPDMADGYWALGLGIEAERIHNEQAVNNPNGSERDNRKQLISALDKGFDGSFKEKHFTFLQSVMMDVTKLGVEYTIDGWQKIGGWGNGIINDLYKSVVKREWTGIFEIVNNNIKQGNEAFKNEINSLVHDMKAAGKEFGDDLNTQWNNLTQAAEIIYNDIVDNTSQGIEKGVKAIKELSEKMKNAASDLADGSAEKAKQVVEDLAQAAKEAYENAKSTAEKAAQAAREFFKGLPSFKDLAEKFRDLFPNPEGWIDDGHQCLAPWVKETKKRNGKYHVYDPLALDLDGDGIETVATKGFAGSLFDHTNNGIRTATGWVSADDGLLVRDLNGNGIIDNGAELFGDNTKLADGSFAKHGYAALAELDSNGDNIINAADAAFQTLRVWQDLNQDGISQANELRTLEELGIQSLDLAYKDVNKNLGNGNTLAQQGSYTKTDGTTAKMGDLLLAADNLHSRFKDKVELTAEQAKAANLAGIGRLRDLREAAALSGDLANMLKAYSAAETKEAQLALLDNLIHKWAETDSNWGKKSPMRLSTDWTQTANEGIALTPSQVAQLKKNALVSLSDKAKAAIDAARDRIAVLDAYTGQDSNTLYYMSEEDALNIVKVTNDTYDHLAKNIYQNLLFQTRLQPYLNQISFKMENDTFTLDFSGLVQAFNHVKETNPQKAFVDLAEMLAYGELRSWYEGRRLMTDYVEEAKKAGKFEDYQKVLGQETVALLAKTSGTQADDILQNVGFGHNKNVSLYGNDGNDTLIGGAGNDYLEGGSGSDTYVFGEGFGQDTVYNYDYATGRKDIIRFTDGITADMLTFTREGNHLLIKAKDGSGQVTVQSYFQNDGSGAYRIDEIHFDNGKVLDVATVKELVQQSTDGSDRLYAYQSGNTLNGGLGDDYLYGADGDDLLNGDAGNDSIYSGNGNDTLDGGEGNDALYGYNGNDALNGGEGNDHLNGEDGNDTLIGGAGNDYLEGGSGSDTYVFGKGFGQDTVYNYDYATGRKDIIRFTDGITADMLTFTREGNHLLIKAKDGSGQVTVQYYFQNDGSGAYRIDEIHFDNGKVLDVATVKELVQQSTDGSDRLYAYQSGSTLNGGLGDDYLYGADGDDLLNGDAGNDSIYSGNGNDTLDGGEGNDALYGYNGNDALNGGEGNDHLNGEDGNDTLIGGAGNDYLEGGSGSDTYVFGEGFGQDTVYNYHVDKNSDTMHFKGFKAADVHFIRSGSDLVLSASEQDNVRISGFFYGENHRVDTFVFDDAAISNPDFAKYINAGNNLVQSMSVFGSNTAATGGNVDANIQSVQQPLLVTPSA

SEQ ID NO: 16291 - protein, 42 aa, Neisseria meningitidis; identical to SEQ ID NO: 6772

SEQ ID NO: 16292 - protein, 421 aa, Neisseria meningitidis
MFSFFRRKKKQETPALEEAQIQETAAKAESELAQIVENIKEDAESLAESVKGQVESAVETVSGAVEQVKETVAEMLSEAEEAAEKAAEQVEAAKEAVAETVGEAVGQVQEAVATTEEHKLGWAARLKQGLTKSRDKMAKSLAGVFGGGQIDEDLYEELETVLITSDMGMEATEYLMKDVRDRVSLKGLKDGNELRGALKEALYDLIKPLEKPLVLPETKEPFVIMLAGINGAGKTTSIGKLAKYFQAQGKSVLLAAGDTFRAAAREQLQAWGERNNVTVISQTTGDSAAVCFDAVQAAKARGIDIVLADTAGRLPTQLHLMEEIKKVKRVLQKAMPDAPHEIIVVLDANIGQNAVNQVKAFDDALGLTGLIVTKLDGTAKGGILAALASDRPVPVRYIGVGEGIDDLRPFDARAFVDALLD

SEQ ID NO: 16293 - protein, 319 aa, Neisseria meningitidis; identical to SEQ ID NO: 6345

SEQ ID NO: 16294 - protein, 706 aa, Neisseria meningitidis
MFDKHVKTFQYGNHTVTLETGEIARQAAAAVKVSMGDTVVLVAVTTNKEVKEGQDFFPLTVDYLERTYAAGKIPGGFFKREGKQSEKEILTSRLIDRPIRPLFPEGFYHDIQIVAMVVSVDPEIDSDIPAMLGASAALVLSGVPFAGPIGAARVGYVNGVYVLNPTKAELAKSQLDLVVAGTSKAVLMVESEAKILPEDVMLGAVVYGHDQMQVAINAINEFADEVNPEVWDWKAPETNEELVAKVREIAGETIKEAFKIRQKQARSAKLDEAWSAVKEALITEETDTLAANEIKGIFKHLEADVVRSQILDGQPRIDGRDTRTVRPLNIQTGVLPRTHGSALFTRGETQALAVATLGTSRDEQIIDALSGEYTDRFMLHYNFPPYSTGEVGRVGAPKRREIGHGRLAKRALLAVLPKPEDFSYTMRVVSEITESNGSSSMASVCGGCLSLLSAGVPLKAHVAGIAMGLILEGNKFAVLTDILGDEDHLGDMDFKVAGTTEGVTALQMDIKIQGITKEIMQIALAQAKEARLHILDQMKAAVAGPQELSAHAPRLFTMKINQDKIREVIGKGGETIRAITAETGTEINIAEDGTITIAATTQEAGDAAKKRIEQITAEVEVGKVYEGTVVKILDNNVGAIVSVMPGKDGLVHISQIAHERVRNVGDYLQVGQVVNVKALEVDDRGRVRLSIKALLDAPAREENAAE

SEQ ID NO: 16295 - protein, 268 aa, Neisseria meningitidis; identical to SEQ ID NO: 6826

SEQ ID NO: 16296 - protein, 152 aa, Neisseria meningitidis
MVDAVVKTPEFLPFTSVGIFRFGADITQYKNILETFMYEPPDEFRTEYYESPDSNLLISVKKKNKIISIFCYQELYFMGVNIIGLNFEDFKQLFHYPKSYGVDKYYLSNESYPTYVYEFDEIGVQAWEAKGKIVTIIAGGKDNYSTEPYYDE

SEQ ID NO: 16297 - protein, 868 aa, Neisseria meningitidis; identical to SEQ ID NO: 6411

SEQ ID NO: 16298 - protein, 217 aa, Neisseria meningitidis; identical to SEQ ID NO: 7454

SEQ ID NO: 16299 - protein, 227 aa, Neisseria meningitidis; identical to SEQ ID NO: 598

SEQ ID NO: 16300 - protein, 255 aa, Neisseria meningitidis; identical to SEQ ID NO: 7056

SEQ ID NO: 16301 - protein, 119 aa, Neisseria meningitidis; identical to SEQ ID NO: 420

SEQ ID NO: 16302 - protein, 193 aa, Neisseria meningitidis; identical to SEQ ID NO: 1600

SEQ ID NO: 16303 - protein, 286 aa, Neisseria meningitidis; identical to SEQ ID NO: 6726

SEQ ID NO: 16304 - protein, 114 aa, Neisseria meningitidis; identical to SEQ ID NO: 5923

SEQ ID NO: 16305 - protein, 249 aa, Neisseria meningitidis; identical to SEQ ID NO: 7278

SEQ ID NO: 16306 - protein, 407 aa, Neisseria meningitidis; identical to SEQ ID NO: 12938

SEQ ID NO: 16307 - protein, 500 aa, Neisseria meningitidis; identical to SEQ ID NO: 7628

SEQ ID NO: 16308 - protein, 172 aa, Neisseria meningitidis
LNKVILIGRLGRDPEVRYMPNGEAVCNFSVATSETWNDRNGQRVERTEWHNITMYRKLAEIAGQYLKKGGLVYLEGRIQSRKYQGKDGIERTAYDIVANEMKMLGGRNENSGGAPYEEGYGQSQEAYQRPAQQSRQPASDAPSHPQEAPAAPRRQPVPAAAPVEDIDDDIPF

SEQ ID NO: 16309 - protein, 95 aa, Neisseria meningitidis; identical to SEQ ID NO: 6196

SEQ ID NO: 16310 - protein, 444 aa, Neisseria meningitidis; identical to SEQ ID NO: 1459

SEQ ID NO: 16311 - protein, 120 aa, Neisseria meningitidis; identical to SEQ ID NO: 6941

SEQ ID NO: 16312 - protein, 349 aa, Neisseria meningitidis
LILMNTPIPFSERLIRWQKQHGRHHLPWQVKNPYCVWLSEIMLQQTQVATVLDYYPRFLEKFPTVQTLAAAPQDEVLSLWAGLGYYSRARNLHKAAQQVVRQFGGTFPSERKDLETLCGVGRSTAAAICAFSFNRRETILDGNVKRVLCRVFARDGNPQDKKFENSLWTLAESLLPSENADMPAYTQGLMDLGATVCKRTKPLCHQCPMADICEAKKQNRTAELPRKKTAAEVPTLPLYWLIVRNRDGAILLEKRPAKGIWGGLYCVPCFESLNGLSDFAAKFSLTMADMDEQTALTHRLTHRLLLITPFEAQMPSESPSDGIWIKPAHLKDYGLPKPLEIYLNGNRLE

SEQ ID NO: 16313 - protein, 416 aa, Neisseria meningitidis; identical to SEQ ID NO: 7240

SEQ ID NO: 16314 - protein, 144 aa, Neisseria meningitidis
VPLPAPCRFAKPAASFLSMALLSCQLSHAATAYIPLNDFQPNCDIRRLGLTQGQHNELRKIRAAFKMAGDRARLKVMHSEHSRRRSVVEIISSDVFNRNEARDYVESRYLSGMDFAVDELEIQHRFFHILTPQQQQMWLSSCLK

SEQ ID NO: 16315 - protein, 149 aa, Neisseria meningitidis; identical to SEQ ID NO: 3543

SEQ ID NO: 16316 - protein, 130 aa, Neisseria meningitidis; identical to SEQ ID NO: 425

SEQ ID NO: 16317 - protein, 78 aa, Neisseria meningitidis; identical to SEQ ID NO: 7083

SEQ ID NO: 16318 - protein, 45 aa, Neisseria meningitidis; identical to SEQ ID NO: 7098

SEQ ID NO: 16319 - protein, 680 aa, Neisseria meningitidis; identical to SEQ ID NO: 7500

SEQ ID NO: 16320 - protein, 453 aa, Neisseria meningitidis; identical to SEQ ID NO: 6561

SEQ ID NO: 16321 - protein, 206 aa, Neisseria meningitidis; identical to SEQ ID NO: 1164

SEQ ID NO: 16322 - protein, 206 aa, Neisseria meningitidis; identical to SEQ ID NO: 320

SEQ ID NO: 16323 - protein, 356 aa, Neisseria meningitidis; identical to SEQ ID NO: 6679

SEQ ID NO: 16324 - protein, 272 aa, Neisseria meningitidis; identical to SEQ ID NO: 7167

SEQ ID NO: 16325 - protein, 407 aa, Neisseria meningitidis; identical to SEQ ID NO: 6500

SEQ ID NO: 16326 - protein, 136 aa, Neisseria meningitidis; identical to SEQ ID NO: 6251

SEQ ID NO: 16327 - protein, 433 aa, Neisseria meningitidis; identical to SEQ ID NO: 7397

SEQ ID NO: 16328 - protein, 507 aa, Neisseria meningitidis
MTVIKQEDFIQSICDAFQFISYYHPKDYIDALYKAWQKEENPAAKDAMTQILVNSRMCAENNRPICQDTGIATVFLKVGMNVQWDADMSVEEMVNEGVRRAYTWEGNTLRASVLADPAGKRQNTKDNTPAVIHMSIVPGGKVEVTCAAKGGGSENKSKLAMLNPSDNIVDWVLKTIPTMGAGWCPPGILGIGIGGTPEKAVLMAKESLMSHIDIQELQEKAASGAELSTTEALRLELFEKVNALGIGAQGLGGLTTVLDVKILDYPTHAASKPIAMIPNCAATRHVEFELDGSGPVELTPPRVEDWPDLTYSPDNGKRVDVDKLTKEEVASWKTGDVLLLNGKILTGRDAAHKRLVDMLNKGEELPVDFTNRLIYYVGPVDPVGDEVVGPAGPTTATRMDKFTRQMLEQTDLLGMIGKSERGVATCEAIADNKAVYLMAVGGAAYLVAKAIKSSKVLAFPELGMEAIYEFEVKDMPVTVAVDSKGESIHATAPRKWQAKIGIIPVES

SEQ ID NO: 16329 - protein, 344 aa, Neisseria meningitidis; identical to SEQ ID NO: 4579

SEQ ID NO: 16330 - protein, 231 aa, Neisseria meningitidis; identical to SEQ ID NO: 2473

SEQ ID NO: 16331 - protein, 366 aa, Neisseria meningitidis; identical to SEQ ID NO: 7307

SEQ ID NO: 16332 - protein, 280 aa, Neisseria meningitidis; identical to SEQ ID NO: 6704

SEQ ID NO: 16333 - protein, 123 aa, Neisseria meningitidis; identical to SEQ ID NO: 616

SEQ ID NO: 16334 - protein, 451 aa, Neisseria meningitidis; identical to SEQ ID NO: 5920

SEQ ID NO: 16335 - protein, 186 aa, Neisseria meningitidis; identical to SEQ ID NO: 1228

SEQ ID NO: 16336 - protein, 383 aa, Neisseria meningitidis; identical to SEQ ID NO: 3357

SEQ ID NO: 16337 - protein, 245 aa, Neisseria meningitidis; identical to SEQ ID NO: 7037

SEQ ID NO: 16338 - protein, 259 aa, Neisseria meningitidis; identical to SEQ ID NO: 6787

SEQ ID NO: 16339 - protein, 659 aa, Neisseria meningitidis
MPKILQQTTLHRFFRANTHHPISPSVLQQAGDLIRWLCFSDGISDFRPCHLKPQNPIGGTVMNTVSNYLSALREAMKAQGLDALVIPSADPHLSEYLPEHWQARRELSGFTGSVGTFVLTTDEAGVWVDSRYWEQAAKQLAGSGIVLQKSGQVPPYNEWLAASLPENAAVGIPSDMVSLTGKRTLAQSLAAKNIRIEHPDNLLNQVWTNRPALPAETVFIHDPDYVSETAAEKLARVRAVMAEKGADYHLVSSLDDIAWLTNLRGSDVPFNPVFVSFLLIGKDNAVLFTDRCRLNAEAAAALQTAGIAVEPYAQVADKLAQIGGVLLIEPNKTAVSTLVRLPESVRLIEGINPSTLFKSCKSEADIARIREAMEHDGAALCGFFAEFEDIIGNGGSLTEIDVDTMLYRHRSVRPGFISLSFDTIAGFNANGALPHYSATPESHSTISGNGLLLIDSGAQYKGGTTDITRVVPVGTPSAEQKSDNTLVLKAHIALAEAVFPENIPSPLIDAICRKPLWQAQCDYGHGTGHGVGYFLNVHEGPQRIAFAAPATPETAMKKGMVTSIEPGLYRPGKWGIRIENLAANQAVAAPQETEFGSFLCFETLTLCPIDTRLMDTALMTDGEIDWVNRYHAEVRRRLEPLTEGAAKAWLIKRTEPLAR

SEQ ID NO: 16340 - protein, 742 aa, Neisseria meningitidis
MRSAVLFIYFFLLNIFLFQPAVIHIQSNYILFMSIVSAPLPALSALIILAHYHGIAANPADIQHEFCTSAQSDLNETQWLLAAKSLGLKAKVVRQPIKRLAMATLPALVWCDDGNHFILAKTDGEGEHAQFLIQDLVTNKSAVLSFAEFSNRYSGKLILVASRASVLGSLAKFDFTWFIPAVIKYRRLFFEVLVVSVVLQLFALITPLFFQVVMDKVLVHRGFSTLDVVSVALLVVSLFEIVLGGLRTYLFAHTTSRIDVELGARLFRHLLSLPLSYFEHRRVGDTVARVRELEQIRNFLTGQALTSVLDLAFSFIFLAVMWYYSSTLTWVVLASLPAYAFWSAFISPILRTRLNDKFARNADNQSFLVESITAVGTVKAMAVEPQMTQRWDNQLAAYVASGFRVTKLAVVGQQGVQLIQKLVTVATLWIGARLVIESKLTVGQLIAFNMLSGQVAAPVIRLAQLWQDFQQVGISVARLGDILNAPTENASSHLALPDIRGEITFEHVDFRYKADGRLILQDLNLRIRAGEVLGIVGRSGSGKSTLTKLVQRLYVPEQGRVLVDGNDLALAAPAWLRRQVGVVLQENVLLNRSIRDNIALTDTGMPLERIIEAAKLAGAHEFIMELPEGYGTVVGEQGAGLSGGQRQRIAIARALITNPRILIFDEATSALDYESERAIMQNMQAICANRTVLIIAHRLSTVKTAHRIIAMDKGRIVEAGTQQELLAKPNGYYRYLYDLQNG

SEQ ID NO: 16341 - protein, 424 aa, Neisseria meningitidis
MPSETSSPRKENETEVHIPAAPFIVKQSGSNALAVCALVLAALGLGTSGFLFVQGQNVLKNQELAFNQKIDKAALGESENAALLKDNLNRQAAIQSELDRLDGNVKANGEQILEMQKSYRELTKGRADWLVDETETILNLAAQQLVLTGNIQTAVGVLEHIDSRLSRFNQAELLPIKQAVSSDLAELKNRPYVDISGTALRLDRLETAVSGLPLMLDGVLKPGVQVKNEAASASWWQNVWEKSLGTLKGLVEIRRLENNDAMLISPEQAYFVRENLRLRLLDARTALMQRNSEVYQGDLNNAEAAVRQYFDAKSPATQSWLKELAELKALDVRMTADDGLKNSLNAVRAYRDGTRMTAAENQEAEQAASEPANEKTASEPAAASDVKTIEAPSLPSERKPEQPAKKQTVPEKAGRSPSAKGERA

SEQ ID NO: 16342 - protein, 305 aa, Neisseria meningitidis; identical to SEQ ID NO: 5961

SEQ ID NO: 16343 - protein, 100 aa, Neisseria meningitidis; identical to SEQ ID NO: 6132

SEQ ID NO: 16344 - protein, 103 aa, Neisseria meningitidis; identical to SEQ ID NO: 2233

SEQ ID NO: 16345 - protein, 157 aa, Neisseria meningitidis; identical to SEQ ID NO: 14248

SEQ ID NO: 16346 - protein, 108 aa, Neisseria meningitidis; identical to SEQ ID NO: 6420

SEQ ID NO: 16347 - protein, 433 aa, Neisseria meningitidis; identical to SEQ ID NO: 6448

SEQ ID NO: 16348 - protein, 270 aa, Neisseria meningitidis
MDKIRVAAVQMVSGVSPETNVAAMKRLVARAAEQGADWVLLPEYWVLMGANDTDKLALAEPLGGGRFQTALSETAKECGVVLFGGTVPLQSCEAGKVMNTLLVYGRDGVRTGLYHKMHLFGFSGLGERYAEADTIRAGGDVPHLSAEGVPVAAGICYDVRFPEFFRRQLPFDVLMLPAAFTHTTGKAHWELLLRARAVENQCYVVAAAQGGLHENGRRTFGHSMIVDPWGDVLDVLPEGEGVVTADIDANRLNSVRNRLPALKYRVLDAV

SEQ ID NO: 16349 - protein, 1392 aa, Neisseria meningitidis; identical to SEQ ID NO: 6989

SEQ ID NO: 16350 - protein, 252 aa, Neisseria meningitidis
MITIRNVSYRIGTHPILDNISLDIPEGGITALIGPNGAGKSTLFSFMARLRPLESGSIAYRGKNLAGTPTAELARTLSILTQENSIMSRITVRDLLMFGRYPYHQGRPTAECRRIVNGAIEEFHLQDFADRYLTELSGGQRQRAMIAMVFCQRTDYVLLDEPLNNLDMYHARSLMQILRRLTDEHKRTTVVVLHDINQAAAYADHVVAMKNGQVAMQGKPDDIFTAANIKTLFDMDVSVLDHQSKKLIVHHI

SEQ ID NO: 16351 - protein, 439 aa, Neisseria meningitidis; identical to SEQ ID NO: 6703

SEQ ID NO: 16352 - protein, 163 aa, Neisseria meningitidis; identical to SEQ ID NO: 6777

SEQ ID NO: 16353 - protein, 331 aa, Neisseria meningitidis; identical to SEQ ID NO: 6104

SEQ ID NO: 16354 - protein, 392 aa, Neisseria meningitidis; identical to SEQ ID NO: 6502

SEQ ID NO: 16355 - protein, 265 aa, Neisseria meningitidis
MLKQRVITAMWLLPLMLGMLFYAPQWLWAAFCGLIALIALWEYARMGGLCKIKTNHYLAATLVFGVVAYAGGWMLPNLVWYVVLAFWLAVMPLWLRFKWRLNGGWQVYAVGWLLVMPFWFALVSLRPHPDDALPLLAVMGLVWVADICAYFSGKAFGKHKIAPAISPGKSWEGAIGGAVCVAVYMTAVRSAGWLAFDTGWFDTVLIGLVLTVVSVCGDLLESWLKRAAGIKDSSKLLPGHGGVFDRTDSLIAVISVYAAMMSVLN

SEQ ID NO: 16356 - protein, 176 aa, Neisseria meningitidis; identical to SEQ ID NO: 7216

SEQ ID NO: 16357 - protein, 392 aa, Neisseria meningitidis; identical to SEQ ID NO: 276

SEQ ID NO: 16358 - protein, 119 aa, Neisseria meningitidis; identical to SEQ ID NO: 7767

SEQ ID NO: 16359 - protein, 303 aa, Neisseria meningitidis; identical to SEQ ID NO: 7319

SEQ ID NO: 16360 - protein, 228 aa, Neisseria meningitidis; identical to SEQ ID NO: 6717

SEQ ID NO: 16361 - protein, 493 aa, Neisseria meningitidis
LDIDHKKSVVTDFRVDGQRFSGRIIEPSIIEHVPTGARSLEKVPVKFTASVSRAGVLAGVGKLARLGAKFSTRAVPYVGTALLAHDVYETFKEDIQAQGYQYDPETDKFVKGYEYSNCLWYEDKRRINRTYGCYGVDSSIMRLMSDDSRFPEVKELMESQMYRLARPFWNWHKEELNKLSSLDWNNFVLNSCTFDWNGGDCVVNKGDDYRNGADFSLIRNSKYKEEMDAKKLEEILSLKVDANPDKYIKETGYPGYSEKVEVAPGTKVNMGPVTDRNGNPVQVVATFGRDSQGNTTVDVQVIPRPDLTPGSAEAPNAQPLPEVSPAENPANNPNPNENPGTSPNPEPDPDLNPDANPDTDGQPGTRPDSPAVPGRTNGRDGKDGKDGKDGGLLCKFFPDILACDRLPESNPAEDLNLPSETVNVEFQKSGIFQDSAQCPAPVTFTVTVLDSSRQFAFSFENACTIAERLRYMLLALAWAVAAFFCIRTVSREV

SEQ ID NO: 16362 - protein, 155 aa, Neisseria meningitidis; identical to SEQ ID NO: 6051

SEQ ID NO: 16363 - protein, 197 aa, Neisseria meningitidis; identical to SEQ ID NO: 7050

SEQ ID NO: 16364 - protein, 531 aa, Neisseria meningitidis; identical to SEQ ID NO: 6220

SEQ ID NO: 16365 - protein, 302 aa, Neisseria meningitidis; identical to SEQ ID NO: 1790

SEQ ID NO: 16366 - protein, 196 aa, Neisseria meningitidis; identical to SEQ ID NO: 6899

SEQ ID NO: 16367 - protein, 93 aa, Neisseria meningitidis; identical to SEQ ID NO: 7287

SEQ ID NO: 16368 - protein, 165 aa, Neisseria meningitidis; identical to SEQ ID NO: 6155

SEQ ID NO: 16369 - protein, 518 aa, Neisseria meningitidis
MDFSWLAEPHTWIGFATLLVLEVVLGIDNLVFVAILANKVQPARRDRARIIGLGLAVVIRIIMLAFMAHIITLTEPLFQIGGLAVSGKDMIMLAGGIFLLYKATTELHERLEGHNRFTVADSQKKHAPFWGVVAQILILDAVFSIDSVITAVAMVDHIVVAMGAVVVAMAVMISASKLLTEFVDRHPTVVMLCLGFLLMIGFSLIAEAFHFHIPKGYLYAAIGFSILIELFNQISQRNSRKNDYIGSSWRKRTAENVLGMMGIRESVLADAGGESGDDAHFEENEKSMIRSVLTLAERPIMGVMIPRRDIERLDISQSREEQCAQLQNTPYSRLLVVGKAGVDEPLGYINKKDLLSQLLETGGLDIQTALRQPLVLPDSTTALGAIELFRQSSADYALVVDEFGAVLGMVTMKDLLETIAGEFPEEFEREEEPAVQGNPDESLTVEGALEYVELAPQLNLPQQEEDADFHTVAGLIMEELQTIPDVGDFADFHGWRFEVVEKEGQRIERVKITKLPEE

SEQ ID NO: 16370 - protein, 287 aa, Neisseria meningitidis
MELNEFLDKAYAVLRRLDAVLPPEPGHTDWNALAFRWQSAGKKGFLEHLPDPHTFPLARLAGVGRQTELLVRNTEQFIAGRPANNVLMSGARGTGKSSLVKALLHEYADKGLRLIEVDKSDLIGLPYLLTLLKERPEKFIVFCDDLSFESGDETYKALKTALDGGLSQRCANVLVYATSNRRHLMPEYFDENAGTTGMRGEIHQKEAVEEKISLSDRFGLWLSFYPFDQNDYLAAVQNWLEDFGVPYDETAQMAALQWAQTRGSRSGRSAWQFACDWAGRLPKQRAL

SEQ ID NO: 16371 - protein, 360 aa, Neisseria meningitidis; identical to SEQ ID NO: 7291

SEQ ID NO: 16372 - protein, 513 aa, Neisseria meningitidis
MTEMQQRAQLHRQIWKIADEVRGAVDGWDFKQYVLGTLFYRFISENFTDYMQAGDSSIDYAAMPDSIITPEIKDDAVKVKGYFIYPGQLFCNIAAEAHQNEELNTKLKEIFTAIESSASGYPSEQDIKGLFDDFDTTSSRLGSTVADKNKRLAAVLKGVAELDFGNFENHHIDLFGDAYEYLISNYAANAGKSGGEFFTPQSVSKLIARLAVHGQEKVNKIYDPACGSGSLLLQAKKQFDEHIIEEGFFGQEINHTTYNLARMNMFLHNVNYNQFHIELGDTLTNPKLKDSKPFDAIVSNPPYSINWIGSDDPTLINDDRFAPAGVLAPKSKADFAFILHALNYLSGRGRAAIVSFPGIFYRGGAEQKIRQYLVEGNYVETVIALAPNLFYGTGIAVNILVLSKHKDNTDIQFIDASGFFKKETNNNVLIEEHIAEIVKLFADKADVPHIAQNAAQQTVKDNGYNLAVSSYVEAEDTREIIDIKQLNAEIGETVAKIERLRREIDEVIAEIEA

SEQ ID NO: 16373 - protein, 114 aa, Neisseria meningitidis; identical to SEQ ID NO: 53

SEQ ID NO: 16374 - protein, 185 aa, Neisseria meningitidis; identical to SEQ ID NO: 5793

SEQ ID NO: 16375 - protein, 418 aa, Neisseria meningitidis; identical to SEQ ID NO: 7440

SEQ ID NO: 16376 - protein, 46 aa, Neisseria meningitidis; identical to SEQ ID NO: 7519

SEQ ID NO: 16377 - protein, 394 aa, Neisseria meningitidis; identical to SEQ ID NO: 6363

SEQ ID NO: 16378 - protein, 389 aa, Neisseria meningitidis; identical to SEQ ID NO: 1971

SEQ ID NO: 16379 - protein, 141 aa, Neisseria meningitidis
LWLLRALTAKLPQQRYAALFITLFFAAVLVFGRHDSMYWYPVLVNLMMLAVFGGSLFAGQTVIEKLARLQQPDLPEKAVRYTRRVTQVWCVFFIINGTLAALLARLGRYDWWAVYTGVIAYVLMGMLFAGEWLYRKLVLKV

SEQ ID NO: 16380 - protein, 119 aa, Neisseria meningitidis; identical to SEQ ID NO: 2176

SEQ ID NO: 16381 - protein, 299 aa, Neisseria meningitidis; identical to SEQ ID NO: 7158

SEQ ID NO: 16382 - protein, 119 aa, Neisseria meningitidis; identical to SEQ ID NO: 6447

SEQ ID NO: 16383 - protein, 231 aa, Neisseria meningitidis; identical to SEQ ID NO: 6931

SEQ ID NO: 16384 - protein, 488 aa, Neisseria meningitidis; identical to SEQ ID NO: 3695

SEQ ID NO: 16385 - protein, 704 aa, Neisseria meningitidis; identical to SEQ ID NO: 7337

SEQ ID NO: 16386 - protein, 231 aa, Neisseria meningitidis; identical to SEQ ID NO: 2520

SEQ ID NO: 16387 - protein, 166 aa, Neisseria meningitidis; identical to SEQ ID NO: 1498

SEQ ID NO: 16388 - protein, 503 aa, Neisseria meningitidis; identical to SEQ ID NO: 7015

SEQ ID NO: 16389 - protein, 253 aa, Neisseria meningitidis; identical to SEQ ID NO: 5921

SEQ ID NO: 16390 - protein, 180 aa, Neisseria meningitidis
VNMAASVRILGIDPGSRVTGFGVIDVRGRDHFYVASGCIKTPADAPLADRIAVIVRHIGEVVTVYKPQQAAVEQVFVNVNPASTLMLGQARGAALAALVSHKLPVSEYTALQVKQAVVGKGKAAKEQVQHMVVQMLGLSGTPQPDAADGLAVALTHALRNHGLAAKLNPSGMQVKRGRFQ

SEQ ID NO: 16391 - protein, 339 aa, Neisseria meningitidis; identical to SEQ ID NO: 7616

SEQ ID NO: 16392 - protein, 232 aa, Neisseria meningitidis
VQADLAYAAERITHDYPKATGTDKDKISTVSDYFRNIRAHSIHPRVSVGYDFGGWRIAADYASYRKWNNNKYSVNTKELQKNNSSGIWQELKTENQENGTFHAASSLGLSAIYDFKLNDKFDKFKPYIGARVAYGHVKHQVHSVRKETTTTFSPPAQGATVPGKIVQGPTNKPAYHESNSISSLGLGVIAGVGFDITPKLTLDTGYRYHNWGRLENTRFKTHEVSLGMRYHF

SEQ ID NO: 16393 - protein, 306 aa, Neisseria meningitidis; identical to SEQ ID NO: 6578

SEQ ID NO: 16394 - protein, 337 aa, Neisseria meningitidis; identical to SEQ ID NO: 6882

SEQ ID NO: 16395 - protein, 154 aa, Neisseria meningitidis; identical to SEQ ID NO: 9513

SEQ ID NO: 16396 - protein, 192 aa, Neisseria meningitidis; identical to SEQ ID NO: 5124

SEQ ID NO: 16397 - protein, 324 aa, Neisseria meningitidis
MIAKHIDRFPLLKLDRVIDWQLIEQYLNRQKTRYLRDHRGRPAYPLLSMFKAVLLGQWHSLSDPELEHSLITRIDFNLFCRFDELSIPDYSTLCRYRNRLAQDNTLSELLELINRQLTEKGLKIEKASAAVVDATIIQTAGSKQRQAIEVDEEGQISGQTTPSKDSDARWIKKNGLYKLGYKQHTRTDAEGYIEKLHITPANAHECKHLSPLLEGLPKGTTVYADKGYDSAENRQHLEEHQLLDGIMRKAHRNRPLTEVQTKRNRYLSKTRYVVEQSFGTLHRKFRYARAAYFGLVKVSAQSHLKAMCLNLLKAANRLSAPAAA

SEQ ID NO: 16398 - protein, 766 aa, Neisseria meningitidis; identical to SEQ ID NO: 6920

SEQ ID NO: 16399 - protein, 427 aa, Neisseria meningitidis; identical to SEQ ID NO: 146

SEQ ID NO: 16400 - protein, 293 aa, Neisseria meningitidis
MSRRAAEADIAGVVAFIRSRGLREHISHGDERTVIGAIGDDRVLSVREVQTLPEVEKAVRILDTWKTVSRENRAEDSRVAAKGVAFGGGETVRIAAEPSVWRNADAVFLDPFFTSANLYDTSSADEGRGRCRRLAEQTASAHDAGKPVLVRVRNVRHVEAALNAGADILYLGGGLMSDLAVLNEAGNLNIPLVLCKDKHHSAEDWLNAAEYVVSRGNRHLILGESGVLNHTKGHPYRLDVESIVKVRQISHLPVIANITGLWNRDMPQEILYGLAKAAGACGIVGTCFEKSGG

SEQ ID NO: 16401 - protein, 74 aa, Neisseria meningitidis; identical to SEQ ID NO: 2281

SEQ ID NO: 16402 - protein, 792 aa, Neisseria meningitidis
MKPLQMLPIAALLGSIFGNPVFAADEAATETTPVKAEVKAVRVKGQRNAPAAVERVNLNRIKQEMIRDNKDLVRYSTDVGLSDSGRHQKGFAIRGVEGNRVGVSIDGVNLPDSEENSLYARYGNFNSSRLSIDPELVRNIDIVKGADSFNTGSGALGGGVNYQTLQGRDLLLPERQFGVMMKNGYSTRNREWTNTLGFGVSNDRVDAALLYSQRRGHETESAGKRGYPVEGAGSGANIRGSARGIPDPSQHKYHSFLGKIAYQINDNHRIGASLNGQQGHNYTVEESYNLLASYWREADDVNRRRNTNLFYEWTPESDRLSMVKADVDYQKTKVSAVNYKGSFPTNYTTWETEYHKKEVGEIYNRSMDTTFKRITLRMDSHPLQLGGGGRHRLSFKTFAGQRDFENLNRDDYYFSGRVVRTTNSIQHPVKTTNYGFSLSDQIQWNDVFSSRAGIRYDHTKMTPQELNADCHACDKTPPAANTYKGWSGFVGLAAQLSQTWRLGYDVTSGFRVPNASEVYFTYNHGSGTWKPNPNLKAERSTTHTLSLQGRGDKGTLDANLYQSNYRNFLSEEQNLTVSGTPGCTEEDAYYYRCSDPYKEKLDWQMKNIDKARIRGIELTGRLNVDKVASFVPEGWKLFGSLGYAKSKLSGDNSLLSTQPLKVIAGIDYESPSEKWGVFSRLTYLGAKKVKDAQYTVYENKGWGTPLQKKVKDYPWLNKSAYVFDMYGFYKPAKNLTLRAGVYNLFNRKYTTWDSLRGLYSYSTTNAVDRDGKGLDRYRAPGRNYAVSLEWKF

SEQ ID NO: 16403 - protein, 243 aa, Neisseria meningitidis
LQDRTGQKVPSVVFRTRVGDTWKDVSTDDLFKGKKVVVFSLPGAFTPTCSSSHLPRYNELFGAFKENGVDAICCVSVNDTFVMNAWSAEEESDNIYMIPDGNGEFTEGMGMLVGKEDLGFGKRSWRYSMLVNDGVVEKMFIEPEEPGDPFKVSDADTMLQFVAPDWKAQESVAIFTKPGCQFCAKAKQALQDKGLSYEEIVLGKDATVTSVRAITGKMTAPQVFIGGKYIGGSEDLEAYLAKN

SEQ ID NO: 16404 - protein, 408 aa, Neisseria meningitidis; identical to SEQ ID NO: 1777

SEQ ID NO: 16405 - protein, 259 aa, Neisseria meningitidis; identical to SEQ ID NO: 9318

SEQ ID NO: 16406 - protein, 322 aa, Neisseria meningitidis; identical to SEQ ID NO: 7028

SEQ ID NO: 16407 - protein, 160 aa, Neisseria meningitidis; identical to SEQ ID NO: 6213

SEQ ID NO: 16408 - protein, 135 aa, Neisseria meningitidis; identical to SEQ ID NO: 803

SEQ ID NO: 16409 - protein, 480 aa, Neisseria meningitidis
MHPTYSAVQARLLEANRLSPELLAKSLCIIGAHHVDYADIYCQRTAYESWHLEEGIVKSGSFQINQGVGVRAVSGDKTAFAYADSLCIDSINRSARAVRAIGAAGGKVSAKMPSETRGKPVCSASDPIAGLDSAAKVALLNKVEAIAKAADPRIVQVMAGLTCEYDMVYLARLDGKHAADIRPMVRLNVTVIAKQGERREQGSAGGGGRYDLAYFDENLVHRFVDAAVKQALTNLESRPAPAGEMTVVLGNGWPGVLLHEAVGHGLEGDFNRKGTSVFSGRIGERVAAKGVTVVDQGDIAGRRGSLNIDDEGNETRRTVLIEDGILVGYMQDETNARLTGTQSTGNGRRESYASAPMPRMTNTFMENGSYEPEEIIASIDKGIYAVNFGGGQVDITSGKFVFSASEAWWVEGGRLQYPVKGATIIGNGPEVLKHVSMIGNDTALDSGVGVCGKEGQSVPVGVGQPTLRIDAGLTVGGSAI

SEQ ID NO: 16410 - protein, 48 aa, Neisseria meningitidis; identical to SEQ ID NO: 6016

SEQ ID NO: 16411 - protein, 524 aa, Neisseria meningitidis
MKKSFLTLVLYSSLLTASEIAYRFVFGIETLPAAKIAETFALTFVIAALYLFARYKVTRLLIAVFFAFSIIANNVHYAVYQSWMTGINYWLMLKEVTEVGSAGASMLDKLWLPVLWGVLEVMLFCSLAKFRRKTHFSADILFAFLMLMIFVRSFDTKQEHGISPKPTYSRIKANYFSFGYFVGRVLPYQLFDLSRIPAFKQPAPSKIGQGSVQNIVLIMGESESAAHLKLFGYGRETSPFLTRLSQADFKPIVKQSYSAGFMTAVSLPSFFNAIPHANGLEQISGGDTNMFRLAKEQGYETYFYSAQAENEMAILNLIGKKWIDHLIQPTQLGYGNGDNMPDEKLLPLFDKINLQQGKHFIVLHQRGSHAPYGALLQPQDKVFGEADIVDKYDNTIHKTDQMIQTVFEQLQKQPDGNWLFAYTSDHGQYVRQDIYNQGTVQPDSYLVPLVLYSPDKAVQQAANQAFAPCEIAFHQQLSTFLIHTLGYDMPVSGCREGSVTGNLITGDAGSLNIRDGKAEYVYPQ

SEQ ID NO: 16412 - protein, 720 aa, Neisseria meningitidis
MQQKIRFQIEGMTCQACASRIEKVLNKKDFVESAGVNFASEEAQVVFDDSKTSVADIAKIIEKTGYGAKEKTEDTLPQPEAEHHIGWRLWLLFTINVPFLIGMAGMMIGRHDWMIPPLWQFALASVVQLWLAIPFYKSAWASIKGGLANMDVLVTIGTVSIYLYSVYMLFFSPHAAYGMAHVYFEVGVMVIGFVSLGKFLEHRTKKSSLNSLGLLLKLTPTQVNVQRNGEWKQLPIDQVQIGDLIRANHGERIAADGIIESGSGWADESHLTGESNPEEKKAGGKVLAGALMTEGSVVYRATQLGSQTQLGDMMNALSEAQGSKAPIARVADKAAAVFVPAVVGIALLTFIVTWLIKGDWTVALMHAVAVLVIACPCALGLATPAAIMVGMGKAVKHGIWFKDAAAMEEAAHVDAVVLDKTGTLTEGSPQVAAVYCVPDSGFDEDALYRIAAAVEQNAAHPLARAIVSAAQARGLDIPAAQNAQTVVGAGITAEVEGVGLVKAGKAEFAELALPKFLDGVWDIASIVAVSVDNKPIGAFALADALKADTAEAIGRLKKHNIDVYIMSGDNQGTVEYVAKQLGIAHAFGNMSPRDKAAEVQKLKAAGKTVAMVGDGINDAPALAAANVSFAMKGGADVAEHTASATLMQHSVNQLADALLVSQATLKNIKQNLFFAFFYNILGIPLAALGFLNPVIAGAAMAASSVSVLSNALRLKRVKID

SEQ ID NO: 16413 - protein, 769 aa, Neisseria meningitidis
MLAPELEQILQQLYREARKAHYEFISLEHLLLVLIEEDASVHNVLKLCGADLKVVSEQLAASVAENTPLIPEHLLDTVETRPTLGFQRVMQRAMVHTQSAGKAAVEPLDVLVALMSETDSHTVYFLKLQSVTRFEVLRCIAHGSPDEDEDEDEDEDDGNYSSDGMDDDNGNRTKPGKNPLSAYTVNLNAEVKAGRIDPLIGRKHEMERLVQILCRRRKNNPLLVGEAGVGKTALAEGLAHQIVNGGIPDALKDAEVYALDMGSLLAGTKYRGDFEARVKSVLKQLEKIPHAILFIDEIHTIIGAGSTSGGTMDASNLLKPALAKGSLRCIGATTYDEYRTIFDKDHALSRRFQKIDVVEPTVSETVQILRGLKPMFEAFHQVRYTQGALEAAAELSARYINERFLPDKAIDVMDEAGAAQRILPKSKQKKVIGKAQIETVIAKVARIPEKTVSHDDKQVLQFLGRDLKNMVYGQENAIDALVAAVKMSRSGLALPDKPIGSFLFSGPTGVGKTEVAKQLAYSMGVPLQRFDMSEYMERHAVSRLIGAPPGYVGFEQGGLLTEAINKQPHCVLLLDEIEKAHPDIFNVLLQVMDAGKLTDNNGKSADFRNVILIMTTNAGAESLSRPSLGFTAKRERGDEMQAINKLFTPEFRNRLDAIIPFAPLSEPVITKVVDKFLLQLEHRLLDKKVEAEFTSALHKYLAEKGFDPQMGARPMHRLIQEKIRKPLADELLFGKLSDGGFVRIDWDAAKEEAVLKFKKSKVKIKTASA

SEQ ID NO: 16414 - protein, 384 aa, Neisseria meningitidis
MTETTQTPTLKPKKSVALSGVAAGNTALCTVGRTGNDLSYRGYDILDLAQKCEFEEVAHLLIHGHLPNKFELAAYKTKLKSMRGLPIRVIKVLESLPAHTHPMDVMRTGVSMLGCVHPERESHPESEARDIADKLIASLGSILLYWYQYLHNGKRIEVESDEETIGGHFLQLLHGKRPSESHIKAMHVSLILYAEHEFNASTFTARVIAGTGSDMYSSITGAIGALKGPKHGGANEVAYDIQKRYRNADEAEADIRERIGRKEIVIGFGHPVYTISDPRNVVIKEVARGLSKETGDMRLFDIAERLESVMWEEKKMFPNLDWFSAVSYQKLGVPTAMFTPLFVISRTTGWSAHVLEQRKDGKIIRPSANYTGPEDLAFVEIEER

SEQ ID NO: 16415 - protein, 183 aa, Neisseria meningitidis; identical to SEQ ID NO: 7636

SEQ ID NO: 16416 - protein, 362 aa, Neisseria meningitidis; identical to SEQ ID NO: 7228

SEQ ID NO: 16417 - protein, 347 aa, Neisseria meningitidis; identical to SEQ ID NO: 6678

SEQ ID NO: 16418 - protein, 1568 aa, Neisseria meningitidis; identical to SEQ ID NO: 9504

SEQ ID NO: 16419 - protein, 186 aa, Neisseria meningitidis
MNRLLLLSAAVLLTACGSGETDKIGRASTVFNILGKNDRIEVEGFDDPDVQGVACYISYAKKGGLKEMVNLEEDASDASVSCVQTASSISFDETAVRKPKEVFKHGASFAFKSRQIVRYYDPKRKTFAYLVYSDKIIQGSPKNSLSAVSCFGGGIPQTDGVQADTSGNLLAGACMISNPIENLDKR

SEQ ID NO: 16420 - protein, 189 aa, Neisseria meningitidis; identical to SEQ ID NO: 7754

SEQ ID NO: 16421 - protein, 427 aa, Neisseria meningitidis; identical to SEQ ID NO: 7408

SEQ ID NO: 16422 - protein, 752 aa, Neisseria meningitidis
MYTRIMEISPWTLRSAKLEKEHKRLQESLTSLGNGYMGMRGSFEETYSADSHLGTYIAGVWFPDKTRVGWWKNGYPKYFGKAINAFNFSKVKIFVDGQEVDLAKNDVAGFSVELDMQHGVLRRSFTVFGVRFNVCKFLSVAQKELAVIRWEAVSVDGKTHQVRIDSIIDADVKNEDSNYEEKFWQVLDKGVSDSLSYIAAQTVANPFGVEQFIVNAEQTFAGSFKALGGSQTDWQVSNSFESEVGSTPETFEKRVIVTTSRDYQSLEAVKAAGRALSEKIAGVAFETLLDAHKAGWLHRWEIADVVIEGSDEAQQGIRFNLFQLFSTYYGEDARLNIGPKGFTGEKYGGATYWDTEAYAVPLYLALAEPEVTRNLLQYRRNQLPQAQHNAREQGLAGALYPMVTFTGIECHNEWEITFEEIHRNGAIPYAIYNYTNYTGDEGYLAKEGLEVLVEVSRFWADRVHFSKRNGKYMIHGVTGPNEYENNINNNWYTNTLAAWVLDYTREALAKYPRPDLNVRAAELEKWADISANMYRPHDEELGVFVQHDGFLDKDIRPVSALSPDDLPLNQKWSWDKILRSPFIKQADVLQGIYFFGDRFNIDEKRRNFDFYEPMTVHESSLSPCIHSILAAELGKEEKAVEMYRRTARLDLDNYNNDTEDGLHITSMTGSWLAIVQGFAQMKTWGGTLSFAPFLPGAWTGYAFHINYRGRLIKVAVGKENVVFTLLKGEPLDLQVYGKDITLDGSHAAALEK

SEQ ID NO: 16423 - protein, 460 aa, Neisseria meningitidis; identical to SEQ ID NO: 6166

SEQ ID NO: 16424 - protein, 274 aa, Neisseria meningitidis; identical to SEQ ID NO: 450

SEQ ID NO: 16425 - protein, 284 aa, Neisseria meningitidis; identical to SEQ ID NO: 6022

SEQ ID NO: 16426 - protein, 158 aa, Neisseria meningitidis; identical to SEQ ID NO: 871

SEQ ID NO: 16427 - protein, 237 aa, Neisseria meningitidis; identical to SEQ ID NO: 7292

SEQ ID NO: 16428 - protein, 280 aa, Neisseria meningitidis; identical to SEQ ID NO: 5980

SEQ ID NO: 16429 - protein, 343 aa, Neisseria meningitidis
MGIKVAINGYGRIGRQVLRAIYDYQIQDQLQIVAVNASGSLETNAHLTKFDTVHGRFEADVSHDGGNLIVNGDKIPFFSTRNPAELPWKELGVDLVMECTGAFTSKEKAKVHLESGAKKVLISAPGGDDVDATVVYGVNDSVLTADMTVVSNASCTTNCLSPVAKVLSESVGIVKGAMTTIHALTNDQTVTDVRHKDLRRARSGVENMIPTKTGAAKAVGLVLPELKGRLDGLAIRVPTVNVSLVDLSFQAAHDTTVEEINALMKAASEAGALKGVLGYNTLPLVSMDFNHTTEASHFDATLTKVVDGNMIKVFAWYDNEWGFSCQMLNTARRMFGLEVRPLK

SEQ ID NO: 16430 - protein, 151 aa, Neisseria meningitidis; identical to SEQ ID NO: 4206

SEQ ID NO: 16431 - protein, 226 aa, Neisseria meningitidis; identical to SEQ ID NO: 7580

SEQ ID NO: 16432 - protein, 71 aa, Neisseria meningitidis
VFKLGVYTCLGLFAGWVLLLIVQLWFSFLEAELFFKITLTMAGLFVIILAALLVCGQYFSEKKMKDDGFIN

SEQ ID NO: 16433 - protein, 412 aa, Neisseria meningitidis; identical to SEQ ID NO: 2406

SEQ ID NO: 16434 - protein, 215 aa, Neisseria meningitidis; identical to SEQ ID NO: 6186

SEQ ID NO: 16435 - protein, 428 aa, Neisseria meningitidis; identical to SEQ ID NO: 5940

SEQ ID NO: 16436 - protein, 335 aa, Neisseria meningitidis; identical to SEQ ID NO: 7558

SEQ ID NO: 16437 - protein, 257 aa, Neisseria meningitidis; identical to SEQ ID NO: 1404

SEQ ID NO: 16438 - protein, 119 aa, Neisseria meningitidis
MYFVDRTAVVLKPTVRFLEWLKSTDENMPDLTIEQLRANCSVFLVPQFDEPEAVVSYFDERYRQIFEAELAGWDIDKDKWPQDMGLKAFWEFFDIEIHDMVLDMEEAELNITPVFDNMM

SEQ ID NO: 16439 - protein, 95 aa, Neisseria meningitidis; identical to SEQ ID NO: 3028

SEQ ID NO: 16440 - protein, 282 aa, Neisseria meningitidis; identical to SEQ ID NO: 1327

SEQ ID NO: 16441 - protein, 346 aa, Neisseria meningitidis; identical to SEQ ID NO: 7429

SEQ ID NO: 16442 - protein, 74 aa, Neisseria meningitidis; identical to SEQ ID NO: 7387

SEQ ID NO: 16443 - protein, 246 aa, Neisseria meningitidis; identical to SEQ ID NO: 2993

SEQ ID NO: 16444 - protein, 477 aa, Neisseria meningitidis; identical to SEQ ID NO: 6184

SEQ ID NO: 16445 - protein, 316 aa, Neisseria meningitidis; identical to SEQ ID NO: 6852

SEQ ID NO: 16446 - protein, 119 aa, Neisseria meningitidis; identical to SEQ ID NO: 7155

SEQ ID NO: 16447 - protein, 228 aa, Neisseria meningitidis; identical to SEQ ID NO: 6168

SEQ ID NO: 16448 - protein, 143 aa, Neisseria meningitidis
LDKQIDNHTHTHFDGKAQVAEQIKGIGSITTATLMAMLPELGRLSHKRIASLVGIAPHPRESGETKFKSRCFGGRSAVRKALYMATVAATRFEPLIRDFYQRLPSEGKPYKVAVTACMRKLLTISNARMRDYFAENDTAENGI

SEQ ID NO: 16449 - protein, 671 aa, Neisseria meningitidis; identical to SEQ ID NO: 7338

SEQ ID NO: 16450 - protein, 61 aa, Neisseria meningitidis; identical to SEQ ID NO: 2615

SEQ ID NO: 16451 - protein, 367 aa, Neisseria meningitidis; identical to SEQ ID NO: 6599

SEQ ID NO: 16452 - protein, 626 aa, Neisseria meningitidis; identical to SEQ ID NO: 7301

SEQ ID NO: 16453 - protein, 221 aa, Neisseria meningitidis; identical to SEQ ID NO: 7751

SEQ ID NO: 16454 - protein, 90 aa, Neisseria meningitidis
LKLALKRSGKYNVYDPLALDLDGDGIETVATKGFSGSLFDHTNNGIRTATGWIAAYDGFPVRKLNSNGGIISTTDTIFQSLHTWLDHQPR

SEQ ID NO: 16455 - protein, 404 aa, Neisseria meningitidis; identical to SEQ ID NO: 6811

SEQ ID NO: 16456 - protein, 178 aa, Neisseria meningitidis; identical to SEQ ID NO: 1654

SEQ ID NO: 16457 - protein, 489 aa, Neisseria meningitidis; identical to SEQ ID NO: 1073

SEQ ID NO: 16458 - protein, 352 aa, Neisseria meningitidis; identical to SEQ ID NO: 6670

SEQ ID NO: 16459 - protein, 81 aa, Neisseria meningitidis; identical to SEQ ID NO: 6821

SEQ ID NO: 16460 - protein, 321 aa, Neisseria meningitidis
MLRLTALTLCTVLALGACSPKDSDSAPQAKEQAVSAAQSEGASVTVKTARGDVQIPQNPERIAVYDLGMLDTLSKLGVKTGLSVDKNLLPYLDEYFKTTKPAGTLFEPDYEALNAYKPQLIIIGSRAAKAFDKLNAIAPTIEMTADTANLKESAKERIDALAQIFGKQAEADKLKAEIDASFEAAKTAAQGKGKGLVILVNGGKMSAFGPSSRLGGWLHKDIGVPAVDESIKEGSHGQPISFEYLKEKNPDWLFVLDRSAAIGEEGQAAKDVLDNPLVAETTAWKKGQVVYLVPETYLAAGGAQELLNASKQVADAFNAAK

SEQ ID NO: 16461 - protein, 268 aa, Neisseria meningitidis; identical to SEQ ID NO: 6520

SEQ ID NO: 16462 - protein, 230 aa, Neisseria meningitidis; identical to SEQ ID NO: 1058

SEQ ID NO: 16463 - protein, 138 aa, Neisseria meningitidis; identical to SEQ ID NO: 7472

SEQ ID NO: 16464 - protein, 315 aa, Neisseria meningitidis
MTDITPFANRLGKNIKHLMKWAKRNGIEAWRIYDRDIPQFPFAADVYGDRIHLQEYDTGWLMRPEEYEAWLAEVLEAVAFVTGFAPEQIRLKRRERQKGLQQYEKTGKAGDDFVITENGRKFWVNLDKYLDTGLFLDHRNTRKKVGETAAGKRFLNLFSYTGSFTVYAATGGAASSETVDLSNTYLDWAKRNFELNGIDTERHKIVRADVFQYLQTAYGEGRRFDLIVMDPPSFSNSKKMSDILDIQRDHKKLIDGAVKLLASDGILYFSNNLRSFVLDDLVSEQYAVKDISKQSVPEDFSNKKIHRCWEIRHKS

SEQ ID NO: 16465 - protein, 590 aa, Neisseria meningitidis; identical to SEQ ID NO: 7471

SEQ ID NO: 16466 - protein, 510 aa, Neisseria meningitidis
MCCSLSFAEPARIDDRIIKFRPSKLKFFESTGYRKINNEFSKFTEAANVEHIPTGAKARINAKITASVSRAAVLSGVGKLARLGAKLSTRAVPYVGTALLAHDVYETFKEDIQAQGYQYDPETDKFVKGYEYSNCLWYEDKRRINRTYGCYGVDSSIMRLMSDDSRFPEVKELMESQMYRLARPFWNWHKEELNKLSSLDWNNFVLNRCTFNWNGGDCLVNKGDDFRNGADFSLIRNSKYKEEMDAKKLEEILSLKVDANPDKYIKATGYPGYSEKVEVAPGTKVNMGPVTDRNGNPVQVVATFGRDSQGNTTVDVQVIPRPDLTPGSAEAPNAQPLPEVSPAENPANNPNPNENPGTSPNPEPDPDLNPDANPDTDGQPGTRPDSPAVPGRTNGRDGKDGKDGKDGGLLCKFFPDILACDRLPESNPAEDLNLPSETVNVEFQKSGIFQDSAQCPAPVTFTVTVLDSSRQFAFSFENACTIAERLRYMLLALAWAVAAFFCIRTVSREV

SEQ ID NO: 16467 - protein, 260 aa, Neisseria meningitidis
MKTKLIKILTPFTVLPLLACGQTPVSNANAEPAVKAESAGKSVAASLKARLEKTYSAQDLKVLSVSETPVKGIYEVVVSGRQIIYTDAEGGYMFVGELINIDTRKNLTEERAADLNKIDFASLPLDKAIKEVRGNGKLKVAVFSDPDCPFCKRLEHEFEKMTDVTVYSFMMPIAGLHPDAARKAQILWCQPDRAKAWTDWMRKGKFPVGGSICDNPVAETTSLGEQFGFNGTPTLVFPNGRSQSGYSPMPQLEEIIRKNQ

SEQ ID NO: 16468 - protein, 114 aa, Neisseria meningitidis; identical to SEQ ID NO: 402

SEQ ID NO: 16469 - protein, 491 aa, Neisseria meningitidis; identical to SEQ ID NO: 6221

SEQ ID NO: 16470 - protein, 615 aa, Neisseria meningitidis; identical to SEQ ID NO: 6760

SEQ ID NO: 16471 - protein, 478 aa, Neisseria meningitidis
MPLLSVEFALFFLAFLPIYWGLAKYPSVQNLLLLAAGMGWLYHIGPVFAAIIVLYSSCVYLLGELLRSDRENTRRFWLGCGIAASLTVLGFFKYFDFFRPMIAQYAGKGGAIDILMPLGLSYYTFQSLAYLVYCFRAPHAARFSWHELLLHLSFFPTVTSGPIIRAAAFKSADGEQAGALAQIRTRRARSPVRPALAVSLILLGIAKKWWLAGMLAENWVSPVFENPAQFDGWGVLGGVYGYTFQLFLDFSGYSDLVIGMAMLLGFRLPKNFSAPLRALNIRAFWDKWHISLSTWIRDYIYIPLGGSKKGFLRTQLNLMAAMVLSGIWHGYGWNFLIWGALHGTALVLLNTGDRYFGRDALCRLKYFAPLSWLITFHFVCLSFVVFNTANPDDAGAVFSALFANANGWNAPQQANMLLLASFASVMLLYPYLQRAFDGAVKGLEKIPMWLWFIPVSAVLLLIIVLAPSGIPGFIYANF

SEQ ID NO: 16472 - protein, 299 aa, Neisseria meningitidis; identical to SEQ ID NO: 5911

SEQ ID NO: 16473 - protein, 218 aa, Neisseria meningitidis; identical to SEQ ID NO: 6976

SEQ ID NO: 16474 - protein, 630 aa, Neisseria meningitidis; identical to SEQ ID NO: 6844

SEQ ID NO: 16475 - protein, 173 aa, Neisseria meningitidis; identical to SEQ ID NO: 7165

SEQ ID NO: 16476 - protein, 157 aa, Neisseria meningitidis; identical to SEQ ID NO: 5983

SEQ ID NO: 16477 - protein, 291 aa, Neisseria meningitidis; identical to SEQ ID NO: 2244

SEQ ID NO: 16478 - protein, 285 aa, Neisseria meningitidis
MLKHIAQTHRKRLIGTFSLVGLENLLMLVYPVFGGRAINAVIAGEVWQALLYALVVLLMWLVGAVRRIADTRTFTRIYTEIAVPVVLEQRQRQVPHSAVTARVALSREFVSFFEEHLPIAATSVVSIFGACIMLLVLEFWVGVSAVGILALFLWLLPRFAAISENLYFRLNNSLERDNHFIRKGDRRQLYRHYGLLARLRVLISNREAFGYLCVGTAMGILFGFAFVMMTLKGYSSAGHVYSVGTYLWMFAMSLDDVPRLVEQYSNLKDIGQRIEWSERNIKAGT

SEQ ID NO: 16479 - protein, 300 aa, Neisseria meningitidis; identical to SEQ ID NO: 7436

SEQ ID NO: 16480 - protein, 311 aa, Neisseria meningitidis
MGHNMMTTQKWYEHITNVIIGNTANFNSGCLDSIDYVDERKGVPLAAMQHIFMDVRAAASHAYLFEHDLKKFKQYAYVAGKLGVLLSVNSTDPEPFFFPCDMLNIQNPMFLMLMSDSPQLREFLVRNIDNIANDTEAFINRYDLNRHMIYNTLLMVEGKQLDRLKQRSEKVLAHPTPSKWLQKRLYDYRFFLAFAEQDAEAMKAALEPLFDKKTARMAAKETLSYFDFYLQPQIVTYAKIASMHGFDLGIDQEIAPRDLIVYDPLPADEYQDIFDFMKQYDLSYPYEYLQDWIDYYTFKTDKLVFGNAKRE

SEQ ID NO: 16481 - protein, 333 aa, Neisseria meningitidis
MKRKIWLLPLLAVSAYLQAQTEVRLAVHKSFSLPKGLIARFERANDAKVSIIQAGGANEMLNKLILSRANPIADAVYGLDNANIGKAREMGILAAAQPESAPVAVGLPSALAVDYGYVSINYDKKWFEGKKLPLPQTLQDLTRPEYKNLLVVPSPATSSPGLGFLMANISGLGEESAFKWWAQMRQNGVKVAKGWSEAYYTDFSHNGGAYPLVVGYAASPAAEVYFSKGKYSEPPTGNLFLKGGVFRQVEGAAVLKGAKQPELAAKLVQWLQSREVQQAVPSEMWVYPAVKNTRLPDVFRFAQAPTHTTAPAQRDIDANQRGWVSRWIRTVLK

SEQ ID NO: 16482 - protein, 85 aa, Neisseria meningitidis; identical to SEQ ID NO: 6553

SEQ ID NO: 16483 - protein, 361 aa, Neisseria meningitidis
MMENALRLAALGRFSTSPNPRVGCVIAHGSQIVGQGFHVKAGEPHAEVHALRQAGEMAQGATAFVTLEPCSHYGRTPPCAEALVRAGVSRVVAAMRDPNPLVAGKGLALLEAAGIKTECGLLEHQARELNRGFLSRIERRRPFVRLKCAVSLDGKTALSDGSSFWITGEDARADVQVLRAESCAVLTGIGTVLADNPRLNVRAFPTLRQPARIVLDSRLRLPPNSHLVTDGQSPTYIATLERNEDRLHPYREHAHVRILMPSETADSKIDLHHLMRLLADEGFGEIMVEAGSELTSAFLAENLADEIVLYRSPKILGSGKDLFSLLENRAALSAPPLWTPVSSEILGHNIKTVFRKNGNAF

SEQ ID NO: 16484 - protein, 222 aa, Neisseria meningitidis
MLPSKYEDNALQIKEKSTERTAPFFVLEVTARSAADILGIHPNSAALFYRKIRTVINHHLALAADEVFEGPVEPDESDFGGRRKGRRGRGAAGKVVVFGILKRNGRVYTVVVDNAKSETLLPVIKKKIMPDSIVYTDSLSSCDKLDVSGFIHYRINHSKEFADRQNHINGIENFWNQAKRVLRKYNGIDRKSFPLFLKECEFRFNFGTPSQQLKILRDWCGI

SEQ ID NO: 16485 - protein, 76 aa, Neisseria meningitidis; identical to SEQ ID NO: 374

SEQ ID NO: 16486 - protein, 741 aa, Neisseria meningitidis; identical to SEQ ID NO: 7685

SEQ ID NO: 16487 - protein, 99 aa, Neisseria meningitidis; identical to SEQ ID NO: 7743

SEQ ID NO: 16488 - protein, 259 aa, Neisseria meningitidis; identical to SEQ ID NO: 588

SEQ ID NO: 16489 - protein, 363 aa, Neisseria meningitidis; identical to SEQ ID NO: 6903

SEQ ID NO: 16490 - protein, 378 aa, Neisseria meningitidis; identical to SEQ ID NO: 6098

SEQ ID NO: 16491 - protein, 791 aa, Neisseria meningitidis; identical to SEQ ID NO: 6424

SEQ ID NO: 16492 - protein, 184 aa, Neisseria meningitidis; identical to SEQ ID NO: 7213

SEQ ID NO: 16493 - protein, 467 aa, Neisseria meningitidis; identical to SEQ ID NO: 7547

SEQ ID NO: 16494 - protein, 363 aa, Neisseria meningitidis; identical to SEQ ID NO: 7257

SEQ ID NO: 16495 - protein, 264 aa, Neisseria meningitidis; identical to SEQ ID NO: 7645

SEQ ID NO: 16496 - protein, 426 aa, Neisseria meningitidis; identical to SEQ ID NO: 7317

SEQ ID NO: 16497 - protein, 522 aa, Neisseria meningitidis
MSQTDTQRDGRFLRTVEWLGNMLPHPVTLFIIFIVLLLIASAVGAYFGLSVPDPRPVGAKGRADDGLIYIVSLLNADGLIKILTHTVKNFTGFAPLGTVLVSLLGVGIAEKSGLISALMRLLLTKSPRKLTTFMVVFTGILSNTASELGYVVLIPLSAIIFHSLGRHPLAGLAAAFAGVSGGYSANLFLGTIDPLLAGITQQAAQIIHPDYVVGPEANWFFMVASTFVIALIGYFVTEKIVEPQLGPYQSDLSQEEKDIRHSNEITPLEYKGLIWAGVVFVALSALLAWSIVPADGILRHPETGLVSGSPFLKSIVVFIFLLFALPGIVYGRVTRSLRGEQEVVNAMAESMSTLGLYLVIIFFAAQFVAFFNWTNIGQYIAVKGATFLKEVGLGGSVLFIGFILICAFINLMIGSASAQWAVTAPIFVPMLMLAGYAPEVIQAAYRIGDSVTNIITPMMSYFGLIMATVIKYKKDAGVGTLISMMLPYSAFFLIAWIALFCIWVFVLGLPVGPGAPTFYPAP

SEQ ID NO: 16498 - protein, 190 aa, Neisseria meningitidis; identical to SEQ ID NO: 7615

SEQ ID NO: 16499 - protein, 269 aa, Neisseria meningitidis; identical to SEQ ID NO: 13933

SEQ ID NO: 16500 - protein, 496 aa, Neisseria meningitidis; identical to SEQ ID NO: 14625

SEQ ID NO: 16501 - protein, 209 aa, Neisseria meningitidis
MNLFQNAKFFTTINHLKDLPDTPLEIAFVGRSNAGKSSAINTLTNHVRLAYVSKTPGRTQHINFFELQNGNFMVDLPGYGYAQVPEAVRAHWVNLLGDYLQQRKQLIGLVLIMDARHPLKELDIRMLDFFHTTGRPVHILLSKADKLSKNEQIKTLSQVKKLLKPYSDRQNISVQLFSSLKKQGIDEANRTVGSWLDAADAAASSPEEN

SEQ ID NO: 16502 - protein, 56 aa, Neisseria meningitidis
LRIAKSPVAPNNTKSKFVCVLIVLSRQERIFRCRLKPVSPITLHRNIGNKGRRHNE

SEQ ID NO: 16503 - protein, 62 aa, Neisseria meningitidis; identical to SEQ ID NO: 7678

SEQ ID NO: 16504 - protein, 273 aa, Neisseria meningitidis; identical to SEQ ID NO: 14267

SEQ ID NO: 16505 - protein, 344 aa, Neisseria meningitidis; identical to SEQ ID NO: 6064

SEQ ID NO: 16506 - protein, 248 aa, Neisseria meningitidis; identical to SEQ ID NO: 4029

SEQ ID NO: 16507 - protein, 149 aa, Neisseria meningitidis; identical to SEQ ID NO: 6241

SEQ ID NO: 16508 - protein, 672 aa, Neisseria meningitidis; identical to SEQ ID NO: 6735

SEQ ID NO: 16509 - protein, 141 aa, Neisseria meningitidis; identical to SEQ ID NO: 7081

SEQ ID NO: 16510 - protein, 307 aa, Neisseria meningitidis
MDIETFLAGERAAGGYRCGFVAIVGRPNVGKSTLMNHLIGQKISITSKKAQTTRNRVTGIYTDDTAQFVFVDTPGFQTDHRNALNDRLNQNVTEALGGVDVVVFVVEAMRFTDADRVVLKQLPKHTPVILVVNKIDKDKAKDRYALEAFVAQVRAEFEFAAAEAVSAKHGLRIANLLELIKPYLPESVPMYPEDMVTDKSARFLAMEIVREKLFRYLGEELPYAMNVEVEQFEEEDGLNRIYIAVLVDKESQKAILIGKGGERLKKISTEARLDMEKLFDTKVFLKVWVKVKSGWADDIRFLRELGL

SEQ ID NO: 16511 - protein, 661 aa, Neisseria meningitidis; identical to SEQ ID NO: 7067

SEQ ID NO: 16512 - protein, 284 aa, Neisseria meningitidis; identical to SEQ ID NO: 6145

SEQ ID NO: 16513 - protein, 475 aa, Neisseria meningitidis
MFFSALKSFLSRYITVWRNVWAVRDQLKPPKRTAEEQAFLPAHLELTDTPVSAAPKWAARFIMAFALLALLWSWFGKIDIVAAASGKTVSGGRSKTIQPLETAVVKAVHVRDGQHVKQGETLAELEAVGTDSDVVQSEQALQAAQLSKLRYEAVLAALESRTVPHIDMAQARSLGLSDADVQSAQVLAQHQYQAWAAQDAQLQSALRGHQAELQSAKAQEQKLVSVGAIEQQKTADYRRLRADNFISEHAFLEQQSKSVSNWNDLESTRGQMRQIQAAIAQAEQNRVLNTQNLKRDTLDALRQANEQIDQYRGQTDKAKQRQQLMTIQSPADGTVQELATYTVGGVVQAAQKMMVIAPDDDKMDVEVLVLNKDIGFVEQGQDAVVKIESFPYTRYGYLTGKVKSVSHDAVSHEQLGLVYTAVVSLDKHTLNIDGKAVNLTAGMNVTAEIKTGKRRVLDYLLSPLQTKLDESFRER

SEQ ID NO: 16514 - protein, 675 aa, Neisseria meningitidis; identical to SEQ ID NO: 7478

SEQ ID NO: 16515 - protein, 328 aa, Neisseria meningitidis; identical to SEQ ID NO: 372

SEQ ID NO: 16516 - protein, 134 aa, Neisseria meningitidis; identical to SEQ ID NO: 6040

SEQ ID NO: 16517 - protein, 132 aa, Neisseria meningitidis; identical to SEQ ID NO: 1178

SEQ ID NO: 16518 - protein, 716 aa, Neisseria meningitidis
MKTPLLKPLLITSLPVFASVFTAASIVWQLGEPKLAMPFVLGIIAGGLVDLDNRLTGRLKNIITTVALFTLSSLTAQSTLGTGLPFILAMTLMTFGFTILGAVGLKYRTFAFGALAVATYTTLTYTPETYWLTNPFMILCGTVLYSTAILLFQIVLPHRPVQESVANAYDALGGYLEAKADFFDPDEAAWIGNRHIDLAMSNTGVITAFNQCRSALFYRLRGKHRHPRTAKMLRYYFAAQDIHERISSAHVDYQEMSEKFKNTDIIFRIHRLLEMQGQACRNTAQALRASKDYVYSKRLGRAIEGCRQSLRLLSDSNDSPDIRHLRRLLDNLGSVDQQFRQLQHNGLQAENDRMGDTRIAALETSSLKNTWQAIRPQLNLESGVFRHAVRLSLVVAAACTIVEALNLNLGYWILLTALFVCQPNYTATKSRVRQRIAGTVLGVIVGSLVPYFTPSVETKLWIVIASTTLFFMTRTYKYSFSTFFITIQALTSLSLAGLDVYAAMPVRIIDTIIGASLAWAAVSYLWPDWKYLTLERTAALAVCSNGAYLEKITERLKSGETGDDVEYRATRRRAHEHTAALSSTLSDMSSEPAKFADSLQPGFTLLKTGYALTGYISALGAYRSEMHEECSPDFTAQFHLAAEHTAHIFQHLPETEPDDFQTALDTLRGELDTLRTHSSGTQSHILLQQLQLIARQLEPYYRAYRQIPHRQPQNAA

SEQ ID NO: 16519 - protein, 410 aa, Neisseria meningitidis; identical to SEQ ID NO: 7906

SEQ ID NO: 16520 - protein, 169 aa, Neisseria meningitidis; identical to SEQ ID NO: 111

SEQ ID NO: 16521 - protein, 675 aa, Neisseria meningitidis
MEVIQYPNSPFKLHQPFPPAGDQPTAIAGLLEGLSDGLAYQTLLGVTGSGKTYTMANVIAQSGRPAIIMAHNKTLAAQLYAEMREFFPENAVEYFVSYYDYYQPEAYVPSRDLFIEKDSAINEHIEQMRLSATKNLMTRNDVIIVATVSAIYGIGDPTEYQQMVLSVKEGDTIEQRDIIATLVSMQYERGDLDFKRGSFRVRGDVIDVYPAESSENALRISLFDDEIDRLDMFDPLSGSLIQRVGRYTVFPSSHYVTPRDTVLRACESIKEELRERIEFFAREQRPVEQQRIEQRTRFDLEMLYEMGFCKGIENYSRHFSGKKEGEPPPTLMDYLPDNAIMFIDESHVTVTQIGGMYKGDASRKQNLVDYGFRLPSARDNRPLKFHEFEKVMPQTIFVSATPAKYEEEHAGQVVEQVVRPTGLVDPQIIIRPVATQVDDLMSEINDRIEKGERVLVTTLTKRMAEQLTDYYSELGIKVRYLHSDIDTVERVEIIRDLRLGLFDVLVGINLLREGLDIPEVSLVAILDADKEGFLRSHRSLIQTIGRAARNVNGVAILYADKITDSMKAAIDETERRREKQIKFNEEQGIVPQQIKKQVKDIIDGVYHEEDGSKGRLKGKNKVKVGEIHNEEDAIKEIAKLEKAMQQAARDLQFEEAAVLRDRIRDIKENLLFGAE

SEQ ID NO: 16522 - protein, 123 aa, Neisseria meningitidis; identical to SEQ ID NO: 6543

SEQ ID NO: 16523 - protein, 232 aa, Neisseria meningitidis; identical to SEQ ID NO: 1935

SEQ ID NO: 16524 - protein, 141 aa, Neisseria meningitidis; identical to SEQ ID NO: 3635

SEQ ID NO: 16525 - protein, 213 aa, Neisseria meningitidis; identical to SEQ ID NO: 6185

SEQ ID NO: 16526 - protein, 767 aa, Neisseria meningitidis; identical to SEQ ID NO: 7374

SEQ ID NO: 16527 - protein, 336 aa, Neisseria meningitidis
MLPFFPEPSLSYTQQNRTAVLLLNLGTPDAPTAQAVRPYLKSFLTDRRVVELPKWLWYPILHGLVLTLRPKKSAHAYEKIWFKEGSPLEVYTARQAAALAKRMPDLIVRHAMTYGNPSVADVLSELKAQGAGRLLVIPMYPQYAASSSGAAVDKVCEQLLLQRNQMSVRTVSRFYDDTGYIDAMKNHILRYWAEHGRGKKLMLSFHGVPQKHHDLGDPYPDECRHTAKLLAEALELTEDQYVVSFQSQFGRAKWVTPSTQDLFGKLPKQGVTELDVFCPGFLADCLETMEEIALMGREQFYEAGGKSYRYIPCLNDNPDWIDALVALAEENLGSWR

SEQ ID NO: 16528 - protein, 123 aa, Neisseria meningitidis; identical to SEQ ID NO: 6403

SEQ ID NO: 16529 - protein, 222 aa, Neisseria meningitidis
LLIHYTLCRYRNWLAQDDTLSELLKLINCQLTEKGLKIEKASAAVVDATIIQTAGSKQRQAIEVDEEGQISSQTTPSKDSDARWIKKNGLYKLGYKQHTRTDAEGYIEKLHITPANAHECKHLSPLLEGLPKGTTVYADKGYDSAENRQHLKEHRLLDGIMRKACRNRPLTETQTKRNRYLSKTRYVVEQSFGTLHRKFRYARAAYFGLICARCRLKGSPDA

SEQ ID NO: 16530 - protein, 298 aa, Neisseria meningitidis; identical to SEQ ID NO: 5738

SEQ ID NO: 16531 - protein, 693 aa, Neisseria meningitidis; identical to SEQ ID NO: 6864

SEQ ID NO: 16532 - protein, 265 aa, Neisseria meningitidis
MDTAQKQRWAITLSYDGSRFYGWQKQADGVPTVQAALETALAQIAGEAVSTTVAGRTDTGVHATAQVVHFDTTAARPQQAWVRGVNAHLPEGIAVLHARQVAPEFHARFDAYGRHYRYLLESAPVRSPLLKNRAGWTHLKLDIGQMRQAAALLVGEQDFSSFRAAECQAKSPVKTIYRADLTQSSGLVRLDLHGNAFLHHMVRNIMGALVYVGSGRLSVEGFAALIQERSRLKAPPTFMPDGLYLTGVDYPEAYGIIRPQIPEWL

SEQ ID NO: 16533 - protein, 324 aa, Neisseria meningitidis
MDTLTRFLPEHLQQNQLPEALGGVLLSVVSACTEINAKVRLGALAGVLGMAGTGNIQGEDQKKLDVIANNIMIDTLKANSAVAGLASEEEDTFVNAGENGRYLVLFDPLDGSSNIDVNISVGTIFSILEKPEGALATESFLQTGRQQLAAGYVLYGPQTQLVFTFGHGVYMFTLNAENEFVLTKENPKVPESTKEFAINMSNRRHWLPPVQQYIDELLAGETGTRGKNYNMRWVASMVAEIHRILMRGGVFMYPQDKRDPAKPGKLRLMYEANPMSLILEQAGASASNAYQAMLDIQPENLHQRVAVFMGSSEEVAYLDRLHAK

SEQ ID NO: 16534 - protein, 318 aa, Neisseria meningitidis
MILTPPDTPFFLRNGNADTIAAKFLQRPAPTYRRELLPDSTGKTKVAYDFSDGISPDAPLVVLFHGLEGSSRSHYAVELMLAVRSRGWHGAVVHFRSCGGIANTAPVFYHLGDTAEIAFTLDTLAARYREIYAVGVSLGGNALAKYLGERGENALPQAAAAVSAPVDAEAAGRRFDSGITRLLYTRYFLRTLIPKARSLHGFQTAFAAGCKTLGEFDDRFTAPLHGFADRHDYYRQTSCKPLLKHVAKPLLLLNAVNDPFLPPEALPRADEVSEAVTLFQPAYGGHVGFVSSTGGRLHLQWLPQTVLSYFDSFRTNRR

SEQ ID NO: 16535 - protein, 138 aa, Neisseria meningitidis; identical to SEQ ID NO: 6327

SEQ ID NO: 16536 - protein, 272 aa, Neisseria meningitidis
MLTSSDPIEIFAESTIHPTNTQAITGGLILSSQSALVVNNKTGQILYQKNADRIMPIASISKLMSAMVVLDANLDMNETVTITPDEIDRLKGTGSRLAIGTALTRKELLHLSLMSSENRATHALGRTYPGGMGAFVAAMNRKAQSLGMYGSRFYEPTGLNFQNVSTAKDLSLMVNAAAQYPQIRTNSTSNYASVQTKNGQQNYKNSNALVREGMWNIELQKTGYIREAGRSMVVKANIQNQPVTIVLLNSPTSATRVNDARKIESWMLQQRS

SEQ ID NO: 16537 - protein, 41 aa, Neisseria meningitidis; identical to SEQ ID NO: 2201

SEQ ID NO: 16538 - protein, 133 aa, Neisseria meningitidis; identical to SEQ ID NO: 825

SEQ ID NO: 16539 - protein, 55 aa, Neisseria meningitidis; identical to SEQ ID NO: 1895

SEQ ID NO: 16540 - protein, 501 aa, Neisseria meningitidis
MYALSEKYNDNGFKAYKVLGEGGGIHTEYNYKFDKSLNLNVLESSTGARSLEKVPVKVTASVSRAAVLSGVGKLARLGAKLSTRAVPYVGTALLAHDVYETFKEDIQAQGYQYDPETDKFVKGYEYSNCLWYEDKRRINRTYGCYGVDSSIMRLMSDDSRFPEVKELMESQMYRLARPFWNWHKEELNKLSSLDWNNFVLNRCTFNWNGGDCLVNKGDDFRNGADFSLIRNSKYKEEMDAKKLEEILSLKVDANPDKYIKATGYPGYSEKVEVAPGTKVNMGPVTDRNGNPVQVVATFGRDSQGNTTVDVQVIPRPDLTPGSAEAPNAQPLPEVSPAENPANNPNPNENPGTSPNPEPDPDLNPDANPDTDGQPGTRPDSPAVPDRPNGRHRKERKEGEDGGLLCDYFPEILACQEMGKPSDGMFHDISIPQVIDDKTWSSHNFLPSNGVCPQPKTFHVFGRQYQASYEPLCVFAEKIRFAVLLAFIIMSAFVVFGSLKGK

SEQ ID NO: 16541 - protein, 330 aa, Neisseria meningitidis
MENVNRIVAEGIAAVEAAQDFNALEQIKARYLGKTGELTGLLKTLGQMSPEERKTIGAHINECKNRFQTAFNAKREALNEVKLQARLAAEALDITLPGRAQEGGSLHPVTLTLQRVVELFHGMGFEVADGPEIEDDFHNFQALNIPANHPARAMQDTFYVENGDVLRTHTSPIQIRYMLDKKEPPIRIIAPGRVYRVDSDATHSPMFHQAEGLWVEEGVTFADLKAVFTDFIRRFFERDDLQVRFRPSFFPFTEPSAEIDIMGENGKWLEVGGCGMVHPNVLKNVNIDPEKYTGFAFGIGLDRFAMLRYNVNDLRLFFDNDLNFLKQFAK

SEQ ID NO: 16542 - protein, 127 aa, Neisseria meningitidis; identical to SEQ ID NO: 4145

SEQ ID NO: 16543 - protein, 209 aa, Neisseria meningitidis; identical to SEQ ID NO: 6736

SEQ ID NO: 16544 - protein, 725 aa, Neisseria meningitidis; identical to SEQ ID NO: 6998

SEQ ID NO: 16545 - protein, 640 aa, Neisseria meningitidis; identical to SEQ ID NO: 7358

SEQ ID NO: 16546 - protein, 104 aa, Neisseria meningitidis
MNKPFITQAQLALYKYQPSSKYYGKTMAYTFASELLDYSKVNKFIIHEEIQCFLNRRISNNIWKIYFSDESVAYIKILELQDDYSRGIEIKTFDFNPNVGDVFG

SEQ ID NO: 16547 - protein, 458 aa, Neisseria meningitidis; identical to SEQ ID NO: 569

SEQ ID NO: 16548 - protein, 352 aa, Neisseria meningitidis; identical to SEQ ID NO: 7829

SEQ ID NO: 16549 - protein, 445 aa, Neisseria meningitidis; identical to SEQ ID NO: 6737

SEQ ID NO: 16550 - protein, 1139 aa, Neisseria meningitidis; identical to SEQ ID NO: 6379

SEQ ID NO: 16551 - protein, 222 aa, Neisseria meningitidis; identical to SEQ ID NO: 7101

SEQ ID NO: 16552 - protein, 451 aa, Neisseria meningitidis; identical to SEQ ID NO: 7557

SEQ ID NO: 16553 - protein, 209 aa, Neisseria meningitidis; identical to SEQ ID NO: 4735

SEQ ID NO: 16554 - protein, 642 aa, Neisseria meningitidis; identical to SEQ ID NO: 7398

SEQ ID NO: 16555 - protein, 207 aa, Neisseria meningitidis; identical to SEQ ID NO: 6966

SEQ ID NO: 16556 - protein, 359 aa, Neisseria meningitidis
MNIQNIRTLLDTVAVPNTARTLGGEKAVRSVEQRSDGIHIALHFGFPVAHIASETADRIQEILMPETGDTHIHLSMDTEIGTHKVQPGVTTIKGVKNIIAVASGKGGVGKSTTTANLAAAMARMGARVGVLDADLYGPSQPTMLGVDDRKPDQKNQKLIPVESSDGIQVMSIGFLVDTDQAVVWRGPMVSQALQQLMFQSEWDEVDYLFIDLPPGTGDIQLTLSQRIPVTGSVIVTTPQDIALIDARKAVDMFRKVNIPILGVLENMSVHICTNCGHSEALFGTDGGKDFAARLNVPLLGQLPLSLPVREAMDGGTPAQLFDEHPAIARIYTDAAFQIALSIADKGKDFSSRFPKIVVE

SEQ ID NO: 16557 - protein, 620 aa, Neisseria meningitidis
MALLQISEPGMSAAPHRHRLAAGIDLGTTNSLVATVRSGSAACLPDAEGRVTLPSVVRYLENGGIEVGKTALSAQKTDPLNTVSSAKRLIGRTLADLHQNTHYLPYRFGDNQRVIELHTRQGVKTPVEVSAEILKTLKSRAEETLGGDLVGVVITVPAYFDDAQRQATKDAARLAGLNVLRLLNEPTAAAIAYGLDNASEGTFVVYDLGGGTFDVSVLQLTKGLFEVKATGGNSALGGDDFDHRLFCRLLEQNGLSQLNEQDSQLLLSLVRAAKEQLTTQTEARIQATLSDGMAIDTSISRAEFHNLTQHLVMKTLEPVTQALKDAGVGKNEVKGVIMVGGSTRMLHVQQAVATFFGQTPLNNLNPDEVVALGAAIQANVLAGNKTDGEWLLLDVTPLSLGLETYGGLAEKIIPRNSTIPTARAQDFTTFKDGQTAMTIHVVQGERELVADCRSLAKFTLRGIPPMAAGAARIRVTFQIDADGLLSVSAQEQSTGVQAQIEVKPSYGLDDDTITQMLKDSMSNAAEDMAARARAEAVVEAESLTDAVNAALELDSDLLDAEELQQIRQGIADLQGRLKDGKAEDIRAAAAKLGSITDNFAAKRMNRNIQRALTGQSVDNI

SEQ ID NO: 16558 - protein, 382 aa, Neisseria meningitidis; identical to SEQ ID NO: 6089

SEQ ID NO: 16559 - protein, 227 aa, Neisseria meningitidis; identical to SEQ ID NO: 6033

SEQ ID NO: 16560 - protein, 121 aa, Neisseria meningitidis; identical to SEQ ID NO: 4117

SEQ ID NO: 16561 - protein, 140 aa, Neisseria meningitidis; identical to SEQ ID NO: 6541

SEQ ID NO: 16562 - protein, 215 aa, Neisseria meningitidis; identical to SEQ ID NO: 6176

SEQ ID NO: 16563 - protein, 308 aa, Neisseria meningitidis; identical to SEQ ID NO: 7753

SEQ ID NO: 16564 - protein, 206 aa, Neisseria meningitidis
LLGVVPGIGESIQAYKVAKAAKNLQGMKKALDKAATVATAQGYVSKTKIKIGQIELRVTAATDKQLLKAIGEGRDTTGKMTEQLFDSVAKQNGFRVLSGGKYGGNNGFDHVWQAADGSVVLIVESKQIRNGTVQLNPNGAGGYTQMSEDWIRQVLDQLPDGSPAKAAVFKANKNGTLKTAIAGVDRQTGKAVILPVKVPSKANIRR

SEQ ID NO: 16565 - protein, 348 aa, Neisseria meningitidis; identical to SEQ ID NO: 7414

SEQ ID NO: 16566 - protein, 321 aa, Neisseria meningitidis; identical to SEQ ID NO: 6649

SEQ ID NO: 16567 - protein, 162 aa, Neisseria meningitidis; identical to SEQ ID NO: 911

SEQ ID NO: 16568 - protein, 147 aa, Neisseria meningitidis; identical to SEQ ID NO: 6122

SEQ ID NO: 16569 - protein, 792 aa, Neisseria meningitidis; identical to SEQ ID NO: 6324

SEQ ID NO: 16570 - protein, 245 aa, Neisseria meningitidis; identical to SEQ ID NO: 6828

SEQ ID NO: 16571 - protein, 289 aa, Neisseria meningitidis; identical to SEQ ID NO: 5935

SEQ ID NO: 16572 - protein, 146 aa, Neisseria meningitidis; identical to SEQ ID NO: 1069

SEQ ID NO: 16573 - protein, 258 aa, Neisseria meningitidis
MTLIHPTAVIDPKAELDSGVKVGAYTVIGPNVQIGANTEIGPHAVINGHTSIGENNRIFQFASLGEIPQDKKYRDEPTKLIIGNGNTIREFTTFNLGTVTGIGETRIGDDNWIMAYCHLAHDCVIGNHTIFANNASLAGHVTIGDYVVLGGYTLVFQFCRIGDYAMTAFAAGVHKDVPPYFMASGYRAEPAGLNSEGMRRNGFTAEQISAVKDVYKTLYHRGIPFEEAKADILRRAETQAELAVFRDFFAQSARGIIR

SEQ ID NO: 16574 - protein, 212 aa, Neisseria meningitidis; identical to SEQ ID NO: 3536

SEQ ID NO: 16575 - protein, 52 aa, Neisseria meningitidis; identical to SEQ ID NO: 7588

SEQ ID NO: 16576 - protein, 484 aa, Neisseria meningitidis; identical to SEQ ID NO: 2793

SEQ ID NO: 16577 - protein, 242 aa, Neisseria meningitidis
MTTYRIAPSILSADFARLGEEVESVIAAGADLIHFDVMDNHYVPNLTFGPMVCAALKPYASVPIDVHLMVEPVDDLIQSFAKAGASIITFHPEASRHIDRSLSLIRDMGCQAGLVLNPATPVYLLENVLDRLDMVLLMSVNPGFGGQSFIPYTLEKIRQVRAMLDRYEEKSGRRIAIEVDGGIKTDNIAAAAQAGADTFVAGSAIFGKPDYKAVIDAMRAELEKSGRLNLAPMIEIEMPSEN

SEQ ID NO: 16578 - protein, 216 aa, Neisseria meningitidis
MISVEHVSKQYQMRGGMRTVLDDINFSLQKGEKVGILGRNGAGKSTLIRLISGVEPPTSGEIKRTMSISWPLAFSGAFQGSLTGMDNLRFICRIYNVDIDYVKAFTEEFSELGQYLYEPVKRYSSGMKARLAFALSLAVEFDCYLIDEVIAVGDSRFADKCKYELFEKRKDRSIILVSHSHSAMKQYCDNAMVLEKGHMYQFEDMDKAYEYYNSLP

SEQ ID NO: 16579 - protein, 354 aa, Neisseria meningitidis; identical to SEQ ID NO: 6299

SEQ ID NO: 16580 - protein, 113 aa, Neisseria meningitidis; identical to SEQ ID NO: 6572

SEQ ID NO: 16581 - protein, 41 aa, Neisseria meningitidis; identical to SEQ ID NO: 6310

SEQ ID NO: 16582 - protein, 233 aa, Neisseria meningitidis
MSLKTVAVIGAMEQEIELLREMMENVKAVSFGRFSAYEGELAGKRMVLALSGIGKVNAAVATAWIIREFAADCVINTGSAGGLGKGLKVGDVVIGTETAHHDVDVTAFGYAWGQVPQLPARFASDGILIEAAKRAARTFEGAAVEQGLIVSGDRFVHSSEGVAEIRKHFPEVKAVEMEAAAIAQTCHQLETPFVIIRAVSDSADEKADISFDEFLKTAAANSAKMVAEIVKSL

SEQ ID NO: 16583 - protein, 304 aa, Neisseria meningitidis; identical to SEQ ID NO: 3139

SEQ ID NO: 16584 - protein, 245 aa, Neisseria meningitidis; identical to SEQ ID NO: 9622

SEQ ID NO: 16585 - protein, 257 aa, Neisseria meningitidis; identical to SEQ ID NO: 15638

SEQ ID NO: 16586 - protein, 197 aa, Neisseria meningitidis; identical to SEQ ID NO: 6180

SEQ ID NO: 16587 - protein, 121 aa, Neisseria meningitidis; identical to SEQ ID NO: 6632

SEQ ID NO: 16588 - protein, 111 aa, Neisseria meningitidis; identical to SEQ ID NO: 7069

SEQ ID NO: 16589 - protein, 421 aa, Neisseria meningitidis; identical to SEQ ID NO: 6986

SEQ ID NO: 16590 - protein, 143 aa, Neisseria meningitidis
LAFGFGSGLAPFAPGTFGTLAALPLAFVLILLGIDGLLLAFLCIVLFMWGIRICAYAERETGVSDHGGIVWDEIVAMLFVLAFVPFRWTWWLAAFVLFRLFDALKPSPVGWFDKNLHGGLGIMADDMAAAVMTLIVLRIAMLF

SEQ ID NO: 16591 - protein, 720 aa, Neisseria meningitidis
MNTPLFRLSLLSLTLAAGFAHAAENNAKVVLDTVTVKGDRQGSKIRTNIVTLQQKDESTATDMRELLKEEPSIDFGGGNGTSQFLTLRGMGQNSVDIKVDNAYSDSQILYHQGRFIVDPALVKVVSVQKGAGSASAGIGATNGAIIAKTVDAQDLLKGLDKNWGVRLNSGFASNEGVSYGASVFGKEGNFDGLFSYNRNDEKDYEAGKGFRNVNGGKTVPYSALDKRSYLAKIGTTFGDDDHRIVLSHMKDQHRGIRTVREEFTVGDKSSRINIDRQAPAYRETTQSNTNLAYTGKNLGFVEKLDANAYVLEKERYSADDSGTGYAGNVKGPNHTRITTRGANFNFDSRLAEQTLLKYGINYRHQEIKPQAFLNSKFSIPTTEEKNGQKVDKPMEQQMKDRADEDTVHAYKLSNPTKTDTGVYVEAIHDIGDFTLTGGLRYDRFKVKTHDGKTVSSSNLNPSFGVIWQPHEHWSFSASHNYASRSPRLYDALQTHGKRGIISIADGTKAERARNTEIGFNYNDGTFAANGSYFWQTIKDALANPQNRHDSVAVREAVNAGYIKNHGYELGASYRTGGLTAKVGVSHSKPRFYDTHKDKLLSANPEFGAQVGRTWTASLAYRFQNPNLEIGWRGRYVQKATGSILAAGQKDRKGNLENVVRKGFGVNDVFANWKPLGKDTLNVNLSVNNVFNKFYYPHSQRWTNTLPGVGRDVRLGVNYKF

SEQ ID NO: 16592 - protein, 252 aa, Neisseria meningitidis; identical to SEQ ID NO: 7668

SEQ ID NO: 16593 - protein, 460 aa, Neisseria meningitidis; identical to SEQ ID NO: 7556

SEQ ID NO: 16594 - protein, 183 aa, Neisseria meningitidis; identical to SEQ ID NO: 4319

SEQ ID NO: 16595 - protein, 768 aa, Neisseria meningitidis; identical to SEQ ID NO: 7605

SEQ ID NO: 16596 - protein, 437 aa, Neisseria meningitidis; identical to SEQ ID NO: 6418

SEQ ID NO: 16597 - protein, 163 aa, Neisseria meningitidis; identical to SEQ ID NO: 6583

SEQ ID NO: 16598 - protein, 393 aa, Neisseria meningitidis; identical to SEQ ID NO: 6245

SEQ ID NO: 16599 - protein, 177 aa, Neisseria meningitidis; identical to SEQ ID NO: 1513

SEQ ID NO: 16600 - protein, 330 aa, Neisseria meningitidis
MKQPVFAVTSGEPAGIGPDICLDLAFARLPCRCAVLGDKNLLRARAEALGKSVVLRDFDPESGGASEEGVLEVLHIPAAEAVEAGKLNPANAAYVLQLLDTALAGISDGIFDGIVTAPLNKGIINDARASTGFFSGHTEYLAEKSGTGQVVMMLAGKGLRVALVTTHLPLKDVAAAITQPLIESVARILHHDLKHKFGIKNPKILVAGLNPHAGEGGHLGHEETDTIIPALENLRREGINLAGPYPADTLFQPFMLEGADAVLAMYHDQGLPVLKYHSFGQGVNITLGLPFIRTSVDHGTALDLAATGRADSGSLITAVETAVEMARGSL

SEQ ID NO: 16601 - protein, 183 aa, Neisseria meningitidis
MPSERRPFQTAFLSNRKTVGKLAERVQSRYDGLHKFKHICSAAMALIKEPLDKVKQRNEELEAAEEAAAQEALGREQEAARVSEWEERYKLSRSEFEQFWKGLPQTVQNKLQASQKTWKSGMDKICANNAKAEGKTPNGIKFSELACKTAKTEARLEELHNRKKALIDEMAREADKKELSKRL

SEQ ID NO: 16602 - protein, 278 aa, Neisseria meningitidis; identical to SEQ ID NO: 6284

SEQ ID NO: 16603 - protein, 169 aa, Neisseria meningitidis; identical to SEQ ID NO: 6257

SEQ ID NO: 16604 - protein, 126 aa, Neisseria meningitidis; identical to SEQ ID NO: 6216

SEQ ID NO: 16605 - protein, 359 aa, Neisseria meningitidis; identical to SEQ ID NO: 2157

SEQ ID NO: 16606 - protein, 417 aa, Neisseria meningitidis; identical to SEQ ID NO: 7147

SEQ ID NO: 16607 - protein, 195 aa, Neisseria meningitidis; identical to SEQ ID NO: 1987

SEQ ID NO: 16608 - protein, 66 aa, Neisseria meningitidis; identical to SEQ ID NO: 2062

SEQ ID NO: 16609 - protein, 248 aa, Neisseria meningitidis; identical to SEQ ID NO: 639

SEQ ID NO: 16610 - protein, 490 aa, Neisseria meningitidis; identical to SEQ ID NO: 7202

SEQ ID NO: 16611 - protein, 65 aa, Neisseria meningitidis; identical to SEQ ID NO: 127

SEQ ID NO: 16612 - protein, 414 aa, Neisseria meningitidis; identical to SEQ ID NO: 7206

SEQ ID NO: 16613 - protein, 426 aa, Neisseria meningitidis; identical to SEQ ID NO: 1580

SEQ ID NO: 16614 - protein, 121 aa, Neisseria meningitidis; identical to SEQ ID NO: 1070

SEQ ID NO: 16615 - protein, 96 aa, Neisseria meningitidis; identical to SEQ ID NO: 6139

SEQ ID NO: 16616 - protein, 52 aa, Neisseria meningitidis; identical to SEQ ID NO: 7295

SEQ ID NO: 16617 - protein, 214 aa, Neisseria meningitidis; identical to SEQ ID NO: 3176

SEQ ID NO: 16618 - protein, 487 aa, Neisseria meningitidis
MKETAFKTGMCLGSNNLSRLQKAAQQILIVRGYLTSQAIIQPQNMDSGILKLRVSAGEIGDIRYEEKRDGKSAEGSISAFNNKFPLYRNKILNLRDVEQGLENLRRLPSVKTDIQIIPSEEEGKSDLQIKWQQNKPIRFSIGIDDAGGKTTGKYQGNVALSFDNPLGLSDLFYVSYGRGLAHKTDLTDATGTETESGSRSYSVHYSVPVKKWLFSFNHNGHRYHEATEGYSVNYDYNGKQYQSSLAAERMLWRNRLHKTSVGMKLWTRQTYKYIDDAEIEVQRRRSAGWEAELRHRAYLNRWQLDGKLSYKRGTGMRQSMPAPEENGGDILPGTSRMKIITAGLDAAAPFILGKQQFFYATAIQAQWNKTPLVAQDKLSIGSRYTVRGFDGEQSLFGERGFYWQNTLTWYFHPNHQFYLGADYGRVSGESAQYVSGKQLMGAVVGFRGGHKVGGMFAYDLFAGKPLHKPKGFQTTNTVYGFNLNYSF

SEQ ID NO: 16619 - protein, 412 aa, Neisseria meningitidis; identical to SEQ ID NO: 7505

SEQ ID NO: 16620 - protein, 259 aa, Neisseria meningitidis; identical to SEQ ID NO: 6563

SEQ ID NO: 16621 - protein, 492 aa, Neisseria meningitidis; identical to SEQ ID NO: 8394

SEQ ID NO: 16622 - protein, 330 aa, Neisseria meningitidis; identical to SEQ ID NO: 3493

SEQ ID NO: 16623 - protein, 425 aa, Neisseria meningitidis; identical to SEQ ID NO: 6788

SEQ ID NO: 16624 - protein, 259 aa, Neisseria meningitidis; identical to SEQ ID NO: 331

SEQ ID NO: 16625 - protein, 220 aa, Neisseria meningitidis; identical to SEQ ID NO: 5269

SEQ ID NO: 16626 - protein, 253 aa, Neisseria meningitidis
MRLARPYAEKVRMVMSHLAQTNTDHGIPLLESHREIRRVGFILITSDKGLCGGLNANVLKKFLAQVQEYRNQGIEEEIVCFGSKGLMACQSIGLNVVASAVNLGDTPKMEMLLGPLTELFQRYEKHEIDRIHLVYSGFVNTMRQEPRMEVLLPIGENVIGDSAPKSPFSWEYRYEPTALAVLEYLVRRYLESVVYQALSDNMASEQAARMVAMKAATDNAGNAIKELRLVYNKSRQAAITTELSEIVAGAAAV

SEQ ID NO: 16627 - protein, 395 aa, Neisseria meningitidis; identical to SEQ ID NO: 7641

SEQ ID NO: 16628 - protein, 502 aa, Neisseria meningitidis
MLPQGQFAQWIAPLTVGEEGGVWVVYGKNQFACNMLKSQFAGKIEAVREELAAGRSAFVFKPGEGVRYEMAAVEGAVEPAEPSLHAVSEGMPVQEVLLDELPSEEPVKPAASKTAADILAERMKNLPHEPRQAAGSASRPESVAVAKARTDVQRDAEEARYEQTNLSPDYTFDTLVEGKGNRLAAAAAQAIAESPGQSYNPFFLYGSTGLGKTHLVQAVGNELLKNRPDAKVRYMHSDDYIRSFMKAVRNNTYDVFKQQYKQYDLLIIDDIQFIKGKDRTMEEFFYLYNHFHNEKKQLILTCDVLPAKIEGMDDRLKSRFSWGLTLELEPPELEMRIAILQKKAEAAGISIEDEAALFIANLIRSNVRELEGAFNRVGASSRFMNRPVIDIDLARTALQDIIAEKHKVITADIIIDAVAKYYRIKISDVLGKKRTRNIARPRQVAMSLTKELTTLSLPSIGDSFGGRDHTTVMHGIRAVAKLREEDPELAQDYEKLLILIQN

SEQ ID NO: 16629 - protein, 410 aa, Neisseria meningitidis; identical to SEQ ID NO: 6333

SEQ ID NO: 16630 - protein, 122 aa, Neisseria meningitidis; identical to SEQ ID NO: 2347

SEQ ID NO: 16631 - protein, 304 aa, Neisseria meningitidis; identical to SEQ ID NO: 3720

SEQ ID NO: 16632 - protein, 482 aa, Neisseria meningitidis; identical to SEQ ID NO: 6949

SEQ ID NO: 16633 - protein, 797 aa, Neisseria meningitidis
MKLKQIASALMMLGISPLALADFTIQDIRVEGLQRTEPSTVFNYLPVKVGDTYNDTHGSAIIKSLYATGFFDDVRVETADGQLLLTVIERPTIGSLNITGAKMLQNDAIKKNLESFGLAQSQYFNQATLNQAVAGLKEEYLGRGKLNIQITPKVTKLARNRVDIDITIDEGKSAKITDIEFEGNQVYSDRKLMRQMSLTEGGIWTWLTRSNQFNEQKFAQDMEKVTDFYQNNGYFDFRILDTDIQTNEDKTKQTIKITVHEGGRFRWGKVSIEGDTNEVPKAELEKLLTMKPGKWYERQQMTAVLGEIQNRMGSAGYAYSEISVQPLPNAETKTVDFVLHIEPGRKIYVNEIHITGNNKTRDEVVRRELRQMESAPYDTSKLQRSKERVELLGYFDNVQFDAVPLAGTPDKVDLNMSLTERSTGSLDLSAGWVQDTGLVMSAGVSQDNLFGTGKSAALRASRSKTTLNGSLSFTDPYFTADGVSLGYDVYGKAFDPRKASTSIKQYKTTTAGAGIRMSVPVTEYDRVNFGLVAEHLTVNTYNKAPKHYADFIKKYGKTDGTDGSFKGWLYKGTVGWGRNKTDSALWPTRGYLTGVNAEIALPGSKLQYYSATHNQTWFFPLSKTFTLMLGGEVGIAGGYGRTKEIPFFENFYGGGLGSVRGYESGTLGPKVYDEYGEKISYGGNKKANVSAELLFPMPGAKDARTVRLSLFADAGSVWDGKTYDDNSSSATGGRVQNIYGAGNTHKSTFTNELRYSAGGAVTWLSPLGPMKFSYAYPLKKKPEDEIQRFQFQLGTTF

SEQ ID NO: 16634 - protein, 111 aa, Neisseria meningitidis
LEMFDGEVEADESYFGGQRKGKRGRGAAGKVAVFGLLKRNGKVYTVTVPNTQTATLFPIIREQVKPDSIVYTDCYRSYDVLDVREFSHFSFAETSFSYQSQHTFCRTTKPY

SEQ ID NO: 16635 - protein, 515 aa, Neisseria meningitidis; identical to SEQ ID NO: 6786

SEQ ID NO: 16636 - protein, 129 aa, Neisseria meningitidis; identical to SEQ ID NO: 7065

SEQ ID NO: 16637 - protein, 163 aa, Neisseria meningitidis; identical to SEQ ID NO: 684

SEQ ID NO: 16638 - protein, 171 aa, Neisseria meningitidis; identical to SEQ ID NO: 6229

SEQ ID NO: 16639 - protein, 306 aa, Neisseria meningitidis; identical to SEQ ID NO: 7190

SEQ ID NO: 16640 - protein, 211 aa, Neisseria meningitidis; identical to SEQ ID NO: 7323

SEQ ID NO: 16641 - protein, 67 aa, Neisseria meningitidis; identical to SEQ ID NO: 7885

SEQ ID NO: 16642 - protein, 658 aa, Neisseria meningitidis
MNEFSLAPIVIVLLVSVITVILCRKFNIPSMLGYLLVGFLAGPGMLSLIPKSHATDYLGEIGIVFLMFSIGLEFSLPKLRAMRRLVFGLGGLQVGITMLSVMGILMLTGVPFNWAFAVSGALAMSSTAIVSRILSEKTELGQPHGQMAMGVLLMQDIAVVPLMILIPALAGGGDGNIWAALGLAFAKMLLTLGLLFFVGSKIMSRWFRMVAKRKSSELFMINVLLVTLGVAYLTELEGLSMALGAFVAGMLLSETEYRFQVEDDIRPFRDILLGFFFITVGMKLDIQALIGGWRQVLMLLAMLLVLKALVVFAIAFKMKHSVGDSLKTALYLAQGGEFGFVMLAIAGQLDMVSPEWEQAATAAVLLSMIIAPFLLGGSDALVGRLVKSSWDMKSLDLHSMLVETMSKSDHVLIVGFGRGGQTVGRVLAQEDIPYFALDLDIARVQVARSAGEPVSFGDAKRREVLEAAGLGRAKMVVVTLNNMHETQHVLDNVLSMYPNMPVYVRATNDDYVKTFTDIGAEEAVSDTKETGLVLAGYAMLGNGASYRHVYQTMANIRHSRYAALEGLFVGSDDEAGFGENGETVRHAFPLAAEAYAVGKTVGTLPMAAYGIKLLFVRRRTGRIENPDASFTLEGGDVLVVAGKKEEIISFENWSLQGI

SEQ ID NO: 16643 - protein, 512 aa, Neisseria meningitidis
MVSKLDKYWQHPALYWPLLILFAAATPFTFAPYYHFWLMPLIFGAFVRLIELRPRFAVSSAYLFGLTAYTTQFYWIHTALHDVSGLPDLYAVPLTFLLPAYLALYPALCFWLWKKFTLPRGIKIGLVLPILWTLTEFARERFLTGFGWGAIGYSQITPDSPLAGFAPLGGIHMVTLATAFLGVWLVLASNNTARSGKRLLPIILIAALLAAGYTARQTDFTRPDGSRSTVALLQGNIDQTLKWREDQVIPTIQKYYEQVGKTTADIVILPETAIPVMRQNLPENILAKFAEQAQNNGSALAVGISQYTSDGNGYENAVINLTGYQENNQDGIPYYAKNHLVPFGEYKPLPFLTTPLYKMMDMPLSDFRKGGGKQSALLMKNQKIAFNICYEDGFGDELIAAAKDATLLANASNMAWYGKSNAMYQHLQQSQARAMELGRYMVRATNTGATAIISPKGNIIAQAQPDTETVLEGHIKGYVGETPYMKTGSSWWLMGILALAALILFIFRNKEH

SEQ ID NO: 16644 - protein, 291 aa, Neisseria meningitidis; identical to SEQ ID NO: 10079

SEQ ID NO: 16645 - protein, 386 aa, Neisseria meningitidis; identical to SEQ ID NO: 3047

SEQ ID NO: 16646 - protein, 190 aa, Neisseria meningitidis; identical to SEQ ID NO: 917

SEQ ID NO: 16647 - protein, 376 aa, Neisseria meningitidis; identical to SEQ ID NO: 7223

SEQ ID NO: 16648 - protein, 242 aa, Neisseria meningitidis; identical to SEQ ID NO: 6894

SEQ ID NO: 16649 - protein, 307 aa, Neisseria meningitidis; identical to SEQ ID NO: 6131

SEQ ID NO: 16650 - protein, 616 aa, Neisseria meningitidis; identical to SEQ ID NO: 6107

SEQ ID NO: 16651 - protein, 1014 aa, Neisseria meningitidis; identical to SEQ ID NO: 7120

SEQ ID NO: 16652 - protein, 256 aa, Neisseria meningitidis; identical to SEQ ID NO: 6382

SEQ ID NO: 16653 - protein, 349 aa, Neisseria meningitidis
MPSEAFRRHRAYRENKLQPLVSVLICAYNVEKYFAQSLAAVVNQTWRNLDILIVDDGSTDGTLAIAQRFQEQDGRIRILAQPRNSGLIPSLNIGLDELAKSGGGGEYIARTDADDIAAPDWIEKIVGEMEKDRSIIAMGAWLEVLSEEKDGNRLARHHEHGKIWKKPTRHEDIADFFPFGNPIHNNTMIMRRSVIDGGLRYNTERDWAEDYQFWYDVSKLGRLAYYPEALVKYRLHANQVSSKYSIRQHEIAQGIQKTARNDFLQSMGFKTRFDSLEYRQIKAVAYELLEKHLPEEDFERARRFLYQCFKRTDTLPAGAWLDFAADGRMRRLFTLRQYFGILHRLLKNR

SEQ ID NO: 16654 - protein, 389 aa, Neisseria meningitidis; identical to SEQ ID NO: 6337

SEQ ID NO: 16655 - protein, 272 aa, Neisseria meningitidis; identical to SEQ ID NO: 7451

SEQ ID NO: 16656 - protein, 141 aa, Neisseria meningitidis; identical to SEQ ID NO: 6654

SEQ ID NO: 16657 - protein, 66 aa, Neisseria meningitidis; identical to SEQ ID NO: 3561

SEQ ID NO: 16658 - protein, 355 aa, Neisseria meningitidis; identical to SEQ ID NO: 6342

SEQ ID NO: 16659 - protein, 129 aa, Neisseria meningitidis; identical to SEQ ID NO: 6587

SEQ ID NO: 16660 - protein, 89 aa, Neisseria meningitidis; identical to SEQ ID NO: 6952

SEQ ID NO: 16661 - protein, 291 aa, Neisseria meningitidis; identical to SEQ ID NO: 6524

SEQ ID NO: 16662 - protein, 508 aa, Neisseria meningitidis; identical to SEQ ID NO: 7843

SEQ ID NO: 16663 - protein, 269 aa, Neisseria meningitidis; identical to SEQ ID NO: 6662

SEQ ID NO: 16664 - protein, 414 aa, Neisseria meningitidis; identical to SEQ ID NO: 6129

SEQ ID NO: 16665 - protein, 56 aa, Neisseria meningitidis; identical to SEQ ID NO: 2179

SEQ ID NO: 16666 - protein, 94 aa, Neisseria meningitidis; identical to SEQ ID NO: 6698

SEQ ID NO: 16667 - protein, 214 aa, Neisseria meningitidis; identical to SEQ ID NO: 7349

SEQ ID NO: 16668 - protein, 841 aa, Neisseria meningitidis
LKNNRQIKLIAASVAVAASFQAHAGLGGLNIQSNLDEPFSGSITVTGEEAKALLGGGSVTVSEKGLTAKVHKLGDKAVIAVSSEQAVRDPVLVFRIGAGAQVREYTAILDPVGYSPKTKSALSDGKTHRKTAPTAESQENQNAKALRKTDKKDSANAAVKPAYNGKTHTVRKGETVKQIAAAIRPKHLTLEQVADALLKANPNVSAHGRLRAGSVLHIPNLNRIKAEQPKPQTAKPKAETASMPSEPSKQATVEKPVEKPEAKVAAPEAKAEKPAVRPEPVPAANTAASETAAESAPQEAAASAIDTPTDETGNAVSEPVEQVSAEEETESGLFDGLFGGSYTLLLAGGGAALIALLLLLRLAQSKRARRTEESVPEEEPDLDDAADDGIEITFAEVETPATPEPAPKNDVNDTLALDGESEEELSAKQTFDVETDTPSNRIDLDFDSLAAAQNGILSGALTQDEETQKRADADWNAIESTDSVYEPETFNPYNPVEIVIDTPEPESVAQTAENKPETVDTDFSDNLPSNNHIGTEETASAKPASPSGLAGFLKASSPETILEKTVAEVQTPEELHDFLKVYETDAVAETAPETPDFNAAADDLSALLQPAEAPSVEENITETVAETPDFNATADDLSALLQPSKVPAVEENAAETVADDLSALLQPAEAPAVEENVTETVAETPDFNATADDLSALLQPSEAPAVEENAAETVADDLSALLQPAEAPAVEENAAEITLETPDSNTSEADALPDFLKDGEEETVDWSIYLSEENIPNNADTSFPSESVGSDAPSEAKYDLAEMYLEIGDRDAAAETVQKLLEEAEGDVLKRAQALAQELGI

SEQ ID NO: 16669 - protein, 69 aa, Neisseria meningitidis; identical to SEQ ID NO: 3057

SEQ ID NO: 16670 - protein, 451 aa, Neisseria meningitidis; identical to SEQ ID NO: 6268

SEQ ID NO: 16671 - protein, 447 aa, Neisseria meningitidis; identical to SEQ ID NO: 6475

SEQ ID NO: 16672 - protein, 249 aa, Neisseria meningitidis; identical to SEQ ID NO: 6142

SEQ ID NO: 16673 - protein, 146 aa, Neisseria meningitidis; identical to SEQ ID NO: 6937

SEQ ID NO: 16674 - protein, 587 aa, Neisseria meningitidis; identical to SEQ ID NO: 7177

SEQ ID NO: 16675 - protein, 505 aa, Neisseria meningitidis; identical to SEQ ID NO: 2655

SEQ ID NO: 16676 - protein, 397 aa, Neisseria meningitidis; identical to SEQ ID NO: 7281

SEQ ID NO: 16677 - protein, 110 aa, Neisseria meningitidis; identical to SEQ ID NO: 4156

SEQ ID NO: 16678 - protein, 473 aa, Neisseria meningitidis; identical to SEQ ID NO: 719

SEQ ID NO: 16679 - protein, 288 aa, Neisseria meningitidis; identical to SEQ ID NO: 2832

SEQ ID NO: 16680 - protein, 472 aa, Neisseria meningitidis; identical to SEQ ID NO: 14539

SEQ ID NO: 16681 - protein, 263 aa, Neisseria meningitidis
MNVYFLGGGNMAAAVAGGLVKQGGYRIYIANRGAEKRERLEKELGVETSATLPELHSDDVLILAVKPQDMEAACKNIRTNGALVLSVAAGLSVGTLSRYLGGTRRIVRVMPNTPGKIGLGVSGMYAEAEVSETDRRIADRIMKSVGLTVWLDDEEKMHGITGISGSGPAYVFYLLDALQNAAIRQGFDMAEARALSLATFKGAVALAEQTGEDFEKLQKNVTSKGGTTHEAVEAFRRHRVAEAISEGVCACVRRSQEMERQYQ

SEQ ID NO: 16682 - protein, 535 aa, Neisseria meningitidis
MSIVEIKVPDIGGHENVDIIAVEVKAGDTIAVDDTLITLETDKATMDVPADAAGVVKEVKVKVGDKISEGGVILTVETGAAAAEAAPAAAEAQPAPAAAPAAAGGATVQVAVPDIGGHTDVDVIAVEIKVGDTVAEDDTLITLETDKATMDVPCTAAGVVKAVFLKVGDKVSEGSAIIEVETVGSAAAAPAQAAQAAAPAAAPPPTAAAAPAAAPAPSAPAAAKIDEAAFAKAHAGPSARKLARELGVDLGQVKGTGLKGRIMGDDIKAFVKSVMQGGAAKPAAASASLGGGLDLLPWPKVDFSKFGNVEVKELSRIKKISGQNLSRNWVVIPHVTVHEEADMTELEEFRKQLNKEWEREGVKLSPLAFIIKASVSALKAFPEFNASLDGDNLVLKNYFNIGFAADTPNGLVVPVIKDVDQKGLKQISQELTELSKKAREGKLKPQEMQGACFTISSLGGIGGTGFTPIVNAPEVAILGVCKSQIKPVWNGKEFAPRLMCPLSLSFDHRVIDGAAGMRFTVFLAKLLKDFRRITL

SEQ ID NO: 16683 - protein, 193 aa, Neisseria meningitidis; identical to SEQ ID NO: 6182

SEQ ID NO: 16684 - protein, 322 aa, Neisseria meningitidis; identical to SEQ ID NO: 6092

SEQ ID NO: 16685 - protein, 207 aa, Neisseria meningitidis; identical to SEQ ID NO: 1335

SEQ ID NO: 16686 - protein, 463 aa, Neisseria meningitidis; identical to SEQ ID NO: 6277

SEQ ID NO: 16687 - protein, 207 aa, Neisseria meningitidis; identical to SEQ ID NO: 7731

SEQ ID NO: 16688 - protein, 59 aa, Neisseria meningitidis
MFWYVIGFCALVVALLSLWVNAGAFGMQEDDTPQSDYERRLGLGAKLKNKNPDTDEKRQ

SEQ ID NO: 16689 - protein, 434 aa, Neisseria meningitidis; identical to SEQ ID NO: 7859

SEQ ID NO: 16690 - protein, 89 aa, Neisseria meningitidis; identical to SEQ ID NO: 1367

SEQ ID NO: 16691 - protein, 426 aa, Neisseria meningitidis
LKDCFPQGLNGKKTAVALSGGLDSVVLLHLLVRAGKKGGFIPDALHIHHGLSPRADDWADFCQNYCDMLGVGLETVKVCVEKNGLGIEAAARQKRYAAFAEKGFDVLALAHHRDDQIETFMLAVARGGGLRALAAMPAVRPFGEKGIIWRPLLPFSRQDIWDYAQKHGLPNIEDESNTDTAYLRNRFRHRILPELSAQIPHFGRHVLNNVRALQEDLALLDEVVVQDCRWVCGAGYFDTARWLTFSPRRKTHILRHFLKENGIPVPNQNALADIARVLTEAKTGRWNLQGFELHHYAGRLFVFRLEKTDKLRFLKDRQISGNLREILTGQGFVLKRHPFGLPEHLLEQDGILRTVAASDTLAMGGIHKDVKKILQGKRVLPVLRPIWPLVADSGNRPLALANCCADFQYSVSDGILPVHPDFPILF

SEQ ID NO: 16692 - protein, 249 aa, Neisseria meningitidis; identical to SEQ ID NO: 6406

SEQ ID NO: 16693 - protein, 131 aa, Neisseria meningitidis; identical to SEQ ID NO: 5973

SEQ ID NO: 16694 - protein, 841 aa, Neisseria meningitidis; identical to SEQ ID NO: 1223

SEQ ID NO: 16695 - protein, 430 aa, Neisseria meningitidis; identical to SEQ ID NO: 7728

SEQ ID NO: 16696 - protein, 459 aa, Neisseria meningitidis; identical to SEQ ID NO: 6558

SEQ ID NO: 16697 - protein, 163 aa, Neisseria meningitidis; identical to SEQ ID NO: 3672

SEQ ID NO: 16698 - protein, 298 aa, Neisseria meningitidis
MKGFTIIEFLVAGLLSMIVLMAVGSSYFTSRKLNDAANERLAAQQDLRNAATLIVRDARMAGGFGCFNMSEHPATDVIPDTTQQNSPFSLKRNGIDKLIPIAESSNINYQNFFQVGSALIFQYGIDDVNASTATTVVSSCAAISKPGKQIPTLEDAKKELKILDQDKEQNGNIARQRHVVNAYAVGRIADEEGLFRFQLDDKGKWGNPQLLVKKVRHMKVRYIYVSGCPEDDDAGKEETFKYTDKFDSAQNAVTPAGVEVLLSSGTDTKIAASSDNHIYAYRIDATIRGGNVCANRTL

SEQ ID NO: 16699 - protein, 169 aa, Neisseria meningitidis; identical to SEQ ID NO: 7919

SEQ ID NO: 16700 - protein, 488 aa, Neisseria meningitidis
MFKRSVIAMACIFALSACGGGGGGSPDVKSADTLSKPAAPVVSEKETEAKEDAPQAGSQGQGAPSAQGSQDMAAVSEENTGNGGAVTADNPKNEDEVAQNDMPQNAAGTDSSTPNHTPDPNMLAGNMENQATDAGESSQPANQPDMANAADGMQGDDPSAGGQNAGNTAAQGANQAGNNQAAGSSDPIPASNPAPANGGSNFGRVDLANGVLIDGPSQNITLTHCKGDSCSGNNFLDEEVQLKSEFEKLSDADKISNYKKDGKNDKFVGLVADSVQMKGINQYIIFYKPKPTSFARFRRSARSRRSLPAEMPLIPVNQADTLIVDGEAVSLTGHSGNIFAPEGNYRYLTYGAEKLPGGSYALRVQGEPAKGEMLAGAAVYNGEVLHFHTENGRPYPTRGRFAAKVDFGSKSVDGIIDSGDDLHMGTQKFKAAIDGNGFKGTWTENGSGDVSGKFYGPAGEEVAGKYSYRPTDAEKGGFGVFAGKKEQD

SEQ ID NO: 16701 - protein, 469 aa, Neisseria meningitidis; identical to SEQ ID NO: 6096

SEQ ID NO: 16702 - protein, 196 aa, Neisseria meningitidis; identical to SEQ ID NO: 2662

SEQ ID NO: 16703 - protein, 390 aa, Neisseria meningitidis; identical to SEQ ID NO: 7296

SEQ ID NO: 16704 - protein, 112 aa, Neisseria meningitidis; identical to SEQ ID NO: 6756

SEQ ID NO: 16705 - protein, 290 aa, Neisseria meningitidis
MSWLDKILPPKIKNRSKDGSSNVPEGLWHKCPSCSATVYSTELQQNNQVCPKCNHHNPLSARQRLNLLLDEEGREEIAGNVKPTDPLKFKDSKKYPDRLSAARKLTGEDDALVVMKGKMNGLPVVVAAFEFRFIGGSMGSVVGERFVQGIRRAVADNCPFVCVAASGGARMQEGVNSLMQMTKTSAALHLLTEKRLPFISVLTDPTMGGVSASFAFLGDVVLAEPNALIGFAGPRVIEQTVRETLPEGFQRAEFLLEKGAIDQIVDRRDMKRRISDLITLLCRQDKVSAA

SEQ ID NO: 16706 - protein, 99 aa, Neisseria meningitidis; identical to SEQ ID NO: 5992

SEQ ID NO: 16707 - protein, 324 aa, Neisseria meningitidis
VQPGLWASDGIFSEWRHSCRRRGSRMGKGGDIVVGNGKKYAAPLLVLGCVVFGLGSLIVRSVPVGSYAIAFWRLLISVFVFWFLARFFGQKFPKNRKTVRYALTAGVFLAFDLALWHESIHAVGPGISTLLNSLQIFFLSAIGVFFFGERLSGLKKAGLISAVAGVAMIAGAEFGYNGNAVWGFASGLVSGLMLALSMVFVRKTHEIEPVALFPSMMILSLGGAVSLVVPALLMDGGVLYPTTWKDAGLVLVYGVVMQCFAWAMVAYAIPLLSLSLTGLLLLSEPVAALFIDYFGLGKPIEGVQWAGVALTLSAIYLGSLKQQS

SEQ ID NO: 16708 - protein, 330 aa, Neisseria meningitidis; identical to SEQ ID NO: 7833

SEQ ID NO: 16709 - protein, 268 aa, Neisseria meningitidis; identical to SEQ ID NO: 6283

SEQ ID NO: 16710 - protein, 701 aa, Neisseria meningitidis; identical to SEQ ID NO: 6719

SEQ ID NO: 16711 - protein, 659 aa, Neisseria meningitidis
MSQLANAIRFLSADAVQKANSGHPGAPMGMAEMAETLWTKFLNHNPANPKFYNRDRFVLSNGHASMLLYSLLHLTGYNLSIEDLKNFRQLHSKTPGHPEYGYTDGVETTTGPLGQGIANAVGMALAEKILAAEFNKDGLNIVDHYTYVFMGDGCLMEGVSHEACSLAGTLGLGKLIVLYDDNNISIDGKVDGWFTENIPQRFESYGWHVVPNVNGHDTAAIQAAIEAARAETGKPSIICCKTLIGKGSANKEGSHKTHGAPLGADEIEATRKHLGWTYPAFEIPQEIYDAWNAKEQGAKLEADWNELFAQYQAKYPAEAAEFVRRMDKKLPDNFDEYVQAALKEVCAKAETIATRKASQNSIEILAKELPELVGGSADLTPSNLTDWSNSVSVTRDKGGNYIHYGVREFGMGAIMNGLVLHGGVKPFGATFLMFSEYERNALRMAALMKINPVFVFTHDSIGLGEDGPTHQPIEQTATLRLIPNMDVWRPCDTAESLVAWAEAVKAADHPSCLIFSRQNLKFQARSEQQLNDIKRGGYVISEAQGNAQAVIIATGSEVELALEAQKALAAQNIAVRVVSMPSTNVFDRQDAAYQAAVLPEGLPRIAVEAGHADGWYKYVGLNGAVVGINRFGESAPADLLFKAFGFTVDNVVDTVKSVL

SEQ ID NO: 16712 - protein, 227 aa, Neisseria meningitidis; identical to SEQ ID NO: 6671

SEQ ID NO: 16713 - protein, 135 aa, Neisseria meningitidis; identical to SEQ ID NO: 7150

SEQ ID NO: 16714 - protein, 199 aa, Neisseria meningitidis; identical to SEQ ID NO: 1022

SEQ ID NO: 16715 - protein, 222 aa, Neisseria meningitidis; identical to SEQ ID NO: 6339

SEQ ID NO: 16716 - protein, 79 aa, Neisseria meningitidis; identical to SEQ ID NO: 1083

SEQ ID NO: 16717 - protein, 96 aa, Neisseria meningitidis; identical to SEQ ID NO: 1755

SEQ ID NO: 16718 - protein, 658 aa, Neisseria meningitidis; identical to SEQ ID NO: 7626

SEQ ID NO: 16719 - protein, 163 aa, Neisseria meningitidis; identical to SEQ ID NO: 6300

SEQ ID NO: 16720 - protein, 394 aa, Neisseria meningitidis; identical to SEQ ID NO: 6005

SEQ ID NO: 16721 - protein, 552 aa, Neisseria meningitidis; identical to SEQ ID NO: 6029

SEQ ID NO: 16722 - protein, 431 aa, Neisseria meningitidis; identical to SEQ ID NO: 6975

SEQ ID NO: 16723 - protein, 307 aa, Neisseria meningitidis; identical to SEQ ID NO: 7357

SEQ ID NO: 16724 - protein, 310 aa, Neisseria meningitidis; identical to SEQ ID NO: 7369

SEQ ID NO: 16725 - protein, 369 aa, Neisseria meningitidis
MKYKRIVFKVGTSSITHSDGSLSRGKIQTITCQLAALHHAGHELVLVSSGAVAAGFGALGFKKRPVKIADKQASAAVGQGLLMEEYTANLSSDGIVSAQILLSRADFADKRRYQNAGGALSVLLQRRAVPIINENDTVSVEELKIGDNDTLSAQVAAMIQADLLVLLTDIDGLYTGNPNSNPDAVRLDKIEHINHEIIEMAGGSGSANGTGGMLTKIKAATIAAESGVPVYICSSLKPDALAEAAEHQADGSFFVPRAKGLRTQKQWLAFYSESRGSVYVDEGAEHALSEQGKSLLMSGIAGIEGHFSRMDTVTVYSKATKQPLGKGRVLFGSAAAEDLLKSRKAKGVFIHRDDWISITPEIRLLLTEF

SEQ ID NO: 16726 - protein, 256 aa, Neisseria meningitidis
VSETQNEQPVQPLVEHLIELRRRLMWTVVGILVCFFGLMPFAQQLYTFIADPLMANLPKDTSMIATDVIAPFFVPVKVTLMAAFLISLPHTLYQIWAFVAPALYQNEKRLITPLVLSSVSLFFIGMAFAYFLVFPVIFKFLASVTPVGVNMATDIDKYLSFILGMFVAFGTTFEVPIVVILLTKIGVVTTGQLKRARPYVIVGAFVIAAIITPPDVISQTLLAIPLILLYEAGIWFGRFFTPRSEQDGDIRPPATT

SEQ ID NO: 16727 - protein, 394 aa, Neisseria meningitidis; identical to SEQ ID NO: 277

SEQ ID NO: 16728 - protein, 269 aa, Neisseria meningitidis; identical to SEQ ID NO: 5955

SEQ ID NO: 16729 - protein, 77 aa, Neisseria meningitidis; identical to SEQ ID NO: 3505

SEQ ID NO: 16730 - protein, 468 aa, Neisseria meningitidis
MKNRVTNIHFVGIGGVGMSGIAEVLHNLGFKVSGSDQARNAATEHLGSLGIQVYPGHTAEHVNGADVVVTSTAVKKENPEVVAALEQQIPVIPRALMLAELMRFRDGIAIAGTHGKTTTTSLTASILGAAGLDPTFVIGGKLNAAGTNARLGKGEYIVAEADESDASFLHLTPIMSVVTNIDEDHMDTYGHSVEKLHQAFIDFIHRMPFYGKAFLCIDSEHVRAILPKVSKPYATYGLDDTADIYATDIENVGAQMKFTVHVQMKGHEQGSFEVVLNMPGRHNVLNALAAIGVALEVGASVEAIQKGLLGFEGVGRRFQKYGDIKLPNGGTALLVDDYGHHPVEMAATLAAARGAYLEKRLVLAFQPHRYTRTRDLFEDFTKVLNTVDALVLTEVYAAGEEPIAAADSRALARAIRVLGKLEPIYCENVADLPEMLLNVLQDGDIVLNMGAGSINRVPAALLALSKQI

SEQ ID NO: 16731 - protein, 352 aa, Neisseria meningitidis; identical to SEQ ID NO: 327

SEQ ID NO: 16732 - protein, 556 aa, Neisseria meningitidis; identical to SEQ ID NO: 6467

SEQ ID NO: 16733 - protein, 319 aa, Neisseria meningitidis; identical to SEQ ID NO: 5570

SEQ ID NO: 16734 - protein, 464 aa, Neisseria meningitidis; identical to SEQ ID NO: 7777

SEQ ID NO: 16735 - protein, 205 aa, Neisseria meningitidis; identical to SEQ ID NO: 6795

SEQ ID NO: 16736 - protein, 212 aa, Neisseria meningitidis; identical to SEQ ID NO: 1350

SEQ ID NO: 16737 - protein, 137 aa, Neisseria meningitidis; identical to SEQ ID NO: 7171

SEQ ID NO: 16738 - protein, 263 aa, Neisseria meningitidis; identical to SEQ ID NO: 6119

SEQ ID NO: 16739 - protein, 127 aa, Neisseria meningitidis; identical to SEQ ID NO: 1080

SEQ ID NO: 16740 - protein, 388 aa, Neisseria meningitidis; identical to SEQ ID NO: 1435

SEQ ID NO: 16741 - protein, 192 aa, Neisseria meningitidis; identical to SEQ ID NO: 6820

SEQ ID NO: 16742 - protein, 185 aa, Neisseria meningitidis; identical to SEQ ID NO: 7784

SEQ ID NO: 16743 - protein, 38 aa, Neisseria meningitidis; identical to SEQ ID NO: 6664

SEQ ID NO: 16744 - protein, 307 aa, Neisseria meningitidis; identical to SEQ ID NO: 6517

SEQ ID NO: 16745 - protein, 53 aa, Neisseria meningitidis; identical to SEQ ID NO: 7231

SEQ ID NO: 16746 - protein, 678 aa, Neisseria meningitidis
MTDNALLHLGEEPRFDQIKTEDIKPALQTAIAEAREQIAAIKAQTHTGWANTVEPLTGITERVGRIWGVVSHLNSVADTPELRAVYNELMPEITVFFTEIGQDIELYNRFKTIKNSPEFDTLSPAQKTKLNHDLRDFVLSGAELPPEQQAELAKLQTEGAQLSAKFSQNVLDATDAFGIYFDDAAPLAGIPEDALAMFAAAAQSESKTGYKIGLQIPHYLAVIQYADNRELREQIYRAYVTRASELSDDGKFDNTANIDRTLANALQTAKLLGFKNYAELSLATKMADTPEQVLNFLHDLARRAKPYAEKDLAEVKAFARESLNLADLQPWDLGYASEKLREAKYAFSETEVKKYFPVGKVLNGLFAQIKKLYGIGFTEKTVPVWHKDVRYFELQQNGETIGGVYMDLYAREGKRGGAWMNDYKGRRRFSDGTLQLPTAYLVCNFAPPVGGREARLSHDEILILFHETGHGLHHLLTQVDELGVSGINGVEWDAVELPSQFMENFVWEYNVLAQMSAHEETGVPLPKELFDKMLAAKNFQRGMFLVRQMEFALFDMMIYSEDDEGRLKNWQQVLDSVRKKVAVIQPPEYNRFALSFGHIFAGGYSAGYYSYAWAEVLSADAYAAFEESDDVAATGKRFWQEILAVGGSRSAAESFKAFRGREPSIDALLRHSGFDNAV

SEQ ID NO: 16747 - protein, 421 aa, Neisseria meningitidis
MSKKQPAQPTRRTLFKTAIAAGAVGAIGGYLGGKKQGETAERTAESQHSPQAYPCYGEHQAGIVTPQQAFSIMCAFDVTAQSAKQLENLFRTLTARIEFLTQGGEYQDGDDKLPPAGSGILGKAFNPDGLTVTVGVGSSLFDGRFGLKDKKPIHLQEMRDFSNDKLQKSWCDGDLSLQICAFTPETCQAALRDIIKHTVQTAVIRWSIDGWQPKSEPGAMAARNLLGFRDGTGNPKVSDPKTADEVLWTGVAANSLDEPEWAKNGSYQAVRLIRHFVEFWDRTPLQEQTDIFGRRKYSGAPMDGKKEADQPDFAKDPEGDITPKDSHIRLANPRDPEFLKKHRLFRRAYSYSRGLASSGQLDVGLVFVCYQANLADGFIFVQNLLNGEPLEEYISPFGGGYFFVLPGVEKGGFLGQGLLGV

SEQ ID NO: 16748 - protein, 67 aa, Neisseria meningitidis; identical to SEQ ID NO: 86

SEQ ID NO: 16749 - protein, 416 aa, Neisseria meningitidis; identical to SEQ ID NO: 7602

SEQ ID NO: 16750 - protein, 443 aa, Neisseria meningitidis; identical to SEQ ID NO: 6478

SEQ ID NO: 16751 - protein, 90 aa, Neisseria meningitidis; identical to SEQ ID NO: 1142

SEQ ID NO: 16752 - protein, 126 aa, Neisseria meningitidis; identical to SEQ ID NO: 6506

SEQ ID NO: 16753 - protein, 264 aa, Neisseria meningitidis; identical to SEQ ID NO: 6162

SEQ ID NO: 16754 - protein, 160 aa, Neisseria meningitidis; identical to SEQ ID NO: 236

SEQ ID NO: 16755 - protein, 468 aa, Neisseria meningitidis; identical to SEQ ID NO: 7578

SEQ ID NO: 16756 - protein, 88 aa, Neisseria meningitidis; identical to SEQ ID NO: 6148

SEQ ID NO: 16757 - protein, 398 aa, Neisseria meningitidis; identical to SEQ ID NO: 6385

SEQ ID NO: 16758 - protein, 214 aa, Neisseria meningitidis; identical to SEQ ID NO: 6060

SEQ ID NO: 16759 - protein, 91 aa, Neisseria meningitidis; identical to SEQ ID NO: 5612

SEQ ID NO: 16760 - protein, 236 aa, Neisseria meningitidis; identical to SEQ ID NO: 2130

SEQ ID NO: 16761 - protein, 278 aa, Neisseria meningitidis; identical to SEQ ID NO: 6061

SEQ ID NO: 16762 - protein, 219 aa, Neisseria meningitidis; identical to SEQ ID NO: 2874

SEQ ID NO: 16763 - protein, 230 aa, Neisseria meningitidis; identical to SEQ ID NO: 6936

SEQ ID NO: 16764 - protein, 221 aa, Neisseria meningitidis; identical to SEQ ID NO: 6256

SEQ ID NO: 16765 - protein, 674 aa, Neisseria meningitidis; identical to SEQ ID NO: 7403

SEQ ID NO: 16766 - protein, 225 aa, Neisseria meningitidis; identical to SEQ ID NO: 7575

SEQ ID NO: 16767 - protein, 249 aa, Neisseria meningitidis; identical to SEQ ID NO: 6711

SEQ ID NO: 16768 - protein, 463 aa, Neisseria meningitidis
MLLVMRAKQGKKTPKRKSQGVGNTQGQTPGSNDSDWVDQIGQSVSDGTQPDWSWNESAETASAAVSAQEVDPLTEYQVYKQFGYQGKAAESLAAYLDGIPDGEAKPENLIRELLDINLEVGDVDVLADNLQKYGKLILSELLAKYIEQALQRDSNHLRIRVLAEEGLGWGTQEIEKRAEGGSATAASASPPPDAGGKAYEAEEIKRIPIVRGKKDVSGISQEEIGAIAGLVRADQGAKILKDKVSYETASKQYDRAIQTSEKPANLIIDALKLDYQHADIDRFAGHLWKLYQTLGNYGRQVKERMLGWGYSLGYHEVFDDLEKGPNDRQIKDIGMGHGYLPKNIQKFKSQHRDLVLQDSSLINTGSSPADDAVKEVESLLMYGQIEAAMDVLEQAVLKYPDESQLYITLIDIYERTEDWDRLGQFLRVLRERADRLPEEVVMLMSRLLQRMNQNIKKIKRYGK

SEQ ID NO: 16769 - protein, 227 aa, Neisseria meningitidis; identical to SEQ ID NO: 6436

SEQ ID NO: 16770 - protein, 461 aa, Neisseria meningitidis
MISIFDIFKIGIGPSSSHTVGPMKAAAAFAAGLDAQAVRIVIDIYGSLALTGYGHGTFDALMLGLEGSLPHDIPLAGIPERLERIRTQHILRLNGQEIRFIPDRDLNILGNQVLPKHPNSLRFTAYASDGTVLNEQVYYSVGGGFVVTEEDFDRQAETEKAVPYPYTSCAELLARCRLNRLDISEVVLANEAALAGCGEAEIRRRAAAVAEVMEGCIKRGLGADGELPSGLNVRRRAPQLAAKLKVLRETEIVNTQLWPMVYAMAVNEENAAGGRVVTAPTNGAAGIIPAVLHYFRKFNPHATQERVENFLLTAGAIGILYKTNASISGADVGCQGEVGVACSMAAGAYAEVIGGTPKQVENAAEMAMEHHLGLTCDPVGGLVQIPCIERNGIAAEKALKLGTLALLEDGTDKKVSLDEVIRTMLQTGRDMKATYKETSLAGLAATLRKKAVPVSVRVVEC

SEQ ID NO: 16771 - protein, 321 aa, Neisseria meningitidis; identical to SEQ ID NO: 4435

SEQ ID NO: 16772 - protein, 285 aa, Neisseria meningitidis; identical to SEQ ID NO: 6917

SEQ ID NO: 16773 - protein, 291 aa, Neisseria meningitidis; identical to SEQ ID NO: 5426

SEQ ID NO: 16774 - protein, 650 aa, Neisseria meningitidis
MRFAVALLSLLGIASVIGTVLQQNQPQTDYLVKFGSFWAQIFGFLGLYDVYASAWFVVIMMFLVVSTSLCLIRNVPPFWREMKSFREKVKEKSLAAMRHSSLLDVKIAPEVAKRYLEVQGFQGKTINREDGSVLIAAKKGTMNKWGYIFAHVALIVICLGGLIDSNLLLKLGMLTGRIVPDNQAVYAKDFKPESILGASNLSFRGNVNISEGQSADVVFLNADNGILVQDLPFEVKLKKFHIDFYNTGMPRDFASDIEVTDKATGEKLERTIRVNHPLTLHGITIYQASFADGGSDLTFKAWNLGDASREPVVLKATSIHQFPLEIGKHKYRLEFDQFTSMNVEDMSEGAEREKSLKSTLNDVRAVTQEGKKYTNIGPSIVYRIRDAAGQAVEYKNYMLPVLQEQDYFWITGTRSGLQQQYRWLRIPLDKQLKADTFMALREFLKDGEGRKRLVADATKGAPAEIREQFMLAAENTLNIFAQKGYLGLDEFITSNIPKEQQDKMQGYFYEMLYGVMNAALDETIRRYGLPEWQQDEARNRFLLHSMDAYTGLTEYPAPMLLQLDGFSEVRSSGLQMTRSPGALLVYLGSVLLVLGTVLMFYVREKRAWVLFSDGKIRFAMSSARSERDLQKEFPKHVESLQRLGKDLNHD

SEQ ID NO: 16775 - protein, 867 aa, Neisseria meningitidis; identical to SEQ ID NO: 7526

SEQ ID NO: 16776 - protein, 72 aa, Neisseria meningitidis; identical to SEQ ID NO: 292

SEQ ID NO: 16777 - protein, 219 aa, Neisseria meningitidis; identical to SEQ ID NO: 7222

SEQ ID NO: 16778 - protein, 334 aa, Neisseria meningitidis; identical to SEQ ID NO: 6111

SEQ ID NO: 16779 - protein, 300 aa, Neisseria meningitidis; identical to SEQ ID NO: 7395

SEQ ID NO: 16780 - protein, 238 aa, Neisseria meningitidis; identical to SEQ ID NO: 7407

SEQ ID NO: 16781 - protein, 310 aa, Neisseria meningitidis; identical to SEQ ID NO: 7606

SEQ ID NO: 16782 - protein, 193 aa, Neisseria meningitidis; identical to SEQ ID NO: 6958

SEQ ID NO: 16783 - protein, 1204 aa, Neisseria meningitidis; identical to SEQ ID NO: 7555

SEQ ID NO: 16784 - protein, 512 aa, Neisseria meningitidis
MNMLGALAKVGSLTMVSRVLGFVRDTVIARAFGAGMATDAFFVAFKLPNLLRRVFAEGAFAQAFVPILAEYKETRSKEAAEAFIRHVAGMLSFVLVIVTALGILAAPWVIYVSAPGFAQDADKFQLSIDLLRITFPYILLISLSSFVGSVLNSYHKFGIPAFTPTFLNVSFIVFALFFVPYFDPPVTALAWAVFVGGILQLGFQLPWLAKLGFLKLPKLNFKDAAVNRVMKQMAPAILGVSVAQISLVINTIFASYLQSGSVSWMYYADRMMELPGGVLGAALGTILLPTLSKHSANQDTEQFSALLDWGLRLCMLLTLPAAVGLAVLSFPLVATLFMYREFTLFDAQMTQHALIAYSFGLIGLIMIKVLAPGFYARQNIKTPVKIAIFTLICTQLMNLAFIGPLKHVGLSLAIGLGACINAGLLFYLLRRHGIYQPGKGWAAFLAKMLLSLAVMGGGLYAAQIWLPFDWAHAGGMQKAARLFILIAVGGGLYFASLAALGFRPRHFKRVES

SEQ ID NO: 16785 - protein, 377 aa, Neisseria meningitidis
MSTPALLVLADGSVFHGTSIGYEGSTSGEVVFNTSMTGYQEILTDPSYCKQIVTLTYPHIGNTGTNAEDEESRSVYAAGLIIRDLPLLHSNFRASESLHDYLVRNKTVAIADIDTRRLTTLLREKGAQGGAILTGADATIEKAQELIAAFGSMVGKDLAKEVSCTETYEWTEGEWALGKGFVTPDEQPYHVVAYDFGVKTNILRMLASRGCRLTVVPAQTSAEDVLALNPDGVFLSNGPGDPEPCTYAIKAVQKLIESGKPIFGICLGHQLISLAIGAKTLKMRFSHHGANHPVQDLDSGKVVITSQNHGFAVDADTLPANARITHKSLFDNTLQGIELTDKPVFCFQGHPEASPGPQDVGYLFDKFIGNMKAAKRA

SEQ ID NO: 16786 - protein, 212 aa, Neisseria meningitidis; identical to SEQ ID NO: 6992

SEQ ID NO: 16787 - protein, 414 aa, Neisseria meningitidis
MAFLKLTEQNVQGKTVLIRADMNVPFKDGKISDDTRIRASLASIKYCVDNGASVIVMTHLGRPTEGEFHPEDDVAPVAAHLGSLLGKDVKVLNDWRENKPALNAGDVVMLQNVRINKGEKKNDLELGKAYASLCDVFVNDAFGTAHRAQASTEAVAQAAPVACAGVLMAGELDALGKALKQPARPMVAIVAGSKVSTKLTILESLADKVDQLIVGGGIANTFLLAEGKAIGKSLAEHDLVEESKKIMAKMAAKGGSVPLPTDVVVAKAFAADAEAVVKDIAADAEAVVKDIAADAEAVVKDIADVAEDEMILDIGPKSAAALADLLKAAGTVVWNGPVGVFEFDQFAGGTKALAEAIAQSKAFSIAGGGDTLAAIAKFGVTEQIGYISTGGGAFLEFLEGKELPAVAALEKRGA

SEQ ID NO: 16788 - protein, 434 aa, Neisseria meningitidis
MKPFAENIPHSLRGNCRDEALPPHTVDCPECGCRADVPQLDRWEAAFCPRCGYKLFRVGRHPFSAPPAYAAASLILMAFAYGMTYIEVGIPGAASVLSLPEMMRLMVFQDYGFLAEVMFVLTFGAPVLFLLLCLYVYAALIRKQAYPALRLATRVMVRLRQAMMVDVFFVSTLVAYIKLSSVAEVRFGSAFYLMFALSVMLIRTSVSVPQHWVYFQIGRLTGDNAVQTASEGKTCCSRCLYFRDSAESPCGVCGAELYRRRPKSLSISSAFLTAAVILYFPANILPIMISSNPAATEVNTILNGIAYMWDEGDRLIAAVIFSASILVPVLKIAAMSVLIASARFALPTGAKKLSHLYRITEAVGRWSMIDIFVIIILMCSFHTYAARVIPGSAAVYFCLVVILTMLSAYYFDPRLLWDKRASDGIAFNETEKHD

SEQ ID NO: 16789 - protein, 384 aa, Neisseria meningitidis; identical to SEQ ID NO: 7608

SEQ ID NO: 16790 - protein, 125 aa, Neisseria meningitidis; identical to SEQ ID NO: 348

SEQ ID NO: 16791 - protein, 92 aa, Neisseria meningitidis; identical to SEQ ID NO: 6928

SEQ ID NO: 16792 - protein, 389 aa, Neisseria meningitidis; identical to SEQ ID NO: 5513

SEQ ID NO: 16793 - protein, 98 aa, Neisseria meningitidis
MKKSLFAAALLSLVLAACGGEKAAEAPAAEAPAAEAPATEAPAAEAPAAEAPAAEAPAAEAAATEAPAAEAAATEAPAAEAAATEAPAAEAPAAEAAK

SEQ ID NO: 16794 - protein, 127 aa, Neisseria meningitidis; identical to SEQ ID NO: 7464

SEQ ID NO: 16795 - protein, 258 aa, Neisseria meningitidis; identical to SEQ ID NO: 2774

SEQ ID NO: 16796 - protein, 274 aa, Neisseria meningitidis; identical to SEQ ID NO: 7818

SEQ ID NO: 16797 - protein, 182 aa, Neisseria meningitidis
MNLSNHFLIAMPDMEDAFFSQSVVYICKHDEDGALGIAINKPSPITMDMIFSATGKNIPMRMQHDSVMMGGPVQVERGYVVHTPIGNWQSSIGVSDNIALTSSRDVIENISREGAVDKALISIGYSSWSKGQLERELADNAWLTVPADEHILFDIPYEHRYAAAFAKLGIDPLALFSGAGHA

SEQ ID NO: 16798 - protein, 173 aa, Neisseria meningitidis; identical to SEQ ID NO: 6851

SEQ ID NO: 16799 - protein, 492 aa, Neisseria meningitidis; identical to SEQ ID NO: 6093

SEQ ID NO: 16800 - protein, 71 aa, Neisseria meningitidis; identical to SEQ ID NO: 6205

SEQ ID NO: 16801 - protein, 198 aa, Neisseria meningitidis; identical to SEQ ID NO: 6940

SEQ ID NO: 16802 - protein, 284 aa, Neisseria meningitidis; identical to SEQ ID NO: 6916

SEQ ID NO: 16803 - protein, 43 aa, Neisseria meningitidis; identical to SEQ ID NO: 12582

SEQ ID NO: 16804 - protein, 661 aa, Neisseria meningitidis; identical to SEQ ID NO: 6484

SEQ ID NO: 16805 - protein, 405 aa, Neisseria meningitidis; identical to SEQ ID NO: 7293

SEQ ID NO: 16806 - protein, 706 aa, Neisseria meningitidis; identical to SEQ ID NO: 6592

SEQ ID NO: 16807 - protein, 40 aa, Neisseria meningitidis; identical to SEQ ID NO: 6365

SEQ ID NO: 16808 - protein, 174 aa, Neisseria meningitidis
VLDREGYRPNVGIILINNRNEVFWGKRVREHSWQFPQGGIKPGESPETAMYRELYEEVGLLPQHVKIIGRTRDWLRYDVPNNWVRREWRGSYRGQKQIWYLLRLTGRDCDVNLRATRHPEFDGWRWHQYWAPVDEVIDFKRDVYLGALKELSSRFLRGMESYEDFAARQSSDNR

SEQ ID NO: 16809 - protein, 73 aa, Neisseria meningitidis; identical to SEQ ID NO: 227

SEQ ID NO: 16810 - protein, 406 aa, Neisseria meningitidis; identical to SEQ ID NO: 14094

SEQ ID NO: 16811 - protein, 56 aa, Neisseria meningitidis; identical to SEQ ID NO: 326

SEQ ID NO: 16812 - protein, 124 aa, Neisseria meningitidis; identical to SEQ ID NO: 5947

SEQ ID NO: 16813 - protein, 201 aa, Neisseria meningitidis; identical to SEQ ID NO: 7524

SEQ ID NO: 16814 - protein, 186 aa, Neisseria meningitidis; identical to SEQ ID NO: 6815

SEQ ID NO: 16815 - protein, 344 aa, Neisseria meningitidis
LEDEDFIRAASMLAEEVFGFGIYKESKGSGGRFYERCWLMGSEDALYGRVHFGGQQNTILFELTGTGCGVAKEGWESRLFAFLTNAIRPKITHVDIAKDFFNGEYSPNQAREDRNKGMFTCHHVKPKGECLGSDWEEDDEAKMTKGKTYGIGSRESSKYVRVYEKGKQLGDKTSTWTRFEIEFKAKDIVIPFEVLQNPGEYFGGAYPICERFAQKATRIHAVKEDKVISADRYLEWVKKQFGRAANGLKFIFPELDKAKLFELIEPSHHKLPKSLAPEAYDCAFLKAQAIHEQPAFKPYKDPYYMYEYYENLEKQLEQQKHVNNEESYNNFIYDKFARLPISWA

SEQ ID NO: 16816 - protein, 251 aa, Neisseria meningitidis; identical to SEQ ID NO: 6395

SEQ ID NO: 16817 - protein, 106 aa, Neisseria meningitidis; identical to SEQ ID NO: 7008

SEQ ID NO: 16818 - protein, 273 aa, Neisseria meningitidis; identical to SEQ ID NO: 6485

SEQ ID NO: 16819 - protein, 310 aa, Neisseria meningitidis
VQDGRQQTISLGRYPDFSLADAREWREEVRRKRAHGENVVNKKVRADFAFEKVARDWFVRWSKGRSEKYAGQVMRNFERWVFPAIGNLDIRQIRTADVVGCLRVMEARGIVDTLRKTKNSLKMVFAFAVGSGMMEINPVAQIGSGVFERAKTGNMAALSPSELPRLIDFLEQRNEFAVYAGRVRIHPVTRLCIYWLLLTMTRIQEAALMEWSELDGEVWRIPAERKKERRGHDVPLSRAMQWVLDQARALNVNGRFVFESVNFQGHINKESPRVAMQRAGLDTTAHGLRSLARTYLREVLKVDSIMRKRK

SEQ ID NO: 16820 - protein, 361 aa, Neisseria meningitidis; identical to SEQ ID NO: 6453

SEQ ID NO: 16821 - protein, 301 aa, Neisseria meningitidis; identical to SEQ ID NO: 1112

SEQ ID NO: 16822 - protein, 65 aa, Neisseria meningitidis; identical to SEQ ID NO: 127

SEQ ID NO: 16823 - protein, 175 aa, Neisseria meningitidis
MKQKIWYTYDDIHRVIKALAEKIRNADIKYDAMIAIGGGGFIPARMLRCFLEIPIYAVTTAYYDSDNEGQVTEEVKKVQWLDPVPEALRGKNVLVVDEVDDSRVTMEFCLKELLKEDFGTIGVAVLHEKIKAKAGKIPEGIPYFSGITVEDWWINYPWDALDIDEHNRLAEAGRG

SEQ ID NO: 16824 - protein, 288 aa, Neisseria meningitidis; identical to SEQ ID NO: 7747

SEQ ID NO: 16825 - protein, 185 aa, Neisseria meningitidis; identical to SEQ ID NO: 313

SEQ ID NO: 16826 - protein, 346 aa, Neisseria meningitidis
MQAVVVNKNVAGDVEVIEREVRPLEYGEALVEVEYCGVCHTDLHVAAGDYGEKPGRVLGHEGIGLVKEVADGVKNLKVGDRVSIAWLFQSCGSCEYCNTGRETLCRSVLNAGYTADGGMATHCIVSADYAVKVPEGLDPAQASSITCAGVTTYKAIKVSGVRPGQWIAIYGAGGLGNLGVQYAKKVFGAHVVAIDINDDKLAFAKETGADLVVNAAKEDAAKVIQEKTGGAHAAVVTAVSAAAFNSAVNCVRAGGRVVAIGLPPESMDLSIPRLVLDGIEVVGSLVGTRKDLEEAFQFGAEGLVVPKVQLRALDEAPAIFQEMREGKITGRMVIDMKKECGCGHHH

SEQ ID NO: 16827 - protein, 270 aa, Neisseria meningitidis; identical to SEQ ID NO: 7099

SEQ ID NO: 16828 - protein, 102 aa, Neisseria meningitidis; identical to SEQ ID NO: 1826

SEQ ID NO: 16829 - protein, 92 aa, Neisseria meningitidis; identical to SEQ ID NO: 510

SEQ ID NO: 16830 - protein, 223 aa, Neisseria meningitidis; identical to SEQ ID NO: 7430

SEQ ID NO: 16831 - protein, 267 aa, Neisseria meningitidis
MKKILLTVSLGLALSACATQGTVDKDAQITQDWSVEKLYAEAQDELNSSNYTRAVKLYEILESRFPTSRHAQQSQLDTAYAYYKDDEKDKALAAIDRFRRLHPQHPNMDYALYLRGLVLFNEDQSFLNKLASQDWSDRDPKANREAYQAFAELVQRFPNSKYAADATARMVKLVDALGGNEMSVARYYMKRGAYIAAANRAQKIIGSYQNTRYVEESLAILELAYKKLDKPRLAADTRRVLETNFPKSPFLKQPWRSDDMPWWRYWH

SEQ ID NO: 16832 - protein, 916 aa, Neisseria meningitidis; identical to SEQ ID NO: 4091

SEQ ID NO: 16833 - protein, 302 aa, Neisseria meningitidis; identical to SEQ ID NO: 6232

SEQ ID NO: 16834 - protein, 808 aa, Neisseria meningitidis; identical to SEQ ID NO: 7850

SEQ ID NO: 16835 - protein, 167 aa, Neisseria meningitidis; identical to SEQ ID NO: 6294

SEQ ID NO: 16836 - protein, 237 aa, Neisseria meningitidis; identical to SEQ ID NO: 6806

SEQ ID NO: 16837 - protein, 138 aa, Neisseria meningitidis; identical to SEQ ID NO: 937

SEQ ID NO: 16838 - protein, 354 aa, Neisseria meningitidis; identical to SEQ ID NO: 7427

SEQ ID NO: 16839 - protein, 257 aa, Neisseria meningitidis; identical to SEQ ID NO: 6954

SEQ ID NO: 16840 - protein, 210 aa, Neisseria meningitidis; identical to SEQ ID NO: 7192

SEQ ID NO: 16841 - protein, 321 aa, Neisseria meningitidis; identical to SEQ ID NO: 7025

SEQ ID NO: 16842 - protein, 92 aa, Neisseria meningitidis; identical to SEQ ID NO: 600

SEQ ID NO: 16843 - protein, 204 aa, Neisseria meningitidis; identical to SEQ ID NO: 7256

SEQ ID NO: 16844 - protein, 704 aa, Neisseria meningitidis
MAYQVLARKWRPKTFADLVGQEHVVKALQNALDEGRLHHAYLLTGTRGVGKTTIARILAKSLNCENAQHGEPCGVCESCTQIDAGRYVDLLEIDAASNTGIDNIREVLENAQYAPTAGKYKVYIIDEVHMLSKSAFNAMLKTLEEPPEHVKFILATTDPHKVPVTVLSRCLQFVLRNMTAQQVADHLAHVLDSEKIAYEPAALQLLGRAAAGSMRDALSLLDQAIALGSGKVAENDVRQMIGAVDKQYLYELLTGIINQDGAALTAKAQEMAACAVGFDNALGELAILLQHLALIQAVPNALAHDDPDSDILHRLAQTISGEQIQLYYQIAVHGKRDLSLAPDEYAGFMMTLLRMLAFAPLAAASCDANAVIENTELKSPSAQTAEKETAAKKPQPRPEAETAQTPVQTASAAAMPSEGKTAEPVTNQENNDIPPWEDAPDETAAGTAQASAKSIQTASEAGTPPKNQVSKNEAADNETDAPLSEVPSENPIQATPNNEALETEAFAHEAPAKPFNGYSFPNDDYLVEDGAEIPPPDWEHAAPADAEEENNADESSNNEDHTPYAPPPEFSTENWAAIVRHFARKLGAAQMPAQHSAWTEYHPDTGLMVLAMTAEARATADKKRLDKIRDTLAQAYGLQLTLQTQDWRDEAGRETPAMQDKRVQAEDRQKAQALLEADPAAQKILQAFGAQWQPESLELAANRP

SEQ ID NO: 16845 - protein, 489 aa, Neisseria meningitidis; identical to SEQ ID NO: 7627

SEQ ID NO: 16846 - protein, 256 aa, Neisseria meningitidis; identical to SEQ ID NO: 6198

SEQ ID NO: 16847 - protein, 260 aa, Neisseria meningitidis; identical to SEQ ID NO: 6334

SEQ ID NO: 16848 - protein, 122 aa, Neisseria meningitidis; identical to SEQ ID NO: 6208

SEQ ID NO: 16849 - protein, 292 aa, Neisseria meningitidis; identical to SEQ ID NO: 1803

SEQ ID NO: 16850 - protein, 128 aa, Neisseria meningitidis; identical to SEQ ID NO: 6045

SEQ ID NO: 16851 - protein, 239 aa, Neisseria meningitidis; identical to SEQ ID NO: 5111

SEQ ID NO: 16852 - protein, 124 aa, Neisseria meningitidis; identical to SEQ ID NO: 6358

SEQ ID NO: 16853 - protein, 594 aa, Neisseria meningitidis; identical to SEQ ID NO: 7618

SEQ ID NO: 16854 - protein, 367 aa, Neisseria meningitidis; identical to SEQ ID NO: 6599

SEQ ID NO: 16855 - protein, 411 aa, Neisseria meningitidis
MLVCIFTGFTSGLPLYFLINLIPAWLRSEQVDLKSIGLMALIGLPFTWKFLWSPLMDAVRLPVLGRRRGWMLLTQAGLLAALAVYAFLNPRNHLPLIAGLSVLVAFFSASQDIVLDAFRREILSDEELGLGNSVHVNAYRIAALIPGSLSLVLADRMPWLEVFVITSLFMLPGLLMTLFLAREPVLPPAVPKTLKQTVVEPFKEFFTRKGIASAVCVLLFIFLYKLGDSMATALATPFYLDMGFSKTDIGLIAKNAGLWPAVAAGILGGVWMLKIGVNKALWLFGAVQAVTVLGFVWLAGFGPFDTVGTGERLMLAAVIGAEAVGVGLGTAAFVSYMARETNPAFTATQLALFTSLSAVPRTVINSFAGYLIEWLGYVPFFQLCFALALPGMLLLLKVAPWNGEKTQDAGR

SEQ ID NO: 16856 - protein, 103 aa, Neisseria meningitidis; identical to SEQ ID NO: 392

SEQ ID NO: 16857 - protein, 269 aa, Neisseria meningitidis; identical to SEQ ID NO: 7566

SEQ ID NO: 16858 - protein, 68 aa, Neisseria meningitidis; identical to SEQ ID NO: 7302

SEQ ID NO: 16859 - protein, 314 aa, Neisseria meningitidis; identical to SEQ ID NO: 7591

SEQ ID NO: 16860 - protein, 437 aa, Neisseria meningitidis; identical to SEQ ID NO: 7298

SEQ ID NO: 16861 - protein, 118 aa, Neisseria meningitidis; identical to SEQ ID NO: 367

SEQ ID NO: 16862 - protein, 241 aa, Neisseria meningitidis; identical to SEQ ID NO: 400

SEQ ID NO: 16863 - protein, 1069 aa, Neisseria meningitidis; identical to SEQ ID NO: 5956

SEQ ID NO: 16864 - protein, 100 aa, Neisseria meningitidis; identical to SEQ ID NO: 1675

SEQ ID NO: 16865 - protein, 456 aa, Neisseria meningitidis; identical to SEQ ID NO: 7779

SEQ ID NO: 16866 - protein, 328 aa, Neisseria meningitidis; identical to SEQ ID NO: 7362

SEQ ID NO: 16867 - protein, 336 aa, Neisseria meningitidis; identical to SEQ ID NO: 7613

SEQ ID NO: 16868 - protein, 614 aa, Neisseria meningitidis; identical to SEQ ID NO: 3083

SEQ ID NO: 16869 - protein, 90 aa, Neisseria meningitidis
MIAKHIDRFPLLKLDQVIDWQPIEQYLNRQKTRYLRDHRGRPACPLLSMFKAVLLGQWHSLSDPELEHSLITRIDFNLFCRFDELSSIVD

SEQ ID NO: 16870 - protein, 287 aa, Neisseria meningitidis; identical to SEQ ID NO: 11456

SEQ ID NO: 16871 - protein, 205 aa, Neisseria meningitidis
MFTGIVQGLGKLTAIHRPSEAFQTYVVELPQEAADNLQRGASVANNGCCLTITEIEGNRVSFDLMAETLAKTNLGLLKEGDCVNIERAARFGDEIGGHVMSGHIMATVPIVEIERDGYNRTVWFSLPHELKPYILTKGFVGLDGCSLTIGKVEDSRFNVHLIPETLERTLFGSRKVGDRINIEIDPNTQAIVDTVERLMAQRYAK

SEQ ID NO: 16872 - protein, 428 aa, Neisseria meningitidis; identical to SEQ ID NO: 7153

SEQ ID NO: 16873 - protein, 63 aa, Neisseria meningitidis; identical to SEQ ID NO: 7354

SEQ ID NO: 16874 - protein, 1067 aa, Neisseria meningitidis; identical to SEQ ID NO: 6167

SEQ ID NO: 16875 - protein, 433 aa, Neisseria meningitidis
MPSEHQHISSLLDFDRTHLLHPYTSMTDPLPVYPVKRAEGVFIELADGTRLIDGMSSWWCAIHGYNHPVLNQVVETQIKQMAHVMFGGLTHEPAVELGKLLVGILPQGLDRIFYADSGSVSVEVALKMAVQYQQARGLTAKQNIATVRRGYHGDTWNAMSVCDPETGMHHIFGSALPQRYFVDNPKSRFDDEWDGADLQPVRALFEVHHADIAAFILEPVVQGAGGMYFYHPQYLRGLRDLCDEFDIVLIFDEIATGFGRTGKMFACEHAEVVPDIMCIGKGLSGGYMTLAAAITSQKVTETISRGEAGVFMHGPTFMANPLACAVACASVKLLLSQDWQANIRRIESILKCCLKTAWDIRGVKDVRVLGAIGVIELEKGVDMARFQADCVAQGIWVRPFGRLVYLMPPYIISDGVLTKLADKTVQILKEHSK

SEQ ID NO: 16876 - protein, 787 aa, Neisseria meningitidis
MQFSYSWLKTQADTELSSDKLEHLLTMSGLEVEEAETAAPAFAGVVIAEVKSVEKHPDADRLNVTQVDAGTGELVQIVCGAPNVKPGIKVPCSLPGAVLPGNFKIKPTKMRGVPSNGMLCSTNELGLPDDGVDGLHILPEDAPVGTNIREYLDLDDTLFTLKITPNRADCLSVKGIAREVSALTGCAFRQPEIHTAPITGSRKQPVQINAPADCGRFISRVIENVNAKAATPDWMKQRLERSGIRSISALVDIGNYVMLEIGQPMHVFDADKLSGSLHIRRAREGETLECLNEKTVSLSENTLVVADEKGVLSLAGLMGGAASAVSDGTQNIVLEAAWFAPEIIAGKSRQYGFGSDSSFRFERGVDYRLQADAIERATELVLQICGGAAGEMVEAQGELPEAKQVGLRLGRLKTVLGVDIPAEQVETILQHLGLQPEKTAEGFRVTAPSFRFDIEIEADLIEEIGRVYGYENIPDDYTSGRLKMLELPETRRPRFAVYNEMAARGYREVVSYAFVDEQWEQDFAANADPIRLQNPLAAQYAVMRSTLIGGLVEILQNNLNRKQNRVCVFEIARVFSKGSDGQFVQNERIGGLWYGAVMPEQWGGKTRNADFYDIKADVENLLKNKAVEFVKTGHPALHPGRAANIVSDGKVIGFVGELHPKWLQKYDLPQAPLVFEIDMAAVLECGKTRYRAVSKFQPVRRDLAFVMPEAMSHDDLLLVLKGAANKLVQEISVFDVYRGTGLPEGMKSVAVKVILQDMENTLTDEAVEPLIGKLIGAATAAGARLRS

SEQ ID NO: 16877 - protein, 169 aa, Neisseria meningitidis
MKKKLLSGIKFAVQTALVFLLVSLFLDWIRKPEEPAGAAGRPLTLLSGQRLTLGQFSRDKAVLVYFWGSWCGVCRYQSPIIDDLAADGVPVVGVAVRSGSSAEVAAYMAKRGLGFPTVNDEDGGLARSWRIVATPAVVLVKNGKMVHYTTGISSYWGLRARIFQADVFG

SEQ ID NO: 16878 - protein, 143 aa, Neisseria meningitidis; identical to SEQ ID NO: 6042

SEQ ID NO: 16879 - protein, 332 aa, Neisseria meningitidis; identical to SEQ ID NO: 7596

SEQ ID NO: 16880 - protein, 753 aa, Neisseria meningitidis; identical to SEQ ID NO: 6723

SEQ ID NO: 16881 - protein, 274 aa, Neisseria meningitidis; identical to SEQ ID NO: 6853

SEQ ID NO: 16882 - protein, 404 aa, Neisseria meningitidis; identical to SEQ ID NO: 7372

SEQ ID NO: 16883 - protein, 67 aa, Neisseria meningitidis; identical to SEQ ID NO: 6900

SEQ ID NO: 16884 - protein, 169 aa, Neisseria meningitidis; identical to SEQ ID NO: 2049

SEQ ID NO: 16885 - protein, 93 aa, Neisseria meningitidis; identical to SEQ ID NO: 7643

SEQ ID NO: 16886 - protein, 197 aa, Neisseria meningitidis
MRKQNTLTGIPTSDGQRGFALFIVLMVMIVVAFLVVTAAQSYNTEQRISANESDRKLALSLAEAALREGELQVLDLEYDTDSKVTFSENCGKGLCAAVNVRTNNDNEEAFDNIVVQGKPTVEAVKRSCPANSTDLCIDKKGMEYKKGTRSVSKMPRYIIEYLGVKNGENVYRVTAKAWGKNANTVVVLQSYVSNNDE

SEQ ID NO: 16887 - protein, 691 aa, Neisseria meningitidis
MLCVLAGAAYGVFRTEAALSSQWRAEAVSGVPLTVEVADMPRSDGRRVQFAAKAVDSGGRTFDLLLSDYKRREWAVGSRWRITARVHPVVGELNLRGLNREAWALSNGIGGAGTVGADRVLLHGGSGWGIAVWRSRISRNWQQADADGGLSDGIGLMRALSVGEQSALRPELWQAFRPLGLTHLVSISGLHVTMVAVMFAWLAKRLLACSPRLPARPRVWVLAAGCAGALFYALLAGFSVPTQRSVLMLAAFAWAWRRGRLSAWATWWQALAAVLLFDPLAVLGVGTWLSFGLVAALIWACSGRLHEGKRQTAVRGQWAASVLSLVLLGYLFASLPLISPLVNAVAIPWFSWVLTPLALLGSVVPFAPLQQLGAFLAEYTLRFLVWLADVSPEFAVAAAPLPLLVLAVCAALLLLLPRGLGLRPWAVLLLAGFVFYRSPGVPENEVAVTVWDAGQGLSVSVQTANHHLLFDTGTASAAQTGIVPSLNAAGVRRLDKLVLSHHDSDHDGGFRAVRNIPAGGIYAGQPEFYEGARHCAEQRWQWDGVDFEFLRPSERKNIDDNGKSCVLRVVAGGAALLVTGDLDTKGEESLVGKYGGNLYSQVLVLGHHGSNTSSSGVFLNAVSPEYAVASSGYANAYKHPTEAVQNRVRAHGIKLLRTDLSGALQFGLGRGGVKAQRLRGYKFYWQKKPFE

SEQ ID NO: 16888 - protein, 929 aa, Neisseria meningitidis; identical to SEQ ID NO: 6912

SEQ ID NO: 16889 - protein, 559 aa, Neisseria meningitidis; identical to SEQ ID NO: 8735

SEQ ID NO: 16890 - protein, 114 aa, Neisseria meningitidis; identical to SEQ ID NO: 7280

SEQ ID NO: 16891 - protein, 57 aa, Neisseria meningitidis; identical to SEQ ID NO: 6070

SEQ ID NO: 16892 - protein, 619 aa, Neisseria meningitidis
MPEYRSKTSTHGRNMAGARALWRATGVMETDFGKPIIAVANSFTQFVPGHVHLHNMGQLVAREIEKAGAIAKEFNTIAIDDGIAMGHSGMLYSLPSRDLIADSIEYMVNAHCADALVCISNCDKITPGMLIAAMRLNIPTIFVSGGPMEAGKVIGVANIQPERRLDLIDAMIESADDNVSNRQVEEVEQNACPTCGSCSGMFTANSMNCLTEALGLSLPGNGSYLATHAGRKELFLEAGRMIVEITKRYYEQNDETVLPRSIATKKAFENAMTMDIAMGGSTNTILHLLAVANEAGVDFKMADIDRLSRVVPCICKTAPNNHDYYMEDVHRAGGIFAILKELDKAGKLHTDVHTIHAPTLKDAIEQWDVTNPENTRAIERFKAAPGGVRTTQAFSQNRMWKTLDLDREKGCIRDVAHAYSQDGGLAVLFGNIAERGCVVKTAGVDESILKFTGRARVFESQEDAVEGILGNQIVAGDIVIIRYEGPKGGPGMQEMLYPTSYLKSKGLGKACALLTDGRFSGGTSGLSIGHASPEAAEGGAIGLVHEGDTVEIDIPNRSIHLAISDEELAARRAEMEARGSKAWKPKNRDRYVSAALRAYGAMATSADKGAVRDVAQIER

SEQ ID NO: 16893 - protein, 470 aa, Neisseria meningitidis; identical to SEQ ID NO: 2364

SEQ ID NO: 16894 - protein, 87 aa, Neisseria meningitidis; identical to SEQ ID NO: 205

SEQ ID NO: 16895 - protein, 405 aa, Neisseria meningitidis; identical to SEQ ID NO: 7017

SEQ ID NO: 16896 - protein, 379 aa, Neisseria meningitidis
MKKTLVAAAILSLALTACGGGSDTAAQTPSAKPEAEQSGKLNIYNWSDYVDPETVAAFEKETGIKTRSDYYDSNETLEAKVLTGKSGYDLTAPSIANVGRQIKAGAYQKIDKAQIPHYGNIDKDLLKMMEAVDPGNEYAVPYFWGINTLAINTQQVKKALGTDKLPENEWDLVFKPEYTAKLKSCGISYFDSAIEQIPLALHYLGKDPNSENPEDIKAAVDMMKAVRGDVKRFSSSGYIDDMAAGNLCAAIGYGGDLNIAKTRAEEAANGVEIKVLTPKTGVGVWVDSFMIPRDAQNVANAHRYIDYTLRPEVAAKNGSFVTYAPASRPARELMDEKYTSDASIFPNKELMEKSFIVSPKSAESVKLGVKLWQGLKAGK

SEQ ID NO: 16897 - protein, 414 aa, Neisseria meningitidis; identical to SEQ ID NO: 1660

SEQ ID NO: 16898 - protein, 64 aa, Neisseria meningitidis; identical to SEQ ID NO: 6143

SEQ ID NO: 16899 - protein, 447 aa, Neisseria meningitidis; identical to SEQ ID NO: 7219

SEQ ID NO: 16900 - protein, 458 aa, Neisseria meningitidis; identical to SEQ ID NO: 7380

SEQ ID NO: 16901 - protein, 545 aa, Neisseria meningitidis; identical to SEQ ID NO: 3410

SEQ ID NO: 16902 - protein, 602 aa, Neisseria meningitidis; identical to SEQ ID NO: 6164

SEQ ID NO: 16903 - protein, 468 aa, Neisseria meningitidis
MEKNTLSARAPSPWLPLLLAIAIFMQMLDATILNTALPEIAADLNESPLDMQLAVISYTLTVALLIPLSGYLADRFGTKKVFFGSIAVFMLGSALCAASGSLFELTLSRVVQGIGGSMLVPIPRLTILRVYDKSKLLNAINYAVMPALIGPVLGPLAGGYLVEYASWHWIFLLNLPIGLLGFILGRNIMPDIKGSNISLDFKGYLIFSAAACLLLLSAESLSHALPPYFALLPLCGGLLFARRYFRHMKTASKPIYSADLFLIRTFRLGLAGNLFSRLGISSIPFLMPLMFQIAFGFGASLSGWLVAPVALSSLLVKPLIAPLMKRFGYRTVLLWNTKLLAAFIMLLALPDGNSPLWIWVFLSLAIGACNSLQFSAMNTLTLADLRPQQTGSGNSLMAVNQQLAISMGIVAGALILKNWTFLIPASSGLHSAFRMTLLSIGGITLASSLVFKRLHVSDGTNLTRNTPS

SEQ ID NO: 16904 - protein, 294 aa, Neisseria meningitidis; identical to SEQ ID NO: 171

SEQ ID NO: 16905 - protein, 140 aa, Neisseria meningitidis; identical to SEQ ID NO: 2533

SEQ ID NO: 16906 - protein, 70 aa, Neisseria meningitidis
LKWRGGDCGDFSCLFQKSGARSLGETEKKAIISWLADREDVATLYATPLVDGFYGDDGWENYSETYKQAD

SEQ ID NO: 16907 - protein, 371 aa, Neisseria meningitidis; identical to SEQ ID NO: 7224

SEQ ID NO: 16908 - protein, 277 aa, Neisseria meningitidis; identical to SEQ ID NO: 6757

SEQ ID NO: 16909 - protein, 328 aa, Neisseria meningitidis; identical to SEQ ID NO: 6244

SEQ ID NO: 16910 - protein, 295 aa, Neisseria meningitidis; identical to SEQ ID NO: 3063

SEQ ID NO: 16911 - protein, 415 aa, Neisseria meningitidis; identical to SEQ ID NO: 7124

SEQ ID NO: 16912 - protein, 685 aa, Neisseria meningitidis; identical to SEQ ID NO: 7724

SEQ ID NO: 16913 - protein, 94 aa, Neisseria meningitidis; identical to SEQ ID NO: 973

SEQ ID NO: 16914 - protein, 433 aa, Neisseria meningitidis; identical to SEQ ID NO: 7396

SEQ ID NO: 16915 - protein, 155 aa, Neisseria meningitidis; identical to SEQ ID NO: 6437

SEQ ID NO: 16916 - protein, 93 aa, Neisseria meningitidis; identical to SEQ ID NO: 7384

SEQ ID NO: 16917 - protein, 459 aa, Neisseria meningitidis; identical to SEQ ID NO: 6463

SEQ ID NO: 16918 - protein, 146 aa, Neisseria meningitidis
LDKQIDDHTHTHFDGKAQVAEQIKGIGSITTATLMAMLPELGRLSHKRIASLAGIAPHPRESEETKFKSRCFGGRSAVRKALYMATVAATRFEPLIRDFYQRLLSKGKPYKVAVTACMRKLLTISNARMRDYFAENDTAENGIRTA

SEQ ID NO: 16919 - protein, 381 aa, Neisseria meningitidis; identical to SEQ ID NO: 7038

SEQ ID NO: 16920 - protein, 456 aa, Neisseria meningitidis; identical to SEQ ID NO: 7619

SEQ ID NO: 16921 - protein, 148 aa, Neisseria meningitidis; identical to SEQ ID NO: 1300

SEQ ID NO: 16922 - protein, 159 aa, Neisseria meningitidis; identical to SEQ ID NO: 38

SEQ ID NO: 16923 - protein, 145 aa, Neisseria meningitidis; identical to SEQ ID NO: 6388

SEQ ID NO: 16924 - protein, 277 aa, Neisseria meningitidis; identical to SEQ ID NO: 7531

SEQ ID NO: 16925 - protein, 369 aa, Neisseria meningitidis; identical to SEQ ID NO: 6840

SEQ ID NO: 16926 - protein, 109 aa, Neisseria meningitidis; identical to SEQ ID NO: 899

SEQ ID NO: 16927 - protein, 517 aa, Neisseria meningitidis
MNRTYANFYEMLAAACRKNGNGTAVFDGKEKTAYRALKQEAEAVAAYLQNIGVKFGDTVALAVSNSTEFITAYFAISAIGAVAVPMNTFLKNSEYAYILNDCKARFLFASAGLSKELAGLKAQTPVEKIIWTDKSRPTGETAEGDAFFEDVRRFPEKPDLGRQPRINDLAHIIYTSGTTGHPKGALISYANLFANLNGIERIFKISKRDRFIVFLPMFHSFTLTAMVLLPIYMACSIILVKSVFPFSNVLKQTLLKRATVFLGVPAIYTAMSKAKIPWYFRWFNRIRLFISGGAPLAEQTILDFKAKFPRAKLLEGYGLSEASPVVAVNTPERQKARSVGIPLPGLEAKAVDEELVEVPRGEVGELIVRGGSVMRGYLNMPAATDETIVNGWLKTGDFVTIDEDGFIFIVDRKKDLIISKGQNVYPREIEEEIYKLDAVEAAAVIGVKDRYADEEIVAFVQLKEGMDLGENEIRRHLRTVLANFKIPKQIHFKDGLPRNATGKVLKRVLKEQFDGNK

SEQ ID NO: 16928 - protein, 289 aa, Neisseria meningitidis; identical to SEQ ID NO: 7162

SEQ ID NO: 16929 - protein, 145 aa, Neisseria meningitidis; identical to SEQ ID NO: 7320

SEQ ID NO: 16930 - protein, 64 aa, Neisseria meningitidis; identical to SEQ ID NO: 6312

SEQ ID NO: 16931 - protein, 60 aa, Neisseria meningitidis; identical to SEQ ID NO: 6172

SEQ ID NO: 16932 - protein, 217 aa, Neisseria meningitidis; identical to SEQ ID NO: 8419

SEQ ID NO: 16933 - protein, 633 aa, Neisseria meningitidis
MTTPKKTAKTSGNEARELADLSEDIGICFKYPNSERVYLQGSRDDIRVPLREIRQDDTYTAQGTEANPPIPVYDTSGVYGDPAAHIDLKQGLPHIRTAWLDERGDTEILPKLSSEYGIERAHDPKTAHLRFNQITRPRRAKSGSNVTQLHYARQGIITPEMEFVAIRERLKLDELSQKPEYAKLLEQHAGQSFGANIPTHPDQITPEFVRQEIAAGRAIIPANINHPELEPMIIGRNFRVKINGNLGNSAVTSSLTEEVEKMVWSLRWGADTIMDLSTGAHIHETREWIIRNAPVPIGTVPIYQALEKTGGIAEDLTWDLFRDTLIEQAEQGVDYFTIHAGVLLRYVPMTANRLTGIVSRGGSIMAKWCLAHHRENFLYTHFDEICEIMKAYDVSFSLGDGLRPGCIADANDESQFAELHTLGELTDKAWKHDVQVMIEGPGHVPLQRVKENMTEELQHCFEAPFYTLGPLVTDIAPGYDHITSGIGAANIGWYGTAMLCYVTPKEHLGLPDKEDVRTGIITYKLAAHAADLAKGWPGAQLRDNALSKARFEFRWRDQFRLSLDPERAESFHDETLPAEGAKIAHFCSMCGPKFCSMKITQEVRDYADKQKAQRQGMEEKAVEFVKKGAKIYS

SEQ ID NO: 16934 - protein, 197 aa, Neisseria meningitidis; identical to SEQ ID NO: 6066

SEQ ID NO: 16935 - protein, 589 aa, Neisseria meningitidis; identical to SEQ ID NO: 6439

SEQ ID NO: 16936 - protein, 211 aa, Neisseria meningitidis; identical to SEQ ID NO: 6559

SEQ ID NO: 16937 - protein, 422 aa, Neisseria meningitidis; identical to SEQ ID NO: 6335

SEQ ID NO: 16938 - protein, 85 aa, Neisseria meningitidis; identical to SEQ ID NO: 4382

SEQ ID NO: 16939 - protein, 101 aa, Neisseria meningitidis; identical to SEQ ID NO: 1118

SEQ ID NO: 16940 - protein, 735 aa, Neisseria meningitidis; identical to SEQ ID NO: 7085

SEQ ID NO: 16941 - protein, 1430 aa, Neisseria meningitidis
MRFTHTTPFCSVLSTLGLFAVSPAYSSIVRNDVDYQYFRDFAENKGAFTVGASNISIQDKQGKILGRVLNGIPMPDFRVSNRQTAIATLVHPQYVNSVKHNVGYGSIQFGNDTQNPEEQAYTYRLVSRNPHPDYDYHLPRLNKLVTEISPTALSSVPLLGNGQPKANAYLDTDRFPYFVRLGSGTQQVRKADGTRTRTAPAYQYLTGGTPLKVLGFQNHGLLVGGSLTDQPLNTYAIAGDSGSPLFAFDKHENRWVLAGVLSTYAGFDNFFNKYIVTQPEFIRSTIRQYETRLDVGLTTNELIWRDNGNGNSTLQGLNERITLPIANPSLAPQNDSRHMPSEDAGKTLILSSRFDNKTLMLADNINQGAGALQFDSNFTVVGKNHTWQGAGVIVADGKRVFWQVSNPKGDRLSKLGAGTLIANGQGINQGDISIGEGTVVLAQKAASDGSKQAFNQVGITSGRGTAVLADSQQIKPENLYFGFRGGRLDLNGNNLAFTHIRHADGGAQIVNHNPDQAATLTLTGNPVLSPEHVEWVQWGNRPQGNAAVYEYINPHRNRRTDYFILKPGGNPREFFPLNMKNSTSWQFIGNNRQQAAEQVAQAENARPDLITFGGYLGENAQTGKAAPSYSKTNEAAIEKTRHIANAAVYGRPEYRYNGALNLHYRPKRTDSTLLLNGGMNLNGEVLIEGGNMIVSGRPVPHAYDHQAKREPVLENEWTDGSFKAARFTLRNHARLTAGRNTAHLDGDITAYDLSGIDLGFTQGKTPECYRSYHSGSTHCTPNAVLKAENYRALPATQVRGDITLNDRSELRLGKAHLYGSIRAGKDTAVRMEADSNWTLSQSSHTGALTLDGAQITLNPDFANNTHNNRFNTLTVNGTLDGFGTFRFLTGIVRKQNAPLKLEGDSRGAFQIHVKNTGQEPQTTESLALVSLNPKHSHQARFTLQNGYADLGAYRYILRKNNNGYSLYNPLKEAELQIEATRAEHERNQQAYNQLQATDISRQVQHDSDATRQALQAWQNSQTELARIDSQVQYLSAQLKQTDPLTGILTRAQNLCAAQGYSVDICRQVAKAADTNDLTLFETELDTYIERVEMAESELDKARQGGDAQAVETARHAYLNALNRLSRQIHSLKTGVAGIRMPNLAELISRSANTAVSEQAAYNTGRQQAGRRIDRHLTDPQQQNIWLETGTQQTDYHSGTHRPYQQTTNYAHIGIQTGITDRLSVGTILTDERTNNRFDEGVSARNRSNGAHLFVKGENGALFAAADLGYSNSRTRFTDYDGAAVRRHAWDAGINTGIKIDTGINLRPYAGIRINRSNGNRYVLDGAEINSPAQIQTTWHAGIRLDKTVELGQAKLTPAFSSDYYHTRQNSGSALSVNDRTLLQQAAHGTLHTLQIDAGYKGWNAKLHAAYGKDSNTARHKQAGIKIGYNW

SEQ ID NO: 16942 - protein, 508 aa, Neisseria meningitidis; identical to SEQ ID NO: 7633

SEQ ID NO: 16943 - protein, 200 aa, Neisseria meningitidis; identical to SEQ ID NO: 7230

SEQ ID NO: 16944 - protein, 194 aa, Neisseria meningitidis; identical to SEQ ID NO: 6623

SEQ ID NO: 16945 - protein, 508 aa, Neisseria meningitidis; identical to SEQ ID NO: 6818

SEQ ID NO: 16946 - protein, 213 aa, Neisseria meningitidis
MPSEKPMNRRTFLLGAGALLLTACGRKSARTHAKIPEGSTVLALGDSLTFGYGANPGESYPAQLQKLTGWNIVNGGVSGDTSAQALSRLPALLARKPKLVIVGIGGNDFLRKVPEEQTRANIAKIIETVQKENIPAVLVGVPHITLGALFGHLSDHPLYEDLSEEYGIPLFGGAWAEILGDNNLKSDQIHANGKGYRKFAEDLNQFLRKQGFR

SEQ ID NO: 16947 - protein, 562 aa, Neisseria meningitidis
MLNKDQFADNHFIRTFIEEDLKSGKHEAVQTRFPPEPNGYLHIGHAKSICLNFGLAYIYDGLCNLRFDDTNPEKENDEYVNAIKEDVEWLGFHWAGEPRFASNYFDQLYDYAVGLVKDGKAYVDDLTPEEMREYRGTLTEAGKNSPYRDRSIEENLDLFTRMKNGEFPDGSKTLRLKIDMASGNINMRDPVIYRIRRAHHHNTGDKWCIYPMYDYTHCISDAIEGITHSLCTLEFEAHRPLYDWVLDNIPAPHATRPRQYEFSRLELLYTITSKRKLNQLVVEKHVSGWDDPRMPTISGMRRRGYTPEGLRLFAKRAGISKSENIVDMSVLEGAIREELENSAPRLMAVLNPLKVTLTNFETGRTQSRRAAFHPNHEEMGDREVPVSQTIYIEADDFAENPPKGFKRLIPGGEVRLRHGYVIKCDEVVKDEAGNVVELKCSIDHDTLGKNPEGRKVKGVIHWVSAEHAAEIKVRLYDRLFTVERPDAVRGEDGEYLPFTDFLNPESVKEITAYAEPAAKDLPAESRWQFERIGYFVTDRKDHGKDTPVFNRTVTLKDSWQPK

SEQ ID NO: 16948 - protein, 114 aa, Neisseria meningitidis; identical to SEQ ID NO: 565

SEQ ID NO: 16949 - protein, 259 aa, Neisseria meningitidis; identical to SEQ ID NO: 1645

SEQ ID NO: 16950 - protein, 91 aa, Neisseria meningitidis
MLQDPFLNALRKEHVPVSIYLVNGIKLQGQVESFDQYVVLLRNTSVTQMVYKHAISTIVPARSVNLQHENRPQAAPASTLVQVETVQQPAE

SEQ ID NO: 16951 - protein, 275 aa, Neisseria meningitidis; identical to SEQ ID NO: 67

SEQ ID NO: 16952 - protein, 612 aa, Neisseria meningitidis; identical to SEQ ID NO: 7227

SEQ ID NO: 16953 - protein, 215 aa, Neisseria meningitidis; identical to SEQ ID NO: 7475

SEQ ID NO: 16954 - protein, 916 aa, Neisseria meningitidis
MGQNLTAPDGAPTGALYGVLNMLRRLRSEYPHDYCAVVFDAKGKNFRHQMFEEYKATRPPMPDDLRPQAEALPDLVRLTGWPVLVIGQVEADDVIGTLAKQGAEHGLRVIVSTGDKDMAQLVDERVTLVNTMSSETLDIEGVKAKFGVRPDQIRDYLALMGDKVDNVPGVEKCGPKTAVKWLEAYGSLAGVMEHASEIKGKVGENLQAALPQLPLSYDLVTIKTDVDLHAELSDGIESLRRTTPKWAQLVVDFKRWGFRTWLKEAESNMNTGSTDDLFGSDSIGEQAALNAEMPFEKQAEKATAPEKLDYQAVTTEAQFAALLDKLSRADTIGIDTETTSLDAMNASLVGISIAFQAGEAVYIPVGHSLTAAPEQLDLQDVLGRLKPHLGNPALKKIGQNLKYDQHVFANYGIALNGIAGDAMLASYIIESHLGHGLDELSERWLGLETITYESLCGKGAKQIGFADVAIGQATEYAAQDADFALRLEAHLRAQMDEKQLEMYEKMELPVAQVLFEMERNGVQIDRAELARQSAELGAELMKLEQEAYAAAGQPFNLNSPKQLQEILFDKMGIPTKGLKKTAKGGISTNEAVLEQLAPDYPLPKIILQNRSLAKLKSTYTDKLPEMISPKDGRVHTTYAQAVAITGRLASNNPNLQNIPIRTEEGRKVRRAFTAPQGSVIVSADYSQIELRIMAHLSGDKTLIAAFQNGEDVHRRTAAEVFGTAPENVSSEQRRYAKTINFGLIYGMGQYGLAKSLGIDNLSAKNFIDRYFARYPGVAEYMQRTKEQAAAQGYVETLFGRRLYLPDIRNKNANARAGAERAAINAPMQGTASDLIKRAMIDVSRWLSECEASPWDELLQSKLIMQVHDELVLEVVETELDFVKEKLPQIMAKVDGGLLDVPLVAEVGVGENWEEAH

SEQ ID NO: 16955 - protein, 300 aa, Neisseria meningitidis; identical to SEQ ID NO: 6138

SEQ ID NO: 16956 - protein, 315 aa, Neisseria meningitidis; identical to SEQ ID NO: 1500

SEQ ID NO: 16957 - protein, 153 aa, Neisseria meningitidis; identical to SEQ ID NO: 750

SEQ ID NO: 16958 - protein, 176 aa, Neisseria meningitidis; identical to SEQ ID NO: 3131

SEQ ID NO: 16959 - protein, 289 aa, Neisseria meningitidis; identical to SEQ ID NO: 657

SEQ ID NO: 16960 - protein, 223 aa, Neisseria meningitidis; identical to SEQ ID NO: 5959

SEQ ID NO: 16961 - protein, 139 aa, Neisseria meningitidis; identical to SEQ ID NO: 7517

SEQ ID NO: 16962 - protein, 119 aa, Neisseria meningitidis; identical to SEQ ID NO: 6320

SEQ ID NO: 16963 - protein, 455 aa, Neisseria meningitidis; identical to SEQ ID NO: 7389

SEQ ID NO: 16964 - protein, 461 aa, Neisseria meningitidis; identical to SEQ ID NO: 3158

SEQ ID NO: 16965 - protein, 337 aa, Neisseria meningitidis; identical to SEQ ID NO: 1101

SEQ ID NO: 16966 - protein, 436 aa, Neisseria meningitidis; identical to SEQ ID NO: 7235

SEQ ID NO: 16967 - protein, 473 aa, Neisseria meningitidis; identical to SEQ ID NO: 7776

SEQ ID NO: 16968 - protein, 96 aa, Neisseria meningitidis; identical to SEQ ID NO: 6139

SEQ ID NO: 16969 - protein, 99 aa, Neisseria meningitidis; identical to SEQ ID NO: 2699

SEQ ID NO: 16970 - protein, 542 aa, Neisseria meningitidis
MISTNGITMQFGAKPLFENVSVKFGEGNRYGLIGANGSGKSTFMKILGGDLEQTAGEVAIENGVRLGKLRQDQFAYEDMRVLDVVMMGHTEMWAAMTERDAIYANPEATEDDYMKAAELEAKFAEYDGYTAEARAAELLSGVGISEDLHNAKMAEVAPGFKLRVLLAQALFSKPDVLLLDEPTNNLDINTIRWLEGVLNQYDSTMIIISHDRHFLNEVCTHMADLDYNTITIYPGNYDDYMLASAQSRERALKDNAKAKEKLQELQEFVARFSANKSKARQATSRLKQADKIKSEMVEVKPSTRQNPYIRFEADEKAKLHRQAVEVEKLAKRFETQLFKNLNFILEAGQRLAIIGPNGAGKSTLLKLLAGAYNPEYSDGLLPDEGTIKWAEKASVGYYPQDHENDFDVDMDLSEWMRQWGQEGDDEQVIRGTLGRLLFGSNDVVKKVKVLSGGEKGRMLYGKLLLLKPNVLVMDEPTNHMDMESIESLNMALEKYNGTLIFVSHDRQFVSSLATQIIELDGKGGYEHYLGDYESYLEKKGVA

SEQ ID NO: 16971 - protein, 237 aa, Neisseria meningitidis; identical to SEQ ID NO: 6270

SEQ ID NO: 16972 - protein, 71 aa, Neisseria meningitidis
MKEYKVIIYQESLLSSLFFGAAKVNPIKFSEFLNKQTPEGWRVVTMEKDLRRMLLFFKREAYVVILERDRV

SEQ ID NO: 16973 - protein, 203 aa, Neisseria meningitidis; identical to SEQ ID NO: 352

SEQ ID NO: 16974 - protein, 637 aa, Neisseria meningitidis; identical to SEQ ID NO: 6369

SEQ ID NO: 16975 - protein, 392 aa, Neisseria meningitidis
MRKKLTALVLSALPLAAVADVSLYGEIKAGVEGRNYQLQLTEAQAANGGASGQVKVTKVTKAKSRIRTKISDFGSFIGFKGSEDLGDGLKAVWQLEQDVSVAGGGATQWGNRESFIGLAGEFGTLRAGRVANQFDDASQAIDPWDSNNDVASQLGIFKRHDDMPVSVRYDSPEFSGFSGSVQFVPIQNSKSAYTPAYYTKDTNNNLTLVPAVVGKPGSDVYYAGLNYKNGGFAGNYAFKYARHANVGRNAFELFLIGSGSDQAKGTDPLKNHQVHRLTGGYEEGGLNLALAAQLDLSENGDKTKNSTTEIAATASYRFGNAVPRISYAHGFDFIERGKKGENTSYDQIIAGVDYDFSKRTSAIVSGAWLKRNTGIGNYTQINAASVGLRHKF

SEQ ID NO: 16976 - protein, 318 aa, Neisseria meningitidis; identical to SEQ ID NO: 6240

SEQ ID NO: 16977 - protein, 593 aa, Neisseria meningitidis; identical to SEQ ID NO: 5999

SEQ ID NO: 16978 - protein, 309 aa, Neisseria meningitidis; identical to SEQ ID NO: 6658

SEQ ID NO: 16979 - protein, 374 aa, Neisseria meningitidis
MTATTASSAKPYLKIQGLVKKFGDNYAVDNIDLDIYQHEIFALLGSSGSGKSTLLRMLAGMESPNQGKIILDGQDITKLAPYDRPINMMFQSYALFPHMTVEQNIAFGLKQDKMPKGEIAARVEEMLRLVQMTKFAKRKPHQLSGGQQQRIALARSLAKRPKILLLDEPLGALDKKLRQQTQLELVNTLEQVGVTCIMVTHDQEEAMTMATRIAIMSDGQLQQVGTPSDVYDYPNSRFTAEFIGETNIFDGVVIEDHADYAVIECEGLENHVRIDHGLGGPSEQDLWVSIRPEDIDLYKEKPEYLGDYNWAKGTVKEIAYLGSFAIYHIKLGNGRVVKSQVPAPYWYVRNITPPTWDETVYISWPENQPTPLFR

SEQ ID NO: 16980 - protein, 261 aa, Neisseria meningitidis
MSRIRQAFAALDGGKALIPYITVGDPDIRTTLALMHGMVANGADILELGVPFSDPMADGPVIQRAAERALANGISLRDVLDVVRKFRETDTQTPVVLMGYLNPVHKMGYREFAQEAAKAGVDGVLTVDSPVETIDPLYRELKDNGVDCIFLIAPTTTEDRIKTIAELAGGFVYYVSLKGVTGAASLDTDEVSRKIEYLHQYIDIPIGVGFGISNAESARKIGRVADAVIVGSWIVKEIENNAGNEAAAVGALVKELKDAVR

SEQ ID NO: 16981 - protein, 66 aa, Neisseria meningitidis; identical to SEQ ID NO: 421

SEQ ID NO: 16982 - protein, 129 aa, Neisseria meningitidis; identical to SEQ ID NO: 322

SEQ ID NO: 16983 - protein, 224 aa, Neisseria meningitidis
VQADLAYAAERITHDYPQATGANNTSTVSDYFRNIRAHSIHPRVSVGYDFGGWRIAADYASYRKWKESNSSTKKVTEEINNNYKETQTKHQGNGSFHASSSLGLSAIYDFKLNDKFKPYIGARVAYGHVKHQVHSVETKTTIVTSKPTQGAAQGGPIIQTDPSKPPYHESHSISSVGLGVIAGVGFDITPKLTLDTGYRYHNWGRLENTRFKTHEVSLGMRYRF

SEQ ID NO: 16984 - protein, 852 aa, Neisseria meningitidis; identical to SEQ ID NO: 7059

SEQ ID NO: 16985 - protein, 531 aa, Neisseria meningitidis; identical to SEQ ID NO: 6044

SEQ ID NO: 16986 - protein, 91 aa, Neisseria meningitidis; identical to SEQ ID NO: 9295

SEQ ID NO: 16987 - protein, 514 aa, Neisseria meningitidis; identical to SEQ ID NO: 6001

SEQ ID NO: 16988 - protein, 155 aa, Neisseria meningitidis; identical to SEQ ID NO: 3828

SEQ ID NO: 16989 - protein, 68 aa, Neisseria meningitidis; identical to SEQ ID NO: 4044

SEQ ID NO: 16990 - protein, 196 aa, Neisseria meningitidis; identical to SEQ ID NO: 6127

SEQ ID NO: 16991 - protein, 316 aa, Neisseria meningitidis; identical to SEQ ID NO: 5301

SEQ ID NO: 16992 - protein, 289 aa, Neisseria meningitidis
MKFIFFVLYVLQFLPFALLHKIADLTGLLAYLLVKPRRRIGEINLAKCFSEWSEEKRKTVLKQHFKHMAKLMLEYGLYWYAPAGRLKSLVRYRNKHYLDDALAAGEKVIILYPHFTAFEMAVYALNQDIPLISMYSHQKNKILDEQILKGRNRYHNVFLIGRTEGLRALVKQFRKSSAPFLYLPDQDFGRNDSVFVDFFGIQTATITGLSRIAALANAKVIPAIPVREADNTVTLHFYPAWKSFPGEDAKADAQRMNRFIEDRVREHPEQYFWLHKRFKTRPEGSPDFY

SEQ ID NO: 16993 - protein, 288 aa, Neisseria meningitidis; identical to SEQ ID NO: 7363

SEQ ID NO: 16994 - protein, 106 aa, Neisseria meningitidis
MQSKYNINNKARVAEISLLRQMQSQFSRKYVNKNLGNSNTLAQQGSYTKKDGTTAQAGDLLLAADNLHSRLTDKMLSISHVRENTISPFVLGCLKQITINAYHYLK

SEQ ID NO: 16995 - protein, 399 aa, Neisseria meningitidis; identical to SEQ ID NO: 2328

SEQ ID NO: 16996 - protein, 51 aa, Neisseria meningitidis; identical to SEQ ID NO: 3530

SEQ ID NO: 16997 - protein, 716 aa, Neisseria meningitidis; identical to SEQ ID NO: 7692

SEQ ID NO: 16998 - protein, 72 aa, Neisseria meningitidis; identical to SEQ ID NO: 7342

SEQ ID NO: 16999 - protein, 462 aa, Neisseria meningitidis; identical to SEQ ID NO: 6381

SEQ ID NO: 17000 - protein, 739 aa, Neisseria meningitidis
MCKPNYGGIVLLPLLLASCIGGNFGVQPVVESTPTAYPVTFKSKDVPTPPPAKPSIETTPVNRPAVGAAMRLLRRNIATSDKDGNDFPNSKQAEEKLSFKEGDVLFLYGSKKDKLQWLKDKIHQRNPNVEIRTSENENKKYGYEFVDAGYVYTKNGTDEIEWTSNRKQFSNRFGYDGFVYYSGEHPSQSLPSAGTVQYSGNWQYMTDAIRHRTGKAGDPSEDLGYLVYYGQNVGATSYAATADDREGKHPAEYTVDFDKKTLTGQLIKNQYVQKKTDEKKPLTIYDITATLDGNRFTGSAKVNTELKTSHADKEHLFFHTDADQRLEGGFFGDKGEELAGRFISNDNSVFGVFAGKKTNASNAADTNPAMPSEKHTKILDSLKISVDEATDKNARPFAISPLPDFGHPDKLLVEGREIPLVSQEKTIELADGRKMTVRACCDFLTYVKLGRIKTDRPASKPKAEDKGKDEEDTGVGNDEEGTEDEAAEGSEGGEDEIGDEGGGAEDEAAENEGGEEDEAEEPEEPEEESPAEGGGGGSDGILPAPEAPKGRDIDLFLKGIRTAEADIPQTGKARYTGTWEARISKPIQWDNHADKKAAKAEFDVDFGEKSISGTLTEKNGVQPAFHIENGVIEGNGFHATARTRDNGINLSGNDSTNPQSFKANNLLVTGGFYGPQAEELGGTIFNNDGKSLGITEDTENEAEAEVENEAGVGEQLKPEAKPQFGVVFGAKKDNKEVEK

SEQ ID NO: 17001 - protein, 127 aa, Neisseria meningitidis; identical to SEQ ID NO: 1134

SEQ ID NO: 17002 - protein, 135 aa, Neisseria meningitidis
MEIRAIKYTAMAALLAFTVAGCRLAGWYECSSLTGWCKPRKPAAIDFWDIGGESPPSLGDYEIPLSDGNRSVRANEYESAQQSYFYRKIGKFEACGLDWRTRDGKPLIETFKQGGFDCLEKQGLRRNGLSERVRW

SEQ ID NO: 17003 - protein, 465 aa, Neisseria meningitidis; identical to SEQ ID NO: 5967

SEQ ID NO: 17004 - protein, 467 aa, Neisseria meningitidis
MKKIQADVVVIGGGTAGMGAFRNARLHSDNVYLIENNVFGTTCARVGCMPSKLLIAAAEARHHALHTDPFGVHLDKDSIVVNGEEVMRRVKSERDRFVGFVVADVEEWPADKRIMGSAKFIDEHTVQIDDHTQITAKSFVIATGSRPVILPQWQSLGNRLIINDDVFSWDTLPKRVAVFGPGVIGLELGQALHRLGVKVEIFGLGGIIGGISDPVVSDEAKAVFGEELKLHLDAKTEAKLDADGNVEVHWEQDGEKGVFVAEYMLAAVGRRPNVDNIGLENINIEKDARGVPVADPLTMQTSIPHIFIAGDASNQLPLLHEAADQGKIAGDNAGRYPNIGGGLRRSTIGVVFTSPQIGFVGLKYAQVAAQYQADEFVIGEVSFKNQGRSRVMLVNKGHMRLYAEKATGRFIGAEIVGPAAEHLAHLLAWAHQMKMTVPQMLDMPFYHPVIEEGLRTALRDADAKLKA

SEQ ID NO: 17005 - protein, 346 aa, Neisseria meningitidis
MDISDFDFTLPEKLIAQHPPEVRGSSRLLVALPDMPLQDRVFGDLPDYVEAGDVLVFNNTKVMKARLFGQKDSGGRIEALIERVLDNHTALAHIRSSKSPKPGMGLVFEGGIRAVTVGREGELFCLRFEGGETVYELLEQNGHLPLPPYIERAADADDDSRYQTVYAKYQGAVAAPTAGLHFTEELLHRLKDKGAVTAEVTLHVGAGTFQPVRVDKIEEHKMHSEWFEVPSETAAAVEAAKARGNKVWAVGTTSMRALESAARATARLKAGQGDTDIFITPGYRFNVVDRLVTNFHLPKSTLLMLVSAFSGMGHIRAAYRHAVEREYRFFSYGDAMVLGRNEGVVR

SEQ ID NO: 17006 - protein, 219 aa, Neisseria meningitidis; identical to SEQ ID NO: 6969

SEQ ID NO: 17007 - protein, 351 aa, Neisseria meningitidis; identical to SEQ ID NO: 6304

SEQ ID NO: 17008 - protein, 431 aa, Neisseria meningitidis; identical to SEQ ID NO: 6377

SEQ ID NO: 17009 - protein, 163 aa, Neisseria meningitidis; identical to SEQ ID NO: 9476

SEQ ID NO: 17010 - protein, 65 aa, Neisseria meningitidis; identical to SEQ ID NO: 127

SEQ ID NO: 17011 - protein, 280 aa, Neisseria meningitidis; identical to SEQ ID NO: 6063

SEQ ID NO: 17012 - protein, 245 aa, Neisseria meningitidis; identical to SEQ ID NO: 4995

SEQ ID NO: 17013 - protein, 487 aa, Neisseria meningitidis; identical to SEQ ID NO: 6113

SEQ ID NO: 17014 - protein, 242 aa, Neisseria meningitidis; identical to SEQ ID NO: 7597

SEQ ID NO: 17015 - protein, 121 aa, Neisseria meningitidis; identical to SEQ ID NO: 14769

SEQ ID NO: 17016 - protein, 256 aa, Neisseria meningitidis; identical to SEQ ID NO: 6620

SEQ ID NO: 17017 - protein, 467 aa, Neisseria meningitidis; identical to SEQ ID NO: 6289

SEQ ID NO: 17018 - protein, 69 aa, Neisseria meningitidis; identical to SEQ ID NO: 1621

SEQ ID NO: 17019 - protein, 187 aa, Neisseria meningitidis; identical to SEQ ID NO: 8513

SEQ ID NO: 17020 - protein, 163 aa, Neisseria meningitidis; identical to SEQ ID NO: 1830

SEQ ID NO: 17021 - protein, 798 aa, Neisseria meningitidis; identical to SEQ ID NO: 6178

SEQ ID NO: 17022 - protein, 273 aa, Neisseria meningitidis; identical to SEQ ID NO: 6354

SEQ ID NO: 17023 - protein, 441 aa, Neisseria meningitidis; identical to SEQ ID NO: 7778

SEQ ID NO: 17024 - protein, 140 aa, Neisseria meningitidis; identical to SEQ ID NO: 4493

SEQ ID NO: 17025 - protein, 409 aa, Neisseria meningitidis; identical to SEQ ID NO: 6609

SEQ ID NO: 17026 - protein, 261 aa, Neisseria meningitidis; identical to SEQ ID NO: 6798

SEQ ID NO: 17027 - protein, 377 aa, Neisseria meningitidis; identical to SEQ ID NO: 7656

SEQ ID NO: 17028 - protein, 55 aa, Neisseria meningitidis; identical to SEQ ID NO: 1257

SEQ ID NO: 17029 - protein, 366 aa, Neisseria meningitidis; identical to SEQ ID NO: 7035

SEQ ID NO: 17030 - protein, 2703 aa, Neisseria meningitidis; identical to SEQ ID NO: 7289

SEQ ID NO: 17031 - protein, 350 aa, Neisseria meningitidis; identical to SEQ ID NO: 928

SEQ ID NO: 17032 - protein, 265 aa, Neisseria meningitidis; identical to SEQ ID NO: 1691

SEQ ID NO: 17033 - protein, 75 aa, Neisseria meningitidis
MNVWDIWGRMVEIYHKYKKPCLVLAVDFVMGMVFIEPNEEPCIGRCYAPMSESPDFANAVAMAVAMICIVWIAVL

SEQ ID NO: 17034 - protein, 375 aa, Neisseria meningitidis; identical to SEQ ID NO: 6238

SEQ ID NO: 17035 - protein, 68 aa, Neisseria meningitidis; identical to SEQ ID NO: 7134

SEQ ID NO: 17036 - protein, 358 aa, Neisseria meningitidis
MKPSILEKLQQLSDRLEEVTHLLGQPEATSDMDNYRKLTREHAELTPVVEVFQNYRLAQSDLADAEEMLSDPEMKDFAAEEIEAAKAKIGELDTELQKLLLPKDADDDKNIFIEIRAGTGGDEAALFAGDLLRMYSRYAERNRWQVEIVSANESELGGYKEVIARIVGLGAYSRLKFESGGHRVQRVPATESQGRIHTSACTVAVMPEADELEDIELNPADLRIDTFRASGAGGQHINKTDSAVRITHLPTGMVVECQDGRSQHANKAQAMKVLAARLNDAQKREAQAKEAAERKSLIGSGDRSERIRTYNYPQGRVTDHRINLTLHKLDFVMDGDLEEITNALIAEHQAELLAAMGD

SEQ ID NO: 17037 - protein, 288 aa, Neisseria meningitidis; identical to SEQ ID NO: 7747

SEQ ID NO: 17038 - protein, 183 aa, Neisseria meningitidis
VNYCEFAASLPENTDNPNKHYHDTQYGFPIEDDNELFERLVLEINQAGLSWTLMLKKRQAFQTAFEGFDIDTVAAFDEADIDRLLADAGIVRNRLKIDAAIFNARQIQALQQEYGSFKNWLDTHHPRSKDEWVKLFKKHFKFVGGEIVGEFLMSTGYLKGAHAESCPVYRKTLKYHPKWLDAV

SEQ ID NO: 17039 - protein, 233 aa, Neisseria meningitidis; identical to SEQ ID NO: 7041

SEQ ID NO: 17040 - protein, 107 aa, Neisseria meningitidis; identical to SEQ ID NO: 7717

SEQ ID NO: 17041 - protein, 105 aa, Neisseria meningitidis; identical to SEQ ID NO: 6222

SEQ ID NO: 17042 - protein, 544 aa, Neisseria meningitidis
MAAKDVQFGNEVRQKMVNGVNILANAVRVTLGPKGRNVVVDRAFGGPHITKDGVTVAKEIELKDKFENMGAQMVKEVASKTNDVAGDGTTTATVLAQSIVAEGMKYVTAGMNPTDLKRGIDKAVAALVDELKNIAKPCDTSKEIAQVGSISANSDEQVGAIIAEAMEKVGKEGVITVEDGKSLENELDVVEGMQFDRGYLSPYFINDAEKQIAALDNPFVLLFDKKISNIRDLLPVLEQVAKASRPLLIIAEDVEGEALATLVVNNIRGILKTVAVKAPGFGDRRKAMLQDIAILTGGVVISEEVGLSLEKATLDDLGQAKRIEIGKENTTIIDGFGDAAQIEARVAEIRQQIETATSDYDKEKLQERVAKLAGGVAVIKVGAATEVEMKEKKDRVEDALHATRAAVEEGVVAGGGVALLRARAALENLHTGNADQDAGVQIVLRAVESPLRQIVANAGGEPSVVVNKVLEGKGNYGYNAGSGEYGDMIEMGVLDPAKVTRSALQHAASIAGLMLTTDCMIAEIPEDKPAVPDMGGMGGMGGMM

SEQ ID NO: 17043 - protein, 336 aa, Neisseria meningitidis; identical to SEQ ID NO: 7100

SEQ ID NO: 17044 - protein, 794 aa, Neisseria meningitidis; identical to SEQ ID NO: 6668

SEQ ID NO: 17045 - protein, 559 aa, Neisseria meningitidis
MEIINDAELIRSMQRQQHIDAELLTDANVRFEQPLEKNNYVLSEDETPCTRVNYISLDDKTVRKFSFLPSVLMKETAFKTGMCLGSNNLSRLQKAAQQILIVRGYLTSQAIIQPQNMDSGILKLRVSAGEIGDIRYEEKRDGKSAEGSISAFNNKFPLYRNKILNLRDVEQGLENLRRLPSVKTDIQIIPSEEEGKSDLQIKWQQNKPIRFSIGIDDAGGKTTGKYQGNVALSFDNPLGLSDLFYVSYGRGLAHKTDLTDATGTETESGSRSYSVHYSVPVKKWLFSFNHNGHRYHEATEGYSVNYDYNGKQYQSSLAAERMLWRNRLHKTSVGMKLWTRQTYKYIDDAEIEVQRRRSAGWEAELRHRAYLNRWQLDGKLSYKRGTGMRQSMPAPEENGGDILPGTSRMKIITAGLDAAAPFILGKQQFFYATAIQAQWNKTPLVAQDKLSIGSRYTVRGFDGEQSLFGERGFYWQNTLTWYFHPNHQFYLGADYGRVSGESAQYVSGKQLMGAVVGFRGGHKVGGMFAYDLFAGKPLHKPKGFQTTNTVYGFNLNYSF

SEQ ID NO: 17046 - protein, 334 aa, Neisseria meningitidis; identical to SEQ ID NO: 7654

SEQ ID NO: 17047 - protein, 90 aa, Neisseria meningitidis; identical to SEQ ID NO: 16128

SEQ ID NO: 17048 - protein, 156 aa, Neisseria meningitidis; identical to SEQ ID NO: 7045

SEQ ID NO: 17049 - protein, 950 aa, Neisseria meningitidis
MKLSELFNPNEFAARHLSFGDEAALLAAVGEKSMDDFVGNTVPQSIRMPSELDLPDALTEADALAKLKGIASKNVINKSYIGLGYYPTRVPNVILRNVLENPGWYTAYTPYQAEIAQGRLEALLNFQQVCIDLTGFPVAGASLLDEATAAAEAMAMAHRVGKVKSGRFFVDERVYPQTLDVMKTRAKYFGFELVVGDFVKADEGEYFGALFQYVGKDGDVQDLQDVISRLKAKGTIVVVATDIMSLVLLKSPAELGADIALGNTQRFGVPMGFGGPHAAYFAFKDAFKRSAPGRIIGVSKDASGKPALRMALSTREQHIRREKATSNICTAQALLANLAGMYAVYHGPEGVKRIANRIHALASAFADALVSDGIKVVHEVFFDTVTVDFGNKEKADQVFAAALESGYNLRRVNDTQVAAAFHETSAYEDLVDLYRAFTGKDAFAFADDVKGRLNAELLRQDDILQHPVFNRYHTEHEMLRYLKKLEDRDLAMNRSMISLGSCTMKLNATAEMLPITWAEFSDIHPYAPEAQTAGYRELLADMENSLKSITGFDAISFQPNSGAQGEYSGMLAIRRYQEAQGEAHRNICLIPKSAHGTNPATAAMLGLKVVVVDTDEHGNVNIDDLKAKAEQYRDALSAIMITYPSTHGVYEEGIRDICRIIHENGGQVYMDGANLNAQIGIMQPAEVGADVLHMNLHKTFCIPHGGGGPGMGPIGLKAHLAPFAPGHALTDTHSTSAGQTAVAAAAYGSASILPITWMYLTMMGKQGMEQATRWALLNANYVAKALGEDYPILYTGKNGRVAHECIVDLRPLKAESGITETDIAKRLMDYGFHAPTVSFPVAGTLMIEPTESESKAELDRFIAALKQIKQEVLKVGRGEWPKDDNPLVNAPHTAADITGNWAHPYSREEAVFPLPFVREHKFWPSVNRVDDVYGDRNLVCSCPPMENYED

SEQ ID NO: 17050 - protein, 247 aa, Neisseria meningitidis; identical to SEQ ID NO: 6663

SEQ ID NO: 17051 - protein, 144 aa, Neisseria meningitidis; identical to SEQ ID NO: 4464

SEQ ID NO: 17052 - protein, 231 aa, Neisseria meningitidis; identical to SEQ ID NO: 1993

SEQ ID NO: 17053 - protein, 164 aa, Neisseria meningitidis; identical to SEQ ID NO: 6738

SEQ ID NO: 17054 - protein, 50 aa, Neisseria meningitidis; identical to SEQ ID NO: 7105

SEQ ID NO: 17055 - protein, 207 aa, Neisseria meningitidis; identical to SEQ ID NO: 243

SEQ ID NO: 17056 - protein, 365 aa, Neisseria meningitidis; identical to SEQ ID NO: 1845

SEQ ID NO: 17057 - protein, 150 aa, Neisseria meningitidis; identical to SEQ ID NO: 2445

SEQ ID NO: 17058 - protein, 206 aa, Neisseria meningitidis; identical to SEQ ID NO: 355

SEQ ID NO: 17059 - protein, 194 aa, Neisseria meningitidis
MHILTAGVDEAGRGPLVGSVFAAAVILPETFDLPGLTDSKKLSEKKRDALAEMIKNQAVEWHVAAASPEEIASLNILHATMLAMKRAVDGLAVRPEKIFIDGNRIPEHLNIPAEAVVKGDSKIIEISAASVLAKTARDAEMYALAQRHPQYGFDKHKGYGTKQHLEALEKYGVLPEHRRDFAPVRNLLAQQALF

SEQ ID NO: 17060 - protein, 65 aa, Neisseria meningitidis; identical to SEQ ID NO: 7172

SEQ ID NO: 17061 - protein, 636 aa, Neisseria meningitidis; identical to SEQ ID NO: 15487

SEQ ID NO: 17062 - protein, 777 aa, Neisseria meningitidis
MNTKLTKIISGLFVATAAFQTASAGNITDIKVSSLPNKQKIVKVSFDKEIVNPTGFVTSSPARIALDFEQTGISMDQQVLEYADPLLSKISAAQNSSRARLVLNLNKPGQYNTEVRGNKVWIFINESDDTVSAPARPAVKAAPAAPAKQQAAAPSTKSAVSVSEPFTPAKQQAAAPFTESVVSVSAPFSPAKQQAAASAKQQAAAPAKQQAAAPAKQQAAAPAKQQAAAPAKQTNIDFRKDGKNAGIIELAALGFAGQPDISQQHDHIIVTLKNHTLPTTLQRSLDVADFKTPVQKVTLKRLNNDTQLIITTAGNWELVNKSAAPGYFTFQVLPKKQNLESGGVNNAPKTFTGRKISLDFQDVEIRTILQILAKESGMNIVASDSVNGKMTLSLKDVPWDQALDLVMQARNLDMRQQGNIVNIAPRDELLAKDKALLQAEKDIADLGALYSQNFQLKYKNVEEFRSILRLDNADTTGNRNTLISGRGSVLIDPATNTLIVTDTRSVIEKFRKLIDELDVPAQQVMIEARIVEAADGFSRDLGVKFGATGKKKLKNDTSAFGWGVNSGFGGDDKWGAETKINLPITAAANSISLVRAISSGALNLELSASESLSKTKTLANPRVLTQNRKEAKIESGYEIPFTVTSIANGGSSTNTELKKAVLGLTVTPNITPDGQIIMTVKINKDSPAQCASGNQTILCISTKNLNTQAMVENGGTLIVGGIYEEDNGNTLTKVPLLGDIPVIGNLFKTRGKKTDRRELLIFITPRIMGTAGNSLRY

SEQ ID NO: 17063 - protein, 113 aa, Neisseria meningitidis; identical to SEQ ID NO: 3580

SEQ ID NO: 17064 - protein, 157 aa, Neisseria meningitidis; identical to SEQ ID NO: 6126

SEQ ID NO: 17065 - protein, 296 aa, Neisseria meningitidis; identical to SEQ ID NO: 7062

SEQ ID NO: 17066 - protein, 90 aa, Neisseria meningitidis; identical to SEQ ID NO: 1115

SEQ ID NO: 17067 - protein, 317 aa, Neisseria meningitidis; identical to SEQ ID NO: 5997

SEQ ID NO: 17068 - protein, 178 aa, Neisseria meningitidis; identical to SEQ ID NO: 6590

SEQ ID NO: 17069 - protein, 195 aa, Neisseria meningitidis; identical to SEQ ID NO: 7027

SEQ ID NO: 17070 - protein, 383 aa, Neisseria meningitidis; identical to SEQ ID NO: 6438

SEQ ID NO: 17071 - protein, 109 aa, Neisseria meningitidis; identical to SEQ ID NO: 6687

SEQ ID NO: 17072 - protein, 321 aa, Neisseria meningitidis
MSHTQLTQGERYHIQYLSRHCTVTEIAKQLNRHKSTISREIRRHRTQGQQYSAEKAQRQSQTIKQRKRQPYKLDSQLIQHIDPLIRRKLSPEQVCAYLRKHHQITLHHSTIYRYLRQDKSNGSTLWQHLRICSKPYRKRYGSTWTRGKVPNRVGIENRPAIVDQKSRIGDWEADTIVGKGQKSALLTLVERVTRYTIICKLDSLKAEDTARAAVRTLKAHKDRVHTITMDNGKEFYQHTKITKALKAETYFCRPYHSWEKGLNENTNGLIRQYFPKQTDFRNISDREIRRVQDELNHRPRKTLGYETPSVLFLNLFQPLIH

SEQ ID NO: 17073 - protein, 61 aa, Neisseria meningitidis; identical to SEQ ID NO: 1125

SEQ ID NO: 17074 - protein, 333 aa, Neisseria meningitidis; identical to SEQ ID NO: 5976

SEQ ID NO: 17075 - protein, 404 aa, Neisseria meningitidis; identical to SEQ ID NO: 7117

SEQ ID NO: 17076 - protein, 305 aa, Neisseria meningitidis; identical to SEQ ID NO: 14673

SEQ ID NO: 17077 - protein, 361 aa, Neisseria meningitidis; identical to SEQ ID NO: 7621

SEQ ID NO: 17078 - protein, 136 aa, Neisseria meningitidis
LAEGQKSAVTEYYLNHGEWPGNNSSAGVATSADIKGKYVKSVEVKNGVVTAQMASSNVNNEIKGKKLSLWAKRQAGSVKWFCGLPVTRADNAKDDAVTAAATGTDKIDTKHLPSTCRDDSSVVCIETPPTAFYKNT

SEQ ID NO: 17079 - protein, 475 aa, Neisseria meningitidis; identical to SEQ ID NO: 3229

SEQ ID NO: 17080 - protein, 74 aa, Neisseria meningitidis; identical to SEQ ID NO: 6276

SEQ ID NO: 17081 - protein, 375 aa, Neisseria meningitidis
MNTRNMRYILLTGLLPMASAFGETALQCAALTDNVTRLACYDRIFAAQLPSSAGQEGQESKAVLNLTETVRSSLDKGEAVIVVEKGGDALPADSAGETADIYTPLSLMYDLDKNDLRGLLGVREHNPMYLMPLWYNNSPNYAPGSPTRGTTVQEKFGQQKRAETKLQVSFKSKIAEDLFKTRADLWFGYTQRSDWQIYNQGRKSAPFRNTDYKPEIFLTQPVKADLPFGGRLRMLGAGFVHQSNGQSRPESRSWNRIYAMAGMEWGKLTVIPRVWVRAFDQSGDKNDNPDIADYMGYGDVKLQYRLNDRQNVYSVLRYNPKTGYGAIEAAYTFPIKGKLKGVVRGFHGYGESLIDYNHKQNGIGIGLMFNDLDGI

SEQ ID NO: 17082 - protein, 473 aa, Neisseria meningitidis; identical to SEQ ID NO: 6909

SEQ ID NO: 17083 - protein, 338 aa, Neisseria meningitidis; identical to SEQ ID NO: 2862

SEQ ID NO: 17084 - protein, 160 aa, Neisseria meningitidis; identical to SEQ ID NO: 2526

SEQ ID NO: 17085 - protein, 205 aa, Neisseria meningitidis; identical to SEQ ID NO: 2641

SEQ ID NO: 17086 - protein, 313 aa, Neisseria meningitidis
MAIQWFPGHMNKAKKAIAERAKSVDMVIEMLDARMPASSENPLLAQLSKGKPKLKILNKQDLADPERTKVWLGHYNSRPDTRAIALDSSETGAHGKITQACRAMIPHRQGIDKPLRVLICGIPNVGKSTLINGMIGKKSAKTGNEPGITKAEQRLFLADDFWLYDTPGMLWPKIIVEEGGYNLAAGGAVGRNALDEEEVALELLDYLRRHYLPMLQERYQADKDPSSHWDENVWLEWIAKKRGAVLSGGRINYQKAAENILTDFREGKIGRITLETPNQWETWLKKARQKEAELKAIREARKAERKGQKPSEA

SEQ ID NO: 17087 - protein, 45 aa, Neisseria meningitidis; identical to SEQ ID NO: 7562

SEQ ID NO: 17088 - protein, 419 aa, Neisseria meningitidis; identical to SEQ ID NO: 6110

SEQ ID NO: 17089 - protein, 445 aa, Neisseria meningitidis; identical to SEQ ID NO: 7567

SEQ ID NO: 17090 - protein, 225 aa, Neisseria meningitidis; identical to SEQ ID NO: 6348

SEQ ID NO: 17091 - protein, 370 aa, Neisseria meningitidis; identical to SEQ ID NO: 7612

SEQ ID NO: 17092 - protein, 2498 aa, Neisseria meningitidis
VVAVAETTKREGKSCADSDSGSAHVKSVPFGTTHAPVCRSNIFSFSLLGFSLCLAVGTANIAFADGIIADKAAPKTQQATILQTGNGIPQVNIQTPTSAGVSVNQYAQFDVGNRGAILNNSRSNTQTQLGGWIQGNPWLARGEARVVVNQINSSHSSQMNGYIEVGGRRAEVVIANPAGIAVNGGGFINASRATLTTGQPQYQAGDLSGFKIRQGNVVIAGHGLDARDTDFTRILSYHSKIDAPVWGQDVRVVAGQNDVVATGNAHSPILNNAAANTSNNTANNGTHIPLFAIDTGKLGGMYANKITLISTAEQAGIRNQGQLFASSGNVAIDANGRLVNSGTMAAANAKDTDNTAEHKVNIRSQGVENSGTAVSQQGTQIHSQSIQNTGTLLSSGEILIHNSGSLKNETSGTIEAARLAIDTDTLNNQGKLSQTGSQKLHIDAQGKMDNRGRMGLQDTAPTASNGSSNQTGNSYNASFHSSTTTPTTATGTGTATVSISNITAPTFADGTIRTHGALDNSGSIIANGQTDVSAQQGLNNAGQIDIHQLNAKGSAFDNHNGTIISDAVHIQAGSLNNQNGNITTRQQLEIETDQLDNAHGKLLSAEIADLAVSGSLNNQNGEIATNQQLIIHDGQQSTAVIDNTNGTIQSGRDVAIQAKSLSNNGTLAADNKLDIALQDDFYVERNIVAGNELSLSTRGSLKNSHTLQAGKRIRIKANNLDNAAQGNIQSGGTTDIGTQHNLTNRGLIDGQQTKIQAGQMNNIGTGRIYGDNIAIAATRLDNQDENGTGAAIAARENLNLGIGQLNNRENSLIYSGNDMAVGGALDTNGQATGKAQRIHNAGATIEAAGKMRLGVEKLHNTNEHLKTQLVETGREHIVDYEAFGRHELLREGTQHELGWSVYNDESDHLRTPDGAAHENWHKYDYEKVTQKTQVTQTAPAKIISGNDLTIDGKEVFNTDSQIIAGGNLIVQTEKDGLHNEQTFGEKKVFSENGKLHSYWREKHKGRDSTGHSEQNYTLPEEITRNISLGSFAYESHRKALSHHAPSQGTELPQSNGISLPYTSNSFTPLPSSSLYIINPVNKGYLVETDPRFANYRQWLGSDYMLDSLKLDPNNLHKRLGDGYYEQRLINEQIAELTGHRRLDGYQNDEEQFKALMDNGATAARSMNLSVGIALSAEQVAQLTSDIVWLVQKEVKLPDGGTQTVLVPQVYVRVKNGDIDGKGALLSGSNTQINVSGSLKNSGTIAGRNALIINTDTLDNIGGRIHAQKSAVTATQDINNIGGMLSAEQTLLLNAGNNINSQSTTASSQNTQGSSTYLDRMAGIYITGKEKGVLAAQAGKDINIIAGQISNQSEQGQTRLQAGRDINLDTVQTSKHQATHFDADNHVIRGSTNEVGSSIQTKGDVTLLSGNNLNAKAAEVSSANGTLAVSAKNDINISAGINTTHVDDASKHTGRSGGGNKLVITDKAQSHHETAQSSTFEGKQVVLQAGNDANILGSNVISDNGTQIQAGNHVRIGTTQTQSQSETYHQTQKSGLMSAGIGFTIGSKTNTQENQSQSNEHTGSTVGSLKGDTTIVAGKHYEQIGSTVSSPEGNNTIYAQSIDIQAAHNKLNSNTTQTYEQKGLTVAFSSPVTDLAQQAIAVAQSSKQVGQSKNDRVNAMAAANAGWQAYQTGKSAQNLANGTTNAKQVSISITYGEQQNRQTTQVQANQAQASQIQAGGKTTLIATGAAEQSNINIAGSDVAGKAGTILIADNDITLQSAEQSNTERGQNKSAGWNAGAAVSFGQGGWSLGVTAGGNVGKGYGNGDSITHRHSHIGDKGSQTLIQSGGDTTIKGAQVRGKGVQVNAKNLSIQSVQDRETYQSKQQNASAQVTVGYGFSAGGDYSQSKIRADHVSVTEQSGIYAGEDGYQIKVGNHTDLKGGIITSTQSAEDKGKNRFQTATLTHSDIKNHSQYKGESFGLGASASISGKTLGQGAQNKPQNKHLTSVADKNSASSSVGYGSDSDSQSSITKSGINTRNIQITDEAAQIRLTGKTAAQTKADIDTNVTTDTAERHSGSLKNTFNKEAVQSELDLQRTVSQDFSKNVQQANTEINQHLDKLKADKEAAETAAAEALANGDMETAKRKAHEAQDAAAKADNWQQGKVILNMLASGLAAPTQSGAGIAAATASPAVSYAIGQHFKDLAGQNANGKLTASQETAHVLAHAVLGAAVAAVGDNNALAGALSAGGSEAAAPYISKWLYGKEKGSDLTAEEKETVTAITNVLGTATGAAVGNSATDAAQGSLNAQSAVENNDTVEQVKFALRHPRIAIAIGSVHKDPGSTLEPNISTIASTFQLNLFPNSEFGGEGGVGNAFRHVLWQATITREFGKDIAVKVGNSHESGEKINYSIRRNLSLDKADEMIDQLNNEIGREIALNTNRLNTKELVGLILETYKNNGFYQAERNSNGNYDVVRKRLSEKDYQNTSNILIHLDNTGAGFKIQQRRKQIRAQISARQWRR

SEQ ID NO: 17093 - protein, 122 aa, Neisseria meningitidis; identical to SEQ ID NO: 6676

SEQ ID NO: 17094 - protein, 544 aa, Neisseria meningitidis; identical to SEQ ID NO: 6685

SEQ ID NO: 17095 - protein, 338 aa, Neisseria meningitidis; identical to SEQ ID NO: 6419

SEQ ID NO: 17096 - protein, 212 aa, Neisseria meningitidis; identical to SEQ ID NO: 7138

SEQ ID NO: 17097 - protein, 82 aa, Neisseria meningitidis; identical to SEQ ID NO: 2740

SEQ ID NO: 17098 - protein, 370 aa, Neisseria meningitidis; identical to SEQ ID NO: 7729

SEQ ID NO: 17099 - protein, 522 aa, Neisseria meningitidis
MKHRTFFSLCAKFGCLLALGACSPKIVDAGAATVPHTLSTLKTADNRPASVYLKKDKPTLIKFWASWCPLCLSELGQTEKWAQDAKFSSANLITVASPGFLHEKKDGDFQKWYAGLNYPKLPVVTDNGGTIAQSLNISVYPSWALIGKDGDVQRIVKGSINEAQALALIRDPNADLGSLKHSFYKPDTQKKDSKIMNTRTIYLAGGCFWGLEAYFQRIDGVVDAVSGYANGNTKNPSYEDVSYRHTGHAETVKVTYDADKLSLDDILQYFFRVVDPTSLNKQGNDTGTQYRSGVYYTDPAEKAVIAAALKREQQKYQLPLVVENEPLKNFYDAEEYHQDYLIKNPNGYCHIDIRKADEPLPGKTKTAPQGKGFDAATYKKPSDAELKRTLTEEQYQVTQNSATEYAFSHEYDHLFKPGIYVDVVSGEPLFSSADKYDSGCGWPSFTRPIDAKSVTEHDDFSYNMRRTEVRSHAADSHLGHVFPDGPRDKGGLRYCINGASLKFIPLEQMDAAGYGALKGKVK

SEQ ID NO: 17100 - protein, 218 aa, Neisseria meningitidis; identical to SEQ ID NO: 7053

SEQ ID NO: 17101 - protein, 86 aa, Neisseria meningitidis; identical to SEQ ID NO: 4508

SEQ ID NO: 17102 - protein, 203 aa, Neisseria meningitidis; identical to SEQ ID NO: 6392

SEQ ID NO: 17103 - protein, 546 aa, Neisseria meningitidis
MTDNSPPPNGHAQARVRKNNTFLSAVWLVPLIALIAGGWLWVKEIRNRGPVVTLLMDSAEGIEVNNTVIKVLSIDVGRVTRIKLRDDQKGVEVTAQLNADVSGLIRSDTQFWVVKPRIDQSGVTGLGTLLSGSYIAFTPGKSDEAKDVFQVQDIPPVTAIGQSGLRLNLIGKNDRILNVNSPVLYENFMVGQVESAHFDPSDQSVHYTIFIQSPNDKLIHSASRFWLESGINIETTGSGIKLNSAPLPALLSGAISFDSPKTKNSKNVKSEDSFTLYDSRSEVANLPDDRSLYYTAFFKQSVRGLTVGSPVEYKGLNVGVVSDVPYFDRNDSLHLFENGWIPVRIRIEPSRLEINADEQSKEHWKQQFQTALNKGLTATISSNNLLTGSKMIELNDQPSSSPKLRPHTVYAGDTVIATQGGGLDDLQVKLADLLDKFGKLPLDKTVSGLNASLAELKSTLKSINTLSNNPQTQNIPNELNQTLKELRTTLQGVSPQSPIYGDVQNTLQSLDKTLKDVQPVINTLKEKPNALIFNSSSKDPIPKGSR

SEQ ID NO: 17104 - protein, 43 aa, Neisseria meningitidis; identical to SEQ ID NO: 7054

SEQ ID NO: 17105 - protein, 143 aa, Neisseria meningitidis; identical to SEQ ID NO: 7006

SEQ ID NO: 17106 - protein, 182 aa, Neisseria meningitidis; identical to SEQ ID NO: 7010

SEQ ID NO: 17107 - protein, 264 aa, Neisseria meningitidis; identical to SEQ ID NO: 6469

SEQ ID NO: 17108 - protein, 197 aa, Neisseria meningitidis; identical to SEQ ID NO: 7333

SEQ ID NO: 17109 - protein, 305 aa, Neisseria meningitidis; identical to SEQ ID NO: 6970

SEQ ID NO: 17110 - protein, 366 aa, Neisseria meningitidis; identical to SEQ ID NO: 6944

SEQ ID NO: 17111 - protein, 238 aa, Neisseria meningitidis; identical to SEQ ID NO: 945

SEQ ID NO: 17112 - protein, 188 aa, Neisseria meningitidis; identical to SEQ ID NO: 6551

SEQ ID NO: 17113 - protein, 144 aa, Neisseria meningitidis; identical to SEQ ID NO: 7462

SEQ ID NO: 17114 - protein, 357 aa, Neisseria meningitidis
MRPFFVGAAVLAILGALVFFINPGAIVLHRQIFLELMLPAAYGGFLTAALLDWTGFSGNLKPVATLMAALLLAASAILPFSPQTASFFVAAYWLVLLLFCARLIWLDRNTDNFALLMLLAAFTVFQTAYAVSGDLNLLRAQVHLNMAAVMFVSVRVSILLGAEALKECRLKDPVFIPNIVYKNIAITFLLLHAAAELWLPAQTAGFTALAVGFILLAKLRELHHHELLRKHYVRTYYLLQLFAAAGYLWTGAAKLQNLPASAPLHLITLGGMMGGVMMVWLTAGLWHSGFTKLDYPKLCRIAVPILFAAAVSRAFLMNVNPIFFITVPAILTAAVFVLYLFTFIPIFRANAFTDDPE

SEQ ID NO: 17115 - protein, 93 aa, Neisseria meningitidis
MDEGRMFCLLDVRTDEETAVCSLPNALHIPMNLIPLRQNELPDDVPLVVYCHHGIRSLHTAMYLADAGFENLYNLQGGIDAWAAEIDGNMMRY

SEQ ID NO: 17116 - protein, 263 aa, Neisseria meningitidis; identical to SEQ ID NO: 5998

SEQ ID NO: 17117 - protein, 213 aa, Neisseria meningitidis; identical to SEQ ID NO: 5657

SEQ ID NO: 17118 - protein, 581 aa, Neisseria meningitidis; identical to SEQ ID NO: 6399

SEQ ID NO: 17119 - protein, 268 aa, Neisseria meningitidis; identical to SEQ ID NO: 5908
